United States Patent Application Publication US 2004/0241651 A1 - sequence listing, part 2

SEQ ID NO: 29309 - DNA, 13 bp, Artificial Sequence
  Oligonucleotide for detection of SNP TSC0008638
tttatatgtatty

SEQ ID NO: 29310 - DNA, 13 bp, Artificial Sequence
  Oligonucleotide for detection of SNP TSC0008638
raatacatataaa

SEQ ID NO: 29311 - DNA, 13 bp, Artificial Sequence
  Oligonucleotide for detection of SNP TSC0008638
tttatacgtatty

SEQ ID NO: 29312 - DNA, 13 bp, Artificial Sequence
  Oligonucleotide for detection of SNP TSC0008638
raatacgtataaa

SEQ ID NO: 29313 - DNA, 13 bp, Artificial Sequence
  Oligonucleotide for detection of SNP TSC0008642
ggttagatttggy

SEQ ID NO: 29314 - DNA, 13 bp, Artificial Sequence
  Oligonucleotide for detection of SNP TSC0008642
rccaaatctaacc

SEQ ID NO: 29315 - DNA, 13 bp, Artificial Sequence
  Oligonucleotide for detection of SNP TSC0008642
ggttaggtttggy

SEQ ID NO: 29316 - DNA, 13 bp, Artificial Sequence
  Oligonucleotide for detection of SNP TSC0008642
rccaaacctaacc

SEQ ID NO: 29317 - DNA, 13 bp, Artificial Sequence
  Oligonucleotide for detection of SNP TSC0008650
atagtggttaggy

SEQ ID NO: 29318 - DNA, 13 bp, Artificial Sequence
  Oligonucleotide for detection of SNP TSC0008650
rcctaaccactat

SEQ ID NO: 29319 - DNA, 13 bp, Artificial Sequence
  Oligonucleotide for detection of SNP TSC0008650
atagtgattaggy

SEQ ID NO: 29320 - DNA, 13 bp, Artificial Sequence
  Oligonucleotide for detection of SNP TSC0008650
rcctaatcactat

SEQ ID NO: 29321 - DNA, 13 bp, Artificial Sequence
  Oligonucleotide for detection of SNP TSC0008651
aagggtagaaaag

SEQ ID NO: 29322 - DNA, 13 bp, Artificial Sequence
  Oligonucleotide for detection of SNP TSC0008651
cttttctaccctt

SEQ ID NO: 29323 - DNA, 13 bp, Artificial Sequence
  Oligonucleotide for detection of SNP TSC0008651
aagggtggaaaag

SEQ ID NO: 29324 - DNA, 13 bp, Artificial Sequence
  Oligonucleotide for detection of SNP TSC0008651
cttttccaccctt

SEQ ID NO: 29325 - DNA, 13 bp, Artificial Sequence
  Oligonucleotide for detection of SNP TSC0008653
tgtgtagattttg

SEQ ID NO: 29326 - DNA, 13 bp, Artificial Sequence
  Oligonucleotide for detection of SNP TSC0008653
caaaatctacaca

SEQ ID NO: 29327 - DNA, 13 bp, Artificial Sequence
  Oligonucleotide for detection of SNP TSC0008653
tgtgtaaattttg

SEQ ID NO: 29328 - DNA, 13 bp, Artificial Sequence
  Oligonucleotide for detection of SNP TSC0008653
caaaatttacaca

SEQ ID NO: 29329 - DNA, 13 bp, Artificial Sequence
  Oligonucleotide for detection of SNP TSC0008654
aggtgtaagttay

SEQ ID NO: 29330 - DNA, 13 bp, Artificial Sequence
  Oligonucleotide for detection of SNP TSC0008654
rtaacttacacct

SEQ ID NO: 29331 - DNA, 13 bp, Artificial Sequence
  Oligonucleotide for detection of SNP TSC0008654
aggtgtgagttay

SEQ ID NO: 29332 - DNA, 13 bp, Artificial Sequence
  Oligonucleotide for detection of SNP TSC0008654
rtaactcacacct

SEQ ID NO: 29333 - DNA, 13 bp, Artificial Sequence
  Oligonucleotide for detection of SNP TSC0008654
aggcgtaagttay

SEQ ID NO: 29334 - DNA, 13 bp, Artificial Sequence
  Oligonucleotide for detection of SNP TSC0008654
rtaacttacgcct

SEQ ID NO: 29335 - DNA, 13 bp, Artificial Sequence
  Oligonucleotide for detection of SNP TSC0008654
aggcgtgagttay

SEQ ID NO: 29336 - DNA, 13 bp, Artificial Sequence
  Oligonucleotide for detection of SNP TSC0008654
rtaactcacgcct

SEQ ID NO: 29337 - DNA, 13 bp, Artificial Sequence
  Oligonucleotide for detection of SNP TSC0008655
gaggatagagtaa

SEQ ID NO: 29338 - DNA, 13 bp, Artificial Sequence
  Oligonucleotide for detection of SNP TSC0008655
ttactctatcctc

SEQ ID NO: 29339 - DNA, 13 bp, Artificial Sequence
  Oligonucleotide for detection of SNP TSC0008655
gaggatggagtaa

SEQ ID NO: 29340 - DNA, 13 bp, Artificial Sequence
  Oligonucleotide for detection of SNP TSC0008655
ttactccatcctc

SEQ ID NO: 29341 - DNA, 13 bp, Artificial Sequence
  Oligonucleotide for detection of SNP TSC0008655
gaggacggagtaa

SEQ ID NO: 29342 - DNA, 13 bp, Artificial Sequence
  Oligonucleotide for detection of SNP TSC0008655
ttactccgtcctc

SEQ ID NO: 29343 - DNA, 13 bp, Artificial Sequence
  Oligonucleotide for detection of SNP TSC0008655
ttgttttgtttty

SEQ ID NO: 29344 - DNA, 13 bp, Artificial Sequence
  Oligonucleotide for detection of SNP TSC0008655
raaaacaaaacaa

SEQ ID NO: 29345 - DNA, 13 bp, Artificial Sequence
  Oligonucleotide for detection of SNP TSC0008655
ttgtttcgtttty

SEQ ID NO: 29346 - DNA, 13 bp, Artificial Sequence
  Oligonucleotide for detection of SNP TSC0008655
raaaacgaaacaa

SEQ ID NO: 29347 - DNA, 13 bp, Artificial Sequence
  Oligonucleotide for detection of SNP TSC0008656
agaagttgggatt

SEQ ID NO: 29348 - DNA, 13 bp, Artificial Sequence
  Oligonucleotide for detection of SNP TSC0008656
aatcccaacttct

SEQ ID NO: 29349 - DNA, 13 bp, Artificial Sequence
  Oligonucleotide for detection of SNP TSC0008656
agaagtcgggatt

SEQ ID NO: 29350 - DNA, 13 bp, Artificial Sequence
  Oligonucleotide for detection of SNP TSC0008656
aatcccgacttct

SEQ ID NO: 29351 - DNA, 13 bp, Artificial Sequence
  Oligonucleotide for detection of SNP TSC0008656
aattttgattttt

SEQ ID NO: 29352 - DNA, 13 bp, Artificial Sequence
  Oligonucleotide for detection of SNP TSC0008656
aaaaatcaaaatt

SEQ ID NO: 29353 - DNA, 13 bp, Artificial Sequence
  Oligonucleotide for detection of SNP TSC0008656
aattttaattttt

SEQ ID NO: 29354 - DNA, 13 bp, Artificial Sequence
  Oligonucleotide for detection of SNP TSC0008656
aaaaattaaaatt

SEQ ID NO: 29355 - DNA, 13 bp, Artificial Sequence
  Oligonucleotide for detection of SNP TSC0008656
aatttcgattttt

SEQ ID NO: 29356 - DNA, 13 bp, Artificial Sequence
  Oligonucleotide for detection of SNP TSC0008656
aaaaatcgaaatt

SEQ ID NO: 29357 - DNA, 13 bp, Artificial Sequence
  Oligonucleotide for detection of SNP TSC0008664
ttttgtattagtg

SEQ ID NO: 29358 - DNA, 13 bp, Artificial Sequence
  Oligonucleotide for detection of SNP TSC0008664
cactaatacaaaa

SEQ ID NO: 29359 - DNA, 13 bp, Artificial Sequence
  Oligonucleotide for detection of SNP TSC0008664
ttttgtgttagtg

SEQ ID NO: 29360 - DNA, 13 bp, Artificial Sequence
  Oligonucleotide for detection of SNP TSC0008664
cactaacacaaaa

SEQ ID NO: 29361 - DNA, 13 bp, Artificial Sequence
  Oligonucleotide for detection of SNP TSC0008670
ttttttggagaty

SEQ ID NO: 29362 - DNA, 13 bp, Artificial Sequence
  Oligonucleotide for detection of SNP TSC0008670
ratctccaaaaaa

SEQ ID NO: 29363 - DNA, 13 bp, Artificial Sequence
  Oligonucleotide for detection of SNP TSC0008670
ttttttagagaty

SEQ ID NO: 29364 - DNA, 13 bp, Artificial Sequence
  Oligonucleotide for detection of SNP TSC0008670
ratctctaaaaaa

SEQ ID NO: 29365 - DNA, 13 bp, Artificial Sequence
  Oligonucleotide for detection of SNP TSC0008671
gtggagattgtag

SEQ ID NO: 29366 - DNA, 13 bp, Artificial Sequence
  Oligonucleotide for detection of SNP TSC0008671
ctacaatctccac

SEQ ID NO: 29367 - DNA, 13 bp, Artificial Sequence
  Oligonucleotide for detection of SNP TSC0008671
gcggagattgtag

SEQ ID NO: 29368 - DNA, 13 bp, Artificial Sequence
  Oligonucleotide for detection of SNP TSC0008671
ctacaatctccgc

SEQ ID NO: 29369 - DNA, 13 bp, Artificial Sequence
  Oligonucleotide for detection of SNP TSC0008679
ggttaggttttay

SEQ ID NO: 29370 - DNA, 13 bp, Artificial Sequence
  Oligonucleotide for detection of SNP TSC0008679
rtaaaacctaacc

SEQ ID NO: 29371 - DNA, 13 bp, Artificial Sequence
  Oligonucleotide for detection of SNP TSC0008679
ggttagattttay

SEQ ID NO: 29372 - DNA, 13 bp, Artificial Sequence
  Oligonucleotide for detection of SNP TSC0008679
rtaaaatctaacc

SEQ ID NO: 29373 - DNA, 13 bp, Artificial Sequence
  Oligonucleotide for detection of SNP TSC0008680
tttatttgtaggg

SEQ ID NO: 29374 - DNA, 13 bp, Artificial Sequence
  Oligonucleotide for detection of SNP TSC0008680
ccctacaaataaa

SEQ ID NO: 29375 - DNA, 13 bp, Artificial Sequence
  Oligonucleotide for detection of SNP TSC0008680
tttattcgtaggg

SEQ ID NO: 29376 - DNA, 13 bp, Artificial Sequence
  Oligonucleotide for detection of SNP TSC0008680
ccctacgaataaa

SEQ ID NO: 29377 - DNA, 13 bp, Artificial Sequence
  Oligonucleotide for detection of SNP TSC0008680
ttttgtggatgaa

SEQ ID NO: 29378 - DNA, 13 bp, Artificial Sequence
  Oligonucleotide for detection of SNP TSC0008680
ttcatccacaaaa

SEQ ID NO: 29379 - DNA, 13 bp, Artificial Sequence
  Oligonucleotide for detection of SNP TSC0008680
ttttgtagatgaa

SEQ ID NO: 29380 - DNA, 13 bp, Artificial Sequence
  Oligonucleotide for detection of SNP TSC0008680
ttcatctacaaaa

SEQ ID NO: 29381 - DNA, 13 bp, Artificial Sequence
  Oligonucleotide for detection of SNP TSC0008680
ttttgcggatgaa

SEQ ID NO: 29382 - DNA, 13 bp, Artificial Sequence
  Oligonucleotide for detection of SNP TSC0008680
ttcatccgcaaaa

SEQ ID NO: 29383 - DNA, 13 bp, Artificial Sequence
  Oligonucleotide for detection of SNP TSC0008681
gagaggtgagagy

SEQ ID NO: 29384 - DNA, 13 bp, Artificial Sequence
  Oligonucleotide for detection of SNP TSC0008681
rctctcacctctc

SEQ ID NO: 29385 - DNA, 13 bp, Artificial Sequence
  Oligonucleotide for detection of SNP TSC0008681
gagaggcgagagy

SEQ ID NO: 29386 - DNA, 13 bp, Artificial Sequence
  Oligonucleotide for detection of SNP TSC0008681
rctctcgcctctc

SEQ ID NO: 29387 - DNA, 13 bp, Artificial Sequence
  Oligonucleotide for detection of SNP TSC0008681
gtttttattttty

SEQ ID NO: 29388 - DNA, 13 bp, Artificial Sequence
  Oligonucleotide for detection of SNP TSC0008681
raaaaataaaaac

SEQ ID NO: 29389 - DNA, 13 bp, Artificial Sequence
  Oligonucleotide for detection of SNP TSC0008681
gttttcgttttty

SEQ ID NO: 29390 - DNA, 13 bp, Artificial Sequence
  Oligonucleotide for detection of SNP TSC0008681
raaaaacgaaaac

SEQ ID NO: 29391 - DNA, 13 bp, Artificial Sequence
  Oligonucleotide for detection of SNP TSC0008687
tggttagtttata

SEQ ID NO: 29392 - DNA, 13 bp, Artificial Sequence
  Oligonucleotide for detection of SNP TSC0008687
tataaactaacca

SEQ ID NO: 29393 - DNA, 13 bp, Artificial Sequence
  Oligonucleotide for detection of SNP TSC0008687
tggttaatttata

SEQ ID NO: 29394 - DNA, 13 bp, Artificial Sequence
  Oligonucleotide for detection of SNP TSC0008687
tataaattaacca

SEQ ID NO: 29395 - DNA, 13 bp, Artificial Sequence
  Oligonucleotide for detection of SNP TSC0008692
ggttttggatgty

SEQ ID NO: 29396 - DNA, 13 bp, Artificial Sequence
  Oligonucleotide for detection of SNP TSC0008692
racatccaaaacc

SEQ ID NO: 29397 - DNA, 13 bp, Artificial Sequence
  Oligonucleotide for detection of SNP TSC0008692
ggttttagatgty

SEQ ID NO: 29398 - DNA, 13 bp, Artificial Sequence
  Oligonucleotide for detection of SNP TSC0008692
racatctaaaacc

SEQ ID NO: 29399 - DNA, 13 bp, Artificial Sequence
  Oligonucleotide for detection of SNP TSC0008693
ttagaagttttay

SEQ ID NO: 29400 - DNA, 13 bp, Artificial Sequence
  Oligonucleotide for detection of SNP TSC0008693
rtaaaacttctaa

SEQ ID NO: 29401 - DNA, 13 bp, Artificial Sequence
  Oligonucleotide for detection of SNP TSC0008693
ttagaaattttay

SEQ ID NO: 29402 - DNA, 13 bp, Artificial Sequence
  Oligonucleotide for detection of SNP TSC0008693
rtaaaatttctaa

SEQ ID NO: 29403 - DNA, 13 bp, Artificial Sequence
  Oligonucleotide for detection of SNP TSC0008694
tttgttgtaatga

SEQ ID NO: 29404 - DNA, 13 bp, Artificial Sequence
  Oligonucleotide for detection of SNP TSC0008694
tcattacaacaaa

SEQ ID NO: 29405 - DNA, 13 bp, Artificial Sequence
  Oligonucleotide for detection of SNP TSC0008694
tttgttataatga

SEQ ID NO: 29406 - DNA, 13 bp, Artificial Sequence
  Oligonucleotide for detection of SNP TSC0008694
tcattataacaaa

SEQ ID NO: 29407 - DNA, 13 bp, Artificial Sequence
  Oligonucleotide for detection of SNP TSC0008695
atgtgggtatttg

SEQ ID NO: 29408 - DNA, 13 bp, Artificial Sequence
  Oligonucleotide for detection of SNP TSC0008695
caaatacccacat

SEQ ID NO: 29409 - DNA, 13 bp, Artificial Sequence
  Oligonucleotide for detection of SNP TSC0008695
atgtggatatttg

SEQ ID NO: 29410 - DNA, 13 bp, Artificial Sequence
  Oligonucleotide for detection of SNP TSC0008695
caaatatccacat

SEQ ID NO: 29411 - DNA, 13 bp, Artificial Sequence
  Oligonucleotide for detection of SNP TSC0008695
atgcgggtatttg

SEQ ID NO: 29412 - DNA, 13 bp, Artificial Sequence
  Oligonucleotide for detection of SNP TSC0008695
caaatacccgcat

SEQ ID NO: 29413 - DNA, 13 bp, Artificial Sequence
  Oligonucleotide for detection of SNP TSC0008695
atgcggatatttg

SEQ ID NO: 29414 - DNA, 13 bp, Artificial Sequence
  Oligonucleotide for detection of SNP TSC0008695
caaatatccgcat

SEQ ID NO: 29415 - DNA, 13 bp, Artificial Sequence
  Oligonucleotide for detection of SNP TSC0008696
gtatgtttttagt

SEQ ID NO: 29416 - DNA, 13 bp, Artificial Sequence
  Oligonucleotide for detection of SNP TSC0008696
actaaaaacatac

SEQ ID NO: 29417 - DNA, 13 bp, Artificial Sequence
  Oligonucleotide for detection of SNP TSC0008696
gtatgtgtttagt

SEQ ID NO: 29418 - DNA, 13 bp, Artificial Sequence
  Oligonucleotide for detection of SNP TSC0008696
actaaacacatac

SEQ ID NO: 29419 - DNA, 13 bp, Artificial Sequence
  Oligonucleotide for detection of SNP TSC0008696
gtacgtttttagt

SEQ ID NO: 29420 - DNA, 13 bp, Artificial Sequence
  Oligonucleotide for detection of SNP TSC0008696
actaaaaacgtac

SEQ ID NO: 29421 - DNA, 13 bp, Artificial Sequence
  Oligonucleotide for detection of SNP TSC0008696
gtacgtgtttagt

SEQ ID NO: 29422 - DNA, 13 bp, Artificial Sequence
  Oligonucleotide for detection of SNP TSC0008696
actaaacacgtac

SEQ ID NO: 29423 - DNA, 13 bp, Artificial Sequence
  Oligonucleotide for detection of SNP TSC0008696
gtatgcgtttagt

SEQ ID NO: 29424 - DNA, 13 bp, Artificial Sequence
  Oligonucleotide for detection of SNP TSC0008696
actaaacgcatac

SEQ ID NO: 29425 - DNA, 13 bp, Artificial Sequence
  Oligonucleotide for detection of SNP TSC0008696
gtacgcgtttagt

SEQ ID NO: 29426 - DNA, 13 bp, Artificial Sequence
  Oligonucleotide for detection of SNP TSC0008696
actaaacgcgtac

SEQ ID NO: 29427 - DNA, 13 bp, Artificial Sequence
  Oligonucleotide for detection of SNP TSC0008696
attgagggtgtgy

SEQ ID NO: 29428 - DNA, 13 bp, Artificial Sequence
  Oligonucleotide for detection of SNP TSC0008696
rcacaccctcaat

SEQ ID NO: 29429 - DNA, 13 bp, Artificial Sequence
  Oligonucleotide for detection of SNP TSC0008696
attgagtgtgtgy

SEQ ID NO: 29430 - DNA, 13 bp, Artificial Sequence
  Oligonucleotide for detection of SNP TSC0008696
rcacacactcaat

SEQ ID NO: 29431 - DNA, 13 bp, Artificial Sequence
  Oligonucleotide for detection of SNP TSC0008696
attgagggcgtgy

SEQ ID NO: 29432 - DNA, 13 bp, Artificial Sequence
  Oligonucleotide for detection of SNP TSC0008696
rcacgccctcaat

SEQ ID NO: 29433 - DNA, 13 bp, Artificial Sequence
  Oligonucleotide for detection of SNP TSC0008696
attgagcgtgtgy

SEQ ID NO: 29434 - DNA, 13 bp, Artificial Sequence
  Oligonucleotide for detection of SNP TSC0008696
rcacacgctcaat

SEQ ID NO: 29435 - DNA, 13 bp, Artificial Sequence
  Oligonucleotide for detection of SNP TSC0008696
attgagtgcgtgy

SEQ ID NO: 29436 - DNA, 13 bp, Artificial Sequence
  Oligonucleotide for detection of SNP TSC0008696
rcacgcactcaat

SEQ ID NO: 29437 - DNA, 13 bp, Artificial Sequence
  Oligonucleotide for detection of SNP TSC0008696
attgagcgcgtgy

SEQ ID NO: 29438 - DNA, 13 bp, Artificial Sequence
  Oligonucleotide for detection of SNP TSC0008696
rcacgcgctcaat

SEQ ID NO: 29439 - DNA, 13 bp, Artificial Sequence
  Oligonucleotide for detection of SNP TSC0008699
gttttagaggaaa

SEQ ID NO: 29440 - DNA, 13 bp, Artificial Sequence
  Oligonucleotide for detection of SNP TSC0008699
tttcctctaaaac

SEQ ID NO: 29441 - DNA, 13 bp, Artificial Sequence
  Oligonucleotide for detection of SNP TSC0008699
gttttaaaggaaa

SEQ ID NO: 29442 - DNA, 13 bp, Artificial Sequence
  Oligonucleotide for detection of SNP TSC0008699
tttcctttaaaac

SEQ ID NO: 29443 - DNA, 13 bp, Artificial Sequence
  Oligonucleotide for detection of SNP TSC0008700
atatatatattty

SEQ ID NO: 29444 - DNA, 13 bp, Artificial Sequence
  Oligonucleotide for detection of SNP TSC0008700
raaatatatatat

SEQ ID NO: 29445 - DNA, 13 bp, Artificial Sequence
  Oligonucleotide for detection of SNP TSC0008700
atatatgtattty

SEQ ID NO: 29446 - DNA, 13 bp, Artificial Sequence
  Oligonucleotide for detection of SNP TSC0008700
raaatacatatat

SEQ ID NO: 29447 - DNA, 13 bp, Artificial Sequence
  Oligonucleotide for detection of SNP TSC0008701
taattaattaaty

SEQ ID NO: 29448 - DNA, 13 bp, Artificial Sequence
  Oligonucleotide for detection of SNP TSC0008701
rattaattaatta

SEQ ID NO: 29449 - DNA, 13 bp, Artificial Sequence
  Oligonucleotide for detection of SNP TSC0008701
taattagttaaty

SEQ ID NO: 29450 - DNA, 13 bp, Artificial Sequence
  Oligonucleotide for detection of SNP TSC0008701
rattaactaatta

SEQ ID NO: 29451 - DNA, 13 bp, Artificial Sequence
  Oligonucleotide for detection of SNP TSC0008702
tgggttataataa

SEQ ID NO: 29452 - DNA, 13 bp, Artificial Sequence
  Oligonucleotide for detection of SNP TSC0008702
ttattataaccca

SEQ ID NO: 29453 - DNA, 13 bp, Artificial Sequence
  Oligonucleotide for detection of SNP TSC0008702
tgggttgtaataa

SEQ ID NO: 29454 - DNA, 13 bp, Artificial Sequence
  Oligonucleotide for detection of SNP TSC0008702
ttattacaaccca

SEQ ID NO: 29455 - DNA, 13 bp, Artificial Sequence
  Oligonucleotide for detection of SNP TSC0008708
tttataaaaattt

SEQ ID NO: 29456 - DNA, 13 bp, Artificial Sequence
  Oligonucleotide for detection of SNP TSC0008708
aaatttttataaa

SEQ ID NO: 29457 - DNA, 13 bp, Artificial Sequence
  Oligonucleotide for detection of SNP TSC0008708
tttatagaaattt

SEQ ID NO: 29458 - DNA, 13 bp, Artificial Sequence
  Oligonucleotide for detection of SNP TSC0008708
aaatttctataaa

SEQ ID NO: 29459 - DNA, 13 bp, Artificial Sequence
  Oligonucleotide for detection of SNP TSC0008709
ttggtataaggtg

SEQ ID NO: 29460 - DNA, 13 bp, Artificial Sequence
  Oligonucleotide for detection of SNP TSC0008709
caccttataccaa

SEQ ID NO: 29461 - DNA, 13 bp, Artificial Sequence
  Oligonucleotide for detection of SNP TSC0008709
ttggtagaaggtg

SEQ ID NO: 29462 - DNA, 13 bp, Artificial Sequence
  Oligonucleotide for detection of SNP TSC0008709
caccttctaccaa

SEQ ID NO: 29463 - DNA, 13 bp, Artificial Sequence
  Oligonucleotide for detection of SNP TSC0008709
tattttgtattag

SEQ ID NO: 29464 - DNA, 13 bp, Artificial Sequence
  Oligonucleotide for detection of SNP TSC0008709
ctaatacaaaata

SEQ ID NO: 29465 - DNA, 13 bp, Artificial Sequence
  Oligonucleotide for detection of SNP TSC0008709
tattttttattag

SEQ ID NO: 29466 - DNA, 13 bp, Artificial Sequence
  Oligonucleotide for detection of SNP TSC0008709
ctaataaaaaata

SEQ ID NO: 29467 - DNA, 13 bp, Artificial Sequence
  Oligonucleotide for detection of SNP TSC0008712
ggaggaaaagtaa

SEQ ID NO: 29468 - DNA, 13 bp, Artificial Sequence
  Oligonucleotide for detection of SNP TSC0008712
ttacttttcctcc

SEQ ID NO: 29469 - DNA, 13 bp, Artificial Sequence
  Oligonucleotide for detection of SNP TSC0008712
ggaggagaagtaa

SEQ ID NO: 29470 - DNA, 13 bp, Artificial Sequence
  Oligonucleotide for detection of SNP TSC0008712
ttacttctcctcc

SEQ ID NO: 29471 - DNA, 13 bp, Artificial Sequence
  Oligonucleotide for detection of SNP TSC0008720
gttagtgtaattt

SEQ ID NO: 29472 - DNA, 13 bp, Artificial Sequence
  Oligonucleotide for detection of SNP TSC0008720
aaattacactaac

SEQ ID NO: 29473 - DNA, 13 bp, Artificial Sequence
  Oligonucleotide for detection of SNP TSC0008720
gttagtttaattt

SEQ ID NO: 29474 - DNA, 13 bp, Artificial Sequence
  Oligonucleotide for detection of SNP TSC0008720
aaattaaactaac

SEQ ID NO: 29475 - DNA, 13 bp, Artificial Sequence
  Oligonucleotide for detection of SNP TSC0008720
aaattgtattaay

SEQ ID NO: 29476 - DNA, 13 bp, Artificial Sequence
  Oligonucleotide for detection of SNP TSC0008720
rttaatacaattt

SEQ ID NO: 29477 - DNA, 13 bp, Artificial Sequence
  Oligonucleotide for detection of SNP TSC0008720
aaattgaattaay

SEQ ID NO: 29478 - DNA, 13 bp, Artificial Sequence
  Oligonucleotide for detection of SNP TSC0008720
rttaattcaattt

SEQ ID NO: 29479 - DNA, 13 bp, Artificial Sequence
  Oligonucleotide for detection of SNP TSC0008721
tataaaggtataa

SEQ ID NO: 29480 - DNA, 13 bp, Artificial Sequence
  Oligonucleotide for detection of SNP TSC0008721
ttatacctttata

SEQ ID NO: 29481 - DNA, 13 bp, Artificial Sequence
  Oligonucleotide for detection of SNP TSC0008721
ttgtgtttttgtg

SEQ ID NO: 29482 - DNA, 13 bp, Artificial Sequence
  Oligonucleotide for detection of SNP TSC0008721
cacaaaaacacaa

SEQ ID NO: 29483 - DNA, 13 bp, Artificial Sequence
  Oligonucleotide for detection of SNP TSC0008721
ttgtgtatttgtg

SEQ ID NO: 29484 - DNA, 13 bp, Artificial Sequence
  Oligonucleotide for detection of SNP TSC0008721
cacaaatacacaa

SEQ ID NO: 29485 - DNA, 13 bp, Artificial Sequence
  Oligonucleotide for detection of SNP TSC0008722
ttagttagttata

SEQ ID NO: 29486 - DNA, 13 bp, Artificial Sequence
  Oligonucleotide for detection of SNP TSC0008722
tataactaactaa

SEQ ID NO: 29487 - DNA, 13 bp, Artificial Sequence
  Oligonucleotide for detection of SNP TSC0008722
ttagtttgttata

SEQ ID NO: 29488 - DNA, 13 bp, Artificial Sequence
  Oligonucleotide for detection of SNP TSC0008722
tataacaaactaa

SEQ ID NO: 29489 - DNA, 13 bp, Artificial Sequence
  Oligonucleotide for detection of SNP TSC0008722
tgtgattggttgg

SEQ ID NO: 29490 - DNA, 13 bp, Artificial Sequence
  Oligonucleotide for detection of SNP TSC0008722
ccaaccaatcaca

SEQ ID NO: 29491 - DNA, 13 bp, Artificial Sequence
  Oligonucleotide for detection of SNP TSC0008722
tgtgataggttgg

SEQ ID NO: 29492 - DNA, 13 bp, Artificial Sequence
  Oligonucleotide for detection of SNP TSC0008722
ccaacctatcaca

SEQ ID NO: 29493 - DNA, 13 bp, Artificial Sequence
  Oligonucleotide for detection of SNP TSC0008724
agttgatgtatta

SEQ ID NO: 29494 - DNA, 13 bp, Artificial Sequence
  Oligonucleotide for detection of SNP TSC0008724
taatacatcaact

SEQ ID NO: 29495 - DNA, 13 bp, Artificial Sequence
  Oligonucleotide for detection of SNP TSC0008724
agttgacgtatta

SEQ ID NO: 29496 - DNA, 13 bp, Artificial Sequence
  Oligonucleotide for detection of SNP TSC0008724
taatacgtcaact

SEQ ID NO: 29497 - DNA, 13 bp, Artificial Sequence
  Oligonucleotide for detection of SNP TSC0008724
tggtatgttagtt

SEQ ID NO: 29498 - DNA, 13 bp, Artificial Sequence
  Oligonucleotide for detection of SNP TSC0008724
aactaacatacca

SEQ ID NO: 29499 - DNA, 13 bp, Artificial Sequence
  Oligonucleotide for detection of SNP TSC0008724
tggtatattagtt

SEQ ID NO: 29500 - DNA, 13 bp, Artificial Sequence
  Oligonucleotide for detection of SNP TSC0008724
aactaatatacca

SEQ ID NO: 29501 - DNA, 13 bp, Artificial Sequence
  Oligonucleotide for detection of SNP TSC0008724
tggtacgttagtt

SEQ ID NO: 29502 - DNA, 13 bp, Artificial Sequence
  Oligonucleotide for detection of SNP TSC0008724
aactaacgtacca

SEQ ID NO: 29503 - DNA, 13 bp, Artificial Sequence
  Oligonucleotide for detection of SNP TSC0008729
ttatattaattgg

SEQ ID NO: 29504 - DNA, 13 bp, Artificial Sequence
  Oligonucleotide for detection of SNP TSC0008729
ccaattaatataa

SEQ ID NO: 29505 - DNA, 13 bp, Artificial Sequence
  Oligonucleotide for detection of SNP TSC0008729
ttatatgaattgg

SEQ ID NO: 29506 - DNA, 13 bp, Artificial Sequence
  Oligonucleotide for detection of SNP TSC0008729
ccaattcatataa

SEQ ID NO: 29507 - DNA, 13 bp, Artificial Sequence
  Oligonucleotide for detection of SNP TSC0008729
ttagttgatatgg

SEQ ID NO: 29508 - DNA, 13 bp, Artificial Sequence
  Oligonucleotide for detection of SNP TSC0008729
ccatatcaactaa

SEQ ID NO: 29509 - DNA, 13 bp, Artificial Sequence
  Oligonucleotide for detection of SNP TSC0008729
ttagtttatatgg

SEQ ID NO: 29510 - DNA, 13 bp, Artificial Sequence
  Oligonucleotide for detection of SNP TSC0008729
ccatataaactaa

SEQ ID NO: 29511 - DNA, 13 bp, Artificial Sequence
  Oligonucleotide for detection of SNP TSC0008746
gtgtatataagtg

SEQ ID NO: 29512 - DNA, 13 bp, Artificial Sequence
  Oligonucleotide for detection of SNP TSC0008746
cacttatatacac

SEQ ID NO: 29513 - DNA, 13 bp, Artificial Sequence
  Oligonucleotide for detection of SNP TSC0008746
gtgtatttaagtg

SEQ ID NO: 29514 - DNA, 13 bp, Artificial Sequence
  Oligonucleotide for detection of SNP TSC0008746
cacttaaatacac

SEQ ID NO: 29515 - DNA, 13 bp, Artificial Sequence
  Oligonucleotide for detection of SNP TSC0008746
tatttatgtatay

SEQ ID NO: 29516 - DNA, 13 bp, Artificial Sequence
  Oligonucleotide for detection of SNP TSC0008746
rtatacataaata

SEQ ID NO: 29517 - DNA, 13 bp, Artificial Sequence
  Oligonucleotide for detection of SNP TSC0008746
tatttaagtatay

SEQ ID NO: 29518 - DNA, 13 bp, Artificial Sequence
  Oligonucleotide for detection of SNP TSC0008746
rtatacttaaata

SEQ ID NO: 29519 - DNA, 13 bp, Artificial Sequence
  Oligonucleotide for detection of SNP TSC0008747
ttgaggttatgga

SEQ ID NO: 29520 - DNA, 13 bp, Artificial Sequence
  Oligonucleotide for detection of SNP TSC0008747
tccataacctcaa

SEQ ID NO: 29521 - DNA, 13 bp, Artificial Sequence
  Oligonucleotide for detection of SNP TSC0008747
ttgagggtatgga

SEQ ID NO: 29522 - DNA, 13 bp, Artificial Sequence
  Oligonucleotide for detection of SNP TSC0008747
tccataccctcaa

SEQ ID NO: 29523 - DNA, 13 bp, Artificial Sequence
  Oligonucleotide for detection of SNP TSC0008747
tttatagttttaa

SEQ ID NO: 29524 - DNA, 13 bp, Artificial Sequence
  Oligonucleotide for detection of SNP TSC0008747
ttaaaactataaa

SEQ ID NO: 29525 - DNA, 13 bp, Artificial Sequence
  Oligonucleotide for detection of SNP TSC0008747
tttatatttttaa

SEQ ID NO: 29526 - DNA, 13 bp, Artificial Sequence
  Oligonucleotide for detection of SNP TSC0008747
ttaaaaatataaa

SEQ ID NO: 29527 - DNA, 13 bp, Artificial Sequence
  Oligonucleotide for detection of SNP TSC0008748
tttttgaagatag

SEQ ID NO: 29528 - DNA, 13 bp, Artificial Sequence
  Oligonucleotide for detection of SNP TSC0008748
ctatcttcaaaaa

SEQ ID NO: 29529 - DNA, 13 bp, Artificial Sequence
  Oligonucleotide for detection of SNP TSC0008748
tttttggagatag

SEQ ID NO: 29530 - DNA, 13 bp, Artificial Sequence
  Oligonucleotide for detection of SNP TSC0008748
ctatctccaaaaa

SEQ ID NO: 29531 - DNA, 13 bp, Artificial Sequence
  Oligonucleotide for detection of SNP TSC0008749
tattagagtagga

SEQ ID NO: 29532 - DNA, 13 bp, Artificial Sequence
  Oligonucleotide for detection of SNP TSC0008749
tcctactctaata

SEQ ID NO: 29533 - DNA, 13 bp, Artificial Sequence
  Oligonucleotide for detection of SNP TSC0008749
tattagggtagga

SEQ ID NO: 29534 - DNA, 13 bp, Artificial Sequence
  Oligonucleotide for detection of SNP TSC0008749
tcctaccctaata

SEQ ID NO: 29535 - DNA, 13 bp, Artificial Sequence
  Oligonucleotide for detection of SNP TSC0008750
aaagaatgatttg

SEQ ID NO: 29536 - DNA, 13 bp, Artificial Sequence
  Oligonucleotide for detection of SNP TSC0008750
caaatcattcttt

SEQ ID NO: 29537 - DNA, 13 bp, Artificial Sequence
  Oligonucleotide for detection of SNP TSC0008750
aaagaacgatttg

SEQ ID NO: 29538 - DNA, 13 bp, Artificial Sequence
  Oligonucleotide for detection of SNP TSC0008750
caaatcgttcttt

SEQ ID NO: 29539 - DNA, 13 bp, Artificial Sequence
  Oligonucleotide for detection of SNP TSC0008750
tagatcgtttttt

SEQ ID NO: 29540 - DNA, 13 bp, Artificial Sequence
  Oligonucleotide for detection of SNP TSC0008750
aaaaaacgatcta

SEQ ID NO: 29541 - DNA, 13 bp, Artificial Sequence
  Oligonucleotide for detection of SNP TSC0008751
agagtaaggggaa

SEQ ID NO: 29542 - DNA, 13 bp, Artificial Sequence
  Oligonucleotide for detection of SNP TSC0008751
ttccccttactct

SEQ ID NO: 29543 - DNA, 13 bp, Artificial Sequence
  Oligonucleotide for detection of SNP TSC0008751
agagtagggggaa

SEQ ID NO: 29544 - DNA, 13 bp, Artificial Sequence
  Oligonucleotide for detection of SNP TSC0008751
ttccccctactct

SEQ ID NO: 29545 - DNA, 13 bp, Artificial Sequence
  Oligonucleotide for detection of SNP TSC0008753
taagtggtaattt

SEQ ID NO: 29546 - DNA, 13 bp, Artificial Sequence
  Oligonucleotide for detection of SNP TSC0008753
aaattaccactta

SEQ ID NO: 29547 - DNA, 13 bp, Artificial Sequence
  Oligonucleotide for detection of SNP TSC0008753
taagtgataattt

SEQ ID NO: 29548 - DNA, 13 bp, Artificial Sequence
  Oligonucleotide for detection of SNP TSC0008753
aaattatcactta

SEQ ID NO: 29549 - DNA, 13 bp, Artificial Sequence
  Oligonucleotide for detection of SNP TSC0008774
ttatgaagttgaa

SEQ ID NO: 29550 - DNA, 13 bp, Artificial Sequence
  Oligonucleotide for detection of SNP TSC0008774
ttcaacttcataa

SEQ ID NO: 29551 - DNA, 13 bp, Artificial Sequence
  Oligonucleotide for detection of SNP TSC0008774
ttatgaggttgaa

SEQ ID NO: 29552 - DNA, 13 bp, Artificial Sequence
  Oligonucleotide for detection of SNP TSC0008774
ttcaacctcataa

SEQ ID NO: 29553 - DNA, 13 bp, Artificial Sequence
  Oligonucleotide for detection of SNP TSC0008776
aagattatgttay

SEQ ID NO: 29554 - DNA, 13 bp, Artificial Sequence
  Oligonucleotide for detection of SNP TSC0008776
rtaacataatctt

SEQ ID NO: 29555 - DNA, 13 bp, Artificial Sequence
  Oligonucleotide for detection of SNP TSC0008776
aagattgtgttay

SEQ ID NO: 29556 - DNA, 13 bp, Artificial Sequence
  Oligonucleotide for detection of SNP TSC0008776
rtaacacaatctt

SEQ ID NO: 29557 - DNA, 13 bp, Artificial Sequence
  Oligonucleotide for detection of SNP TSC0008776
aagattacgttay

SEQ ID NO: 29558 - DNA, 13 bp, Artificial Sequence
  Oligonucleotide for detection of SNP TSC0008776
rtaacgtaatctt

SEQ ID NO: 29559 - DNA, 13 bp, Artificial Sequence
  Oligonucleotide for detection of SNP TSC0008776
aagatcgtgttay

SEQ ID NO: 29560 - DNA, 13 bp, Artificial Sequence
  Oligonucleotide for detection of SNP TSC0008776
rtaacacgatctt

SEQ ID NO: 29561 - DNA, 13 bp, Artificial Sequence
  Oligonucleotide for detection of SNP TSC0008776
aagattgcgttay

SEQ ID NO: 29562 - DNA, 13 bp, Artificial Sequence
  Oligonucleotide for detection of SNP TSC0008776
rtaacgcaatctt

SEQ ID NO: 29563 - DNA, 13 bp, Artificial Sequence
  Oligonucleotide for detection of SNP TSC0008776
aagatcgcgttay

SEQ ID NO: 29564 - DNA, 13 bp, Artificial Sequence
  Oligonucleotide for detection of SNP TSC0008776
rtaacgcgatctt

SEQ ID NO: 29565 - DNA, 13 bp, Artificial Sequence
  Oligonucleotide for detection of SNP TSC0008776
gtggtgtgatttt

SEQ ID NO: 29566 - DNA, 13 bp, Artificial Sequence
  Oligonucleotide for detection of SNP TSC0008776
aaaatcacaccac

SEQ ID NO: 29567 - DNA, 13 bp, Artificial Sequence
  Oligonucleotide for detection of SNP TSC0008776
gtggcgtgatttt

SEQ ID NO: 29568 - DNA, 13 bp, Artificial Sequence
  Oligonucleotide for detection of SNP TSC0008776
aaaatcacgccac

SEQ ID NO: 29569 - DNA, 13 bp, Artificial Sequence
  Oligonucleotide for detection of SNP TSC0008776
gtggtgcgatttt

SEQ ID NO: 29570 - DNA, 13 bp, Artificial Sequence
  Oligonucleotide for detection of SNP TSC0008776
aaaatcgcaccac

SEQ ID NO: 29571 - DNA, 13 bp, Artificial Sequence
  Oligonucleotide for detection of SNP TSC0008776
gtggcgcgatttt

SEQ ID NO: 29572 - DNA, 13 bp, Artificial Sequence
  Oligonucleotide for detection of SNP TSC0008776
aaaatcgcgccac

SEQ ID NO: 29573 - DNA, 13 bp, Artificial Sequence
  Oligonucleotide for detection of SNP TSC0008777
ggggtagaaataa

SEQ ID NO: 29574 - DNA, 13 bp, Artificial Sequence
  Oligonucleotide for detection of SNP TSC0008777
ttatttctacccc

SEQ ID NO: 29575 - DNA, 13 bp, Artificial Sequence
  Oligonucleotide for detection of SNP TSC0008777
ggggtaaaaataa

SEQ ID NO: 29576 - DNA, 13 bp, Artificial Sequence
  Oligonucleotide for detection of SNP TSC0008777
ttatttttacccc

SEQ ID NO: 29577 - DNA, 13 bp, Artificial Sequence
  Oligonucleotide for detection of SNP TSC0008778
tattgtattttag

SEQ ID NO: 29578 - DNA, 13 bp, Artificial Sequence
  Oligonucleotide for detection of SNP TSC0008778
ctaaaatacaata

SEQ ID NO: 29579 - DNA, 13 bp, Artificial Sequence
  Oligonucleotide for detection of SNP TSC0008778
tattgttttttag

SEQ ID NO: 29580 - DNA, 13 bp, Artificial Sequence
  Oligonucleotide for detection of SNP TSC0008778
ctaaaaaacaata

SEQ ID NO: 29581 - DNA, 13 bp, Artificial Sequence
  Oligonucleotide for detection of SNP TSC0008778
ttggagtgtagtg

SEQ ID NO: 29582 - DNA, 13 bp, Artificial Sequence
  Oligonucleotide for detection of SNP TSC0008778
cactacactccaa

SEQ ID NO: 29583 - DNA, 13 bp, Artificial Sequence
  Oligonucleotide for detection of SNP TSC0008778
ttggagagtagtg

SEQ ID NO: 29584 - DNA, 13 bp, Artificial Sequence
  Oligonucleotide for detection of SNP TSC0008778
cactactctccaa

SEQ ID NO: 29585 - DNA, 13 bp, Artificial Sequence
  Oligonucleotide for detection of SNP TSC0008779
taaaatattagtt

SEQ ID NO: 29586 - DNA, 13 bp, Artificial Sequence
  Oligonucleotide for detection of SNP TSC0008779
aactaatatttta

SEQ ID NO: 29587 - DNA, 13 bp, Artificial Sequence
  Oligonucleotide for detection of SNP TSC0008779
taaaatgttagtt

SEQ ID NO: 29588 - DNA, 13 bp, Artificial Sequence
  Oligonucleotide for detection of SNP TSC0008779
aactaacatttta

SEQ ID NO: 29589 - DNA, 13 bp, Artificial Sequence
  Oligonucleotide for detection of SNP TSC0008779
taaaacgttagtt

SEQ ID NO: 29590 - DNA, 13 bp, Artificial Sequence
  Oligonucleotide for detection of SNP TSC0008779
aactaacgtttta

SEQ ID NO: 29591 - DNA, 13 bp, Artificial Sequence
  Oligonucleotide for detection of SNP TSC0008779
agttaatgttttg

SEQ ID NO: 29592 - DNA, 13 bp, Artificial Sequence
  Oligonucleotide for detection of SNP TSC0008779
caaaacattaact

SEQ ID NO: 29593 - DNA, 13 bp, Artificial Sequence
  Oligonucleotide for detection of SNP TSC0008779
agttaacgttttg

SEQ ID NO: 29594 - DNA, 13 bp, Artificial Sequence
  Oligonucleotide for detection of SNP TSC0008779
caaaacgttaact

SEQ ID NO: 29595 - DNA, 13 bp, Artificial Sequence
  Oligonucleotide for detection of SNP TSC0008780
tgttgtagttaag

SEQ ID NO: 29596 - DNA, 13 bp, Artificial Sequence
  Oligonucleotide for detection of SNP TSC0008780
cttaactacaaca

SEQ ID NO: 29597 - DNA, 13 bp, Artificial Sequence
  Oligonucleotide for detection of SNP TSC0008780
tgttgtggttaag

SEQ ID NO: 29598 - DNA, 13 bp, Artificial Sequence
  Oligonucleotide for detection of SNP TSC0008780
cttaaccacaaca

SEQ ID NO: 29599 - DNA, 13 bp, Artificial Sequence
  Oligonucleotide for detection of SNP TSC0008780
tgtcgtagttaag

SEQ ID NO: 29600 - DNA, 13 bp, Artificial Sequence
  Oligonucleotide for detection of SNP TSC0008780
cttaactacgaca

SEQ ID NO: 29601 - DNA, 13 bp, Artificial Sequence
  Oligonucleotide for detection of SNP TSC0008780
tgtcgtggttaag

SEQ ID NO: 29602 - DNA, 13 bp, Artificial Sequence
  Oligonucleotide for detection of SNP TSC0008780
cttaaccacgaca

SEQ ID NO: 29603 - DNA, 13 bp, Artificial Sequence
  Oligonucleotide for detection of SNP TSC0008781
ttattatgttggt

SEQ ID NO: 29604 - DNA, 13 bp, Artificial Sequence
  Oligonucleotide for detection of SNP TSC0008781
accaacataataa

SEQ ID NO: 29605 - DNA, 13 bp, Artificial Sequence
  Oligonucleotide for detection of SNP TSC0008781
ttattacgttggt

SEQ ID NO: 29606 - DNA, 13 bp, Artificial Sequence
  Oligonucleotide for detection of SNP TSC0008781
accaacgtaataa

SEQ ID NO: 29607 - DNA, 13 bp, Artificial Sequence
  Oligonucleotide for detection of SNP TSC0008781
attagtgtggtaa

SEQ ID NO: 29608 - DNA, 13 bp, Artificial Sequence
  Oligonucleotide for detection of SNP TSC0008781
ttaccacactaat

SEQ ID NO: 29609 - DNA, 13 bp, Artificial Sequence
  Oligonucleotide for detection of SNP TSC0008781
attagtatggtaa

SEQ ID NO: 29610 - DNA, 13 bp, Artificial Sequence
  Oligonucleotide for detection of SNP TSC0008781
ttaccatactaat

SEQ ID NO: 29611 - DNA, 13 bp, Artificial Sequence
  Oligonucleotide for detection of SNP TSC0008781
attagcgtggtaa

SEQ ID NO: 29612 - DNA, 13 bp, Artificial Sequence
  Oligonucleotide for detection of SNP TSC0008781
ttaccacgctaat

SEQ ID NO: 29613 - DNA, 13 bp, Artificial Sequence
  Oligonucleotide for detection of SNP TSC0008782
agtgaagatttty

SEQ ID NO: 29614 - DNA, 13 bp, Artificial Sequence
  Oligonucleotide for detection of SNP TSC0008782
raaaatcttcact

SEQ ID NO: 29615 - DNA, 13 bp, Artificial Sequence
  Oligonucleotide for detection of SNP TSC0008782
agtgaaaatttty

SEQ ID NO: 29616 - DNA, 13 bp, Artificial Sequence
  Oligonucleotide for detection of SNP TSC0008782
raaaattttcact

SEQ ID NO: 29617 - DNA, 13 bp, Artificial Sequence
  Oligonucleotide for detection of SNP TSC0008783
atatttattatgg

SEQ ID NO: 29618 - DNA, 13 bp, Artificial Sequence
  Oligonucleotide for detection of SNP TSC0008783
ccataataaatat

SEQ ID NO: 29619 - DNA, 13 bp, Artificial Sequence
  Oligonucleotide for detection of SNP TSC0008783
atattttttatgg

SEQ ID NO: 29620 - DNA, 13 bp, Artificial Sequence
  Oligonucleotide for detection of SNP TSC0008783
ccataaaaaatat

SEQ ID NO: 29621 - DNA, 13 bp, Artificial Sequence
  Oligonucleotide for detection of SNP TSC0008783
ttatggtgaatat

SEQ ID NO: 29622 - DNA, 13 bp, Artificial Sequence
  Oligonucleotide for detection of SNP TSC0008783
atattcaccataa

SEQ ID NO: 29623 - DNA, 13 bp, Artificial Sequence
  Oligonucleotide for detection of SNP TSC0008783
ttatggggaatat

SEQ ID NO: 29624 - DNA, 13 bp, Artificial Sequence
  Oligonucleotide for detection of SNP TSC0008783
atattccccataa

SEQ ID NO: 29625 - DNA, 13 bp, Artificial Sequence
  Oligonucleotide for detection of SNP TSC0008784
atttaaatatgtg

SEQ ID NO: 29626 - DNA, 13 bp, Artificial Sequence
  Oligonucleotide for detection of SNP TSC0008784
cacatatttaaat

SEQ ID NO: 29627 - DNA, 13 bp, Artificial Sequence
  Oligonucleotide for detection of SNP TSC0008784
atttaagtatgtg

SEQ ID NO: 29628 - DNA, 13 bp, Artificial Sequence
  Oligonucleotide for detection of SNP TSC0008784
cacatacttaaat

SEQ ID NO: 29629 - DNA, 13 bp, Artificial Sequence
  Oligonucleotide for detection of SNP TSC0008792
gtagaaagttttt

SEQ ID NO: 29630 - DNA, 13 bp, Artificial Sequence
  Oligonucleotide for detection of SNP TSC0008792
aaaaactttctac

SEQ ID NO: 29631 - DNA, 13 bp, Artificial Sequence
  Oligonucleotide for detection of SNP TSC0008792
gtagaaggttttt

SEQ ID NO: 29632 - DNA, 13 bp, Artificial Sequence
  Oligonucleotide for detection of SNP TSC0008792
aaaaaccttctac

SEQ ID NO: 29633 - DNA, 13 bp, Artificial Sequence
  Oligonucleotide for detection of SNP TSC0008793
gagttaattaaty

SEQ ID NO: 29634 - DNA, 13 bp, Artificial Sequence
  Oligonucleotide for detection of SNP TSC0008793
rattaattaactc

SEQ ID NO: 29635 - DNA, 13 bp, Artificial Sequence
  Oligonucleotide for detection of SNP TSC0008793
gagttagttaaty

SEQ ID NO: 29636 - DNA, 13 bp, Artificial Sequence
  Oligonucleotide for detection of SNP TSC0008793
rattaactaactc

SEQ ID NO: 29637 - DNA, 13 bp, Artificial Sequence
  Oligonucleotide for detection of SNP TSC0008794
gtgaaaatagatt

SEQ ID NO: 29638 - DNA, 13 bp, Artificial Sequence
  Oligonucleotide for detection of SNP TSC0008794
aatctattttcac

SEQ ID NO: 29639 - DNA, 13 bp, Artificial Sequence
  Oligonucleotide for detection of SNP TSC0008794
gtgaaagtagatt

SEQ ID NO: 29640 - DNA, 13 bp, Artificial Sequence
  Oligonucleotide for detection of SNP TSC0008794
aatctactttcac

SEQ ID NO: 29641 - DNA, 13 bp, Artificial Sequence
  Oligonucleotide for detection of SNP TSC0008801
tgttagaaaattt

SEQ ID NO: 29642 - DNA, 13 bp, Artificial Sequence
  Oligonucleotide for detection of SNP TSC0008801
aaattttctaaca

SEQ ID NO: 29643 - DNA, 13 bp, Artificial Sequence
  Oligonucleotide for detection of SNP TSC0008801
tgttaggaaattt

SEQ ID NO: 29644 - DNA, 13 bp, Artificial Sequence
  Oligonucleotide for detection of SNP TSC0008801
aaatttcctaaca

SEQ ID NO: 29645 - DNA, 13 bp, Artificial Sequence
  Oligonucleotide for detection of SNP TSC0008810
taaagaaaaaaaa

SEQ ID NO: 29646 - DNA, 13 bp, Artificial Sequence
  Oligonucleotide for detection of SNP TSC0008810
ttttttttcttta

SEQ ID NO: 29647 - DNA, 13 bp, Artificial Sequence
  Oligonucleotide for detection of SNP TSC0008810
taaagagaaaaaa

SEQ ID NO: 29648 - DNA, 13 bp, Artificial Sequence
  Oligonucleotide for detection of SNP TSC0008810
ttttttctcttta

SEQ ID NO: 29649 - DNA, 13 bp, Artificial Sequence
  Oligonucleotide for detection of SNP TSC0008817
ttgtgatgaggaa

SEQ ID NO: 29650 - DNA, 13 bp, Artificial Sequence
  Oligonucleotide for detection of SNP TSC0008817
ttcctcatcacaa

SEQ ID NO: 29651 - DNA, 13 bp, Artificial Sequence
  Oligonucleotide for detection of SNP TSC0008817
ttgtgaggaggaa

SEQ ID NO: 29652 - DNA, 13 bp, Artificial Sequence
  Oligonucleotide for detection of SNP TSC0008817
ttcctcctcacaa

SEQ ID NO: 29653 - DNA, 13 bp, Artificial Sequence
  Oligonucleotide for detection of SNP TSC0008817
ttgtgacgaggaa

SEQ ID NO: 29654 - DNA, 13 bp, Artificial Sequence
  Oligonucleotide for detection of SNP TSC0008817
ttcctcgtcacaa

SEQ ID NO: 29655 - DNA, 13 bp, Artificial Sequence
  Oligonucleotide for detection of SNP TSC0008817
ttttttgttataa

SEQ ID NO: 29656 - DNA, 13 bp, Artificial Sequence
  Oligonucleotide for detection of SNP TSC0008817
ttataacaaaaaa

SEQ ID NO: 29657 - DNA, 13 bp, Artificial Sequence
  Oligonucleotide for detection of SNP TSC0008817
tttttttttataa

SEQ ID NO: 29658 - DNA, 13 bp, Artificial Sequence
  Oligonucleotide for detection of SNP TSC0008817
ttataaaaaaaaa

SEQ ID NO: 29659 - DNA, 13 bp, Artificial Sequence
  Oligonucleotide for detection of SNP TSC0008817
tttttcgttataa

SEQ ID NO: 29660 - DNA, 13 bp, Artificial Sequence
  Oligonucleotide for detection of SNP TSC0008817
ttataacgaaaaa

SEQ ID NO: 29661 - DNA, 13 bp, Artificial Sequence
  Oligonucleotide for detection of SNP TSC0008828
aaaaaagagaaaa

SEQ ID NO: 29662 - DNA, 13 bp, Artificial Sequence
  Oligonucleotide for detection of SNP TSC0008828
ttttctctttttt

SEQ ID NO: 29663 - DNA, 13 bp, Artificial Sequence
  Oligonucleotide for detection of SNP TSC0008828
aaaaaaaagaaaa

SEQ ID NO: 29664 - DNA, 13 bp, Artificial Sequence
  Oligonucleotide for detection of SNP TSC0008828
ttttctttttttt

SEQ ID NO: 29665 - DNA, 13 bp, Artificial Sequence
  Oligonucleotide for detection of SNP TSC0008833
tttataattattg

SEQ ID NO: 29666 - DNA, 13 bp, Artificial Sequence
  Oligonucleotide for detection of SNP TSC0008833
caataattataaa

SEQ ID NO: 29667 - DNA, 13 bp, Artificial Sequence
  Oligonucleotide for detection of SNP TSC0008839
aattaagattgta

SEQ ID NO: 29668 - DNA, 13 bp, Artificial Sequence
  Oligonucleotide for detection of SNP TSC0008839
tacaatcttaatt

SEQ ID NO: 29669 - DNA, 13 bp, Artificial Sequence
  Oligonucleotide for detection of SNP TSC0008839
aattaaaattgta

SEQ ID NO: 29670 - DNA, 13 bp, Artificial Sequence
  Oligonucleotide for detection of SNP TSC0008839
tacaattttaatt

SEQ ID NO: 29671 - DNA, 13 bp, Artificial Sequence
  Oligonucleotide for detection of SNP TSC0008840
taaaagtgagggy

SEQ ID NO: 29672 - DNA, 13 bp, Artificial Sequence
  Oligonucleotide for detection of SNP TSC0008840
rccctcactttta

SEQ ID NO: 29673 - DNA, 13 bp, Artificial Sequence
  Oligonucleotide for detection of SNP TSC0008840
taaaagggagggy

SEQ ID NO: 29674 - DNA, 13 bp, Artificial Sequence
  Oligonucleotide for detection of SNP TSC0008840
rccctccctttta

SEQ ID NO: 29675 - DNA, 13 bp, Artificial Sequence
  Oligonucleotide for detection of SNP TSC0008842
aatgaagtttaag

SEQ ID NO: 29676 - DNA, 13 bp, Artificial Sequence
  Oligonucleotide for detection of SNP TSC0008842
cttaaacttcatt

SEQ ID NO: 29677 - DNA, 13 bp, Artificial Sequence
  Oligonucleotide for detection of SNP TSC0008842
aatgaaatttaag

SEQ ID NO: 29678 - DNA, 13 bp, Artificial Sequence
  Oligonucleotide for detection of SNP TSC0008842
cttaaatttcatt

SEQ ID NO: 29679 - DNA, 13 bp, Artificial Sequence
  Oligonucleotide for detection of SNP TSC0008848
tttgggattttag

SEQ ID NO: 29680 - DNA, 13 bp, Artificial Sequence
  Oligonucleotide for detection of SNP TSC0008848
ctaaaatcccaaa

SEQ ID NO: 29681 - DNA, 13 bp, Artificial Sequence
  Oligonucleotide for detection of SNP TSC0008849
ttattttttttag

SEQ ID NO: 29682 - DNA, 13 bp, Artificial Sequence
  Oligonucleotide for detection of SNP TSC0008849
ctaaaaaaaataa

SEQ ID NO: 29683 - DNA, 13 bp, Artificial Sequence
  Oligonucleotide for detection of SNP TSC0008849
ttatttgttttag

SEQ ID NO: 29684 - DNA, 13 bp, Artificial Sequence
  Oligonucleotide for detection of SNP TSC0008849
ctaaaacaaataa

SEQ ID NO: 29685 - DNA, 13 bp, Artificial Sequence
  Oligonucleotide for detection of SNP TSC0008849
ttattcgttttag

SEQ ID NO: 29686 - DNA, 13 bp, Artificial Sequence
  Oligonucleotide for detection of SNP TSC0008849
ctaaaacgaataa

SEQ ID NO: 29687 - DNA, 13 bp, Artificial Sequence
  Oligonucleotide for detection of SNP TSC0008849
ttggaagggatga

SEQ ID NO: 29688 - DNA, 13 bp, Artificial Sequence
  Oligonucleotide for detection of SNP TSC0008849
tcatcccttccaa

SEQ ID NO: 29689 - DNA, 13 bp, Artificial Sequence
  Oligonucleotide for detection of SNP TSC0008849
ttggaatggatga

SEQ ID NO: 29690 - DNA, 13 bp, Artificial Sequence
  Oligonucleotide for detection of SNP TSC0008849
tcatccattccaa

SEQ ID NO: 29691 - DNA, 13 bp, Artificial Sequence
  Oligonucleotide for detection of SNP TSC0008849
ttggaacggatga

SEQ ID NO: 29692 - DNA, 13 bp, Artificial Sequence
  Oligonucleotide for detection of SNP TSC0008849
tcatccgttccaa

SEQ ID NO: 29693 - DNA, 13 bp, Artificial Sequence
  Oligonucleotide for detection of SNP TSC0008853
ggtttaaagaata

SEQ ID NO: 29694 - DNA, 13 bp, Artificial Sequence
  Oligonucleotide for detection of SNP TSC0008853
tattctttaaacc

SEQ ID NO: 29695 - DNA, 13 bp, Artificial Sequence
  Oligonucleotide for detection of SNP TSC0008853
ggtttatagaata

SEQ ID NO: 29696 - DNA, 13 bp, Artificial Sequence
  Oligonucleotide for detection of SNP TSC0008853
tattctataaacc

SEQ ID NO: 29697 - DNA, 13 bp, Artificial Sequence
  Oligonucleotide for detection of SNP TSC0008857
gataatagttgga

SEQ ID NO: 29698 - DNA, 13 bp, Artificial Sequence
  Oligonucleotide for detection of SNP TSC0008857
tccaactattatc

SEQ ID NO: 29699 - DNA, 13 bp, Artificial Sequence
  Oligonucleotide for detection of SNP TSC0008857
gataatggttgga

SEQ ID NO: 29700 - DNA, 13 bp, Artificial Sequence
  Oligonucleotide for detection of SNP TSC0008857
tccaaccattatc

SEQ ID NO: 29701 - DNA, 13 bp, Artificial Sequence
  Oligonucleotide for detection of SNP TSC0008857
gataacggttgga

SEQ ID NO: 29702 - DNA, 13 bp, Artificial Sequence
  Oligonucleotide for detection of SNP TSC0008857
tccaaccgttatc

SEQ ID NO: 29703 - DNA, 13 bp, Artificial Sequence
  Oligonucleotide for detection of SNP TSC0008857
tttaattgttaty

SEQ ID NO: 29704 - DNA, 13 bp, Artificial Sequence
  Oligonucleotide for detection of SNP TSC0008857
rataacaattaaa

SEQ ID NO: 29705 - DNA, 13 bp, Artificial Sequence
  Oligonucleotide for detection of SNP TSC0008857
tttaatcgttaty

SEQ ID NO: 29706 - DNA, 13 bp, Artificial Sequence
  Oligonucleotide for detection of SNP TSC0008857
rataacgattaaa

SEQ ID NO: 29707 - DNA, 13 bp, Artificial Sequence
  Oligonucleotide for detection of SNP TSC0008862
tttttttgtgtta

SEQ ID NO: 29708 - DNA, 13 bp, Artificial Sequence
  Oligonucleotide for detection of SNP TSC0008862
taacacaaaaaaa

SEQ ID NO: 29709 - DNA, 13 bp, Artificial Sequence
  Oligonucleotide for detection of SNP TSC0008862
ttttttcgtgtta

SEQ ID NO: 29710 - DNA, 13 bp, Artificial Sequence
  Oligonucleotide for detection of SNP TSC0008862
taacacgaaaaaa

SEQ ID NO: 29711 - DNA, 13 bp, Artificial Sequence
  Oligonucleotide for detection of SNP TSC0008862
tgatatggggaaa

SEQ ID NO: 29712 - DNA, 13 bp, Artificial Sequence
  Oligonucleotide for detection of SNP TSC0008862
tttccccatatca

SEQ ID NO: 29713 - DNA, 13 bp, Artificial Sequence
  Oligonucleotide for detection of SNP TSC0008862
tgatatagggaaa

SEQ ID NO: 29714 - DNA, 13 bp, Artificial Sequence
  Oligonucleotide for detection of SNP TSC0008862
tttccctatatca

SEQ ID NO: 29715 - DNA, 13 bp, Artificial Sequence
  Oligonucleotide for detection of SNP TSC0008862
tgatacggggaaa

SEQ ID NO: 29716 - DNA, 13 bp, Artificial Sequence
  Oligonucleotide for detection of SNP TSC0008862
tttccccgtatca

SEQ ID NO: 29717 - DNA, 13 bp, Artificial Sequence
  Oligonucleotide for detection of SNP TSC0008871
aatattaaataay

SEQ ID NO: 29718 - DNA, 13 bp, Artificial Sequence
  Oligonucleotide for detection of SNP TSC0008871
rttatttaatatt

SEQ ID NO: 29719 - DNA, 13 bp, Artificial Sequence
  Oligonucleotide for detection of SNP TSC0008871
aatattgaataay

SEQ ID NO: 29720 - DNA, 13 bp, Artificial Sequence
  Oligonucleotide for detection of SNP TSC0008871
rttattcaatatt

SEQ ID NO: 29721 - DNA, 13 bp, Artificial Sequence
  Oligonucleotide for detection of SNP TSC0008878
atagttatagtta

SEQ ID NO: 29722 - DNA, 13 bp, Artificial Sequence
  Oligonucleotide for detection of SNP TSC0008878
taactataactat

SEQ ID NO: 29723 - DNA, 13 bp, Artificial Sequence
  Oligonucleotide for detection of SNP TSC0008878
atagttttagtta

SEQ ID NO: 29724 - DNA, 13 bp, Artificial Sequence
  Oligonucleotide for detection of SNP TSC0008878
taactaaaactat

SEQ ID NO: 29725 - DNA, 13 bp, Artificial Sequence
  Oligonucleotide for detection of SNP TSC0008878
tggttatggttgt

SEQ ID NO: 29726 - DNA, 13 bp, Artificial Sequence
  Oligonucleotide for detection of SNP TSC0008878
acaaccataacca

SEQ ID NO: 29727 - DNA, 13 bp, Artificial Sequence
  Oligonucleotide for detection of SNP TSC0008878
tggttaaggttgt

SEQ ID NO: 29728 - DNA, 13 bp, Artificial Sequence
  Oligonucleotide for detection of SNP TSC0008878
acaaccttaacca

SEQ ID NO: 29729 - DNA, 13 bp, Artificial Sequence
  Oligonucleotide for detection of SNP TSC0008886
aagagagataatt

SEQ ID NO: 29730 - DNA, 13 bp, Artificial Sequence
  Oligonucleotide for detection of SNP TSC0008886
aattatctctctt

SEQ ID NO: 29731 - DNA, 13 bp, Artificial Sequence
  Oligonucleotide for detection of SNP TSC0008886
aagagatataatt

SEQ ID NO: 29732 - DNA, 13 bp, Artificial Sequence
  Oligonucleotide for detection of SNP TSC0008886
aattatatctctt

SEQ ID NO: 29733 - DNA, 13 bp, Artificial Sequence
  Oligonucleotide for detection of SNP TSC0008886
aattatttttttt

SEQ ID NO: 29734 - DNA, 13 bp, Artificial Sequence
  Oligonucleotide for detection of SNP TSC0008886
aaaaaaaataatt

SEQ ID NO: 29735 - DNA, 13 bp, Artificial Sequence
  Oligonucleotide for detection of SNP TSC0008886
aattatatttttt

SEQ ID NO: 29736 - DNA, 13 bp, Artificial Sequence
  Oligonucleotide for detection of SNP TSC0008886
aaaaaatataatt

SEQ ID NO: 29737 - DNA, 13 bp, Artificial Sequence
  Oligonucleotide for detection of SNP TSC0008887
tagtgaataagty

SEQ ID NO: 29738 - DNA, 13 bp, Artificial Sequence
  Oligonucleotide for detection of SNP TSC0008887
racttattcacta

SEQ ID NO: 29739 - DNA, 13 bp, Artificial Sequence
  Oligonucleotide for detection of SNP TSC0008887
tagtgagtaagty

SEQ ID NO: 29740 - DNA, 13 bp, Artificial Sequence
  Oligonucleotide for detection of SNP TSC0008887
racttactcacta

SEQ ID NO: 29741 - DNA, 13 bp, Artificial Sequence
  Oligonucleotide for detection of SNP TSC0008889
tatatatgtatay

SEQ ID NO: 29742 - DNA, 13 bp, Artificial Sequence
  Oligonucleotide for detection of SNP TSC0008889
rtatacatatata

SEQ ID NO: 29743 - DNA, 13 bp, Artificial Sequence
  Oligonucleotide for detection of SNP TSC0008889
tatatacgtatay

SEQ ID NO: 29744 - DNA, 13 bp, Artificial Sequence
  Oligonucleotide for detection of SNP TSC0008889
rtatacgtatata

SEQ ID NO: 29745 - DNA, 13 bp, Artificial Sequence
  Oligonucleotide for detection of SNP TSC0008889
gtgtgtgtgtgtg

SEQ ID NO: 29746 - DNA, 13 bp, Artificial Sequence
  Oligonucleotide for detection of SNP TSC0008889
cacacacacacac

SEQ ID NO: 29747 - DNA, 13 bp, Artificial Sequence
  Oligonucleotide for detection of SNP TSC0008889
gtgtgtatgtgtg

SEQ ID NO: 29748 - DNA, 13 bp, Artificial Sequence
  Oligonucleotide for detection of SNP TSC0008889
cacacatacacac

SEQ ID NO: 29749 - DNA, 13 bp, Artificial Sequence
  Oligonucleotide for detection of SNP TSC0008889
gtgtgcgtgtgtg

SEQ ID NO: 29750 - DNA, 13 bp, Artificial Sequence
  Oligonucleotide for detection of SNP TSC0008889
cacacacgcacac

SEQ ID NO: 29751 - DNA, 13 bp, Artificial Sequence
  Oligonucleotide for detection of SNP TSC0008890
tatggaagaatgg

SEQ ID NO: 29752 - DNA, 13 bp, Artificial Sequence
  Oligonucleotide for detection of SNP TSC0008890
ccattcttccata

SEQ ID NO: 29753 - DNA, 13 bp, Artificial Sequence
  Oligonucleotide for detection of SNP TSC0008890
tatggatgaatgg

SEQ ID NO: 29754 - DNA, 13 bp, Artificial Sequence
  Oligonucleotide for detection of SNP TSC0008890
ccattcatccata

SEQ ID NO: 29755 - DNA, 13 bp, Artificial Sequence
  Oligonucleotide for detection of SNP TSC0008890
ttatttttttata

SEQ ID NO: 29756 - DNA, 13 bp, Artificial Sequence
  Oligonucleotide for detection of SNP TSC0008890
tataaaaaaataa

SEQ ID NO: 29757 - DNA, 13 bp, Artificial Sequence
  Oligonucleotide for detection of SNP TSC0008890
ttatttatttata

SEQ ID NO: 29758 - DNA, 13 bp, Artificial Sequence
  Oligonucleotide for detection of SNP TSC0008890
tataaataaataa

SEQ ID NO: 29759 - DNA, 13 bp, Artificial Sequence
  Oligonucleotide for detection of SNP TSC0008892
gatatagttaaay

SEQ ID NO: 29760 - DNA, 13 bp, Artificial Sequence
  Oligonucleotide for detection of SNP TSC0008892
rtttaactatatc

SEQ ID NO: 29761 - DNA, 13 bp, Artificial Sequence
  Oligonucleotide for detection of SNP TSC0008892
gatataattaaay

SEQ ID NO: 29762 - DNA, 13 bp, Artificial Sequence
  Oligonucleotide for detection of SNP TSC0008892
rtttaattatatc

SEQ ID NO: 29763 - DNA, 13 bp, Artificial Sequence
  Oligonucleotide for detection of SNP TSC0008896
tttgaaattttgg

SEQ ID NO: 29764 - DNA, 13 bp, Artificial Sequence
  Oligonucleotide for detection of SNP TSC0008896
ccaaaatttcaaa

SEQ ID NO: 29765 - DNA, 13 bp, Artificial Sequence
  Oligonucleotide for detection of SNP TSC0008896
tttgaatttttgg

SEQ ID NO: 29766 - DNA, 13 bp, Artificial Sequence
  Oligonucleotide for detection of SNP TSC0008896
ccaaaaattcaaa

SEQ ID NO: 29767 - DNA, 13 bp, Artificial Sequence
  Oligonucleotide for detection of SNP TSC0008896
ttagaattttagg

SEQ ID NO: 29768 - DNA, 13 bp, Artificial Sequence
  Oligonucleotide for detection of SNP TSC0008896
cctaaaattctaa

SEQ ID NO: 29769 - DNA, 13 bp, Artificial Sequence
  Oligonucleotide for detection of SNP TSC0008896
ttagaaatttagg

SEQ ID NO: 29770 - DNA, 13 bp, Artificial Sequence
  Oligonucleotide for detection of SNP TSC0008896
cctaaatttctaa

SEQ ID NO: 29771 - DNA, 13 bp, Artificial Sequence
  Oligonucleotide for detection of SNP TSC0008900
tttggagattttt

SEQ ID NO: 29772 - DNA, 13 bp, Artificial Sequence
  Oligonucleotide for detection of SNP TSC0008900
aaaaatctccaaa

SEQ ID NO: 29773 - DNA, 13 bp, Artificial Sequence
  Oligonucleotide for detection of SNP TSC0008900
tttggaaattttt

SEQ ID NO: 29774 - DNA, 13 bp, Artificial Sequence
  Oligonucleotide for detection of SNP TSC0008900
aaaaatttccaaa

SEQ ID NO: 29775 - DNA, 13 bp, Artificial Sequence
  Oligonucleotide for detection of SNP TSC0008904
tagtatgtagatg

SEQ ID NO: 29776 - DNA, 13 bp, Artificial Sequence
  Oligonucleotide for detection of SNP TSC0008904
catctacatacta

SEQ ID NO: 29777 - DNA, 13 bp, Artificial Sequence
  Oligonucleotide for detection of SNP TSC0008904
tagtatatagatg

SEQ ID NO: 29778 - DNA, 13 bp, Artificial Sequence
  Oligonucleotide for detection of SNP TSC0008904
catctatatacta

SEQ ID NO: 29779 - DNA, 13 bp, Artificial Sequence
  Oligonucleotide for detection of SNP TSC0008908
ttgtttttatgtg

SEQ ID NO: 29780 - DNA, 13 bp, Artificial Sequence
  Oligonucleotide for detection of SNP TSC0008908
cacataaaaacaa

SEQ ID NO: 29781 - DNA, 13 bp, Artificial Sequence
  Oligonucleotide for detection of SNP TSC0008908
ttgtttgtatgtg

SEQ ID NO: 29782 - DNA, 13 bp, Artificial Sequence
  Oligonucleotide for detection of SNP TSC0008908
cacatacaaacaa

SEQ ID NO: 29783 - DNA, 13 bp, Artificial Sequence
  Oligonucleotide for detection of SNP TSC0008908
tatatagaggtaa

SEQ ID NO: 29784 - DNA, 13 bp, Artificial Sequence
  Oligonucleotide for detection of SNP TSC0008908
ttacctctatata

SEQ ID NO: 29785 - DNA, 13 bp, Artificial Sequence
  Oligonucleotide for detection of SNP TSC0008908
tatatataggtaa

SEQ ID NO: 29786 - DNA, 13 bp, Artificial Sequence
  Oligonucleotide for detection of SNP TSC0008908
ttacctatatata

SEQ ID NO: 29787 - DNA, 13 bp, Artificial Sequence
  Oligonucleotide for detection of SNP TSC0008919
ttgtataaagtty

SEQ ID NO: 29788 - DNA, 13 bp, Artificial Sequence
  Oligonucleotide for detection of SNP TSC0008919
raactttatacaa

SEQ ID NO: 29789 - DNA, 13 bp, Artificial Sequence
  Oligonucleotide for detection of SNP TSC0008919
ttgtatgaagtty

SEQ ID NO: 29790 - DNA, 13 bp, Artificial Sequence
  Oligonucleotide for detection of SNP TSC0008919
raacttcatacaa

SEQ ID NO: 29791 - DNA, 13 bp, Artificial Sequence
  Oligonucleotide for detection of SNP TSC0008919
ttgtacgaagtty

SEQ ID NO: 29792 - DNA, 13 bp, Artificial Sequence
  Oligonucleotide for detection of SNP TSC0008919
raacttcgtacaa

SEQ ID NO: 29793 - DNA, 13 bp, Artificial Sequence
  Oligonucleotide for detection of SNP TSC0008919
gggttttgtgtag

SEQ ID NO: 29794 - DNA, 13 bp, Artificial Sequence
  Oligonucleotide for detection of SNP TSC0008919
ctacacaaaaccc

SEQ ID NO: 29795 - DNA, 13 bp, Artificial Sequence
  Oligonucleotide for detection of SNP TSC0008919
gggtttcgtgtag

SEQ ID NO: 29796 - DNA, 13 bp, Artificial Sequence
  Oligonucleotide for detection of SNP TSC0008919
ctacacgaaaccc

SEQ ID NO: 29797 - DNA, 13 bp, Artificial Sequence
  Oligonucleotide for detection of SNP TSC0008921
gtaggttgtatay

SEQ ID NO: 29798 - DNA, 13 bp, Artificial Sequence
  Oligonucleotide for detection of SNP TSC0008921
rtatacaacctac

SEQ ID NO: 29799 - DNA, 13 bp, Artificial Sequence
  Oligonucleotide for detection of SNP TSC0008921
gtaggtcgtatay

SEQ ID NO: 29800 - DNA, 13 bp, Artificial Sequence
  Oligonucleotide for detection of SNP TSC0008921
rtatacgacctac

SEQ ID NO: 29801 - DNA, 13 bp, Artificial Sequence
  Oligonucleotide for detection of SNP TSC0008921
gtgtatggtttgy

SEQ ID NO: 29802 - DNA, 13 bp, Artificial Sequence
  Oligonucleotide for detection of SNP TSC0008921
rcaaaccatacac

SEQ ID NO: 29803 - DNA, 13 bp, Artificial Sequence
  Oligonucleotide for detection of SNP TSC0008921
gtgtatagtttgy

SEQ ID NO: 29804 - DNA, 13 bp, Artificial Sequence
  Oligonucleotide for detection of SNP TSC0008921
rcaaactatacac

SEQ ID NO: 29805 - DNA, 13 bp, Artificial Sequence
  Oligonucleotide for detection of SNP TSC0008921
gtgtacggtttgy

SEQ ID NO: 29806 - DNA, 13 bp, Artificial Sequence
  Oligonucleotide for detection of SNP TSC0008921
rcaaaccgtacac

SEQ ID NO: 29807 - DNA, 13 bp, Artificial Sequence
  Oligonucleotide for detection of SNP TSC0008922
tggtttatagtty

SEQ ID NO: 29808 - DNA, 13 bp, Artificial Sequence
  Oligonucleotide for detection of SNP TSC0008922
raactataaacca

SEQ ID NO: 29809 - DNA, 13 bp, Artificial Sequence
  Oligonucleotide for detection of SNP TSC0008922
tggtttttagtty

SEQ ID NO: 29810 - DNA, 13 bp, Artificial Sequence
  Oligonucleotide for detection of SNP TSC0008922
raactaaaaacca

SEQ ID NO: 29811 - DNA, 13 bp, Artificial Sequence
  Oligonucleotide for detection of SNP TSC0008922
gaattgtgagtta

SEQ ID NO: 29812 - DNA, 13 bp, Artificial Sequence
  Oligonucleotide for detection of SNP TSC0008922
taactcacaattc

SEQ ID NO: 29813 - DNA, 13 bp, Artificial Sequence
  Oligonucleotide for detection of SNP TSC0008922
gaattgagagtta

SEQ ID NO: 29814 - DNA, 13 bp, Artificial Sequence
  Oligonucleotide for detection of SNP TSC0008922
taactctcaattc

SEQ ID NO: 29815 - DNA, 13 bp, Artificial Sequence
  Oligonucleotide for detection of SNP TSC0008923
ttagggtgtataa

SEQ ID NO: 29816 - DNA, 13 bp, Artificial Sequence
  Oligonucleotide for detection of SNP TSC0008923
ttatacaccctaa

SEQ ID NO: 29817 - DNA, 13 bp, Artificial Sequence
  Oligonucleotide for detection of SNP TSC0008923
ttagggcgtataa

SEQ ID NO: 29818 - DNA, 13 bp, Artificial Sequence
  Oligonucleotide for detection of SNP TSC0008923
ttatacgccctaa

SEQ ID NO: 29819 - DNA, 13 bp, Artificial Sequence
  Oligonucleotide for detection of SNP TSC0008923
ttatatgttttag

SEQ ID NO: 29820 - DNA, 13 bp, Artificial Sequence
  Oligonucleotide for detection of SNP TSC0008923
ctaaaacatataa

SEQ ID NO: 29821 - DNA, 13 bp, Artificial Sequence
  Oligonucleotide for detection of SNP TSC0008923
ttatatattttag

SEQ ID NO: 29822 - DNA, 13 bp, Artificial Sequence
  Oligonucleotide for detection of SNP TSC0008923
ctaaaatatataa

SEQ ID NO: 29823 - DNA, 13 bp, Artificial Sequence
  Oligonucleotide for detection of SNP TSC0008923
ttatacgttttag

SEQ ID NO: 29824 - DNA, 13 bp, Artificial Sequence
  Oligonucleotide for detection of SNP TSC0008923
ctaaaacgtataa

SEQ ID NO: 29825 - DNA, 13 bp, Artificial Sequence
  Oligonucleotide for detection of SNP TSC0008943
gggtaggagggag

SEQ ID NO: 29826 - DNA, 13 bp, Artificial Sequence
  Oligonucleotide for detection of SNP TSC0008943
ctccctcctaccc

SEQ ID NO: 29827 - DNA, 13 bp, Artificial Sequence
  Oligonucleotide for detection of SNP TSC0008943
gggtagtagggag

SEQ ID NO: 29828 - DNA, 13 bp, Artificial Sequence
  Oligonucleotide for detection of SNP TSC0008943
ctccctactaccc

SEQ ID NO: 29829 - DNA, 13 bp, Artificial Sequence
  Oligonucleotide for detection of SNP TSC0008944
ttattttttattg

SEQ ID NO: 29830 - DNA, 13 bp, Artificial Sequence
  Oligonucleotide for detection of SNP TSC0008944
caataaaaaataa

SEQ ID NO: 29831 - DNA, 13 bp, Artificial Sequence
  Oligonucleotide for detection of SNP TSC0008944
ttatttgttattg

SEQ ID NO: 29832 - DNA, 13 bp, Artificial Sequence
  Oligonucleotide for detection of SNP TSC0008944
caataacaaataa

SEQ ID NO: 29833 - DNA, 13 bp, Artificial Sequence
  Oligonucleotide for detection of SNP TSC0008944
ttattcgttattg

SEQ ID NO: 29834 - DNA, 13 bp, Artificial Sequence
  Oligonucleotide for detection of SNP TSC0008944
caataacgaataa

SEQ ID NO: 29835 - DNA, 13 bp, Artificial Sequence
  Oligonucleotide for detection of SNP TSC0008944
taatgaggggtga

SEQ ID NO: 29836 - DNA, 13 bp, Artificial Sequence
  Oligonucleotide for detection of SNP TSC0008944
tcacccctcatta

SEQ ID NO: 29837 - DNA, 13 bp, Artificial Sequence
  Oligonucleotide for detection of SNP TSC0008944
taatgatgggtga

SEQ ID NO: 29838 - DNA, 13 bp, Artificial Sequence
  Oligonucleotide for detection of SNP TSC0008944
tcacccatcatta

SEQ ID NO: 29839 - DNA, 13 bp, Artificial Sequence
  Oligonucleotide for detection of SNP TSC0008944
taatgacgggtga

SEQ ID NO: 29840 - DNA, 13 bp, Artificial Sequence
  Oligonucleotide for detection of SNP TSC0008944
tcacccgtcatta

SEQ ID NO: 29841 - DNA, 13 bp, Artificial Sequence
  Oligonucleotide for detection of SNP TSC0008945
gggtgtaattggg

SEQ ID NO: 29842 - DNA, 13 bp, Artificial Sequence
  Oligonucleotide for detection of SNP TSC0008945
cccaattacaccc

SEQ ID NO: 29843 - DNA, 13 bp, Artificial Sequence
  Oligonucleotide for detection of SNP TSC0008945
gggtgtgattggg

SEQ ID NO: 29844 - DNA, 13 bp, Artificial Sequence
  Oligonucleotide for detection of SNP TSC0008945
cccaatcacaccc

SEQ ID NO: 29845 - DNA, 13 bp, Artificial Sequence
  Oligonucleotide for detection of SNP TSC0008955
gttttgtggttta

SEQ ID NO: 29846 - DNA, 13 bp, Artificial Sequence
  Oligonucleotide for detection of SNP TSC0008955
taaaccacaaaac

SEQ ID NO: 29847 - DNA, 13 bp, Artificial Sequence
  Oligonucleotide for detection of SNP TSC0008955
gttttgcggttta

SEQ ID NO: 29848 - DNA, 13 bp, Artificial Sequence
  Oligonucleotide for detection of SNP TSC0008955
taaaccgcaaaac

SEQ ID NO: 29849 - DNA, 13 bp, Artificial Sequence
  Oligonucleotide for detection of SNP TSC0008955
tgagttgtaaaay

SEQ ID NO: 29850 - DNA, 13 bp, Artificial Sequence
  Oligonucleotide for detection of SNP TSC0008955
rttttacaactca

SEQ ID NO: 29851 - DNA, 13 bp, Artificial Sequence
  Oligonucleotide for detection of SNP TSC0008955
tgagttataaaay

SEQ ID NO: 29852 - DNA, 13 bp, Artificial Sequence
  Oligonucleotide for detection of SNP TSC0008955
rttttataactca

SEQ ID NO: 29853 - DNA, 13 bp, Artificial Sequence
  Oligonucleotide for detection of SNP TSC0008955
tgagtcgtaaaay

SEQ ID NO: 29854 - DNA, 13 bp, Artificial Sequence
  Oligonucleotide for detection of SNP TSC0008955
rttttacgactca

SEQ ID NO: 29855 - DNA, 13 bp, Artificial Sequence
  Oligonucleotide for detection of SNP TSC0008956
gagtttatatagy

SEQ ID NO: 29856 - DNA, 13 bp, Artificial Sequence
  Oligonucleotide for detection of SNP TSC0008956
rctatataaactc

SEQ ID NO: 29857 - DNA, 13 bp, Artificial Sequence
  Oligonucleotide for detection of SNP TSC0008956
gagtttgtatagy

SEQ ID NO: 29858 - DNA, 13 bp, Artificial Sequence
  Oligonucleotide for detection of SNP TSC0008956
rctatacaaactc

SEQ ID NO: 29859 - DNA, 13 bp, Artificial Sequence
  Oligonucleotide for detection of SNP TSC0008960
atttaggttaaty

SEQ ID NO: 29860 - DNA, 13 bp, Artificial Sequence
  Oligonucleotide for detection of SNP TSC0008960
rattaacctaaat

SEQ ID NO: 29861 - DNA, 13 bp, Artificial Sequence
  Oligonucleotide for detection of SNP TSC0008960
atttagattaaty

SEQ ID NO: 29862 - DNA, 13 bp, Artificial Sequence
  Oligonucleotide for detection of SNP TSC0008960
rattaatctaaat

SEQ ID NO: 29863 - DNA, 13 bp, Artificial Sequence
  Oligonucleotide for detection of SNP TSC0008968
ttgtaaatttttt

SEQ ID NO: 29864 - DNA, 13 bp, Artificial Sequence
  Oligonucleotide for detection of SNP TSC0008968
aaaaaatttacaa

SEQ ID NO: 29865 - DNA, 13 bp, Artificial Sequence
  Oligonucleotide for detection of SNP TSC0008970
gttatagtgttga

SEQ ID NO: 29866 - DNA, 13 bp, Artificial Sequence
  Oligonucleotide for detection of SNP TSC0008970
tcaacactataac

SEQ ID NO: 29867 - DNA, 13 bp, Artificial Sequence
  Oligonucleotide for detection of SNP TSC0008970
gttataatgttga

SEQ ID NO: 29868 - DNA, 13 bp, Artificial Sequence
  Oligonucleotide for detection of SNP TSC0008970
tcaacattataac

SEQ ID NO: 29869 - DNA, 13 bp, Artificial Sequence
  Oligonucleotide for detection of SNP TSC0008971
tgttgtatttttt

SEQ ID NO: 29870 - DNA, 13 bp, Artificial Sequence
  Oligonucleotide for detection of SNP TSC0008971
aaaaaatacaaca

SEQ ID NO: 29871 - DNA, 13 bp, Artificial Sequence
  Oligonucleotide for detection of SNP TSC0008971
tgttgtgtttttt

SEQ ID NO: 29872 - DNA, 13 bp, Artificial Sequence
  Oligonucleotide for detection of SNP TSC0008971
aaaaaacacaaca

SEQ ID NO: 29873 - DNA, 13 bp, Artificial Sequence
  Oligonucleotide for detection of SNP TSC0008972
tgttagagattay

SEQ ID NO: 29874 - DNA, 13 bp, Artificial Sequence
  Oligonucleotide for detection of SNP TSC0008972
rtaatctctaaca

SEQ ID NO: 29875 - DNA, 13 bp, Artificial Sequence
  Oligonucleotide for detection of SNP TSC0008972
tgttagggattay

SEQ ID NO: 29876 - DNA, 13 bp, Artificial Sequence
  Oligonucleotide for detection of SNP TSC0008972
rtaatccctaaca

SEQ ID NO: 29877 - DNA, 13 bp, Artificial Sequence
  Oligonucleotide for detection of SNP TSC0008974
gatggtatggtty

SEQ ID NO: 29878 - DNA, 13 bp, Artificial Sequence
  Oligonucleotide for detection of SNP TSC0008974
raaccataccatc

SEQ ID NO: 29879 - DNA, 13 bp, Artificial Sequence
  Oligonucleotide for detection of SNP TSC0008974
gatggtgtggtty

SEQ ID NO: 29880 - DNA, 13 bp, Artificial Sequence
  Oligonucleotide for detection of SNP TSC0008974
raaccacaccatc

SEQ ID NO: 29881 - DNA, 13 bp, Artificial Sequence
  Oligonucleotide for detection of SNP TSC0008974
gatggcgtggtty

SEQ ID NO: 29882 - DNA, 13 bp, Artificial Sequence
  Oligonucleotide for detection of SNP TSC0008974
raaccacgccatc

SEQ ID NO: 29883 - DNA, 13 bp, Artificial Sequence
  Oligonucleotide for detection of SNP TSC0008974
gagttatgttaty

SEQ ID NO: 29884 - DNA, 13 bp, Artificial Sequence
  Oligonucleotide for detection of SNP TSC0008974
rataacataactc

SEQ ID NO: 29885 - DNA, 13 bp, Artificial Sequence
  Oligonucleotide for detection of SNP TSC0008974
gagttacgttaty

SEQ ID NO: 29886 - DNA, 13 bp, Artificial Sequence
  Oligonucleotide for detection of SNP TSC0008974
rataacgtaactc

SEQ ID NO: 29887 - DNA, 13 bp, Artificial Sequence
  Oligonucleotide for detection of SNP TSC0008975
ggaaagagtttta

SEQ ID NO: 29888 - DNA, 13 bp, Artificial Sequence
  Oligonucleotide for detection of SNP TSC0008975
taaaactctttcc

SEQ ID NO: 29889 - DNA, 13 bp, Artificial Sequence
  Oligonucleotide for detection of SNP TSC0008975
ggaaagggtttta

SEQ ID NO: 29890 - DNA, 13 bp, Artificial Sequence
  Oligonucleotide for detection of SNP TSC0008975
taaaaccctttcc

SEQ ID NO: 29891 - DNA, 13 bp, Artificial Sequence
  Oligonucleotide for detection of SNP TSC0008981
tggtaaagtagay

SEQ ID NO: 29892 - DNA, 13 bp, Artificial Sequence
  Oligonucleotide for detection of SNP TSC0008981
rtctactttacca

SEQ ID NO: 29893 - DNA, 13 bp, Artificial Sequence
  Oligonucleotide for detection of SNP TSC0008981
tggtaaggtagay

SEQ ID NO: 29894 - DNA, 13 bp, Artificial Sequence
  Oligonucleotide for detection of SNP TSC0008981
rtctaccttacca

SEQ ID NO: 29895 - DNA, 13 bp, Artificial Sequence
  Oligonucleotide for detection of SNP TSC0008989
taagtaataaaaa

SEQ ID NO: 29896 - DNA, 13 bp, Artificial Sequence
  Oligonucleotide for detection of SNP TSC0008989
tttttattactta

SEQ ID NO: 29897 - DNA, 13 bp, Artificial Sequence
  Oligonucleotide for detection of SNP TSC0008989
taagtagtaaaaa

SEQ ID NO: 29898 - DNA, 13 bp, Artificial Sequence
  Oligonucleotide for detection of SNP TSC0008989
tttttactactta

SEQ ID NO: 29899 - DNA, 13 bp, Artificial Sequence
  Oligonucleotide for detection of SNP TSC0008991
tttgggggtttty

SEQ ID NO: 29900 - DNA, 13 bp, Artificial Sequence
  Oligonucleotide for detection of SNP TSC0008991
raaaacccccaaa

SEQ ID NO: 29901 - DNA, 13 bp, Artificial Sequence
  Oligonucleotide for detection of SNP TSC0008991
tttgggagtttty

SEQ ID NO: 29902 - DNA, 13 bp, Artificial Sequence
  Oligonucleotide for detection of SNP TSC0008991
raaaactcccaaa

SEQ ID NO: 29903 - DNA, 13 bp, Artificial Sequence
  Oligonucleotide for detection of SNP TSC0008991
ttcgggggtttty

SEQ ID NO: 29904 - DNA, 13 bp, Artificial Sequence
  Oligonucleotide for detection of SNP TSC0008991
raaaacccccgaa

SEQ ID NO: 29905 - DNA, 13 bp, Artificial Sequence
  Oligonucleotide for detection of SNP TSC0008991
ttcgggagtttty

SEQ ID NO: 29906 - DNA, 13 bp, Artificial Sequence
  Oligonucleotide for detection of SNP TSC0008991
raaaactcccgaa

SEQ ID NO: 29907 - DNA, 13 bp, Artificial Sequence
  Oligonucleotide for detection of SNP TSC0009006
taaataaagggga

SEQ ID NO: 29908 - DNA, 13 bp, Artificial Sequence
  Oligonucleotide for detection of SNP TSC0009006
tcccctttattta

SEQ ID NO: 29909 - DNA, 13 bp, Artificial Sequence
  Oligonucleotide for detection of SNP TSC0009006
taaatatagggga

SEQ ID NO: 29910 - DNA, 13 bp, Artificial Sequence
  Oligonucleotide for detection of SNP TSC0009006
tcccctatattta

SEQ ID NO: 29911 - DNA, 13 bp, Artificial Sequence
  Oligonucleotide for detection of SNP TSC0009007
taaaataaaaatg

SEQ ID NO: 29912 - DNA, 13 bp, Artificial Sequence
  Oligonucleotide for detection of SNP TSC0009007
catttttatttta

SEQ ID NO: 29913 - DNA, 13 bp, Artificial Sequence
  Oligonucleotide for detection of SNP TSC0009007
taaaattaaaatg

SEQ ID NO: 29914 - DNA, 13 bp, Artificial Sequence
  Oligonucleotide for detection of SNP TSC0009007
cattttaatttta

SEQ ID NO: 29915 - DNA, 13 bp, Artificial Sequence
  Oligonucleotide for detection of SNP TSC0009007
tattttaatttta

SEQ ID NO: 29916 - DNA, 13 bp, Artificial Sequence
  Oligonucleotide for detection of SNP TSC0009007
taaaattaaaata

SEQ ID NO: 29917 - DNA, 13 bp, Artificial Sequence
  Oligonucleotide for detection of SNP TSC0009008
ttggttgtattgg

SEQ ID NO: 29918 - DNA, 13 bp, Artificial Sequence
  Oligonucleotide for detection of SNP TSC0009008
ccaatacaaccaa

SEQ ID NO: 29919 - DNA, 13 bp, Artificial Sequence
  Oligonucleotide for detection of SNP TSC0009008
ttggttttattgg

SEQ ID NO: 29920 - DNA, 13 bp, Artificial Sequence
  Oligonucleotide for detection of SNP TSC0009008
ccaataaaaccaa

SEQ ID NO: 29921 - DNA, 13 bp, Artificial Sequence
  Oligonucleotide for detection of SNP TSC0009008
ttggtcgtattgg

SEQ ID NO: 29922 - DNA, 13 bp, Artificial Sequence
  Oligonucleotide for detection of SNP TSC0009008
ccaatacgaccaa

SEQ ID NO: 29923 - DNA, 13 bp, Artificial Sequence
  Oligonucleotide for detection of SNP TSC0009008
ttaatatggttag

SEQ ID NO: 29924 - DNA, 13 bp, Artificial Sequence
  Oligonucleotide for detection of SNP TSC0009008
ctaaccatattaa

SEQ ID NO: 29925 - DNA, 13 bp, Artificial Sequence
  Oligonucleotide for detection of SNP TSC0009008
ttaataaggttag

SEQ ID NO: 29926 - DNA, 13 bp, Artificial Sequence
  Oligonucleotide for detection of SNP TSC0009008
ctaaccttattaa

SEQ ID NO: 29927 - DNA, 13 bp, Artificial Sequence
  Oligonucleotide for detection of SNP TSC0009008
ttaatacggttag

SEQ ID NO: 29928 - DNA, 13 bp, Artificial Sequence
  Oligonucleotide for detection of SNP TSC0009008
ctaaccgtattaa

SEQ ID NO: 29929 - DNA, 13 bp, Artificial Sequence
  Oligonucleotide for detection of SNP TSC0009009
atgataatgtgag

SEQ ID NO: 29930 - DNA, 13 bp, Artificial Sequence
  Oligonucleotide for detection of SNP TSC0009009
ctcacattatcat

SEQ ID NO: 29931 - DNA, 13 bp, Artificial Sequence
  Oligonucleotide for detection of SNP TSC0009009
atgatagtgtgag

SEQ ID NO: 29932 - DNA, 13 bp, Artificial Sequence
  Oligonucleotide for detection of SNP TSC0009009
ctcacactatcat

SEQ ID NO: 29933 - DNA, 13 bp, Artificial Sequence
  Oligonucleotide for detection of SNP TSC0009014
tttttaaatttty

SEQ ID NO: 29934 - DNA, 13 bp, Artificial Sequence
  Oligonucleotide for detection of SNP TSC0009014
raaaatttaaaaa

SEQ ID NO: 29935 - DNA, 13 bp, Artificial Sequence
  Oligonucleotide for detection of SNP TSC0009018
ttttgaatagata

SEQ ID NO: 29936 - DNA, 13 bp, Artificial Sequence
  Oligonucleotide for detection of SNP TSC0009018
tatctattcaaaa

SEQ ID NO: 29937 - DNA, 13 bp, Artificial Sequence
  Oligonucleotide for detection of SNP TSC0009018
ttttgattagata

SEQ ID NO: 29938 - DNA, 13 bp, Artificial Sequence
  Oligonucleotide for detection of SNP TSC0009018
tatctaatcaaaa

SEQ ID NO: 29939 - DNA, 13 bp, Artificial Sequence
  Oligonucleotide for detection of SNP TSC0009018
tatttgtttaagg

SEQ ID NO: 29940 - DNA, 13 bp, Artificial Sequence
  Oligonucleotide for detection of SNP TSC0009018
ccttaaacaaata

SEQ ID NO: 29941 - DNA, 13 bp, Artificial Sequence
  Oligonucleotide for detection of SNP TSC0009018
tatttggttaagg

SEQ ID NO: 29942 - DNA, 13 bp, Artificial Sequence
  Oligonucleotide for detection of SNP TSC0009018
ccttaaccaaata

SEQ ID NO: 29943 - DNA, 13 bp, Artificial Sequence
  Oligonucleotide for detection of SNP TSC0009019
gttaaaatttttg

SEQ ID NO: 29944 - DNA, 13 bp, Artificial Sequence
  Oligonucleotide for detection of SNP TSC0009019
caaaaattttaac

SEQ ID NO: 29945 - DNA, 13 bp, Artificial Sequence
  Oligonucleotide for detection of SNP TSC0009019
gttaaattttttg

SEQ ID NO: 29946 - DNA, 13 bp, Artificial Sequence
  Oligonucleotide for detection of SNP TSC0009019
caaaaaatttaac

SEQ ID NO: 29947 - DNA, 13 bp, Artificial Sequence
  Oligonucleotide for detection of SNP TSC0009019
taagggttttggy

SEQ ID NO: 29948 - DNA, 13 bp, Artificial Sequence
  Oligonucleotide for detection of SNP TSC0009019
rccaaaaccctta

SEQ ID NO: 29949 - DNA, 13 bp, Artificial Sequence
  Oligonucleotide for detection of SNP TSC0009019
taaggggtttggy

SEQ ID NO: 29950 - DNA, 13 bp, Artificial Sequence
  Oligonucleotide for detection of SNP TSC0009019
rccaaacccctta

SEQ ID NO: 29951 - DNA, 13 bp, Artificial Sequence
  Oligonucleotide for detection of SNP TSC0009020
aaagattgttttt

SEQ ID NO: 29952 - DNA, 13 bp, Artificial Sequence
  Oligonucleotide for detection of SNP TSC0009020
aaaaacaatcttt

SEQ ID NO: 29953 - DNA, 13 bp, Artificial Sequence
  Oligonucleotide for detection of SNP TSC0009020
aaagatcgttttt

SEQ ID NO: 29954 - DNA, 13 bp, Artificial Sequence
  Oligonucleotide for detection of SNP TSC0009020
aaaaacgatcttt

SEQ ID NO: 29955 - DNA, 13 bp, Artificial Sequence
  Oligonucleotide for detection of SNP TSC0009020
aaagatgattttt

SEQ ID NO: 29956 - DNA, 13 bp, Artificial Sequence
  Oligonucleotide for detection of SNP TSC0009020
aaaaatcatcttt

SEQ ID NO: 29957 - DNA, 13 bp, Artificial Sequence
  Oligonucleotide for detection of SNP TSC0009020
aaagataattttt

SEQ ID NO: 29958 - DNA, 13 bp, Artificial Sequence
  Oligonucleotide for detection of SNP TSC0009020
aaaaattatcttt

SEQ ID NO: 29959 - DNA, 13 bp, Artificial Sequence
  Oligonucleotide for detection of SNP TSC0009020
aaagacgattttt

SEQ ID NO: 29960 - DNA, 13 bp, Artificial Sequence
  Oligonucleotide for detection of SNP TSC0009020
aaaaatcgtcttt

SEQ ID NO: 29961 - DNA, 13 bp, Artificial Sequence
  Oligonucleotide for detection of SNP TSC0009021
ttagttattttaa

SEQ ID NO: 29962 - DNA, 13 bp, Artificial Sequence
  Oligonucleotide for detection of SNP TSC0009021
ttaaaataactaa

SEQ ID NO: 29963 - DNA, 13 bp, Artificial Sequence
  Oligonucleotide for detection of SNP TSC0009021
ttagttgttttaa

SEQ ID NO: 29964 - DNA, 13 bp, Artificial Sequence
  Oligonucleotide for detection of SNP TSC0009021
ttaaaacaactaa

SEQ ID NO: 29965 - DNA, 13 bp, Artificial Sequence
  Oligonucleotide for detection of SNP TSC0009021
ttagtcgttttaa

SEQ ID NO: 29966 - DNA, 13 bp, Artificial Sequence
  Oligonucleotide for detection of SNP TSC0009021
ttaaaacgactaa

SEQ ID NO: 29967 - DNA, 13 bp, Artificial Sequence
  Oligonucleotide for detection of SNP TSC0009021
ttggaatggttga

SEQ ID NO: 29968 - DNA, 13 bp, Artificial Sequence
  Oligonucleotide for detection of SNP TSC0009021
tcaaccattccaa

SEQ ID NO: 29969 - DNA, 13 bp, Artificial Sequence
  Oligonucleotide for detection of SNP TSC0009021
ttggaacggttga

SEQ ID NO: 29970 - DNA, 13 bp, Artificial Sequence
  Oligonucleotide for detection of SNP TSC0009021
tcaaccgttccaa

SEQ ID NO: 29971 - DNA, 13 bp, Artificial Sequence
  Oligonucleotide for detection of SNP TSC0009025
tattatgttaaat

SEQ ID NO: 29972 - DNA, 13 bp, Artificial Sequence
  Oligonucleotide for detection of SNP TSC0009025
atttaacataata

SEQ ID NO: 29973 - DNA, 13 bp, Artificial Sequence
  Oligonucleotide for detection of SNP TSC0009025
tattatattaaat

SEQ ID NO: 29974 - DNA, 13 bp, Artificial Sequence
  Oligonucleotide for detection of SNP TSC0009025
atttaatataata

SEQ ID NO: 29975 - DNA, 13 bp, Artificial Sequence
  Oligonucleotide for detection of SNP TSC0009026
tttattaaaattt

SEQ ID NO: 29976 - DNA, 13 bp, Artificial Sequence
  Oligonucleotide for detection of SNP TSC0009026
aaattttaataaa

SEQ ID NO: 29977 - DNA, 13 bp, Artificial Sequence
  Oligonucleotide for detection of SNP TSC0009026
tttatttaaattt

SEQ ID NO: 29978 - DNA, 13 bp, Artificial Sequence
  Oligonucleotide for detection of SNP TSC0009026
aaatttaaataaa

SEQ ID NO: 29979 - DNA, 13 bp, Artificial Sequence
  Oligonucleotide for detection of SNP TSC0009026
agattttggtggg

SEQ ID NO: 29980 - DNA, 13 bp, Artificial Sequence
  Oligonucleotide for detection of SNP TSC0009026
cccaccaaaatct

SEQ ID NO: 29981 - DNA, 13 bp, Artificial Sequence
  Oligonucleotide for detection of SNP TSC0009026
agatttgggtggg

SEQ ID NO: 29982 - DNA, 13 bp, Artificial Sequence
  Oligonucleotide for detection of SNP TSC0009026
cccacccaaatct

SEQ ID NO: 29983 - DNA, 13 bp, Artificial Sequence
  Oligonucleotide for detection of SNP TSC0009027
aattataggaata

SEQ ID NO: 29984 - DNA, 13 bp, Artificial Sequence
  Oligonucleotide for detection of SNP TSC0009027
tattcctataatt

SEQ ID NO: 29985 - DNA, 13 bp, Artificial Sequence
  Oligonucleotide for detection of SNP TSC0009027
aattatgggaata

SEQ ID NO: 29986 - DNA, 13 bp, Artificial Sequence
  Oligonucleotide for detection of SNP TSC0009027
tattcccataatt

SEQ ID NO: 29987 - DNA, 13 bp, Artificial Sequence
  Oligonucleotide for detection of SNP TSC0009028
attaagatgtgta

SEQ ID NO: 29988 - DNA, 13 bp, Artificial Sequence
  Oligonucleotide for detection of SNP TSC0009028
tacacatcttaat

SEQ ID NO: 29989 - DNA, 13 bp, Artificial Sequence
  Oligonucleotide for detection of SNP TSC0009028
attaaggtgtgta

SEQ ID NO: 29990 - DNA, 13 bp, Artificial Sequence
  Oligonucleotide for detection of SNP TSC0009028
tacacaccttaat

SEQ ID NO: 29991 - DNA, 13 bp, Artificial Sequence
  Oligonucleotide for detection of SNP TSC0009029
taaggaaagtgat

SEQ ID NO: 29992 - DNA, 13 bp, Artificial Sequence
  Oligonucleotide for detection of SNP TSC0009029
atcactttcctta

SEQ ID NO: 29993 - DNA, 13 bp, Artificial Sequence
  Oligonucleotide for detection of SNP TSC0009029
taaggatagtgat

SEQ ID NO: 29994 - DNA, 13 bp, Artificial Sequence
  Oligonucleotide for detection of SNP TSC0009029
atcactatcctta

SEQ ID NO: 29995 - DNA, 13 bp, Artificial Sequence
  Oligonucleotide for detection of SNP TSC0009029
attattttttttg

SEQ ID NO: 29996 - DNA, 13 bp, Artificial Sequence
  Oligonucleotide for detection of SNP TSC0009029
caaaaaaaataat

SEQ ID NO: 29997 - DNA, 13 bp, Artificial Sequence
  Oligonucleotide for detection of SNP TSC0009029
attattgtttttg

SEQ ID NO: 29998 - DNA, 13 bp, Artificial Sequence
  Oligonucleotide for detection of SNP TSC0009029
caaaaacaataat

SEQ ID NO: 29999 - DNA, 13 bp, Artificial Sequence
  Oligonucleotide for detection of SNP TSC0009034
tgtttagaaggga

SEQ ID NO: 30000 - DNA, 13 bp, Artificial Sequence
  Oligonucleotide for detection of SNP TSC0009034
tcccttctaaaca

SEQ ID NO: 30001 - DNA, 13 bp, Artificial Sequence
  Oligonucleotide for detection of SNP TSC0009034
tgtttaaaaggga

SEQ ID NO: 30002 - DNA, 13 bp, Artificial Sequence
  Oligonucleotide for detection of SNP TSC0009034
tcccttttaaaca

SEQ ID NO: 30003 - DNA, 13 bp, Artificial Sequence
  Oligonucleotide for detection of SNP TSC0009039
ttttatgtttaty

SEQ ID NO: 30004 - DNA, 13 bp, Artificial Sequence
  Oligonucleotide for detection of SNP TSC0009039
rataaacataaaa

SEQ ID NO: 30005 - DNA, 13 bp, Artificial Sequence
  Oligonucleotide for detection of SNP TSC0009039
gatgagtatgagg

SEQ ID NO: 30006 - DNA, 13 bp, Artificial Sequence
  Oligonucleotide for detection of SNP TSC0009039
cctcatactcatc

SEQ ID NO: 30007 - DNA, 13 bp, Artificial Sequence
  Oligonucleotide for detection of SNP TSC0009039
gatgagaatgagg

SEQ ID NO: 30008 - DNA, 13 bp, Artificial Sequence
  Oligonucleotide for detection of SNP TSC0009039
cctcattctcatc

SEQ ID NO: 30009 - DNA, 13 bp, Artificial Sequence
  Oligonucleotide for detection of SNP TSC0009040
gtgtagttggtay

SEQ ID NO: 30010 - DNA, 13 bp, Artificial Sequence
  Oligonucleotide for detection of SNP TSC0009040
rtaccaactacac

SEQ ID NO: 30011 - DNA, 13 bp, Artificial Sequence
  Oligonucleotide for detection of SNP TSC0009040
gtgtaggtggtay

SEQ ID NO: 30012 - DNA, 13 bp, Artificial Sequence
  Oligonucleotide for detection of SNP TSC0009040
rtaccacctacac

SEQ ID NO: 30013 - DNA, 13 bp, Artificial Sequence
  Oligonucleotide for detection of SNP TSC0009040
gtgttagttgtay

SEQ ID NO: 30014 - DNA, 13 bp, Artificial Sequence
  Oligonucleotide for detection of SNP TSC0009040
rtacaactaacac

SEQ ID NO: 30015 - DNA, 13 bp, Artificial Sequence
  Oligonucleotide for detection of SNP TSC0009040
gtgttatttgtay

SEQ ID NO: 30016 - DNA, 13 bp, Artificial Sequence
  Oligonucleotide for detection of SNP TSC0009040
rtacaaataacac

SEQ ID NO: 30017 - DNA, 13 bp, Artificial Sequence
  Oligonucleotide for detection of SNP TSC0009041
gtgaggtgtgatg

SEQ ID NO: 30018 - DNA, 13 bp, Artificial Sequence
  Oligonucleotide for detection of SNP TSC0009041
catcacacctcac

SEQ ID NO: 30019 - DNA, 13 bp, Artificial Sequence
  Oligonucleotide for detection of SNP TSC0009041
gtgaggggtgatg

SEQ ID NO: 30020 - DNA, 13 bp, Artificial Sequence
  Oligonucleotide for detection of SNP TSC0009041
catcacccctcac

SEQ ID NO: 30021 - DNA, 13 bp, Artificial Sequence
  Oligonucleotide for detection of SNP TSC0009041
gtgaggcgtgatg

SEQ ID NO: 30022 - DNA, 13 bp, Artificial Sequence
  Oligonucleotide for detection of SNP TSC0009041
catcacgcctcac

SEQ ID NO: 30023 - DNA, 13 bp, Artificial Sequence
  Oligonucleotide for detection of SNP TSC0009041
gtgaggggcgatg

SEQ ID NO: 30024 - DNA, 13 bp, Artificial Sequence
  Oligonucleotide for detection of SNP TSC0009041
catcgcccctcac

SEQ ID NO: 30025 - DNA, 13 bp, Artificial Sequence
  Oligonucleotide for detection of SNP TSC0009041
gtgaggtgcgatg

SEQ ID NO: 30026 - DNA, 13 bp, Artificial Sequence
  Oligonucleotide for detection of SNP TSC0009041
catcgcacctcac

SEQ ID NO: 30027 - DNA, 13 bp, Artificial Sequence
  Oligonucleotide for detection of SNP TSC0009041
gtgaggcgcgatg

SEQ ID NO: 30028 - DNA, 13 bp, Artificial Sequence
  Oligonucleotide for detection of SNP TSC0009041
catcgcgcctcac

SEQ ID NO: 30029 - DNA, 13 bp, Artificial Sequence
  Oligonucleotide for detection of SNP TSC0009041
tattgtgttttay

SEQ ID NO: 30030 - DNA, 13 bp, Artificial Sequence
  Oligonucleotide for detection of SNP TSC0009041
rtaaaacacaata

SEQ ID NO: 30031 - DNA, 13 bp, Artificial Sequence
  Oligonucleotide for detection of SNP TSC0009041
tattgttttttay

SEQ ID NO: 30032 - DNA, 13 bp, Artificial Sequence
  Oligonucleotide for detection of SNP TSC0009041
rtaaaaaacaata

SEQ ID NO: 30033 - DNA, 13 bp, Artificial Sequence
  Oligonucleotide for detection of SNP TSC0009041
tatcgtgttttay

SEQ ID NO: 30034 - DNA, 13 bp, Artificial Sequence
  Oligonucleotide for detection of SNP TSC0009041
rtaaaacacgata

SEQ ID NO: 30035 - DNA, 13 bp, Artificial Sequence
  Oligonucleotide for detection of SNP TSC0009041
tatcgttttttay

SEQ ID NO: 30036 - DNA, 13 bp, Artificial Sequence
  Oligonucleotide for detection of SNP TSC0009041
rtaaaaaacgata

SEQ ID NO: 30037 - DNA, 13 bp, Artificial Sequence
  Oligonucleotide for detection of SNP TSC0009041
tattgcgttttay

SEQ ID NO: 30038 - DNA, 13 bp, Artificial Sequence
  Oligonucleotide for detection of SNP TSC0009041
rtaaaacgcaata

SEQ ID NO: 30039 - DNA, 13 bp, Artificial Sequence
  Oligonucleotide for detection of SNP TSC0009041
tatcgcgttttay

SEQ ID NO: 30040 - DNA, 13 bp, Artificial Sequence
  Oligonucleotide for detection of SNP TSC0009041
rtaaaacgcgata

SEQ ID NO: 30041 - DNA, 13 bp, Artificial Sequence
  Oligonucleotide for detection of SNP TSC0009043
aattatagttatg

SEQ ID NO: 30042 - DNA, 13 bp, Artificial Sequence
  Oligonucleotide for detection of SNP TSC0009043
cataactataatt

SEQ ID NO: 30043 - DNA, 13 bp, Artificial Sequence
  Oligonucleotide for detection of SNP TSC0009043
aattatggttatg

SEQ ID NO: 30044 - DNA, 13 bp, Artificial Sequence
  Oligonucleotide for detection of SNP TSC0009043
cataaccataatt

SEQ ID NO: 30045 - DNA, 13 bp, Artificial Sequence
  Oligonucleotide for detection of SNP TSC0009043
aattacggttatg

SEQ ID NO: 30046 - DNA, 13 bp, Artificial Sequence
  Oligonucleotide for detection of SNP TSC0009043
cataaccgtaatt

SEQ ID NO: 30047 - DNA, 13 bp, Artificial Sequence
  Oligonucleotide for detection of SNP TSC0009043
tatgattgtggtt

SEQ ID NO: 30048 - DNA, 13 bp, Artificial Sequence
  Oligonucleotide for detection of SNP TSC0009043
aaccacaatcata

SEQ ID NO: 30049 - DNA, 13 bp, Artificial Sequence
  Oligonucleotide for detection of SNP TSC0009043
tatgatcgtggtt

SEQ ID NO: 30050 - DNA, 13 bp, Artificial Sequence
  Oligonucleotide for detection of SNP TSC0009043
aaccacgatcata

SEQ ID NO: 30051 - DNA, 13 bp, Artificial Sequence
  Oligonucleotide for detection of SNP TSC0009044
agttatatgggag

SEQ ID NO: 30052 - DNA, 13 bp, Artificial Sequence
  Oligonucleotide for detection of SNP TSC0009044
ctcccatataact

SEQ ID NO: 30053 - DNA, 13 bp, Artificial Sequence
  Oligonucleotide for detection of SNP TSC0009044
agttatttgggag

SEQ ID NO: 30054 - DNA, 13 bp, Artificial Sequence
  Oligonucleotide for detection of SNP TSC0009044
ctcccaaataact

SEQ ID NO: 30055 - DNA, 13 bp, Artificial Sequence
  Oligonucleotide for detection of SNP TSC0009044
tttttatgtggtt

SEQ ID NO: 30056 - DNA, 13 bp, Artificial Sequence
  Oligonucleotide for detection of SNP TSC0009044
aaccacataaaaa

SEQ ID NO: 30057 - DNA, 13 bp, Artificial Sequence
  Oligonucleotide for detection of SNP TSC0009044
tttttaagtggtt

SEQ ID NO: 30058 - DNA, 13 bp, Artificial Sequence
  Oligonucleotide for detection of SNP TSC0009044
aaccacttaaaaa

SEQ ID NO: 30059 - DNA, 13 bp, Artificial Sequence
  Oligonucleotide for detection of SNP TSC0009055
aataatgtgaaaa

SEQ ID NO: 30060 - DNA, 13 bp, Artificial Sequence
  Oligonucleotide for detection of SNP TSC0009055
ttttcacattatt

SEQ ID NO: 30061 - DNA, 13 bp, Artificial Sequence
  Oligonucleotide for detection of SNP TSC0009058
gataataagttta

SEQ ID NO: 30062 - DNA, 13 bp, Artificial Sequence
  Oligonucleotide for detection of SNP TSC0009058
taaacttattatc

SEQ ID NO: 30063 - DNA, 13 bp, Artificial Sequence
  Oligonucleotide for detection of SNP TSC0009058
gataatgagttta

SEQ ID NO: 30064 - DNA, 13 bp, Artificial Sequence
  Oligonucleotide for detection of SNP TSC0009058
taaactcattatc

SEQ ID NO: 30065 - DNA, 13 bp, Artificial Sequence
  Oligonucleotide for detection of SNP TSC0009058
gataacgagttta

SEQ ID NO: 30066 - DNA, 13 bp, Artificial Sequence
  Oligonucleotide for detection of SNP TSC0009058
taaactcgttatc

SEQ ID NO: 30067 - DNA, 13 bp, Artificial Sequence
  Oligonucleotide for detection of SNP TSC0009058
tgagtttgttaty

SEQ ID NO: 30068 - DNA, 13 bp, Artificial Sequence
  Oligonucleotide for detection of SNP TSC0009058
rataacaaactca

SEQ ID NO: 30069 - DNA, 13 bp, Artificial Sequence
  Oligonucleotide for detection of SNP TSC0009058
tgagttcgttaty

SEQ ID NO: 30070 - DNA, 13 bp, Artificial Sequence
  Oligonucleotide for detection of SNP TSC0009058
rataacgaactca

SEQ ID NO: 30071 - DNA, 13 bp, Artificial Sequence
  Oligonucleotide for detection of SNP TSC0009077
aagggtgggataa

SEQ ID NO: 30072 - DNA, 13 bp, Artificial Sequence
  Oligonucleotide for detection of SNP TSC0009077
ttatcccaccctt

SEQ ID NO: 30073 - DNA, 13 bp, Artificial Sequence
  Oligonucleotide for detection of SNP TSC0009077
aagggtaggataa

SEQ ID NO: 30074 - DNA, 13 bp, Artificial Sequence
  Oligonucleotide for detection of SNP TSC0009077
ttatcctaccctt

SEQ ID NO: 30075 - DNA, 13 bp, Artificial Sequence
  Oligonucleotide for detection of SNP TSC0009081
atttatagaagta

SEQ ID NO: 30076 - DNA, 13 bp, Artificial Sequence
  Oligonucleotide for detection of SNP TSC0009081
tacttctataaat

SEQ ID NO: 30077 - DNA, 13 bp, Artificial Sequence
  Oligonucleotide for detection of SNP TSC0009081
atttatggaagta

SEQ ID NO: 30078 - DNA, 13 bp, Artificial Sequence
  Oligonucleotide for detection of SNP TSC0009081
tacttccataaat

SEQ ID NO: 30079 - DNA, 13 bp, Artificial Sequence
  Oligonucleotide for detection of SNP TSC0009082
aagattaatttty

SEQ ID NO: 30080 - DNA, 13 bp, Artificial Sequence
  Oligonucleotide for detection of SNP TSC0009082
raaaattaatctt

SEQ ID NO: 30081 - DNA, 13 bp, Artificial Sequence
  Oligonucleotide for detection of SNP TSC0009082
aagattgatttty

SEQ ID NO: 30082 - DNA, 13 bp, Artificial Sequence
  Oligonucleotide for detection of SNP TSC0009082
raaaatcaatctt

SEQ ID NO: 30083 - DNA, 13 bp, Artificial Sequence
  Oligonucleotide for detection of SNP TSC0009082
aagatcgatttty

SEQ ID NO: 30084 - DNA, 13 bp, Artificial Sequence
  Oligonucleotide for detection of SNP TSC0009082
raaaatcgatctt

SEQ ID NO: 30085 - DNA, 13 bp, Artificial Sequence
  Oligonucleotide for detection of SNP TSC0009082
ggaagttgatttt

SEQ ID NO: 30086 - DNA, 13 bp, Artificial Sequence
  Oligonucleotide for detection of SNP TSC0009082
aaaatcaacttcc

SEQ ID NO: 30087 - DNA, 13 bp, Artificial Sequence
  Oligonucleotide for detection of SNP TSC0009082
ggaagtcgatttt

SEQ ID NO: 30088 - DNA, 13 bp, Artificial Sequence
  Oligonucleotide for detection of SNP TSC0009082
aaaatcgacttcc

SEQ ID NO: 30089 - DNA, 13 bp, Artificial Sequence
  Oligonucleotide for detection of SNP TSC0009087
tttgtatattaat

SEQ ID NO: 30090 - DNA, 13 bp, Artificial Sequence
  Oligonucleotide for detection of SNP TSC0009087
attaatatacaaa

SEQ ID NO: 30091 - DNA, 13 bp, Artificial Sequence
  Oligonucleotide for detection of SNP TSC0009087
tttgtagattaat

SEQ ID NO: 30092 - DNA, 13 bp, Artificial Sequence
  Oligonucleotide for detection of SNP TSC0009087
attaatctacaaa

SEQ ID NO: 30093 - DNA, 13 bp, Artificial Sequence
  Oligonucleotide for detection of SNP TSC0009087
attggtgtataaa

SEQ ID NO: 30094 - DNA, 13 bp, Artificial Sequence
  Oligonucleotide for detection of SNP TSC0009087
tttatacaccaat

SEQ ID NO: 30095 - DNA, 13 bp, Artificial Sequence
  Oligonucleotide for detection of SNP TSC0009087
attggtttataaa

SEQ ID NO: 30096 - DNA, 13 bp, Artificial Sequence
  Oligonucleotide for detection of SNP TSC0009087
tttataaaccaat

SEQ ID NO: 30097 - DNA, 13 bp, Artificial Sequence
  Oligonucleotide for detection of SNP TSC0009088
ttgtatattaatg

SEQ ID NO: 30098 - DNA, 13 bp, Artificial Sequence
  Oligonucleotide for detection of SNP TSC0009088
cattaatatacaa

SEQ ID NO: 30099 - DNA, 13 bp, Artificial Sequence
  Oligonucleotide for detection of SNP TSC0009088
ttgtatgttaatg

SEQ ID NO: 30100 - DNA, 13 bp, Artificial Sequence
  Oligonucleotide for detection of SNP TSC0009088
cattaacatacaa

SEQ ID NO: 30101 - DNA, 13 bp, Artificial Sequence
  Oligonucleotide for detection of SNP TSC0009088
ttgtacgttaatg

SEQ ID NO: 30102 - DNA, 13 bp, Artificial Sequence
  Oligonucleotide for detection of SNP TSC0009088
cattaacgtacaa

SEQ ID NO: 30103 - DNA, 13 bp, Artificial Sequence
  Oligonucleotide for detection of SNP TSC0009088
tattggtgtataa

SEQ ID NO: 30104 - DNA, 13 bp, Artificial Sequence
  Oligonucleotide for detection of SNP TSC0009088
ttatacaccaata

SEQ ID NO: 30105 - DNA, 13 bp, Artificial Sequence
  Oligonucleotide for detection of SNP TSC0009088
tattggcgtataa

SEQ ID NO: 30106 - DNA, 13 bp, Artificial Sequence
  Oligonucleotide for detection of SNP TSC0009088
ttatacgccaata

SEQ ID NO: 30107 - DNA, 13 bp, Artificial Sequence
  Oligonucleotide for detection of SNP TSC0009092
atatttggtttag

SEQ ID NO: 30108 - DNA, 13 bp, Artificial Sequence
  Oligonucleotide for detection of SNP TSC0009092
ctaaaccaaatat

SEQ ID NO: 30109 - DNA, 13 bp, Artificial Sequence
  Oligonucleotide for detection of SNP TSC0009092
atatttagtttag

SEQ ID NO: 30110 - DNA, 13 bp, Artificial Sequence
  Oligonucleotide for detection of SNP TSC0009092
ctaaactaaatat

SEQ ID NO: 30111 - DNA, 13 bp, Artificial Sequence
  Oligonucleotide for detection of SNP TSC0009102
atttttgggaagt

SEQ ID NO: 30112 - DNA, 13 bp, Artificial Sequence
  Oligonucleotide for detection of SNP TSC0009102
acttcccaaaaat

SEQ ID NO: 30113 - DNA, 13 bp, Artificial Sequence
  Oligonucleotide for detection of SNP TSC0009102
atttttaggaagt

SEQ ID NO: 30114 - DNA, 13 bp, Artificial Sequence
  Oligonucleotide for detection of SNP TSC0009102
acttcctaaaaat

SEQ ID NO: 30115 - DNA, 13 bp, Artificial Sequence
  Oligonucleotide for detection of SNP TSC0009103
aatttgagaagga

SEQ ID NO: 30116 - DNA, 13 bp, Artificial Sequence
  Oligonucleotide for detection of SNP TSC0009103
tccttctcaaatt

SEQ ID NO: 30117 - DNA, 13 bp, Artificial Sequence
  Oligonucleotide for detection of SNP TSC0009103
aatttgggaagga

SEQ ID NO: 30118 - DNA, 13 bp, Artificial Sequence
  Oligonucleotide for detection of SNP TSC0009103
tccttcccaaatt

SEQ ID NO: 30119 - DNA, 13 bp, Artificial Sequence
  Oligonucleotide for detection of SNP TSC0009104
attttagttggga

SEQ ID NO: 30120 - DNA, 13 bp, Artificial Sequence
  Oligonucleotide for detection of SNP TSC0009104
tcccaactaaaat

SEQ ID NO: 30121 - DNA, 13 bp, Artificial Sequence
  Oligonucleotide for detection of SNP TSC0009104
attttaattggga

SEQ ID NO: 30122 - DNA, 13 bp, Artificial Sequence
  Oligonucleotide for detection of SNP TSC0009104
tcccaattaaaat

SEQ ID NO: 30123 - DNA, 13 bp, Artificial Sequence
  Oligonucleotide for detection of SNP TSC0009111
gaaaatgatgttg

SEQ ID NO: 30124 - DNA, 13 bp, Artificial Sequence
  Oligonucleotide for detection of SNP TSC0009111
caacatcattttc

SEQ ID NO: 30125 - DNA, 13 bp, Artificial Sequence
  Oligonucleotide for detection of SNP TSC0009111
gaaaataatgttg

SEQ ID NO: 30126 - DNA, 13 bp, Artificial Sequence
  Oligonucleotide for detection of SNP TSC0009111
caacattattttc

SEQ ID NO: 30127 - DNA, 13 bp, Artificial Sequence
  Oligonucleotide for detection of SNP TSC0009112
ataaaagtaaata

SEQ ID NO: 30128 - DNA, 13 bp, Artificial Sequence
  Oligonucleotide for detection of SNP TSC0009112
tatttacttttat

SEQ ID NO: 30129 - DNA, 13 bp, Artificial Sequence
  Oligonucleotide for detection of SNP TSC0009113
ggtataatgtgtg

SEQ ID NO: 30130 - DNA, 13 bp, Artificial Sequence
  Oligonucleotide for detection of SNP TSC0009113
cacacattatacc

SEQ ID NO: 30131 - DNA, 13 bp, Artificial Sequence
  Oligonucleotide for detection of SNP TSC0009113
ggtatattgtgtg

SEQ ID NO: 30132 - DNA, 13 bp, Artificial Sequence
  Oligonucleotide for detection of SNP TSC0009113
cacacaatatacc

SEQ ID NO: 30133 - DNA, 13 bp, Artificial Sequence
  Oligonucleotide for detection of SNP TSC0009113
tatatattataty

SEQ ID NO: 30134 - DNA, 13 bp, Artificial Sequence
  Oligonucleotide for detection of SNP TSC0009113
ratataatatata

SEQ ID NO: 30135 - DNA, 13 bp, Artificial Sequence
  Oligonucleotide for detection of SNP TSC0009113
tatataatataty

SEQ ID NO: 30136 - DNA, 13 bp, Artificial Sequence
  Oligonucleotide for detection of SNP TSC0009113
ratatattatata

SEQ ID NO: 30137 - DNA, 13 bp, Artificial Sequence
  Oligonucleotide for detection of SNP TSC0009127
taaattattatta

SEQ ID NO: 30138 - DNA, 13 bp, Artificial Sequence
  Oligonucleotide for detection of SNP TSC0009127
taataataattta

SEQ ID NO: 30139 - DNA, 13 bp, Artificial Sequence
  Oligonucleotide for detection of SNP TSC0009127
tagtaatggtttg

SEQ ID NO: 30140 - DNA, 13 bp, Artificial Sequence
  Oligonucleotide for detection of SNP TSC0009127
caaaccattacta

SEQ ID NO: 30141 - DNA, 13 bp, Artificial Sequence
  Oligonucleotide for detection of SNP TSC0009127
tagtaagggtttg

SEQ ID NO: 30142 - DNA, 13 bp, Artificial Sequence
  Oligonucleotide for detection of SNP TSC0009127
caaacccttacta

SEQ ID NO: 30143 - DNA, 13 bp, Artificial Sequence
  Oligonucleotide for detection of SNP TSC0009133
aagtttgttaaay

SEQ ID NO: 30144 - DNA, 13 bp, Artificial Sequence
  Oligonucleotide for detection of SNP TSC0009133
rtttaacaaactt

SEQ ID NO: 30145 - DNA, 13 bp, Artificial Sequence
  Oligonucleotide for detection of SNP TSC0009133
aagtttattaaay

SEQ ID NO: 30146 - DNA, 13 bp, Artificial Sequence
  Oligonucleotide for detection of SNP TSC0009133
rtttaataaactt

SEQ ID NO: 30147 - DNA, 13 bp, Artificial Sequence
  Oligonucleotide for detection of SNP TSC0009139
aatatggggaagg

SEQ ID NO: 30148 - DNA, 13 bp, Artificial Sequence
  Oligonucleotide for detection of SNP TSC0009139
ccttccccatatt

SEQ ID NO: 30149 - DNA, 13 bp, Artificial Sequence
  Oligonucleotide for detection of SNP TSC0009139
aatatgaggaagg

SEQ ID NO: 30150 - DNA, 13 bp, Artificial Sequence
  Oligonucleotide for detection of SNP TSC0009139
ccttcctcatatt

SEQ ID NO: 30151 - DNA, 13 bp, Artificial Sequence
  Oligonucleotide for detection of SNP TSC0009141
tttgtaatttaty

SEQ ID NO: 30152 - DNA, 13 bp, Artificial Sequence
  Oligonucleotide for detection of SNP TSC0009141
rataaattacaaa

SEQ ID NO: 30153 - DNA, 13 bp, Artificial Sequence
  Oligonucleotide for detection of SNP TSC0009141
tttgtagtttaty

SEQ ID NO: 30154 - DNA, 13 bp, Artificial Sequence
  Oligonucleotide for detection of SNP TSC0009141
rataaactacaaa

SEQ ID NO: 30155 - DNA, 13 bp, Artificial Sequence
  Oligonucleotide for detection of SNP TSC0009142
taataaattgggy

SEQ ID NO: 30156 - DNA, 13 bp, Artificial Sequence
  Oligonucleotide for detection of SNP TSC0009142
rcccaatttatta

SEQ ID NO: 30157 - DNA, 13 bp, Artificial Sequence
  Oligonucleotide for detection of SNP TSC0009142
taataagttgggy

SEQ ID NO: 30158 - DNA, 13 bp, Artificial Sequence
  Oligonucleotide for detection of SNP TSC0009142
rcccaacttatta

SEQ ID NO: 30159 - DNA, 13 bp, Artificial Sequence
  Oligonucleotide for detection of SNP TSC0009142
taataaatcgggy

SEQ ID NO: 30160 - DNA, 13 bp, Artificial Sequence
  Oligonucleotide for detection of SNP TSC0009142
rcccgatttatta

SEQ ID NO: 30161 - DNA, 13 bp, Artificial Sequence
  Oligonucleotide for detection of SNP TSC0009142
taataagtcgggy

SEQ ID NO: 30162 - DNA, 13 bp, Artificial Sequence
  Oligonucleotide for detection of SNP TSC0009142
rcccgacttatta

SEQ ID NO: 30163 - DNA, 13 bp, Artificial Sequence
  Oligonucleotide for detection of SNP TSC0009146
gtggtagtgtgtt

SEQ ID NO: 30164 - DNA, 13 bp, Artificial Sequence
  Oligonucleotide for detection of SNP TSC0009146
aacacactaccac

SEQ ID NO: 30165 - DNA, 13 bp, Artificial Sequence
  Oligonucleotide for detection of SNP TSC0009146
gtggtaatgtgtt

SEQ ID NO: 30166 - DNA, 13 bp, Artificial Sequence
  Oligonucleotide for detection of SNP TSC0009146
aacacattaccac

SEQ ID NO: 30167 - DNA, 13 bp, Artificial Sequence
  Oligonucleotide for detection of SNP TSC0009148
attttgattatga

SEQ ID NO: 30168 - DNA, 13 bp, Artificial Sequence
  Oligonucleotide for detection of SNP TSC0009148
tcataatcaaaat

SEQ ID NO: 30169 - DNA, 13 bp, Artificial Sequence
  Oligonucleotide for detection of SNP TSC0009148
attttgtttatga

SEQ ID NO: 30170 - DNA, 13 bp, Artificial Sequence
  Oligonucleotide for detection of SNP TSC0009148
tcataaacaaaat

SEQ ID NO: 30171 - DNA, 13 bp, Artificial Sequence
  Oligonucleotide for detection of SNP TSC0009148
atttcgattatga

SEQ ID NO: 30172 - DNA, 13 bp, Artificial Sequence
  Oligonucleotide for detection of SNP TSC0009148
tcataatcgaaat

SEQ ID NO: 30173 - DNA, 13 bp, Artificial Sequence
  Oligonucleotide for detection of SNP TSC0009148
atttcgtttatga

SEQ ID NO: 30174 - DNA, 13 bp, Artificial Sequence
  Oligonucleotide for detection of SNP TSC0009148
tcataaacgaaat

SEQ ID NO: 30175 - DNA, 13 bp, Artificial Sequence
  Oligonucleotide for detection of SNP TSC0009148
ttatagttggggt

SEQ ID NO: 30176 - DNA, 13 bp, Artificial Sequence
  Oligonucleotide for detection of SNP TSC0009148
accccaactataa

SEQ ID NO: 30177 - DNA, 13 bp, Artificial Sequence
  Oligonucleotide for detection of SNP TSC0009148
ttataggtggggt

SEQ ID NO: 30178 - DNA, 13 bp, Artificial Sequence
  Oligonucleotide for detection of SNP TSC0009148
accccacctataa

SEQ ID NO: 30179 - DNA, 13 bp, Artificial Sequence
  Oligonucleotide for detection of SNP TSC0009148
ttatagtcggggt

SEQ ID NO: 30180 - DNA, 13 bp, Artificial Sequence
  Oligonucleotide for detection of SNP TSC0009148
accccgactataa

SEQ ID NO: 30181 - DNA, 13 bp, Artificial Sequence
  Oligonucleotide for detection of SNP TSC0009148
ttataggcggggt

SEQ ID NO: 30182 - DNA, 13 bp, Artificial Sequence
  Oligonucleotide for detection of SNP TSC0009148
accccgcctataa

SEQ ID NO: 30183 - DNA, 13 bp, Artificial Sequence
  Oligonucleotide for detection of SNP TSC0009149
gtgaggattttgg

SEQ ID NO: 30184 - DNA, 13 bp, Artificial Sequence
  Oligonucleotide for detection of SNP TSC0009149
ccaaaatcctcac

SEQ ID NO: 30185 - DNA, 13 bp, Artificial Sequence
  Oligonucleotide for detection of SNP TSC0009149
gtgagggttttgg

SEQ ID NO: 30186 - DNA, 13 bp, Artificial Sequence
  Oligonucleotide for detection of SNP TSC0009149
ccaaaaccctcac

SEQ ID NO: 30187 - DNA, 13 bp, Artificial Sequence
  Oligonucleotide for detection of SNP TSC0009150
ggttttgttaatg

SEQ ID NO: 30188 - DNA, 13 bp, Artificial Sequence
  Oligonucleotide for detection of SNP TSC0009150
cattaacaaaacc

SEQ ID NO: 30189 - DNA, 13 bp, Artificial Sequence
  Oligonucleotide for detection of SNP TSC0009150
ggttttattaatg

SEQ ID NO: 30190 - DNA, 13 bp, Artificial Sequence
  Oligonucleotide for detection of SNP TSC0009150
cattaataaaacc

SEQ ID NO: 30191 - DNA, 13 bp, Artificial Sequence
  Oligonucleotide for detection of SNP TSC0009172
ataattttaagtt

SEQ ID NO: 30192 - DNA, 13 bp, Artificial Sequence
  Oligonucleotide for detection of SNP TSC0009172
aacttaaaattat

SEQ ID NO: 30193 - DNA, 13 bp, Artificial Sequence
  Oligonucleotide for detection of SNP TSC0009172
ataattgtaagtt

SEQ ID NO: 30194 - DNA, 13 bp, Artificial Sequence
  Oligonucleotide for detection of SNP TSC0009172
aacttacaattat

SEQ ID NO: 30195 - DNA, 13 bp, Artificial Sequence
  Oligonucleotide for detection of SNP TSC0009172
aatttagaattat

SEQ ID NO: 30196 - DNA, 13 bp, Artificial Sequence
  Oligonucleotide for detection of SNP TSC0009172
ataattctaaatt

SEQ ID NO: 30197 - DNA, 13 bp, Artificial Sequence
  Oligonucleotide for detection of SNP TSC0009172
aatttataattat

SEQ ID NO: 30198 - DNA, 13 bp, Artificial Sequence
  Oligonucleotide for detection of SNP TSC0009172
ataattataaatt

SEQ ID NO: 30199 - DNA, 13 bp, Artificial Sequence
  Oligonucleotide for detection of SNP TSC0009173
tttataaattaty

SEQ ID NO: 30200 - DNA, 13 bp, Artificial Sequence
  Oligonucleotide for detection of SNP TSC0009173
rataatttataaa

SEQ ID NO: 30201 - DNA, 13 bp, Artificial Sequence
  Oligonucleotide for detection of SNP TSC0009173
tttatatattaty

SEQ ID NO: 30202 - DNA, 13 bp, Artificial Sequence
  Oligonucleotide for detection of SNP TSC0009173
rataatatataaa

SEQ ID NO: 30203 - DNA, 13 bp, Artificial Sequence
  Oligonucleotide for detection of SNP TSC0009173
ggtgatttataaa

SEQ ID NO: 30204 - DNA, 13 bp, Artificial Sequence
  Oligonucleotide for detection of SNP TSC0009173
tttataaatcacc

SEQ ID NO: 30205 - DNA, 13 bp, Artificial Sequence
  Oligonucleotide for detection of SNP TSC0009173
ggtgatatataaa

SEQ ID NO: 30206 - DNA, 13 bp, Artificial Sequence
  Oligonucleotide for detection of SNP TSC0009173
tttatatatcacc

SEQ ID NO: 30207 - DNA, 13 bp, Artificial Sequence
  Oligonucleotide for detection of SNP TSC0009174
ttttaggtaatgt

SEQ ID NO: 30208 - DNA, 13 bp, Artificial Sequence
  Oligonucleotide for detection of SNP TSC0009174
acattacctaaaa

SEQ ID NO: 30209 - DNA, 13 bp, Artificial Sequence
  Oligonucleotide for detection of SNP TSC0009174
ttttagttaatgt

SEQ ID NO: 30210 - DNA, 13 bp, Artificial Sequence
  Oligonucleotide for detection of SNP TSC0009174
acattaactaaaa

SEQ ID NO: 30211 - DNA, 13 bp, Artificial Sequence
  Oligonucleotide for detection of SNP TSC0009174
atattgtttggga

SEQ ID NO: 30212 - DNA, 13 bp, Artificial Sequence
  Oligonucleotide for detection of SNP TSC0009174
tcccaaacaatat

SEQ ID NO: 30213 - DNA, 13 bp, Artificial Sequence
  Oligonucleotide for detection of SNP TSC0009174
atattgattggga

SEQ ID NO: 30214 - DNA, 13 bp, Artificial Sequence
  Oligonucleotide for detection of SNP TSC0009174
tcccaatcaatat

SEQ ID NO: 30215 - DNA, 13 bp, Artificial Sequence
  Oligonucleotide for detection of SNP TSC0009176
gtgttgatttttg

SEQ ID NO: 30216 - DNA, 13 bp, Artificial Sequence
  Oligonucleotide for detection of SNP TSC0009176
caaaaatcaacac

SEQ ID NO: 30217 - DNA, 13 bp, Artificial Sequence
  Oligonucleotide for detection of SNP TSC0009176
gtgttggtttttg

SEQ ID NO: 30218 - DNA, 13 bp, Artificial Sequence
  Oligonucleotide for detection of SNP TSC0009176
caaaaaccaacac

SEQ ID NO: 30219 - DNA, 13 bp, Artificial Sequence
  Oligonucleotide for detection of SNP TSC0009177
tatgtaattgtat

SEQ ID NO: 30220 - DNA, 13 bp, Artificial Sequence
  Oligonucleotide for detection of SNP TSC0009177
atacaattacata

SEQ ID NO: 30221 - DNA, 13 bp, Artificial Sequence
  Oligonucleotide for detection of SNP TSC0009177
tatgtagttgtat

SEQ ID NO: 30222 - DNA, 13 bp, Artificial Sequence
  Oligonucleotide for detection of SNP TSC0009177
atacaactacata

SEQ ID NO: 30223 - DNA, 13 bp, Artificial Sequence
  Oligonucleotide for detection of SNP TSC0009181
atgtttgtattta

SEQ ID NO: 30224 - DNA, 13 bp, Artificial Sequence
  Oligonucleotide for detection of SNP TSC0009181
taaatacaaacat

SEQ ID NO: 30225 - DNA, 13 bp, Artificial Sequence
  Oligonucleotide for detection of SNP TSC0009181
atgtttatattta

SEQ ID NO: 30226 - DNA, 13 bp, Artificial Sequence
  Oligonucleotide for detection of SNP TSC0009181
taaatataaacat

SEQ ID NO: 30227 - DNA, 13 bp, Artificial Sequence
  Oligonucleotide for detection of SNP TSC0009183
ttttaataatttt

SEQ ID NO: 30228 - DNA, 13 bp, Artificial Sequence
  Oligonucleotide for detection of SNP TSC0009183
aaaattattaaaa

SEQ ID NO: 30229 - DNA, 13 bp, Artificial Sequence
  Oligonucleotide for detection of SNP TSC0009183
ttttaagaatttt

SEQ ID NO: 30230 - DNA, 13 bp, Artificial Sequence
  Oligonucleotide for detection of SNP TSC0009183
aaaattcttaaaa

SEQ ID NO: 30231 - DNA, 13 bp, Artificial Sequence
  Oligonucleotide for detection of SNP TSC0009183
aaagttgttgaag

SEQ ID NO: 30232 - DNA, 13 bp, Artificial Sequence
  Oligonucleotide for detection of SNP TSC0009183
cttcaacaacttt

SEQ ID NO: 30233 - DNA, 13 bp, Artificial Sequence
  Oligonucleotide for detection of SNP TSC0009183
aaagtttttgaag

SEQ ID NO: 30234 - DNA, 13 bp, Artificial Sequence
  Oligonucleotide for detection of SNP TSC0009183
cttcaaaaacttt

SEQ ID NO: 30235 - DNA, 13 bp, Artificial Sequence
  Oligonucleotide for detection of SNP TSC0009184
atagatgttgatt

SEQ ID NO: 30236 - DNA, 13 bp, Artificial Sequence
  Oligonucleotide for detection of SNP TSC0009184
aatcaacatctat

SEQ ID NO: 30237 - DNA, 13 bp, Artificial Sequence
  Oligonucleotide for detection of SNP TSC0009184
atagatattgatt

SEQ ID NO: 30238 - DNA, 13 bp, Artificial Sequence
  Oligonucleotide for detection of SNP TSC0009184
aatcaatatctat

SEQ ID NO: 30239 - DNA, 13 bp, Artificial Sequence
  Oligonucleotide for detection of SNP TSC0009185
ttattaatggtag

SEQ ID NO: 30240 - DNA, 13 bp, Artificial Sequence
  Oligonucleotide for detection of SNP TSC0009185
ctaccattaataa

SEQ ID NO: 30241 - DNA, 13 bp, Artificial Sequence
  Oligonucleotide for detection of SNP TSC0009185
ttattagtggtag

SEQ ID NO: 30242 - DNA, 13 bp, Artificial Sequence
  Oligonucleotide for detection of SNP TSC0009185
ctaccactaataa

SEQ ID NO: 30243 - DNA, 13 bp, Artificial Sequence
  Oligonucleotide for detection of SNP TSC0009192
taattaggtttty

SEQ ID NO: 30244 - DNA, 13 bp, Artificial Sequence
  Oligonucleotide for detection of SNP TSC0009192
raaaacctaatta

SEQ ID NO: 30245 - DNA, 13 bp, Artificial Sequence
  Oligonucleotide for detection of SNP TSC0009192
taattaagtttty

SEQ ID NO: 30246 - DNA, 13 bp, Artificial Sequence
  Oligonucleotide for detection of SNP TSC0009192
raaaacttaatta

SEQ ID NO: 30247 - DNA, 13 bp, Artificial Sequence
  Oligonucleotide for detection of SNP TSC0009193
ggagataaaaggy

SEQ ID NO: 30248 - DNA, 13 bp, Artificial Sequence
  Oligonucleotide for detection of SNP TSC0009193
rccttttatctcc

SEQ ID NO: 30249 - DNA, 13 bp, Artificial Sequence
  Oligonucleotide for detection of SNP TSC0009193
ggagattaaaggy

SEQ ID NO: 30250 - DNA, 13 bp, Artificial Sequence
  Oligonucleotide for detection of SNP TSC0009193
rcctttaatctcc

SEQ ID NO: 30251 - DNA, 13 bp, Artificial Sequence
  Oligonucleotide for detection of SNP TSC0009195
atatacgtatata

SEQ ID NO: 30252 - DNA, 13 bp, Artificial Sequence
  Oligonucleotide for detection of SNP TSC0009195
tatatacgtatat

SEQ ID NO: 30253 - DNA, 13 bp, Artificial Sequence
  Oligonucleotide for detection of SNP TSC0009195
tgtgtgtgtatgt

SEQ ID NO: 30254 - DNA, 13 bp, Artificial Sequence
  Oligonucleotide for detection of SNP TSC0009195
acatacacacaca

SEQ ID NO: 30255 - DNA, 13 bp, Artificial Sequence
  Oligonucleotide for detection of SNP TSC0009195
tgtgtgcgtatgt

SEQ ID NO: 30256 - DNA, 13 bp, Artificial Sequence
  Oligonucleotide for detection of SNP TSC0009195
acatacgcacaca

SEQ ID NO: 30257 - DNA, 13 bp, Artificial Sequence
  Oligonucleotide for detection of SNP TSC0009196
taaattgtttttt

SEQ ID NO: 30258 - DNA, 13 bp, Artificial Sequence
  Oligonucleotide for detection of SNP TSC0009196
aaaaaacaattta

SEQ ID NO: 30259 - DNA, 13 bp, Artificial Sequence
  Oligonucleotide for detection of SNP TSC0009220
ttttgtatttgtg

SEQ ID NO: 30260 - DNA, 13 bp, Artificial Sequence
  Oligonucleotide for detection of SNP TSC0009220
cacaaatacaaaa

SEQ ID NO: 30261 - DNA, 13 bp, Artificial Sequence
  Oligonucleotide for detection of SNP TSC0009220
ttttgtgtttgtg

SEQ ID NO: 30262 - DNA, 13 bp, Artificial Sequence
  Oligonucleotide for detection of SNP TSC0009220
cacaaacacaaaa

SEQ ID NO: 30263 - DNA, 13 bp, Artificial Sequence
  Oligonucleotide for detection of SNP TSC0009220
ttttgcgtttgtg

SEQ ID NO: 30264 - DNA, 13 bp, Artificial Sequence
  Oligonucleotide for detection of SNP TSC0009220
cacaaacgcaaaa

SEQ ID NO: 30265 - DNA, 13 bp, Artificial Sequence
  Oligonucleotide for detection of SNP TSC0009220
tataggtgtagag

SEQ ID NO: 30266 - DNA, 13 bp, Artificial Sequence
  Oligonucleotide for detection of SNP TSC0009220
ctctacacctata

SEQ ID NO: 30267 - DNA, 13 bp, Artificial Sequence
  Oligonucleotide for detection of SNP TSC0009220
tataggcgtagag

SEQ ID NO: 30268 - DNA, 13 bp, Artificial Sequence
  Oligonucleotide for detection of SNP TSC0009220
ctctacgcctata

SEQ ID NO: 30269 - DNA, 13 bp, Artificial Sequence
  Oligonucleotide for detection of SNP TSC0009221
gggtatatttggg

SEQ ID NO: 30270 - DNA, 13 bp, Artificial Sequence
  Oligonucleotide for detection of SNP TSC0009221
cccaaatataccc

SEQ ID NO: 30271 - DNA, 13 bp, Artificial Sequence
  Oligonucleotide for detection of SNP TSC0009221
gggtatttttggg

SEQ ID NO: 30272 - DNA, 13 bp, Artificial Sequence
  Oligonucleotide for detection of SNP TSC0009221
cccaaaaataccc

SEQ ID NO: 30273 - DNA, 13 bp, Artificial Sequence
  Oligonucleotide for detection of SNP TSC0009221
tttaagtgtatty

SEQ ID NO: 30274 - DNA, 13 bp, Artificial Sequence
  Oligonucleotide for detection of SNP TSC0009221
raatacacttaaa

SEQ ID NO: 30275 - DNA, 13 bp, Artificial Sequence
  Oligonucleotide for detection of SNP TSC0009221
tttaagggtatty

SEQ ID NO: 30276 - DNA, 13 bp, Artificial Sequence
  Oligonucleotide for detection of SNP TSC0009221
raatacccttaaa

SEQ ID NO: 30277 - DNA, 13 bp, Artificial Sequence
  Oligonucleotide for detection of SNP TSC0009222
atgagtattttga

SEQ ID NO: 30278 - DNA, 13 bp, Artificial Sequence
  Oligonucleotide for detection of SNP TSC0009222
tcaaaatactcat

SEQ ID NO: 30279 - DNA, 13 bp, Artificial Sequence
  Oligonucleotide for detection of SNP TSC0009222
atgagttttttga

SEQ ID NO: 30280 - DNA, 13 bp, Artificial Sequence
  Oligonucleotide for detection of SNP TSC0009222
tcaaaaaactcat

SEQ ID NO: 30281 - DNA, 13 bp, Artificial Sequence
  Oligonucleotide for detection of SNP TSC0009222
acgagtattttga

SEQ ID NO: 30282 - DNA, 13 bp, Artificial Sequence
  Oligonucleotide for detection of SNP TSC0009222
tcaaaatactcgt

SEQ ID NO: 30283 - DNA, 13 bp, Artificial Sequence
  Oligonucleotide for detection of SNP TSC0009222
acgagttttttga

SEQ ID NO: 30284 - DNA, 13 bp, Artificial Sequence
  Oligonucleotide for detection of SNP TSC0009222
tcaaaaaactcgt

SEQ ID NO: 30285 - DNA, 13 bp, Artificial Sequence
  Oligonucleotide for detection of SNP TSC0009222
ttaggatgtttgt

SEQ ID NO: 30286 - DNA, 13 bp, Artificial Sequence
  Oligonucleotide for detection of SNP TSC0009222
acaaacatcctaa

SEQ ID NO: 30287 - DNA, 13 bp, Artificial Sequence
  Oligonucleotide for detection of SNP TSC0009222
ttaggaggtttgt

SEQ ID NO: 30288 - DNA, 13 bp, Artificial Sequence
  Oligonucleotide for detection of SNP TSC0009222
acaaacctcctaa

SEQ ID NO: 30289 - DNA, 13 bp, Artificial Sequence
  Oligonucleotide for detection of SNP TSC0009222
ttaggatgttcgt

SEQ ID NO: 30290 - DNA, 13 bp, Artificial Sequence
  Oligonucleotide for detection of SNP TSC0009222
acgaacatcctaa

SEQ ID NO: 30291 - DNA, 13 bp, Artificial Sequence
  Oligonucleotide for detection of SNP TSC0009222
ttaggaggttcgt

SEQ ID NO: 30292 - DNA, 13 bp, Artificial Sequence
  Oligonucleotide for detection of SNP TSC0009222
acgaacctcctaa

SEQ ID NO: 30293 - DNA, 13 bp, Artificial Sequence
  Oligonucleotide for detection of SNP TSC0009223
tttgagagaaaaa

SEQ ID NO: 30294 - DNA, 13 bp, Artificial Sequence
  Oligonucleotide for detection of SNP TSC0009223
tttttctctcaaa

SEQ ID NO: 30295 - DNA, 13 bp, Artificial Sequence
  Oligonucleotide for detection of SNP TSC0009223
tttgagtgaaaaa

SEQ ID NO: 30296 - DNA, 13 bp, Artificial Sequence
  Oligonucleotide for detection of SNP TSC0009223
tttttcactcaaa

SEQ ID NO: 30297 - DNA, 13 bp, Artificial Sequence
  Oligonucleotide for detection of SNP TSC0009223
tttgagcgaaaaa

SEQ ID NO: 30298 - DNA, 13 bp, Artificial Sequence
  Oligonucleotide for detection of SNP TSC0009223
tttttcgctcaaa

SEQ ID NO: 30299 - DNA, 13 bp, Artificial Sequence
  Oligonucleotide for detection of SNP TSC0009223
ttttttttttaag

SEQ ID NO: 30300 - DNA, 13 bp, Artificial Sequence
  Oligonucleotide for detection of SNP TSC0009223
cttaaaaaaaaaa

SEQ ID NO: 30301 - DNA, 13 bp, Artificial Sequence
  Oligonucleotide for detection of SNP TSC0009223
ttttttgtttaag

SEQ ID NO: 30302 - DNA, 13 bp, Artificial Sequence
  Oligonucleotide for detection of SNP TSC0009223
cttaaacaaaaaa

SEQ ID NO: 30303 - DNA, 13 bp, Artificial Sequence
  Oligonucleotide for detection of SNP TSC0009223
tttttcgtttaag

SEQ ID NO: 30304 - DNA, 13 bp, Artificial Sequence
  Oligonucleotide for detection of SNP TSC0009223
cttaaacgaaaaa

SEQ ID NO: 30305 - DNA, 13 bp, Artificial Sequence
  Oligonucleotide for detection of SNP TSC0009224
atgaaaggtttgt

SEQ ID NO: 30306 - DNA, 13 bp, Artificial Sequence
  Oligonucleotide for detection of SNP TSC0009224
acaaacctttcat

SEQ ID NO: 30307 - DNA, 13 bp, Artificial Sequence
  Oligonucleotide for detection of SNP TSC0009224
atgaaatgtttgt

SEQ ID NO: 30308 - DNA, 13 bp, Artificial Sequence
  Oligonucleotide for detection of SNP TSC0009224
acaaacatttcat

SEQ ID NO: 30309 - DNA, 13 bp, Artificial Sequence
  Oligonucleotide for detection of SNP TSC0009224
ataagttttttat

SEQ ID NO: 30310 - DNA, 13 bp, Artificial Sequence
  Oligonucleotide for detection of SNP TSC0009224
ataaaaaacttat

SEQ ID NO: 30311 - DNA, 13 bp, Artificial Sequence
  Oligonucleotide for detection of SNP TSC0009224
ataagtattttat

SEQ ID NO: 30312 - DNA, 13 bp, Artificial Sequence
  Oligonucleotide for detection of SNP TSC0009224
ataaaatacttat

SEQ ID NO: 30313 - DNA, 13 bp, Artificial Sequence
  Oligonucleotide for detection of SNP TSC0009234
tggaataaataaa

SEQ ID NO: 30314 - DNA, 13 bp, Artificial Sequence
  Oligonucleotide for detection of SNP TSC0009234
tttatttattcca

SEQ ID NO: 30315 - DNA, 13 bp, Artificial Sequence
  Oligonucleotide for detection of SNP TSC0009234
tggaatgaataaa

SEQ ID NO: 30316 - DNA, 13 bp, Artificial Sequence
  Oligonucleotide for detection of SNP TSC0009234
tttattcattcca

SEQ ID NO: 30317 - DNA, 13 bp, Artificial Sequence
  Oligonucleotide for detection of SNP TSC0009246
gtatttgttagta

SEQ ID NO: 30318 - DNA, 13 bp, Artificial Sequence
  Oligonucleotide for detection of SNP TSC0009246
tactaacaaatac

SEQ ID NO: 30319 - DNA, 13 bp, Artificial Sequence
  Oligonucleotide for detection of SNP TSC0009246
gtatttattagta

SEQ ID NO: 30320 - DNA, 13 bp, Artificial Sequence
  Oligonucleotide for detection of SNP TSC0009246
tactaataaatac

SEQ ID NO: 30321 - DNA, 13 bp, Artificial Sequence
  Oligonucleotide for detection of SNP TSC0009247
ttaaagggtatay

SEQ ID NO: 30322 - DNA, 13 bp, Artificial Sequence
  Oligonucleotide for detection of SNP TSC0009247
rtataccctttaa

SEQ ID NO: 30323 - DNA, 13 bp, Artificial Sequence
  Oligonucleotide for detection of SNP TSC0009247
ttaaagagtatay

SEQ ID NO: 30324 - DNA, 13 bp, Artificial Sequence
  Oligonucleotide for detection of SNP TSC0009247
rtatactctttaa

SEQ ID NO: 30325 - DNA, 13 bp, Artificial Sequence
  Oligonucleotide for detection of SNP TSC0009248
ttaaataatttta

SEQ ID NO: 30326 - DNA, 13 bp, Artificial Sequence
  Oligonucleotide for detection of SNP TSC0009248
taaaattatttaa

SEQ ID NO: 30327 - DNA, 13 bp, Artificial Sequence
  Oligonucleotide for detection of SNP TSC0009248
ttaaattatttta

SEQ ID NO: 30328 - DNA, 13 bp, Artificial Sequence
  Oligonucleotide for detection of SNP TSC0009248
taaaataatttaa

SEQ ID NO: 30329 - DNA, 13 bp, Artificial Sequence
  Oligonucleotide for detection of SNP TSC0009248
tgaaattatttaa

SEQ ID NO: 30330 - DNA, 13 bp, Artificial Sequence
  Oligonucleotide for detection of SNP TSC0009248
ttaaataatttca

SEQ ID NO: 30331 - DNA, 13 bp, Artificial Sequence
  Oligonucleotide for detection of SNP TSC0009248
tgaaatgatttaa

SEQ ID NO: 30332 - DNA, 13 bp, Artificial Sequence
  Oligonucleotide for detection of SNP TSC0009248
ttaaatcatttca

SEQ ID NO: 30333 - DNA, 13 bp, Artificial Sequence
  Oligonucleotide for detection of SNP TSC0009254
gagtaaatttgga

SEQ ID NO: 30334 - DNA, 13 bp, Artificial Sequence
  Oligonucleotide for detection of SNP TSC0009254
tccaaatttactc

SEQ ID NO: 30335 - DNA, 13 bp, Artificial Sequence
  Oligonucleotide for detection of SNP TSC0009254
gagtaagtttgga

SEQ ID NO: 30336 - DNA, 13 bp, Artificial Sequence
  Oligonucleotide for detection of SNP TSC0009254
tccaaacttactc

SEQ ID NO: 30337 - DNA, 13 bp, Artificial Sequence
  Oligonucleotide for detection of SNP TSC0009255
ttttatatataag

SEQ ID NO: 30338 - DNA, 13 bp, Artificial Sequence
  Oligonucleotide for detection of SNP TSC0009255
cttatatataaaa

SEQ ID NO: 30339 - DNA, 13 bp, Artificial Sequence
  Oligonucleotide for detection of SNP TSC0009255
ttttatttataag

SEQ ID NO: 30340 - DNA, 13 bp, Artificial Sequence
  Oligonucleotide for detection of SNP TSC0009255
cttataaataaaa

SEQ ID NO: 30341 - DNA, 13 bp, Artificial Sequence
  Oligonucleotide for detection of SNP TSC0009255
tttatgtgtggaa

SEQ ID NO: 30342 - DNA, 13 bp, Artificial Sequence
  Oligonucleotide for detection of SNP TSC0009255
ttccacacataaa

SEQ ID NO: 30343 - DNA, 13 bp, Artificial Sequence
  Oligonucleotide for detection of SNP TSC0009255
tttatgggtggaa

SEQ ID NO: 30344 - DNA, 13 bp, Artificial Sequence
  Oligonucleotide for detection of SNP TSC0009255
ttccacccataaa

SEQ ID NO: 30345 - DNA, 13 bp, Artificial Sequence
  Oligonucleotide for detection of SNP TSC0009256
tatttaagaaatg

SEQ ID NO: 30346 - DNA, 13 bp, Artificial Sequence
  Oligonucleotide for detection of SNP TSC0009256
catttcttaaata

SEQ ID NO: 30347 - DNA, 13 bp, Artificial Sequence
  Oligonucleotide for detection of SNP TSC0009256
tatttatgaaatg

SEQ ID NO: 30348 - DNA, 13 bp, Artificial Sequence
  Oligonucleotide for detection of SNP TSC0009256
catttcataaata

SEQ ID NO: 30349 - DNA, 13 bp, Artificial Sequence
  Oligonucleotide for detection of SNP TSC0009256
tatttacgaaatg

SEQ ID NO: 30350 - DNA, 13 bp, Artificial Sequence
  Oligonucleotide for detection of SNP TSC0009256
catttcgtaaata

SEQ ID NO: 30351 - DNA, 13 bp, Artificial Sequence
  Oligonucleotide for detection of SNP TSC0009256
tattttttaagta

SEQ ID NO: 30352 - DNA, 13 bp, Artificial Sequence
  Oligonucleotide for detection of SNP TSC0009256
tacttaaaaaata

SEQ ID NO: 30353 - DNA, 13 bp, Artificial Sequence
  Oligonucleotide for detection of SNP TSC0009256
tattttgtaagta

SEQ ID NO: 30354 - DNA, 13 bp, Artificial Sequence
  Oligonucleotide for detection of SNP TSC0009256
tacttacaaaata

SEQ ID NO: 30355 - DNA, 13 bp, Artificial Sequence
  Oligonucleotide for detection of SNP TSC0009256
tatttcgtaagta

SEQ ID NO: 30356 - DNA, 13 bp, Artificial Sequence
  Oligonucleotide for detection of SNP TSC0009256
tacttacgaaata

SEQ ID NO: 30357 - DNA, 13 bp, Artificial Sequence
  Oligonucleotide for detection of SNP TSC0009257
ttttagtatttay

SEQ ID NO: 30358 - DNA, 13 bp, Artificial Sequence
  Oligonucleotide for detection of SNP TSC0009257
rtaaatactaaaa

SEQ ID NO: 30359 - DNA, 13 bp, Artificial Sequence
  Oligonucleotide for detection of SNP TSC0009257
gtgagttttggag

SEQ ID NO: 30360 - DNA, 13 bp, Artificial Sequence
  Oligonucleotide for detection of SNP TSC0009257
ctccaaaactcac

SEQ ID NO: 30361 - DNA, 13 bp, Artificial Sequence
  Oligonucleotide for detection of SNP TSC0009257
gtgagtattggag

SEQ ID NO: 30362 - DNA, 13 bp, Artificial Sequence
  Oligonucleotide for detection of SNP TSC0009257
ctccaatactcac

SEQ ID NO: 30363 - DNA, 13 bp, Artificial Sequence
  Oligonucleotide for detection of SNP TSC0009259
ataattatgttay

SEQ ID NO: 30364 - DNA, 13 bp, Artificial Sequence
  Oligonucleotide for detection of SNP TSC0009259
rtaacataattat

SEQ ID NO: 30365 - DNA, 13 bp, Artificial Sequence
  Oligonucleotide for detection of SNP TSC0009259
ataattgtgttay

SEQ ID NO: 30366 - DNA, 13 bp, Artificial Sequence
  Oligonucleotide for detection of SNP TSC0009259
rtaacacaattat

SEQ ID NO: 30367 - DNA, 13 bp, Artificial Sequence
  Oligonucleotide for detection of SNP TSC0009259
ataatcgtgttay

SEQ ID NO: 30368 - DNA, 13 bp, Artificial Sequence
  Oligonucleotide for detection of SNP TSC0009259
rtaacacgattat

SEQ ID NO: 30369 - DNA, 13 bp, Artificial Sequence
  Oligonucleotide for detection of SNP TSC0009259
gtgatatgattat

SEQ ID NO: 30370 - DNA, 13 bp, Artificial Sequence
  Oligonucleotide for detection of SNP TSC0009259
ataatcatatcac

SEQ ID NO: 30371 - DNA, 13 bp, Artificial Sequence
  Oligonucleotide for detection of SNP TSC0009259
gtgatacgattat

SEQ ID NO: 30372 - DNA, 13 bp, Artificial Sequence
  Oligonucleotide for detection of SNP TSC0009259
ataatcgtatcac

SEQ ID NO: 30373 - DNA, 13 bp, Artificial Sequence
  Oligonucleotide for detection of SNP TSC0009265
tattttattatgt

SEQ ID NO: 30374 - DNA, 13 bp, Artificial Sequence
  Oligonucleotide for detection of SNP TSC0009265
acataataaaata

SEQ ID NO: 30375 - DNA, 13 bp, Artificial Sequence
  Oligonucleotide for detection of SNP TSC0009265
tatttttttatgt

SEQ ID NO: 30376 - DNA, 13 bp, Artificial Sequence
  Oligonucleotide for detection of SNP TSC0009265
acataaaaaaata

SEQ ID NO: 30377 - DNA, 13 bp, Artificial Sequence
  Oligonucleotide for detection of SNP TSC0009265
atatgatggggta

SEQ ID NO: 30378 - DNA, 13 bp, Artificial Sequence
  Oligonucleotide for detection of SNP TSC0009265
taccccatcatat

SEQ ID NO: 30379 - DNA, 13 bp, Artificial Sequence
  Oligonucleotide for detection of SNP TSC0009265
atatgagggggta

SEQ ID NO: 30380 - DNA, 13 bp, Artificial Sequence
  Oligonucleotide for detection of SNP TSC0009265
taccccctcatat

SEQ ID NO: 30381 - DNA, 13 bp, Artificial Sequence
  Oligonucleotide for detection of SNP TSC0009266
tatattattagaa

SEQ ID NO: 30382 - DNA, 13 bp, Artificial Sequence
  Oligonucleotide for detection of SNP TSC0009266
ttctaataatata

SEQ ID NO: 30383 - DNA, 13 bp, Artificial Sequence
  Oligonucleotide for detection of SNP TSC0009266
tatattgttagaa

SEQ ID NO: 30384 - DNA, 13 bp, Artificial Sequence
  Oligonucleotide for detection of SNP TSC0009266
ttctaacaatata

SEQ ID NO: 30385 - DNA, 13 bp, Artificial Sequence
  Oligonucleotide for detection of SNP TSC0009271
attagataaatta

SEQ ID NO: 30386 - DNA, 13 bp, Artificial Sequence
  Oligonucleotide for detection of SNP TSC0009271
taatttatctaat

SEQ ID NO: 30387 - DNA, 13 bp, Artificial Sequence
  Oligonucleotide for detection of SNP TSC0009271
attagagaaatta

SEQ ID NO: 30388 - DNA, 13 bp, Artificial Sequence
  Oligonucleotide for detection of SNP TSC0009271
taatttctctaat

SEQ ID NO: 30389 - DNA, 13 bp, Artificial Sequence
  Oligonucleotide for detection of SNP TSC0009271
tagtttgtttagt

SEQ ID NO: 30390 - DNA, 13 bp, Artificial Sequence
  Oligonucleotide for detection of SNP TSC0009271
actaaacaaacta

SEQ ID NO: 30391 - DNA, 13 bp, Artificial Sequence
  Oligonucleotide for detection of SNP TSC0009271
tagtttttttagt

SEQ ID NO: 30392 - DNA, 13 bp, Artificial Sequence
  Oligonucleotide for detection of SNP TSC0009271
actaaaaaaacta

SEQ ID NO: 30393 - DNA, 13 bp, Artificial Sequence
  Oligonucleotide for detection of SNP TSC0009272
tttatagatggat

SEQ ID NO: 30394 - DNA, 13 bp, Artificial Sequence
  Oligonucleotide for detection of SNP TSC0009272
atccatctataaa

SEQ ID NO: 30395 - DNA, 13 bp, Artificial Sequence
  Oligonucleotide for detection of SNP TSC0009272
tttataaatggat

SEQ ID NO: 30396 - DNA, 13 bp, Artificial Sequence
  Oligonucleotide for detection of SNP TSC0009272
atccatttataaa

SEQ ID NO: 30397 - DNA, 13 bp, Artificial Sequence
  Oligonucleotide for detection of SNP TSC0009273
atattggttgatg

SEQ ID NO: 30398 - DNA, 13 bp, Artificial Sequence
  Oligonucleotide for detection of SNP TSC0009273
catcaaccaatat

SEQ ID NO: 30399 - DNA, 13 bp, Artificial Sequence
  Oligonucleotide for detection of SNP TSC0009273
atattgattgatg

SEQ ID NO: 30400 - DNA, 13 bp, Artificial Sequence
  Oligonucleotide for detection of SNP TSC0009273
catcaatcaatat

SEQ ID NO: 30401 - DNA, 13 bp, Artificial Sequence
  Oligonucleotide for detection of SNP TSC0009274
tttaatattggtt

SEQ ID NO: 30402 - DNA, 13 bp, Artificial Sequence
  Oligonucleotide for detection of SNP TSC0009274
aaccaatattaaa

SEQ ID NO: 30403 - DNA, 13 bp, Artificial Sequence
  Oligonucleotide for detection of SNP TSC0009274
tttaatgttggtt

SEQ ID NO: 30404 - DNA, 13 bp, Artificial Sequence
  Oligonucleotide for detection of SNP TSC0009274
aaccaacattaaa

SEQ ID NO: 30405 - DNA, 13 bp, Artificial Sequence
  Oligonucleotide for detection of SNP TSC0009274
tttaacgttggtt

SEQ ID NO: 30406 - DNA, 13 bp, Artificial Sequence
  Oligonucleotide for detection of SNP TSC0009274
aaccaacgttaaa

SEQ ID NO: 30407 - DNA, 13 bp, Artificial Sequence
  Oligonucleotide for detection of SNP TSC0009274
aattaatgttgaa

SEQ ID NO: 30408 - DNA, 13 bp, Artificial Sequence
  Oligonucleotide for detection of SNP TSC0009274
ttcaacattaatt

SEQ ID NO: 30409 - DNA, 13 bp, Artificial Sequence
  Oligonucleotide for detection of SNP TSC0009274
aattaacgttgaa

SEQ ID NO: 30410 - DNA, 13 bp, Artificial Sequence
  Oligonucleotide for detection of SNP TSC0009274
ttcaacgttaatt

SEQ ID NO: 30411 - DNA, 13 bp, Artificial Sequence
  Oligonucleotide for detection of SNP TSC0009278
aataggtttttty

SEQ ID NO: 30412 - DNA, 13 bp, Artificial Sequence
  Oligonucleotide for detection of SNP TSC0009278
raaaaaacctatt

SEQ ID NO: 30413 - DNA, 13 bp, Artificial Sequence
  Oligonucleotide for detection of SNP TSC0009278
aatagggttttty

SEQ ID NO: 30414 - DNA, 13 bp, Artificial Sequence
  Oligonucleotide for detection of SNP TSC0009278
raaaaaccctatt

SEQ ID NO: 30415 - DNA, 13 bp, Artificial Sequence
  Oligonucleotide for detection of SNP TSC0009278
ggaaaggtttatt

SEQ ID NO: 30416 - DNA, 13 bp, Artificial Sequence
  Oligonucleotide for detection of SNP TSC0009278
aataaacctttcc

SEQ ID NO: 30417 - DNA, 13 bp, Artificial Sequence
  Oligonucleotide for detection of SNP TSC0009278
ggaaagttttatt

SEQ ID NO: 30418 - DNA, 13 bp, Artificial Sequence
  Oligonucleotide for detection of SNP TSC0009278
aataaaactttcc

SEQ ID NO: 30419 - DNA, 13 bp, Artificial Sequence
  Oligonucleotide for detection of SNP TSC0009279
atgtgaattttta

SEQ ID NO: 30420 - DNA, 13 bp, Artificial Sequence
  Oligonucleotide for detection of SNP TSC0009279
taaaaattcacat

SEQ ID NO: 30421 - DNA, 13 bp, Artificial Sequence
  Oligonucleotide for detection of SNP TSC0009279
atgtgatttttta

SEQ ID NO: 30422 - DNA, 13 bp, Artificial Sequence
  Oligonucleotide for detection of SNP TSC0009279
taaaaaatcacat

SEQ ID NO: 30423 - DNA, 13 bp, Artificial Sequence
  Oligonucleotide for detection of SNP TSC0009279
tggaagtttatat

SEQ ID NO: 30424 - DNA, 13 bp, Artificial Sequence
  Oligonucleotide for detection of SNP TSC0009279
atataaacttcca

SEQ ID NO: 30425 - DNA, 13 bp, Artificial Sequence
  Oligonucleotide for detection of SNP TSC0009279
tggaaggttatat

SEQ ID NO: 30426 - DNA, 13 bp, Artificial Sequence
  Oligonucleotide for detection of SNP TSC0009279
atataaccttcca

SEQ ID NO: 30427 - DNA, 13 bp, Artificial Sequence
  Oligonucleotide for detection of SNP TSC0009280
gaattagaagaag

SEQ ID NO: 30428 - DNA, 13 bp, Artificial Sequence
  Oligonucleotide for detection of SNP TSC0009280
cttcttctaattc

SEQ ID NO: 30429 - DNA, 13 bp, Artificial Sequence
  Oligonucleotide for detection of SNP TSC0009280
gaattataagaag

SEQ ID NO: 30430 - DNA, 13 bp, Artificial Sequence
  Oligonucleotide for detection of SNP TSC0009280
cttcttataattc

SEQ ID NO: 30431 - DNA, 13 bp, Artificial Sequence
  Oligonucleotide for detection of SNP TSC0009280
ttttttttaatty

SEQ ID NO: 30432 - DNA, 13 bp, Artificial Sequence
  Oligonucleotide for detection of SNP TSC0009280
raattaaaaaaaa

SEQ ID NO: 30433 - DNA, 13 bp, Artificial Sequence
  Oligonucleotide for detection of SNP TSC0009280
ttttttataatty

SEQ ID NO: 30434 - DNA, 13 bp, Artificial Sequence
  Oligonucleotide for detection of SNP TSC0009280
raattataaaaaa

SEQ ID NO: 30435 - DNA, 13 bp, Artificial Sequence
  Oligonucleotide for detection of SNP TSC0009283
gattttaaattty

SEQ ID NO: 30436 - DNA, 13 bp, Artificial Sequence
  Oligonucleotide for detection of SNP TSC0009283
raaatttaaaatc

SEQ ID NO: 30437 - DNA, 13 bp, Artificial Sequence
  Oligonucleotide for detection of SNP TSC0009283
gattttgaattty

SEQ ID NO: 30438 - DNA, 13 bp, Artificial Sequence
  Oligonucleotide for detection of SNP TSC0009283
raaattcaaaatc

SEQ ID NO: 30439 - DNA, 13 bp, Artificial Sequence
  Oligonucleotide for detection of SNP TSC0009283
gatttcgaattty

SEQ ID NO: 30440 - DNA, 13 bp, Artificial Sequence
  Oligonucleotide for detection of SNP TSC0009283
raaattcgaaatc

SEQ ID NO: 30441 - DNA, 13 bp, Artificial Sequence
  Oligonucleotide for detection of SNP TSC0009285
aaatatattaatt

SEQ ID NO: 30442 - DNA, 13 bp, Artificial Sequence
  Oligonucleotide for detection of SNP TSC0009285
aattaatatattt

SEQ ID NO: 30443 - DNA, 13 bp, Artificial Sequence
  Oligonucleotide for detection of SNP TSC0009285
aaatatgttaatt

SEQ ID NO: 30444 - DNA, 13 bp, Artificial Sequence
  Oligonucleotide for detection of SNP TSC0009285
aattaacatattt

SEQ ID NO: 30445 - DNA, 13 bp, Artificial Sequence
  Oligonucleotide for detection of SNP TSC0009286
ataggaagttttt

SEQ ID NO: 30446 - DNA, 13 bp, Artificial Sequence
  Oligonucleotide for detection of SNP TSC0009286
aaaaacttcctat

SEQ ID NO: 30447 - DNA, 13 bp, Artificial Sequence
  Oligonucleotide for detection of SNP TSC0009286
ataggatgttttt

SEQ ID NO: 30448 - DNA, 13 bp, Artificial Sequence
  Oligonucleotide for detection of SNP TSC0009286
aaaaacatcctat

SEQ ID NO: 30449 - DNA, 13 bp, Artificial Sequence
  Oligonucleotide for detection of SNP TSC0009286
aaaaattttttgt

SEQ ID NO: 30450 - DNA, 13 bp, Artificial Sequence
  Oligonucleotide for detection of SNP TSC0009286
acaaaaaattttt

SEQ ID NO: 30451 - DNA, 13 bp, Artificial Sequence
  Oligonucleotide for detection of SNP TSC0009286
aaaaatattttgt

SEQ ID NO: 30452 - DNA, 13 bp, Artificial Sequence
  Oligonucleotide for detection of SNP TSC0009286
acaaaatattttt

SEQ ID NO: 30453 - DNA, 13 bp, Artificial Sequence
  Oligonucleotide for detection of SNP TSC0009287
ttatagattttaa

SEQ ID NO: 30454 - DNA, 13 bp, Artificial Sequence
  Oligonucleotide for detection of SNP TSC0009287
ttaaaatctataa

SEQ ID NO: 30455 - DNA, 13 bp, Artificial Sequence
  Oligonucleotide for detection of SNP TSC0009287
ttatagtttttaa

SEQ ID NO: 30456 - DNA, 13 bp, Artificial Sequence
  Oligonucleotide for detection of SNP TSC0009287
ttaaaaactataa

SEQ ID NO: 30457 - DNA, 13 bp, Artificial Sequence
  Oligonucleotide for detection of SNP TSC0009287
ttaaaatttgtgg

SEQ ID NO: 30458 - DNA, 13 bp, Artificial Sequence
  Oligonucleotide for detection of SNP TSC0009287
ccacaaattttaa

SEQ ID NO: 30459 - DNA, 13 bp, Artificial Sequence
  Oligonucleotide for detection of SNP TSC0009287
ttaaaaattgtgg

SEQ ID NO: 30460 - DNA, 13 bp, Artificial Sequence
  Oligonucleotide for detection of SNP TSC0009287
ccacaatttttaa

SEQ ID NO: 30461 - DNA, 13 bp, Artificial Sequence
  Oligonucleotide for detection of SNP TSC0009288
aatgagtgtaaat

SEQ ID NO: 30462 - DNA, 13 bp, Artificial Sequence
  Oligonucleotide for detection of SNP TSC0009288
atttacactcatt

SEQ ID NO: 30463 - DNA, 13 bp, Artificial Sequence
  Oligonucleotide for detection of SNP TSC0009288
aatgagcgtaaat

SEQ ID NO: 30464 - DNA, 13 bp, Artificial Sequence
  Oligonucleotide for detection of SNP TSC0009288
atttacgctcatt

SEQ ID NO: 30465 - DNA, 13 bp, Artificial Sequence
  Oligonucleotide for detection of SNP TSC0009288
atttatgtttatt

SEQ ID NO: 30466 - DNA, 13 bp, Artificial Sequence
  Oligonucleotide for detection of SNP TSC0009288
aataaacataaat

SEQ ID NO: 30467 - DNA, 13 bp, Artificial Sequence
  Oligonucleotide for detection of SNP TSC0009288
atttatatttatt

SEQ ID NO: 30468 - DNA, 13 bp, Artificial Sequence
  Oligonucleotide for detection of SNP TSC0009288
aataaatataaat

SEQ ID NO: 30469 - DNA, 13 bp, Artificial Sequence
  Oligonucleotide for detection of SNP TSC0009288
atttacgtttatt

SEQ ID NO: 30470 - DNA, 13 bp, Artificial Sequence
  Oligonucleotide for detection of SNP TSC0009288
aataaacgtaaat

SEQ ID NO: 30471 - DNA, 13 bp, Artificial Sequence
  Oligonucleotide for detection of SNP TSC0009296
tatagtaattatt

SEQ ID NO: 30472 - DNA, 13 bp, Artificial Sequence
  Oligonucleotide for detection of SNP TSC0009296
aataattactata

SEQ ID NO: 30473 - DNA, 13 bp, Artificial Sequence
  Oligonucleotide for detection of SNP TSC0009296
tatagtgattatt

SEQ ID NO: 30474 - DNA, 13 bp, Artificial Sequence
  Oligonucleotide for detection of SNP TSC0009296
aataatcactata

SEQ ID NO: 30475 - DNA, 13 bp, Artificial Sequence
  Oligonucleotide for detection of SNP TSC0009297
agttaggtatggt

SEQ ID NO: 30476 - DNA, 13 bp, Artificial Sequence
  Oligonucleotide for detection of SNP TSC0009297
accatacctaact

SEQ ID NO: 30477 - DNA, 13 bp, Artificial Sequence
  Oligonucleotide for detection of SNP TSC0009297
agttagatatggt

SEQ ID NO: 30478 - DNA, 13 bp, Artificial Sequence
  Oligonucleotide for detection of SNP TSC0009297
accatatctaact

SEQ ID NO: 30479 - DNA, 13 bp, Artificial Sequence
  Oligonucleotide for detection of SNP TSC0009299
tattaattggtty

SEQ ID NO: 30480 - DNA, 13 bp, Artificial Sequence
  Oligonucleotide for detection of SNP TSC0009299
raaccaattaata

SEQ ID NO: 30481 - DNA, 13 bp, Artificial Sequence
  Oligonucleotide for detection of SNP TSC0009299
tattaagtggtty

SEQ ID NO: 30482 - DNA, 13 bp, Artificial Sequence
  Oligonucleotide for detection of SNP TSC0009299
raaccacttaata

SEQ ID NO: 30483 - DNA, 13 bp, Artificial Sequence
  Oligonucleotide for detection of SNP TSC0009299
gagttagttggta

SEQ ID NO: 30484 - DNA, 13 bp, Artificial Sequence
  Oligonucleotide for detection of SNP TSC0009299
taccaactaactc

SEQ ID NO: 30485 - DNA, 13 bp, Artificial Sequence
  Oligonucleotide for detection of SNP TSC0009299
gagttatttggta

SEQ ID NO: 30486 - DNA, 13 bp, Artificial Sequence
  Oligonucleotide for detection of SNP TSC0009299
taccaaataactc

SEQ ID NO: 30487 - DNA, 13 bp, Artificial Sequence
  Oligonucleotide for detection of SNP TSC0009300
aatggtatttatt

SEQ ID NO: 30488 - DNA, 13 bp, Artificial Sequence
  Oligonucleotide for detection of SNP TSC0009300
aataaataccatt

SEQ ID NO: 30489 - DNA, 13 bp, Artificial Sequence
  Oligonucleotide for detection of SNP TSC0009300
aatggtgtttatt

SEQ ID NO: 30490 - DNA, 13 bp, Artificial Sequence
  Oligonucleotide for detection of SNP TSC0009300
aataaacaccatt

SEQ ID NO: 30491 - DNA, 13 bp, Artificial Sequence
  Oligonucleotide for detection of SNP TSC0009300
aacggtatttatt

SEQ ID NO: 30492 - DNA, 13 bp, Artificial Sequence
  Oligonucleotide for detection of SNP TSC0009300
aataaataccgtt

SEQ ID NO: 30493 - DNA, 13 bp, Artificial Sequence
  Oligonucleotide for detection of SNP TSC0009300
aacggtgtttatt

SEQ ID NO: 30494 - DNA, 13 bp, Artificial Sequence
  Oligonucleotide for detection of SNP TSC0009300
aataaacaccgtt

SEQ ID NO: 30495 - DNA, 13 bp, Artificial Sequence
  Oligonucleotide for detection of SNP TSC0009300
aatggcgtttatt

SEQ ID NO: 30496 - DNA, 13 bp, Artificial Sequence
  Oligonucleotide for detection of SNP TSC0009300
aataaacgccatt

SEQ ID NO: 30497 - DNA, 13 bp, Artificial Sequence
  Oligonucleotide for detection of SNP TSC0009300
aacggcgtttatt

SEQ ID NO: 30498 - DNA, 13 bp, Artificial Sequence
  Oligonucleotide for detection of SNP TSC0009300
aataaacgccgtt

SEQ ID NO: 30499 - DNA, 13 bp, Artificial Sequence
  Oligonucleotide for detection of SNP TSC0009300
agtaaatgttgtt

SEQ ID NO: 30500 - DNA, 13 bp, Artificial Sequence
  Oligonucleotide for detection of SNP TSC0009300
aacaacatttact

SEQ ID NO: 30501 - DNA, 13 bp, Artificial Sequence
  Oligonucleotide for detection of SNP TSC0009300
agtaaatgtcgtt

SEQ ID NO: 30502 - DNA, 13 bp, Artificial Sequence
  Oligonucleotide for detection of SNP TSC0009300
aacgacatttact

SEQ ID NO: 30503 - DNA, 13 bp, Artificial Sequence
  Oligonucleotide for detection of SNP TSC0009300
agtaaacgttgtt

SEQ ID NO: 30504 - DNA, 13 bp, Artificial Sequence
  Oligonucleotide for detection of SNP TSC0009300
aacaacgtttact

SEQ ID NO: 30505 - DNA, 13 bp, Artificial Sequence
  Oligonucleotide for detection of SNP TSC0009300
agtaaacgtcgtt

SEQ ID NO: 30506 - DNA, 13 bp, Artificial Sequence
  Oligonucleotide for detection of SNP TSC0009300
aacgacgtttact

SEQ ID NO: 30507 - DNA, 13 bp, Artificial Sequence
  Oligonucleotide for detection of SNP TSC0009302
ggaaaatggtaaa

SEQ ID NO: 30508 - DNA, 13 bp, Artificial Sequence
  Oligonucleotide for detection of SNP TSC0009302
tttaccattttcc

SEQ ID NO: 30509 - DNA, 13 bp, Artificial Sequence
  Oligonucleotide for detection of SNP TSC0009302
ggaaaacggtaaa

SEQ ID NO: 30510 - DNA, 13 bp, Artificial Sequence
  Oligonucleotide for detection of SNP TSC0009302
tttaccgttttcc

SEQ ID NO: 30511 - DNA, 13 bp, Artificial Sequence
  Oligonucleotide for detection of SNP TSC0009302
tttattgttttty

SEQ ID NO: 30512 - DNA, 13 bp, Artificial Sequence
  Oligonucleotide for detection of SNP TSC0009302
raaaaacaataaa

SEQ ID NO: 30513 - DNA, 13 bp, Artificial Sequence
  Oligonucleotide for detection of SNP TSC0009302
tttattattttty

SEQ ID NO: 30514 - DNA, 13 bp, Artificial Sequence
  Oligonucleotide for detection of SNP TSC0009302
raaaaataataaa

SEQ ID NO: 30515 - DNA, 13 bp, Artificial Sequence
  Oligonucleotide for detection of SNP TSC0009302
tttatcgttttty

SEQ ID NO: 30516 - DNA, 13 bp, Artificial Sequence
  Oligonucleotide for detection of SNP TSC0009302
raaaaacgataaa

SEQ ID NO: 30517 - DNA, 13 bp, Artificial Sequence
  Oligonucleotide for detection of SNP TSC0009303
gaataatatatty

SEQ ID NO: 30518 - DNA, 13 bp, Artificial Sequence
  Oligonucleotide for detection of SNP TSC0009303
raatatattattc

SEQ ID NO: 30519 - DNA, 13 bp, Artificial Sequence
  Oligonucleotide for detection of SNP TSC0009303
gaataagatatty

SEQ ID NO: 30520 - DNA, 13 bp, Artificial Sequence
  Oligonucleotide for detection of SNP TSC0009303
raatatcttattc

SEQ ID NO: 30521 - DNA, 13 bp, Artificial Sequence
  Oligonucleotide for detection of SNP TSC0009303
gaatatgttgtty

SEQ ID NO: 30522 - DNA, 13 bp, Artificial Sequence
  Oligonucleotide for detection of SNP TSC0009303
raacaacatattc

SEQ ID NO: 30523 - DNA, 13 bp, Artificial Sequence
  Oligonucleotide for detection of SNP TSC0009303
gaatattttgtty

SEQ ID NO: 30524 - DNA, 13 bp, Artificial Sequence
  Oligonucleotide for detection of SNP TSC0009303
raacaaaatattc

SEQ ID NO: 30525 - DNA, 13 bp, Artificial Sequence
  Oligonucleotide for detection of SNP TSC0009306
ttgtttttaatta

SEQ ID NO: 30526 - DNA, 13 bp, Artificial Sequence
  Oligonucleotide for detection of SNP TSC0009306
taattaaaaacaa

SEQ ID NO: 30527 - DNA, 13 bp, Artificial Sequence
  Oligonucleotide for detection of SNP TSC0009306
ttgtttgtaatta

SEQ ID NO: 30528 - DNA, 13 bp, Artificial Sequence
  Oligonucleotide for detection of SNP TSC0009306
taattacaaacaa

SEQ ID NO: 30529 - DNA, 13 bp, Artificial Sequence
  Oligonucleotide for detection of SNP TSC0009306
tggttagaaataa

SEQ ID NO: 30530 - DNA, 13 bp, Artificial Sequence
  Oligonucleotide for detection of SNP TSC0009306
ttatttctaacca

SEQ ID NO: 30531 - DNA, 13 bp, Artificial Sequence
  Oligonucleotide for detection of SNP TSC0009306
tggttataaataa

SEQ ID NO: 30532 - DNA, 13 bp, Artificial Sequence
  Oligonucleotide for detection of SNP TSC0009306
ttatttataacca

SEQ ID NO: 30533 - DNA, 13 bp, Artificial Sequence
  Oligonucleotide for detection of SNP TSC0009314
aggtttatatagy

SEQ ID NO: 30534 - DNA, 13 bp, Artificial Sequence
  Oligonucleotide for detection of SNP TSC0009314
rctatataaacct

SEQ ID NO: 30535 - DNA, 13 bp, Artificial Sequence
  Oligonucleotide for detection of SNP TSC0009314
aggtttgtatagy

SEQ ID NO: 30536 - DNA, 13 bp, Artificial Sequence
  Oligonucleotide for detection of SNP TSC0009314
rctatacaaacct

SEQ ID NO: 30537 - DNA, 13 bp, Artificial Sequence
  Oligonucleotide for detection of SNP TSC0009315
ttgttaaggatag

SEQ ID NO: 30538 - DNA, 13 bp, Artificial Sequence
  Oligonucleotide for detection of SNP TSC0009315
ctatccttaacaa

SEQ ID NO: 30539 - DNA, 13 bp, Artificial Sequence
  Oligonucleotide for detection of SNP TSC0009315
ttgttagggatag

SEQ ID NO: 30540 - DNA, 13 bp, Artificial Sequence
  Oligonucleotide for detection of SNP TSC0009315
ctatccctaacaa

SEQ ID NO: 30541 - DNA, 13 bp, Artificial Sequence
  Oligonucleotide for detection of SNP TSC0009316
attggaattttgt

SEQ ID NO: 30542 - DNA, 13 bp, Artificial Sequence
  Oligonucleotide for detection of SNP TSC0009316
acaaaattccaat

SEQ ID NO: 30543 - DNA, 13 bp, Artificial Sequence
  Oligonucleotide for detection of SNP TSC0009316
attggatttttgt

SEQ ID NO: 30544 - DNA, 13 bp, Artificial Sequence
  Oligonucleotide for detection of SNP TSC0009316
acaaaaatccaat

SEQ ID NO: 30545 - DNA, 13 bp, Artificial Sequence
  Oligonucleotide for detection of SNP TSC0009316
atagggttttagt

SEQ ID NO: 30546 - DNA, 13 bp, Artificial Sequence
  Oligonucleotide for detection of SNP TSC0009316
actaaaaccctat

SEQ ID NO: 30547 - DNA, 13 bp, Artificial Sequence
  Oligonucleotide for detection of SNP TSC0009316
atagggatttagt

SEQ ID NO: 30548 - DNA, 13 bp, Artificial Sequence
  Oligonucleotide for detection of SNP TSC0009316
actaaatccctat

SEQ ID NO: 30549 - DNA, 13 bp, Artificial Sequence
  Oligonucleotide for detection of SNP TSC0009317
aagaaagtaaata

SEQ ID NO: 30550 - DNA, 13 bp, Artificial Sequence
  Oligonucleotide for detection of SNP TSC0009317
tatttactttctt

SEQ ID NO: 30551 - DNA, 13 bp, Artificial Sequence
  Oligonucleotide for detection of SNP TSC0009317
aagaaaataaata

SEQ ID NO: 30552 - DNA, 13 bp, Artificial Sequence
  Oligonucleotide for detection of SNP TSC0009317
tatttattttctt

SEQ ID NO: 30553 - DNA, 13 bp, Artificial Sequence
  Oligonucleotide for detection of SNP TSC0009326
tttaaagttttaa

SEQ ID NO: 30554 - DNA, 13 bp, Artificial Sequence
  Oligonucleotide for detection of SNP TSC0009326
ttaaaactttaaa

SEQ ID NO: 30555 - DNA, 13 bp, Artificial Sequence
  Oligonucleotide for detection of SNP TSC0009326
tttaaatttttaa

SEQ ID NO: 30556 - DNA, 13 bp, Artificial Sequence
  Oligonucleotide for detection of SNP TSC0009326
ttaaaaatttaaa

SEQ ID NO: 30557 - DNA, 13 bp, Artificial Sequence
  Oligonucleotide for detection of SNP TSC0009326
ttaagattttggg

SEQ ID NO: 30558 - DNA, 13 bp, Artificial Sequence
  Oligonucleotide for detection of SNP TSC0009326
cccaaaatcttaa

SEQ ID NO: 30559 - DNA, 13 bp, Artificial Sequence
  Oligonucleotide for detection of SNP TSC0009326
ttaagaatttggg

SEQ ID NO: 30560 - DNA, 13 bp, Artificial Sequence
  Oligonucleotide for detection of SNP TSC0009326
cccaaattcttaa

SEQ ID NO: 30561 - DNA, 13 bp, Artificial Sequence
  Oligonucleotide for detection of SNP TSC0009334
ttatgttgtgaay

SEQ ID NO: 30562 - DNA, 13 bp, Artificial Sequence
  Oligonucleotide for detection of SNP TSC0009334
rttcacaacataa

SEQ ID NO: 30563 - DNA, 13 bp, Artificial Sequence
  Oligonucleotide for detection of SNP TSC0009334
ttatgtcgtgaay

SEQ ID NO: 30564 - DNA, 13 bp, Artificial Sequence
  Oligonucleotide for detection of SNP TSC0009334
rttcacgacataa

SEQ ID NO: 30565 - DNA, 13 bp, Artificial Sequence
  Oligonucleotide for detection of SNP TSC0009334
gtttatgatatga

SEQ ID NO: 30566 - DNA, 13 bp, Artificial Sequence
  Oligonucleotide for detection of SNP TSC0009334
tcatatcataaac

SEQ ID NO: 30567 - DNA, 13 bp, Artificial Sequence
  Oligonucleotide for detection of SNP TSC0009334
gtttataatatga

SEQ ID NO: 30568 - DNA, 13 bp, Artificial Sequence
  Oligonucleotide for detection of SNP TSC0009334
tcatattataaac

SEQ ID NO: 30569 - DNA, 13 bp, Artificial Sequence
  Oligonucleotide for detection of SNP TSC0009334
gtttacgatatga

SEQ ID NO: 30570 - DNA, 13 bp, Artificial Sequence
  Oligonucleotide for detection of SNP TSC0009334
tcatatcgtaaac

SEQ ID NO: 30571 - DNA, 13 bp, Artificial Sequence
  Oligonucleotide for detection of SNP TSC0009335
tgagtgggtaagt

SEQ ID NO: 30572 - DNA, 13 bp, Artificial Sequence
  Oligonucleotide for detection of SNP TSC0009335
acttacccactca

SEQ ID NO: 30573 - DNA, 13 bp, Artificial Sequence
  Oligonucleotide for detection of SNP TSC0009335
tgagtgagtaagt

SEQ ID NO: 30574 - DNA, 13 bp, Artificial Sequence
  Oligonucleotide for detection of SNP TSC0009335
acttactcactca

SEQ ID NO: 30575 - DNA, 13 bp, Artificial Sequence
  Oligonucleotide for detection of SNP TSC0009368
atttttaggttty

SEQ ID NO: 30576 - DNA, 13 bp, Artificial Sequence
  Oligonucleotide for detection of SNP TSC0009368
raaacctaaaaat

SEQ ID NO: 30577 - DNA, 13 bp, Artificial Sequence
  Oligonucleotide for detection of SNP TSC0009368
atttttgggttty

SEQ ID NO: 30578 - DNA, 13 bp, Artificial Sequence
  Oligonucleotide for detection of SNP TSC0009368
raaacccaaaaat

SEQ ID NO: 30579 - DNA, 13 bp, Artificial Sequence
  Oligonucleotide for detection of SNP TSC0009368
attttcgggttty

SEQ ID NO: 30580 - DNA, 13 bp, Artificial Sequence
  Oligonucleotide for detection of SNP TSC0009368
raaacccgaaaat

SEQ ID NO: 30581 - DNA, 13 bp, Artificial Sequence
  Oligonucleotide for detection of SNP TSC0009368
ggaatttggagat

SEQ ID NO: 30582 - DNA, 13 bp, Artificial Sequence
  Oligonucleotide for detection of SNP TSC0009368
atctccaaattcc

SEQ ID NO: 30583 - DNA, 13 bp, Artificial Sequence
  Oligonucleotide for detection of SNP TSC0009368
ggaattcggagat

SEQ ID NO: 30584 - DNA, 13 bp, Artificial Sequence
  Oligonucleotide for detection of SNP TSC0009368
atctccgaattcc

SEQ ID NO: 30585 - DNA, 13 bp, Artificial Sequence
  Oligonucleotide for detection of SNP TSC0009375
ttaggaggttggg

SEQ ID NO: 30586 - DNA, 13 bp, Artificial Sequence
  Oligonucleotide for detection of SNP TSC0009375
cccaacctcctaa

SEQ ID NO: 30587 - DNA, 13 bp, Artificial Sequence
  Oligonucleotide for detection of SNP TSC0009375
ttaggaagttggg

SEQ ID NO: 30588 - DNA, 13 bp, Artificial Sequence
  Oligonucleotide for detection of SNP TSC0009375
cccaacttcctaa

SEQ ID NO: 30589 - DNA, 13 bp, Artificial Sequence
  Oligonucleotide for detection of SNP TSC0009376
ttttttattagta

SEQ ID NO: 30590 - DNA, 13 bp, Artificial Sequence
  Oligonucleotide for detection of SNP TSC0009376
tactaataaaaaa

SEQ ID NO: 30591 - DNA, 13 bp, Artificial Sequence
  Oligonucleotide for detection of SNP TSC0009376
ttttttgttagta

SEQ ID NO: 30592 - DNA, 13 bp, Artificial Sequence
  Oligonucleotide for detection of SNP TSC0009376
tactaacaaaaaa

SEQ ID NO: 30593 - DNA, 13 bp, Artificial Sequence
  Oligonucleotide for detection of SNP TSC0009379
taatttattttaa

SEQ ID NO: 30594 - DNA, 13 bp, Artificial Sequence
  Oligonucleotide for detection of SNP TSC0009379
ttaaaataaatta

SEQ ID NO: 30595 - DNA, 13 bp, Artificial Sequence
  Oligonucleotide for detection of SNP TSC0009379
taattttttttaa

SEQ ID NO: 30596 - DNA, 13 bp, Artificial Sequence
  Oligonucleotide for detection of SNP TSC0009379
ttaaaaaaaatta

SEQ ID NO: 30597 - DNA, 13 bp, Artificial Sequence
  Oligonucleotide for detection of SNP TSC0009379
ttaggataaattg

SEQ ID NO: 30598 - DNA, 13 bp, Artificial Sequence
  Oligonucleotide for detection of SNP TSC0009379
caatttatcctaa

SEQ ID NO: 30599 - DNA, 13 bp, Artificial Sequence
  Oligonucleotide for detection of SNP TSC0009379
ttaggaaaaattg

SEQ ID NO: 30600 - DNA, 13 bp, Artificial Sequence
  Oligonucleotide for detection of SNP TSC0009379
caatttttcctaa

SEQ ID NO: 30601 - DNA, 13 bp, Artificial Sequence
  Oligonucleotide for detection of SNP TSC0009380
ttaaaatgtgtty

SEQ ID NO: 30602 - DNA, 13 bp, Artificial Sequence
  Oligonucleotide for detection of SNP TSC0009380
raacacattttaa

SEQ ID NO: 30603 - DNA, 13 bp, Artificial Sequence
  Oligonucleotide for detection of SNP TSC0009380
ttaaaacgtgtty

SEQ ID NO: 30604 - DNA, 13 bp, Artificial Sequence
  Oligonucleotide for detection of SNP TSC0009380
raacacgttttaa

SEQ ID NO: 30605 - DNA, 13 bp, Artificial Sequence
  Oligonucleotide for detection of SNP TSC0009380
gaatatgttttgg

SEQ ID NO: 30606 - DNA, 13 bp, Artificial Sequence
  Oligonucleotide for detection of SNP TSC0009380
ccaaaacatattc

SEQ ID NO: 30607 - DNA, 13 bp, Artificial Sequence
  Oligonucleotide for detection of SNP TSC0009380
gaatatattttgg

SEQ ID NO: 30608 - DNA, 13 bp, Artificial Sequence
  Oligonucleotide for detection of SNP TSC0009380
ccaaaatatattc

SEQ ID NO: 30609 - DNA, 13 bp, Artificial Sequence
  Oligonucleotide for detection of SNP TSC0009380
gaatacgttttgg

SEQ ID NO: 30610 - DNA, 13 bp, Artificial Sequence
  Oligonucleotide for detection of SNP TSC0009380
ccaaaacgtattc

SEQ ID NO: 30611 - DNA, 13 bp, Artificial Sequence
  Oligonucleotide for detection of SNP TSC0009381
aaagttatatgtt

SEQ ID NO: 30612 - DNA, 13 bp, Artificial Sequence
  Oligonucleotide for detection of SNP TSC0009381
aacatataacttt

SEQ ID NO: 30613 - DNA, 13 bp, Artificial Sequence
  Oligonucleotide for detection of SNP TSC0009381
aaagttgtatgtt

SEQ ID NO: 30614 - DNA, 13 bp, Artificial Sequence
  Oligonucleotide for detection of SNP TSC0009381
aacatacaacttt

SEQ ID NO: 30615 - DNA, 13 bp, Artificial Sequence
  Oligonucleotide for detection of SNP TSC0009381
aaagtcgtatgtt

SEQ ID NO: 30616 - DNA, 13 bp, Artificial Sequence
  Oligonucleotide for detection of SNP TSC0009381
aacatacgacttt

SEQ ID NO: 30617 - DNA, 13 bp, Artificial Sequence
  Oligonucleotide for detection of SNP TSC0009381
agtatgtggtttt

SEQ ID NO: 30618 - DNA, 13 bp, Artificial Sequence
  Oligonucleotide for detection of SNP TSC0009381
aaaaccacatact

SEQ ID NO: 30619 - DNA, 13 bp, Artificial Sequence
  Oligonucleotide for detection of SNP TSC0009381
agtatgcggtttt

SEQ ID NO: 30620 - DNA, 13 bp, Artificial Sequence
  Oligonucleotide for detection of SNP TSC0009381
aaaaccgcatact

SEQ ID NO: 30621 - DNA, 13 bp, Artificial Sequence
  Oligonucleotide for detection of SNP TSC0009388
ttatgggttttty

SEQ ID NO: 30622 - DNA, 13 bp, Artificial Sequence
  Oligonucleotide for detection of SNP TSC0009388
raaaaacccataa

SEQ ID NO: 30623 - DNA, 13 bp, Artificial Sequence
  Oligonucleotide for detection of SNP TSC0009388
ttatggtttttty

SEQ ID NO: 30624 - DNA, 13 bp, Artificial Sequence
  Oligonucleotide for detection of SNP TSC0009388
raaaaaaccataa

SEQ ID NO: 30625 - DNA, 13 bp, Artificial Sequence
  Oligonucleotide for detection of SNP TSC0009388
ggaaaatttatga

SEQ ID NO: 30626 - DNA, 13 bp, Artificial Sequence
  Oligonucleotide for detection of SNP TSC0009388
tcataaattttcc

SEQ ID NO: 30627 - DNA, 13 bp, Artificial Sequence
  Oligonucleotide for detection of SNP TSC0009388
ggaaaaattatga

SEQ ID NO: 30628 - DNA, 13 bp, Artificial Sequence
  Oligonucleotide for detection of SNP TSC0009388
tcataatttttcc

SEQ ID NO: 30629 - DNA, 13 bp, Artificial Sequence
  Oligonucleotide for detection of SNP TSC0009389
atatatatgggaa

SEQ ID NO: 30630 - DNA, 13 bp, Artificial Sequence
  Oligonucleotide for detection of SNP TSC0009389
ttcccatatatat

SEQ ID NO: 30631 - DNA, 13 bp, Artificial Sequence
  Oligonucleotide for detection of SNP TSC0009389
atatatgtgggaa

SEQ ID NO: 30632 - DNA, 13 bp, Artificial Sequence
  Oligonucleotide for detection of SNP TSC0009389
ttcccacatatat

SEQ ID NO: 30633 - DNA, 13 bp, Artificial Sequence
  Oligonucleotide for detection of SNP TSC0009389
atatacgtgggaa

SEQ ID NO: 30634 - DNA, 13 bp, Artificial Sequence
  Oligonucleotide for detection of SNP TSC0009389
ttcccacgtatat

SEQ ID NO: 30635 - DNA, 13 bp, Artificial Sequence
  Oligonucleotide for detection of SNP TSC0009389
tttttatgtgtgt

SEQ ID NO: 30636 - DNA, 13 bp, Artificial Sequence
  Oligonucleotide for detection of SNP TSC0009389
acacacataaaaa

SEQ ID NO: 30637 - DNA, 13 bp, Artificial Sequence
  Oligonucleotide for detection of SNP TSC0009389
tttttacgtgtgt

SEQ ID NO: 30638 - DNA, 13 bp, Artificial Sequence
  Oligonucleotide for detection of SNP TSC0009389
acacacgtaaaaa

SEQ ID NO: 30639 - DNA, 13 bp, Artificial Sequence
  Oligonucleotide for detection of SNP TSC0009391
ggatagatttaay

SEQ ID NO: 30640 - DNA, 13 bp, Artificial Sequence
  Oligonucleotide for detection of SNP TSC0009391
rttaaatctatcc

SEQ ID NO: 30641 - DNA, 13 bp, Artificial Sequence
  Oligonucleotide for detection of SNP TSC0009391
ggatagttttaay

SEQ ID NO: 30642 - DNA, 13 bp, Artificial Sequence
  Oligonucleotide for detection of SNP TSC0009391
rttaaaactatcc

SEQ ID NO: 30643 - DNA, 13 bp, Artificial Sequence
  Oligonucleotide for detection of SNP TSC0009391
gttgagtttatty

SEQ ID NO: 30644 - DNA, 13 bp, Artificial Sequence
  Oligonucleotide for detection of SNP TSC0009391
raataaactcaac

SEQ ID NO: 30645 - DNA, 13 bp, Artificial Sequence
  Oligonucleotide for detection of SNP TSC0009391
gttgagattatty

SEQ ID NO: 30646 - DNA, 13 bp, Artificial Sequence
  Oligonucleotide for detection of SNP TSC0009391
raataatctcaac

SEQ ID NO: 30647 - DNA, 13 bp, Artificial Sequence
  Oligonucleotide for detection of SNP TSC0009395
ttattggttaaag

SEQ ID NO: 30648 - DNA, 13 bp, Artificial Sequence
  Oligonucleotide for detection of SNP TSC0009395
ctttaaccaataa

SEQ ID NO: 30649 - DNA, 13 bp, Artificial Sequence
  Oligonucleotide for detection of SNP TSC0009395
ttattgattaaag

SEQ ID NO: 30650 - DNA, 13 bp, Artificial Sequence
  Oligonucleotide for detection of SNP TSC0009395
ctttaatcaataa

SEQ ID NO: 30651 - DNA, 13 bp, Artificial Sequence
  Oligonucleotide for detection of SNP TSC0009396
ttttatatattay

SEQ ID NO: 30652 - DNA, 13 bp, Artificial Sequence
  Oligonucleotide for detection of SNP TSC0009396
rtaatatataaaa

SEQ ID NO: 30653 - DNA, 13 bp, Artificial Sequence
  Oligonucleotide for detection of SNP TSC0009397
tttaaaagtgtgt

SEQ ID NO: 30654 - DNA, 13 bp, Artificial Sequence
  Oligonucleotide for detection of SNP TSC0009397
acacacttttaaa

SEQ ID NO: 30655 - DNA, 13 bp, Artificial Sequence
  Oligonucleotide for detection of SNP TSC0009397
tttaaatgtgtgt

SEQ ID NO: 30656 - DNA, 13 bp, Artificial Sequence
  Oligonucleotide for detection of SNP TSC0009397
acacacatttaaa

SEQ ID NO: 30657 - DNA, 13 bp, Artificial Sequence
  Oligonucleotide for detection of SNP TSC0009397
atatatttttaaa

SEQ ID NO: 30658 - DNA, 13 bp, Artificial Sequence
  Oligonucleotide for detection of SNP TSC0009397
tttaaaaatatat

SEQ ID NO: 30659 - DNA, 13 bp, Artificial Sequence
  Oligonucleotide for detection of SNP TSC0009397
atatatatttaaa

SEQ ID NO: 30660 - DNA, 13 bp, Artificial Sequence
  Oligonucleotide for detection of SNP TSC0009397
tttaaatatatat

SEQ ID NO: 30661 - DNA, 13 bp, Artificial Sequence
  Oligonucleotide for detection of SNP TSC0009402
ttttttgtttgtg

SEQ ID NO: 30662 - DNA, 13 bp, Artificial Sequence
  Oligonucleotide for detection of SNP TSC0009402
cacaaacaaaaaa

SEQ ID NO: 30663 - DNA, 13 bp, Artificial Sequence
  Oligonucleotide for detection of SNP TSC0009402
ttttttatttgtg

SEQ ID NO: 30664 - DNA, 13 bp, Artificial Sequence
  Oligonucleotide for detection of SNP TSC0009402
cacaaataaaaaa

SEQ ID NO: 30665 - DNA, 13 bp, Artificial Sequence
  Oligonucleotide for detection of SNP TSC0009418
tgtttgattttga

SEQ ID NO: 30666 - DNA, 13 bp, Artificial Sequence
  Oligonucleotide for detection of SNP TSC0009418
tcaaaatcaaaca

SEQ ID NO: 30667 - DNA, 13 bp, Artificial Sequence
  Oligonucleotide for detection of SNP TSC0009418
tgtttgtttttga

SEQ ID NO: 30668 - DNA, 13 bp, Artificial Sequence
  Oligonucleotide for detection of SNP TSC0009418
tcaaaaacaaaca

SEQ ID NO: 30669 - DNA, 13 bp, Artificial Sequence
  Oligonucleotide for detection of SNP TSC0009418
cgtttgattttga

SEQ ID NO: 30670 - DNA, 13 bp, Artificial Sequence
  Oligonucleotide for detection of SNP TSC0009418
tcaaaatcaaacg

SEQ ID NO: 30671 - DNA, 13 bp, Artificial Sequence
  Oligonucleotide for detection of SNP TSC0009418
cgtttgtttttga

SEQ ID NO: 30672 - DNA, 13 bp, Artificial Sequence
  Oligonucleotide for detection of SNP TSC0009418
tcaaaaacaaacg

SEQ ID NO: 30673 - DNA, 13 bp, Artificial Sequence
  Oligonucleotide for detection of SNP TSC0009418
ttaaggttaaatg

SEQ ID NO: 30674 - DNA, 13 bp, Artificial Sequence
  Oligonucleotide for detection of SNP TSC0009418
catttaaccttaa

SEQ ID NO: 30675 - DNA, 13 bp, Artificial Sequence
  Oligonucleotide for detection of SNP TSC0009418
ttaaggataaatg

SEQ ID NO: 30676 - DNA, 13 bp, Artificial Sequence
  Oligonucleotide for detection of SNP TSC0009418
catttatccttaa

SEQ ID NO: 30677 - DNA, 13 bp, Artificial Sequence
  Oligonucleotide for detection of SNP TSC0009418
ttaaggttaaacg

SEQ ID NO: 30678 - DNA, 13 bp, Artificial Sequence
  Oligonucleotide for detection of SNP TSC0009418
cgtttaaccttaa

SEQ ID NO: 30679 - DNA, 13 bp, Artificial Sequence
  Oligonucleotide for detection of SNP TSC0009418
ttaaggataaacg

SEQ ID NO: 30680 - DNA, 13 bp, Artificial Sequence
  Oligonucleotide for detection of SNP TSC0009418
cgtttatccttaa

SEQ ID NO: 30681 - DNA, 13 bp, Artificial Sequence
  Oligonucleotide for detection of SNP TSC0009419
aatttaatattay

SEQ ID NO: 30682 - DNA, 13 bp, Artificial Sequence
  Oligonucleotide for detection of SNP TSC0009419
rtaatattaaatt

SEQ ID NO: 30683 - DNA, 13 bp, Artificial Sequence
  Oligonucleotide for detection of SNP TSC0009419
aatttattattay

SEQ ID NO: 30684 - DNA, 13 bp, Artificial Sequence
  Oligonucleotide for detection of SNP TSC0009419
rtaataataaatt

SEQ ID NO: 30685 - DNA, 13 bp, Artificial Sequence
  Oligonucleotide for detection of SNP TSC0009419
gtaatgttgagtt

SEQ ID NO: 30686 - DNA, 13 bp, Artificial Sequence
  Oligonucleotide for detection of SNP TSC0009419
aactcaacattac

SEQ ID NO: 30687 - DNA, 13 bp, Artificial Sequence
  Oligonucleotide for detection of SNP TSC0009419
gtaatgatgagtt

SEQ ID NO: 30688 - DNA, 13 bp, Artificial Sequence
  Oligonucleotide for detection of SNP TSC0009419
aactcatcattac

SEQ ID NO: 30689 - DNA, 13 bp, Artificial Sequence
  Oligonucleotide for detection of SNP TSC0009420
ttttagggtaatt

SEQ ID NO: 30690 - DNA, 13 bp, Artificial Sequence
  Oligonucleotide for detection of SNP TSC0009420
aattaccctaaaa

SEQ ID NO: 30691 - DNA, 13 bp, Artificial Sequence
  Oligonucleotide for detection of SNP TSC0009420
ttttagagtaatt

SEQ ID NO: 30692 - DNA, 13 bp, Artificial Sequence
  Oligonucleotide for detection of SNP TSC0009420
aattactctaaaa

SEQ ID NO: 30693 - DNA, 13 bp, Artificial Sequence
  Oligonucleotide for detection of SNP TSC0009424
ttgtttatattaa

SEQ ID NO: 30694 - DNA, 13 bp, Artificial Sequence
  Oligonucleotide for detection of SNP TSC0009424
ttaatataaacaa

SEQ ID NO: 30695 - DNA, 13 bp, Artificial Sequence
  Oligonucleotide for detection of SNP TSC0009424
ttgtttgtattaa

SEQ ID NO: 30696 - DNA, 13 bp, Artificial Sequence
  Oligonucleotide for detection of SNP TSC0009424
ttaatacaaacaa

SEQ ID NO: 30697 - DNA, 13 bp, Artificial Sequence
  Oligonucleotide for detection of SNP TSC0009424
ttgttcgtattaa

SEQ ID NO: 30698 - DNA, 13 bp, Artificial Sequence
  Oligonucleotide for detection of SNP TSC0009424
ttaatacgaacaa

SEQ ID NO: 30699 - DNA, 13 bp, Artificial Sequence
  Oligonucleotide for detection of SNP TSC0009424
ttagtatgggtag

SEQ ID NO: 30700 - DNA, 13 bp, Artificial Sequence
  Oligonucleotide for detection of SNP TSC0009424
ctacccatactaa

SEQ ID NO: 30701 - DNA, 13 bp, Artificial Sequence
  Oligonucleotide for detection of SNP TSC0009424
ttagtacgggtag

SEQ ID NO: 30702 - DNA, 13 bp, Artificial Sequence
  Oligonucleotide for detection of SNP TSC0009424
ctacccgtactaa

SEQ ID NO: 30703 - DNA, 13 bp, Artificial Sequence
  Oligonucleotide for detection of SNP TSC0009435
tatgaggatttaa

SEQ ID NO: 30704 - DNA, 13 bp, Artificial Sequence
  Oligonucleotide for detection of SNP TSC0009435
ttaaatcctcata

SEQ ID NO: 30705 - DNA, 13 bp, Artificial Sequence
  Oligonucleotide for detection of SNP TSC0009435
tatgagaatttaa

SEQ ID NO: 30706 - DNA, 13 bp, Artificial Sequence
  Oligonucleotide for detection of SNP TSC0009435
ttaaattctcata

SEQ ID NO: 30707 - DNA, 13 bp, Artificial Sequence
  Oligonucleotide for detection of SNP TSC0009436
tgtttgtagttta

SEQ ID NO: 30708 - DNA, 13 bp, Artificial Sequence
  Oligonucleotide for detection of SNP TSC0009436
taaactacaaaca

SEQ ID NO: 30709 - DNA, 13 bp, Artificial Sequence
  Oligonucleotide for detection of SNP TSC0009436
tgtttggagttta

SEQ ID NO: 30710 - DNA, 13 bp, Artificial Sequence
  Oligonucleotide for detection of SNP TSC0009436
taaactccaaaca

SEQ ID NO: 30711 - DNA, 13 bp, Artificial Sequence
  Oligonucleotide for detection of SNP TSC0009436
tgaattgtaaata

SEQ ID NO: 30712 - DNA, 13 bp, Artificial Sequence
  Oligonucleotide for detection of SNP TSC0009436
tatttacaattca

SEQ ID NO: 30713 - DNA, 13 bp, Artificial Sequence
  Oligonucleotide for detection of SNP TSC0009436
tgaattttaaata

SEQ ID NO: 30714 - DNA, 13 bp, Artificial Sequence
  Oligonucleotide for detection of SNP TSC0009436
tatttaaaattca

SEQ ID NO: 30715 - DNA, 13 bp, Artificial Sequence
  Oligonucleotide for detection of SNP TSC0009439
aggtttaaattgt

SEQ ID NO: 30716 - DNA, 13 bp, Artificial Sequence
  Oligonucleotide for detection of SNP TSC0009439
acaatttaaacct

SEQ ID NO: 30717 - DNA, 13 bp, Artificial Sequence
  Oligonucleotide for detection of SNP TSC0009439
aggtttgaattgt

SEQ ID NO: 30718 - DNA, 13 bp, Artificial Sequence
  Oligonucleotide for detection of SNP TSC0009439
acaattcaaacct

SEQ ID NO: 30719 - DNA, 13 bp, Artificial Sequence
  Oligonucleotide for detection of SNP TSC0009442
aaatttaaaatgy

SEQ ID NO: 30720 - DNA, 13 bp, Artificial Sequence
  Oligonucleotide for detection of SNP TSC0009442
rcattttaaattt

SEQ ID NO: 30721 - DNA, 13 bp, Artificial Sequence
  Oligonucleotide for detection of SNP TSC0009442
aaattttaaatgy

SEQ ID NO: 30722 - DNA, 13 bp, Artificial Sequence
  Oligonucleotide for detection of SNP TSC0009442
rcatttaaaattt

SEQ ID NO: 30723 - DNA, 13 bp, Artificial Sequence
  Oligonucleotide for detection of SNP TSC0009442
gtattttaggttt

SEQ ID NO: 30724 - DNA, 13 bp, Artificial Sequence
  Oligonucleotide for detection of SNP TSC0009442
aaacctaaaatac

SEQ ID NO: 30725 - DNA, 13 bp, Artificial Sequence
  Oligonucleotide for detection of SNP TSC0009442
gtatttgaggttt

SEQ ID NO: 30726 - DNA, 13 bp, Artificial Sequence
  Oligonucleotide for detection of SNP TSC0009442
aaacctcaaatac

SEQ ID NO: 30727 - DNA, 13 bp, Artificial Sequence
  Oligonucleotide for detection of SNP TSC0009445
ttttaaaataata

SEQ ID NO: 30728 - DNA, 13 bp, Artificial Sequence
  Oligonucleotide for detection of SNP TSC0009445
tattattttaaaa

SEQ ID NO: 30729 - DNA, 13 bp, Artificial Sequence
  Oligonucleotide for detection of SNP TSC0009445
ttttaagataata

SEQ ID NO: 30730 - DNA, 13 bp, Artificial Sequence
  Oligonucleotide for detection of SNP TSC0009445
tattatcttaaaa

SEQ ID NO: 30731 - DNA, 13 bp, Artificial Sequence
  Oligonucleotide for detection of SNP TSC0009446
agaaattgttgty

SEQ ID NO: 30732 - DNA, 13 bp, Artificial Sequence
  Oligonucleotide for detection of SNP TSC0009446
racaacaatttct

SEQ ID NO: 30733 - DNA, 13 bp, Artificial Sequence
  Oligonucleotide for detection of SNP TSC0009446
agaaatcgttgty

SEQ ID NO: 30734 - DNA, 13 bp, Artificial Sequence
  Oligonucleotide for detection of SNP TSC0009446
racaacgatttct

SEQ ID NO: 30735 - DNA, 13 bp, Artificial Sequence
  Oligonucleotide for detection of SNP TSC0009446
ggtaatgattttt

SEQ ID NO: 30736 - DNA, 13 bp, Artificial Sequence
  Oligonucleotide for detection of SNP TSC0009446
aaaaatcattacc

SEQ ID NO: 30737 - DNA, 13 bp, Artificial Sequence
  Oligonucleotide for detection of SNP TSC0009446
ggtaataattttt

SEQ ID NO: 30738 - DNA, 13 bp, Artificial Sequence
  Oligonucleotide for detection of SNP TSC0009446
aaaaattattacc

SEQ ID NO: 30739 - DNA, 13 bp, Artificial Sequence
  Oligonucleotide for detection of SNP TSC0009446
ggtaacgattttt

SEQ ID NO: 30740 - DNA, 13 bp, Artificial Sequence
  Oligonucleotide for detection of SNP TSC0009446
aaaaatcgttacc

SEQ ID NO: 30741 - DNA, 13 bp, Artificial Sequence
  Oligonucleotide for detection of SNP TSC0009450
gggtggaagaata

SEQ ID NO: 30742 - DNA, 13 bp, Artificial Sequence
  Oligonucleotide for detection of SNP TSC0009450
tattcttccaccc

SEQ ID NO: 30743 - DNA, 13 bp, Artificial Sequence
  Oligonucleotide for detection of SNP TSC0009450
gggtggtagaata

SEQ ID NO: 30744 - DNA, 13 bp, Artificial Sequence
  Oligonucleotide for detection of SNP TSC0009450
tattctaccaccc

SEQ ID NO: 30745 - DNA, 13 bp, Artificial Sequence
  Oligonucleotide for detection of SNP TSC0009450
tgtttttttatty

SEQ ID NO: 30746 - DNA, 13 bp, Artificial Sequence
  Oligonucleotide for detection of SNP TSC0009450
raataaaaaaaca

SEQ ID NO: 30747 - DNA, 13 bp, Artificial Sequence
  Oligonucleotide for detection of SNP TSC0009450
tgttttattatty

SEQ ID NO: 30748 - DNA, 13 bp, Artificial Sequence
  Oligonucleotide for detection of SNP TSC0009450
raataataaaaca

SEQ ID NO: 30749 - DNA, 13 bp, Artificial Sequence
  Oligonucleotide for detection of SNP TSC0009453
tagttgatatatt

SEQ ID NO: 30750 - DNA, 13 bp, Artificial Sequence
  Oligonucleotide for detection of SNP TSC0009453
aatatatcaacta

SEQ ID NO: 30751 - DNA, 13 bp, Artificial Sequence
  Oligonucleotide for detection of SNP TSC0009453
tagttggtatatt

SEQ ID NO: 30752 - DNA, 13 bp, Artificial Sequence
  Oligonucleotide for detection of SNP TSC0009453
aatataccaacta

SEQ ID NO: 30753 - DNA, 13 bp, Artificial Sequence
  Oligonucleotide for detection of SNP TSC0009454
aatggagtatttt

SEQ ID NO: 30754 - DNA, 13 bp, Artificial Sequence
  Oligonucleotide for detection of SNP TSC0009454
aaaatactccatt

SEQ ID NO: 30755 - DNA, 13 bp, Artificial Sequence
  Oligonucleotide for detection of SNP TSC0009454
aatggaatatttt

SEQ ID NO: 30756 - DNA, 13 bp, Artificial Sequence
  Oligonucleotide for detection of SNP TSC0009454
aaaatattccatt

SEQ ID NO: 30757 - DNA, 13 bp, Artificial Sequence
  Oligonucleotide for detection of SNP TSC0009455
tataaggtattaa

SEQ ID NO: 30758 - DNA, 13 bp, Artificial Sequence
  Oligonucleotide for detection of SNP TSC0009455
ttaataccttata

SEQ ID NO: 30759 - DNA, 13 bp, Artificial Sequence
  Oligonucleotide for detection of SNP TSC0009455
tataagatattaa

SEQ ID NO: 30760 - DNA, 13 bp, Artificial Sequence
  Oligonucleotide for detection of SNP TSC0009455
ttaatatcttata

SEQ ID NO: 30761 - DNA, 13 bp, Artificial Sequence
  Oligonucleotide for detection of SNP TSC0009457
tgattgtggtaga

SEQ ID NO: 30762 - DNA, 13 bp, Artificial Sequence
  Oligonucleotide for detection of SNP TSC0009457
tctaccacaatca

SEQ ID NO: 30763 - DNA, 13 bp, Artificial Sequence
  Oligonucleotide for detection of SNP TSC0009457
cgattgtggtaga

SEQ ID NO: 30764 - DNA, 13 bp, Artificial Sequence
  Oligonucleotide for detection of SNP TSC0009457
tctaccacaatcg

SEQ ID NO: 30765 - DNA, 13 bp, Artificial Sequence
  Oligonucleotide for detection of SNP TSC0009457
tgatcgtggtaga

SEQ ID NO: 30766 - DNA, 13 bp, Artificial Sequence
  Oligonucleotide for detection of SNP TSC0009457
tctaccacgatca

SEQ ID NO: 30767 - DNA, 13 bp, Artificial Sequence
  Oligonucleotide for detection of SNP TSC0009457
tgattgcggtaga

SEQ ID NO: 30768 - DNA, 13 bp, Artificial Sequence
  Oligonucleotide for detection of SNP TSC0009457
tctaccgcaatca

SEQ ID NO: 30769 - DNA, 13 bp, Artificial Sequence
  Oligonucleotide for detection of SNP TSC0009457
cgatcgtggtaga

SEQ ID NO: 30770 - DNA, 13 bp, Artificial Sequence
  Oligonucleotide for detection of SNP TSC0009457
tctaccacgatcg

SEQ ID NO: 30771 - DNA, 13 bp, Artificial Sequence
  Oligonucleotide for detection of SNP TSC0009457
cgattgcggtaga

SEQ ID NO: 30772 - DNA, 13 bp, Artificial Sequence
  Oligonucleotide for detection of SNP TSC0009457
tctaccgcaatcg

SEQ ID NO: 30773 - DNA, 13 bp, Artificial Sequence
  Oligonucleotide for detection of SNP TSC0009457
tgatcgcggtaga

SEQ ID NO: 30774 - DNA, 13 bp, Artificial Sequence
  Oligonucleotide for detection of SNP TSC0009457
tctaccgcgatca

SEQ ID NO: 30775 - DNA, 13 bp, Artificial Sequence
  Oligonucleotide for detection of SNP TSC0009457
cgatcgcggtaga

SEQ ID NO: 30776 - DNA, 13 bp, Artificial Sequence
  Oligonucleotide for detection of SNP TSC0009457
tctaccgcgatcg

SEQ ID NO: 30777 - DNA, 13 bp, Artificial Sequence
  Oligonucleotide for detection of SNP TSC0009457
tttgttgtgattg

SEQ ID NO: 30778 - DNA, 13 bp, Artificial Sequence
  Oligonucleotide for detection of SNP TSC0009457
caatcacaacaaa

SEQ ID NO: 30779 - DNA, 13 bp, Artificial Sequence
  Oligonucleotide for detection of SNP TSC0009457
tttgttatgattg

SEQ ID NO: 30780 - DNA, 13 bp, Artificial Sequence
  Oligonucleotide for detection of SNP TSC0009457
caatcataacaaa

SEQ ID NO: 30781 - DNA, 13 bp, Artificial Sequence
  Oligonucleotide for detection of SNP TSC0009457
tttgtcgtgattg

SEQ ID NO: 30782 - DNA, 13 bp, Artificial Sequence
  Oligonucleotide for detection of SNP TSC0009457
caatcacgacaaa

SEQ ID NO: 30783 - DNA, 13 bp, Artificial Sequence
  Oligonucleotide for detection of SNP TSC0009457
tttgttacgattg

SEQ ID NO: 30784 - DNA, 13 bp, Artificial Sequence
  Oligonucleotide for detection of SNP TSC0009457
caatcgtaacaaa

SEQ ID NO: 30785 - DNA, 13 bp, Artificial Sequence
  Oligonucleotide for detection of SNP TSC0009457
tttgttgcgattg

SEQ ID NO: 30786 - DNA, 13 bp, Artificial Sequence
  Oligonucleotide for detection of SNP TSC0009457
caatcgcaacaaa

SEQ ID NO: 30787 - DNA, 13 bp, Artificial Sequence
  Oligonucleotide for detection of SNP TSC0009457
tttgttatgatcg

SEQ ID NO: 30788 - DNA, 13 bp, Artificial Sequence
  Oligonucleotide for detection of SNP TSC0009457
cgatcataacaaa

SEQ ID NO: 30789 - DNA, 13 bp, Artificial Sequence
  Oligonucleotide for detection of SNP TSC0009457
tttgttgtgatcg

SEQ ID NO: 30790 - DNA, 13 bp, Artificial Sequence
  Oligonucleotide for detection of SNP TSC0009457
cgatcacaacaaa

SEQ ID NO: 30791 - DNA, 13 bp, Artificial Sequence
  Oligonucleotide for detection of SNP TSC0009457
tttgttacgatcg

SEQ ID NO: 30792 - DNA, 13 bp, Artificial Sequence
  Oligonucleotide for detection of SNP TSC0009457
cgatcgtaacaaa

SEQ ID NO: 30793 - DNA, 13 bp, Artificial Sequence
  Oligonucleotide for detection of SNP TSC0009457
tttgtcgcgattg

SEQ ID NO: 30794 - DNA, 13 bp, Artificial Sequence
  Oligonucleotide for detection of SNP TSC0009457
caatcgcgacaaa

SEQ ID NO: 30795 - DNA, 13 bp, Artificial Sequence
  Oligonucleotide for detection of SNP TSC0009457
tttgtcgtgatcg

SEQ ID NO: 30796 - DNA, 13 bp, Artificial Sequence
  Oligonucleotide for detection of SNP TSC0009457
cgatcacgacaaa

SEQ ID NO: 30797 - DNA, 13 bp, Artificial Sequence
  Oligonucleotide for detection of SNP TSC0009457
tttgttgcgatcg

SEQ ID NO: 30798 - DNA, 13 bp, Artificial Sequence
  Oligonucleotide for detection of SNP TSC0009457
cgatcgcaacaaa

SEQ ID NO: 30799 - DNA, 13 bp, Artificial Sequence
  Oligonucleotide for detection of SNP TSC0009457
tttgtcgcgatcg

SEQ ID NO: 30800 - DNA, 13 bp, Artificial Sequence
  Oligonucleotide for detection of SNP TSC0009457
cgatcgcgacaaa

SEQ ID NO: 30801 - DNA, 13 bp, Artificial Sequence
  Oligonucleotide for detection of SNP TSC0009458
agaggtgtgagat

SEQ ID NO: 30802 - DNA, 13 bp, Artificial Sequence
  Oligonucleotide for detection of SNP TSC0009458
atctcacacctct

SEQ ID NO: 30803 - DNA, 13 bp, Artificial Sequence
  Oligonucleotide for detection of SNP TSC0009458
agaggtatgagat

SEQ ID NO: 30804 - DNA, 13 bp, Artificial Sequence
  Oligonucleotide for detection of SNP TSC0009458
atctcatacctct

SEQ ID NO: 30805 - DNA, 13 bp, Artificial Sequence
  Oligonucleotide for detection of SNP TSC0009460
tgaaaatgtggaa

SEQ ID NO: 30806 - DNA, 13 bp, Artificial Sequence
  Oligonucleotide for detection of SNP TSC0009460
ttccacattttca

SEQ ID NO: 30807 - DNA, 13 bp, Artificial Sequence
  Oligonucleotide for detection of SNP TSC0009460
tgaaaacgtggaa

SEQ ID NO: 30808 - DNA, 13 bp, Artificial Sequence
  Oligonucleotide for detection of SNP TSC0009460
ttccacgttttca

SEQ ID NO: 30809 - DNA, 13 bp, Artificial Sequence
  Oligonucleotide for detection of SNP TSC0009463
ttaaatgatttta

SEQ ID NO: 30810 - DNA, 13 bp, Artificial Sequence
  Oligonucleotide for detection of SNP TSC0009463
taaaatcatttaa

SEQ ID NO: 30811 - DNA, 13 bp, Artificial Sequence
  Oligonucleotide for detection of SNP TSC0009464
ttttttattatgy

SEQ ID NO: 30812 - DNA, 13 bp, Artificial Sequence
  Oligonucleotide for detection of SNP TSC0009464
rcataataaaaaa

SEQ ID NO: 30813 - DNA, 13 bp, Artificial Sequence
  Oligonucleotide for detection of SNP TSC0009464
tttttttttatgy

SEQ ID NO: 30814 - DNA, 13 bp, Artificial Sequence
  Oligonucleotide for detection of SNP TSC0009464
rcataaaaaaaaa

SEQ ID NO: 30815 - DNA, 13 bp, Artificial Sequence
  Oligonucleotide for detection of SNP TSC0009464
gtataataaaaag

SEQ ID NO: 30816 - DNA, 13 bp, Artificial Sequence
  Oligonucleotide for detection of SNP TSC0009464
ctttttattatac

SEQ ID NO: 30817 - DNA, 13 bp, Artificial Sequence
  Oligonucleotide for detection of SNP TSC0009464
gtataagaaaaag

SEQ ID NO: 30818 - DNA, 13 bp, Artificial Sequence
  Oligonucleotide for detection of SNP TSC0009464
ctttttcttatac

SEQ ID NO: 30819 - DNA, 13 bp, Artificial Sequence
  Oligonucleotide for detection of SNP TSC0009476
aagtaggggaaat

SEQ ID NO: 30820 - DNA, 13 bp, Artificial Sequence
  Oligonucleotide for detection of SNP TSC0009476
atttcccctactt

SEQ ID NO: 30821 - DNA, 13 bp, Artificial Sequence
  Oligonucleotide for detection of SNP TSC0009476
aagtagaggaaat

SEQ ID NO: 30822 - DNA, 13 bp, Artificial Sequence
  Oligonucleotide for detection of SNP TSC0009476
atttcctctactt

SEQ ID NO: 30823 - DNA, 13 bp, Artificial Sequence
  Oligonucleotide for detection of SNP TSC0009477
tatttatgtttag

SEQ ID NO: 30824 - DNA, 13 bp, Artificial Sequence
  Oligonucleotide for detection of SNP TSC0009477
ctaaacataaata

SEQ ID NO: 30825 - DNA, 13 bp, Artificial Sequence
  Oligonucleotide for detection of SNP TSC0009477
tatttacgtttag

SEQ ID NO: 30826 - DNA, 13 bp, Artificial Sequence
  Oligonucleotide for detection of SNP TSC0009477
ctaaacgtaaata

SEQ ID NO: 30827 - DNA, 13 bp, Artificial Sequence
  Oligonucleotide for detection of SNP TSC0009477
ttgaatgtaagta

SEQ ID NO: 30828 - DNA, 13 bp, Artificial Sequence
  Oligonucleotide for detection of SNP TSC0009477
tacttacattcaa

SEQ ID NO: 30829 - DNA, 13 bp, Artificial Sequence
  Oligonucleotide for detection of SNP TSC0009477
ttgaatataagta

SEQ ID NO: 30830 - DNA, 13 bp, Artificial Sequence
  Oligonucleotide for detection of SNP TSC0009477
tacttatattcaa

SEQ ID NO: 30831 - DNA, 13 bp, Artificial Sequence
  Oligonucleotide for detection of SNP TSC0009477
ttgaacgtaagta

SEQ ID NO: 30832 - DNA, 13 bp, Artificial Sequence
  Oligonucleotide for detection of SNP TSC0009477
tacttacgttcaa

SEQ ID NO: 30833 - DNA, 13 bp, Artificial Sequence
  Oligonucleotide for detection of SNP TSC0009488
tattaagtaatty

SEQ ID NO: 30834 - DNA, 13 bp, Artificial Sequence
  Oligonucleotide for detection of SNP TSC0009488
raattacttaata

SEQ ID NO: 30835 - DNA, 13 bp, Artificial Sequence
  Oligonucleotide for detection of SNP TSC0009488
tattaaataatty

SEQ ID NO: 30836 - DNA, 13 bp, Artificial Sequence
  Oligonucleotide for detection of SNP TSC0009488
raattatttaata

SEQ ID NO: 30837 - DNA, 13 bp, Artificial Sequence
  Oligonucleotide for detection of SNP TSC0009489
aaagagaagatag

SEQ ID NO: 30838 - DNA, 13 bp, Artificial Sequence
  Oligonucleotide for detection of SNP TSC0009489
ctatcttctcttt

SEQ ID NO: 30839 - DNA, 13 bp, Artificial Sequence
  Oligonucleotide for detection of SNP TSC0009489
aaagaggagatag

SEQ ID NO: 30840 - DNA, 13 bp, Artificial Sequence
  Oligonucleotide for detection of SNP TSC0009489
ctatctcctcttt

SEQ ID NO: 30841 - DNA, 13 bp, Artificial Sequence
  Oligonucleotide for detection of SNP TSC0009490
gttagggtgaggg

SEQ ID NO: 30842 - DNA, 13 bp, Artificial Sequence
  Oligonucleotide for detection of SNP TSC0009490
ccctcaccctaac

SEQ ID NO: 30843 - DNA, 13 bp, Artificial Sequence
  Oligonucleotide for detection of SNP TSC0009490
gttaggttgaggg

SEQ ID NO: 30844 - DNA, 13 bp, Artificial Sequence
  Oligonucleotide for detection of SNP TSC0009490
ccctcaacctaac

SEQ ID NO: 30845 - DNA, 13 bp, Artificial Sequence
  Oligonucleotide for detection of SNP TSC0009490
tttttattttgay

SEQ ID NO: 30846 - DNA, 13 bp, Artificial Sequence
  Oligonucleotide for detection of SNP TSC0009490
rtcaaaataaaaa

SEQ ID NO: 30847 - DNA, 13 bp, Artificial Sequence
  Oligonucleotide for detection of SNP TSC0009490
tttttaatttgay

SEQ ID NO: 30848 - DNA, 13 bp, Artificial Sequence
  Oligonucleotide for detection of SNP TSC0009490
rtcaaattaaaaa

SEQ ID NO: 30849 - DNA, 13 bp, Artificial Sequence
  Oligonucleotide for detection of SNP TSC0009493
ttttgaatttaag

SEQ ID NO: 30850 - DNA, 13 bp, Artificial Sequence
  Oligonucleotide for detection of SNP TSC0009493
cttaaattcaaaa

SEQ ID NO: 30851 - DNA, 13 bp, Artificial Sequence
  Oligonucleotide for detection of SNP TSC0009493
ttttgattttaag

SEQ ID NO: 30852 - DNA, 13 bp, Artificial Sequence
  Oligonucleotide for detection of SNP TSC0009493
cttaaaatcaaaa

SEQ ID NO: 30853 - DNA, 13 bp, Artificial Sequence
  Oligonucleotide for detection of SNP TSC0009493
tttgagtttagga

SEQ ID NO: 30854 - DNA, 13 bp, Artificial Sequence
  Oligonucleotide for detection of SNP TSC0009493
tcctaaactcaaa

SEQ ID NO: 30855 - DNA, 13 bp, Artificial Sequence
  Oligonucleotide for detection of SNP TSC0009493
tttgaggttagga

SEQ ID NO: 30856 - DNA, 13 bp, Artificial Sequence
  Oligonucleotide for detection of SNP TSC0009493
tcctaacctcaaa

SEQ ID NO: 30857 - DNA, 13 bp, Artificial Sequence
  Oligonucleotide for detection of SNP TSC0009494
gttgaatgtggtg

SEQ ID NO: 30858 - DNA, 13 bp, Artificial Sequence
  Oligonucleotide for detection of SNP TSC0009494
caccacattcaac

SEQ ID NO: 30859 - DNA, 13 bp, Artificial Sequence
  Oligonucleotide for detection of SNP TSC0009494
gttgaacgtggtg

SEQ ID NO: 30860 - DNA, 13 bp, Artificial Sequence
  Oligonucleotide for detection of SNP TSC0009494
caccacgttcaac

SEQ ID NO: 30861 - DNA, 13 bp, Artificial Sequence
  Oligonucleotide for detection of SNP TSC0009498
tgatagtgtttag

SEQ ID NO: 30862 - DNA, 13 bp, Artificial Sequence
  Oligonucleotide for detection of SNP TSC0009498
ctaaacactatca

SEQ ID NO: 30863 - DNA, 13 bp, Artificial Sequence
  Oligonucleotide for detection of SNP TSC0009498
tgatagcgtttag

SEQ ID NO: 30864 - DNA, 13 bp, Artificial Sequence
  Oligonucleotide for detection of SNP TSC0009498
ctaaacgctatca

SEQ ID NO: 30865 - DNA, 13 bp, Artificial Sequence
  Oligonucleotide for detection of SNP TSC0009498
ttggatgttgtta

SEQ ID NO: 30866 - DNA, 13 bp, Artificial Sequence
  Oligonucleotide for detection of SNP TSC0009498
taacaacatccaa

SEQ ID NO: 30867 - DNA, 13 bp, Artificial Sequence
  Oligonucleotide for detection of SNP TSC0009498
ttggatattgtta

SEQ ID NO: 30868 - DNA, 13 bp, Artificial Sequence
  Oligonucleotide for detection of SNP TSC0009498
taacaatatccaa

SEQ ID NO: 30869 - DNA, 13 bp, Artificial Sequence
  Oligonucleotide for detection of SNP TSC0009498
ttggacgttgtta

SEQ ID NO: 30870 - DNA, 13 bp, Artificial Sequence
  Oligonucleotide for detection of SNP TSC0009498
taacaacgtccaa

SEQ ID NO: 30871 - DNA, 13 bp, Artificial Sequence
  Oligonucleotide for detection of SNP TSC0009499
gggtttagaaaty

SEQ ID NO: 30872 - DNA, 13 bp, Artificial Sequence
  Oligonucleotide for detection of SNP TSC0009499
ratttctaaaccc

SEQ ID NO: 30873 - DNA, 13 bp, Artificial Sequence
  Oligonucleotide for detection of SNP TSC0009499
gggtttggaaaty

SEQ ID NO: 30874 - DNA, 13 bp, Artificial Sequence
  Oligonucleotide for detection of SNP TSC0009499
ratttccaaaccc

SEQ ID NO: 30875 - DNA, 13 bp, Artificial Sequence
  Oligonucleotide for detection of SNP TSC0009499
gggttcggaaaty

SEQ ID NO: 30876 - DNA, 13 bp, Artificial Sequence
  Oligonucleotide for detection of SNP TSC0009499
ratttccgaaccc

SEQ ID NO: 30877 - DNA, 13 bp, Artificial Sequence
  Oligonucleotide for detection of SNP TSC0009499
gatttttgggtty

SEQ ID NO: 30878 - DNA, 13 bp, Artificial Sequence
  Oligonucleotide for detection of SNP TSC0009499
raacccaaaaatc

SEQ ID NO: 30879 - DNA, 13 bp, Artificial Sequence
  Oligonucleotide for detection of SNP TSC0009499
gattttcgggtty

SEQ ID NO: 30880 - DNA, 13 bp, Artificial Sequence
  Oligonucleotide for detection of SNP TSC0009499
raacccgaaaatc

SEQ ID NO: 30881 - DNA, 13 bp, Artificial Sequence
  Oligonucleotide for detection of SNP TSC0009500
ttagtttggttgg

SEQ ID NO: 30882 - DNA, 13 bp, Artificial Sequence
  Oligonucleotide for detection of SNP TSC0009500
ccaaccaaactaa

SEQ ID NO: 30883 - DNA, 13 bp, Artificial Sequence
  Oligonucleotide for detection of SNP TSC0009500
ttagttcggttgg

SEQ ID NO: 30884 - DNA, 13 bp, Artificial Sequence
  Oligonucleotide for detection of SNP TSC0009500
ccaaccgaactaa

SEQ ID NO: 30885 - DNA, 13 bp, Artificial Sequence
  Oligonucleotide for detection of SNP TSC0009500
ttagttgagttgg

SEQ ID NO: 30886 - DNA, 13 bp, Artificial Sequence
  Oligonucleotide for detection of SNP TSC0009500
ccaactcaactaa

SEQ ID NO: 30887 - DNA, 13 bp, Artificial Sequence
  Oligonucleotide for detection of SNP TSC0009500
ttagttaagttgg

SEQ ID NO: 30888 - DNA, 13 bp, Artificial Sequence
  Oligonucleotide for detection of SNP TSC0009500
ccaacttaactaa

SEQ ID NO: 30889 - DNA, 13 bp, Artificial Sequence
  Oligonucleotide for detection of SNP TSC0009500
ttagtcgagttgg

SEQ ID NO: 30890 - DNA, 13 bp, Artificial Sequence
  Oligonucleotide for detection of SNP TSC0009500
ccaactcgactaa

SEQ ID NO: 30891 - DNA, 13 bp, Artificial Sequence
  Oligonucleotide for detection of SNP TSC0009503
gataaattgtgay

SEQ ID NO: 30892 - DNA, 13 bp, Artificial Sequence
  Oligonucleotide for detection of SNP TSC0009503
rtcacaatttatc

SEQ ID NO: 30893 - DNA, 13 bp, Artificial Sequence
  Oligonucleotide for detection of SNP TSC0009503
gataaagtgtgay

SEQ ID NO: 30894 - DNA, 13 bp, Artificial Sequence
  Oligonucleotide for detection of SNP TSC0009503
rtcacactttatc

SEQ ID NO: 30895 - DNA, 13 bp, Artificial Sequence
  Oligonucleotide for detection of SNP TSC0009503
gttatagtttgty

SEQ ID NO: 30896 - DNA, 13 bp, Artificial Sequence
  Oligonucleotide for detection of SNP TSC0009503
racaaactataac

SEQ ID NO: 30897 - DNA, 13 bp, Artificial Sequence
  Oligonucleotide for detection of SNP TSC0009503
gttatattttgty

SEQ ID NO: 30898 - DNA, 13 bp, Artificial Sequence
  Oligonucleotide for detection of SNP TSC0009503
racaaaatataac

SEQ ID NO: 30899 - DNA, 13 bp, Artificial Sequence
  Oligonucleotide for detection of SNP TSC0009504
aaagtaatttttg

SEQ ID NO: 30900 - DNA, 13 bp, Artificial Sequence
  Oligonucleotide for detection of SNP TSC0009504
caaaaattacttt

SEQ ID NO: 30901 - DNA, 13 bp, Artificial Sequence
  Oligonucleotide for detection of SNP TSC0009504
aaagtattttttg

SEQ ID NO: 30902 - DNA, 13 bp, Artificial Sequence
  Oligonucleotide for detection of SNP TSC0009504
caaaaaatacttt

SEQ ID NO: 30903 - DNA, 13 bp, Artificial Sequence
  Oligonucleotide for detection of SNP TSC0009504
aaagtaattttcg

SEQ ID NO: 30904 - DNA, 13 bp, Artificial Sequence
  Oligonucleotide for detection of SNP TSC0009504
cgaaaattacttt

SEQ ID NO: 30905 - DNA, 13 bp, Artificial Sequence
  Oligonucleotide for detection of SNP TSC0009504
aaagtatttttcg

SEQ ID NO: 30906 - DNA, 13 bp, Artificial Sequence
  Oligonucleotide for detection of SNP TSC0009504
cgaaaaatacttt

SEQ ID NO: 30907 - DNA, 13 bp, Artificial Sequence
  Oligonucleotide for detection of SNP TSC0009504
tgaaggttgtttt

SEQ ID NO: 30908 - DNA, 13 bp, Artificial Sequence
  Oligonucleotide for detection of SNP TSC0009504
aaaacaaccttca

SEQ ID NO: 30909 - DNA, 13 bp, Artificial Sequence
  Oligonucleotide for detection of SNP TSC0009504
tgaaggatgtttt

SEQ ID NO: 30910 - DNA, 13 bp, Artificial Sequence
  Oligonucleotide for detection of SNP TSC0009504
aaaacatccttca

SEQ ID NO: 30911 - DNA, 13 bp, Artificial Sequence
  Oligonucleotide for detection of SNP TSC0009504
cgaaggttgtttt

SEQ ID NO: 30912 - DNA, 13 bp, Artificial Sequence
  Oligonucleotide for detection of SNP TSC0009504
aaaacaaccttcg

SEQ ID NO: 30913 - DNA, 13 bp, Artificial Sequence
  Oligonucleotide for detection of SNP TSC0009504
cgaaggatgtttt

SEQ ID NO: 30914 - DNA, 13 bp, Artificial Sequence
  Oligonucleotide for detection of SNP TSC0009504
aaaacatccttcg

SEQ ID NO: 30915 - DNA, 13 bp, Artificial Sequence
  Oligonucleotide for detection of SNP TSC0009505
ttattatgagagg

SEQ ID NO: 30916 - DNA, 13 bp, Artificial Sequence
  Oligonucleotide for detection of SNP TSC0009505
cctctcataataa

SEQ ID NO: 30917 - DNA, 13 bp, Artificial Sequence
  Oligonucleotide for detection of SNP TSC0009505
ttattaggagagg

SEQ ID NO: 30918 - DNA, 13 bp, Artificial Sequence
  Oligonucleotide for detection of SNP TSC0009505
cctctcctaataa

SEQ ID NO: 30919 - DNA, 13 bp, Artificial Sequence
  Oligonucleotide for detection of SNP TSC0009505
ttattacgagagg

SEQ ID NO: 30920 - DNA, 13 bp, Artificial Sequence
  Oligonucleotide for detection of SNP TSC0009505
cctctcgtaataa

SEQ ID NO: 30921 - DNA, 13 bp, Artificial Sequence
  Oligonucleotide for detection of SNP TSC0009505
ttttttgtaataa

SEQ ID NO: 30922 - DNA, 13 bp, Artificial Sequence
  Oligonucleotide for detection of SNP TSC0009505
ttattacaaaaaa

SEQ ID NO: 30923 - DNA, 13 bp, Artificial Sequence
  Oligonucleotide for detection of SNP TSC0009505
ttttttttaataa

SEQ ID NO: 30924 - DNA, 13 bp, Artificial Sequence
  Oligonucleotide for detection of SNP TSC0009505
ttattaaaaaaaa

SEQ ID NO: 30925 - DNA, 13 bp, Artificial Sequence
  Oligonucleotide for detection of SNP TSC0009505
tttttcgtaataa

SEQ ID NO: 30926 - DNA, 13 bp, Artificial Sequence
  Oligonucleotide for detection of SNP TSC0009505
ttattacgaaaaa

SEQ ID NO: 30927 - DNA, 13 bp, Artificial Sequence
  Oligonucleotide for detection of SNP TSC0009512
tagagtatatagt

SEQ ID NO: 30928 - DNA, 13 bp, Artificial Sequence
  Oligonucleotide for detection of SNP TSC0009512
actatatactcta

SEQ ID NO: 30929 - DNA, 13 bp, Artificial Sequence
  Oligonucleotide for detection of SNP TSC0009512
tagagtgtatagt

SEQ ID NO: 30930 - DNA, 13 bp, Artificial Sequence
  Oligonucleotide for detection of SNP TSC0009512
actatacactcta

SEQ ID NO: 30931 - DNA, 13 bp, Artificial Sequence
  Oligonucleotide for detection of SNP TSC0009512
tagagcgtatagt

SEQ ID NO: 30932 - DNA, 13 bp, Artificial Sequence
  Oligonucleotide for detection of SNP TSC0009512
actatacgctcta

SEQ ID NO: 30933 - DNA, 13 bp, Artificial Sequence
  Oligonucleotide for detection of SNP TSC0009512
attatatgttttg

SEQ ID NO: 30934 - DNA, 13 bp, Artificial Sequence
  Oligonucleotide for detection of SNP TSC0009512
caaaacatataat

SEQ ID NO: 30935 - DNA, 13 bp, Artificial Sequence
  Oligonucleotide for detection of SNP TSC0009512
attatacgttttg

SEQ ID NO: 30936 - DNA, 13 bp, Artificial Sequence
  Oligonucleotide for detection of SNP TSC0009512
caaaacgtataat

SEQ ID NO: 30937 - DNA, 13 bp, Artificial Sequence
  Oligonucleotide for detection of SNP TSC0009516
attgttatgagaa

SEQ ID NO: 30938 - DNA, 13 bp, Artificial Sequence
  Oligonucleotide for detection of SNP TSC0009516
ttctcataacaat

SEQ ID NO: 30939 - DNA, 13 bp, Artificial Sequence
  Oligonucleotide for detection of SNP TSC0009516
attgttgtgagaa

SEQ ID NO: 30940 - DNA, 13 bp, Artificial Sequence
  Oligonucleotide for detection of SNP TSC0009516
ttctcacaacaat

SEQ ID NO: 30941 - DNA, 13 bp, Artificial Sequence
  Oligonucleotide for detection of SNP TSC0009516
attgtcgtgagaa

SEQ ID NO: 30942 - DNA, 13 bp, Artificial Sequence
  Oligonucleotide for detection of SNP TSC0009516
ttctcacgacaat

SEQ ID NO: 30943 - DNA, 13 bp, Artificial Sequence
  Oligonucleotide for detection of SNP TSC0009516
tttttatgataat

SEQ ID NO: 30944 - DNA, 13 bp, Artificial Sequence
  Oligonucleotide for detection of SNP TSC0009516
attatcataaaaa

SEQ ID NO: 30945 - DNA, 13 bp, Artificial Sequence
  Oligonucleotide for detection of SNP TSC0009516
tttttacgataat

SEQ ID NO: 30946 - DNA, 13 bp, Artificial Sequence
  Oligonucleotide for detection of SNP TSC0009516
attatcgtaaaaa

SEQ ID NO: 30947 - DNA, 13 bp, Artificial Sequence
  Oligonucleotide for detection of SNP TSC0009517
ttgtttaaggtga

SEQ ID NO: 30948 - DNA, 13 bp, Artificial Sequence
  Oligonucleotide for detection of SNP TSC0009517
tcaccttaaacaa

SEQ ID NO: 30949 - DNA, 13 bp, Artificial Sequence
  Oligonucleotide for detection of SNP TSC0009517
ttgtttgaggtga

SEQ ID NO: 30950 - DNA, 13 bp, Artificial Sequence
  Oligonucleotide for detection of SNP TSC0009517
tcacctcaaacaa

SEQ ID NO: 30951 - DNA, 13 bp, Artificial Sequence
  Oligonucleotide for detection of SNP TSC0009519
ttagaagttgtaa

SEQ ID NO: 30952 - DNA, 13 bp, Artificial Sequence
  Oligonucleotide for detection of SNP TSC0009519
ttacaacttctaa

SEQ ID NO: 30953 - DNA, 13 bp, Artificial Sequence
  Oligonucleotide for detection of SNP TSC0009519
ttagaaattgtaa

SEQ ID NO: 30954 - DNA, 13 bp, Artificial Sequence
  Oligonucleotide for detection of SNP TSC0009519
ttacaatttctaa

SEQ ID NO: 30955 - DNA, 13 bp, Artificial Sequence
  Oligonucleotide for detection of SNP TSC0009522
gaaaagagaaata

SEQ ID NO: 30956 - DNA, 13 bp, Artificial Sequence
  Oligonucleotide for detection of SNP TSC0009522
tatttctcttttc

SEQ ID NO: 30957 - DNA, 13 bp, Artificial Sequence
  Oligonucleotide for detection of SNP TSC0009522
gaaaagtgaaata

SEQ ID NO: 30958 - DNA, 13 bp, Artificial Sequence
  Oligonucleotide for detection of SNP TSC0009522
tatttcacttttc

SEQ ID NO: 30959 - DNA, 13 bp, Artificial Sequence
  Oligonucleotide for detection of SNP TSC0009527
ttattatggaatt

SEQ ID NO: 30960 - DNA, 13 bp, Artificial Sequence
  Oligonucleotide for detection of SNP TSC0009527
aattccataataa

SEQ ID NO: 30961 - DNA, 13 bp, Artificial Sequence
  Oligonucleotide for detection of SNP TSC0009527
ttattacggaatt

SEQ ID NO: 30962 - DNA, 13 bp, Artificial Sequence
  Oligonucleotide for detection of SNP TSC0009527
aattccgtaataa

SEQ ID NO: 30963 - DNA, 13 bp, Artificial Sequence
  Oligonucleotide for detection of SNP TSC0009527
aattttgtaataa

SEQ ID NO: 30964 - DNA, 13 bp, Artificial Sequence
  Oligonucleotide for detection of SNP TSC0009527
ttattacaaaatt

SEQ ID NO: 30965 - DNA, 13 bp, Artificial Sequence
  Oligonucleotide for detection of SNP TSC0009527
aattttataataa

SEQ ID NO: 30966 - DNA, 13 bp, Artificial Sequence
  Oligonucleotide for detection of SNP TSC0009527
ttattataaaatt

SEQ ID NO: 30967 - DNA, 13 bp, Artificial Sequence
  Oligonucleotide for detection of SNP TSC0009527
aatttcgtaataa

SEQ ID NO: 30968 - DNA, 13 bp, Artificial Sequence
  Oligonucleotide for detection of SNP TSC0009527
ttattacgaaatt

SEQ ID NO: 30969 - DNA, 13 bp, Artificial Sequence
  Oligonucleotide for detection of SNP TSC0009529
tttagtatagtta

SEQ ID NO: 30970 - DNA, 13 bp, Artificial Sequence
  Oligonucleotide for detection of SNP TSC0009529
taactatactaaa

SEQ ID NO: 30971 - DNA, 13 bp, Artificial Sequence
  Oligonucleotide for detection of SNP TSC0009529
tttagtgtagtta

SEQ ID NO: 30972 - DNA, 13 bp, Artificial Sequence
  Oligonucleotide for detection of SNP TSC0009529
taactacactaaa

SEQ ID NO: 30973 - DNA, 13 bp, Artificial Sequence
  Oligonucleotide for detection of SNP TSC0009531
tattttaataaay

SEQ ID NO: 30974 - DNA, 13 bp, Artificial Sequence
  Oligonucleotide for detection of SNP TSC0009531
rtttattaaaata

SEQ ID NO: 30975 - DNA, 13 bp, Artificial Sequence
  Oligonucleotide for detection of SNP TSC0009531
tatttttataaay

SEQ ID NO: 30976 - DNA, 13 bp, Artificial Sequence
  Oligonucleotide for detection of SNP TSC0009531
rtttataaaaata

SEQ ID NO: 30977 - DNA, 13 bp, Artificial Sequence
  Oligonucleotide for detection of SNP TSC0009531
gtttattagaatg

SEQ ID NO: 30978 - DNA, 13 bp, Artificial Sequence
  Oligonucleotide for detection of SNP TSC0009531
cattctaataaac

SEQ ID NO: 30979 - DNA, 13 bp, Artificial Sequence
  Oligonucleotide for detection of SNP TSC0009531
gtttatgagaatg

SEQ ID NO: 30980 - DNA, 13 bp, Artificial Sequence
  Oligonucleotide for detection of SNP TSC0009531
cattctcataaac

SEQ ID NO: 30981 - DNA, 13 bp, Artificial Sequence
  Oligonucleotide for detection of SNP TSC0009532
aaattggtaggta

SEQ ID NO: 30982 - DNA, 13 bp, Artificial Sequence
  Oligonucleotide for detection of SNP TSC0009532
tacctaccaattt

SEQ ID NO: 30983 - DNA, 13 bp, Artificial Sequence
  Oligonucleotide for detection of SNP TSC0009532
aaattgataggta

SEQ ID NO: 30984 - DNA, 13 bp, Artificial Sequence
  Oligonucleotide for detection of SNP TSC0009532
tacctatcaattt

SEQ ID NO: 30985 - DNA, 13 bp, Artificial Sequence
  Oligonucleotide for detection of SNP TSC0009535
ttttttggagatt

SEQ ID NO: 30986 - DNA, 13 bp, Artificial Sequence
  Oligonucleotide for detection of SNP TSC0009535
aatctccaaaaaa

SEQ ID NO: 30987 - DNA, 13 bp, Artificial Sequence
  Oligonucleotide for detection of SNP TSC0009535
ttttttagagatt

SEQ ID NO: 30988 - DNA, 13 bp, Artificial Sequence
  Oligonucleotide for detection of SNP TSC0009535
aatctctaaaaaa

SEQ ID NO: 30989 - DNA, 13 bp, Artificial Sequence
  Oligonucleotide for detection of SNP TSC0009544
ataggatatatta

SEQ ID NO: 30990 - DNA, 13 bp, Artificial Sequence
  Oligonucleotide for detection of SNP TSC0009544
taatatatcctat

SEQ ID NO: 30991 - DNA, 13 bp, Artificial Sequence
  Oligonucleotide for detection of SNP TSC0009544
ataggagatatta

SEQ ID NO: 30992 - DNA, 13 bp, Artificial Sequence
  Oligonucleotide for detection of SNP TSC0009544
taatatctcctat

SEQ ID NO: 30993 - DNA, 13 bp, Artificial Sequence
  Oligonucleotide for detection of SNP TSC0009544
tagtgtgttttgt

SEQ ID NO: 30994 - DNA, 13 bp, Artificial Sequence
  Oligonucleotide for detection of SNP TSC0009544
acaaaacacacta

SEQ ID NO: 30995 - DNA, 13 bp, Artificial Sequence
  Oligonucleotide for detection of SNP TSC0009544
tagtgttttttgt

SEQ ID NO: 30996 - DNA, 13 bp, Artificial Sequence
  Oligonucleotide for detection of SNP TSC0009544
acaaaaaacacta

SEQ ID NO: 30997 - DNA, 13 bp, Artificial Sequence
  Oligonucleotide for detection of SNP TSC0009549
ttttttagtttgt

SEQ ID NO: 30998 - DNA, 13 bp, Artificial Sequence
  Oligonucleotide for detection of SNP TSC0009549
acaaactaaaaaa

SEQ ID NO: 30999 - DNA, 13 bp, Artificial Sequence
  Oligonucleotide for detection of SNP TSC0009549
tttttttgtttgt

SEQ ID NO: 31000 - DNA, 13 bp, Artificial Sequence
  Oligonucleotide for detection of SNP TSC0009549
acaaacaaaaaaa

SEQ ID NO: 31001 - DNA, 13 bp, Artificial Sequence
  Oligonucleotide for detection of SNP TSC0009549
ttttttagttcgt

SEQ ID NO: 31002 - DNA, 13 bp, Artificial Sequence
  Oligonucleotide for detection of SNP TSC0009549
acgaactaaaaaa

SEQ ID NO: 31003 - DNA, 13 bp, Artificial Sequence
  Oligonucleotide for detection of SNP TSC0009549
tttttttgttcgt

SEQ ID NO: 31004 - DNA, 13 bp, Artificial Sequence
  Oligonucleotide for detection of SNP TSC0009549
acgaacaaaaaaa

SEQ ID NO: 31005 - DNA, 13 bp, Artificial Sequence
  Oligonucleotide for detection of SNP TSC0009549
atggattggaagg

SEQ ID NO: 31006 - DNA, 13 bp, Artificial Sequence
  Oligonucleotide for detection of SNP TSC0009549
ccttccaatccat

SEQ ID NO: 31007 - DNA, 13 bp, Artificial Sequence
  Oligonucleotide for detection of SNP TSC0009549
atggataggaagg

SEQ ID NO: 31008 - DNA, 13 bp, Artificial Sequence
  Oligonucleotide for detection of SNP TSC0009549
ccttcctatccat

SEQ ID NO: 31009 - DNA, 13 bp, Artificial Sequence
  Oligonucleotide for detection of SNP TSC0009549
acggattggaagg

SEQ ID NO: 31010 - DNA, 13 bp, Artificial Sequence
  Oligonucleotide for detection of SNP TSC0009549
ccttccaatccgt

SEQ ID NO: 31011 - DNA, 13 bp, Artificial Sequence
  Oligonucleotide for detection of SNP TSC0009549
acggataggaagg

SEQ ID NO: 31012 - DNA, 13 bp, Artificial Sequence
  Oligonucleotide for detection of SNP TSC0009549
ccttcctatccgt

SEQ ID NO: 31013 - DNA, 13 bp, Artificial Sequence
  Oligonucleotide for detection of SNP TSC0009552
tatttagttatty

SEQ ID NO: 31014 - DNA, 13 bp, Artificial Sequence
  Oligonucleotide for detection of SNP TSC0009552
raataactaaata

SEQ ID NO: 31015 - DNA, 13 bp, Artificial Sequence
  Oligonucleotide for detection of SNP TSC0009552
tatttaattatty

SEQ ID NO: 31016 - DNA, 13 bp, Artificial Sequence
  Oligonucleotide for detection of SNP TSC0009552
raataattaaata

SEQ ID NO: 31017 - DNA, 13 bp, Artificial Sequence
  Oligonucleotide for detection of SNP TSC0009553
ttttttgttttag

SEQ ID NO: 31018 - DNA, 13 bp, Artificial Sequence
  Oligonucleotide for detection of SNP TSC0009553
ctaaaacaaaaaa

SEQ ID NO: 31019 - DNA, 13 bp, Artificial Sequence
  Oligonucleotide for detection of SNP TSC0009554
gggagaaggagat

SEQ ID NO: 31020 - DNA, 13 bp, Artificial Sequence
  Oligonucleotide for detection of SNP TSC0009554
atctccttctccc

SEQ ID NO: 31021 - DNA, 13 bp, Artificial Sequence
  Oligonucleotide for detection of SNP TSC0009554
gggagagggagat

SEQ ID NO: 31022 - DNA, 13 bp, Artificial Sequence
  Oligonucleotide for detection of SNP TSC0009554
atctccctctccc

SEQ ID NO: 31023 - DNA, 13 bp, Artificial Sequence
  Oligonucleotide for detection of SNP TSC0009555
gttataatggtta

SEQ ID NO: 31024 - DNA, 13 bp, Artificial Sequence
  Oligonucleotide for detection of SNP TSC0009555
taaccattataac

SEQ ID NO: 31025 - DNA, 13 bp, Artificial Sequence
  Oligonucleotide for detection of SNP TSC0009555
gttatagtggtta

SEQ ID NO: 31026 - DNA, 13 bp, Artificial Sequence
  Oligonucleotide for detection of SNP TSC0009555
taaccactataac

SEQ ID NO: 31027 - DNA, 13 bp, Artificial Sequence
  Oligonucleotide for detection of SNP TSC0009559
ttattaaagtagt

SEQ ID NO: 31028 - DNA, 13 bp, Artificial Sequence
  Oligonucleotide for detection of SNP TSC0009559
actactttaataa

SEQ ID NO: 31029 - DNA, 13 bp, Artificial Sequence
  Oligonucleotide for detection of SNP TSC0009559
ttattagagtagt

SEQ ID NO: 31030 - DNA, 13 bp, Artificial Sequence
  Oligonucleotide for detection of SNP TSC0009559
actactctaataa

SEQ ID NO: 31031 - DNA, 13 bp, Artificial Sequence
  Oligonucleotide for detection of SNP TSC0009560
agaaaatgaataa

SEQ ID NO: 31032 - DNA, 13 bp, Artificial Sequence
  Oligonucleotide for detection of SNP TSC0009560
ttattcattttct

SEQ ID NO: 31033 - DNA, 13 bp, Artificial Sequence
  Oligonucleotide for detection of SNP TSC0009560
agaaaacgaataa

SEQ ID NO: 31034 - DNA, 13 bp, Artificial Sequence
  Oligonucleotide for detection of SNP TSC0009560
ttattcgttttct

SEQ ID NO: 31035 - DNA, 13 bp, Artificial Sequence
  Oligonucleotide for detection of SNP TSC0009570
ttttttattagga

SEQ ID NO: 31036 - DNA, 13 bp, Artificial Sequence
  Oligonucleotide for detection of SNP TSC0009570
tcctaataaaaaa

SEQ ID NO: 31037 - DNA, 13 bp, Artificial Sequence
  Oligonucleotide for detection of SNP TSC0009570
ttttttgttagga

SEQ ID NO: 31038 - DNA, 13 bp, Artificial Sequence
  Oligonucleotide for detection of SNP TSC0009570
tcctaacaaaaaa

SEQ ID NO: 31039 - DNA, 13 bp, Artificial Sequence
  Oligonucleotide for detection of SNP TSC0009571
tgtataataagtt

SEQ ID NO: 31040 - DNA, 13 bp, Artificial Sequence
  Oligonucleotide for detection of SNP TSC0009571
aacttattataca

SEQ ID NO: 31041 - DNA, 13 bp, Artificial Sequence
  Oligonucleotide for detection of SNP TSC0009571
tgtatagtaagtt

SEQ ID NO: 31042 - DNA, 13 bp, Artificial Sequence
  Oligonucleotide for detection of SNP TSC0009571
aacttactataca

SEQ ID NO: 31043 - DNA, 13 bp, Artificial Sequence
  Oligonucleotide for detection of SNP TSC0009576
tttaggaaataay

SEQ ID NO: 31044 - DNA, 13 bp, Artificial Sequence
  Oligonucleotide for detection of SNP TSC0009576
rttatttcctaaa

SEQ ID NO: 31045 - DNA, 13 bp, Artificial Sequence
  Oligonucleotide for detection of SNP TSC0009576
tttagggaataay

SEQ ID NO: 31046 - DNA, 13 bp, Artificial Sequence
  Oligonucleotide for detection of SNP TSC0009576
rttattccctaaa

SEQ ID NO: 31047 - DNA, 13 bp, Artificial Sequence
  Oligonucleotide for detection of SNP TSC0009577
gttgatgatttta

SEQ ID NO: 31048 - DNA, 13 bp, Artificial Sequence
  Oligonucleotide for detection of SNP TSC0009577
taaaatcatcaac

SEQ ID NO: 31049 - DNA, 13 bp, Artificial Sequence
  Oligonucleotide for detection of SNP TSC0009577
gttgataatttta

SEQ ID NO: 31050 - DNA, 13 bp, Artificial Sequence
  Oligonucleotide for detection of SNP TSC0009577
taaaattatcaac

SEQ ID NO: 31051 - DNA, 13 bp, Artificial Sequence
  Oligonucleotide for detection of SNP TSC0009579
aagttcgttaaay

SEQ ID NO: 31052 - DNA, 13 bp, Artificial Sequence
  Oligonucleotide for detection of SNP TSC0009579
rtttaacgaactt

SEQ ID NO: 31053 - DNA, 13 bp, Artificial Sequence
  Oligonucleotide for detection of SNP TSC0009579
gtttaatgaattt

SEQ ID NO: 31054 - DNA, 13 bp, Artificial Sequence
  Oligonucleotide for detection of SNP TSC0009579
aaattcattaaac

SEQ ID NO: 31055 - DNA, 13 bp, Artificial Sequence
  Oligonucleotide for detection of SNP TSC0009579
gtttaacgaattt

SEQ ID NO: 31056 - DNA, 13 bp, Artificial Sequence
  Oligonucleotide for detection of SNP TSC0009579
aaattcgttaaac

SEQ ID NO: 31057 - DNA, 13 bp, Artificial Sequence
  Oligonucleotide for detection of SNP TSC0009581
tgttttatggtta

SEQ ID NO: 31058 - DNA, 13 bp, Artificial Sequence
  Oligonucleotide for detection of SNP TSC0009581
taaccataaaaca

SEQ ID NO: 31059 - DNA, 13 bp, Artificial Sequence
  Oligonucleotide for detection of SNP TSC0009581
tgttttttggtta

SEQ ID NO: 31060 - DNA, 13 bp, Artificial Sequence
  Oligonucleotide for detection of SNP TSC0009581
taaccaaaaaaca

SEQ ID NO: 31061 - DNA, 13 bp, Artificial Sequence
  Oligonucleotide for detection of SNP TSC0009581
tggttatgggata

SEQ ID NO: 31062 - DNA, 13 bp, Artificial Sequence
  Oligonucleotide for detection of SNP TSC0009581
tatcccataacca

SEQ ID NO: 31063 - DNA, 13 bp, Artificial Sequence
  Oligonucleotide for detection of SNP TSC0009581
tggttaagggata

SEQ ID NO: 31064 - DNA, 13 bp, Artificial Sequence
  Oligonucleotide for detection of SNP TSC0009581
tatcccttaacca

SEQ ID NO: 31065 - DNA, 13 bp, Artificial Sequence
  Oligonucleotide for detection of SNP TSC0009586
tgttttttaaaaa

SEQ ID NO: 31066 - DNA, 13 bp, Artificial Sequence
  Oligonucleotide for detection of SNP TSC0009586
tttttaaaaaaca

SEQ ID NO: 31067 - DNA, 13 bp, Artificial Sequence
  Oligonucleotide for detection of SNP TSC0009586
tgttttgtaaaaa

SEQ ID NO: 31068 - DNA, 13 bp, Artificial Sequence
  Oligonucleotide for detection of SNP TSC0009586
tttttacaaaaca

SEQ ID NO: 31069 - DNA, 13 bp, Artificial Sequence
  Oligonucleotide for detection of SNP TSC0009586
tttttggagaata

SEQ ID NO: 31070 - DNA, 13 bp, Artificial Sequence
  Oligonucleotide for detection of SNP TSC0009586
tattctccaaaaa

SEQ ID NO: 31071 - DNA, 13 bp, Artificial Sequence
  Oligonucleotide for detection of SNP TSC0009586
tttttgtagaata

SEQ ID NO: 31072 - DNA, 13 bp, Artificial Sequence
  Oligonucleotide for detection of SNP TSC0009586
tattctacaaaaa

SEQ ID NO: 31073 - DNA, 13 bp, Artificial Sequence
  Oligonucleotide for detection of SNP TSC0009593
gaatgagttttty

SEQ ID NO: 31074 - DNA, 13 bp, Artificial Sequence
  Oligonucleotide for detection of SNP TSC0009593
raaaaactcattc

SEQ ID NO: 31075 - DNA, 13 bp, Artificial Sequence
  Oligonucleotide for detection of SNP TSC0009593
gaatgaattttty

SEQ ID NO: 31076 - DNA, 13 bp, Artificial Sequence
  Oligonucleotide for detection of SNP TSC0009593
raaaaattcattc

SEQ ID NO: 31077 - DNA, 13 bp, Artificial Sequence
  Oligonucleotide for detection of SNP TSC0009594
ggaattagtttgy

SEQ ID NO: 31078 - DNA, 13 bp, Artificial Sequence
  Oligonucleotide for detection of SNP TSC0009594
rcaaactaattcc

SEQ ID NO: 31079 - DNA, 13 bp, Artificial Sequence
  Oligonucleotide for detection of SNP TSC0009594
ggaattggtttgy

SEQ ID NO: 31080 - DNA, 13 bp, Artificial Sequence
  Oligonucleotide for detection of SNP TSC0009594
rcaaaccaattcc

SEQ ID NO: 31081 - DNA, 13 bp, Artificial Sequence
  Oligonucleotide for detection of SNP TSC0009594
ggaattagttcgy

SEQ ID NO: 31082 - DNA, 13 bp, Artificial Sequence
  Oligonucleotide for detection of SNP TSC0009594
rcgaactaattcc

SEQ ID NO: 31083 - DNA, 13 bp, Artificial Sequence
  Oligonucleotide for detection of SNP TSC0009594
ggaatcggtttgy

SEQ ID NO: 31084 - DNA, 13 bp, Artificial Sequence
  Oligonucleotide for detection of SNP TSC0009594
rcaaaccgattcc

SEQ ID NO: 31085 - DNA, 13 bp, Artificial Sequence
  Oligonucleotide for detection of SNP TSC0009594
ggaattggttcgy

SEQ ID NO: 31086 - DNA, 13 bp, Artificial Sequence
  Oligonucleotide for detection of SNP TSC0009594
rcgaaccaattcc

SEQ ID NO: 31087 - DNA, 13 bp, Artificial Sequence
  Oligonucleotide for detection of SNP TSC0009594
ggaatcggttcgy

SEQ ID NO: 31088 - DNA, 13 bp, Artificial Sequence
  Oligonucleotide for detection of SNP TSC0009594
rcgaaccgattcc

SEQ ID NO: 31089 - DNA, 13 bp, Artificial Sequence
  Oligonucleotide for detection of SNP TSC0009594
gtgagttggttty

SEQ ID NO: 31090 - DNA, 13 bp, Artificial Sequence
  Oligonucleotide for detection of SNP TSC0009594
raaaccaactcac

SEQ ID NO: 31091 - DNA, 13 bp, Artificial Sequence
  Oligonucleotide for detection of SNP TSC0009594
gcgagttggttty

SEQ ID NO: 31092 - DNA, 13 bp, Artificial Sequence
  Oligonucleotide for detection of SNP TSC0009594
raaaccaactcgc

SEQ ID NO: 31093 - DNA, 13 bp, Artificial Sequence
  Oligonucleotide for detection of SNP TSC0009594
gtgagtcggttty

SEQ ID NO: 31094 - DNA, 13 bp, Artificial Sequence
  Oligonucleotide for detection of SNP TSC0009594
raaaccgactcac

SEQ ID NO: 31095 - DNA, 13 bp, Artificial Sequence
  Oligonucleotide for detection of SNP TSC0009594
gcgagtcggttty

SEQ ID NO: 31096 - DNA, 13 bp, Artificial Sequence
  Oligonucleotide for detection of SNP TSC0009594
raaaccgactcgc

SEQ ID NO: 31097 - DNA, 13 bp, Artificial Sequence
  Oligonucleotide for detection of SNP TSC0009596
tgtgagttttggg

SEQ ID NO: 31098 - DNA, 13 bp, Artificial Sequence
  Oligonucleotide for detection of SNP TSC0009596
cccaaaactcaca

SEQ ID NO: 31099 - DNA, 13 bp, Artificial Sequence
  Oligonucleotide for detection of SNP TSC0009596
tgtgaggtttggg

SEQ ID NO: 31100 - DNA, 13 bp, Artificial Sequence
  Oligonucleotide for detection of SNP TSC0009596
cccaaacctcaca

SEQ ID NO: 31101 - DNA, 13 bp, Artificial Sequence
  Oligonucleotide for detection of SNP TSC0009596
tttagggtttata

SEQ ID NO: 31102 - DNA, 13 bp, Artificial Sequence
  Oligonucleotide for detection of SNP TSC0009596
tataaaccctaaa

SEQ ID NO: 31103 - DNA, 13 bp, Artificial Sequence
  Oligonucleotide for detection of SNP TSC0009596
tttaggttttata

SEQ ID NO: 31104 - DNA, 13 bp, Artificial Sequence
  Oligonucleotide for detection of SNP TSC0009596
tataaaacctaaa

SEQ ID NO: 31105 - DNA, 13 bp, Artificial Sequence
  Oligonucleotide for detection of SNP TSC0009597
aaattagttttta

SEQ ID NO: 31106 - DNA, 13 bp, Artificial Sequence
  Oligonucleotide for detection of SNP TSC0009597
taaaaactaattt

SEQ ID NO: 31107 - DNA, 13 bp, Artificial Sequence
  Oligonucleotide for detection of SNP TSC0009597
aaattaattttta

SEQ ID NO: 31108 - DNA, 13 bp, Artificial Sequence
  Oligonucleotide for detection of SNP TSC0009597
taaaaattaattt

SEQ ID NO: 31109 - DNA, 13 bp, Artificial Sequence
  Oligonucleotide for detection of SNP TSC0009598
aaagggaaatatt

SEQ ID NO: 31110 - DNA, 13 bp, Artificial Sequence
  Oligonucleotide for detection of SNP TSC0009598
aatatttcccttt

SEQ ID NO: 31111 - DNA, 13 bp, Artificial Sequence
  Oligonucleotide for detection of SNP TSC0009598
aaaggggaatatt

SEQ ID NO: 31112 - DNA, 13 bp, Artificial Sequence
  Oligonucleotide for detection of SNP TSC0009598
aatattccccttt

SEQ ID NO: 31113 - DNA, 13 bp, Artificial Sequence
  Oligonucleotide for detection of SNP TSC0009600
gtattgattttaa

SEQ ID NO: 31114 - DNA, 13 bp, Artificial Sequence
  Oligonucleotide for detection of SNP TSC0009600
ttaaaatcaatac

SEQ ID NO: 31115 - DNA, 13 bp, Artificial Sequence
  Oligonucleotide for detection of SNP TSC0009600
gtattggttttaa

SEQ ID NO: 31116 - DNA, 13 bp, Artificial Sequence
  Oligonucleotide for detection of SNP TSC0009600
ttaaaaccaatac

SEQ ID NO: 31117 - DNA, 13 bp, Artificial Sequence
  Oligonucleotide for detection of SNP TSC0009602
tattttattatty

SEQ ID NO: 31118 - DNA, 13 bp, Artificial Sequence
  Oligonucleotide for detection of SNP TSC0009602
raataataaaata

SEQ ID NO: 31119 - DNA, 13 bp, Artificial Sequence
  Oligonucleotide for detection of SNP TSC0009602
tattttgttatty

SEQ ID NO: 31120 - DNA, 13 bp, Artificial Sequence
  Oligonucleotide for detection of SNP TSC0009602
raataacaaaata

SEQ ID NO: 31121 - DNA, 13 bp, Artificial Sequence
  Oligonucleotide for detection of SNP TSC0009604
gtaaggattttga

SEQ ID NO: 31122 - DNA, 13 bp, Artificial Sequence
  Oligonucleotide for detection of SNP TSC0009604
tcaaaatccttac

SEQ ID NO: 31123 - DNA, 13 bp, Artificial Sequence
  Oligonucleotide for detection of SNP TSC0009604
gtaagggttttga

SEQ ID NO: 31124 - DNA, 13 bp, Artificial Sequence
  Oligonucleotide for detection of SNP TSC0009604
tcaaaacccttac

SEQ ID NO: 31125 - DNA, 13 bp, Artificial Sequence
  Oligonucleotide for detection of SNP TSC0009604
gtaaggatttcga

SEQ ID NO: 31126 - DNA, 13 bp, Artificial Sequence
  Oligonucleotide for detection of SNP TSC0009604
tcgaaatccttac

SEQ ID NO: 31127 - DNA, 13 bp, Artificial Sequence
  Oligonucleotide for detection of SNP TSC0009604
gtaagggtttcga

SEQ ID NO: 31128 - DNA, 13 bp, Artificial Sequence
  Oligonucleotide for detection of SNP TSC0009604
tcgaaacccttac

SEQ ID NO: 31129 - DNA, 13 bp, Artificial Sequence
  Oligonucleotide for detection of SNP TSC0009605
gtttaagtgatty

SEQ ID NO: 31130 - DNA, 13 bp, Artificial Sequence
  Oligonucleotide for detection of SNP TSC0009605
raatcacttaaac

SEQ ID NO: 31131 - DNA, 13 bp, Artificial Sequence
  Oligonucleotide for detection of SNP TSC0009605
gtttaaatgatty

SEQ ID NO: 31132 - DNA, 13 bp, Artificial Sequence
  Oligonucleotide for detection of SNP TSC0009605
raatcatttaaac

SEQ ID NO: 31133 - DNA, 13 bp, Artificial Sequence
  Oligonucleotide for detection of SNP TSC0009606
tggagtgtgaagt

SEQ ID NO: 31134 - DNA, 13 bp, Artificial Sequence
  Oligonucleotide for detection of SNP TSC0009606
acttcacactcca

SEQ ID NO: 31135 - DNA, 13 bp, Artificial Sequence
  Oligonucleotide for detection of SNP TSC0009606
tggagtttgaagt

SEQ ID NO: 31136 - DNA, 13 bp, Artificial Sequence
  Oligonucleotide for detection of SNP TSC0009606
acttcaaactcca

SEQ ID NO: 31137 - DNA, 13 bp, Artificial Sequence
  Oligonucleotide for detection of SNP TSC0009606
attttatatttta

SEQ ID NO: 31138 - DNA, 13 bp, Artificial Sequence
  Oligonucleotide for detection of SNP TSC0009606
taaaatataaaat

SEQ ID NO: 31139 - DNA, 13 bp, Artificial Sequence
  Oligonucleotide for detection of SNP TSC0009606
attttaaatttta

SEQ ID NO: 31140 - DNA, 13 bp, Artificial Sequence
  Oligonucleotide for detection of SNP TSC0009606
taaaatttaaaat

SEQ ID NO: 31141 - DNA, 13 bp, Artificial Sequence
  Oligonucleotide for detection of SNP TSC0009612
gaaaggtggagtt

SEQ ID NO: 31142 - DNA, 13 bp, Artificial Sequence
  Oligonucleotide for detection of SNP TSC0009612
aactccacctttc

SEQ ID NO: 31143 - DNA, 13 bp, Artificial Sequence
  Oligonucleotide for detection of SNP TSC0009612
gaaaggaggagtt

SEQ ID NO: 31144 - DNA, 13 bp, Artificial Sequence
  Oligonucleotide for detection of SNP TSC0009612
aactcctcctttc

SEQ ID NO: 31145 - DNA, 13 bp, Artificial Sequence
  Oligonucleotide for detection of SNP TSC0009619
gagtgggtttttg

SEQ ID NO: 31146 - DNA, 13 bp, Artificial Sequence
  Oligonucleotide for detection of SNP TSC0009619
caaaaacccactc

SEQ ID NO: 31147 - DNA, 13 bp, Artificial Sequence
  Oligonucleotide for detection of SNP TSC0009619
gagtggttttttg

SEQ ID NO: 31148 - DNA, 13 bp, Artificial Sequence
  Oligonucleotide for detection of SNP TSC0009619
caaaaaaccactc

SEQ ID NO: 31149 - DNA, 13 bp, Artificial Sequence
  Oligonucleotide for detection of SNP TSC0009619
gagcgggtttttg

SEQ ID NO: 31150 - DNA, 13 bp, Artificial Sequence
  Oligonucleotide for detection of SNP TSC0009619
caaaaacccgctc

SEQ ID NO: 31151 - DNA, 13 bp, Artificial Sequence
  Oligonucleotide for detection of SNP TSC0009619
gagcggttttttg

SEQ ID NO: 31152 - DNA, 13 bp, Artificial Sequence
  Oligonucleotide for detection of SNP TSC0009619
caaaaaaccgctc

SEQ ID NO: 31153 - DNA, 13 bp, Artificial Sequence
  Oligonucleotide for detection of SNP TSC0009619
tagaggtttgtty

SEQ ID NO: 31154 - DNA, 13 bp, Artificial Sequence
  Oligonucleotide for detection of SNP TSC0009619
raacaaacctcta

SEQ ID NO: 31155 - DNA, 13 bp, Artificial Sequence
  Oligonucleotide for detection of SNP TSC0009619
tagaggattgtty

SEQ ID NO: 31156 - DNA, 13 bp, Artificial Sequence
  Oligonucleotide for detection of SNP TSC0009619
raacaatcctcta

SEQ ID NO: 31157 - DNA, 13 bp, Artificial Sequence
  Oligonucleotide for detection of SNP TSC0009619
tagaggttcgtty

SEQ ID NO: 31158 - DNA, 13 bp, Artificial Sequence
  Oligonucleotide for detection of SNP TSC0009619
raacgaacctcta

SEQ ID NO: 31159 - DNA, 13 bp, Artificial Sequence
  Oligonucleotide for detection of SNP TSC0009619
tagaggatcgtty

SEQ ID NO: 31160 - DNA, 13 bp, Artificial Sequence
  Oligonucleotide for detection of SNP TSC0009619
raacgatcctcta

SEQ ID NO: 31161 - DNA, 13 bp, Artificial Sequence
  Oligonucleotide for detection of SNP TSC0009623
gattttagtagaa

SEQ ID NO: 31162 - DNA, 13 bp, Artificial Sequence
  Oligonucleotide for detection of SNP TSC0009623
ttctactaaaatc

SEQ ID NO: 31163 - DNA, 13 bp, Artificial Sequence
  Oligonucleotide for detection of SNP TSC0009623
gattttggtagaa

SEQ ID NO: 31164 - DNA, 13 bp, Artificial Sequence
  Oligonucleotide for detection of SNP TSC0009623
ttctaccaaaatc

SEQ ID NO: 31165 - DNA, 13 bp, Artificial Sequence
  Oligonucleotide for detection of SNP TSC0009625
gttttgtgatata

SEQ ID NO: 31166 - DNA, 13 bp, Artificial Sequence
  Oligonucleotide for detection of SNP TSC0009625
tatatcacaaaac

SEQ ID NO: 31167 - DNA, 13 bp, Artificial Sequence
  Oligonucleotide for detection of SNP TSC0009625
gttttgcgatata

SEQ ID NO: 31168 - DNA, 13 bp, Artificial Sequence
  Oligonucleotide for detection of SNP TSC0009625
tatatcgcaaaac

SEQ ID NO: 31169 - DNA, 13 bp, Artificial Sequence
  Oligonucleotide for detection of SNP TSC0009625
tatattgtaaaay

SEQ ID NO: 31170 - DNA, 13 bp, Artificial Sequence
  Oligonucleotide for detection of SNP TSC0009625
rttttacaatata

SEQ ID NO: 31171 - DNA, 13 bp, Artificial Sequence
  Oligonucleotide for detection of SNP TSC0009625
tatattataaaay

SEQ ID NO: 31172 - DNA, 13 bp, Artificial Sequence
  Oligonucleotide for detection of SNP TSC0009625
rttttataatata

SEQ ID NO: 31173 - DNA, 13 bp, Artificial Sequence
  Oligonucleotide for detection of SNP TSC0009625
tatatcgtaaaay

SEQ ID NO: 31174 - DNA, 13 bp, Artificial Sequence
  Oligonucleotide for detection of SNP TSC0009625
rttttacgatata

SEQ ID NO: 31175 - DNA, 13 bp, Artificial Sequence
  Oligonucleotide for detection of SNP TSC0009631
tttatagtggttt

SEQ ID NO: 31176 - DNA, 13 bp, Artificial Sequence
  Oligonucleotide for detection of SNP TSC0009631
aaaccactataaa

SEQ ID NO: 31177 - DNA, 13 bp, Artificial Sequence
  Oligonucleotide for detection of SNP TSC0009631
tttataatggttt

SEQ ID NO: 31178 - DNA, 13 bp, Artificial Sequence
  Oligonucleotide for detection of SNP TSC0009631
aaaccattataaa

SEQ ID NO: 31179 - DNA, 13 bp, Artificial Sequence
  Oligonucleotide for detection of SNP TSC0009638
atattaataaggt

SEQ ID NO: 31180 - DNA, 13 bp, Artificial Sequence
  Oligonucleotide for detection of SNP TSC0009638
accttattaatat

SEQ ID NO: 31181 - DNA, 13 bp, Artificial Sequence
  Oligonucleotide for detection of SNP TSC0009638
atattattaaggt

SEQ ID NO: 31182 - DNA, 13 bp, Artificial Sequence
  Oligonucleotide for detection of SNP TSC0009638
accttaataatat

SEQ ID NO: 31183 - DNA, 13 bp, Artificial Sequence
  Oligonucleotide for detection of SNP TSC0009638
attttattggtgt

SEQ ID NO: 31184 - DNA, 13 bp, Artificial Sequence
  Oligonucleotide for detection of SNP TSC0009638
acaccaataaaat

SEQ ID NO: 31185 - DNA, 13 bp, Artificial Sequence
  Oligonucleotide for detection of SNP TSC0009638
attttaatggtgt

SEQ ID NO: 31186 - DNA, 13 bp, Artificial Sequence
  Oligonucleotide for detection of SNP TSC0009638
acaccattaaaat

SEQ ID NO: 31187 - DNA, 13 bp, Artificial Sequence
  Oligonucleotide for detection of SNP TSC0009639
gttgtaatataat

SEQ ID NO: 31188 - DNA, 13 bp, Artificial Sequence
  Oligonucleotide for detection of SNP TSC0009639
attatattacaac

SEQ ID NO: 31189 - DNA, 13 bp, Artificial Sequence
  Oligonucleotide for detection of SNP TSC0009639
gttgtattataat

SEQ ID NO: 31190 - DNA, 13 bp, Artificial Sequence
  Oligonucleotide for detection of SNP TSC0009639
attataatacaac

SEQ ID NO: 31191 - DNA, 13 bp, Artificial Sequence
  Oligonucleotide for detection of SNP TSC0009639
attatattgtagy

SEQ ID NO: 31192 - DNA, 13 bp, Artificial Sequence
  Oligonucleotide for detection of SNP TSC0009639
rctacaatataat

SEQ ID NO: 31193 - DNA, 13 bp, Artificial Sequence
  Oligonucleotide for detection of SNP TSC0009639
attataatgtagy

SEQ ID NO: 31194 - DNA, 13 bp, Artificial Sequence
  Oligonucleotide for detection of SNP TSC0009639
rctacattataat

SEQ ID NO: 31195 - DNA, 13 bp, Artificial Sequence
  Oligonucleotide for detection of SNP TSC0009640
aaaagtgaatttt

SEQ ID NO: 31196 - DNA, 13 bp, Artificial Sequence
  Oligonucleotide for detection of SNP TSC0009640
aaaattcactttt

SEQ ID NO: 31197 - DNA, 13 bp, Artificial Sequence
  Oligonucleotide for detection of SNP TSC0009640
aaaagttaatttt

SEQ ID NO: 31198 - DNA, 13 bp, Artificial Sequence
  Oligonucleotide for detection of SNP TSC0009640
aaaattaactttt

SEQ ID NO: 31199 - DNA, 13 bp, Artificial Sequence
  Oligonucleotide for detection of SNP TSC0009640
aggatttattttt

SEQ ID NO: 31200 - DNA, 13 bp, Artificial Sequence
  Oligonucleotide for detection of SNP TSC0009640
aaaaataaatcct

SEQ ID NO: 31201 - DNA, 13 bp, Artificial Sequence
  Oligonucleotide for detection of SNP TSC0009640
aggattaattttt

SEQ ID NO: 31202 - DNA, 13 bp, Artificial Sequence
  Oligonucleotide for detection of SNP TSC0009640
aaaaattaatcct

SEQ ID NO: 31203 - DNA, 13 bp, Artificial Sequence
  Oligonucleotide for detection of SNP TSC0009643
ttttttttatatg

SEQ ID NO: 31204 - DNA, 13 bp, Artificial Sequence
  Oligonucleotide for detection of SNP TSC0009643
catataaaaaaaa

SEQ ID NO: 31205 - DNA, 13 bp, Artificial Sequence
  Oligonucleotide for detection of SNP TSC0009643
ttttttgtatatg

SEQ ID NO: 31206 - DNA, 13 bp, Artificial Sequence
  Oligonucleotide for detection of SNP TSC0009643
catatacaaaaaa

SEQ ID NO: 31207 - DNA, 13 bp, Artificial Sequence
  Oligonucleotide for detection of SNP TSC0009643
tttttcgtatatg

SEQ ID NO: 31208 - DNA, 13 bp, Artificial Sequence
  Oligonucleotide for detection of SNP TSC0009643
catatacgaaaaa

SEQ ID NO: 31209 - DNA, 13 bp, Artificial Sequence
  Oligonucleotide for detection of SNP TSC0009643
tatataggaagaa

SEQ ID NO: 31210 - DNA, 13 bp, Artificial Sequence
  Oligonucleotide for detection of SNP TSC0009643
ttcttcctatata

SEQ ID NO: 31211 - DNA, 13 bp, Artificial Sequence
  Oligonucleotide for detection of SNP TSC0009643
tatatatgaagaa

SEQ ID NO: 31212 - DNA, 13 bp, Artificial Sequence
  Oligonucleotide for detection of SNP TSC0009643
ttcttcatatata

SEQ ID NO: 31213 - DNA, 13 bp, Artificial Sequence
  Oligonucleotide for detection of SNP TSC0009643
tatatacgaagaa

SEQ ID NO: 31214 - DNA, 13 bp, Artificial Sequence
  Oligonucleotide for detection of SNP TSC0009643
ttcttcgtatata

SEQ ID NO: 31215 - DNA, 13 bp, Artificial Sequence
  Oligonucleotide for detection of SNP TSC0009647
gattttaataaat

SEQ ID NO: 31216 - DNA, 13 bp, Artificial Sequence
  Oligonucleotide for detection of SNP TSC0009647
atttattaaaatc

SEQ ID NO: 31217 - DNA, 13 bp, Artificial Sequence
  Oligonucleotide for detection of SNP TSC0009647
gattttgataaat

SEQ ID NO: 31218 - DNA, 13 bp, Artificial Sequence
  Oligonucleotide for detection of SNP TSC0009647
atttatcaaaatc

SEQ ID NO: 31219 - DNA, 13 bp, Artificial Sequence
  Oligonucleotide for detection of SNP TSC0009648
gaatatagattta

SEQ ID NO: 31220 - DNA, 13 bp, Artificial Sequence
  Oligonucleotide for detection of SNP TSC0009648
taaatctatattc

SEQ ID NO: 31221 - DNA, 13 bp, Artificial Sequence
  Oligonucleotide for detection of SNP TSC0009648
gaatatggattta

SEQ ID NO: 31222 - DNA, 13 bp, Artificial Sequence
  Oligonucleotide for detection of SNP TSC0009648
taaatccatattc

SEQ ID NO: 31223 - DNA, 13 bp, Artificial Sequence
  Oligonucleotide for detection of SNP TSC0009648
gaatacggattta

SEQ ID NO: 31224 - DNA, 13 bp, Artificial Sequence
  Oligonucleotide for detection of SNP TSC0009648
taaatccgtattc

SEQ ID NO: 31225 - DNA, 13 bp, Artificial Sequence
  Oligonucleotide for detection of SNP TSC0009648
taaatttgtgtty

SEQ ID NO: 31226 - DNA, 13 bp, Artificial Sequence
  Oligonucleotide for detection of SNP TSC0009648
raacacaaattta

SEQ ID NO: 31227 - DNA, 13 bp, Artificial Sequence
  Oligonucleotide for detection of SNP TSC0009648
taaattcgtgtty

SEQ ID NO: 31228 - DNA, 13 bp, Artificial Sequence
  Oligonucleotide for detection of SNP TSC0009648
raacacgaattta

SEQ ID NO: 31229 - DNA, 13 bp, Artificial Sequence
  Oligonucleotide for detection of SNP TSC0009649
aaaattgtataaa

SEQ ID NO: 31230 - DNA, 13 bp, Artificial Sequence
  Oligonucleotide for detection of SNP TSC0009649
tttatacaatttt

SEQ ID NO: 31231 - DNA, 13 bp, Artificial Sequence
  Oligonucleotide for detection of SNP TSC0009649
tttatgtagtttt

SEQ ID NO: 31232 - DNA, 13 bp, Artificial Sequence
  Oligonucleotide for detection of SNP TSC0009649
aaaactacataaa

SEQ ID NO: 31233 - DNA, 13 bp, Artificial Sequence
  Oligonucleotide for detection of SNP TSC0009649
tttatgaagtttt

SEQ ID NO: 31234 - DNA, 13 bp, Artificial Sequence
  Oligonucleotide for detection of SNP TSC0009649
aaaacttcataaa

SEQ ID NO: 31235 - DNA, 13 bp, Artificial Sequence
  Oligonucleotide for detection of SNP TSC0009650
gtgggtgagggga

SEQ ID NO: 31236 - DNA, 13 bp, Artificial Sequence
  Oligonucleotide for detection of SNP TSC0009650
tcccctcacccac

SEQ ID NO: 31237 - DNA, 13 bp, Artificial Sequence
  Oligonucleotide for detection of SNP TSC0009650
gtgggtaagggga

SEQ ID NO: 31238 - DNA, 13 bp, Artificial Sequence
  Oligonucleotide for detection of SNP TSC0009650
tccccttacccac

SEQ ID NO: 31239 - DNA, 13 bp, Artificial Sequence
  Oligonucleotide for detection of SNP TSC0009651
ttaaaaataaata

SEQ ID NO: 31240 - DNA, 13 bp, Artificial Sequence
  Oligonucleotide for detection of SNP TSC0009651
tatttatttttaa

SEQ ID NO: 31241 - DNA, 13 bp, Artificial Sequence
  Oligonucleotide for detection of SNP TSC0009651
ttaaaattaaata

SEQ ID NO: 31242 - DNA, 13 bp, Artificial Sequence
  Oligonucleotide for detection of SNP TSC0009651
tatttaattttaa

SEQ ID NO: 31243 - DNA, 13 bp, Artificial Sequence
  Oligonucleotide for detection of SNP TSC0009651
tatttatttttga

SEQ ID NO: 31244 - DNA, 13 bp, Artificial Sequence
  Oligonucleotide for detection of SNP TSC0009651
tcaaaaataaata

SEQ ID NO: 31245 - DNA, 13 bp, Artificial Sequence
  Oligonucleotide for detection of SNP TSC0009651
tatttagttttga

SEQ ID NO: 31246 - DNA, 13 bp, Artificial Sequence
  Oligonucleotide for detection of SNP TSC0009651
tcaaaactaaata

SEQ ID NO: 31247 - DNA, 13 bp, Artificial Sequence
  Oligonucleotide for detection of SNP TSC0009657
ttatttaaaaagt

SEQ ID NO: 31248 - DNA, 13 bp, Artificial Sequence
  Oligonucleotide for detection of SNP TSC0009657
actttttaaataa

SEQ ID NO: 31249 - DNA, 13 bp, Artificial Sequence
  Oligonucleotide for detection of SNP TSC0009657
ttatttgaaaagt

SEQ ID NO: 31250 - DNA, 13 bp, Artificial Sequence
  Oligonucleotide for detection of SNP TSC0009657
acttttcaaataa

SEQ ID NO: 31251 - DNA, 13 bp, Artificial Sequence
  Oligonucleotide for detection of SNP TSC0009657
ttattcgaaaagt

SEQ ID NO: 31252 - DNA, 13 bp, Artificial Sequence
  Oligonucleotide for detection of SNP TSC0009657
acttttcgaataa

SEQ ID NO: 31253 - DNA, 13 bp, Artificial Sequence
  Oligonucleotide for detection of SNP TSC0009657
attttttgaatgg

SEQ ID NO: 31254 - DNA, 13 bp, Artificial Sequence
  Oligonucleotide for detection of SNP TSC0009657
ccattcaaaaaat

SEQ ID NO: 31255 - DNA, 13 bp, Artificial Sequence
  Oligonucleotide for detection of SNP TSC0009657
atttttcgaatgg

SEQ ID NO: 31256 - DNA, 13 bp, Artificial Sequence
  Oligonucleotide for detection of SNP TSC0009657
ccattcgaaaaat

SEQ ID NO: 31257 - DNA, 13 bp, Artificial Sequence
  Oligonucleotide for detection of SNP TSC0009658
tttttatgttgta

SEQ ID NO: 31258 - DNA, 13 bp, Artificial Sequence
  Oligonucleotide for detection of SNP TSC0009658
tacaacataaaaa

SEQ ID NO: 31259 - DNA, 13 bp, Artificial Sequence
  Oligonucleotide for detection of SNP TSC0009658
tttttacgttgta

SEQ ID NO: 31260 - DNA, 13 bp, Artificial Sequence
  Oligonucleotide for detection of SNP TSC0009658
tacaacgtaaaaa

SEQ ID NO: 31261 - DNA, 13 bp, Artificial Sequence
  Oligonucleotide for detection of SNP TSC0009658
tataatgtgggga

SEQ ID NO: 31262 - DNA, 13 bp, Artificial Sequence
  Oligonucleotide for detection of SNP TSC0009658
tccccacattata

SEQ ID NO: 31263 - DNA, 13 bp, Artificial Sequence
  Oligonucleotide for detection of SNP TSC0009658
tataatatgggga

SEQ ID NO: 31264 - DNA, 13 bp, Artificial Sequence
  Oligonucleotide for detection of SNP TSC0009658
tccccatattata

SEQ ID NO: 31265 - DNA, 13 bp, Artificial Sequence
  Oligonucleotide for detection of SNP TSC0009658
tataacgtgggga

SEQ ID NO: 31266 - DNA, 13 bp, Artificial Sequence
  Oligonucleotide for detection of SNP TSC0009658
tccccacgttata

SEQ ID NO: 31267 - DNA, 13 bp, Artificial Sequence
  Oligonucleotide for detection of SNP TSC0009660
aaatgatgtataa

SEQ ID NO: 31268 - DNA, 13 bp, Artificial Sequence
  Oligonucleotide for detection of SNP TSC0009660
ttatacatcattt

SEQ ID NO: 31269 - DNA, 13 bp, Artificial Sequence
  Oligonucleotide for detection of SNP TSC0009660
aaatgacgtataa

SEQ ID NO: 31270 - DNA, 13 bp, Artificial Sequence
  Oligonucleotide for detection of SNP TSC0009660
ttatacgtcattt

SEQ ID NO: 31271 - DNA, 13 bp, Artificial Sequence
  Oligonucleotide for detection of SNP TSC0009660
ttgtatgttattt

SEQ ID NO: 31272 - DNA, 13 bp, Artificial Sequence
  Oligonucleotide for detection of SNP TSC0009660
aaataacatacaa

SEQ ID NO: 31273 - DNA, 13 bp, Artificial Sequence
  Oligonucleotide for detection of SNP TSC0009660
ttgtatattattt

SEQ ID NO: 31274 - DNA, 13 bp, Artificial Sequence
  Oligonucleotide for detection of SNP TSC0009660
aaataatatacaa

SEQ ID NO: 31275 - DNA, 13 bp, Artificial Sequence
  Oligonucleotide for detection of SNP TSC0009660
ttgtacgttattt

SEQ ID NO: 31276 - DNA, 13 bp, Artificial Sequence
  Oligonucleotide for detection of SNP TSC0009660
aaataacgtacaa

SEQ ID NO: 31277 - DNA, 13 bp, Artificial Sequence
  Oligonucleotide for detection of SNP TSC0009662
ggaaaggagttta

SEQ ID NO: 31278 - DNA, 13 bp, Artificial Sequence
  Oligonucleotide for detection of SNP TSC0009662
taaactcctttcc

SEQ ID NO: 31279 - DNA, 13 bp, Artificial Sequence
  Oligonucleotide for detection of SNP TSC0009662
ggaaagaagttta

SEQ ID NO: 31280 - DNA, 13 bp, Artificial Sequence
  Oligonucleotide for detection of SNP TSC0009662
taaacttctttcc

SEQ ID NO: 31281 - DNA, 13 bp, Artificial Sequence
  Oligonucleotide for detection of SNP TSC0009665
ttttgatgtgaag

SEQ ID NO: 31282 - DNA, 13 bp, Artificial Sequence
  Oligonucleotide for detection of SNP TSC0009665
cttcacatcaaaa

SEQ ID NO: 31283 - DNA, 13 bp, Artificial Sequence
  Oligonucleotide for detection of SNP TSC0009665
tttcgatgtgaag

SEQ ID NO: 31284 - DNA, 13 bp, Artificial Sequence
  Oligonucleotide for detection of SNP TSC0009665
cttcacatcgaaa

SEQ ID NO: 31285 - DNA, 13 bp, Artificial Sequence
  Oligonucleotide for detection of SNP TSC0009665
ttttgacgtgaag

SEQ ID NO: 31286 - DNA, 13 bp, Artificial Sequence
  Oligonucleotide for detection of SNP TSC0009665
cttcacgtcaaaa

SEQ ID NO: 31287 - DNA, 13 bp, Artificial Sequence
  Oligonucleotide for detection of SNP TSC0009665
tttcgacgtgaag

SEQ ID NO: 31288 - DNA, 13 bp, Artificial Sequence
  Oligonucleotide for detection of SNP TSC0009665
cttcacgtcgaaa

SEQ ID NO: 31289 - DNA, 13 bp, Artificial Sequence
  Oligonucleotide for detection of SNP TSC0009665
ttttatgttggaa

SEQ ID NO: 31290 - DNA, 13 bp, Artificial Sequence
  Oligonucleotide for detection of SNP TSC0009665
ttccaacataaaa

SEQ ID NO: 31291 - DNA, 13 bp, Artificial Sequence
  Oligonucleotide for detection of SNP TSC0009665
ttttatattggaa

SEQ ID NO: 31292 - DNA, 13 bp, Artificial Sequence
  Oligonucleotide for detection of SNP TSC0009665
ttccaatataaaa

SEQ ID NO: 31293 - DNA, 13 bp, Artificial Sequence
  Oligonucleotide for detection of SNP TSC0009665
ttttacgttggaa

SEQ ID NO: 31294 - DNA, 13 bp, Artificial Sequence
  Oligonucleotide for detection of SNP TSC0009665
ttccaacgtaaaa

SEQ ID NO: 31295 - DNA, 13 bp, Artificial Sequence
  Oligonucleotide for detection of SNP TSC0009665
ttttatatcggaa

SEQ ID NO: 31296 - DNA, 13 bp, Artificial Sequence
  Oligonucleotide for detection of SNP TSC0009665
ttccgatataaaa

SEQ ID NO: 31297 - DNA, 13 bp, Artificial Sequence
  Oligonucleotide for detection of SNP TSC0009665
ttttatgtcggaa

SEQ ID NO: 31298 - DNA, 13 bp, Artificial Sequence
  Oligonucleotide for detection of SNP TSC0009665
ttccgacataaaa

SEQ ID NO: 31299 - DNA, 13 bp, Artificial Sequence
  Oligonucleotide for detection of SNP TSC0009665
ttttacgtcggaa

SEQ ID NO: 31300 - DNA, 13 bp, Artificial Sequence
  Oligonucleotide for detection of SNP TSC0009665
ttccgacgtaaaa

SEQ ID NO: 31301 - DNA, 13 bp, Artificial Sequence
  Oligonucleotide for detection of SNP TSC0009666
gtagatataatat

SEQ ID NO: 31302 - DNA, 13 bp, Artificial Sequence
  Oligonucleotide for detection of SNP TSC0009666
atattatatctac

SEQ ID NO: 31303 - DNA, 13 bp, Artificial Sequence
  Oligonucleotide for detection of SNP TSC0009666
gtagatttaatat

SEQ ID NO: 31304 - DNA, 13 bp, Artificial Sequence
  Oligonucleotide for detection of SNP TSC0009666
atattaaatctac

SEQ ID NO: 31305 - DNA, 13 bp, Artificial Sequence
  Oligonucleotide for detection of SNP TSC0009666
atgttatgtttgy

SEQ ID NO: 31306 - DNA, 13 bp, Artificial Sequence
  Oligonucleotide for detection of SNP TSC0009666
rcaaacataacat

SEQ ID NO: 31307 - DNA, 13 bp, Artificial Sequence
  Oligonucleotide for detection of SNP TSC0009666
atgttaagtttgy

SEQ ID NO: 31308 - DNA, 13 bp, Artificial Sequence
  Oligonucleotide for detection of SNP TSC0009666
rcaaacttaacat

SEQ ID NO: 31309 - DNA, 13 bp, Artificial Sequence
  Oligonucleotide for detection of SNP TSC0009668
tttggagggttga

SEQ ID NO: 31310 - DNA, 13 bp, Artificial Sequence
  Oligonucleotide for detection of SNP TSC0009668
tcaaccctccaaa

SEQ ID NO: 31311 - DNA, 13 bp, Artificial Sequence
  Oligonucleotide for detection of SNP TSC0009668
tttggaaggttga

SEQ ID NO: 31312 - DNA, 13 bp, Artificial Sequence
  Oligonucleotide for detection of SNP TSC0009668
tcaaccttccaaa

SEQ ID NO: 31313 - DNA, 13 bp, Artificial Sequence
  Oligonucleotide for detection of SNP TSC0009669
aagaattgtttgg

SEQ ID NO: 31314 - DNA, 13 bp, Artificial Sequence
  Oligonucleotide for detection of SNP TSC0009669
ccaaacaattctt

SEQ ID NO: 31315 - DNA, 13 bp, Artificial Sequence
  Oligonucleotide for detection of SNP TSC0009669
aagaatcgtttgg

SEQ ID NO: 31316 - DNA, 13 bp, Artificial Sequence
  Oligonucleotide for detection of SNP TSC0009669
ccaaacgattctt

SEQ ID NO: 31317 - DNA, 13 bp, Artificial Sequence
  Oligonucleotide for detection of SNP TSC0009669
ttaggtggttttt

SEQ ID NO: 31318 - DNA, 13 bp, Artificial Sequence
  Oligonucleotide for detection of SNP TSC0009669
aaaaaccacctaa

SEQ ID NO: 31319 - DNA, 13 bp, Artificial Sequence
  Oligonucleotide for detection of SNP TSC0009669
ttaggtagttttt

SEQ ID NO: 31320 - DNA, 13 bp, Artificial Sequence
  Oligonucleotide for detection of SNP TSC0009669
aaaaactacctaa

SEQ ID NO: 31321 - DNA, 13 bp, Artificial Sequence
  Oligonucleotide for detection of SNP TSC0009669
ttaggcggttttt

SEQ ID NO: 31322 - DNA, 13 bp, Artificial Sequence
  Oligonucleotide for detection of SNP TSC0009669
aaaaaccgcctaa

SEQ ID NO: 31323 - DNA, 13 bp, Artificial Sequence
  Oligonucleotide for detection of SNP TSC0009673
aagaggatgttaa

SEQ ID NO: 31324 - DNA, 13 bp, Artificial Sequence
  Oligonucleotide for detection of SNP TSC0009673
ttaacatcctctt

SEQ ID NO: 31325 - DNA, 13 bp, Artificial Sequence
  Oligonucleotide for detection of SNP TSC0009673
aagagggtgttaa

SEQ ID NO: 31326 - DNA, 13 bp, Artificial Sequence
  Oligonucleotide for detection of SNP TSC0009673
ttaacaccctctt

SEQ ID NO: 31327 - DNA, 13 bp, Artificial Sequence
  Oligonucleotide for detection of SNP TSC0009677
atttaataaagtt

SEQ ID NO: 31328 - DNA, 13 bp, Artificial Sequence
  Oligonucleotide for detection of SNP TSC0009677
aactttattaaat

SEQ ID NO: 31329 - DNA, 13 bp, Artificial Sequence
  Oligonucleotide for detection of SNP TSC0009677
atttaagaaagtt

SEQ ID NO: 31330 - DNA, 13 bp, Artificial Sequence
  Oligonucleotide for detection of SNP TSC0009677
aactttcttaaat

SEQ ID NO: 31331 - DNA, 13 bp, Artificial Sequence
  Oligonucleotide for detection of SNP TSC0009677
aattttgttaaat

SEQ ID NO: 31332 - DNA, 13 bp, Artificial Sequence
  Oligonucleotide for detection of SNP TSC0009677
atttaacaaaatt

SEQ ID NO: 31333 - DNA, 13 bp, Artificial Sequence
  Oligonucleotide for detection of SNP TSC0009677
aatttttttaaat

SEQ ID NO: 31334 - DNA, 13 bp, Artificial Sequence
  Oligonucleotide for detection of SNP TSC0009677
atttaaaaaaatt

SEQ ID NO: 31335 - DNA, 13 bp, Artificial Sequence
  Oligonucleotide for detection of SNP TSC0009679
tttattatgatty

SEQ ID NO: 31336 - DNA, 13 bp, Artificial Sequence
  Oligonucleotide for detection of SNP TSC0009679
raatcataataaa

SEQ ID NO: 31337 - DNA, 13 bp, Artificial Sequence
  Oligonucleotide for detection of SNP TSC0009679
tttattttgatty

SEQ ID NO: 31338 - DNA, 13 bp, Artificial Sequence
  Oligonucleotide for detection of SNP TSC0009679
raatcaaaataaa

SEQ ID NO: 31339 - DNA, 13 bp, Artificial Sequence
  Oligonucleotide for detection of SNP TSC0009679
tttattacgatty

SEQ ID NO: 31340 - DNA, 13 bp, Artificial Sequence
  Oligonucleotide for detection of SNP TSC0009679
raatcgtaataaa

SEQ ID NO: 31341 - DNA, 13 bp, Artificial Sequence
  Oligonucleotide for detection of SNP TSC0009679
tttatttcgatty

SEQ ID NO: 31342 - DNA, 13 bp, Artificial Sequence
  Oligonucleotide for detection of SNP TSC0009679
raatcgaaataaa

SEQ ID NO: 31343 - DNA, 13 bp, Artificial Sequence
  Oligonucleotide for detection of SNP TSC0009679
gaattgtgataga

SEQ ID NO: 31344 - DNA, 13 bp, Artificial Sequence
  Oligonucleotide for detection of SNP TSC0009679
tctatcacaattc

SEQ ID NO: 31345 - DNA, 13 bp, Artificial Sequence
  Oligonucleotide for detection of SNP TSC0009679
gaattgagataga

SEQ ID NO: 31346 - DNA, 13 bp, Artificial Sequence
  Oligonucleotide for detection of SNP TSC0009679
tctatctcaattc

SEQ ID NO: 31347 - DNA, 13 bp, Artificial Sequence
  Oligonucleotide for detection of SNP TSC0009679
gaatcgtgataga

SEQ ID NO: 31348 - DNA, 13 bp, Artificial Sequence
  Oligonucleotide for detection of SNP TSC0009679
tctatcacgattc

SEQ ID NO: 31349 - DNA, 13 bp, Artificial Sequence
  Oligonucleotide for detection of SNP TSC0009679
gaatcgagataga

SEQ ID NO: 31350 - DNA, 13 bp, Artificial Sequence
  Oligonucleotide for detection of SNP TSC0009679
tctatctcgattc

SEQ ID NO: 31351 - DNA, 13 bp, Artificial Sequence
  Oligonucleotide for detection of SNP TSC0009680
aatgagagattat

SEQ ID NO: 31352 - DNA, 13 bp, Artificial Sequence
  Oligonucleotide for detection of SNP TSC0009680
ataatctctcatt

SEQ ID NO: 31353 - DNA, 13 bp, Artificial Sequence
  Oligonucleotide for detection of SNP TSC0009680
aatgagtgattat

SEQ ID NO: 31354 - DNA, 13 bp, Artificial Sequence
  Oligonucleotide for detection of SNP TSC0009680
ataatcactcatt

SEQ ID NO: 31355 - DNA, 13 bp, Artificial Sequence
  Oligonucleotide for detection of SNP TSC0009680
aatgagcgattat

SEQ ID NO: 31356 - DNA, 13 bp, Artificial Sequence
  Oligonucleotide for detection of SNP TSC0009680
ataatcgctcatt

SEQ ID NO: 31357 - DNA, 13 bp, Artificial Sequence
  Oligonucleotide for detection of SNP TSC0009680
atgattttttatt

SEQ ID NO: 31358 - DNA, 13 bp, Artificial Sequence
  Oligonucleotide for detection of SNP TSC0009680
aataaaaaatcat

SEQ ID NO: 31359 - DNA, 13 bp, Artificial Sequence
  Oligonucleotide for detection of SNP TSC0009680
atgattgtttatt

SEQ ID NO: 31360 - DNA, 13 bp, Artificial Sequence
  Oligonucleotide for detection of SNP TSC0009680
aataaacaatcat

SEQ ID NO: 31361 - DNA, 13 bp, Artificial Sequence
  Oligonucleotide for detection of SNP TSC0009680
atgatcgtttatt

SEQ ID NO: 31362 - DNA, 13 bp, Artificial Sequence
  Oligonucleotide for detection of SNP TSC0009680
aataaacgatcat

SEQ ID NO: 31363 - DNA, 13 bp, Artificial Sequence
  Oligonucleotide for detection of SNP TSC0009686
aatttgatagtty

SEQ ID NO: 31364 - DNA, 13 bp, Artificial Sequence
  Oligonucleotide for detection of SNP TSC0009686
raactatcaaatt

SEQ ID NO: 31365 - DNA, 13 bp, Artificial Sequence
  Oligonucleotide for detection of SNP TSC0009686
aatttgttagtty

SEQ ID NO: 31366 - DNA, 13 bp, Artificial Sequence
  Oligonucleotide for detection of SNP TSC0009686
raactaacaaatt

SEQ ID NO: 31367 - DNA, 13 bp, Artificial Sequence
  Oligonucleotide for detection of SNP TSC0009686
gggttattagatt

SEQ ID NO: 31368 - DNA, 13 bp, Artificial Sequence
  Oligonucleotide for detection of SNP TSC0009686
aatctaataaccc

SEQ ID NO: 31369 - DNA, 13 bp, Artificial Sequence
  Oligonucleotide for detection of SNP TSC0009686
gggttaatagatt

SEQ ID NO: 31370 - DNA, 13 bp, Artificial Sequence
  Oligonucleotide for detection of SNP TSC0009686
aatctattaaccc

SEQ ID NO: 31371 - DNA, 13 bp, Artificial Sequence
  Oligonucleotide for detection of SNP TSC0009689
tttaagagagaay

SEQ ID NO: 31372 - DNA, 13 bp, Artificial Sequence
  Oligonucleotide for detection of SNP TSC0009689
rttctctcttaaa

SEQ ID NO: 31373 - DNA, 13 bp, Artificial Sequence
  Oligonucleotide for detection of SNP TSC0009689
tttaagtgagaay

SEQ ID NO: 31374 - DNA, 13 bp, Artificial Sequence
  Oligonucleotide for detection of SNP TSC0009689
rttctcacttaaa

SEQ ID NO: 31375 - DNA, 13 bp, Artificial Sequence
  Oligonucleotide for detection of SNP TSC0009689
gtttttttttgga

SEQ ID NO: 31376 - DNA, 13 bp, Artificial Sequence
  Oligonucleotide for detection of SNP TSC0009689
tccaaaaaaaaac

SEQ ID NO: 31377 - DNA, 13 bp, Artificial Sequence
  Oligonucleotide for detection of SNP TSC0009689
gtttttatttgga

SEQ ID NO: 31378 - DNA, 13 bp, Artificial Sequence
  Oligonucleotide for detection of SNP TSC0009689
tccaaataaaaac

SEQ ID NO: 31379 - DNA, 13 bp, Artificial Sequence
  Oligonucleotide for detection of SNP TSC0009690
agtggggtgttga

SEQ ID NO: 31380 - DNA, 13 bp, Artificial Sequence
  Oligonucleotide for detection of SNP TSC0009690
tcaacaccccact

SEQ ID NO: 31381 - DNA, 13 bp, Artificial Sequence
  Oligonucleotide for detection of SNP TSC0009690
agtgggttgttga

SEQ ID NO: 31382 - DNA, 13 bp, Artificial Sequence
  Oligonucleotide for detection of SNP TSC0009690
tcaacaacccact

SEQ ID NO: 31383 - DNA, 13 bp, Artificial Sequence
  Oligonucleotide for detection of SNP TSC0009690
ttagtattttatt

SEQ ID NO: 31384 - DNA, 13 bp, Artificial Sequence
  Oligonucleotide for detection of SNP TSC0009690
aataaaatactaa

SEQ ID NO: 31385 - DNA, 13 bp, Artificial Sequence
  Oligonucleotide for detection of SNP TSC0009690
ttagtaatttatt

SEQ ID NO: 31386 - DNA, 13 bp, Artificial Sequence
  Oligonucleotide for detection of SNP TSC0009690
aataaattactaa

SEQ ID NO: 31387 - DNA, 13 bp, Artificial Sequence
  Oligonucleotide for detection of SNP TSC0009691
agtaattgaaagg

SEQ ID NO: 31388 - DNA, 13 bp, Artificial Sequence
  Oligonucleotide for detection of SNP TSC0009691
cctttcaattact

SEQ ID NO: 31389 - DNA, 13 bp, Artificial Sequence
  Oligonucleotide for detection of SNP TSC0009691
agtaatcgaaagg

SEQ ID NO: 31390 - DNA, 13 bp, Artificial Sequence
  Oligonucleotide for detection of SNP TSC0009691
cctttcgattact

SEQ ID NO: 31391 - DNA, 13 bp, Artificial Sequence
  Oligonucleotide for detection of SNP TSC0009691
ttttttggttgtt

SEQ ID NO: 31392 - DNA, 13 bp, Artificial Sequence
  Oligonucleotide for detection of SNP TSC0009691
aacaaccaaaaaa

SEQ ID NO: 31393 - DNA, 13 bp, Artificial Sequence
  Oligonucleotide for detection of SNP TSC0009691
tttttcggttgtt

SEQ ID NO: 31394 - DNA, 13 bp, Artificial Sequence
  Oligonucleotide for detection of SNP TSC0009691
aacaaccgaaaaa

SEQ ID NO: 31395 - DNA, 13 bp, Artificial Sequence
  Oligonucleotide for detection of SNP TSC0009692
ttaattatttatt

SEQ ID NO: 31396 - DNA, 13 bp, Artificial Sequence
  Oligonucleotide for detection of SNP TSC0009692
aataaataattaa

SEQ ID NO: 31397 - DNA, 13 bp, Artificial Sequence
  Oligonucleotide for detection of SNP TSC0009692
ttaattgtttatt

SEQ ID NO: 31398 - DNA, 13 bp, Artificial Sequence
  Oligonucleotide for detection of SNP TSC0009692
aataaacaattaa

SEQ ID NO: 31399 - DNA, 13 bp, Artificial Sequence
  Oligonucleotide for detection of SNP TSC0009692
ttaatcgtttatt

SEQ ID NO: 31400 - DNA, 13 bp, Artificial Sequence
  Oligonucleotide for detection of SNP TSC0009692
aataaacgattaa

SEQ ID NO: 31401 - DNA, 13 bp, Artificial Sequence
  Oligonucleotide for detection of SNP TSC0009692
aatagatgattaa

SEQ ID NO: 31402 - DNA, 13 bp, Artificial Sequence
  Oligonucleotide for detection of SNP TSC0009692
ttaatcatctatt

SEQ ID NO: 31403 - DNA, 13 bp, Artificial Sequence
  Oligonucleotide for detection of SNP TSC0009692
aatagacgattaa

SEQ ID NO: 31404 - DNA, 13 bp, Artificial Sequence
  Oligonucleotide for detection of SNP TSC0009692
ttaatcgtctatt

SEQ ID NO: 31405 - DNA, 13 bp, Artificial Sequence
  Oligonucleotide for detection of SNP TSC0009696
agtatagtggatt

SEQ ID NO: 31406 - DNA, 13 bp, Artificial Sequence
  Oligonucleotide for detection of SNP TSC0009696
aatccactatact

SEQ ID NO: 31407 - DNA, 13 bp, Artificial Sequence
  Oligonucleotide for detection of SNP TSC0009696
agtataatggatt

SEQ ID NO: 31408 - DNA, 13 bp, Artificial Sequence
  Oligonucleotide for detection of SNP TSC0009696
aatccattatact

SEQ ID NO: 31409 - DNA, 13 bp, Artificial Sequence
  Oligonucleotide for detection of SNP TSC0009697
tttttagttttta

SEQ ID NO: 31410 - DNA, 13 bp, Artificial Sequence
  Oligonucleotide for detection of SNP TSC0009697
taaaaactaaaaa

SEQ ID NO: 31411 - DNA, 13 bp, Artificial Sequence
  Oligonucleotide for detection of SNP TSC0009698
aaaagaagttatg

SEQ ID NO: 31412 - DNA, 13 bp, Artificial Sequence
  Oligonucleotide for detection of SNP TSC0009698
cataacttctttt

SEQ ID NO: 31413 - DNA, 13 bp, Artificial Sequence
  Oligonucleotide for detection of SNP TSC0009698
aaaagaggttatg

SEQ ID NO: 31414 - DNA, 13 bp, Artificial Sequence
  Oligonucleotide for detection of SNP TSC0009698
cataacctctttt

SEQ ID NO: 31415 - DNA, 13 bp, Artificial Sequence
  Oligonucleotide for detection of SNP TSC0009700
aatttagtattta

SEQ ID NO: 31416 - DNA, 13 bp, Artificial Sequence
  Oligonucleotide for detection of SNP TSC0009700
taaatactaaatt

SEQ ID NO: 31417 - DNA, 13 bp, Artificial Sequence
  Oligonucleotide for detection of SNP TSC0009700
aatttattattta

SEQ ID NO: 31418 - DNA, 13 bp, Artificial Sequence
  Oligonucleotide for detection of SNP TSC0009700
taaataataaatt

SEQ ID NO: 31419 - DNA, 13 bp, Artificial Sequence
  Oligonucleotide for detection of SNP TSC0009700
taaatattaaatt

SEQ ID NO: 31420 - DNA, 13 bp, Artificial Sequence
  Oligonucleotide for detection of SNP TSC0009700
aatttaatattta

SEQ ID NO: 31421 - DNA, 13 bp, Artificial Sequence
  Oligonucleotide for detection of SNP TSC0009701
tagaatagtgagy

SEQ ID NO: 31422 - DNA, 13 bp, Artificial Sequence
  Oligonucleotide for detection of SNP TSC0009701
rctcactattcta

SEQ ID NO: 31423 - DNA, 13 bp, Artificial Sequence
  Oligonucleotide for detection of SNP TSC0009701
tagaattgtgagy

SEQ ID NO: 31424 - DNA, 13 bp, Artificial Sequence
  Oligonucleotide for detection of SNP TSC0009701
rctcacaattcta

SEQ ID NO: 31425 - DNA, 13 bp, Artificial Sequence
  Oligonucleotide for detection of SNP TSC0009701
gtttattattttg

SEQ ID NO: 31426 - DNA, 13 bp, Artificial Sequence
  Oligonucleotide for detection of SNP TSC0009701
caaaataataaac

SEQ ID NO: 31427 - DNA, 13 bp, Artificial Sequence
  Oligonucleotide for detection of SNP TSC0009701
gtttataattttg

SEQ ID NO: 31428 - DNA, 13 bp, Artificial Sequence
  Oligonucleotide for detection of SNP TSC0009701
caaaattataaac

SEQ ID NO: 31429 - DNA, 13 bp, Artificial Sequence
  Oligonucleotide for detection of SNP TSC0009706
aaagtaaaaagaa

SEQ ID NO: 31430 - DNA, 13 bp, Artificial Sequence
  Oligonucleotide for detection of SNP TSC0009706
ttctttttacttt

SEQ ID NO: 31431 - DNA, 13 bp, Artificial Sequence
  Oligonucleotide for detection of SNP TSC0009706
aaagtagaaagaa

SEQ ID NO: 31432 - DNA, 13 bp, Artificial Sequence
  Oligonucleotide for detection of SNP TSC0009706
ttctttctacttt

SEQ ID NO: 31433 - DNA, 13 bp, Artificial Sequence
  Oligonucleotide for detection of SNP TSC0009716
ttatttatattty

SEQ ID NO: 31434 - DNA, 13 bp, Artificial Sequence
  Oligonucleotide for detection of SNP TSC0009716
raaatataaataa

SEQ ID NO: 31435 - DNA, 13 bp, Artificial Sequence
  Oligonucleotide for detection of SNP TSC0009717
gtggaaagagagg

SEQ ID NO: 31436 - DNA, 13 bp, Artificial Sequence
  Oligonucleotide for detection of SNP TSC0009717
cctctctttccac

SEQ ID NO: 31437 - DNA, 13 bp, Artificial Sequence
  Oligonucleotide for detection of SNP TSC0009717
gtggaaggagagg

SEQ ID NO: 31438 - DNA, 13 bp, Artificial Sequence
  Oligonucleotide for detection of SNP TSC0009717
cctctccttccac

SEQ ID NO: 31439 - DNA, 13 bp, Artificial Sequence
  Oligonucleotide for detection of SNP TSC0009722
ggattggtttttg

SEQ ID NO: 31440 - DNA, 13 bp, Artificial Sequence
  Oligonucleotide for detection of SNP TSC0009722
caaaaaccaatcc

SEQ ID NO: 31441 - DNA, 13 bp, Artificial Sequence
  Oligonucleotide for detection of SNP TSC0009722
ggattgatttttg

SEQ ID NO: 31442 - DNA, 13 bp, Artificial Sequence
  Oligonucleotide for detection of SNP TSC0009722
caaaaatcaatcc

SEQ ID NO: 31443 - DNA, 13 bp, Artificial Sequence
  Oligonucleotide for detection of SNP TSC0009724
tttttttttggta

SEQ ID NO: 31444 - DNA, 13 bp, Artificial Sequence
  Oligonucleotide for detection of SNP TSC0009724
taccaaaaaaaaa

SEQ ID NO: 31445 - DNA, 13 bp, Artificial Sequence
  Oligonucleotide for detection of SNP TSC0009724
ttttttgttggta

SEQ ID NO: 31446 - DNA, 13 bp, Artificial Sequence
  Oligonucleotide for detection of SNP TSC0009724
taccaacaaaaaa

SEQ ID NO: 31447 - DNA, 13 bp, Artificial Sequence
  Oligonucleotide for detection of SNP TSC0009724
tattaagaagaga

SEQ ID NO: 31448 - DNA, 13 bp, Artificial Sequence
  Oligonucleotide for detection of SNP TSC0009724
tctcttcttaata

SEQ ID NO: 31449 - DNA, 13 bp, Artificial Sequence
  Oligonucleotide for detection of SNP TSC0009724
tattaataagaga

SEQ ID NO: 31450 - DNA, 13 bp, Artificial Sequence
  Oligonucleotide for detection of SNP TSC0009724
tctcttattaata

SEQ ID NO: 31451 - DNA, 13 bp, Artificial Sequence
  Oligonucleotide for detection of SNP TSC0009729
ataaatgtaagga

SEQ ID NO: 31452 - DNA, 13 bp, Artificial Sequence
  Oligonucleotide for detection of SNP TSC0009729
tccttacatttat

SEQ ID NO: 31453 - DNA, 13 bp, Artificial Sequence
  Oligonucleotide for detection of SNP TSC0009729
ataaatttaagga

SEQ ID NO: 31454 - DNA, 13 bp, Artificial Sequence
  Oligonucleotide for detection of SNP TSC0009729
tccttaaatttat

SEQ ID NO: 31455 - DNA, 13 bp, Artificial Sequence
  Oligonucleotide for detection of SNP TSC0009729
tttttgtatttgt

SEQ ID NO: 31456 - DNA, 13 bp, Artificial Sequence
  Oligonucleotide for detection of SNP TSC0009729
acaaatacaaaaa

SEQ ID NO: 31457 - DNA, 13 bp, Artificial Sequence
  Oligonucleotide for detection of SNP TSC0009729
tttttgaatttgt

SEQ ID NO: 31458 - DNA, 13 bp, Artificial Sequence
  Oligonucleotide for detection of SNP TSC0009729
acaaattcaaaaa

SEQ ID NO: 31459 - DNA, 13 bp, Artificial Sequence
  Oligonucleotide for detection of SNP TSC0009734
atatattaaagag

SEQ ID NO: 31460 - DNA, 13 bp, Artificial Sequence
  Oligonucleotide for detection of SNP TSC0009734
ctctttaatatat

SEQ ID NO: 31461 - DNA, 13 bp, Artificial Sequence
  Oligonucleotide for detection of SNP TSC0009734
atatatgaaagag

SEQ ID NO: 31462 - DNA, 13 bp, Artificial Sequence
  Oligonucleotide for detection of SNP TSC0009734
ctctttcatatat

SEQ ID NO: 31463 - DNA, 13 bp, Artificial Sequence
  Oligonucleotide for detection of SNP TSC0009734
atatacgaaagag

SEQ ID NO: 31464 - DNA, 13 bp, Artificial Sequence
  Oligonucleotide for detection of SNP TSC0009734
ctctttcgtatat

SEQ ID NO: 31465 - DNA, 13 bp, Artificial Sequence
  Oligonucleotide for detection of SNP TSC0009734
ttttttggtatat

SEQ ID NO: 31466 - DNA, 13 bp, Artificial Sequence
  Oligonucleotide for detection of SNP TSC0009734
atataccaaaaaa

SEQ ID NO: 31467 - DNA, 13 bp, Artificial Sequence
  Oligonucleotide for detection of SNP TSC0009734
tttttttgtatat

SEQ ID NO: 31468 - DNA, 13 bp, Artificial Sequence
  Oligonucleotide for detection of SNP TSC0009734
atatacaaaaaaa

SEQ ID NO: 31469 - DNA, 13 bp, Artificial Sequence
  Oligonucleotide for detection of SNP TSC0009734
ttttttcgtatat

SEQ ID NO: 31470 - DNA, 13 bp, Artificial Sequence
  Oligonucleotide for detection of SNP TSC0009734
atatacgaaaaaa

SEQ ID NO: 31471 - DNA, 13 bp, Artificial Sequence
  Oligonucleotide for detection of SNP TSC0009735
ttgtgaggttttg

SEQ ID NO: 31472 - DNA, 13 bp, Artificial Sequence
  Oligonucleotide for detection of SNP TSC0009735
caaaacctcacaa

SEQ ID NO: 31473 - DNA, 13 bp, Artificial Sequence
  Oligonucleotide for detection of SNP TSC0009735
ttgtgaagttttg

SEQ ID NO: 31474 - DNA, 13 bp, Artificial Sequence
  Oligonucleotide for detection of SNP TSC0009735
caaaacttcacaa

SEQ ID NO: 31475 - DNA, 13 bp, Artificial Sequence
  Oligonucleotide for detection of SNP TSC0009736
tgttagagtagtt

SEQ ID NO: 31476 - DNA, 13 bp, Artificial Sequence
  Oligonucleotide for detection of SNP TSC0009736
aactactctaaca

SEQ ID NO: 31477 - DNA, 13 bp, Artificial Sequence
  Oligonucleotide for detection of SNP TSC0009736
tgttagggtagtt

SEQ ID NO: 31478 - DNA, 13 bp, Artificial Sequence
  Oligonucleotide for detection of SNP TSC0009736
aactaccctaaca

SEQ ID NO: 31479 - DNA, 13 bp, Artificial Sequence
  Oligonucleotide for detection of SNP TSC0009740
tatgttgttaaaa

SEQ ID NO: 31480 - DNA, 13 bp, Artificial Sequence
  Oligonucleotide for detection of SNP TSC0009740
ttttaacaacata

SEQ ID NO: 31481 - DNA, 13 bp, Artificial Sequence
  Oligonucleotide for detection of SNP TSC0009740
tatgttattaaaa

SEQ ID NO: 31482 - DNA, 13 bp, Artificial Sequence
  Oligonucleotide for detection of SNP TSC0009740
ttttaataacata

SEQ ID NO: 31483 - DNA, 13 bp, Artificial Sequence
  Oligonucleotide for detection of SNP TSC0009744
ttataaaaattty

SEQ ID NO: 31484 - DNA, 13 bp, Artificial Sequence
  Oligonucleotide for detection of SNP TSC0009744
raaatttttataa

SEQ ID NO: 31485 - DNA, 13 bp, Artificial Sequence
  Oligonucleotide for detection of SNP TSC0009744
ttataataattty

SEQ ID NO: 31486 - DNA, 13 bp, Artificial Sequence
  Oligonucleotide for detection of SNP TSC0009744
raaattattataa

SEQ ID NO: 31487 - DNA, 13 bp, Artificial Sequence
  Oligonucleotide for detection of SNP TSC0009744
ggaatttttgtaa

SEQ ID NO: 31488 - DNA, 13 bp, Artificial Sequence
  Oligonucleotide for detection of SNP TSC0009744
ttacaaaaattcc

SEQ ID NO: 31489 - DNA, 13 bp, Artificial Sequence
  Oligonucleotide for detection of SNP TSC0009744
ggaattgttgtaa

SEQ ID NO: 31490 - DNA, 13 bp, Artificial Sequence
  Oligonucleotide for detection of SNP TSC0009744
ttacaacaattcc

SEQ ID NO: 31491 - DNA, 13 bp, Artificial Sequence
  Oligonucleotide for detection of SNP TSC0009748
tatttaaatattt

SEQ ID NO: 31492 - DNA, 13 bp, Artificial Sequence
  Oligonucleotide for detection of SNP TSC0009748
aaatatttaaata

SEQ ID NO: 31493 - DNA, 13 bp, Artificial Sequence
  Oligonucleotide for detection of SNP TSC0009748
tatttagatattt

SEQ ID NO: 31494 - DNA, 13 bp, Artificial Sequence
  Oligonucleotide for detection of SNP TSC0009748
aaatatctaaata

SEQ ID NO: 31495 - DNA, 13 bp, Artificial Sequence
  Oligonucleotide for detection of SNP TSC0009749
taatgtataaaay

SEQ ID NO: 31496 - DNA, 13 bp, Artificial Sequence
  Oligonucleotide for detection of SNP TSC0009749
rttttatacatta

SEQ ID NO: 31497 - DNA, 13 bp, Artificial Sequence
  Oligonucleotide for detection of SNP TSC0009749
taatgtgtaaaay

SEQ ID NO: 31498 - DNA, 13 bp, Artificial Sequence
  Oligonucleotide for detection of SNP TSC0009749
rttttacacatta

SEQ ID NO: 31499 - DNA, 13 bp, Artificial Sequence
  Oligonucleotide for detection of SNP TSC0009754
gtaggaatttatt

SEQ ID NO: 31500 - DNA, 13 bp, Artificial Sequence
  Oligonucleotide for detection of SNP TSC0009754
aataaattcctac

SEQ ID NO: 31501 - DNA, 13 bp, Artificial Sequence
  Oligonucleotide for detection of SNP TSC0009754
gtaggagtttatt

SEQ ID NO: 31502 - DNA, 13 bp, Artificial Sequence
  Oligonucleotide for detection of SNP TSC0009754
aataaactcctac

SEQ ID NO: 31503 - DNA, 13 bp, Artificial Sequence
  Oligonucleotide for detection of SNP TSC0009755
ttttgtattatga

SEQ ID NO: 31504 - DNA, 13 bp, Artificial Sequence
  Oligonucleotide for detection of SNP TSC0009755
tcataatacaaaa

SEQ ID NO: 31505 - DNA, 13 bp, Artificial Sequence
  Oligonucleotide for detection of SNP TSC0009755
ttttgtgttatga

SEQ ID NO: 31506 - DNA, 13 bp, Artificial Sequence
  Oligonucleotide for detection of SNP TSC0009755
tcataacacaaaa

SEQ ID NO: 31507 - DNA, 13 bp, Artificial Sequence
  Oligonucleotide for detection of SNP TSC0009757
tgaataggtttag

SEQ ID NO: 31508 - DNA, 13 bp, Artificial Sequence
  Oligonucleotide for detection of SNP TSC0009757
ctaaacctattca

SEQ ID NO: 31509 - DNA, 13 bp, Artificial Sequence
  Oligonucleotide for detection of SNP TSC0009757
tgaataagtttag

SEQ ID NO: 31510 - DNA, 13 bp, Artificial Sequence
  Oligonucleotide for detection of SNP TSC0009757
ctaaacttattca

SEQ ID NO: 31511 - DNA, 13 bp, Artificial Sequence
  Oligonucleotide for detection of SNP TSC0009761
attatggttttat

SEQ ID NO: 31512 - DNA, 13 bp, Artificial Sequence
  Oligonucleotide for detection of SNP TSC0009761
ataaaaccataat

SEQ ID NO: 31513 - DNA, 13 bp, Artificial Sequence
  Oligonucleotide for detection of SNP TSC0009761
attatgattttat

SEQ ID NO: 31514 - DNA, 13 bp, Artificial Sequence
  Oligonucleotide for detection of SNP TSC0009761
ataaaatcataat

SEQ ID NO: 31515 - DNA, 13 bp, Artificial Sequence
  Oligonucleotide for detection of SNP TSC0009761
attacggttttat

SEQ ID NO: 31516 - DNA, 13 bp, Artificial Sequence
  Oligonucleotide for detection of SNP TSC0009761
ataaaaccgtaat

SEQ ID NO: 31517 - DNA, 13 bp, Artificial Sequence
  Oligonucleotide for detection of SNP TSC0009761
attacgattttat

SEQ ID NO: 31518 - DNA, 13 bp, Artificial Sequence
  Oligonucleotide for detection of SNP TSC0009761
ataaaatcgtaat

SEQ ID NO: 31519 - DNA, 13 bp, Artificial Sequence
  Oligonucleotide for detection of SNP TSC0009770
atttatatatatg

SEQ ID NO: 31520 - DNA, 13 bp, Artificial Sequence
  Oligonucleotide for detection of SNP TSC0009770
catatatataaat

SEQ ID NO: 31521 - DNA, 13 bp, Artificial Sequence
  Oligonucleotide for detection of SNP TSC0009770
atttatttatatg

SEQ ID NO: 31522 - DNA, 13 bp, Artificial Sequence
  Oligonucleotide for detection of SNP TSC0009770
catataaataaat

SEQ ID NO: 31523 - DNA, 13 bp, Artificial Sequence
  Oligonucleotide for detection of SNP TSC0009770
tatgtatgtaagt

SEQ ID NO: 31524 - DNA, 13 bp, Artificial Sequence
  Oligonucleotide for detection of SNP TSC0009770
acttacatacata

SEQ ID NO: 31525 - DNA, 13 bp, Artificial Sequence
  Oligonucleotide for detection of SNP TSC0009770
tatgtaggtaagt

SEQ ID NO: 31526 - DNA, 13 bp, Artificial Sequence
  Oligonucleotide for detection of SNP TSC0009770
acttacctacata

SEQ ID NO: 31527 - DNA, 13 bp, Artificial Sequence
  Oligonucleotide for detection of SNP TSC0009776
attttaaatggtg

SEQ ID NO: 31528 - DNA, 13 bp, Artificial Sequence
  Oligonucleotide for detection of SNP TSC0009776
caccatttaaaat

SEQ ID NO: 31529 - DNA, 13 bp, Artificial Sequence
  Oligonucleotide for detection of SNP TSC0009776
attttagatggtg

SEQ ID NO: 31530 - DNA, 13 bp, Artificial Sequence
  Oligonucleotide for detection of SNP TSC0009776
caccatctaaaat

SEQ ID NO: 31531 - DNA, 13 bp, Artificial Sequence
  Oligonucleotide for detection of SNP TSC0009790
tgaaatgatgaag

SEQ ID NO: 31532 - DNA, 13 bp, Artificial Sequence
  Oligonucleotide for detection of SNP TSC0009790
cttcatcatttca

SEQ ID NO: 31533 - DNA, 13 bp, Artificial Sequence
  Oligonucleotide for detection of SNP TSC0009790
tgaaattatgaag

SEQ ID NO: 31534 - DNA, 13 bp, Artificial Sequence
  Oligonucleotide for detection of SNP TSC0009790
cttcataatttca

SEQ ID NO: 31535 - DNA, 13 bp, Artificial Sequence
  Oligonucleotide for detection of SNP TSC0009790
ttttattatttta

SEQ ID NO: 31536 - DNA, 13 bp, Artificial Sequence
  Oligonucleotide for detection of SNP TSC0009790
taaaataataaaa

SEQ ID NO: 31537 - DNA, 13 bp, Artificial Sequence
  Oligonucleotide for detection of SNP TSC0009790
ttttataatttta

SEQ ID NO: 31538 - DNA, 13 bp, Artificial Sequence
  Oligonucleotide for detection of SNP TSC0009790
taaaattataaaa

SEQ ID NO: 31539 - DNA, 13 bp, Artificial Sequence
  Oligonucleotide for detection of SNP TSC0009796
taatttgttttat

SEQ ID NO: 31540 - DNA, 13 bp, Artificial Sequence
  Oligonucleotide for detection of SNP TSC0009796
ataaaacaaatta

SEQ ID NO: 31541 - DNA, 13 bp, Artificial Sequence
  Oligonucleotide for detection of SNP TSC0009796
taatttattttat

SEQ ID NO: 31542 - DNA, 13 bp, Artificial Sequence
  Oligonucleotide for detection of SNP TSC0009796
ataaaataaatta

SEQ ID NO: 31543 - DNA, 13 bp, Artificial Sequence
  Oligonucleotide for detection of SNP TSC0009797
tttgtgggtatta

SEQ ID NO: 31544 - DNA, 13 bp, Artificial Sequence
  Oligonucleotide for detection of SNP TSC0009797
taatacccacaaa

SEQ ID NO: 31545 - DNA, 13 bp, Artificial Sequence
  Oligonucleotide for detection of SNP TSC0009797
tttgtgagtatta

SEQ ID NO: 31546 - DNA, 13 bp, Artificial Sequence
  Oligonucleotide for detection of SNP TSC0009797
taatactcacaaa

SEQ ID NO: 31547 - DNA, 13 bp, Artificial Sequence
  Oligonucleotide for detection of SNP TSC0009797
ttcgtgggtatta

SEQ ID NO: 31548 - DNA, 13 bp, Artificial Sequence
  Oligonucleotide for detection of SNP TSC0009797
taatacccacgaa

SEQ ID NO: 31549 - DNA, 13 bp, Artificial Sequence
  Oligonucleotide for detection of SNP TSC0009797
ttcgtgagtatta

SEQ ID NO: 31550 - DNA, 13 bp, Artificial Sequence
  Oligonucleotide for detection of SNP TSC0009797
taatactcacgaa

SEQ ID NO: 31551 - DNA, 13 bp, Artificial Sequence
  Oligonucleotide for detection of SNP TSC0009798
tatattatatttt

SEQ ID NO: 31552 - DNA, 13 bp, Artificial Sequence
  Oligonucleotide for detection of SNP TSC0009798
aaaatataatata

SEQ ID NO: 31553 - DNA, 13 bp, Artificial Sequence
  Oligonucleotide for detection of SNP TSC0009798
tatattgtatttt

SEQ ID NO: 31554 - DNA, 13 bp, Artificial Sequence
  Oligonucleotide for detection of SNP TSC0009798
aaaatacaatata

SEQ ID NO: 31555 - DNA, 13 bp, Artificial Sequence
  Oligonucleotide for detection of SNP TSC0009799
tgtggaaatgagy

SEQ ID NO: 31556 - DNA, 13 bp, Artificial Sequence
  Oligonucleotide for detection of SNP TSC0009799
rctcatttccaca

SEQ ID NO: 31557 - DNA, 13 bp, Artificial Sequence
  Oligonucleotide for detection of SNP TSC0009799
tgtggatatgagy

SEQ ID NO: 31558 - DNA, 13 bp, Artificial Sequence
  Oligonucleotide for detection of SNP TSC0009799
rctcatatccaca

SEQ ID NO: 31559 - DNA, 13 bp, Artificial Sequence
  Oligonucleotide for detection of SNP TSC0009799
tgcggaaatgagy

SEQ ID NO: 31560 - DNA, 13 bp, Artificial Sequence
  Oligonucleotide for detection of SNP TSC0009799
rctcatttccgca

SEQ ID NO: 31561 - DNA, 13 bp, Artificial Sequence
  Oligonucleotide for detection of SNP TSC0009799
tgcggatatgagy

SEQ ID NO: 31562 - DNA, 13 bp, Artificial Sequence
  Oligonucleotide for detection of SNP TSC0009799
rctcatatccgca

SEQ ID NO: 31563 - DNA, 13 bp, Artificial Sequence
  Oligonucleotide for detection of SNP TSC0009799
gtttatttttgta

SEQ ID NO: 31564 - DNA, 13 bp, Artificial Sequence
  Oligonucleotide for detection of SNP TSC0009799
tacaaaaataaac

SEQ ID NO: 31565 - DNA, 13 bp, Artificial Sequence
  Oligonucleotide for detection of SNP TSC0009799
gtttattttcgta

SEQ ID NO: 31566 - DNA, 13 bp, Artificial Sequence
  Oligonucleotide for detection of SNP TSC0009799
tacgaaaataaac

SEQ ID NO: 31567 - DNA, 13 bp, Artificial Sequence
  Oligonucleotide for detection of SNP TSC0009799
gtttatattcgta

SEQ ID NO: 31568 - DNA, 13 bp, Artificial Sequence
  Oligonucleotide for detection of SNP TSC0009799
tacgaatataaac

SEQ ID NO: 31569 - DNA, 13 bp, Artificial Sequence
  Oligonucleotide for detection of SNP TSC0009800
ttggagtaggggy

SEQ ID NO: 31570 - DNA, 13 bp, Artificial Sequence
  Oligonucleotide for detection of SNP TSC0009800
rcccctactccaa

SEQ ID NO: 31571 - DNA, 13 bp, Artificial Sequence
  Oligonucleotide for detection of SNP TSC0009800
ttggaggaggggy

SEQ ID NO: 31572 - DNA, 13 bp, Artificial Sequence
  Oligonucleotide for detection of SNP TSC0009800
rcccctcctccaa

SEQ ID NO: 31573 - DNA, 13 bp, Artificial Sequence
  Oligonucleotide for detection of SNP TSC0009800
gtttttgttttaa

SEQ ID NO: 31574 - DNA, 13 bp, Artificial Sequence
  Oligonucleotide for detection of SNP TSC0009800
ttaaaacaaaaac

SEQ ID NO: 31575 - DNA, 13 bp, Artificial Sequence
  Oligonucleotide for detection of SNP TSC0009800
gttttttttttaa

SEQ ID NO: 31576 - DNA, 13 bp, Artificial Sequence
  Oligonucleotide for detection of SNP TSC0009800
ttaaaaaaaaaac

SEQ ID NO: 31577 - DNA, 13 bp, Artificial Sequence
  Oligonucleotide for detection of SNP TSC0009801
gagtaaattttgt

SEQ ID NO: 31578 - DNA, 13 bp, Artificial Sequence
  Oligonucleotide for detection of SNP TSC0009801
acaaaatttactc

SEQ ID NO: 31579 - DNA, 13 bp, Artificial Sequence
  Oligonucleotide for detection of SNP TSC0009801
gagtaagttttgt

SEQ ID NO: 31580 - DNA, 13 bp, Artificial Sequence
  Oligonucleotide for detection of SNP TSC0009801
acaaaacttactc

SEQ ID NO: 31581 - DNA, 13 bp, Artificial Sequence
  Oligonucleotide for detection of SNP TSC0009807
tgtttaggtgatt

SEQ ID NO: 31582 - DNA, 13 bp, Artificial Sequence
  Oligonucleotide for detection of SNP TSC0009807
aatcacctaaaca

SEQ ID NO: 31583 - DNA, 13 bp, Artificial Sequence
  Oligonucleotide for detection of SNP TSC0009807
tgtttatgtgatt

SEQ ID NO: 31584 - DNA, 13 bp, Artificial Sequence
  Oligonucleotide for detection of SNP TSC0009807
aatcacataaaca

SEQ ID NO: 31585 - DNA, 13 bp, Artificial Sequence
  Oligonucleotide for detection of SNP TSC0009807
agttatttgaata

SEQ ID NO: 31586 - DNA, 13 bp, Artificial Sequence
  Oligonucleotide for detection of SNP TSC0009807
tattcaaataact

SEQ ID NO: 31587 - DNA, 13 bp, Artificial Sequence
  Oligonucleotide for detection of SNP TSC0009807
agttatatgaata

SEQ ID NO: 31588 - DNA, 13 bp, Artificial Sequence
  Oligonucleotide for detection of SNP TSC0009807
tattcatataact

SEQ ID NO: 31589 - DNA, 13 bp, Artificial Sequence
  Oligonucleotide for detection of SNP TSC0009810
ttggagggatgtt

SEQ ID NO: 31590 - DNA, 13 bp, Artificial Sequence
  Oligonucleotide for detection of SNP TSC0009810
aacatccctccaa

SEQ ID NO: 31591 - DNA, 13 bp, Artificial Sequence
  Oligonucleotide for detection of SNP TSC0009810
ttggagagatgtt

SEQ ID NO: 31592 - DNA, 13 bp, Artificial Sequence
  Oligonucleotide for detection of SNP TSC0009810
aacatctctccaa

SEQ ID NO: 31593 - DNA, 13 bp, Artificial Sequence
  Oligonucleotide for detection of SNP TSC0009813
taagatggttgtg

SEQ ID NO: 31594 - DNA, 13 bp, Artificial Sequence
  Oligonucleotide for detection of SNP TSC0009813
cacaaccatctta

SEQ ID NO: 31595 - DNA, 13 bp, Artificial Sequence
  Oligonucleotide for detection of SNP TSC0009813
taagatagttgtg

SEQ ID NO: 31596 - DNA, 13 bp, Artificial Sequence
  Oligonucleotide for detection of SNP TSC0009813
cacaactatctta

SEQ ID NO: 31597 - DNA, 13 bp, Artificial Sequence
  Oligonucleotide for detection of SNP TSC0009813
taagatggtcgtg

SEQ ID NO: 31598 - DNA, 13 bp, Artificial Sequence
  Oligonucleotide for detection of SNP TSC0009813
cacgaccatctta

SEQ ID NO: 31599 - DNA, 13 bp, Artificial Sequence
  Oligonucleotide for detection of SNP TSC0009813
taagatagtcgtg

SEQ ID NO: 31600 - DNA, 13 bp, Artificial Sequence
  Oligonucleotide for detection of SNP TSC0009813
cacgactatctta

SEQ ID NO: 31601 - DNA, 13 bp, Artificial Sequence
  Oligonucleotide for detection of SNP TSC0009816
tagtgtggttaay

SEQ ID NO: 31602 - DNA, 13 bp, Artificial Sequence
  Oligonucleotide for detection of SNP TSC0009816
rttaaccacacta

SEQ ID NO: 31603 - DNA, 13 bp, Artificial Sequence
  Oligonucleotide for detection of SNP TSC0009816
tagtgtagttaay

SEQ ID NO: 31604 - DNA, 13 bp, Artificial Sequence
  Oligonucleotide for detection of SNP TSC0009816
rttaactacacta

SEQ ID NO: 31605 - DNA, 13 bp, Artificial Sequence
  Oligonucleotide for detection of SNP TSC0009818
tgtaaggtatgta

SEQ ID NO: 31606 - DNA, 13 bp, Artificial Sequence
  Oligonucleotide for detection of SNP TSC0009818
tacataccttaca

SEQ ID NO: 31607 - DNA, 13 bp, Artificial Sequence
  Oligonucleotide for detection of SNP TSC0009818
tgtaagttatgta

SEQ ID NO: 31608 - DNA, 13 bp, Artificial Sequence
  Oligonucleotide for detection of SNP TSC0009818
tacataacttaca

SEQ ID NO: 31609 - DNA, 13 bp, Artificial Sequence
  Oligonucleotide for detection of SNP TSC0009818
tgtatgttttata

SEQ ID NO: 31610 - DNA, 13 bp, Artificial Sequence
  Oligonucleotide for detection of SNP TSC0009818
tataaaacataca

SEQ ID NO: 31611 - DNA, 13 bp, Artificial Sequence
  Oligonucleotide for detection of SNP TSC0009818
tgtatgatttata

SEQ ID NO: 31612 - DNA, 13 bp, Artificial Sequence
  Oligonucleotide for detection of SNP TSC0009818
tataaatcataca

SEQ ID NO: 31613 - DNA, 13 bp, Artificial Sequence
  Oligonucleotide for detection of SNP TSC0009820
aaaaatgtttaag

SEQ ID NO: 31614 - DNA, 13 bp, Artificial Sequence
  Oligonucleotide for detection of SNP TSC0009820
cttaaacattttt

SEQ ID NO: 31615 - DNA, 13 bp, Artificial Sequence
  Oligonucleotide for detection of SNP TSC0009820
aaaaatttttaag

SEQ ID NO: 31616 - DNA, 13 bp, Artificial Sequence
  Oligonucleotide for detection of SNP TSC0009820
cttaaaaattttt

SEQ ID NO: 31617 - DNA, 13 bp, Artificial Sequence
  Oligonucleotide for detection of SNP TSC0009820
aaaaacgtttaag

SEQ ID NO: 31618 - DNA, 13 bp, Artificial Sequence
  Oligonucleotide for detection of SNP TSC0009820
cttaaacgttttt

SEQ ID NO: 31619 - DNA, 13 bp, Artificial Sequence
  Oligonucleotide for detection of SNP TSC0009820
tttagatgttttt

SEQ ID NO: 31620 - DNA, 13 bp, Artificial Sequence
  Oligonucleotide for detection of SNP TSC0009820
aaaaacatctaaa

SEQ ID NO: 31621 - DNA, 13 bp, Artificial Sequence
  Oligonucleotide for detection of SNP TSC0009820
tttagaagttttt

SEQ ID NO: 31622 - DNA, 13 bp, Artificial Sequence
  Oligonucleotide for detection of SNP TSC0009820
aaaaacttctaaa

SEQ ID NO: 31623 - DNA, 13 bp, Artificial Sequence
  Oligonucleotide for detection of SNP TSC0009820
tttagacgttttt

SEQ ID NO: 31624 - DNA, 13 bp, Artificial Sequence
  Oligonucleotide for detection of SNP TSC0009820
aaaaacgtctaaa

SEQ ID NO: 31625 - DNA, 13 bp, Artificial Sequence
  Oligonucleotide for detection of SNP TSC0009824
taaagtattaagt

SEQ ID NO: 31626 - DNA, 13 bp, Artificial Sequence
  Oligonucleotide for detection of SNP TSC0009824
acttaatacttta

SEQ ID NO: 31627 - DNA, 13 bp, Artificial Sequence
  Oligonucleotide for detection of SNP TSC0009824
taaagtgttaagt

SEQ ID NO: 31628 - DNA, 13 bp, Artificial Sequence
  Oligonucleotide for detection of SNP TSC0009824
acttaacacttta

SEQ ID NO: 31629 - DNA, 13 bp, Artificial Sequence
  Oligonucleotide for detection of SNP TSC0009825
tatgaaaaaataa

SEQ ID NO: 31630 - DNA, 13 bp, Artificial Sequence
  Oligonucleotide for detection of SNP TSC0009825
ttattttttcata

SEQ ID NO: 31631 - DNA, 13 bp, Artificial Sequence
  Oligonucleotide for detection of SNP TSC0009825
tatgaataaataa

SEQ ID NO: 31632 - DNA, 13 bp, Artificial Sequence
  Oligonucleotide for detection of SNP TSC0009825
ttatttattcata

SEQ ID NO: 31633 - DNA, 13 bp, Artificial Sequence
  Oligonucleotide for detection of SNP TSC0009825
ttatttgtttatg

SEQ ID NO: 31634 - DNA, 13 bp, Artificial Sequence
  Oligonucleotide for detection of SNP TSC0009825
cataaacaaataa

SEQ ID NO: 31635 - DNA, 13 bp, Artificial Sequence
  Oligonucleotide for detection of SNP TSC0009826
agtgaaatttatg

SEQ ID NO: 31636 - DNA, 13 bp, Artificial Sequence
  Oligonucleotide for detection of SNP TSC0009826
cataaatttcact

SEQ ID NO: 31637 - DNA, 13 bp, Artificial Sequence
  Oligonucleotide for detection of SNP TSC0009826
agtgaagtttatg

SEQ ID NO: 31638 - DNA, 13 bp, Artificial Sequence
  Oligonucleotide for detection of SNP TSC0009826
cataaacttcact

SEQ ID NO: 31639 - DNA, 13 bp, Artificial Sequence
  Oligonucleotide for detection of SNP TSC0009839
ttatatattaata

SEQ ID NO: 31640 - DNA, 13 bp, Artificial Sequence
  Oligonucleotide for detection of SNP TSC0009839
tattaatatataa

SEQ ID NO: 31641 - DNA, 13 bp, Artificial Sequence
  Oligonucleotide for detection of SNP TSC0009839
ttatatgttaata

SEQ ID NO: 31642 - DNA, 13 bp, Artificial Sequence
  Oligonucleotide for detection of SNP TSC0009839
tattaacatataa

SEQ ID NO: 31643 - DNA, 13 bp, Artificial Sequence
  Oligonucleotide for detection of SNP TSC0009845
tttttttgggtat

SEQ ID NO: 31644 - DNA, 13 bp, Artificial Sequence
  Oligonucleotide for detection of SNP TSC0009845
atacccaaaaaaa

SEQ ID NO: 31645 - DNA, 13 bp, Artificial Sequence
  Oligonucleotide for detection of SNP TSC0009845
ttttttcgggtat

SEQ ID NO: 31646 - DNA, 13 bp, Artificial Sequence
  Oligonucleotide for detection of SNP TSC0009845
atacccgaaaaaa

SEQ ID NO: 31647 - DNA, 13 bp, Artificial Sequence
  Oligonucleotide for detection of SNP TSC0009845
atatttgaggaaa

SEQ ID NO: 31648 - DNA, 13 bp, Artificial Sequence
  Oligonucleotide for detection of SNP TSC0009845
tttcctcaaatat

SEQ ID NO: 31649 - DNA, 13 bp, Artificial Sequence
  Oligonucleotide for detection of SNP TSC0009845
atatttaaggaaa

SEQ ID NO: 31650 - DNA, 13 bp, Artificial Sequence
  Oligonucleotide for detection of SNP TSC0009845
tttccttaaatat

SEQ ID NO: 31651 - DNA, 13 bp, Artificial Sequence
  Oligonucleotide for detection of SNP TSC0009845
atattcgaggaaa

SEQ ID NO: 31652 - DNA, 13 bp, Artificial Sequence
  Oligonucleotide for detection of SNP TSC0009845
tttcctcgaatat

SEQ ID NO: 31653 - DNA, 13 bp, Artificial Sequence
  Oligonucleotide for detection of SNP TSC0009848
atttttgaatttt

SEQ ID NO: 31654 - DNA, 13 bp, Artificial Sequence
  Oligonucleotide for detection of SNP TSC0009848
aaaattcaaaaat

SEQ ID NO: 31655 - DNA, 13 bp, Artificial Sequence
  Oligonucleotide for detection of SNP TSC0009848
atttttaaatttt

SEQ ID NO: 31656 - DNA, 13 bp, Artificial Sequence
  Oligonucleotide for detection of SNP TSC0009848
aaaatttaaaaat

SEQ ID NO: 31657 - DNA, 13 bp, Artificial Sequence
  Oligonucleotide for detection of SNP TSC0009850
gtagatattatag

SEQ ID NO: 31658 - DNA, 13 bp, Artificial Sequence
  Oligonucleotide for detection of SNP TSC0009850
ctataatatctac

SEQ ID NO: 31659 - DNA, 13 bp, Artificial Sequence
  Oligonucleotide for detection of SNP TSC0009850
gtagatgttatag

SEQ ID NO: 31660 - DNA, 13 bp, Artificial Sequence
  Oligonucleotide for detection of SNP TSC0009850
ctataacatctac

SEQ ID NO: 31661 - DNA, 13 bp, Artificial Sequence
  Oligonucleotide for detection of SNP TSC0009854
agtgattgggaat

SEQ ID NO: 31662 - DNA, 13 bp, Artificial Sequence
  Oligonucleotide for detection of SNP TSC0009854
attcccaatcact

SEQ ID NO: 31663 - DNA, 13 bp, Artificial Sequence
  Oligonucleotide for detection of SNP TSC0009854
agtgatcgggaat

SEQ ID NO: 31664 - DNA, 13 bp, Artificial Sequence
  Oligonucleotide for detection of SNP TSC0009854
attcccgatcact

SEQ ID NO: 31665 - DNA, 13 bp, Artificial Sequence
  Oligonucleotide for detection of SNP TSC0009854
atttttggttatt

SEQ ID NO: 31666 - DNA, 13 bp, Artificial Sequence
  Oligonucleotide for detection of SNP TSC0009854
aataaccaaaaat

SEQ ID NO: 31667 - DNA, 13 bp, Artificial Sequence
  Oligonucleotide for detection of SNP TSC0009854
atttttagttatt

SEQ ID NO: 31668 - DNA, 13 bp, Artificial Sequence
  Oligonucleotide for detection of SNP TSC0009854
aataactaaaaat

SEQ ID NO: 31669 - DNA, 13 bp, Artificial Sequence
  Oligonucleotide for detection of SNP TSC0009854
attttcggttatt

SEQ ID NO: 31670 - DNA, 13 bp, Artificial Sequence
  Oligonucleotide for detection of SNP TSC0009854
aataaccgaaaat

SEQ ID NO: 31671 - DNA, 13 bp, Artificial Sequence
  Oligonucleotide for detection of SNP TSC0009862
attattagtattg

SEQ ID NO: 31672 - DNA, 13 bp, Artificial Sequence
  Oligonucleotide for detection of SNP TSC0009862
caatactaataat

SEQ ID NO: 31673 - DNA, 13 bp, Artificial Sequence
  Oligonucleotide for detection of SNP TSC0009862
attattggtattg

SEQ ID NO: 31674 - DNA, 13 bp, Artificial Sequence
  Oligonucleotide for detection of SNP TSC0009862
caataccaataat

SEQ ID NO: 31675 - DNA, 13 bp, Artificial Sequence
  Oligonucleotide for detection of SNP TSC0009864
ttgaatgatattt

SEQ ID NO: 31676 - DNA, 13 bp, Artificial Sequence
  Oligonucleotide for detection of SNP TSC0009864
aaatatcattcaa

SEQ ID NO: 31677 - DNA, 13 bp, Artificial Sequence
  Oligonucleotide for detection of SNP TSC0009864
ttgaataatattt

SEQ ID NO: 31678 - DNA, 13 bp, Artificial Sequence
  Oligonucleotide for detection of SNP TSC0009864
aaatattattcaa

SEQ ID NO: 31679 - DNA, 13 bp, Artificial Sequence
  Oligonucleotide for detection of SNP TSC0009866
gggttgtgatgty

SEQ ID NO: 31680 - DNA, 13 bp, Artificial Sequence
  Oligonucleotide for detection of SNP TSC0009866
racatcacaaccc

SEQ ID NO: 31681 - DNA, 13 bp, Artificial Sequence
  Oligonucleotide for detection of SNP TSC0009866
gggttgcgatgty

SEQ ID NO: 31682 - DNA, 13 bp, Artificial Sequence
  Oligonucleotide for detection of SNP TSC0009866
racatcgcaaccc

SEQ ID NO: 31683 - DNA, 13 bp, Artificial Sequence
  Oligonucleotide for detection of SNP TSC0009866
gatattgtagtty

SEQ ID NO: 31684 - DNA, 13 bp, Artificial Sequence
  Oligonucleotide for detection of SNP TSC0009866
raactacaatatc

SEQ ID NO: 31685 - DNA, 13 bp, Artificial Sequence
  Oligonucleotide for detection of SNP TSC0009866
gatattatagtty

SEQ ID NO: 31686 - DNA, 13 bp, Artificial Sequence
  Oligonucleotide for detection of SNP TSC0009866
raactataatatc

SEQ ID NO: 31687 - DNA, 13 bp, Artificial Sequence
  Oligonucleotide for detection of SNP TSC0009866
gatatcgtagtty

SEQ ID NO: 31688 - DNA, 13 bp, Artificial Sequence
  Oligonucleotide for detection of SNP TSC0009866
raactacgatatc

SEQ ID NO: 31689 - DNA, 13 bp, Artificial Sequence
  Oligonucleotide for detection of SNP TSC0009869
tattattaggaaa

SEQ ID NO: 31690 - DNA, 13 bp, Artificial Sequence
  Oligonucleotide for detection of SNP TSC0009869
tttcctaataata

SEQ ID NO: 31691 - DNA, 13 bp, Artificial Sequence
  Oligonucleotide for detection of SNP TSC0009869
tattatgaggaaa

SEQ ID NO: 31692 - DNA, 13 bp, Artificial Sequence
  Oligonucleotide for detection of SNP TSC0009869
tttcctcataata

SEQ ID NO: 31693 - DNA, 13 bp, Artificial Sequence
  Oligonucleotide for detection of SNP TSC0009869
ttttttgatggta

SEQ ID NO: 31694 - DNA, 13 bp, Artificial Sequence
  Oligonucleotide for detection of SNP TSC0009869
taccatcaaaaaa

SEQ ID NO: 31695 - DNA, 13 bp, Artificial Sequence
  Oligonucleotide for detection of SNP TSC0009869
tttttttatggta

SEQ ID NO: 31696 - DNA, 13 bp, Artificial Sequence
  Oligonucleotide for detection of SNP TSC0009869
taccataaaaaaa

SEQ ID NO: 31697 - DNA, 13 bp, Artificial Sequence
  Oligonucleotide for detection of SNP TSC0009870
gtttggtgatgag

SEQ ID NO: 31698 - DNA, 13 bp, Artificial Sequence
  Oligonucleotide for detection of SNP TSC0009870
ctcatcaccaaac

SEQ ID NO: 31699 - DNA, 13 bp, Artificial Sequence
  Oligonucleotide for detection of SNP TSC0009870
gtttggcgatgag

SEQ ID NO: 31700 - DNA, 13 bp, Artificial Sequence
  Oligonucleotide for detection of SNP TSC0009870
ctcatcgccaaac

SEQ ID NO: 31701 - DNA, 13 bp, Artificial Sequence
  Oligonucleotide for detection of SNP TSC0009870
tttattgttaggy

SEQ ID NO: 31702 - DNA, 13 bp, Artificial Sequence
  Oligonucleotide for detection of SNP TSC0009870
rcctaacaataaa

SEQ ID NO: 31703 - DNA, 13 bp, Artificial Sequence
  Oligonucleotide for detection of SNP TSC0009870
tttattattaggy

SEQ ID NO: 31704 - DNA, 13 bp, Artificial Sequence
  Oligonucleotide for detection of SNP TSC0009870
rcctaataataaa

SEQ ID NO: 31705 - DNA, 13 bp, Artificial Sequence
  Oligonucleotide for detection of SNP TSC0009870
tttatcgttaggy

SEQ ID NO: 31706 - DNA, 13 bp, Artificial Sequence
  Oligonucleotide for detection of SNP TSC0009870
rcctaacgataaa

SEQ ID NO: 31707 - DNA, 13 bp, Artificial Sequence
  Oligonucleotide for detection of SNP TSC0009881
tatttgatatatt

SEQ ID NO: 31708 - DNA, 13 bp, Artificial Sequence
  Oligonucleotide for detection of SNP TSC0009881
aatatatcaaata

SEQ ID NO: 31709 - DNA, 13 bp, Artificial Sequence
  Oligonucleotide for detection of SNP TSC0009881
tatttggtatatt

SEQ ID NO: 31710 - DNA, 13 bp, Artificial Sequence
  Oligonucleotide for detection of SNP TSC0009881
aatataccaaata

SEQ ID NO: 31711 - DNA, 13 bp, Artificial Sequence
  Oligonucleotide for detection of SNP TSC0009883
tgttataatggta

SEQ ID NO: 31712 - DNA, 13 bp, Artificial Sequence
  Oligonucleotide for detection of SNP TSC0009883
taccattataaca

SEQ ID NO: 31713 - DNA, 13 bp, Artificial Sequence
  Oligonucleotide for detection of SNP TSC0009883
tgttatgatggta

SEQ ID NO: 31714 - DNA, 13 bp, Artificial Sequence
  Oligonucleotide for detection of SNP TSC0009883
taccatcataaca

SEQ ID NO: 31715 - DNA, 13 bp, Artificial Sequence
  Oligonucleotide for detection of SNP TSC0009885
aagaaagtgagga

SEQ ID NO: 31716 - DNA, 13 bp, Artificial Sequence
  Oligonucleotide for detection of SNP TSC0009885
tcctcactttctt

SEQ ID NO: 31717 - DNA, 13 bp, Artificial Sequence
  Oligonucleotide for detection of SNP TSC0009885
aagaaaatgagga

SEQ ID NO: 31718 - DNA, 13 bp, Artificial Sequence
  Oligonucleotide for detection of SNP TSC0009885
tcctcattttctt

SEQ ID NO: 31719 - DNA, 13 bp, Artificial Sequence
  Oligonucleotide for detection of SNP TSC0009886
attataatattgy

SEQ ID NO: 31720 - DNA, 13 bp, Artificial Sequence
  Oligonucleotide for detection of SNP TSC0009886
rcaatattataat

SEQ ID NO: 31721 - DNA, 13 bp, Artificial Sequence
  Oligonucleotide for detection of SNP TSC0009886
attatattattgy

SEQ ID NO: 31722 - DNA, 13 bp, Artificial Sequence
  Oligonucleotide for detection of SNP TSC0009886
rcaataatataat

SEQ ID NO: 31723 - DNA, 13 bp, Artificial Sequence
  Oligonucleotide for detection of SNP TSC0009886
gtagtgttgtgat

SEQ ID NO: 31724 - DNA, 13 bp, Artificial Sequence
  Oligonucleotide for detection of SNP TSC0009886
atcacaacactac

SEQ ID NO: 31725 - DNA, 13 bp, Artificial Sequence
  Oligonucleotide for detection of SNP TSC0009886
gtagtggtgtgat

SEQ ID NO: 31726 - DNA, 13 bp, Artificial Sequence
  Oligonucleotide for detection of SNP TSC0009886
atcacaccactac

SEQ ID NO: 31727 - DNA, 13 bp, Artificial Sequence
  Oligonucleotide for detection of SNP TSC0009887
ttttttttttgtg

SEQ ID NO: 31728 - DNA, 13 bp, Artificial Sequence
  Oligonucleotide for detection of SNP TSC0009887
cacaaaaaaaaaa

SEQ ID NO: 31729 - DNA, 13 bp, Artificial Sequence
  Oligonucleotide for detection of SNP TSC0009887
tttttcgtttgtg

SEQ ID NO: 31730 - DNA, 13 bp, Artificial Sequence
  Oligonucleotide for detection of SNP TSC0009887
cacaaacgaaaaa

SEQ ID NO: 31731 - DNA, 13 bp, Artificial Sequence
  Oligonucleotide for detection of SNP TSC0009887
tataaaggaaagg

SEQ ID NO: 31732 - DNA, 13 bp, Artificial Sequence
  Oligonucleotide for detection of SNP TSC0009887
cctttcctttata

SEQ ID NO: 31733 - DNA, 13 bp, Artificial Sequence
  Oligonucleotide for detection of SNP TSC0009887
tataaatgaaagg

SEQ ID NO: 31734 - DNA, 13 bp, Artificial Sequence
  Oligonucleotide for detection of SNP TSC0009887
cctttcatttata

SEQ ID NO: 31735 - DNA, 13 bp, Artificial Sequence
  Oligonucleotide for detection of SNP TSC0009887
tataaacgaaagg

SEQ ID NO: 31736 - DNA, 13 bp, Artificial Sequence
  Oligonucleotide for detection of SNP TSC0009887
cctttcgtttata

SEQ ID NO: 31737 - DNA, 13 bp, Artificial Sequence
  Oligonucleotide for detection of SNP TSC0009888
ttttgtgttggta

SEQ ID NO: 31738 - DNA, 13 bp, Artificial Sequence
  Oligonucleotide for detection of SNP TSC0009888
taccaacacaaaa

SEQ ID NO: 31739 - DNA, 13 bp, Artificial Sequence
  Oligonucleotide for detection of SNP TSC0009888
ttttgtattggta

SEQ ID NO: 31740 - DNA, 13 bp, Artificial Sequence
  Oligonucleotide for detection of SNP TSC0009888
taccaatacaaaa

SEQ ID NO: 31741 - DNA, 13 bp, Artificial Sequence
  Oligonucleotide for detection of SNP TSC0009889
ataaaagatatag

SEQ ID NO: 31742 - DNA, 13 bp, Artificial Sequence
  Oligonucleotide for detection of SNP TSC0009889
ctatatcttttat

SEQ ID NO: 31743 - DNA, 13 bp, Artificial Sequence
  Oligonucleotide for detection of SNP TSC0009889
ataaaaaatatag

SEQ ID NO: 31744 - DNA, 13 bp, Artificial Sequence
  Oligonucleotide for detection of SNP TSC0009889
ctatattttttat

SEQ ID NO: 31745 - DNA, 13 bp, Artificial Sequence
  Oligonucleotide for detection of SNP TSC0009892
ttttagaatttgy

SEQ ID NO: 31746 - DNA, 13 bp, Artificial Sequence
  Oligonucleotide for detection of SNP TSC0009892
rcaaattctaaaa

SEQ ID NO: 31747 - DNA, 13 bp, Artificial Sequence
  Oligonucleotide for detection of SNP TSC0009892
ttttagtatttgy

SEQ ID NO: 31748 - DNA, 13 bp, Artificial Sequence
  Oligonucleotide for detection of SNP TSC0009892
rcaaatactaaaa

SEQ ID NO: 31749 - DNA, 13 bp, Artificial Sequence
  Oligonucleotide for detection of SNP TSC0009892
gtaagttttggaa

SEQ ID NO: 31750 - DNA, 13 bp, Artificial Sequence
  Oligonucleotide for detection of SNP TSC0009892
ttccaaaacttac

SEQ ID NO: 31751 - DNA, 13 bp, Artificial Sequence
  Oligonucleotide for detection of SNP TSC0009892
gtaagtgttggaa

SEQ ID NO: 31752 - DNA, 13 bp, Artificial Sequence
  Oligonucleotide for detection of SNP TSC0009892
ttccaacacttac

SEQ ID NO: 31753 - DNA, 13 bp, Artificial Sequence
  Oligonucleotide for detection of SNP TSC0009894
ttatatatatgtt

SEQ ID NO: 31754 - DNA, 13 bp, Artificial Sequence
  Oligonucleotide for detection of SNP TSC0009894
aacatatatataa

SEQ ID NO: 31755 - DNA, 13 bp, Artificial Sequence
  Oligonucleotide for detection of SNP TSC0009894
ttatatttatgtt

SEQ ID NO: 31756 - DNA, 13 bp, Artificial Sequence
  Oligonucleotide for detection of SNP TSC0009894
aacataaatataa

SEQ ID NO: 31757 - DNA, 13 bp, Artificial Sequence
  Oligonucleotide for detection of SNP TSC0009894
agtatgtgtatga

SEQ ID NO: 31758 - DNA, 13 bp, Artificial Sequence
  Oligonucleotide for detection of SNP TSC0009894
tcatacacatact

SEQ ID NO: 31759 - DNA, 13 bp, Artificial Sequence
  Oligonucleotide for detection of SNP TSC0009894
agtatgagtatga

SEQ ID NO: 31760 - DNA, 13 bp, Artificial Sequence
  Oligonucleotide for detection of SNP TSC0009894
tcatactcatact

SEQ ID NO: 31761 - DNA, 13 bp, Artificial Sequence
  Oligonucleotide for detection of SNP TSC0009898
tggaagagtagta

SEQ ID NO: 31762 - DNA, 13 bp, Artificial Sequence
  Oligonucleotide for detection of SNP TSC0009898
tactactcttcca

SEQ ID NO: 31763 - DNA, 13 bp, Artificial Sequence
  Oligonucleotide for detection of SNP TSC0009898
tggaagtgtagta

SEQ ID NO: 31764 - DNA, 13 bp, Artificial Sequence
  Oligonucleotide for detection of SNP TSC0009898
tactacacttcca

SEQ ID NO: 31765 - DNA, 13 bp, Artificial Sequence
  Oligonucleotide for detection of SNP TSC0009898
tggaagcgtagta

SEQ ID NO: 31766 - DNA, 13 bp, Artificial Sequence
  Oligonucleotide for detection of SNP TSC0009898
tactacgcttcca

SEQ ID NO: 31767 - DNA, 13 bp, Artificial Sequence
  Oligonucleotide for detection of SNP TSC0009898
tgttattttttta

SEQ ID NO: 31768 - DNA, 13 bp, Artificial Sequence
  Oligonucleotide for detection of SNP TSC0009898
taaaaaaataaca

SEQ ID NO: 31769 - DNA, 13 bp, Artificial Sequence
  Oligonucleotide for detection of SNP TSC0009898
tgttatgttttta

SEQ ID NO: 31770 - DNA, 13 bp, Artificial Sequence
  Oligonucleotide for detection of SNP TSC0009898
taaaaacataaca

SEQ ID NO: 31771 - DNA, 13 bp, Artificial Sequence
  Oligonucleotide for detection of SNP TSC0009898
tgttacgttttta

SEQ ID NO: 31772 - DNA, 13 bp, Artificial Sequence
  Oligonucleotide for detection of SNP TSC0009898
taaaaacgtaaca

SEQ ID NO: 31773 - DNA, 13 bp, Artificial Sequence
  Oligonucleotide for detection of SNP TSC0009901
tttttatagtagt

SEQ ID NO: 31774 - DNA, 13 bp, Artificial Sequence
  Oligonucleotide for detection of SNP TSC0009901
actactataaaaa

SEQ ID NO: 31775 - DNA, 13 bp, Artificial Sequence
  Oligonucleotide for detection of SNP TSC0009901
tttttagagtagt

SEQ ID NO: 31776 - DNA, 13 bp, Artificial Sequence
  Oligonucleotide for detection of SNP TSC0009901
actactctaaaaa

SEQ ID NO: 31777 - DNA, 13 bp, Artificial Sequence
  Oligonucleotide for detection of SNP TSC0009901
attgttgtaaaaa

SEQ ID NO: 31778 - DNA, 13 bp, Artificial Sequence
  Oligonucleotide for detection of SNP TSC0009901
tttttacaacaat

SEQ ID NO: 31779 - DNA, 13 bp, Artificial Sequence
  Oligonucleotide for detection of SNP TSC0009901
attgttttaaaaa

SEQ ID NO: 31780 - DNA, 13 bp, Artificial Sequence
  Oligonucleotide for detection of SNP TSC0009901
tttttaaaacaat

SEQ ID NO: 31781 - DNA, 13 bp, Artificial Sequence
  Oligonucleotide for detection of SNP TSC0009906
attttagtagttt

SEQ ID NO: 31782 - DNA, 13 bp, Artificial Sequence
  Oligonucleotide for detection of SNP TSC0009906
aaactactaaaat

SEQ ID NO: 31783 - DNA, 13 bp, Artificial Sequence
  Oligonucleotide for detection of SNP TSC0009906
attttaatagttt

SEQ ID NO: 31784 - DNA, 13 bp, Artificial Sequence
  Oligonucleotide for detection of SNP TSC0009906
aaactattaaaat

SEQ ID NO: 31785 - DNA, 13 bp, Artificial Sequence
  Oligonucleotide for detection of SNP TSC0009909
atattggtttggt

SEQ ID NO: 31786 - DNA, 13 bp, Artificial Sequence
  Oligonucleotide for detection of SNP TSC0009909
accaaaccaatat

SEQ ID NO: 31787 - DNA, 13 bp, Artificial Sequence
  Oligonucleotide for detection of SNP TSC0009909
atattgttttggt

SEQ ID NO: 31788 - DNA, 13 bp, Artificial Sequence
  Oligonucleotide for detection of SNP TSC0009909
accaaaacaatat

SEQ ID NO: 31789 - DNA, 13 bp, Artificial Sequence
  Oligonucleotide for detection of SNP TSC0009909
attaaattaatgt

SEQ ID NO: 31790 - DNA, 13 bp, Artificial Sequence
  Oligonucleotide for detection of SNP TSC0009909
acattaatttaat

SEQ ID NO: 31791 - DNA, 13 bp, Artificial Sequence
  Oligonucleotide for detection of SNP TSC0009909
attaaaataatgt

SEQ ID NO: 31792 - DNA, 13 bp, Artificial Sequence
  Oligonucleotide for detection of SNP TSC0009909
acattattttaat

SEQ ID NO: 31793 - DNA, 13 bp, Artificial Sequence
  Oligonucleotide for detection of SNP TSC0009910
tttgttaagaaat

SEQ ID NO: 31794 - DNA, 13 bp, Artificial Sequence
  Oligonucleotide for detection of SNP TSC0009910
atttcttaacaaa

SEQ ID NO: 31795 - DNA, 13 bp, Artificial Sequence
  Oligonucleotide for detection of SNP TSC0009910
tttgttgagaaat

SEQ ID NO: 31796 - DNA, 13 bp, Artificial Sequence
  Oligonucleotide for detection of SNP TSC0009910
atttctcaacaaa

SEQ ID NO: 31797 - DNA, 13 bp, Artificial Sequence
  Oligonucleotide for detection of SNP TSC0009912
agataaattttga

SEQ ID NO: 31798 - DNA, 13 bp, Artificial Sequence
  Oligonucleotide for detection of SNP TSC0009912
tcaaaatttatct

SEQ ID NO: 31799 - DNA, 13 bp, Artificial Sequence
  Oligonucleotide for detection of SNP TSC0009912
agataatttttga

SEQ ID NO: 31800 - DNA, 13 bp, Artificial Sequence
  Oligonucleotide for detection of SNP TSC0009912
tcaaaaattatct

SEQ ID NO: 31801 - DNA, 13 bp, Artificial Sequence
  Oligonucleotide for detection of SNP TSC0009912
ttagaatttattt

SEQ ID NO: 31802 - DNA, 13 bp, Artificial Sequence
  Oligonucleotide for detection of SNP TSC0009912
aaataaattctaa

SEQ ID NO: 31803 - DNA, 13 bp, Artificial Sequence
  Oligonucleotide for detection of SNP TSC0009912
ttagaaattattt

SEQ ID NO: 31804 - DNA, 13 bp, Artificial Sequence
  Oligonucleotide for detection of SNP TSC0009912
aaataatttctaa

SEQ ID NO: 31805 - DNA, 13 bp, Artificial Sequence
  Oligonucleotide for detection of SNP TSC0009913
tgttgggtttgga

SEQ ID NO: 31806 - DNA, 13 bp, Artificial Sequence
  Oligonucleotide for detection of SNP TSC0009913
tccaaacccaaca

SEQ ID NO: 31807 - DNA, 13 bp, Artificial Sequence
  Oligonucleotide for detection of SNP TSC0009913
tgttggttttgga

SEQ ID NO: 31808 - DNA, 13 bp, Artificial Sequence
  Oligonucleotide for detection of SNP TSC0009913
tccaaaaccaaca

SEQ ID NO: 31809 - DNA, 13 bp, Artificial Sequence
  Oligonucleotide for detection of SNP TSC0009913
cgttgggtttgga

SEQ ID NO: 31810 - DNA, 13 bp, Artificial Sequence
  Oligonucleotide for detection of SNP TSC0009913
tccaaacccaacg

SEQ ID NO: 31811 - DNA, 13 bp, Artificial Sequence
  Oligonucleotide for detection of SNP TSC0009913
cgttggttttgga

SEQ ID NO: 31812 - DNA, 13 bp, Artificial Sequence
  Oligonucleotide for detection of SNP TSC0009913
tccaaaaccaacg

SEQ ID NO: 31813 - DNA, 13 bp, Artificial Sequence
  Oligonucleotide for detection of SNP TSC0009913
tgtcgggtttgga

SEQ ID NO: 31814 - DNA, 13 bp, Artificial Sequence
  Oligonucleotide for detection of SNP TSC0009913
tccaaacccgaca

SEQ ID NO: 31815 - DNA, 13 bp, Artificial Sequence
  Oligonucleotide for detection of SNP TSC0009913
tgtcggttttgga

SEQ ID NO: 31816 - DNA, 13 bp, Artificial Sequence
  Oligonucleotide for detection of SNP TSC0009913
tccaaaaccgaca

SEQ ID NO: 31817 - DNA, 13 bp, Artificial Sequence
  Oligonucleotide for detection of SNP TSC0009913
tgttgggttcgga

SEQ ID NO: 31818 - DNA, 13 bp, Artificial Sequence
  Oligonucleotide for detection of SNP TSC0009913
tccgaacccaaca

SEQ ID NO: 31819 - DNA, 13 bp, Artificial Sequence
  Oligonucleotide for detection of SNP TSC0009913
tgttggtttcgga

SEQ ID NO: 31820 - DNA, 13 bp, Artificial Sequence
  Oligonucleotide for detection of SNP TSC0009913
tccgaaaccaaca

SEQ ID NO: 31821 - DNA, 13 bp, Artificial Sequence
  Oligonucleotide for detection of SNP TSC0009913
cgtcgggtttgga

SEQ ID NO: 31822 - DNA, 13 bp, Artificial Sequence
  Oligonucleotide for detection of SNP TSC0009913
tccaaacccgacg

SEQ ID NO: 31823 - DNA, 13 bp, Artificial Sequence
  Oligonucleotide for detection of SNP TSC0009913
cgtcggttttgga

SEQ ID NO: 31824 - DNA, 13 bp, Artificial Sequence
  Oligonucleotide for detection of SNP TSC0009913
tccaaaaccgacg

SEQ ID NO: 31825 - DNA, 13 bp, Artificial Sequence
  Oligonucleotide for detection of SNP TSC0009913
cgttgggttcgga

SEQ ID NO: 31826 - DNA, 13 bp, Artificial Sequence
  Oligonucleotide for detection of SNP TSC0009913
tccgaacccaacg

SEQ ID NO: 31827 - DNA, 13 bp, Artificial Sequence
  Oligonucleotide for detection of SNP TSC0009913
cgttggtttcgga

SEQ ID NO: 31828 - DNA, 13 bp, Artificial Sequence
  Oligonucleotide for detection of SNP TSC0009913
tccgaaaccaacg

SEQ ID NO: 31829 - DNA, 13 bp, Artificial Sequence
  Oligonucleotide for detection of SNP TSC0009913
tgtcgggttcgga

SEQ ID NO: 31830 - DNA, 13 bp, Artificial Sequence
  Oligonucleotide for detection of SNP TSC0009913
tccgaacccgaca

SEQ ID NO: 31831 - DNA, 13 bp, Artificial Sequence
  Oligonucleotide for detection of SNP TSC0009913
tgtcggtttcgga

SEQ ID NO: 31832 - DNA, 13 bp, Artificial Sequence
  Oligonucleotide for detection of SNP TSC0009913
tccgaaaccgaca

SEQ ID NO: 31833 - DNA, 13 bp, Artificial Sequence
  Oligonucleotide for detection of SNP TSC0009913
cgtcgggttcgga

SEQ ID NO: 31834 - DNA, 13 bp, Artificial Sequence
  Oligonucleotide for detection of SNP TSC0009913
tccgaacccgacg

SEQ ID NO: 31835 - DNA, 13 bp, Artificial Sequence
  Oligonucleotide for detection of SNP TSC0009913
cgtcggtttcgga

SEQ ID NO: 31836 - DNA, 13 bp, Artificial Sequence
  Oligonucleotide for detection of SNP TSC0009913
tccgaaaccgacg

SEQ ID NO: 31837 - DNA, 13 bp, Artificial Sequence
  Oligonucleotide for detection of SNP TSC0009913
tttgggtttggtg

SEQ ID NO: 31838 - DNA, 13 bp, Artificial Sequence
  Oligonucleotide for detection of SNP TSC0009913
caccaaacccaaa

SEQ ID NO: 31839 - DNA, 13 bp, Artificial Sequence
  Oligonucleotide for detection of SNP TSC0009913
tttgggattggtg

SEQ ID NO: 31840 - DNA, 13 bp, Artificial Sequence
  Oligonucleotide for detection of SNP TSC0009913
caccaatcccaaa

SEQ ID NO: 31841 - DNA, 13 bp, Artificial Sequence
  Oligonucleotide for detection of SNP TSC0009913
ttcgggtttggtg

SEQ ID NO: 31842 - DNA, 13 bp, Artificial Sequence
  Oligonucleotide for detection of SNP TSC0009913
caccaaacccgaa

SEQ ID NO: 31843 - DNA, 13 bp, Artificial Sequence
  Oligonucleotide for detection of SNP TSC0009913
ttcgggattggtg

SEQ ID NO: 31844 - DNA, 13 bp, Artificial Sequence
  Oligonucleotide for detection of SNP TSC0009913
caccaatcccgaa

SEQ ID NO: 31845 - DNA, 13 bp, Artificial Sequence
  Oligonucleotide for detection of SNP TSC0009913
tttgggttcggtg

SEQ ID NO: 31846 - DNA, 13 bp, Artificial Sequence
  Oligonucleotide for detection of SNP TSC0009913
caccgaacccaaa

SEQ ID NO: 31847 - DNA, 13 bp, Artificial Sequence
  Oligonucleotide for detection of SNP TSC0009913
tttgggatcggtg

SEQ ID NO: 31848 - DNA, 13 bp, Artificial Sequence
  Oligonucleotide for detection of SNP TSC0009913
caccgatcccaaa

SEQ ID NO: 31849 - DNA, 13 bp, Artificial Sequence
  Oligonucleotide for detection of SNP TSC0009913
tttgggtttggcg

SEQ ID NO: 31850 - DNA, 13 bp, Artificial Sequence
  Oligonucleotide for detection of SNP TSC0009913
cgccaaacccaaa

SEQ ID NO: 31851 - DNA, 13 bp, Artificial Sequence
  Oligonucleotide for detection of SNP TSC0009913
tttgggattggcg

SEQ ID NO: 31852 - DNA, 13 bp, Artificial Sequence
  Oligonucleotide for detection of SNP TSC0009913
cgccaatcccaaa

SEQ ID NO: 31853 - DNA, 13 bp, Artificial Sequence
  Oligonucleotide for detection of SNP TSC0009913
ttcgggttcggtg

SEQ ID NO: 31854 - DNA, 13 bp, Artificial Sequence
  Oligonucleotide for detection of SNP TSC0009913
caccgaacccgaa

SEQ ID NO: 31855 - DNA, 13 bp, Artificial Sequence
  Oligonucleotide for detection of SNP TSC0009913
ttcgggatcggtg

SEQ ID NO: 31856 - DNA, 13 bp, Artificial Sequence
  Oligonucleotide for detection of SNP TSC0009913
caccgatcccgaa

SEQ ID NO: 31857 - DNA, 13 bp, Artificial Sequence
  Oligonucleotide for detection of SNP TSC0009913
ttcgggtttggcg

SEQ ID NO: 31858 - DNA, 13 bp, Artificial Sequence
  Oligonucleotide for detection of SNP TSC0009913
cgccaaacccgaa

SEQ ID NO: 31859 - DNA, 13 bp, Artificial Sequence
  Oligonucleotide for detection of SNP TSC0009913
ttcgggattggcg

SEQ ID NO: 31860 - DNA, 13 bp, Artificial Sequence
  Oligonucleotide for detection of SNP TSC0009913
cgccaatcccgaa

SEQ ID NO: 31861 - DNA, 13 bp, Artificial Sequence
  Oligonucleotide for detection of SNP TSC0009913
tttgggttcggcg

SEQ ID NO: 31862 - DNA, 13 bp, Artificial Sequence
  Oligonucleotide for detection of SNP TSC0009913
cgccgaacccaaa

SEQ ID NO: 31863 - DNA, 13 bp, Artificial Sequence
  Oligonucleotide for detection of SNP TSC0009913
tttgggatcggcg

SEQ ID NO: 31864 - DNA, 13 bp, Artificial Sequence
  Oligonucleotide for detection of SNP TSC0009913
cgccgatcccaaa

SEQ ID NO: 31865 - DNA, 13 bp, Artificial Sequence
  Oligonucleotide for detection of SNP TSC0009913
ttcgggttcggcg

SEQ ID NO: 31866 - DNA, 13 bp, Artificial Sequence
  Oligonucleotide for detection of SNP TSC0009913
cgccgaacccgaa

SEQ ID NO: 31867 - DNA, 13 bp, Artificial Sequence
  Oligonucleotide for detection of SNP TSC0009913
ttcgggatcggcg

SEQ ID NO: 31868 - DNA, 13 bp, Artificial Sequence
  Oligonucleotide for detection of SNP TSC0009913
cgccgatcccgaa

SEQ ID NO: 31869 - DNA, 13 bp, Artificial Sequence
  Oligonucleotide for detection of SNP TSC0009922
ttttaaggttttt

SEQ ID NO: 31870 - DNA, 13 bp, Artificial Sequence
  Oligonucleotide for detection of SNP TSC0009922
aaaaaccttaaaa

SEQ ID NO: 31871 - DNA, 13 bp, Artificial Sequence
  Oligonucleotide for detection of SNP TSC0009922
ttttaaagttttt

SEQ ID NO: 31872 - DNA, 13 bp, Artificial Sequence
  Oligonucleotide for detection of SNP TSC0009922
aaaaactttaaaa

SEQ ID NO: 31873 - DNA, 13 bp, Artificial Sequence
  Oligonucleotide for detection of SNP TSC0009924
tgtgttaattttt

SEQ ID NO: 31874 - DNA, 13 bp, Artificial Sequence
  Oligonucleotide for detection of SNP TSC0009924
aaaaattaacaca

SEQ ID NO: 31875 - DNA, 13 bp, Artificial Sequence
  Oligonucleotide for detection of SNP TSC0009924
tgtgttgattttt

SEQ ID NO: 31876 - DNA, 13 bp, Artificial Sequence
  Oligonucleotide for detection of SNP TSC0009924
aaaaatcaacaca

SEQ ID NO: 31877 - DNA, 13 bp, Artificial Sequence
  Oligonucleotide for detection of SNP TSC0009924
tgtgtcgattttt

SEQ ID NO: 31878 - DNA, 13 bp, Artificial Sequence
  Oligonucleotide for detection of SNP TSC0009924
aaaaatcgacaca

SEQ ID NO: 31879 - DNA, 13 bp, Artificial Sequence
  Oligonucleotide for detection of SNP TSC0009924
aaaggttgatata

SEQ ID NO: 31880 - DNA, 13 bp, Artificial Sequence
  Oligonucleotide for detection of SNP TSC0009924
tatatcaaccttt

SEQ ID NO: 31881 - DNA, 13 bp, Artificial Sequence
  Oligonucleotide for detection of SNP TSC0009924
aaaggtcgatata

SEQ ID NO: 31882 - DNA, 13 bp, Artificial Sequence
  Oligonucleotide for detection of SNP TSC0009924
tatatcgaccttt

SEQ ID NO: 31883 - DNA, 13 bp, Artificial Sequence
  Oligonucleotide for detection of SNP TSC0009927
tttatttggtgtt

SEQ ID NO: 31884 - DNA, 13 bp, Artificial Sequence
  Oligonucleotide for detection of SNP TSC0009927
aacaccaaataaa

SEQ ID NO: 31885 - DNA, 13 bp, Artificial Sequence
  Oligonucleotide for detection of SNP TSC0009927
tttattcggtgtt

SEQ ID NO: 31886 - DNA, 13 bp, Artificial Sequence
  Oligonucleotide for detection of SNP TSC0009927
aacaccgaataaa

SEQ ID NO: 31887 - DNA, 13 bp, Artificial Sequence
  Oligonucleotide for detection of SNP TSC0009927
aatattgggtaag

SEQ ID NO: 31888 - DNA, 13 bp, Artificial Sequence
  Oligonucleotide for detection of SNP TSC0009927
cttacccaatatt

SEQ ID NO: 31889 - DNA, 13 bp, Artificial Sequence
  Oligonucleotide for detection of SNP TSC0009927
aatattaggtaag

SEQ ID NO: 31890 - DNA, 13 bp, Artificial Sequence
  Oligonucleotide for detection of SNP TSC0009927
cttacctaatatt

SEQ ID NO: 31891 - DNA, 13 bp, Artificial Sequence
  Oligonucleotide for detection of SNP TSC0009927
aatatcgggtaag

SEQ ID NO: 31892 - DNA, 13 bp, Artificial Sequence
  Oligonucleotide for detection of SNP TSC0009927
cttacccgatatt

SEQ ID NO: 31893 - DNA, 13 bp, Artificial Sequence
  Oligonucleotide for detection of SNP TSC0009930
atgtttagatata

SEQ ID NO: 31894 - DNA, 13 bp, Artificial Sequence
  Oligonucleotide for detection of SNP TSC0009930
tatatctaaacat

SEQ ID NO: 31895 - DNA, 13 bp, Artificial Sequence
  Oligonucleotide for detection of SNP TSC0009930
atgtttggatata

SEQ ID NO: 31896 - DNA, 13 bp, Artificial Sequence
  Oligonucleotide for detection of SNP TSC0009930
tatatccaaacat

SEQ ID NO: 31897 - DNA, 13 bp, Artificial Sequence
  Oligonucleotide for detection of SNP TSC0009930
atgttcggatata

SEQ ID NO: 31898 - DNA, 13 bp, Artificial Sequence
  Oligonucleotide for detection of SNP TSC0009930
tatatccgaacat

SEQ ID NO: 31899 - DNA, 13 bp, Artificial Sequence
  Oligonucleotide for detection of SNP TSC0009930
tgtgtttggatat

SEQ ID NO: 31900 - DNA, 13 bp, Artificial Sequence
  Oligonucleotide for detection of SNP TSC0009930
atatccaaacaca

SEQ ID NO: 31901 - DNA, 13 bp, Artificial Sequence
  Oligonucleotide for detection of SNP TSC0009930
tgtgttcggatat

SEQ ID NO: 31902 - DNA, 13 bp, Artificial Sequence
  Oligonucleotide for detection of SNP TSC0009930
atatccgaacaca

SEQ ID NO: 31903 - DNA, 13 bp, Artificial Sequence
  Oligonucleotide for detection of SNP TSC0009938
taagagagatatg

SEQ ID NO: 31904 - DNA, 13 bp, Artificial Sequence
  Oligonucleotide for detection of SNP TSC0009938
catatctctctta

SEQ ID NO: 31905 - DNA, 13 bp, Artificial Sequence
  Oligonucleotide for detection of SNP TSC0009938
taagagggatatg

SEQ ID NO: 31906 - DNA, 13 bp, Artificial Sequence
  Oligonucleotide for detection of SNP TSC0009938
catatccctctta

SEQ ID NO: 31907 - DNA, 13 bp, Artificial Sequence
  Oligonucleotide for detection of SNP TSC0009939
gttattaagttay

SEQ ID NO: 31908 - DNA, 13 bp, Artificial Sequence
  Oligonucleotide for detection of SNP TSC0009939
rtaacttaataac

SEQ ID NO: 31909 - DNA, 13 bp, Artificial Sequence
  Oligonucleotide for detection of SNP TSC0009939
gttatttagttay

SEQ ID NO: 31910 - DNA, 13 bp, Artificial Sequence
  Oligonucleotide for detection of SNP TSC0009939
rtaactaaataac

SEQ ID NO: 31911 - DNA, 13 bp, Artificial Sequence
  Oligonucleotide for detection of SNP TSC0009939
gtggtttaatgay

SEQ ID NO: 31912 - DNA, 13 bp, Artificial Sequence
  Oligonucleotide for detection of SNP TSC0009939
rtcattaaaccac

SEQ ID NO: 31913 - DNA, 13 bp, Artificial Sequence
  Oligonucleotide for detection of SNP TSC0009939
gtggttaaatgay

SEQ ID NO: 31914 - DNA, 13 bp, Artificial Sequence
  Oligonucleotide for detection of SNP TSC0009939
rtcatttaaccac

SEQ ID NO: 31915 - DNA, 13 bp, Artificial Sequence
  Oligonucleotide for detection of SNP TSC0009940
gtggttttataag

SEQ ID NO: 31916 - DNA, 13 bp, Artificial Sequence
  Oligonucleotide for detection of SNP TSC0009940
cttataaaaccac

SEQ ID NO: 31917 - DNA, 13 bp, Artificial Sequence
  Oligonucleotide for detection of SNP TSC0009940
gtggttgtataag

SEQ ID NO: 31918 - DNA, 13 bp, Artificial Sequence
  Oligonucleotide for detection of SNP TSC0009940
cttatacaaccac

SEQ ID NO: 31919 - DNA, 13 bp, Artificial Sequence
  Oligonucleotide for detection of SNP TSC0009940
tttatagagttay

SEQ ID NO: 31920 - DNA, 13 bp, Artificial Sequence
  Oligonucleotide for detection of SNP TSC0009940
rtaactctataaa

SEQ ID NO: 31921 - DNA, 13 bp, Artificial Sequence
  Oligonucleotide for detection of SNP TSC0009940
tttatatagttay

SEQ ID NO: 31922 - DNA, 13 bp, Artificial Sequence
  Oligonucleotide for detection of SNP TSC0009940
rtaactatataaa

SEQ ID NO: 31923 - DNA, 13 bp, Artificial Sequence
  Oligonucleotide for detection of SNP TSC0009943
tgtgaagtttttt

SEQ ID NO: 31924 - DNA, 13 bp, Artificial Sequence
  Oligonucleotide for detection of SNP TSC0009943
aaaaaacttcaca

SEQ ID NO: 31925 - DNA, 13 bp, Artificial Sequence
  Oligonucleotide for detection of SNP TSC0009943
tgtgaaatttttt

SEQ ID NO: 31926 - DNA, 13 bp, Artificial Sequence
  Oligonucleotide for detection of SNP TSC0009943
aaaaaatttcaca

SEQ ID NO: 31927 - DNA, 13 bp, Artificial Sequence
  Oligonucleotide for detection of SNP TSC0009943
cgtgaagtttttt

SEQ ID NO: 31928 - DNA, 13 bp, Artificial Sequence
  Oligonucleotide for detection of SNP TSC0009943
aaaaaacttcacg

SEQ ID NO: 31929 - DNA, 13 bp, Artificial Sequence
  Oligonucleotide for detection of SNP TSC0009943
cgtgaaatttttt

SEQ ID NO: 31930 - DNA, 13 bp, Artificial Sequence
  Oligonucleotide for detection of SNP TSC0009943
aaaaaatttcacg

SEQ ID NO: 31931 - DNA, 13 bp, Artificial Sequence
  Oligonucleotide for detection of SNP TSC0009950
ttgtgagaaataa

SEQ ID NO: 31932 - DNA, 13 bp, Artificial Sequence
  Oligonucleotide for detection of SNP TSC0009950
ttatttctcacaa

SEQ ID NO: 31933 - DNA, 13 bp, Artificial Sequence
  Oligonucleotide for detection of SNP TSC0009950
ttgtgaaaaataa

SEQ ID NO: 31934 - DNA, 13 bp, Artificial Sequence
  Oligonucleotide for detection of SNP TSC0009950
ttatttttcacaa

SEQ ID NO: 31935 - DNA, 13 bp, Artificial Sequence
  Oligonucleotide for detection of SNP TSC0009959
ttatatgtttaay

SEQ ID NO: 31936 - DNA, 13 bp, Artificial Sequence
  Oligonucleotide for detection of SNP TSC0009959
rttaaacatataa

SEQ ID NO: 31937 - DNA, 13 bp, Artificial Sequence
  Oligonucleotide for detection of SNP TSC0009959
ttatatatttaay

SEQ ID NO: 31938 - DNA, 13 bp, Artificial Sequence
  Oligonucleotide for detection of SNP TSC0009959
rttaaatatataa

SEQ ID NO: 31939 - DNA, 13 bp, Artificial Sequence
  Oligonucleotide for detection of SNP TSC0009960
aaattgatattgg

SEQ ID NO: 31940 - DNA, 13 bp, Artificial Sequence
  Oligonucleotide for detection of SNP TSC0009960
ccaatatcaattt

SEQ ID NO: 31941 - DNA, 13 bp, Artificial Sequence
  Oligonucleotide for detection of SNP TSC0009960
aaattggtattgg

SEQ ID NO: 31942 - DNA, 13 bp, Artificial Sequence
  Oligonucleotide for detection of SNP TSC0009960
ccaataccaattt

SEQ ID NO: 31943 - DNA, 13 bp, Artificial Sequence
  Oligonucleotide for detection of SNP TSC0009960
aaattgatatcgg

SEQ ID NO: 31944 - DNA, 13 bp, Artificial Sequence
  Oligonucleotide for detection of SNP TSC0009960
ccgatatcaattt

SEQ ID NO: 31945 - DNA, 13 bp, Artificial Sequence
  Oligonucleotide for detection of SNP TSC0009960
aaattggtatcgg

SEQ ID NO: 31946 - DNA, 13 bp, Artificial Sequence
  Oligonucleotide for detection of SNP TSC0009960
ccgataccaattt

SEQ ID NO: 31947 - DNA, 13 bp, Artificial Sequence
  Oligonucleotide for detection of SNP TSC0009966
agatttattgttg

SEQ ID NO: 31948 - DNA, 13 bp, Artificial Sequence
  Oligonucleotide for detection of SNP TSC0009966
caacaataaatct

SEQ ID NO: 31949 - DNA, 13 bp, Artificial Sequence
  Oligonucleotide for detection of SNP TSC0009966
agatttgttgttg

SEQ ID NO: 31950 - DNA, 13 bp, Artificial Sequence
  Oligonucleotide for detection of SNP TSC0009966
caacaacaaatct

SEQ ID NO: 31951 - DNA, 13 bp, Artificial Sequence
  Oligonucleotide for detection of SNP TSC0009966
agattcgttgttg

SEQ ID NO: 31952 - DNA, 13 bp, Artificial Sequence
  Oligonucleotide for detection of SNP TSC0009966
caacaacgaatct

SEQ ID NO: 31953 - DNA, 13 bp, Artificial Sequence
  Oligonucleotide for detection of SNP TSC0009966
tagtagtggattt

SEQ ID NO: 31954 - DNA, 13 bp, Artificial Sequence
  Oligonucleotide for detection of SNP TSC0009966
aaatccactacta

SEQ ID NO: 31955 - DNA, 13 bp, Artificial Sequence
  Oligonucleotide for detection of SNP TSC0009966
tagtagcggattt

SEQ ID NO: 31956 - DNA, 13 bp, Artificial Sequence
  Oligonucleotide for detection of SNP TSC0009966
aaatccgctacta

SEQ ID NO: 31957 - DNA, 13 bp, Artificial Sequence
  Oligonucleotide for detection of SNP TSC0009969
gtgttaagaagat

SEQ ID NO: 31958 - DNA, 13 bp, Artificial Sequence
  Oligonucleotide for detection of SNP TSC0009969
atcttcttaacac

SEQ ID NO: 31959 - DNA, 13 bp, Artificial Sequence
  Oligonucleotide for detection of SNP TSC0009969
gtgttaggaagat

SEQ ID NO: 31960 - DNA, 13 bp, Artificial Sequence
  Oligonucleotide for detection of SNP TSC0009969
atcttcctaacac

SEQ ID NO: 31961 - DNA, 13 bp, Artificial Sequence
  Oligonucleotide for detection of SNP TSC0009975
ttgtaaaataaaa

SEQ ID NO: 31962 - DNA, 13 bp, Artificial Sequence
  Oligonucleotide for detection of SNP TSC0009975
ttttattttacaa

SEQ ID NO: 31963 - DNA, 13 bp, Artificial Sequence
  Oligonucleotide for detection of SNP TSC0009975
ttgtaatataaaa

SEQ ID NO: 31964 - DNA, 13 bp, Artificial Sequence
  Oligonucleotide for detection of SNP TSC0009975
ttttatattacaa

SEQ ID NO: 31965 - DNA, 13 bp, Artificial Sequence
  Oligonucleotide for detection of SNP TSC0009975
ttttattttataa

SEQ ID NO: 31966 - DNA, 13 bp, Artificial Sequence
  Oligonucleotide for detection of SNP TSC0009975
ttataaaataaaa

SEQ ID NO: 31967 - DNA, 13 bp, Artificial Sequence
  Oligonucleotide for detection of SNP TSC0009975
ttttatattataa

SEQ ID NO: 31968 - DNA, 13 bp, Artificial Sequence
  Oligonucleotide for detection of SNP TSC0009975
ttataatataaaa

SEQ ID NO: 31969 - DNA, 13 bp, Artificial Sequence
  Oligonucleotide for detection of SNP TSC0009976
ttaaaagtaaata

SEQ ID NO: 31970 - DNA, 13 bp, Artificial Sequence
  Oligonucleotide for detection of SNP TSC0009976
tatttacttttaa

SEQ ID NO: 31971 - DNA, 13 bp, Artificial Sequence
  Oligonucleotide for detection of SNP TSC0009977
ttatttaaagtaa

SEQ ID NO: 31972 - DNA, 13 bp, Artificial Sequence
  Oligonucleotide for detection of SNP TSC0009977
ttactttaaataa

SEQ ID NO: 31973 - DNA, 13 bp, Artificial Sequence
  Oligonucleotide for detection of SNP TSC0009977
ttatttgaagtaa

SEQ ID NO: 31974 - DNA, 13 bp, Artificial Sequence
  Oligonucleotide for detection of SNP TSC0009977
ttacttcaaataa

SEQ ID NO: 31975 - DNA, 13 bp, Artificial Sequence
  Oligonucleotide for detection of SNP TSC0009978
tatttaaattttg

SEQ ID NO: 31976 - DNA, 13 bp, Artificial Sequence
  Oligonucleotide for detection of SNP TSC0009978
caaaatttaaata

SEQ ID NO: 31977 - DNA, 13 bp, Artificial Sequence
  Oligonucleotide for detection of SNP TSC0009978
tatttatattttg

SEQ ID NO: 31978 - DNA, 13 bp, Artificial Sequence
  Oligonucleotide for detection of SNP TSC0009978
caaaatataaata

SEQ ID NO: 31979 - DNA, 13 bp, Artificial Sequence
  Oligonucleotide for detection of SNP TSC0009978
taaagtttaaata

SEQ ID NO: 31980 - DNA, 13 bp, Artificial Sequence
  Oligonucleotide for detection of SNP TSC0009978
tatttaaacttta

SEQ ID NO: 31981 - DNA, 13 bp, Artificial Sequence
  Oligonucleotide for detection of SNP TSC0009978
taaagtataaata

SEQ ID NO: 31982 - DNA, 13 bp, Artificial Sequence
  Oligonucleotide for detection of SNP TSC0009978
tatttatacttta

SEQ ID NO: 31983 - DNA, 13 bp, Artificial Sequence
  Oligonucleotide for detection of SNP TSC0009979
ggggggatattta

SEQ ID NO: 31984 - DNA, 13 bp, Artificial Sequence
  Oligonucleotide for detection of SNP TSC0009979
taaatatcccccc

SEQ ID NO: 31985 - DNA, 13 bp, Artificial Sequence
  Oligonucleotide for detection of SNP TSC0009979
gggggggtattta

SEQ ID NO: 31986 - DNA, 13 bp, Artificial Sequence
  Oligonucleotide for detection of SNP TSC0009979
taaataccccccc

SEQ ID NO: 31987 - DNA, 13 bp, Artificial Sequence
  Oligonucleotide for detection of SNP TSC0009981
atattcggtattt

SEQ ID NO: 31988 - DNA, 13 bp, Artificial Sequence
  Oligonucleotide for detection of SNP TSC0009981
aaataccgaatat

SEQ ID NO: 31989 - DNA, 13 bp, Artificial Sequence
  Oligonucleotide for detection of SNP TSC0009981
agatgttgggtgt

SEQ ID NO: 31990 - DNA, 13 bp, Artificial Sequence
  Oligonucleotide for detection of SNP TSC0009981
acacccaacatct

SEQ ID NO: 31991 - DNA, 13 bp, Artificial Sequence
  Oligonucleotide for detection of SNP TSC0009981
agatgtagggtgt

SEQ ID NO: 31992 - DNA, 13 bp, Artificial Sequence
  Oligonucleotide for detection of SNP TSC0009981
acaccctacatct

SEQ ID NO: 31993 - DNA, 13 bp, Artificial Sequence
  Oligonucleotide for detection of SNP TSC0009981
agatgtcgggtgt

SEQ ID NO: 31994 - DNA, 13 bp, Artificial Sequence
  Oligonucleotide for detection of SNP TSC0009981
acacccgacatct

SEQ ID NO: 31995 - DNA, 13 bp, Artificial Sequence
  Oligonucleotide for detection of SNP TSC0009984
aaggtgattgttt

SEQ ID NO: 31996 - DNA, 13 bp, Artificial Sequence
  Oligonucleotide for detection of SNP TSC0009984
aaacaatcacctt

SEQ ID NO: 31997 - DNA, 13 bp, Artificial Sequence
  Oligonucleotide for detection of SNP TSC0009984
aaggtgtttgttt

SEQ ID NO: 31998 - DNA, 13 bp, Artificial Sequence
  Oligonucleotide for detection of SNP TSC0009984
aaacaaacacctt

SEQ ID NO: 31999 - DNA, 13 bp, Artificial Sequence
  Oligonucleotide for detection of SNP TSC0009984
aagtaattatttt

SEQ ID NO: 32000 - DNA, 13 bp, Artificial Sequence
  Oligonucleotide for detection of SNP TSC0009984
aaaataattactt

SEQ ID NO: 32001 - DNA, 13 bp, Artificial Sequence
  Oligonucleotide for detection of SNP TSC0009984
aagtaagtatttt

SEQ ID NO: 32002 - DNA, 13 bp, Artificial Sequence
  Oligonucleotide for detection of SNP TSC0009984
aaaatacttactt

SEQ ID NO: 32003 - DNA, 13 bp, Artificial Sequence
  Oligonucleotide for detection of SNP TSC0009985
tggtaaaaattat

SEQ ID NO: 32004 - DNA, 13 bp, Artificial Sequence
  Oligonucleotide for detection of SNP TSC0009985
ataatttttacca

SEQ ID NO: 32005 - DNA, 13 bp, Artificial Sequence
  Oligonucleotide for detection of SNP TSC0009985
tggtaagaattat

SEQ ID NO: 32006 - DNA, 13 bp, Artificial Sequence
  Oligonucleotide for detection of SNP TSC0009985
ataattcttacca

SEQ ID NO: 32007 - DNA, 13 bp, Artificial Sequence
  Oligonucleotide for detection of SNP TSC0009985
cggtaaaaattat

SEQ ID NO: 32008 - DNA, 13 bp, Artificial Sequence
  Oligonucleotide for detection of SNP TSC0009985
ataatttttaccg

SEQ ID NO: 32009 - DNA, 13 bp, Artificial Sequence
  Oligonucleotide for detection of SNP TSC0009985
cggtaagaattat

SEQ ID NO: 32010 - DNA, 13 bp, Artificial Sequence
  Oligonucleotide for detection of SNP TSC0009985
ataattcttaccg

SEQ ID NO: 32011 - DNA, 13 bp, Artificial Sequence
  Oligonucleotide for detection of SNP TSC0009986
aaagaggaaagag

SEQ ID NO: 32012 - DNA, 13 bp, Artificial Sequence
  Oligonucleotide for detection of SNP TSC0009986
ctctttcctcttt

SEQ ID NO: 32013 - DNA, 13 bp, Artificial Sequence
  Oligonucleotide for detection of SNP TSC0009986
aaagagaaaagag

SEQ ID NO: 32014 - DNA, 13 bp, Artificial Sequence
  Oligonucleotide for detection of SNP TSC0009986
ctcttttctcttt

SEQ ID NO: 32015 - DNA, 13 bp, Artificial Sequence
  Oligonucleotide for detection of SNP TSC0009987
attgttgtaaaga

SEQ ID NO: 32016 - DNA, 13 bp, Artificial Sequence
  Oligonucleotide for detection of SNP TSC0009987
tctttacaacaat

SEQ ID NO: 32017 - DNA, 13 bp, Artificial Sequence
  Oligonucleotide for detection of SNP TSC0009987
attgttataaaga

SEQ ID NO: 32018 - DNA, 13 bp, Artificial Sequence
  Oligonucleotide for detection of SNP TSC0009987
tctttataacaat

SEQ ID NO: 32019 - DNA, 13 bp, Artificial Sequence
  Oligonucleotide for detection of SNP TSC0009989
attatagttaaga

SEQ ID NO: 32020 - DNA, 13 bp, Artificial Sequence
  Oligonucleotide for detection of SNP TSC0009989
tcttaactataat

SEQ ID NO: 32021 - DNA, 13 bp, Artificial Sequence
  Oligonucleotide for detection of SNP TSC0009989
attataattaaga

SEQ ID NO: 32022 - DNA, 13 bp, Artificial Sequence
  Oligonucleotide for detection of SNP TSC0009989
tcttaattataat

SEQ ID NO: 32023 - DNA, 13 bp, Artificial Sequence
  Oligonucleotide for detection of SNP TSC0009991
aattatgttatga

SEQ ID NO: 32024 - DNA, 13 bp, Artificial Sequence
  Oligonucleotide for detection of SNP TSC0009991
tcataacataatt

SEQ ID NO: 32025 - DNA, 13 bp, Artificial Sequence
  Oligonucleotide for detection of SNP TSC0009991
aattattttatga

SEQ ID NO: 32026 - DNA, 13 bp, Artificial Sequence
  Oligonucleotide for detection of SNP TSC0009991
tcataaaataatt

SEQ ID NO: 32027 - DNA, 13 bp, Artificial Sequence
  Oligonucleotide for detection of SNP TSC0009991
ttatgatataatt

SEQ ID NO: 32028 - DNA, 13 bp, Artificial Sequence
  Oligonucleotide for detection of SNP TSC0009991
aattatatcataa

SEQ ID NO: 32029 - DNA, 13 bp, Artificial Sequence
  Oligonucleotide for detection of SNP TSC0009991
ttatgaaataatt

SEQ ID NO: 32030 - DNA, 13 bp, Artificial Sequence
  Oligonucleotide for detection of SNP TSC0009991
aattatttcataa

SEQ ID NO: 32031 - DNA, 13 bp, Artificial Sequence
  Oligonucleotide for detection of SNP TSC0009993
gttttttttatgt

SEQ ID NO: 32032 - DNA, 13 bp, Artificial Sequence
  Oligonucleotide for detection of SNP TSC0009993
acataaaaaaaac

SEQ ID NO: 32033 - DNA, 13 bp, Artificial Sequence
  Oligonucleotide for detection of SNP TSC0009993
gtttttgttatgt

SEQ ID NO: 32034 - DNA, 13 bp, Artificial Sequence
  Oligonucleotide for detection of SNP TSC0009993
acataacaaaaac

SEQ ID NO: 32035 - DNA, 13 bp, Artificial Sequence
  Oligonucleotide for detection of SNP TSC0009993
atatgggagaaay

SEQ ID NO: 32036 - DNA, 13 bp, Artificial Sequence
  Oligonucleotide for detection of SNP TSC0009993
rtttctcccatat

SEQ ID NO: 32037 - DNA, 13 bp, Artificial Sequence
  Oligonucleotide for detection of SNP TSC0009993
atatggtagaaay

SEQ ID NO: 32038 - DNA, 13 bp, Artificial Sequence
  Oligonucleotide for detection of SNP TSC0009993
rtttctaccatat

SEQ ID NO: 32039 - DNA, 13 bp, Artificial Sequence
  Oligonucleotide for detection of SNP TSC0009994
gtttgtattttay

SEQ ID NO: 32040 - DNA, 13 bp, Artificial Sequence
  Oligonucleotide for detection of SNP TSC0009994
rtaaaatacaaac

SEQ ID NO: 32041 - DNA, 13 bp, Artificial Sequence
  Oligonucleotide for detection of SNP TSC0009994
gtttgtgttttay

SEQ ID NO: 32042 - DNA, 13 bp, Artificial Sequence
  Oligonucleotide for detection of SNP TSC0009994
rtaaaacacaaac

SEQ ID NO: 32043 - DNA, 13 bp, Artificial Sequence
  Oligonucleotide for detection of SNP TSC0009995
ataattatattay

SEQ ID NO: 32044 - DNA, 13 bp, Artificial Sequence
  Oligonucleotide for detection of SNP TSC0009995
rtaatataattat

SEQ ID NO: 32045 - DNA, 13 bp, Artificial Sequence
  Oligonucleotide for detection of SNP TSC0009995
ataattgtattay

SEQ ID NO: 32046 - DNA, 13 bp, Artificial Sequence
  Oligonucleotide for detection of SNP TSC0009995
rtaatacaattat

SEQ ID NO: 32047 - DNA, 13 bp, Artificial Sequence
  Oligonucleotide for detection of SNP TSC0009996
ttaggaataagtt

SEQ ID NO: 32048 - DNA, 13 bp, Artificial Sequence
  Oligonucleotide for detection of SNP TSC0009996
aacttattcctaa

SEQ ID NO: 32049 - DNA, 13 bp, Artificial Sequence
  Oligonucleotide for detection of SNP TSC0009996
ttaggagtaagtt

SEQ ID NO: 32050 - DNA, 13 bp, Artificial Sequence
  Oligonucleotide for detection of SNP TSC0009996
aacttactcctaa

SEQ ID NO: 32051 - DNA, 13 bp, Artificial Sequence
  Oligonucleotide for detection of SNP TSC0009997
ttgaaataattat

SEQ ID NO: 32052 - DNA, 13 bp, Artificial Sequence
  Oligonucleotide for detection of SNP TSC0009997
ataattatttcaa

SEQ ID NO: 32053 - DNA, 13 bp, Artificial Sequence
  Oligonucleotide for detection of SNP TSC0009997
ttgaaagaattat

SEQ ID NO: 32054 - DNA, 13 bp, Artificial Sequence
  Oligonucleotide for detection of SNP TSC0009997
ataattctttcaa

SEQ ID NO: 32055 - DNA, 13 bp, Artificial Sequence
  Oligonucleotide for detection of SNP TSC0009999
gagtgagtttaag

SEQ ID NO: 32056 - DNA, 13 bp, Artificial Sequence
  Oligonucleotide for detection of SNP TSC0009999
cttaaactcactc

SEQ ID NO: 32057 - DNA, 13 bp, Artificial Sequence
  Oligonucleotide for detection of SNP TSC0009999
gagtgattttaag

SEQ ID NO: 32058 - DNA, 13 bp, Artificial Sequence
  Oligonucleotide for detection of SNP TSC0009999
cttaaaatcactc

SEQ ID NO: 32059 - DNA, 13 bp, Artificial Sequence
  Oligonucleotide for detection of SNP TSC0009999
tttgagtttatty

SEQ ID NO: 32060 - DNA, 13 bp, Artificial Sequence
  Oligonucleotide for detection of SNP TSC0009999
raataaactcaaa

SEQ ID NO: 32061 - DNA, 13 bp, Artificial Sequence
  Oligonucleotide for detection of SNP TSC0009999
tttgagattatty

SEQ ID NO: 32062 - DNA, 13 bp, Artificial Sequence
  Oligonucleotide for detection of SNP TSC0009999
raataatctcaaa

SEQ ID NO: 32063 - DNA, 13 bp, Artificial Sequence
  Oligonucleotide for detection of SNP TSC0010000
atttagtgtgtat

SEQ ID NO: 32064 - DNA, 13 bp, Artificial Sequence
  Oligonucleotide for detection of SNP TSC0010000
atacacactaaat

SEQ ID NO: 32065 - DNA, 13 bp, Artificial Sequence
  Oligonucleotide for detection of SNP TSC0010000
atttagcgtgtat

SEQ ID NO: 32066 - DNA, 13 bp, Artificial Sequence
  Oligonucleotide for detection of SNP TSC0010000
atacacgctaaat

SEQ ID NO: 32067 - DNA, 13 bp, Artificial Sequence
  Oligonucleotide for detection of SNP TSC0010000
atatatgttaaat

SEQ ID NO: 32068 - DNA, 13 bp, Artificial Sequence
  Oligonucleotide for detection of SNP TSC0010000
atttaacatatat

SEQ ID NO: 32069 - DNA, 13 bp, Artificial Sequence
  Oligonucleotide for detection of SNP TSC0010000
atatatattaaat

SEQ ID NO: 32070 - DNA, 13 bp, Artificial Sequence
  Oligonucleotide for detection of SNP TSC0010000
atttaatatatat

SEQ ID NO: 32071 - DNA, 13 bp, Artificial Sequence
  Oligonucleotide for detection of SNP TSC0010000
atatacgttaaat

SEQ ID NO: 32072 - DNA, 13 bp, Artificial Sequence
  Oligonucleotide for detection of SNP TSC0010000
atttaacgtatat

SEQ ID NO: 32073 - DNA, 13 bp, Artificial Sequence
  Oligonucleotide for detection of SNP TSC0010001
gtgtatattgttg

SEQ ID NO: 32074 - DNA, 13 bp, Artificial Sequence
  Oligonucleotide for detection of SNP TSC0010001
caacaatatacac

SEQ ID NO: 32075 - DNA, 13 bp, Artificial Sequence
  Oligonucleotide for detection of SNP TSC0010001
gtgtatgttgttg

SEQ ID NO: 32076 - DNA, 13 bp, Artificial Sequence
  Oligonucleotide for detection of SNP TSC0010001
caacaacatacac

SEQ ID NO: 32077 - DNA, 13 bp, Artificial Sequence
  Oligonucleotide for detection of SNP TSC0010001
gtgtacgttgttg

SEQ ID NO: 32078 - DNA, 13 bp, Artificial Sequence
  Oligonucleotide for detection of SNP TSC0010001
caacaacgtacac

SEQ ID NO: 32079 - DNA, 13 bp, Artificial Sequence
  Oligonucleotide for detection of SNP TSC0010001
taataatgtatay

SEQ ID NO: 32080 - DNA, 13 bp, Artificial Sequence
  Oligonucleotide for detection of SNP TSC0010001
rtatacattatta

SEQ ID NO: 32081 - DNA, 13 bp, Artificial Sequence
  Oligonucleotide for detection of SNP TSC0010001
taataacgtatay

SEQ ID NO: 32082 - DNA, 13 bp, Artificial Sequence
  Oligonucleotide for detection of SNP TSC0010001
rtatacgttatta

SEQ ID NO: 32083 - DNA, 13 bp, Artificial Sequence
  Oligonucleotide for detection of SNP TSC0010002
gatttaatttgty

SEQ ID NO: 32084 - DNA, 13 bp, Artificial Sequence
  Oligonucleotide for detection of SNP TSC0010002
racaaattaaatc

SEQ ID NO: 32085 - DNA, 13 bp, Artificial Sequence
  Oligonucleotide for detection of SNP TSC0010002
gatttagtttgty

SEQ ID NO: 32086 - DNA, 13 bp, Artificial Sequence
  Oligonucleotide for detection of SNP TSC0010002
racaaactaaatc

SEQ ID NO: 32087 - DNA, 13 bp, Artificial Sequence
  Oligonucleotide for detection of SNP TSC0010005
ttataatggggtt

SEQ ID NO: 32088 - DNA, 13 bp, Artificial Sequence
  Oligonucleotide for detection of SNP TSC0010005
aaccccattataa

SEQ ID NO: 32089 - DNA, 13 bp, Artificial Sequence
  Oligonucleotide for detection of SNP TSC0010005
ttataacggggtt

SEQ ID NO: 32090 - DNA, 13 bp, Artificial Sequence
  Oligonucleotide for detection of SNP TSC0010005
aaccccgttataa

SEQ ID NO: 32091 - DNA, 13 bp, Artificial Sequence
  Oligonucleotide for detection of SNP TSC0010005
aattttgttataa

SEQ ID NO: 32092 - DNA, 13 bp, Artificial Sequence
  Oligonucleotide for detection of SNP TSC0010005
ttataacaaaatt

SEQ ID NO: 32093 - DNA, 13 bp, Artificial Sequence
  Oligonucleotide for detection of SNP TSC0010005
aattttattataa

SEQ ID NO: 32094 - DNA, 13 bp, Artificial Sequence
  Oligonucleotide for detection of SNP TSC0010005
ttataataaaatt

SEQ ID NO: 32095 - DNA, 13 bp, Artificial Sequence
  Oligonucleotide for detection of SNP TSC0010005
aatttcgttataa

SEQ ID NO: 32096 - DNA, 13 bp, Artificial Sequence
  Oligonucleotide for detection of SNP TSC0010005
ttataacgaaatt

SEQ ID NO: 32097 - DNA, 13 bp, Artificial Sequence
  Oligonucleotide for detection of SNP TSC0010006
tatttttagtttg

SEQ ID NO: 32098 - DNA, 13 bp, Artificial Sequence
  Oligonucleotide for detection of SNP TSC0010006
caaactaaaaata

SEQ ID NO: 32099 - DNA, 13 bp, Artificial Sequence
  Oligonucleotide for detection of SNP TSC0010006
tattttaagttcg

SEQ ID NO: 32100 - DNA, 13 bp, Artificial Sequence
  Oligonucleotide for detection of SNP TSC0010006
cgaacttaaaata

SEQ ID NO: 32101 - DNA, 13 bp, Artificial Sequence
  Oligonucleotide for detection of SNP TSC0010006
tatttttagttcg

SEQ ID NO: 32102 - DNA, 13 bp, Artificial Sequence
  Oligonucleotide for detection of SNP TSC0010006
cgaactaaaaata

SEQ ID NO: 32103 - DNA, 13 bp, Artificial Sequence
  Oligonucleotide for detection of SNP TSC0010006
tgagtttgagata

SEQ ID NO: 32104 - DNA, 13 bp, Artificial Sequence
  Oligonucleotide for detection of SNP TSC0010006
tatctcaaactca

SEQ ID NO: 32105 - DNA, 13 bp, Artificial Sequence
  Oligonucleotide for detection of SNP TSC0010006
tgagttagagata

SEQ ID NO: 32106 - DNA, 13 bp, Artificial Sequence
  Oligonucleotide for detection of SNP TSC0010006
tatctctaactca

SEQ ID NO: 32107 - DNA, 13 bp, Artificial Sequence
  Oligonucleotide for detection of SNP TSC0010006
cgagtttgagata

SEQ ID NO: 32108 - DNA, 13 bp, Artificial Sequence
  Oligonucleotide for detection of SNP TSC0010006
tatctcaaactcg

SEQ ID NO: 32109 - DNA, 13 bp, Artificial Sequence
  Oligonucleotide for detection of SNP TSC0010006
cgagttagagata

SEQ ID NO: 32110 - DNA, 13 bp, Artificial Sequence
  Oligonucleotide for detection of SNP TSC0010006
tatctctaactcg

SEQ ID NO: 32111 - DNA, 13 bp, Artificial Sequence
  Oligonucleotide for detection of SNP TSC0010012
attttaaaatggg

SEQ ID NO: 32112 - DNA, 13 bp, Artificial Sequence
  Oligonucleotide for detection of SNP TSC0010012
cccattttaaaat

SEQ ID NO: 32113 - DNA, 13 bp, Artificial Sequence
  Oligonucleotide for detection of SNP TSC0010012
attttagaatggg

SEQ ID NO: 32114 - DNA, 13 bp, Artificial Sequence
  Oligonucleotide for detection of SNP TSC0010012
cccattctaaaat

SEQ ID NO: 32115 - DNA, 13 bp, Artificial Sequence
  Oligonucleotide for detection of SNP TSC0010014
ttgttgtggtggt

SEQ ID NO: 32116 - DNA, 13 bp, Artificial Sequence
  Oligonucleotide for detection of SNP TSC0010014
accaccacaacaa

SEQ ID NO: 32117 - DNA, 13 bp, Artificial Sequence
  Oligonucleotide for detection of SNP TSC0010014
ttgttgcggtggt

SEQ ID NO: 32118 - DNA, 13 bp, Artificial Sequence
  Oligonucleotide for detection of SNP TSC0010014
accaccgcaacaa

SEQ ID NO: 32119 - DNA, 13 bp, Artificial Sequence
  Oligonucleotide for detection of SNP TSC0010014
attattgtagtaa

SEQ ID NO: 32120 - DNA, 13 bp, Artificial Sequence
  Oligonucleotide for detection of SNP TSC0010014
ttactacaataat

SEQ ID NO: 32121 - DNA, 13 bp, Artificial Sequence
  Oligonucleotide for detection of SNP TSC0010014
attattatagtaa

SEQ ID NO: 32122 - DNA, 13 bp, Artificial Sequence
  Oligonucleotide for detection of SNP TSC0010014
ttactataataat

SEQ ID NO: 32123 - DNA, 13 bp, Artificial Sequence
  Oligonucleotide for detection of SNP TSC0010014
attatcgtagtaa

SEQ ID NO: 32124 - DNA, 13 bp, Artificial Sequence
  Oligonucleotide for detection of SNP TSC0010014
ttactacgataat

SEQ ID NO: 32125 - DNA, 13 bp, Artificial Sequence
  Oligonucleotide for detection of SNP TSC0010015
agaataagattty

SEQ ID NO: 32126 - DNA, 13 bp, Artificial Sequence
  Oligonucleotide for detection of SNP TSC0010015
raaatcttattct

SEQ ID NO: 32127 - DNA, 13 bp, Artificial Sequence
  Oligonucleotide for detection of SNP TSC0010015
agaataggattty

SEQ ID NO: 32128 - DNA, 13 bp, Artificial Sequence
  Oligonucleotide for detection of SNP TSC0010015
raaatcctattct

SEQ ID NO: 32129 - DNA, 13 bp, Artificial Sequence
  Oligonucleotide for detection of SNP TSC0010016
agtaatgttttta

SEQ ID NO: 32130 - DNA, 13 bp, Artificial Sequence
  Oligonucleotide for detection of SNP TSC0010016
taaaaacattact

SEQ ID NO: 32131 - DNA, 13 bp, Artificial Sequence
  Oligonucleotide for detection of SNP TSC0010016
agtaatattttta

SEQ ID NO: 32132 - DNA, 13 bp, Artificial Sequence
  Oligonucleotide for detection of SNP TSC0010016
taaaaatattact

SEQ ID NO: 32133 - DNA, 13 bp, Artificial Sequence
  Oligonucleotide for detection of SNP TSC0010018
gtttttgtgaaaa

SEQ ID NO: 32134 - DNA, 13 bp, Artificial Sequence
  Oligonucleotide for detection of SNP TSC0010018
ttttcacaaaaac

SEQ ID NO: 32135 - DNA, 13 bp, Artificial Sequence
  Oligonucleotide for detection of SNP TSC0010018
gtttttttgaaaa

SEQ ID NO: 32136 - DNA, 13 bp, Artificial Sequence
  Oligonucleotide for detection of SNP TSC0010018
ttttcaaaaaaac

SEQ ID NO: 32137 - DNA, 13 bp, Artificial Sequence
  Oligonucleotide for detection of SNP TSC0010018
tttttataaagay

SEQ ID NO: 32138 - DNA, 13 bp, Artificial Sequence
  Oligonucleotide for detection of SNP TSC0010018
rtctttataaaaa

SEQ ID NO: 32139 - DNA, 13 bp, Artificial Sequence
  Oligonucleotide for detection of SNP TSC0010018
tttttaaaaagay

SEQ ID NO: 32140 - DNA, 13 bp, Artificial Sequence
  Oligonucleotide for detection of SNP TSC0010018
rtctttttaaaaa

SEQ ID NO: 32141 - DNA, 13 bp, Artificial Sequence
  Oligonucleotide for detection of SNP TSC0010022
gagtatatttaag

SEQ ID NO: 32142 - DNA, 13 bp, Artificial Sequence
  Oligonucleotide for detection of SNP TSC0010022
cttaaatatactc

SEQ ID NO: 32143 - DNA, 13 bp, Artificial Sequence
  Oligonucleotide for detection of SNP TSC0010022
gagtatgtttaag

SEQ ID NO: 32144 - DNA, 13 bp, Artificial Sequence
  Oligonucleotide for detection of SNP TSC0010022
cttaaacatactc

SEQ ID NO: 32145 - DNA, 13 bp, Artificial Sequence
  Oligonucleotide for detection of SNP TSC0010022
gagtacgtttaag

SEQ ID NO: 32146 - DNA, 13 bp, Artificial Sequence
  Oligonucleotide for detection of SNP TSC0010022
cttaaacgtactc

SEQ ID NO: 32147 - DNA, 13 bp, Artificial Sequence
  Oligonucleotide for detection of SNP TSC0010022
tttaggtgtgtty

SEQ ID NO: 32148 - DNA, 13 bp, Artificial Sequence
  Oligonucleotide for detection of SNP TSC0010022
raacacacctaaa

SEQ ID NO: 32149 - DNA, 13 bp, Artificial Sequence
  Oligonucleotide for detection of SNP TSC0010022
tttaggcgtgtty

SEQ ID NO: 32150 - DNA, 13 bp, Artificial Sequence
  Oligonucleotide for detection of SNP TSC0010022
raacacgcctaaa

SEQ ID NO: 32151 - DNA, 13 bp, Artificial Sequence
  Oligonucleotide for detection of SNP TSC0010023
ggaaagaattaaa

SEQ ID NO: 32152 - DNA, 13 bp, Artificial Sequence
  Oligonucleotide for detection of SNP TSC0010023
tttaattctttcc

SEQ ID NO: 32153 - DNA, 13 bp, Artificial Sequence
  Oligonucleotide for detection of SNP TSC0010023
ggaaaggattaaa

SEQ ID NO: 32154 - DNA, 13 bp, Artificial Sequence
  Oligonucleotide for detection of SNP TSC0010023
tttaatcctttcc

SEQ ID NO: 32155 - DNA, 13 bp, Artificial Sequence
  Oligonucleotide for detection of SNP TSC0010032
tttttaaatttat

SEQ ID NO: 32156 - DNA, 13 bp, Artificial Sequence
  Oligonucleotide for detection of SNP TSC0010032
ataaatttaaaaa

SEQ ID NO: 32157 - DNA, 13 bp, Artificial Sequence
  Oligonucleotide for detection of SNP TSC0010032
tttttagatttat

SEQ ID NO: 32158 - DNA, 13 bp, Artificial Sequence
  Oligonucleotide for detection of SNP TSC0010032
ataaatctaaaaa

SEQ ID NO: 32159 - DNA, 13 bp, Artificial Sequence
  Oligonucleotide for detection of SNP TSC0010036
ttagagatataat

SEQ ID NO: 32160 - DNA, 13 bp, Artificial Sequence
  Oligonucleotide for detection of SNP TSC0010036
attatatctctaa

SEQ ID NO: 32161 - DNA, 13 bp, Artificial Sequence
  Oligonucleotide for detection of SNP TSC0010036
ttagagttataat

SEQ ID NO: 32162 - DNA, 13 bp, Artificial Sequence
  Oligonucleotide for detection of SNP TSC0010036
attataactctaa

SEQ ID NO: 32163 - DNA, 13 bp, Artificial Sequence
  Oligonucleotide for detection of SNP TSC0010036
attatatttttaa

SEQ ID NO: 32164 - DNA, 13 bp, Artificial Sequence
  Oligonucleotide for detection of SNP TSC0010036
ttaaaaatataat

SEQ ID NO: 32165 - DNA, 13 bp, Artificial Sequence
  Oligonucleotide for detection of SNP TSC0010036
attatagttttaa

SEQ ID NO: 32166 - DNA, 13 bp, Artificial Sequence
  Oligonucleotide for detection of SNP TSC0010036
ttaaaactataat

SEQ ID NO: 32167 - DNA, 13 bp, Artificial Sequence
  Oligonucleotide for detection of SNP TSC0010039
ttttttgtaagga

SEQ ID NO: 32168 - DNA, 13 bp, Artificial Sequence
  Oligonucleotide for detection of SNP TSC0010039
tccttacaaaaaa

SEQ ID NO: 32169 - DNA, 13 bp, Artificial Sequence
  Oligonucleotide for detection of SNP TSC0010039
ttttttataagga

SEQ ID NO: 32170 - DNA, 13 bp, Artificial Sequence
  Oligonucleotide for detection of SNP TSC0010039
tccttataaaaaa

SEQ ID NO: 32171 - DNA, 13 bp, Artificial Sequence
  Oligonucleotide for detection of SNP TSC0010041
aataattgagttt

SEQ ID NO: 32172 - DNA, 13 bp, Artificial Sequence
  Oligonucleotide for detection of SNP TSC0010041
aaactcaattatt

SEQ ID NO: 32173 - DNA, 13 bp, Artificial Sequence
  Oligonucleotide for detection of SNP TSC0010041
aataatcgagttt

SEQ ID NO: 32174 - DNA, 13 bp, Artificial Sequence
  Oligonucleotide for detection of SNP TSC0010041
aaactcgattatt

SEQ ID NO: 32175 - DNA, 13 bp, Artificial Sequence
  Oligonucleotide for detection of SNP TSC0010041
aaatttggttgtt

SEQ ID NO: 32176 - DNA, 13 bp, Artificial Sequence
  Oligonucleotide for detection of SNP TSC0010041
aacaaccaaattt

SEQ ID NO: 32177 - DNA, 13 bp, Artificial Sequence
  Oligonucleotide for detection of SNP TSC0010041
aaatttagttgtt

SEQ ID NO: 32178 - DNA, 13 bp, Artificial Sequence
  Oligonucleotide for detection of SNP TSC0010041
aacaactaaattt

SEQ ID NO: 32179 - DNA, 13 bp, Artificial Sequence
  Oligonucleotide for detection of SNP TSC0010041
aaattcggttgtt

SEQ ID NO: 32180 - DNA, 13 bp, Artificial Sequence
  Oligonucleotide for detection of SNP TSC0010041
aacaaccgaattt

SEQ ID NO: 32181 - DNA, 13 bp, Artificial Sequence
  Oligonucleotide for detection of SNP TSC0010042
agattgatagata

SEQ ID NO: 32182 - DNA, 13 bp, Artificial Sequence
  Oligonucleotide for detection of SNP TSC0010042
tatctatcaatct

SEQ ID NO: 32183 - DNA, 13 bp, Artificial Sequence
  Oligonucleotide for detection of SNP TSC0010042
agattggtagata

SEQ ID NO: 32184 - DNA, 13 bp, Artificial Sequence
  Oligonucleotide for detection of SNP TSC0010042
tatctaccaatct

SEQ ID NO: 32185 - DNA, 13 bp, Artificial Sequence
  Oligonucleotide for detection of SNP TSC0010046
aatttatgaggaa

SEQ ID NO: 32186 - DNA, 13 bp, Artificial Sequence
  Oligonucleotide for detection of SNP TSC0010046
ttcctcataaatt

SEQ ID NO: 32187 - DNA, 13 bp, Artificial Sequence
  Oligonucleotide for detection of SNP TSC0010046
aatttacgaggaa

SEQ ID NO: 32188 - DNA, 13 bp, Artificial Sequence
  Oligonucleotide for detection of SNP TSC0010046
ttcctcgtaaatt

SEQ ID NO: 32189 - DNA, 13 bp, Artificial Sequence
  Oligonucleotide for detection of SNP TSC0010046
ttttttgtgagtt

SEQ ID NO: 32190 - DNA, 13 bp, Artificial Sequence
  Oligonucleotide for detection of SNP TSC0010046
aactcacaaaaaa

SEQ ID NO: 32191 - DNA, 13 bp, Artificial Sequence
  Oligonucleotide for detection of SNP TSC0010046
ttttttatgagtt

SEQ ID NO: 32192 - DNA, 13 bp, Artificial Sequence
  Oligonucleotide for detection of SNP TSC0010046
aactcataaaaaa

SEQ ID NO: 32193 - DNA, 13 bp, Artificial Sequence
  Oligonucleotide for detection of SNP TSC0010046
tttttcgtgagtt

SEQ ID NO: 32194 - DNA, 13 bp, Artificial Sequence
  Oligonucleotide for detection of SNP TSC0010046
aactcacgaaaaa

SEQ ID NO: 32195 - DNA, 13 bp, Artificial Sequence
  Oligonucleotide for detection of SNP TSC0010047
tggtttgttttty

SEQ ID NO: 32196 - DNA, 13 bp, Artificial Sequence
  Oligonucleotide for detection of SNP TSC0010047
raaaaacaaacca

SEQ ID NO: 32197 - DNA, 13 bp, Artificial Sequence
  Oligonucleotide for detection of SNP TSC0010047
tggtttattttty

SEQ ID NO: 32198 - DNA, 13 bp, Artificial Sequence
  Oligonucleotide for detection of SNP TSC0010047
raaaaataaacca

SEQ ID NO: 32199 - DNA, 13 bp, Artificial Sequence
  Oligonucleotide for detection of SNP TSC0010049
ttttgaaagttga

SEQ ID NO: 32200 - DNA, 13 bp, Artificial Sequence
  Oligonucleotide for detection of SNP TSC0010049
tcaactttcaaaa

SEQ ID NO: 32201 - DNA, 13 bp, Artificial Sequence
  Oligonucleotide for detection of SNP TSC0010049
ttttgagagttga

SEQ ID NO: 32202 - DNA, 13 bp, Artificial Sequence
  Oligonucleotide for detection of SNP TSC0010049
tcaactctcaaaa

SEQ ID NO: 32203 - DNA, 13 bp, Artificial Sequence
  Oligonucleotide for detection of SNP TSC0010051
tgggggtataggy

SEQ ID NO: 32204 - DNA, 13 bp, Artificial Sequence
  Oligonucleotide for detection of SNP TSC0010051
rcctataccccca

SEQ ID NO: 32205 - DNA, 13 bp, Artificial Sequence
  Oligonucleotide for detection of SNP TSC0010051
tggggggataggy

SEQ ID NO: 32206 - DNA, 13 bp, Artificial Sequence
  Oligonucleotide for detection of SNP TSC0010051
rcctatcccccca

SEQ ID NO: 32207 - DNA, 13 bp, Artificial Sequence
  Oligonucleotide for detection of SNP TSC0010051
gtttgtgttttta

SEQ ID NO: 32208 - DNA, 13 bp, Artificial Sequence
  Oligonucleotide for detection of SNP TSC0010051
taaaaacacaaac

SEQ ID NO: 32209 - DNA, 13 bp, Artificial Sequence
  Oligonucleotide for detection of SNP TSC0010051
gtttgttttttta

SEQ ID NO: 32210 - DNA, 13 bp, Artificial Sequence
  Oligonucleotide for detection of SNP TSC0010051
taaaaaaacaaac

SEQ ID NO: 32211 - DNA, 13 bp, Artificial Sequence
  Oligonucleotide for detection of SNP TSC0010052
atataaaggatta

SEQ ID NO: 32212 - DNA, 13 bp, Artificial Sequence
  Oligonucleotide for detection of SNP TSC0010052
taatcctttatat

SEQ ID NO: 32213 - DNA, 13 bp, Artificial Sequence
  Oligonucleotide for detection of SNP TSC0010052
atataatggatta

SEQ ID NO: 32214 - DNA, 13 bp, Artificial Sequence
  Oligonucleotide for detection of SNP TSC0010052
taatccattatat

SEQ ID NO: 32215 - DNA, 13 bp, Artificial Sequence
  Oligonucleotide for detection of SNP TSC0010053
atttttaaaaaat

SEQ ID NO: 32216 - DNA, 13 bp, Artificial Sequence
  Oligonucleotide for detection of SNP TSC0010053
attttttaaaaat

SEQ ID NO: 32217 - DNA, 13 bp, Artificial Sequence
  Oligonucleotide for detection of SNP TSC0010054
gttttagggaaay

SEQ ID NO: 32218 - DNA, 13 bp, Artificial Sequence
  Oligonucleotide for detection of SNP TSC0010054
rtttccctaaaac

SEQ ID NO: 32219 - DNA, 13 bp, Artificial Sequence
  Oligonucleotide for detection of SNP TSC0010054
gttttaaggaaay

SEQ ID NO: 32220 - DNA, 13 bp, Artificial Sequence
  Oligonucleotide for detection of SNP TSC0010054
rtttccttaaaac

SEQ ID NO: 32221 - DNA, 13 bp, Artificial Sequence
  Oligonucleotide for detection of SNP TSC0010055
gttattagttaaa

SEQ ID NO: 32222 - DNA, 13 bp, Artificial Sequence
  Oligonucleotide for detection of SNP TSC0010055
tttaactaataac

SEQ ID NO: 32223 - DNA, 13 bp, Artificial Sequence
  Oligonucleotide for detection of SNP TSC0010055
gttatttgttaaa

SEQ ID NO: 32224 - DNA, 13 bp, Artificial Sequence
  Oligonucleotide for detection of SNP TSC0010055
tttaacaaataac

SEQ ID NO: 32225 - DNA, 13 bp, Artificial Sequence
  Oligonucleotide for detection of SNP TSC0010055
tttgattgataay

SEQ ID NO: 32226 - DNA, 13 bp, Artificial Sequence
  Oligonucleotide for detection of SNP TSC0010055
rttatcaatcaaa

SEQ ID NO: 32227 - DNA, 13 bp, Artificial Sequence
  Oligonucleotide for detection of SNP TSC0010055
tttgatagataay

SEQ ID NO: 32228 - DNA, 13 bp, Artificial Sequence
  Oligonucleotide for detection of SNP TSC0010055
rttatctatcaaa

SEQ ID NO: 32229 - DNA, 13 bp, Artificial Sequence
  Oligonucleotide for detection of SNP TSC0010056
ttatataagaaag

SEQ ID NO: 32230 - DNA, 13 bp, Artificial Sequence
  Oligonucleotide for detection of SNP TSC0010056
ctttcttatataa

SEQ ID NO: 32231 - DNA, 13 bp, Artificial Sequence
  Oligonucleotide for detection of SNP TSC0010056
ttatattagaaag

SEQ ID NO: 32232 - DNA, 13 bp, Artificial Sequence
  Oligonucleotide for detection of SNP TSC0010056
ctttctaatataa

SEQ ID NO: 32233 - DNA, 13 bp, Artificial Sequence
  Oligonucleotide for detection of SNP TSC0010056
tttttttgtatag

SEQ ID NO: 32234 - DNA, 13 bp, Artificial Sequence
  Oligonucleotide for detection of SNP TSC0010056
ctatacaaaaaaa

SEQ ID NO: 32235 - DNA, 13 bp, Artificial Sequence
  Oligonucleotide for detection of SNP TSC0010056
ttttttggtatag

SEQ ID NO: 32236 - DNA, 13 bp, Artificial Sequence
  Oligonucleotide for detection of SNP TSC0010056
ctataccaaaaaa

SEQ ID NO: 32237 - DNA, 13 bp, Artificial Sequence
  Oligonucleotide for detection of SNP TSC0010060
tattttttttaaa

SEQ ID NO: 32238 - DNA, 13 bp, Artificial Sequence
  Oligonucleotide for detection of SNP TSC0010060
tttaaaaaaaata

SEQ ID NO: 32239 - DNA, 13 bp, Artificial Sequence
  Oligonucleotide for detection of SNP TSC0010060
tattttgtttaaa

SEQ ID NO: 32240 - DNA, 13 bp, Artificial Sequence
  Oligonucleotide for detection of SNP TSC0010060
tttaaacaaaata

SEQ ID NO: 32241 - DNA, 13 bp, Artificial Sequence
  Oligonucleotide for detection of SNP TSC0010060
tttggagaaaatg

SEQ ID NO: 32242 - DNA, 13 bp, Artificial Sequence
  Oligonucleotide for detection of SNP TSC0010060
cattttctccaaa

SEQ ID NO: 32243 - DNA, 13 bp, Artificial Sequence
  Oligonucleotide for detection of SNP TSC0010060
tttggataaaatg

SEQ ID NO: 32244 - DNA, 13 bp, Artificial Sequence
  Oligonucleotide for detection of SNP TSC0010060
cattttatccaaa

SEQ ID NO: 32245 - DNA, 13 bp, Artificial Sequence
  Oligonucleotide for detection of SNP TSC0010061
tttgtgataatag

SEQ ID NO: 32246 - DNA, 13 bp, Artificial Sequence
  Oligonucleotide for detection of SNP TSC0010061
ctattatcacaaa

SEQ ID NO: 32247 - DNA, 13 bp, Artificial Sequence
  Oligonucleotide for detection of SNP TSC0010061
tttgtggtaatag

SEQ ID NO: 32248 - DNA, 13 bp, Artificial Sequence
  Oligonucleotide for detection of SNP TSC0010061
ctattaccacaaa

SEQ ID NO: 32249 - DNA, 13 bp, Artificial Sequence
  Oligonucleotide for detection of SNP TSC0010062
tatttatttgttg

SEQ ID NO: 32250 - DNA, 13 bp, Artificial Sequence
  Oligonucleotide for detection of SNP TSC0010062
caacaaataaata

SEQ ID NO: 32251 - DNA, 13 bp, Artificial Sequence
  Oligonucleotide for detection of SNP TSC0010062
tatttagttgttg

SEQ ID NO: 32252 - DNA, 13 bp, Artificial Sequence
  Oligonucleotide for detection of SNP TSC0010062
caacaactaaata

SEQ ID NO: 32253 - DNA, 13 bp, Artificial Sequence
  Oligonucleotide for detection of SNP TSC0010062
tatttattcgttg

SEQ ID NO: 32254 - DNA, 13 bp, Artificial Sequence
  Oligonucleotide for detection of SNP TSC0010062
caacgaataaata

SEQ ID NO: 32255 - DNA, 13 bp, Artificial Sequence
  Oligonucleotide for detection of SNP TSC0010062
tatttagtcgttg

SEQ ID NO: 32256 - DNA, 13 bp, Artificial Sequence
  Oligonucleotide for detection of SNP TSC0010062
caacgactaaata

SEQ ID NO: 32257 - DNA, 13 bp, Artificial Sequence
  Oligonucleotide for detection of SNP TSC0010062
tagtgagtggatg

SEQ ID NO: 32258 - DNA, 13 bp, Artificial Sequence
  Oligonucleotide for detection of SNP TSC0010062
catccactcacta

SEQ ID NO: 32259 - DNA, 13 bp, Artificial Sequence
  Oligonucleotide for detection of SNP TSC0010062
tagtgattggatg

SEQ ID NO: 32260 - DNA, 13 bp, Artificial Sequence
  Oligonucleotide for detection of SNP TSC0010062
catccaatcacta

SEQ ID NO: 32261 - DNA, 13 bp, Artificial Sequence
  Oligonucleotide for detection of SNP TSC0010062
tagcgagtggatg

SEQ ID NO: 32262 - DNA, 13 bp, Artificial Sequence
  Oligonucleotide for detection of SNP TSC0010062
catccactcgcta

SEQ ID NO: 32263 - DNA, 13 bp, Artificial Sequence
  Oligonucleotide for detection of SNP TSC0010062
tagcgattggatg

SEQ ID NO: 32264 - DNA, 13 bp, Artificial Sequence
  Oligonucleotide for detection of SNP TSC0010062
catccaatcgcta

SEQ ID NO: 32265 - DNA, 13 bp, Artificial Sequence
  Oligonucleotide for detection of SNP TSC0010063
ttgggaagtttay

SEQ ID NO: 32266 - DNA, 13 bp, Artificial Sequence
  Oligonucleotide for detection of SNP TSC0010063
rtaaacttcccaa

SEQ ID NO: 32267 - DNA, 13 bp, Artificial Sequence
  Oligonucleotide for detection of SNP TSC0010063
ttgggaggtttay

SEQ ID NO: 32268 - DNA, 13 bp, Artificial Sequence
  Oligonucleotide for detection of SNP TSC0010063
rtaaacctcccaa

SEQ ID NO: 32269 - DNA, 13 bp, Artificial Sequence
  Oligonucleotide for detection of SNP TSC0010063
tcgggaagtttay

SEQ ID NO: 32270 - DNA, 13 bp, Artificial Sequence
  Oligonucleotide for detection of SNP TSC0010063
rtaaacttcccga

SEQ ID NO: 32271 - DNA, 13 bp, Artificial Sequence
  Oligonucleotide for detection of SNP TSC0010063
tcgggaggtttay

SEQ ID NO: 32272 - DNA, 13 bp, Artificial Sequence
  Oligonucleotide for detection of SNP TSC0010063
rtaaacctcccga

SEQ ID NO: 32273 - DNA, 13 bp, Artificial Sequence
  Oligonucleotide for detection of SNP TSC0010065
ttatatatttgtg

SEQ ID NO: 32274 - DNA, 13 bp, Artificial Sequence
  Oligonucleotide for detection of SNP TSC0010065
cacaaatatataa

SEQ ID NO: 32275 - DNA, 13 bp, Artificial Sequence
  Oligonucleotide for detection of SNP TSC0010065
ttatatttttgtg

SEQ ID NO: 32276 - DNA, 13 bp, Artificial Sequence
  Oligonucleotide for detection of SNP TSC0010065
cacaaaaatataa

SEQ ID NO: 32277 - DNA, 13 bp, Artificial Sequence
  Oligonucleotide for detection of SNP TSC0010065
tatagatatatag

SEQ ID NO: 32278 - DNA, 13 bp, Artificial Sequence
  Oligonucleotide for detection of SNP TSC0010065
ctatatatctata

SEQ ID NO: 32279 - DNA, 13 bp, Artificial Sequence
  Oligonucleotide for detection of SNP TSC0010065
tatagagatatag

SEQ ID NO: 32280 - DNA, 13 bp, Artificial Sequence
  Oligonucleotide for detection of SNP TSC0010065
ctatatctctata

SEQ ID NO: 32281 - DNA, 13 bp, Artificial Sequence
  Oligonucleotide for detection of SNP TSC0010075
agatttaaatgga

SEQ ID NO: 32282 - DNA, 13 bp, Artificial Sequence
  Oligonucleotide for detection of SNP TSC0010075
tccatttaaatct

SEQ ID NO: 32283 - DNA, 13 bp, Artificial Sequence
  Oligonucleotide for detection of SNP TSC0010075
agatttgaatgga

SEQ ID NO: 32284 - DNA, 13 bp, Artificial Sequence
  Oligonucleotide for detection of SNP TSC0010075
tccattcaaatct

SEQ ID NO: 32285 - DNA, 13 bp, Artificial Sequence
  Oligonucleotide for detection of SNP TSC0010075
agattcgaatgga

SEQ ID NO: 32286 - DNA, 13 bp, Artificial Sequence
  Oligonucleotide for detection of SNP TSC0010075
tccattcgaatct

SEQ ID NO: 32287 - DNA, 13 bp, Artificial Sequence
  Oligonucleotide for detection of SNP TSC0010075
tttatttggattt

SEQ ID NO: 32288 - DNA, 13 bp, Artificial Sequence
  Oligonucleotide for detection of SNP TSC0010075
aaatccaaataaa

SEQ ID NO: 32289 - DNA, 13 bp, Artificial Sequence
  Oligonucleotide for detection of SNP TSC0010075
tttattcggattt

SEQ ID NO: 32290 - DNA, 13 bp, Artificial Sequence
  Oligonucleotide for detection of SNP TSC0010075
aaatccgaataaa

SEQ ID NO: 32291 - DNA, 13 bp, Artificial Sequence
  Oligonucleotide for detection of SNP TSC0010076
aaaatggaaatta

SEQ ID NO: 32292 - DNA, 13 bp, Artificial Sequence
  Oligonucleotide for detection of SNP TSC0010076
taatttccatttt

SEQ ID NO: 32293 - DNA, 13 bp, Artificial Sequence
  Oligonucleotide for detection of SNP TSC0010076
aaaatgaaaatta

SEQ ID NO: 32294 - DNA, 13 bp, Artificial Sequence
  Oligonucleotide for detection of SNP TSC0010076
taattttcatttt

SEQ ID NO: 32295 - DNA, 13 bp, Artificial Sequence
  Oligonucleotide for detection of SNP TSC0010077
gatgtttgttatg

SEQ ID NO: 32296 - DNA, 13 bp, Artificial Sequence
  Oligonucleotide for detection of SNP TSC0010077
cataacaaacatc

SEQ ID NO: 32297 - DNA, 13 bp, Artificial Sequence
  Oligonucleotide for detection of SNP TSC0010077
gatgttcgttatg

SEQ ID NO: 32298 - DNA, 13 bp, Artificial Sequence
  Oligonucleotide for detection of SNP TSC0010077
cataacgaacatc

SEQ ID NO: 32299 - DNA, 13 bp, Artificial Sequence
  Oligonucleotide for detection of SNP TSC0010077
tatggtggataty

SEQ ID NO: 32300 - DNA, 13 bp, Artificial Sequence
  Oligonucleotide for detection of SNP TSC0010077
ratatccaccata

SEQ ID NO: 32301 - DNA, 13 bp, Artificial Sequence
  Oligonucleotide for detection of SNP TSC0010077
tatggtagataty

SEQ ID NO: 32302 - DNA, 13 bp, Artificial Sequence
  Oligonucleotide for detection of SNP TSC0010077
ratatctaccata

SEQ ID NO: 32303 - DNA, 13 bp, Artificial Sequence
  Oligonucleotide for detection of SNP TSC0010077
tatggcggataty

SEQ ID NO: 32304 - DNA, 13 bp, Artificial Sequence
  Oligonucleotide for detection of SNP TSC0010077
ratatccgccata

SEQ ID NO: 32305 - DNA, 13 bp, Artificial Sequence
  Oligonucleotide for detection of SNP TSC0010078
atggatgttgtty

SEQ ID NO: 32306 - DNA, 13 bp, Artificial Sequence
  Oligonucleotide for detection of SNP TSC0010078
raacaacatccat

SEQ ID NO: 32307 - DNA, 13 bp, Artificial Sequence
  Oligonucleotide for detection of SNP TSC0010078
atggattttgtty

SEQ ID NO: 32308 - DNA, 13 bp, Artificial Sequence
  Oligonucleotide for detection of SNP TSC0010078
raacaaaatccat

SEQ ID NO: 32309 - DNA, 13 bp, Artificial Sequence
  Oligonucleotide for detection of SNP TSC0010078
atggatgtcgtty

SEQ ID NO: 32310 - DNA, 13 bp, Artificial Sequence
  Oligonucleotide for detection of SNP TSC0010078
raacgacatccat

SEQ ID NO: 32311 - DNA, 13 bp, Artificial Sequence
  Oligonucleotide for detection of SNP TSC0010078
atggatttcgtty

SEQ ID NO: 32312 - DNA, 13 bp, Artificial Sequence
  Oligonucleotide for detection of SNP TSC0010078
raacgaaatccat

SEQ ID NO: 32313 - DNA, 13 bp, Artificial Sequence
  Oligonucleotide for detection of SNP TSC0010078
gagtgatatttat

SEQ ID NO: 32314 - DNA, 13 bp, Artificial Sequence
  Oligonucleotide for detection of SNP TSC0010078
ataaatatcactc

SEQ ID NO: 32315 - DNA, 13 bp, Artificial Sequence
  Oligonucleotide for detection of SNP TSC0010078
gagtgaaatttat

SEQ ID NO: 32316 - DNA, 13 bp, Artificial Sequence
  Oligonucleotide for detection of SNP TSC0010078
ataaatttcactc

SEQ ID NO: 32317 - DNA, 13 bp, Artificial Sequence
  Oligonucleotide for detection of SNP TSC0010078
gagcgatatttat

SEQ ID NO: 32318 - DNA, 13 bp, Artificial Sequence
  Oligonucleotide for detection of SNP TSC0010078
ataaatatcgctc

SEQ ID NO: 32319 - DNA, 13 bp, Artificial Sequence
  Oligonucleotide for detection of SNP TSC0010078
gagcgaaatttat

SEQ ID NO: 32320 - DNA, 13 bp, Artificial Sequence
  Oligonucleotide for detection of SNP TSC0010078
ataaatttcgctc

SEQ ID NO: 32321 - DNA, 13 bp, Artificial Sequence
  Oligonucleotide for detection of SNP TSC0010079
tagttaggtggaa

SEQ ID NO: 32322 - DNA, 13 bp, Artificial Sequence
  Oligonucleotide for detection of SNP TSC0010079
ttccacctaacta

SEQ ID NO: 32323 - DNA, 13 bp, Artificial Sequence
  Oligonucleotide for detection of SNP TSC0010079
tagttatgtggaa

SEQ ID NO: 32324 - DNA, 13 bp, Artificial Sequence
  Oligonucleotide for detection of SNP TSC0010079
ttccacataacta

SEQ ID NO: 32325 - DNA, 13 bp, Artificial Sequence
  Oligonucleotide for detection of SNP TSC0010079
ttttatttggttg

SEQ ID NO: 32326 - DNA, 13 bp, Artificial Sequence
  Oligonucleotide for detection of SNP TSC0010079
caaccaaataaaa

SEQ ID NO: 32327 - DNA, 13 bp, Artificial Sequence
  Oligonucleotide for detection of SNP TSC0010079
ttttatatggttg

SEQ ID NO: 32328 - DNA, 13 bp, Artificial Sequence
  Oligonucleotide for detection of SNP TSC0010079
caaccatataaaa

SEQ ID NO: 32329 - DNA, 13 bp, Artificial Sequence
  Oligonucleotide for detection of SNP TSC0010080
ggtaagaaattgt

SEQ ID NO: 32330 - DNA, 13 bp, Artificial Sequence
  Oligonucleotide for detection of SNP TSC0010080
acaatttcttacc

SEQ ID NO: 32331 - DNA, 13 bp, Artificial Sequence
  Oligonucleotide for detection of SNP TSC0010080
ggtaaggaattgt

SEQ ID NO: 32332 - DNA, 13 bp, Artificial Sequence
  Oligonucleotide for detection of SNP TSC0010080
acaattccttacc

SEQ ID NO: 32333 - DNA, 13 bp, Artificial Sequence
  Oligonucleotide for detection of SNP TSC0010083
tttattaattaty

SEQ ID NO: 32334 - DNA, 13 bp, Artificial Sequence
  Oligonucleotide for detection of SNP TSC0010083
rataattaataaa

SEQ ID NO: 32335 - DNA, 13 bp, Artificial Sequence
  Oligonucleotide for detection of SNP TSC0010083
tttattgattaty

SEQ ID NO: 32336 - DNA, 13 bp, Artificial Sequence
  Oligonucleotide for detection of SNP TSC0010083
rataatcaataaa

SEQ ID NO: 32337 - DNA, 13 bp, Artificial Sequence
  Oligonucleotide for detection of SNP TSC0010083
tttatcgattaty

SEQ ID NO: 32338 - DNA, 13 bp, Artificial Sequence
  Oligonucleotide for detection of SNP TSC0010083
rataatcgataaa

SEQ ID NO: 32339 - DNA, 13 bp, Artificial Sequence
  Oligonucleotide for detection of SNP TSC0010083
gatgattgatgga

SEQ ID NO: 32340 - DNA, 13 bp, Artificial Sequence
  Oligonucleotide for detection of SNP TSC0010083
tccatcaatcatc

SEQ ID NO: 32341 - DNA, 13 bp, Artificial Sequence
  Oligonucleotide for detection of SNP TSC0010083
gatgatcgatgga

SEQ ID NO: 32342 - DNA, 13 bp, Artificial Sequence
  Oligonucleotide for detection of SNP TSC0010083
tccatcgatcatc

SEQ ID NO: 32343 - DNA, 13 bp, Artificial Sequence
  Oligonucleotide for detection of SNP TSC0010087
ttgttttttttty

SEQ ID NO: 32344 - DNA, 13 bp, Artificial Sequence
  Oligonucleotide for detection of SNP TSC0010087
raaaaaaaaacaa

SEQ ID NO: 32345 - DNA, 13 bp, Artificial Sequence
  Oligonucleotide for detection of SNP TSC0010087
gaaaggtaagtaa

SEQ ID NO: 32346 - DNA, 13 bp, Artificial Sequence
  Oligonucleotide for detection of SNP TSC0010087
ttacttacctttc

SEQ ID NO: 32347 - DNA, 13 bp, Artificial Sequence
  Oligonucleotide for detection of SNP TSC0010087
gaaagggaagtaa

SEQ ID NO: 32348 - DNA, 13 bp, Artificial Sequence
  Oligonucleotide for detection of SNP TSC0010087
ttacttccctttc

SEQ ID NO: 32349 - DNA, 13 bp, Artificial Sequence
  Oligonucleotide for detection of SNP TSC0010088
aggaagtgtggga

SEQ ID NO: 32350 - DNA, 13 bp, Artificial Sequence
  Oligonucleotide for detection of SNP TSC0010088
tcccacacttcct

SEQ ID NO: 32351 - DNA, 13 bp, Artificial Sequence
  Oligonucleotide for detection of SNP TSC0010088
aggaagcgtggga

SEQ ID NO: 32352 - DNA, 13 bp, Artificial Sequence
  Oligonucleotide for detection of SNP TSC0010088
tcccacgcttcct

SEQ ID NO: 32353 - DNA, 13 bp, Artificial Sequence
  Oligonucleotide for detection of SNP TSC0010088
ttttacgtttttt

SEQ ID NO: 32354 - DNA, 13 bp, Artificial Sequence
  Oligonucleotide for detection of SNP TSC0010088
aaaaaacgtaaaa

SEQ ID NO: 32355 - DNA, 13 bp, Artificial Sequence
  Oligonucleotide for detection of SNP TSC0010093
aatgttaggttaa

SEQ ID NO: 32356 - DNA, 13 bp, Artificial Sequence
  Oligonucleotide for detection of SNP TSC0010093
ttaacctaacatt

SEQ ID NO: 32357 - DNA, 13 bp, Artificial Sequence
  Oligonucleotide for detection of SNP TSC0010093
aatgttgggttaa

SEQ ID NO: 32358 - DNA, 13 bp, Artificial Sequence
  Oligonucleotide for detection of SNP TSC0010093
ttaacccaacatt

SEQ ID NO: 32359 - DNA, 13 bp, Artificial Sequence
  Oligonucleotide for detection of SNP TSC0010097
tttgaaaaagtgg

SEQ ID NO: 32360 - DNA, 13 bp, Artificial Sequence
  Oligonucleotide for detection of SNP TSC0010097
ccactttttcaaa

SEQ ID NO: 32361 - DNA, 13 bp, Artificial Sequence
  Oligonucleotide for detection of SNP TSC0010097
tttgaataagtgg

SEQ ID NO: 32362 - DNA, 13 bp, Artificial Sequence
  Oligonucleotide for detection of SNP TSC0010097
ccacttattcaaa

SEQ ID NO: 32363 - DNA, 13 bp, Artificial Sequence
  Oligonucleotide for detection of SNP TSC0010097
ttatttttttaag

SEQ ID NO: 32364 - DNA, 13 bp, Artificial Sequence
  Oligonucleotide for detection of SNP TSC0010097
cttaaaaaaataa

SEQ ID NO: 32365 - DNA, 13 bp, Artificial Sequence
  Oligonucleotide for detection of SNP TSC0010097
ttatttgtttaag

SEQ ID NO: 32366 - DNA, 13 bp, Artificial Sequence
  Oligonucleotide for detection of SNP TSC0010097
cttaaacaaataa

SEQ ID NO: 32367 - DNA, 13 bp, Artificial Sequence
  Oligonucleotide for detection of SNP TSC0010099
ggggggaaaaaaa

SEQ ID NO: 32368 - DNA, 13 bp, Artificial Sequence
  Oligonucleotide for detection of SNP TSC0010099
tttttttcccccc

SEQ ID NO: 32369 - DNA, 13 bp, Artificial Sequence
  Oligonucleotide for detection of SNP TSC0010101
gtggaaataagty

SEQ ID NO: 32370 - DNA, 13 bp, Artificial Sequence
  Oligonucleotide for detection of SNP TSC0010101
racttatttccac

SEQ ID NO: 32371 - DNA, 13 bp, Artificial Sequence
  Oligonucleotide for detection of SNP TSC0010101
gtggaagtaagty

SEQ ID NO: 32372 - DNA, 13 bp, Artificial Sequence
  Oligonucleotide for detection of SNP TSC0010101
racttacttccac

SEQ ID NO: 32373 - DNA, 13 bp, Artificial Sequence
  Oligonucleotide for detection of SNP TSC0010102
gtttgtggaattg

SEQ ID NO: 32374 - DNA, 13 bp, Artificial Sequence
  Oligonucleotide for detection of SNP TSC0010102
caattccacaaac

SEQ ID NO: 32375 - DNA, 13 bp, Artificial Sequence
  Oligonucleotide for detection of SNP TSC0010102
gtttgtagaattg

SEQ ID NO: 32376 - DNA, 13 bp, Artificial Sequence
  Oligonucleotide for detection of SNP TSC0010102
caattctacaaac

SEQ ID NO: 32377 - DNA, 13 bp, Artificial Sequence
  Oligonucleotide for detection of SNP TSC0010104
gttttttggaagg

SEQ ID NO: 32378 - DNA, 13 bp, Artificial Sequence
  Oligonucleotide for detection of SNP TSC0010104
ccttccaaaaaac

SEQ ID NO: 32379 - DNA, 13 bp, Artificial Sequence
  Oligonucleotide for detection of SNP TSC0010104
gtttttcggaagg

SEQ ID NO: 32380 - DNA, 13 bp, Artificial Sequence
  Oligonucleotide for detection of SNP TSC0010104
ccttccgaaaaac

SEQ ID NO: 32381 - DNA, 13 bp, Artificial Sequence
  Oligonucleotide for detection of SNP TSC0010104
ttttttgaagaay

SEQ ID NO: 32382 - DNA, 13 bp, Artificial Sequence
  Oligonucleotide for detection of SNP TSC0010104
rttcttcaaaaaa

SEQ ID NO: 32383 - DNA, 13 bp, Artificial Sequence
  Oligonucleotide for detection of SNP TSC0010104
ttttttaaagaay

SEQ ID NO: 32384 - DNA, 13 bp, Artificial Sequence
  Oligonucleotide for detection of SNP TSC0010104
rttctttaaaaaa

SEQ ID NO: 32385 - DNA, 13 bp, Artificial Sequence
  Oligonucleotide for detection of SNP TSC0010104
tttttcgaagaay

SEQ ID NO: 32386 - DNA, 13 bp, Artificial Sequence
  Oligonucleotide for detection of SNP TSC0010104
rttcttcgaaaaa

SEQ ID NO: 32387 - DNA, 13 bp, Artificial Sequence
  Oligonucleotide for detection of SNP TSC0010107
gtagatagaggta

SEQ ID NO: 32388 - DNA, 13 bp, Artificial Sequence
  Oligonucleotide for detection of SNP TSC0010107
tacctctatctac

SEQ ID NO: 32389 - DNA, 13 bp, Artificial Sequence
  Oligonucleotide for detection of SNP TSC0010107
gtagatggaggta

SEQ ID NO: 32390 - DNA, 13 bp, Artificial Sequence
  Oligonucleotide for detection of SNP TSC0010107
tacctccatctac

SEQ ID NO: 32391 - DNA, 13 bp, Artificial Sequence
  Oligonucleotide for detection of SNP TSC0010115
taaggagggttty

SEQ ID NO: 32392 - DNA, 13 bp, Artificial Sequence
  Oligonucleotide for detection of SNP TSC0010115
raaaccctcctta

SEQ ID NO: 32393 - DNA, 13 bp, Artificial Sequence
  Oligonucleotide for detection of SNP TSC0010115
taaggaaggttty

SEQ ID NO: 32394 - DNA, 13 bp, Artificial Sequence
  Oligonucleotide for detection of SNP TSC0010115
raaaccttcctta

SEQ ID NO: 32395 - DNA, 13 bp, Artificial Sequence
  Oligonucleotide for detection of SNP TSC0010116
gatttttggggta

SEQ ID NO: 32396 - DNA, 13 bp, Artificial Sequence
  Oligonucleotide for detection of SNP TSC0010116
taccccaaaaatc

SEQ ID NO: 32397 - DNA, 13 bp, Artificial Sequence
  Oligonucleotide for detection of SNP TSC0010116
gattttcggggta

SEQ ID NO: 32398 - DNA, 13 bp, Artificial Sequence
  Oligonucleotide for detection of SNP TSC0010116
taccccgaaaatc

SEQ ID NO: 32399 - DNA, 13 bp, Artificial Sequence
  Oligonucleotide for detection of SNP TSC0010116
tattttgaaggty

SEQ ID NO: 32400 - DNA, 13 bp, Artificial Sequence
  Oligonucleotide for detection of SNP TSC0010116
raccttcaaaata

SEQ ID NO: 32401 - DNA, 13 bp, Artificial Sequence
  Oligonucleotide for detection of SNP TSC0010116
tattttaaaggty

SEQ ID NO: 32402 - DNA, 13 bp, Artificial Sequence
  Oligonucleotide for detection of SNP TSC0010116
racctttaaaata

SEQ ID NO: 32403 - DNA, 13 bp, Artificial Sequence
  Oligonucleotide for detection of SNP TSC0010116
tatttcgaaggty

SEQ ID NO: 32404 - DNA, 13 bp, Artificial Sequence
  Oligonucleotide for detection of SNP TSC0010116
raccttcgaaata

SEQ ID NO: 32405 - DNA, 13 bp, Artificial Sequence
  Oligonucleotide for detection of SNP TSC0010117
tagggtaatggtt

SEQ ID NO: 32406 - DNA, 13 bp, Artificial Sequence
  Oligonucleotide for detection of SNP TSC0010117
aaccattacccta

SEQ ID NO: 32407 - DNA, 13 bp, Artificial Sequence
  Oligonucleotide for detection of SNP TSC0010117
tagggttatggtt

SEQ ID NO: 32408 - DNA, 13 bp, Artificial Sequence
  Oligonucleotide for detection of SNP TSC0010117
aaccataacccta

SEQ ID NO: 32409 - DNA, 13 bp, Artificial Sequence
  Oligonucleotide for detection of SNP TSC0010117
agttattgttttg

SEQ ID NO: 32410 - DNA, 13 bp, Artificial Sequence
  Oligonucleotide for detection of SNP TSC0010117
caaaacaataact

SEQ ID NO: 32411 - DNA, 13 bp, Artificial Sequence
  Oligonucleotide for detection of SNP TSC0010117
agttatggttttg

SEQ ID NO: 32412 - DNA, 13 bp, Artificial Sequence
  Oligonucleotide for detection of SNP TSC0010117
caaaaccataact

SEQ ID NO: 32413 - DNA, 13 bp, Artificial Sequence
  Oligonucleotide for detection of SNP TSC0010118
gtttagttgatty

SEQ ID NO: 32414 - DNA, 13 bp, Artificial Sequence
  Oligonucleotide for detection of SNP TSC0010118
raatcaactaaac

SEQ ID NO: 32415 - DNA, 13 bp, Artificial Sequence
  Oligonucleotide for detection of SNP TSC0010118
gtttaggtgatty

SEQ ID NO: 32416 - DNA, 13 bp, Artificial Sequence
  Oligonucleotide for detection of SNP TSC0010118
raatcacctaaac

SEQ ID NO: 32417 - DNA, 13 bp, Artificial Sequence
  Oligonucleotide for detection of SNP TSC0010118
gtttagtcgatty

SEQ ID NO: 32418 - DNA, 13 bp, Artificial Sequence
  Oligonucleotide for detection of SNP TSC0010118
raatcgactaaac

SEQ ID NO: 32419 - DNA, 13 bp, Artificial Sequence
  Oligonucleotide for detection of SNP TSC0010118
gtttaggcgatty

SEQ ID NO: 32420 - DNA, 13 bp, Artificial Sequence
  Oligonucleotide for detection of SNP TSC0010118
raatcgcctaaac

SEQ ID NO: 32421 - DNA, 13 bp, Artificial Sequence
  Oligonucleotide for detection of SNP TSC0010118
gggttggttgagy

SEQ ID NO: 32422 - DNA, 13 bp, Artificial Sequence
  Oligonucleotide for detection of SNP TSC0010118
rctcaaccaaccc

SEQ ID NO: 32423 - DNA, 13 bp, Artificial Sequence
  Oligonucleotide for detection of SNP TSC0010118
gggttgtttgagy

SEQ ID NO: 32424 - DNA, 13 bp, Artificial Sequence
  Oligonucleotide for detection of SNP TSC0010118
rctcaaacaaccc

SEQ ID NO: 32425 - DNA, 13 bp, Artificial Sequence
  Oligonucleotide for detection of SNP TSC0010118
gggtcggttgagy

SEQ ID NO: 32426 - DNA, 13 bp, Artificial Sequence
  Oligonucleotide for detection of SNP TSC0010118
rctcaaccgaccc

SEQ ID NO: 32427 - DNA, 13 bp, Artificial Sequence
  Oligonucleotide for detection of SNP TSC0010118
gggtcgtttgagy

SEQ ID NO: 32428 - DNA, 13 bp, Artificial Sequence
  Oligonucleotide for detection of SNP TSC0010118
rctcaaacgaccc

SEQ ID NO: 32429 - DNA, 13 bp, Artificial Sequence
  Oligonucleotide for detection of SNP TSC0010119
tttaagaggggty

SEQ ID NO: 32430 - DNA, 13 bp, Artificial Sequence
  Oligonucleotide for detection of SNP TSC0010119
racccctcttaaa

SEQ ID NO: 32431 - DNA, 13 bp, Artificial Sequence
  Oligonucleotide for detection of SNP TSC0010119
tttaaggggggty

SEQ ID NO: 32432 - DNA, 13 bp, Artificial Sequence
  Oligonucleotide for detection of SNP TSC0010119
raccccccttaaa

SEQ ID NO: 32433 - DNA, 13 bp, Artificial Sequence
  Oligonucleotide for detection of SNP TSC0010121
tttgtttttttty

SEQ ID NO: 32434 - DNA, 13 bp, Artificial Sequence
  Oligonucleotide for detection of SNP TSC0010121
raaaaaaaacaaa

SEQ ID NO: 32435 - DNA, 13 bp, Artificial Sequence
  Oligonucleotide for detection of SNP TSC0010121
ttcgtttttttty

SEQ ID NO: 32436 - DNA, 13 bp, Artificial Sequence
  Oligonucleotide for detection of SNP TSC0010121
raaaaaaaacgaa

SEQ ID NO: 32437 - DNA, 13 bp, Artificial Sequence
  Oligonucleotide for detection of SNP TSC0010121
ttcgttgttttty

SEQ ID NO: 32438 - DNA, 13 bp, Artificial Sequence
  Oligonucleotide for detection of SNP TSC0010121
raaaaacaacgaa

SEQ ID NO: 32439 - DNA, 13 bp, Artificial Sequence
  Oligonucleotide for detection of SNP TSC0010121
ttcgtcgttttty

SEQ ID NO: 32440 - DNA, 13 bp, Artificial Sequence
  Oligonucleotide for detection of SNP TSC0010121
raaaaacgacgaa

SEQ ID NO: 32441 - DNA, 13 bp, Artificial Sequence
  Oligonucleotide for detection of SNP TSC0010121
ggggagggatggg

SEQ ID NO: 32442 - DNA, 13 bp, Artificial Sequence
  Oligonucleotide for detection of SNP TSC0010121
cccatccctcccc

SEQ ID NO: 32443 - DNA, 13 bp, Artificial Sequence
  Oligonucleotide for detection of SNP TSC0010121
ggggagtgatggg

SEQ ID NO: 32444 - DNA, 13 bp, Artificial Sequence
  Oligonucleotide for detection of SNP TSC0010121
cccatcactcccc

SEQ ID NO: 32445 - DNA, 13 bp, Artificial Sequence
  Oligonucleotide for detection of SNP TSC0010121
ggggagggacggg

SEQ ID NO: 32446 - DNA, 13 bp, Artificial Sequence
  Oligonucleotide for detection of SNP TSC0010121
cccgtccctcccc

SEQ ID NO: 32447 - DNA, 13 bp, Artificial Sequence
  Oligonucleotide for detection of SNP TSC0010121
ggggagcgatggg

SEQ ID NO: 32448 - DNA, 13 bp, Artificial Sequence
  Oligonucleotide for detection of SNP TSC0010121
cccatcgctcccc

SEQ ID NO: 32449 - DNA, 13 bp, Artificial Sequence
  Oligonucleotide for detection of SNP TSC0010121
ggggagtgacggg

SEQ ID NO: 32450 - DNA, 13 bp, Artificial Sequence
  Oligonucleotide for detection of SNP TSC0010121
cccgtcactcccc

SEQ ID NO: 32451 - DNA, 13 bp, Artificial Sequence
  Oligonucleotide for detection of SNP TSC0010121
ggggagcgacggg

SEQ ID NO: 32452 - DNA, 13 bp, Artificial Sequence
  Oligonucleotide for detection of SNP TSC0010121
cccgtcgctcccc

SEQ ID NO: 32453 - DNA, 13 bp, Artificial Sequence
  Oligonucleotide for detection of SNP TSC0010124
aaaaaaaaaaaag

SEQ ID NO: 32454 - DNA, 13 bp, Artificial Sequence
  Oligonucleotide for detection of SNP TSC0010124
ctttttttttttt

SEQ ID NO: 32455 - DNA, 13 bp, Artificial Sequence
  Oligonucleotide for detection of SNP TSC0010124
aaaaaataaaaag

SEQ ID NO: 32456 - DNA, 13 bp, Artificial Sequence
  Oligonucleotide for detection of SNP TSC0010124
ctttttatttttt

SEQ ID NO: 32457 - DNA, 13 bp, Artificial Sequence
  Oligonucleotide for detection of SNP TSC0010125
tggttagtggttt

SEQ ID NO: 32458 - DNA, 13 bp, Artificial Sequence
  Oligonucleotide for detection of SNP TSC0010125
aaaccactaacca

SEQ ID NO: 32459 - DNA, 13 bp, Artificial Sequence
  Oligonucleotide for detection of SNP TSC0010125
tggttaatggttt

SEQ ID NO: 32460 - DNA, 13 bp, Artificial Sequence
  Oligonucleotide for detection of SNP TSC0010125
aaaccattaacca

SEQ ID NO: 32461 - DNA, 13 bp, Artificial Sequence
  Oligonucleotide for detection of SNP TSC0010127
tgtgaggttagtt

SEQ ID NO: 32462 - DNA, 13 bp, Artificial Sequence
  Oligonucleotide for detection of SNP TSC0010127
aactaacctcaca

SEQ ID NO: 32463 - DNA, 13 bp, Artificial Sequence
  Oligonucleotide for detection of SNP TSC0010127
tgtgagattagtt

SEQ ID NO: 32464 - DNA, 13 bp, Artificial Sequence
  Oligonucleotide for detection of SNP TSC0010127
aactaatctcaca

SEQ ID NO: 32465 - DNA, 13 bp, Artificial Sequence
  Oligonucleotide for detection of SNP TSC0010134
gggtaagtatagt

SEQ ID NO: 32466 - DNA, 13 bp, Artificial Sequence
  Oligonucleotide for detection of SNP TSC0010134
actatacttaccc

SEQ ID NO: 32467 - DNA, 13 bp, Artificial Sequence
  Oligonucleotide for detection of SNP TSC0010134
gggtaaatatagt

SEQ ID NO: 32468 - DNA, 13 bp, Artificial Sequence
  Oligonucleotide for detection of SNP TSC0010134
actatatttaccc

SEQ ID NO: 32469 - DNA, 13 bp, Artificial Sequence
  Oligonucleotide for detection of SNP TSC0010135
ttaataaatatay

SEQ ID NO: 32470 - DNA, 13 bp, Artificial Sequence
  Oligonucleotide for detection of SNP TSC0010135
rtatatttattaa

SEQ ID NO: 32471 - DNA, 13 bp, Artificial Sequence
  Oligonucleotide for detection of SNP TSC0010135
ttaatatatatay

SEQ ID NO: 32472 - DNA, 13 bp, Artificial Sequence
  Oligonucleotide for detection of SNP TSC0010135
rtatatatattaa

SEQ ID NO: 32473 - DNA, 13 bp, Artificial Sequence
  Oligonucleotide for detection of SNP TSC0010135
gtgtgtttattga

SEQ ID NO: 32474 - DNA, 13 bp, Artificial Sequence
  Oligonucleotide for detection of SNP TSC0010135
tcaataaacacac

SEQ ID NO: 32475 - DNA, 13 bp, Artificial Sequence
  Oligonucleotide for detection of SNP TSC0010135
gtgtgtgtattga

SEQ ID NO: 32476 - DNA, 13 bp, Artificial Sequence
  Oligonucleotide for detection of SNP TSC0010135
tcaatacacacac

SEQ ID NO: 32477 - DNA, 13 bp, Artificial Sequence
  Oligonucleotide for detection of SNP TSC0010136
gtaggtatgtata

SEQ ID NO: 32478 - DNA, 13 bp, Artificial Sequence
  Oligonucleotide for detection of SNP TSC0010136
tatacatacctac

SEQ ID NO: 32479 - DNA, 13 bp, Artificial Sequence
  Oligonucleotide for detection of SNP TSC0010136
gtaggtttgtata

SEQ ID NO: 32480 - DNA, 13 bp, Artificial Sequence
  Oligonucleotide for detection of SNP TSC0010136
tatacaaacctac

SEQ ID NO: 32481 - DNA, 13 bp, Artificial Sequence
  Oligonucleotide for detection of SNP TSC0010136
tgtgtatgtttgy

SEQ ID NO: 32482 - DNA, 13 bp, Artificial Sequence
  Oligonucleotide for detection of SNP TSC0010136
rcaaacatacaca

SEQ ID NO: 32483 - DNA, 13 bp, Artificial Sequence
  Oligonucleotide for detection of SNP TSC0010136
tgtgtaagtttgy

SEQ ID NO: 32484 - DNA, 13 bp, Artificial Sequence
  Oligonucleotide for detection of SNP TSC0010136
rcaaacttacaca

SEQ ID NO: 32485 - DNA, 13 bp, Artificial Sequence
  Oligonucleotide for detection of SNP TSC0010137
ttaaaaaatttty

SEQ ID NO: 32486 - DNA, 13 bp, Artificial Sequence
  Oligonucleotide for detection of SNP TSC0010137
raaaattttttaa

SEQ ID NO: 32487 - DNA, 13 bp, Artificial Sequence
  Oligonucleotide for detection of SNP TSC0010137
ttaaaagatttty

SEQ ID NO: 32488 - DNA, 13 bp, Artificial Sequence
  Oligonucleotide for detection of SNP TSC0010137
raaaatcttttaa

SEQ ID NO: 32489 - DNA, 13 bp, Artificial Sequence
  Oligonucleotide for detection of SNP TSC0010138
aaaaaatttaagg

SEQ ID NO: 32490 - DNA, 13 bp, Artificial Sequence
  Oligonucleotide for detection of SNP TSC0010138
ccttaaatttttt

SEQ ID NO: 32491 - DNA, 13 bp, Artificial Sequence
  Oligonucleotide for detection of SNP TSC0010138
aaaaaagttaagg

SEQ ID NO: 32492 - DNA, 13 bp, Artificial Sequence
  Oligonucleotide for detection of SNP TSC0010138
ccttaactttttt

SEQ ID NO: 32493 - DNA, 13 bp, Artificial Sequence
  Oligonucleotide for detection of SNP TSC0010138
ttttgggtttttt

SEQ ID NO: 32494 - DNA, 13 bp, Artificial Sequence
  Oligonucleotide for detection of SNP TSC0010138
aaaaaacccaaaa

SEQ ID NO: 32495 - DNA, 13 bp, Artificial Sequence
  Oligonucleotide for detection of SNP TSC0010138
ttttggttttttt

SEQ ID NO: 32496 - DNA, 13 bp, Artificial Sequence
  Oligonucleotide for detection of SNP TSC0010138
aaaaaaaccaaaa

SEQ ID NO: 32497 - DNA, 13 bp, Artificial Sequence
  Oligonucleotide for detection of SNP TSC0010140
aatataaaaattt

SEQ ID NO: 32498 - DNA, 13 bp, Artificial Sequence
  Oligonucleotide for detection of SNP TSC0010140
aaatttttatatt

SEQ ID NO: 32499 - DNA, 13 bp, Artificial Sequence
  Oligonucleotide for detection of SNP TSC0010140
aatatagaaattt

SEQ ID NO: 32500 - DNA, 13 bp, Artificial Sequence
  Oligonucleotide for detection of SNP TSC0010140
aaatttctatatt

SEQ ID NO: 32501 - DNA, 13 bp, Artificial Sequence
  Oligonucleotide for detection of SNP TSC0010143
ttatatatttagg

SEQ ID NO: 32502 - DNA, 13 bp, Artificial Sequence
  Oligonucleotide for detection of SNP TSC0010143
cctaaatatataa

SEQ ID NO: 32503 - DNA, 13 bp, Artificial Sequence
  Oligonucleotide for detection of SNP TSC0010143
ttatatgtttagg

SEQ ID NO: 32504 - DNA, 13 bp, Artificial Sequence
  Oligonucleotide for detection of SNP TSC0010143
cctaaacatataa

SEQ ID NO: 32505 - DNA, 13 bp, Artificial Sequence
  Oligonucleotide for detection of SNP TSC0010144
tttttaatttagg

SEQ ID NO: 32506 - DNA, 13 bp, Artificial Sequence
  Oligonucleotide for detection of SNP TSC0010144
cctaaattaaaaa

SEQ ID NO: 32507 - DNA, 13 bp, Artificial Sequence
  Oligonucleotide for detection of SNP TSC0010144
tttttattttagg

SEQ ID NO: 32508 - DNA, 13 bp, Artificial Sequence
  Oligonucleotide for detection of SNP TSC0010144
cctaaaataaaaa

SEQ ID NO: 32509 - DNA, 13 bp, Artificial Sequence
  Oligonucleotide for detection of SNP TSC0010144
tttaggttaggag

SEQ ID NO: 32510 - DNA, 13 bp, Artificial Sequence
  Oligonucleotide for detection of SNP TSC0010144
ctcctaacctaaa

SEQ ID NO: 32511 - DNA, 13 bp, Artificial Sequence
  Oligonucleotide for detection of SNP TSC0010144
tttagggtaggag

SEQ ID NO: 32512 - DNA, 13 bp, Artificial Sequence
  Oligonucleotide for detection of SNP TSC0010144
ctcctaccctaaa

SEQ ID NO: 32513 - DNA, 13 bp, Artificial Sequence
  Oligonucleotide for detection of SNP TSC0010145
tatttagagttay

SEQ ID NO: 32514 - DNA, 13 bp, Artificial Sequence
  Oligonucleotide for detection of SNP TSC0010145
rtaactctaaata

SEQ ID NO: 32515 - DNA, 13 bp, Artificial Sequence
  Oligonucleotide for detection of SNP TSC0010145
tatttatagttay

SEQ ID NO: 32516 - DNA, 13 bp, Artificial Sequence
  Oligonucleotide for detection of SNP TSC0010145
rtaactataaata

SEQ ID NO: 32517 - DNA, 13 bp, Artificial Sequence
  Oligonucleotide for detection of SNP TSC0010145
gtagttttgaatg

SEQ ID NO: 32518 - DNA, 13 bp, Artificial Sequence
  Oligonucleotide for detection of SNP TSC0010145
cattcaaaactac

SEQ ID NO: 32519 - DNA, 13 bp, Artificial Sequence
  Oligonucleotide for detection of SNP TSC0010145
gtagttatgaatg

SEQ ID NO: 32520 - DNA, 13 bp, Artificial Sequence
  Oligonucleotide for detection of SNP TSC0010145
cattcataactac

SEQ ID NO: 32521 - DNA, 13 bp, Artificial Sequence
  Oligonucleotide for detection of SNP TSC0010146
tttagagtttagg

SEQ ID NO: 32522 - DNA, 13 bp, Artificial Sequence
  Oligonucleotide for detection of SNP TSC0010146
cctaaactctaaa

SEQ ID NO: 32523 - DNA, 13 bp, Artificial Sequence
  Oligonucleotide for detection of SNP TSC0010146
tttagaatttagg

SEQ ID NO: 32524 - DNA, 13 bp, Artificial Sequence
  Oligonucleotide for detection of SNP TSC0010146
cctaaattctaaa

SEQ ID NO: 32525 - DNA, 13 bp, Artificial Sequence
  Oligonucleotide for detection of SNP TSC0010147
tattatttgttta

SEQ ID NO: 32526 - DNA, 13 bp, Artificial Sequence
  Oligonucleotide for detection of SNP TSC0010147
taaacaaataata

SEQ ID NO: 32527 - DNA, 13 bp, Artificial Sequence
  Oligonucleotide for detection of SNP TSC0010147
tattatgtgttta

SEQ ID NO: 32528 - DNA, 13 bp, Artificial Sequence
  Oligonucleotide for detection of SNP TSC0010147
taaacacataata

SEQ ID NO: 32529 - DNA, 13 bp, Artificial Sequence
  Oligonucleotide for detection of SNP TSC0010147
taagtagatagtg

SEQ ID NO: 32530 - DNA, 13 bp, Artificial Sequence
  Oligonucleotide for detection of SNP TSC0010147
cactatctactta

SEQ ID NO: 32531 - DNA, 13 bp, Artificial Sequence
  Oligonucleotide for detection of SNP TSC0010147
taagtatatagtg

SEQ ID NO: 32532 - DNA, 13 bp, Artificial Sequence
  Oligonucleotide for detection of SNP TSC0010147
cactatatactta

SEQ ID NO: 32533 - DNA, 13 bp, Artificial Sequence
  Oligonucleotide for detection of SNP TSC0010151
ttataggtgaaty

SEQ ID NO: 32534 - DNA, 13 bp, Artificial Sequence
  Oligonucleotide for detection of SNP TSC0010151
rattcacctataa

SEQ ID NO: 32535 - DNA, 13 bp, Artificial Sequence
  Oligonucleotide for detection of SNP TSC0010151
ttatagatgaaty

SEQ ID NO: 32536 - DNA, 13 bp, Artificial Sequence
  Oligonucleotide for detection of SNP TSC0010151
rattcatctataa

SEQ ID NO: 32537 - DNA, 13 bp, Artificial Sequence
  Oligonucleotide for detection of SNP TSC0010152
ttgaaggattttg

SEQ ID NO: 32538 - DNA, 13 bp, Artificial Sequence
  Oligonucleotide for detection of SNP TSC0010152
caaaatccttcaa

SEQ ID NO: 32539 - DNA, 13 bp, Artificial Sequence
  Oligonucleotide for detection of SNP TSC0010152
ttgaagaattttg

SEQ ID NO: 32540 - DNA, 13 bp, Artificial Sequence
  Oligonucleotide for detection of SNP TSC0010152
caaaattcttcaa

SEQ ID NO: 32541 - DNA, 13 bp, Artificial Sequence
  Oligonucleotide for detection of SNP TSC0010155
ggttttgttattt

SEQ ID NO: 32542 - DNA, 13 bp, Artificial Sequence
  Oligonucleotide for detection of SNP TSC0010155
aaataacaaaacc

SEQ ID NO: 32543 - DNA, 13 bp, Artificial Sequence
  Oligonucleotide for detection of SNP TSC0010155
ggttttattattt

SEQ ID NO: 32544 - DNA, 13 bp, Artificial Sequence
  Oligonucleotide for detection of SNP TSC0010155
aaataataaaacc

SEQ ID NO: 32545 - DNA, 13 bp, Artificial Sequence
  Oligonucleotide for detection of SNP TSC0010156
tgaaggattgtga

SEQ ID NO: 32546 - DNA, 13 bp, Artificial Sequence
  Oligonucleotide for detection of SNP TSC0010156
tcacaatccttca

SEQ ID NO: 32547 - DNA, 13 bp, Artificial Sequence
  Oligonucleotide for detection of SNP TSC0010156
tgaagggttgtga

SEQ ID NO: 32548 - DNA, 13 bp, Artificial Sequence
  Oligonucleotide for detection of SNP TSC0010156
tcacaacccttca

SEQ ID NO: 32549 - DNA, 13 bp, Artificial Sequence
  Oligonucleotide for detection of SNP TSC0010156
cgaaggattgtga

SEQ ID NO: 32550 - DNA, 13 bp, Artificial Sequence
  Oligonucleotide for detection of SNP TSC0010156
tcacaatccttcg

SEQ ID NO: 32551 - DNA, 13 bp, Artificial Sequence
  Oligonucleotide for detection of SNP TSC0010156
cgaagggttgtga

SEQ ID NO: 32552 - DNA, 13 bp, Artificial Sequence
  Oligonucleotide for detection of SNP TSC0010156
tcacaacccttcg

SEQ ID NO: 32553 - DNA, 13 bp, Artificial Sequence
  Oligonucleotide for detection of SNP TSC0010157
tgaagaaaagtat

SEQ ID NO: 32554 - DNA, 13 bp, Artificial Sequence
  Oligonucleotide for detection of SNP TSC0010157
atacttttcttca

SEQ ID NO: 32555 - DNA, 13 bp, Artificial Sequence
  Oligonucleotide for detection of SNP TSC0010157
tgaagataagtat

SEQ ID NO: 32556 - DNA, 13 bp, Artificial Sequence
  Oligonucleotide for detection of SNP TSC0010157
atacttatcttca

SEQ ID NO: 32557 - DNA, 13 bp, Artificial Sequence
  Oligonucleotide for detection of SNP TSC0010157
atgttttttttta

SEQ ID NO: 32558 - DNA, 13 bp, Artificial Sequence
  Oligonucleotide for detection of SNP TSC0010157
taaaaaaaaacat

SEQ ID NO: 32559 - DNA, 13 bp, Artificial Sequence
  Oligonucleotide for detection of SNP TSC0010158
agaaaagatattt

SEQ ID NO: 32560 - DNA, 13 bp, Artificial Sequence
  Oligonucleotide for detection of SNP TSC0010158
aaatatcttttct

SEQ ID NO: 32561 - DNA, 13 bp, Artificial Sequence
  Oligonucleotide for detection of SNP TSC0010158
agaaaatatattt

SEQ ID NO: 32562 - DNA, 13 bp, Artificial Sequence
  Oligonucleotide for detection of SNP TSC0010158
aaatatattttct

SEQ ID NO: 32563 - DNA, 13 bp, Artificial Sequence
  Oligonucleotide for detection of SNP TSC0010158
aaatgtttttttt

SEQ ID NO: 32564 - DNA, 13 bp, Artificial Sequence
  Oligonucleotide for detection of SNP TSC0010158
aaaaaaaacattt

SEQ ID NO: 32565 - DNA, 13 bp, Artificial Sequence
  Oligonucleotide for detection of SNP TSC0010158
aaatgtatttttt

SEQ ID NO: 32566 - DNA, 13 bp, Artificial Sequence
  Oligonucleotide for detection of SNP TSC0010158
aaaaaatacattt

SEQ ID NO: 32567 - DNA, 13 bp, Artificial Sequence
  Oligonucleotide for detection of SNP TSC0010160
ttaaatattttat

SEQ ID NO: 32568 - DNA, 13 bp, Artificial Sequence
  Oligonucleotide for detection of SNP TSC0010160
ataaaatatttaa

SEQ ID NO: 32569 - DNA, 13 bp, Artificial Sequence
  Oligonucleotide for detection of SNP TSC0010160
ttaaatgttttat

SEQ ID NO: 32570 - DNA, 13 bp, Artificial Sequence
  Oligonucleotide for detection of SNP TSC0010160
ataaaacatttaa

SEQ ID NO: 32571 - DNA, 13 bp, Artificial Sequence
  Oligonucleotide for detection of SNP TSC0010163
aattggataatag

SEQ ID NO: 32572 - DNA, 13 bp, Artificial Sequence
  Oligonucleotide for detection of SNP TSC0010163
ctattatccaatt

SEQ ID NO: 32573 - DNA, 13 bp, Artificial Sequence
  Oligonucleotide for detection of SNP TSC0010163
aattgggtaatag

SEQ ID NO: 32574 - DNA, 13 bp, Artificial Sequence
  Oligonucleotide for detection of SNP TSC0010163
ctattacccaatt

SEQ ID NO: 32575 - DNA, 13 bp, Artificial Sequence
  Oligonucleotide for detection of SNP TSC0010164
taattagtacgga

SEQ ID NO: 32576 - DNA, 13 bp, Artificial Sequence
  Oligonucleotide for detection of SNP TSC0010164
tccgtactaatta

SEQ ID NO: 32577 - DNA, 13 bp, Artificial Sequence
  Oligonucleotide for detection of SNP TSC0010164
taattaatacgga

SEQ ID NO: 32578 - DNA, 13 bp, Artificial Sequence
  Oligonucleotide for detection of SNP TSC0010164
tccgtattaatta

SEQ ID NO: 32579 - DNA, 13 bp, Artificial Sequence
  Oligonucleotide for detection of SNP TSC0010165
gtgggaaggttgt

SEQ ID NO: 32580 - DNA, 13 bp, Artificial Sequence
  Oligonucleotide for detection of SNP TSC0010165
acaaccttcccac

SEQ ID NO: 32581 - DNA, 13 bp, Artificial Sequence
  Oligonucleotide for detection of SNP TSC0010165
gtgggagggttgt

SEQ ID NO: 32582 - DNA, 13 bp, Artificial Sequence
  Oligonucleotide for detection of SNP TSC0010165
acaaccctcccac

SEQ ID NO: 32583 - DNA, 13 bp, Artificial Sequence
  Oligonucleotide for detection of SNP TSC0010165
gtgggaaggtcgt

SEQ ID NO: 32584 - DNA, 13 bp, Artificial Sequence
  Oligonucleotide for detection of SNP TSC0010165
acgaccttcccac

SEQ ID NO: 32585 - DNA, 13 bp, Artificial Sequence
  Oligonucleotide for detection of SNP TSC0010165
gtgggagggtcgt

SEQ ID NO: 32586 - DNA, 13 bp, Artificial Sequence
  Oligonucleotide for detection of SNP TSC0010165
acgaccctcccac

SEQ ID NO: 32587 - DNA, 13 bp, Artificial Sequence
  Oligonucleotide for detection of SNP TSC0010172
gttttagtgattg

SEQ ID NO: 32588 - DNA, 13 bp, Artificial Sequence
  Oligonucleotide for detection of SNP TSC0010172
caatcactaaaac

SEQ ID NO: 32589 - DNA, 13 bp, Artificial Sequence
  Oligonucleotide for detection of SNP TSC0010172
gttttattgattg

SEQ ID NO: 32590 - DNA, 13 bp, Artificial Sequence
  Oligonucleotide for detection of SNP TSC0010172
caatcaataaaac

SEQ ID NO: 32591 - DNA, 13 bp, Artificial Sequence
  Oligonucleotide for detection of SNP TSC0010172
taattattagagy

SEQ ID NO: 32592 - DNA, 13 bp, Artificial Sequence
  Oligonucleotide for detection of SNP TSC0010172
rctctaataatta

SEQ ID NO: 32593 - DNA, 13 bp, Artificial Sequence
  Oligonucleotide for detection of SNP TSC0010172
taattaatagagy

SEQ ID NO: 32594 - DNA, 13 bp, Artificial Sequence
  Oligonucleotide for detection of SNP TSC0010172
rctctattaatta

SEQ ID NO: 32595 - DNA, 13 bp, Artificial Sequence
  Oligonucleotide for detection of SNP TSC0010180
attttaataatag

SEQ ID NO: 32596 - DNA, 13 bp, Artificial Sequence
  Oligonucleotide for detection of SNP TSC0010180
ctattattaaaat

SEQ ID NO: 32597 - DNA, 13 bp, Artificial Sequence
  Oligonucleotide for detection of SNP TSC0010180
attttagtaatag

SEQ ID NO: 32598 - DNA, 13 bp, Artificial Sequence
  Oligonucleotide for detection of SNP TSC0010180
ctattactaaaat

SEQ ID NO: 32599 - DNA, 13 bp, Artificial Sequence
  Oligonucleotide for detection of SNP TSC0010182
aattttaaatagt

SEQ ID NO: 32600 - DNA, 13 bp, Artificial Sequence
  Oligonucleotide for detection of SNP TSC0010182
actatttaaaatt

SEQ ID NO: 32601 - DNA, 13 bp, Artificial Sequence
  Oligonucleotide for detection of SNP TSC0010182
aattttgaatagt

SEQ ID NO: 32602 - DNA, 13 bp, Artificial Sequence
  Oligonucleotide for detection of SNP TSC0010182
actattcaaaatt

SEQ ID NO: 32603 - DNA, 13 bp, Artificial Sequence
  Oligonucleotide for detection of SNP TSC0010182
aatttcgaatagt

SEQ ID NO: 32604 - DNA, 13 bp, Artificial Sequence
  Oligonucleotide for detection of SNP TSC0010182
actattcgaaatt

SEQ ID NO: 32605 - DNA, 13 bp, Artificial Sequence
  Oligonucleotide for detection of SNP TSC0010182
attatttgaggtt

SEQ ID NO: 32606 - DNA, 13 bp, Artificial Sequence
  Oligonucleotide for detection of SNP TSC0010182
aacctcaaataat

SEQ ID NO: 32607 - DNA, 13 bp, Artificial Sequence
  Oligonucleotide for detection of SNP TSC0010182
attattcgaggtt

SEQ ID NO: 32608 - DNA, 13 bp, Artificial Sequence
  Oligonucleotide for detection of SNP TSC0010182
aacctcgaataat

SEQ ID NO: 32609 - DNA, 13 bp, Artificial Sequence
  Oligonucleotide for detection of SNP TSC0010183
tgatgggataggg

SEQ ID NO: 32610 - DNA, 13 bp, Artificial Sequence
  Oligonucleotide for detection of SNP TSC0010183
ccctatcccatca

SEQ ID NO: 32611 - DNA, 13 bp, Artificial Sequence
  Oligonucleotide for detection of SNP TSC0010183
tgatggaataggg

SEQ ID NO: 32612 - DNA, 13 bp, Artificial Sequence
  Oligonucleotide for detection of SNP TSC0010183
ccctattccatca

SEQ ID NO: 32613 - DNA, 13 bp, Artificial Sequence
  Oligonucleotide for detection of SNP TSC0010184
gtaatagttttaa

SEQ ID NO: 32614 - DNA, 13 bp, Artificial Sequence
  Oligonucleotide for detection of SNP TSC0010184
ttaaaactattac

SEQ ID NO: 32615 - DNA, 13 bp, Artificial Sequence
  Oligonucleotide for detection of SNP TSC0010184
gtaatatttttaa

SEQ ID NO: 32616 - DNA, 13 bp, Artificial Sequence
  Oligonucleotide for detection of SNP TSC0010184
ttaaaaatattac

SEQ ID NO: 32617 - DNA, 13 bp, Artificial Sequence
  Oligonucleotide for detection of SNP TSC0010184
ttgaaattgttgy

SEQ ID NO: 32618 - DNA, 13 bp, Artificial Sequence
  Oligonucleotide for detection of SNP TSC0010184
rcaacaatttcaa

SEQ ID NO: 32619 - DNA, 13 bp, Artificial Sequence
  Oligonucleotide for detection of SNP TSC0010184
ttgaaaatgttgy

SEQ ID NO: 32620 - DNA, 13 bp, Artificial Sequence
  Oligonucleotide for detection of SNP TSC0010184
rcaacattttcaa

SEQ ID NO: 32621 - DNA, 13 bp, Artificial Sequence
  Oligonucleotide for detection of SNP TSC0010185
ttggtgattggtt

SEQ ID NO: 32622 - DNA, 13 bp, Artificial Sequence
  Oligonucleotide for detection of SNP TSC0010185
aaccaatcaccaa

SEQ ID NO: 32623 - DNA, 13 bp, Artificial Sequence
  Oligonucleotide for detection of SNP TSC0010185
ttggtggttggtt

SEQ ID NO: 32624 - DNA, 13 bp, Artificial Sequence
  Oligonucleotide for detection of SNP TSC0010185
aaccaaccaccaa

SEQ ID NO: 32625 - DNA, 13 bp, Artificial Sequence
  Oligonucleotide for detection of SNP TSC0010185
tcggtgattggtt

SEQ ID NO: 32626 - DNA, 13 bp, Artificial Sequence
  Oligonucleotide for detection of SNP TSC0010185
aaccaatcaccga

SEQ ID NO: 32627 - DNA, 13 bp, Artificial Sequence
  Oligonucleotide for detection of SNP TSC0010185
tcggtggttggtt

SEQ ID NO: 32628 - DNA, 13 bp, Artificial Sequence
  Oligonucleotide for detection of SNP TSC0010185
aaccaaccaccga

SEQ ID NO: 32629 - DNA, 13 bp, Artificial Sequence
  Oligonucleotide for detection of SNP TSC0010190
atatgagtaggga

SEQ ID NO: 32630 - DNA, 13 bp, Artificial Sequence
  Oligonucleotide for detection of SNP TSC0010190
tccctactcatat

SEQ ID NO: 32631 - DNA, 13 bp, Artificial Sequence
  Oligonucleotide for detection of SNP TSC0010190
atatgaataggga

SEQ ID NO: 32632 - DNA, 13 bp, Artificial Sequence
  Oligonucleotide for detection of SNP TSC0010190
tccctattcatat

SEQ ID NO: 32633 - DNA, 13 bp, Artificial Sequence
  Oligonucleotide for detection of SNP TSC0010196
ttaagataattta

SEQ ID NO: 32634 - DNA, 13 bp, Artificial Sequence
  Oligonucleotide for detection of SNP TSC0010196
taaattatcttaa

SEQ ID NO: 32635 - DNA, 13 bp, Artificial Sequence
  Oligonucleotide for detection of SNP TSC0010196
ttaagagaattta

SEQ ID NO: 32636 - DNA, 13 bp, Artificial Sequence
  Oligonucleotide for detection of SNP TSC0010196
taaattctcttaa

SEQ ID NO: 32637 - DNA, 13 bp, Artificial Sequence
  Oligonucleotide for detection of SNP TSC0010196
tggattgttttga

SEQ ID NO: 32638 - DNA, 13 bp, Artificial Sequence
  Oligonucleotide for detection of SNP TSC0010196
tcaaaacaatcca

SEQ ID NO: 32639 - DNA, 13 bp, Artificial Sequence
  Oligonucleotide for detection of SNP TSC0010196
tggatttttttga

SEQ ID NO: 32640 - DNA, 13 bp, Artificial Sequence
  Oligonucleotide for detection of SNP TSC0010196
tcaaaaaaatcca

SEQ ID NO: 32641 - DNA, 13 bp, Artificial Sequence
  Oligonucleotide for detection of SNP TSC0010197
aaaaaataaaaty

SEQ ID NO: 32642 - DNA, 13 bp, Artificial Sequence
  Oligonucleotide for detection of SNP TSC0010197
rattttatttttt

SEQ ID NO: 32643 - DNA, 13 bp, Artificial Sequence
  Oligonucleotide for detection of SNP TSC0010197
ggttttttttttt

SEQ ID NO: 32644 - DNA, 13 bp, Artificial Sequence
  Oligonucleotide for detection of SNP TSC0010197
aaaaaaaaaaacc

SEQ ID NO: 32645 - DNA, 13 bp, Artificial Sequence
  Oligonucleotide for detection of SNP TSC0010202
ttaatgagttgty

SEQ ID NO: 32646 - DNA, 13 bp, Artificial Sequence
  Oligonucleotide for detection of SNP TSC0010202
racaactcattaa

SEQ ID NO: 32647 - DNA, 13 bp, Artificial Sequence
  Oligonucleotide for detection of SNP TSC0010202
ttaatgtgttgty

SEQ ID NO: 32648 - DNA, 13 bp, Artificial Sequence
  Oligonucleotide for detection of SNP TSC0010202
racaacacattaa

SEQ ID NO: 32649 - DNA, 13 bp, Artificial Sequence
  Oligonucleotide for detection of SNP TSC0010202
ttaatgcgttgty

SEQ ID NO: 32650 - DNA, 13 bp, Artificial Sequence
  Oligonucleotide for detection of SNP TSC0010202
racaacgcattaa

SEQ ID NO: 32651 - DNA, 13 bp, Artificial Sequence
  Oligonucleotide for detection of SNP TSC0010202
gataatttattgg

SEQ ID NO: 32652 - DNA, 13 bp, Artificial Sequence
  Oligonucleotide for detection of SNP TSC0010202
ccaataaattatc

SEQ ID NO: 32653 - DNA, 13 bp, Artificial Sequence
  Oligonucleotide for detection of SNP TSC0010202
gataatgtattgg

SEQ ID NO: 32654 - DNA, 13 bp, Artificial Sequence
  Oligonucleotide for detection of SNP TSC0010202
ccaatacattatc

SEQ ID NO: 32655 - DNA, 13 bp, Artificial Sequence
  Oligonucleotide for detection of SNP TSC0010202
gataacgtattgg

SEQ ID NO: 32656 - DNA, 13 bp, Artificial Sequence
  Oligonucleotide for detection of SNP TSC0010202
ccaatacgttatc

SEQ ID NO: 32657 - DNA, 13 bp, Artificial Sequence
  Oligonucleotide for detection of SNP TSC0010203
gattttatttttg

SEQ ID NO: 32658 - DNA, 13 bp, Artificial Sequence
  Oligonucleotide for detection of SNP TSC0010203
caaaaataaaatc

SEQ ID NO: 32659 - DNA, 13 bp, Artificial Sequence
  Oligonucleotide for detection of SNP TSC0010203
gattttgtttttg

SEQ ID NO: 32660 - DNA, 13 bp, Artificial Sequence
  Oligonucleotide for detection of SNP TSC0010203
caaaaacaaaatc

SEQ ID NO: 32661 - DNA, 13 bp, Artificial Sequence
  Oligonucleotide for detection of SNP TSC0010203
gatttcgtttttg

SEQ ID NO: 32662 - DNA, 13 bp, Artificial Sequence
  Oligonucleotide for detection of SNP TSC0010203
caaaaacgaaatc

SEQ ID NO: 32663 - DNA, 13 bp, Artificial Sequence
  Oligonucleotide for detection of SNP TSC0010203
tagagatggagty

SEQ ID NO: 32664 - DNA, 13 bp, Artificial Sequence
  Oligonucleotide for detection of SNP TSC0010203
ractccatctcta

SEQ ID NO: 32665 - DNA, 13 bp, Artificial Sequence
  Oligonucleotide for detection of SNP TSC0010203
tagagacggagty

SEQ ID NO: 32666 - DNA, 13 bp, Artificial Sequence
  Oligonucleotide for detection of SNP TSC0010203
ractccgtctcta

SEQ ID NO: 32667 - DNA, 13 bp, Artificial Sequence
  Oligonucleotide for detection of SNP TSC0010205
tttaaataatttt

SEQ ID NO: 32668 - DNA, 13 bp, Artificial Sequence
  Oligonucleotide for detection of SNP TSC0010205
aaaattatttaaa

SEQ ID NO: 32669 - DNA, 13 bp, Artificial Sequence
  Oligonucleotide for detection of SNP TSC0010205
tttaaagaatttt

SEQ ID NO: 32670 - DNA, 13 bp, Artificial Sequence
  Oligonucleotide for detection of SNP TSC0010205
aaaattctttaaa

SEQ ID NO: 32671 - DNA, 13 bp, Artificial Sequence
  Oligonucleotide for detection of SNP TSC0010205
aaaattgtttgag

SEQ ID NO: 32672 - DNA, 13 bp, Artificial Sequence
  Oligonucleotide for detection of SNP TSC0010205
ctcaaacaatttt

SEQ ID NO: 32673 - DNA, 13 bp, Artificial Sequence
  Oligonucleotide for detection of SNP TSC0010205
aaaattttttgag

SEQ ID NO: 32674 - DNA, 13 bp, Artificial Sequence
  Oligonucleotide for detection of SNP TSC0010205
ctcaaaaaatttt

SEQ ID NO: 32675 - DNA, 13 bp, Artificial Sequence
  Oligonucleotide for detection of SNP TSC0010212
ggtggggtaagag

SEQ ID NO: 32676 - DNA, 13 bp, Artificial Sequence
  Oligonucleotide for detection of SNP TSC0010212
ctcttaccccacc

SEQ ID NO: 32677 - DNA, 13 bp, Artificial Sequence
  Oligonucleotide for detection of SNP TSC0010212
ggtgggttaagag

SEQ ID NO: 32678 - DNA, 13 bp, Artificial Sequence
  Oligonucleotide for detection of SNP TSC0010212
ctcttaacccacc

SEQ ID NO: 32679 - DNA, 13 bp, Artificial Sequence
  Oligonucleotide for detection of SNP TSC0010212
tttttattttaty

SEQ ID NO: 32680 - DNA, 13 bp, Artificial Sequence
  Oligonucleotide for detection of SNP TSC0010212
rataaaataaaaa

SEQ ID NO: 32681 - DNA, 13 bp, Artificial Sequence
  Oligonucleotide for detection of SNP TSC0010212
tttttaatttaty

SEQ ID NO: 32682 - DNA, 13 bp, Artificial Sequence
  Oligonucleotide for detection of SNP TSC0010212
rataaattaaaaa

SEQ ID NO: 32683 - DNA, 13 bp, Artificial Sequence
  Oligonucleotide for detection of SNP TSC0010213
tggtagagggaty

SEQ ID NO: 32684 - DNA, 13 bp, Artificial Sequence
  Oligonucleotide for detection of SNP TSC0010213
ratccctctacca

SEQ ID NO: 32685 - DNA, 13 bp, Artificial Sequence
  Oligonucleotide for detection of SNP TSC0010213
tggtagggggaty

SEQ ID NO: 32686 - DNA, 13 bp, Artificial Sequence
  Oligonucleotide for detection of SNP TSC0010213
ratccccctacca

SEQ ID NO: 32687 - DNA, 13 bp, Artificial Sequence
  Oligonucleotide for detection of SNP TSC0010216
ttttttaaagttg

SEQ ID NO: 32688 - DNA, 13 bp, Artificial Sequence
  Oligonucleotide for detection of SNP TSC0010216
caactttaaaaaa

SEQ ID NO: 32689 - DNA, 13 bp, Artificial Sequence
  Oligonucleotide for detection of SNP TSC0010216
tttttttaagttg

SEQ ID NO: 32690 - DNA, 13 bp, Artificial Sequence
  Oligonucleotide for detection of SNP TSC0010216
caacttaaaaaaa

SEQ ID NO: 32691 - DNA, 13 bp, Artificial Sequence
  Oligonucleotide for detection of SNP TSC0010216
taattttaaaaaa

SEQ ID NO: 32692 - DNA, 13 bp, Artificial Sequence
  Oligonucleotide for detection of SNP TSC0010216
ttttttaaaatta

SEQ ID NO: 32693 - DNA, 13 bp, Artificial Sequence
  Oligonucleotide for detection of SNP TSC0010216
taatttaaaaaaa

SEQ ID NO: 32694 - DNA, 13 bp, Artificial Sequence
  Oligonucleotide for detection of SNP TSC0010216
tttttttaaatta

SEQ ID NO: 32695 - DNA, 13 bp, Artificial Sequence
  Oligonucleotide for detection of SNP TSC0010222
agttaatgttgga

SEQ ID NO: 32696 - DNA, 13 bp, Artificial Sequence
  Oligonucleotide for detection of SNP TSC0010222
tccaacattaact

SEQ ID NO: 32697 - DNA, 13 bp, Artificial Sequence
  Oligonucleotide for detection of SNP TSC0010222
agttaacgttgga

SEQ ID NO: 32698 - DNA, 13 bp, Artificial Sequence
  Oligonucleotide for detection of SNP TSC0010222
tccaacgttaact

SEQ ID NO: 32699 - DNA, 13 bp, Artificial Sequence
  Oligonucleotide for detection of SNP TSC0010222
tttagtgttaatt

SEQ ID NO: 32700 - DNA, 13 bp, Artificial Sequence
  Oligonucleotide for detection of SNP TSC0010222
aattaacactaaa

SEQ ID NO: 32701 - DNA, 13 bp, Artificial Sequence
  Oligonucleotide for detection of SNP TSC0010222
tttagcgttaatt

SEQ ID NO: 32702 - DNA, 13 bp, Artificial Sequence
  Oligonucleotide for detection of SNP TSC0010222
aattaacgctaaa

SEQ ID NO: 32703 - DNA, 13 bp, Artificial Sequence
  Oligonucleotide for detection of SNP TSC0010227
ttttttattagty

SEQ ID NO: 32704 - DNA, 13 bp, Artificial Sequence
  Oligonucleotide for detection of SNP TSC0010227
ractaataaaaaa

SEQ ID NO: 32705 - DNA, 13 bp, Artificial Sequence
  Oligonucleotide for detection of SNP TSC0010227
tttttttttagty

SEQ ID NO: 32706 - DNA, 13 bp, Artificial Sequence
  Oligonucleotide for detection of SNP TSC0010227
ractaaaaaaaaa

SEQ ID NO: 32707 - DNA, 13 bp, Artificial Sequence
  Oligonucleotide for detection of SNP TSC0010227
ggttagtggggag

SEQ ID NO: 32708 - DNA, 13 bp, Artificial Sequence
  Oligonucleotide for detection of SNP TSC0010227
ctccccactaacc

SEQ ID NO: 32709 - DNA, 13 bp, Artificial Sequence
  Oligonucleotide for detection of SNP TSC0010227
ggttaggggggag

SEQ ID NO: 32710 - DNA, 13 bp, Artificial Sequence
  Oligonucleotide for detection of SNP TSC0010227
ctcccccctaacc

SEQ ID NO: 32711 - DNA, 13 bp, Artificial Sequence
  Oligonucleotide for detection of SNP TSC0010233
gtagatgtgtata

SEQ ID NO: 32712 - DNA, 13 bp, Artificial Sequence
  Oligonucleotide for detection of SNP TSC0010233
tatacacatctac

SEQ ID NO: 32713 - DNA, 13 bp, Artificial Sequence
  Oligonucleotide for detection of SNP TSC0010233
gtagatttgtata

SEQ ID NO: 32714 - DNA, 13 bp, Artificial Sequence
  Oligonucleotide for detection of SNP TSC0010233
tatacaaatctac

SEQ ID NO: 32715 - DNA, 13 bp, Artificial Sequence
  Oligonucleotide for detection of SNP TSC0010233
tgtgtatatttgy

SEQ ID NO: 32716 - DNA, 13 bp, Artificial Sequence
  Oligonucleotide for detection of SNP TSC0010233
rcaaatatacaca

SEQ ID NO: 32717 - DNA, 13 bp, Artificial Sequence
  Oligonucleotide for detection of SNP TSC0010233
tgtgtaaatttgy

SEQ ID NO: 32718 - DNA, 13 bp, Artificial Sequence
  Oligonucleotide for detection of SNP TSC0010233
rcaaatttacaca

SEQ ID NO: 32719 - DNA, 13 bp, Artificial Sequence
  Oligonucleotide for detection of SNP TSC0010235
ttattagaagtat

SEQ ID NO: 32720 - DNA, 13 bp, Artificial Sequence
  Oligonucleotide for detection of SNP TSC0010235
atacttctaataa

SEQ ID NO: 32721 - DNA, 13 bp, Artificial Sequence
  Oligonucleotide for detection of SNP TSC0010235
ttattaaaagtat

SEQ ID NO: 32722 - DNA, 13 bp, Artificial Sequence
  Oligonucleotide for detection of SNP TSC0010235
atacttttaataa

SEQ ID NO: 32723 - DNA, 13 bp, Artificial Sequence
  Oligonucleotide for detection of SNP TSC0010237
tttggtatatatt

SEQ ID NO: 32724 - DNA, 13 bp, Artificial Sequence
  Oligonucleotide for detection of SNP TSC0010237
aatatataccaaa

SEQ ID NO: 32725 - DNA, 13 bp, Artificial Sequence
  Oligonucleotide for detection of SNP TSC0010237
tttggtgtatatt

SEQ ID NO: 32726 - DNA, 13 bp, Artificial Sequence
  Oligonucleotide for detection of SNP TSC0010237
aatatacaccaaa

SEQ ID NO: 32727 - DNA, 13 bp, Artificial Sequence
  Oligonucleotide for detection of SNP TSC0010237
tttggcgtatatt

SEQ ID NO: 32728 - DNA, 13 bp, Artificial Sequence
  Oligonucleotide for detection of SNP TSC0010237
aatatacgccaaa

SEQ ID NO: 32729 - DNA, 13 bp, Artificial Sequence
  Oligonucleotide for detection of SNP TSC0010237
agtgtatgttaaa

SEQ ID NO: 32730 - DNA, 13 bp, Artificial Sequence
  Oligonucleotide for detection of SNP TSC0010237
tttaacatacact

SEQ ID NO: 32731 - DNA, 13 bp, Artificial Sequence
  Oligonucleotide for detection of SNP TSC0010237
agtgtacgttaaa

SEQ ID NO: 32732 - DNA, 13 bp, Artificial Sequence
  Oligonucleotide for detection of SNP TSC0010237
tttaacgtacact

SEQ ID NO: 32733 - DNA, 13 bp, Artificial Sequence
  Oligonucleotide for detection of SNP TSC0010239
gtagttatggttg

SEQ ID NO: 32734 - DNA, 13 bp, Artificial Sequence
  Oligonucleotide for detection of SNP TSC0010239
caaccataactac

SEQ ID NO: 32735 - DNA, 13 bp, Artificial Sequence
  Oligonucleotide for detection of SNP TSC0010239
gtagttgtggttg

SEQ ID NO: 32736 - DNA, 13 bp, Artificial Sequence
  Oligonucleotide for detection of SNP TSC0010239
caaccacaactac

SEQ ID NO: 32737 - DNA, 13 bp, Artificial Sequence
  Oligonucleotide for detection of SNP TSC0010239
gtagtcgtggttg

SEQ ID NO: 32738 - DNA, 13 bp, Artificial Sequence
  Oligonucleotide for detection of SNP TSC0010239
caaccacgactac

SEQ ID NO: 32739 - DNA, 13 bp, Artificial Sequence
  Oligonucleotide for detection of SNP TSC0010239
tagttatgattgy

SEQ ID NO: 32740 - DNA, 13 bp, Artificial Sequence
  Oligonucleotide for detection of SNP TSC0010239
rcaatcataacta

SEQ ID NO: 32741 - DNA, 13 bp, Artificial Sequence
  Oligonucleotide for detection of SNP TSC0010239
tagttacgattgy

SEQ ID NO: 32742 - DNA, 13 bp, Artificial Sequence
  Oligonucleotide for detection of SNP TSC0010239
rcaatcgtaacta

SEQ ID NO: 32743 - DNA, 13 bp, Artificial Sequence
  Oligonucleotide for detection of SNP TSC0010243
tttgtggatttag

SEQ ID NO: 32744 - DNA, 13 bp, Artificial Sequence
  Oligonucleotide for detection of SNP TSC0010243
ctaaatccacaaa

SEQ ID NO: 32745 - DNA, 13 bp, Artificial Sequence
  Oligonucleotide for detection of SNP TSC0010243
tttgtgaatttag

SEQ ID NO: 32746 - DNA, 13 bp, Artificial Sequence
  Oligonucleotide for detection of SNP TSC0010243
ctaaattcacaaa

SEQ ID NO: 32747 - DNA, 13 bp, Artificial Sequence
  Oligonucleotide for detection of SNP TSC0010243
ttcgtggatttag

SEQ ID NO: 32748 - DNA, 13 bp, Artificial Sequence
  Oligonucleotide for detection of SNP TSC0010243
ctaaatccacgaa

SEQ ID NO: 32749 - DNA, 13 bp, Artificial Sequence
  Oligonucleotide for detection of SNP TSC0010243
ttcgtgaatttag

SEQ ID NO: 32750 - DNA, 13 bp, Artificial Sequence
  Oligonucleotide for detection of SNP TSC0010243
ctaaattcacgaa

SEQ ID NO: 32751 - DNA, 13 bp, Artificial Sequence
  Oligonucleotide for detection of SNP TSC0010245
gtttattgtttty

SEQ ID NO: 32752 - DNA, 13 bp, Artificial Sequence
  Oligonucleotide for detection of SNP TSC0010245
raaaacaataaac

SEQ ID NO: 32753 - DNA, 13 bp, Artificial Sequence
  Oligonucleotide for detection of SNP TSC0010245
gtttatcgtttty

SEQ ID NO: 32754 - DNA, 13 bp, Artificial Sequence
  Oligonucleotide for detection of SNP TSC0010245
raaaacgataaac

SEQ ID NO: 32755 - DNA, 13 bp, Artificial Sequence
  Oligonucleotide for detection of SNP TSC0010245
ggaagtggtgaay

SEQ ID NO: 32756 - DNA, 13 bp, Artificial Sequence
  Oligonucleotide for detection of SNP TSC0010245
rttcaccacttcc

SEQ ID NO: 32757 - DNA, 13 bp, Artificial Sequence
  Oligonucleotide for detection of SNP TSC0010245
ggaagtagtgaay

SEQ ID NO: 32758 - DNA, 13 bp, Artificial Sequence
  Oligonucleotide for detection of SNP TSC0010245
rttcactacttcc

SEQ ID NO: 32759 - DNA, 13 bp, Artificial Sequence
  Oligonucleotide for detection of SNP TSC0010245
ggaagcggtgaay

SEQ ID NO: 32760 - DNA, 13 bp, Artificial Sequence
  Oligonucleotide for detection of SNP TSC0010245
rttcaccgcttcc

SEQ ID NO: 32761 - DNA, 13 bp, Artificial Sequence
  Oligonucleotide for detection of SNP TSC0010252
gaaagtgtttttg

SEQ ID NO: 32762 - DNA, 13 bp, Artificial Sequence
  Oligonucleotide for detection of SNP TSC0010252
caaaaacactttc

SEQ ID NO: 32763 - DNA, 13 bp, Artificial Sequence
  Oligonucleotide for detection of SNP TSC0010252
gaaagtatttttg

SEQ ID NO: 32764 - DNA, 13 bp, Artificial Sequence
  Oligonucleotide for detection of SNP TSC0010252
caaaaatactttc

SEQ ID NO: 32765 - DNA, 13 bp, Artificial Sequence
  Oligonucleotide for detection of SNP TSC0010253
tttattatgttty

SEQ ID NO: 32766 - DNA, 13 bp, Artificial Sequence
  Oligonucleotide for detection of SNP TSC0010253
raaacataataaa

SEQ ID NO: 32767 - DNA, 13 bp, Artificial Sequence
  Oligonucleotide for detection of SNP TSC0010253
tttattgtgttty

SEQ ID NO: 32768 - DNA, 13 bp, Artificial Sequence
  Oligonucleotide for detection of SNP TSC0010253
raaacacaataaa

SEQ ID NO: 32769 - DNA, 13 bp, Artificial Sequence
  Oligonucleotide for detection of SNP TSC0010272
aaaggaaggtatt

SEQ ID NO: 32770 - DNA, 13 bp, Artificial Sequence
  Oligonucleotide for detection of SNP TSC0010272
aataccttccttt

SEQ ID NO: 32771 - DNA, 13 bp, Artificial Sequence
  Oligonucleotide for detection of SNP TSC0010272
aaaggagggtatt

SEQ ID NO: 32772 - DNA, 13 bp, Artificial Sequence
  Oligonucleotide for detection of SNP TSC0010272
aataccctccttt

SEQ ID NO: 32773 - DNA, 13 bp, Artificial Sequence
  Oligonucleotide for detection of SNP TSC0010275
gatttggggtaaa

SEQ ID NO: 32774 - DNA, 13 bp, Artificial Sequence
  Oligonucleotide for detection of SNP TSC0010275
tttaccccaaatc

SEQ ID NO: 32775 - DNA, 13 bp, Artificial Sequence
  Oligonucleotide for detection of SNP TSC0010275
gatttgaggtaaa

SEQ ID NO: 32776 - DNA, 13 bp, Artificial Sequence
  Oligonucleotide for detection of SNP TSC0010275
tttacctcaaatc

SEQ ID NO: 32777 - DNA, 13 bp, Artificial Sequence
  Oligonucleotide for detection of SNP TSC0010281
ttgagggaatttg

SEQ ID NO: 32778 - DNA, 13 bp, Artificial Sequence
  Oligonucleotide for detection of SNP TSC0010281
caaattccctcaa

SEQ ID NO: 32779 - DNA, 13 bp, Artificial Sequence
  Oligonucleotide for detection of SNP TSC0010281
ttgaggaaatttg

SEQ ID NO: 32780 - DNA, 13 bp, Artificial Sequence
  Oligonucleotide for detection of SNP TSC0010281
caaatttcctcaa

SEQ ID NO: 32781 - DNA, 13 bp, Artificial Sequence
  Oligonucleotide for detection of SNP TSC0010282
tttgttattgaga

SEQ ID NO: 32782 - DNA, 13 bp, Artificial Sequence
  Oligonucleotide for detection of SNP TSC0010282
tctcaataacaaa

SEQ ID NO: 32783 - DNA, 13 bp, Artificial Sequence
  Oligonucleotide for detection of SNP TSC0010282
tttgttgttgaga

SEQ ID NO: 32784 - DNA, 13 bp, Artificial Sequence
  Oligonucleotide for detection of SNP TSC0010282
tctcaacaacaaa

SEQ ID NO: 32785 - DNA, 13 bp, Artificial Sequence
  Oligonucleotide for detection of SNP TSC0010284
tttttcgttttag

SEQ ID NO: 32786 - DNA, 13 bp, Artificial Sequence
  Oligonucleotide for detection of SNP TSC0010284
ctaaaacgaaaaa

SEQ ID NO: 32787 - DNA, 13 bp, Artificial Sequence
  Oligonucleotide for detection of SNP TSC0010284
ttgaggtgggagg

SEQ ID NO: 32788 - DNA, 13 bp, Artificial Sequence
  Oligonucleotide for detection of SNP TSC0010284
cctcccacctcaa

SEQ ID NO: 32789 - DNA, 13 bp, Artificial Sequence
  Oligonucleotide for detection of SNP TSC0010284
ttgaggcgggagg

SEQ ID NO: 32790 - DNA, 13 bp, Artificial Sequence
  Oligonucleotide for detection of SNP TSC0010284
cctcccgcctcaa

SEQ ID NO: 32791 - DNA, 13 bp, Artificial Sequence
  Oligonucleotide for detection of SNP TSC0010286
attaatgttttta

SEQ ID NO: 32792 - DNA, 13 bp, Artificial Sequence
  Oligonucleotide for detection of SNP TSC0010286
taaaaacattaat

SEQ ID NO: 32793 - DNA, 13 bp, Artificial Sequence
  Oligonucleotide for detection of SNP TSC0010286
attaatattttta

SEQ ID NO: 32794 - DNA, 13 bp, Artificial Sequence
  Oligonucleotide for detection of SNP TSC0010286
taaaaatattaat

SEQ ID NO: 32795 - DNA, 13 bp, Artificial Sequence
  Oligonucleotide for detection of SNP TSC0010296
ttttattgattag

SEQ ID NO: 32796 - DNA, 13 bp, Artificial Sequence
  Oligonucleotide for detection of SNP TSC0010296
ctaatcaataaaa

SEQ ID NO: 32797 - DNA, 13 bp, Artificial Sequence
  Oligonucleotide for detection of SNP TSC0010296
ttttatcgattag

SEQ ID NO: 32798 - DNA, 13 bp, Artificial Sequence
  Oligonucleotide for detection of SNP TSC0010296
ctaatcgataaaa

SEQ ID NO: 32799 - DNA, 13 bp, Artificial Sequence
  Oligonucleotide for detection of SNP TSC0010296
ttgattgatgggg

SEQ ID NO: 32800 - DNA, 13 bp, Artificial Sequence
  Oligonucleotide for detection of SNP TSC0010296
ccccatcaatcaa

SEQ ID NO: 32801 - DNA, 13 bp, Artificial Sequence
  Oligonucleotide for detection of SNP TSC0010296
ttgattaatgggg

SEQ ID NO: 32802 - DNA, 13 bp, Artificial Sequence
  Oligonucleotide for detection of SNP TSC0010296
ccccattaatcaa

SEQ ID NO: 32803 - DNA, 13 bp, Artificial Sequence
  Oligonucleotide for detection of SNP TSC0010296
ttgatcgatgggg

SEQ ID NO: 32804 - DNA, 13 bp, Artificial Sequence
  Oligonucleotide for detection of SNP TSC0010296
ccccatcgatcaa

SEQ ID NO: 32805 - DNA, 13 bp, Artificial Sequence
  Oligonucleotide for detection of SNP TSC0010297
tttttaaaagtta

SEQ ID NO: 32806 - DNA, 13 bp, Artificial Sequence
  Oligonucleotide for detection of SNP TSC0010297
taacttttaaaaa

SEQ ID NO: 32807 - DNA, 13 bp, Artificial Sequence
  Oligonucleotide for detection of SNP TSC0010297
tttttataagtta

SEQ ID NO: 32808 - DNA, 13 bp, Artificial Sequence
  Oligonucleotide for detection of SNP TSC0010297
taacttataaaaa

SEQ ID NO: 32809 - DNA, 13 bp, Artificial Sequence
  Oligonucleotide for detection of SNP TSC0010297
taatttttggaag

SEQ ID NO: 32810 - DNA, 13 bp, Artificial Sequence
  Oligonucleotide for detection of SNP TSC0010297
cttccaaaaatta

SEQ ID NO: 32811 - DNA, 13 bp, Artificial Sequence
  Oligonucleotide for detection of SNP TSC0010297
taatttatggaag

SEQ ID NO: 32812 - DNA, 13 bp, Artificial Sequence
  Oligonucleotide for detection of SNP TSC0010297
cttccataaatta

SEQ ID NO: 32813 - DNA, 13 bp, Artificial Sequence
  Oligonucleotide for detection of SNP TSC0010303
agtgaataagagg

SEQ ID NO: 32814 - DNA, 13 bp, Artificial Sequence
  Oligonucleotide for detection of SNP TSC0010303
cctcttattcact

SEQ ID NO: 32815 - DNA, 13 bp, Artificial Sequence
  Oligonucleotide for detection of SNP TSC0010303
agtgaagaagagg

SEQ ID NO: 32816 - DNA, 13 bp, Artificial Sequence
  Oligonucleotide for detection of SNP TSC0010303
cctcttcttcact

SEQ ID NO: 32817 - DNA, 13 bp, Artificial Sequence
  Oligonucleotide for detection of SNP TSC0010303
agcgaataagagg

SEQ ID NO: 32818 - DNA, 13 bp, Artificial Sequence
  Oligonucleotide for detection of SNP TSC0010303
cctcttattcgct

SEQ ID NO: 32819 - DNA, 13 bp, Artificial Sequence
  Oligonucleotide for detection of SNP TSC0010303
agcgaagaagagg

SEQ ID NO: 32820 - DNA, 13 bp, Artificial Sequence
  Oligonucleotide for detection of SNP TSC0010303
cctcttcttcgct

SEQ ID NO: 32821 - DNA, 13 bp, Artificial Sequence
  Oligonucleotide for detection of SNP TSC0010303
ttttttttttgtt

SEQ ID NO: 32822 - DNA, 13 bp, Artificial Sequence
  Oligonucleotide for detection of SNP TSC0010303
aacaaaaaaaaaa

SEQ ID NO: 32823 - DNA, 13 bp, Artificial Sequence
  Oligonucleotide for detection of SNP TSC0010303
ttttttgttcgtt

SEQ ID NO: 32824 - DNA, 13 bp, Artificial Sequence
  Oligonucleotide for detection of SNP TSC0010303
aacgaacaaaaaa

SEQ ID NO: 32825 - DNA, 13 bp, Artificial Sequence
  Oligonucleotide for detection of SNP TSC0010303
tttttttttcgtt

SEQ ID NO: 32826 - DNA, 13 bp, Artificial Sequence
  Oligonucleotide for detection of SNP TSC0010303
aacgaaaaaaaaa

SEQ ID NO: 32827 - DNA, 13 bp, Artificial Sequence
  Oligonucleotide for detection of SNP TSC0010304
gtgatttagatta

SEQ ID NO: 32828 - DNA, 13 bp, Artificial Sequence
  Oligonucleotide for detection of SNP TSC0010304
taatctaaatcac

SEQ ID NO: 32829 - DNA, 13 bp, Artificial Sequence
  Oligonucleotide for detection of SNP TSC0010304
gtgattgagatta

SEQ ID NO: 32830 - DNA, 13 bp, Artificial Sequence
  Oligonucleotide for detection of SNP TSC0010304
taatctcaatcac

SEQ ID NO: 32831 - DNA, 13 bp, Artificial Sequence
  Oligonucleotide for detection of SNP TSC0010304
taatttgagttay

SEQ ID NO: 32832 - DNA, 13 bp, Artificial Sequence
  Oligonucleotide for detection of SNP TSC0010304
rtaactcaaatta

SEQ ID NO: 32833 - DNA, 13 bp, Artificial Sequence
  Oligonucleotide for detection of SNP TSC0010304
taattttagttay

SEQ ID NO: 32834 - DNA, 13 bp, Artificial Sequence
  Oligonucleotide for detection of SNP TSC0010304
rtaactaaaatta

SEQ ID NO: 32835 - DNA, 13 bp, Artificial Sequence
  Oligonucleotide for detection of SNP TSC0010305
aataatattattt

SEQ ID NO: 32836 - DNA, 13 bp, Artificial Sequence
  Oligonucleotide for detection of SNP TSC0010305
aaataatattatt

SEQ ID NO: 32837 - DNA, 13 bp, Artificial Sequence
  Oligonucleotide for detection of SNP TSC0010305
aataatgttattt

SEQ ID NO: 32838 - DNA, 13 bp, Artificial Sequence
  Oligonucleotide for detection of SNP TSC0010305
aaataacattatt

SEQ ID NO: 32839 - DNA, 13 bp, Artificial Sequence
  Oligonucleotide for detection of SNP TSC0010305
aataacgttattt

SEQ ID NO: 32840 - DNA, 13 bp, Artificial Sequence
  Oligonucleotide for detection of SNP TSC0010305
aaataacgttatt

SEQ ID NO: 32841 - DNA, 13 bp, Artificial Sequence
  Oligonucleotide for detection of SNP TSC0010305
aggtgatgttatt

SEQ ID NO: 32842 - DNA, 13 bp, Artificial Sequence
  Oligonucleotide for detection of SNP TSC0010305
aataacatcacct

SEQ ID NO: 32843 - DNA, 13 bp, Artificial Sequence
  Oligonucleotide for detection of SNP TSC0010305
aggtgacgttatt

SEQ ID NO: 32844 - DNA, 13 bp, Artificial Sequence
  Oligonucleotide for detection of SNP TSC0010305
aataacgtcacct

SEQ ID NO: 32845 - DNA, 13 bp, Artificial Sequence
  Oligonucleotide for detection of SNP TSC0010306
aggtataatatta

SEQ ID NO: 32846 - DNA, 13 bp, Artificial Sequence
  Oligonucleotide for detection of SNP TSC0010306
taatattatacct

SEQ ID NO: 32847 - DNA, 13 bp, Artificial Sequence
  Oligonucleotide for detection of SNP TSC0010306
aggtatgatatta

SEQ ID NO: 32848 - DNA, 13 bp, Artificial Sequence
  Oligonucleotide for detection of SNP TSC0010306
taatatcatacct

SEQ ID NO: 32849 - DNA, 13 bp, Artificial Sequence
  Oligonucleotide for detection of SNP TSC0010306
aggtacgatatta

SEQ ID NO: 32850 - DNA, 13 bp, Artificial Sequence
  Oligonucleotide for detection of SNP TSC0010306
taatatcgtacct

SEQ ID NO: 32851 - DNA, 13 bp, Artificial Sequence
  Oligonucleotide for detection of SNP TSC0010306
taatattgtgttt

SEQ ID NO: 32852 - DNA, 13 bp, Artificial Sequence
  Oligonucleotide for detection of SNP TSC0010306
aaacacaatatta

SEQ ID NO: 32853 - DNA, 13 bp, Artificial Sequence
  Oligonucleotide for detection of SNP TSC0010306
taatatcgtgttt

SEQ ID NO: 32854 - DNA, 13 bp, Artificial Sequence
  Oligonucleotide for detection of SNP TSC0010306
aaacacgatatta

SEQ ID NO: 32855 - DNA, 13 bp, Artificial Sequence
  Oligonucleotide for detection of SNP TSC0010307
ttaggaggagata

SEQ ID NO: 32856 - DNA, 13 bp, Artificial Sequence
  Oligonucleotide for detection of SNP TSC0010307
tatctcctcctaa

SEQ ID NO: 32857 - DNA, 13 bp, Artificial Sequence
  Oligonucleotide for detection of SNP TSC0010307
ttaggaagagata

SEQ ID NO: 32858 - DNA, 13 bp, Artificial Sequence
  Oligonucleotide for detection of SNP TSC0010307
tatctcttcctaa

SEQ ID NO: 32859 - DNA, 13 bp, Artificial Sequence
  Oligonucleotide for detection of SNP TSC0010311
gttttttggggty

SEQ ID NO: 32860 - DNA, 13 bp, Artificial Sequence
  Oligonucleotide for detection of SNP TSC0010311
raccccaaaaaac

SEQ ID NO: 32861 - DNA, 13 bp, Artificial Sequence
  Oligonucleotide for detection of SNP TSC0010311
gtttttcggggty

SEQ ID NO: 32862 - DNA, 13 bp, Artificial Sequence
  Oligonucleotide for detection of SNP TSC0010311
raccccgaaaaac

SEQ ID NO: 32863 - DNA, 13 bp, Artificial Sequence
  Oligonucleotide for detection of SNP TSC0010311
ggttttggaggay

SEQ ID NO: 32864 - DNA, 13 bp, Artificial Sequence
  Oligonucleotide for detection of SNP TSC0010311
rtcctccaaaacc

SEQ ID NO: 32865 - DNA, 13 bp, Artificial Sequence
  Oligonucleotide for detection of SNP TSC0010311
ggttttagaggay

SEQ ID NO: 32866 - DNA, 13 bp, Artificial Sequence
  Oligonucleotide for detection of SNP TSC0010311
rtcctctaaaacc

SEQ ID NO: 32867 - DNA, 13 bp, Artificial Sequence
  Oligonucleotide for detection of SNP TSC0010311
ggtttcggaggay

SEQ ID NO: 32868 - DNA, 13 bp, Artificial Sequence
  Oligonucleotide for detection of SNP TSC0010311
rtcctccgaaacc

SEQ ID NO: 32869 - DNA, 13 bp, Artificial Sequence
  Oligonucleotide for detection of SNP TSC0010326
tagaagattgagt

SEQ ID NO: 32870 - DNA, 13 bp, Artificial Sequence
  Oligonucleotide for detection of SNP TSC0010326
actcaatcttcta

SEQ ID NO: 32871 - DNA, 13 bp, Artificial Sequence
  Oligonucleotide for detection of SNP TSC0010326
tagaaggttgagt

SEQ ID NO: 32872 - DNA, 13 bp, Artificial Sequence
  Oligonucleotide for detection of SNP TSC0010326
actcaaccttcta

SEQ ID NO: 32873 - DNA, 13 bp, Artificial Sequence
  Oligonucleotide for detection of SNP TSC0010328
gagagtagataty

SEQ ID NO: 32874 - DNA, 13 bp, Artificial Sequence
  Oligonucleotide for detection of SNP TSC0010328
ratatctactctc

SEQ ID NO: 32875 - DNA, 13 bp, Artificial Sequence
  Oligonucleotide for detection of SNP TSC0010328
gagagtggataty

SEQ ID NO: 32876 - DNA, 13 bp, Artificial Sequence
  Oligonucleotide for detection of SNP TSC0010328
ratatccactctc

SEQ ID NO: 32877 - DNA, 13 bp, Artificial Sequence
  Oligonucleotide for detection of SNP TSC0010329
tttagtggtttty

SEQ ID NO: 32878 - DNA, 13 bp, Artificial Sequence
  Oligonucleotide for detection of SNP TSC0010329
raaaaccactaaa

SEQ ID NO: 32879 - DNA, 13 bp, Artificial Sequence
  Oligonucleotide for detection of SNP TSC0010329
tttagtagtttty

SEQ ID NO: 32880 - DNA, 13 bp, Artificial Sequence
  Oligonucleotide for detection of SNP TSC0010329
raaaactactaaa

SEQ ID NO: 32881 - DNA, 13 bp, Artificial Sequence
  Oligonucleotide for detection of SNP TSC0010330
aggttattatatt

SEQ ID NO: 32882 - DNA, 13 bp, Artificial Sequence
  Oligonucleotide for detection of SNP TSC0010330
aatataataacct

SEQ ID NO: 32883 - DNA, 13 bp, Artificial Sequence
  Oligonucleotide for detection of SNP TSC0010330
aggttagtatatt

SEQ ID NO: 32884 - DNA, 13 bp, Artificial Sequence
  Oligonucleotide for detection of SNP TSC0010330
aatatactaacct

SEQ ID NO: 32885 - DNA, 13 bp, Artificial Sequence
  Oligonucleotide for detection of SNP TSC0010330
aatatggtgattt

SEQ ID NO: 32886 - DNA, 13 bp, Artificial Sequence
  Oligonucleotide for detection of SNP TSC0010330
aaatcaccatatt

SEQ ID NO: 32887 - DNA, 13 bp, Artificial Sequence
  Oligonucleotide for detection of SNP TSC0010330
aatatgttgattt

SEQ ID NO: 32888 - DNA, 13 bp, Artificial Sequence
  Oligonucleotide for detection of SNP TSC0010330
aaatcaacatatt

SEQ ID NO: 32889 - DNA, 13 bp, Artificial Sequence
  Oligonucleotide for detection of SNP TSC0010331
tgttttgttttta

SEQ ID NO: 32890 - DNA, 13 bp, Artificial Sequence
  Oligonucleotide for detection of SNP TSC0010331
taaaaacaaaaca

SEQ ID NO: 32891 - DNA, 13 bp, Artificial Sequence
  Oligonucleotide for detection of SNP TSC0010331
tgttttattttta

SEQ ID NO: 32892 - DNA, 13 bp, Artificial Sequence
  Oligonucleotide for detection of SNP TSC0010331
taaaaataaaaca

SEQ ID NO: 32893 - DNA, 13 bp, Artificial Sequence
  Oligonucleotide for detection of SNP TSC0010368
aaataaattttga

SEQ ID NO: 32894 - DNA, 13 bp, Artificial Sequence
  Oligonucleotide for detection of SNP TSC0010368
tcaaaatttattt

SEQ ID NO: 32895 - DNA, 13 bp, Artificial Sequence
  Oligonucleotide for detection of SNP TSC0010368
aaataagttttga

SEQ ID NO: 32896 - DNA, 13 bp, Artificial Sequence
  Oligonucleotide for detection of SNP TSC0010368
tcaaaacttattt

SEQ ID NO: 32897 - DNA, 13 bp, Artificial Sequence
  Oligonucleotide for detection of SNP TSC0010369
ttagtaatttggg

SEQ ID NO: 32898 - DNA, 13 bp, Artificial Sequence
  Oligonucleotide for detection of SNP TSC0010369
cccaaattactaa

SEQ ID NO: 32899 - DNA, 13 bp, Artificial Sequence
  Oligonucleotide for detection of SNP TSC0010369
ttagtattttggg

SEQ ID NO: 32900 - DNA, 13 bp, Artificial Sequence
  Oligonucleotide for detection of SNP TSC0010369
cccaaaatactaa

SEQ ID NO: 32901 - DNA, 13 bp, Artificial Sequence
  Oligonucleotide for detection of SNP TSC0010369
tttaaattgttgg

SEQ ID NO: 32902 - DNA, 13 bp, Artificial Sequence
  Oligonucleotide for detection of SNP TSC0010369
ccaacaatttaaa

SEQ ID NO: 32903 - DNA, 13 bp, Artificial Sequence
  Oligonucleotide for detection of SNP TSC0010369
tttaaagtgttgg

SEQ ID NO: 32904 - DNA, 13 bp, Artificial Sequence
  Oligonucleotide for detection of SNP TSC0010369
ccaacactttaaa

SEQ ID NO: 32905 - DNA, 13 bp, Artificial Sequence
  Oligonucleotide for detection of SNP TSC0010370
attgatgatatty

SEQ ID NO: 32906 - DNA, 13 bp, Artificial Sequence
  Oligonucleotide for detection of SNP TSC0010370
raatatcatcaat

SEQ ID NO: 32907 - DNA, 13 bp, Artificial Sequence
  Oligonucleotide for detection of SNP TSC0010370
attgataatatty

SEQ ID NO: 32908 - DNA, 13 bp, Artificial Sequence
  Oligonucleotide for detection of SNP TSC0010370
raatattatcaat

SEQ ID NO: 32909 - DNA, 13 bp, Artificial Sequence
  Oligonucleotide for detection of SNP TSC0010374
tattttggagtta

SEQ ID NO: 32910 - DNA, 13 bp, Artificial Sequence
  Oligonucleotide for detection of SNP TSC0010374
taactccaaaata

SEQ ID NO: 32911 - DNA, 13 bp, Artificial Sequence
  Oligonucleotide for detection of SNP TSC0010374
tatttttgagtta

SEQ ID NO: 32912 - DNA, 13 bp, Artificial Sequence
  Oligonucleotide for detection of SNP TSC0010374
taactcaaaaata

SEQ ID NO: 32913 - DNA, 13 bp, Artificial Sequence
  Oligonucleotide for detection of SNP TSC0010374
taattttaaaatg

SEQ ID NO: 32914 - DNA, 13 bp, Artificial Sequence
  Oligonucleotide for detection of SNP TSC0010374
cattttaaaatta

SEQ ID NO: 32915 - DNA, 13 bp, Artificial Sequence
  Oligonucleotide for detection of SNP TSC0010374
taatttaaaaatg

SEQ ID NO: 32916 - DNA, 13 bp, Artificial Sequence
  Oligonucleotide for detection of SNP TSC0010374
catttttaaatta

SEQ ID NO: 32917 - DNA, 13 bp, Artificial Sequence
  Oligonucleotide for detection of SNP TSC0010386
aaggggatataty

SEQ ID NO: 32918 - DNA, 13 bp, Artificial Sequence
  Oligonucleotide for detection of SNP TSC0010386
ratatatcccctt

SEQ ID NO: 32919 - DNA, 13 bp, Artificial Sequence
  Oligonucleotide for detection of SNP TSC0010386
aaggggttataty

SEQ ID NO: 32920 - DNA, 13 bp, Artificial Sequence
  Oligonucleotide for detection of SNP TSC0010386
ratataacccctt

SEQ ID NO: 32921 - DNA, 13 bp, Artificial Sequence
  Oligonucleotide for detection of SNP TSC0010386
ggtgtattttttt

SEQ ID NO: 32922 - DNA, 13 bp, Artificial Sequence
  Oligonucleotide for detection of SNP TSC0010386
aaaaaaatacacc

SEQ ID NO: 32923 - DNA, 13 bp, Artificial Sequence
  Oligonucleotide for detection of SNP TSC0010386
ggtgtaatttttt

SEQ ID NO: 32924 - DNA, 13 bp, Artificial Sequence
  Oligonucleotide for detection of SNP TSC0010386
aaaaaattacacc

SEQ ID NO: 32925 - DNA, 13 bp, Artificial Sequence
  Oligonucleotide for detection of SNP TSC0010387
aggaaaaatggtt

SEQ ID NO: 32926 - DNA, 13 bp, Artificial Sequence
  Oligonucleotide for detection of SNP TSC0010387
aaccatttttcct

SEQ ID NO: 32927 - DNA, 13 bp, Artificial Sequence
  Oligonucleotide for detection of SNP TSC0010387
aggaaatatggtt

SEQ ID NO: 32928 - DNA, 13 bp, Artificial Sequence
  Oligonucleotide for detection of SNP TSC0010387
aaccatatttcct

SEQ ID NO: 32929 - DNA, 13 bp, Artificial Sequence
  Oligonucleotide for detection of SNP TSC0010387
aattatgtttttt

SEQ ID NO: 32930 - DNA, 13 bp, Artificial Sequence
  Oligonucleotide for detection of SNP TSC0010387
aaaaaacataatt

SEQ ID NO: 32931 - DNA, 13 bp, Artificial Sequence
  Oligonucleotide for detection of SNP TSC0010388
gtaatatgataag

SEQ ID NO: 32932 - DNA, 13 bp, Artificial Sequence
  Oligonucleotide for detection of SNP TSC0010388
cttatcatattac

SEQ ID NO: 32933 - DNA, 13 bp, Artificial Sequence
  Oligonucleotide for detection of SNP TSC0010388
gtaatacgataag

SEQ ID NO: 32934 - DNA, 13 bp, Artificial Sequence
  Oligonucleotide for detection of SNP TSC0010388
cttatcgtattac

SEQ ID NO: 32935 - DNA, 13 bp, Artificial Sequence
  Oligonucleotide for detection of SNP TSC0010388
tttgttgtgttgy

SEQ ID NO: 32936 - DNA, 13 bp, Artificial Sequence
  Oligonucleotide for detection of SNP TSC0010388
rcaacacaacaaa

SEQ ID NO: 32937 - DNA, 13 bp, Artificial Sequence
  Oligonucleotide for detection of SNP TSC0010388
tttgttatgttgy

SEQ ID NO: 32938 - DNA, 13 bp, Artificial Sequence
  Oligonucleotide for detection of SNP TSC0010388
rcaacataacaaa

SEQ ID NO: 32939 - DNA, 13 bp, Artificial Sequence
  Oligonucleotide for detection of SNP TSC0010388
tttgtcgtgttgy

SEQ ID NO: 32940 - DNA, 13 bp, Artificial Sequence
  Oligonucleotide for detection of SNP TSC0010388
rcaacacgacaaa

SEQ ID NO: 32941 - DNA, 13 bp, Artificial Sequence
  Oligonucleotide for detection of SNP TSC0010390
aaaggaagaaggg

SEQ ID NO: 32942 - DNA, 13 bp, Artificial Sequence
  Oligonucleotide for detection of SNP TSC0010390
cccttcttccttt

SEQ ID NO: 32943 - DNA, 13 bp, Artificial Sequence
  Oligonucleotide for detection of SNP TSC0010390
aaaggaggaaggg

SEQ ID NO: 32944 - DNA, 13 bp, Artificial Sequence
  Oligonucleotide for detection of SNP TSC0010390
cccttcctccttt

SEQ ID NO: 32945 - DNA, 13 bp, Artificial Sequence
  Oligonucleotide for detection of SNP TSC0010394
aagggaaaatatg

SEQ ID NO: 32946 - DNA, 13 bp, Artificial Sequence
  Oligonucleotide for detection of SNP TSC0010394
catattttccctt

SEQ ID NO: 32947 - DNA, 13 bp, Artificial Sequence
  Oligonucleotide for detection of SNP TSC0010394
aagggagaatatg

SEQ ID NO: 32948 - DNA, 13 bp, Artificial Sequence
  Oligonucleotide for detection of SNP TSC0010394
catattctccctt

SEQ ID NO: 32949 - DNA, 13 bp, Artificial Sequence
  Oligonucleotide for detection of SNP TSC0010404
aatttagttttag

SEQ ID NO: 32950 - DNA, 13 bp, Artificial Sequence
  Oligonucleotide for detection of SNP TSC0010404
ctaaaactaaatt

SEQ ID NO: 32951 - DNA, 13 bp, Artificial Sequence
  Oligonucleotide for detection of SNP TSC0010404
aatttaattttag

SEQ ID NO: 32952 - DNA, 13 bp, Artificial Sequence
  Oligonucleotide for detection of SNP TSC0010404
ctaaaattaaatt

SEQ ID NO: 32953 - DNA, 13 bp, Artificial Sequence
  Oligonucleotide for detection of SNP TSC0010405
gttggtgaaaaat

SEQ ID NO: 32954 - DNA, 13 bp, Artificial Sequence
  Oligonucleotide for detection of SNP TSC0010405
atttttcaccaac

SEQ ID NO: 32955 - DNA, 13 bp, Artificial Sequence
  Oligonucleotide for detection of SNP TSC0010405
gttggtaaaaaat

SEQ ID NO: 32956 - DNA, 13 bp, Artificial Sequence
  Oligonucleotide for detection of SNP TSC0010405
attttttaccaac

SEQ ID NO: 32957 - DNA, 13 bp, Artificial Sequence
  Oligonucleotide for detection of SNP TSC0010410
agtttgagttttg

SEQ ID NO: 32958 - DNA, 13 bp, Artificial Sequence
  Oligonucleotide for detection of SNP TSC0010410
caaaactcaaact

SEQ ID NO: 32959 - DNA, 13 bp, Artificial Sequence
  Oligonucleotide for detection of SNP TSC0010410
agtttgggttttg

SEQ ID NO: 32960 - DNA, 13 bp, Artificial Sequence
  Oligonucleotide for detection of SNP TSC0010410
caaaacccaaact

SEQ ID NO: 32961 - DNA, 13 bp, Artificial Sequence
  Oligonucleotide for detection of SNP TSC0010414
ttattagtagttt

SEQ ID NO: 32962 - DNA, 13 bp, Artificial Sequence
  Oligonucleotide for detection of SNP TSC0010414
aaactactaataa

SEQ ID NO: 32963 - DNA, 13 bp, Artificial Sequence
  Oligonucleotide for detection of SNP TSC0010414
ttattattagttt

SEQ ID NO: 32964 - DNA, 13 bp, Artificial Sequence
  Oligonucleotide for detection of SNP TSC0010414
aaactaataataa

SEQ ID NO: 32965 - DNA, 13 bp, Artificial Sequence
  Oligonucleotide for detection of SNP TSC0010414
aaattgttggtgg

SEQ ID NO: 32966 - DNA, 13 bp, Artificial Sequence
  Oligonucleotide for detection of SNP TSC0010414
ccaccaacaattt

SEQ ID NO: 32967 - DNA, 13 bp, Artificial Sequence
  Oligonucleotide for detection of SNP TSC0010414
aaattgatggtgg

SEQ ID NO: 32968 - DNA, 13 bp, Artificial Sequence
  Oligonucleotide for detection of SNP TSC0010414
ccaccatcaattt

SEQ ID NO: 32969 - DNA, 13 bp, Artificial Sequence
  Oligonucleotide for detection of SNP TSC0010415
ttttgggtaagag

SEQ ID NO: 32970 - DNA, 13 bp, Artificial Sequence
  Oligonucleotide for detection of SNP TSC0010415
ctcttacccaaaa

SEQ ID NO: 32971 - DNA, 13 bp, Artificial Sequence
  Oligonucleotide for detection of SNP TSC0010415
ttttggataagag

SEQ ID NO: 32972 - DNA, 13 bp, Artificial Sequence
  Oligonucleotide for detection of SNP TSC0010415
ctcttatccaaaa

SEQ ID NO: 32973 - DNA, 13 bp, Artificial Sequence
  Oligonucleotide for detection of SNP TSC0010416
atgttatgtttat

SEQ ID NO: 32974 - DNA, 13 bp, Artificial Sequence
  Oligonucleotide for detection of SNP TSC0010416
ataaacataacat

SEQ ID NO: 32975 - DNA, 13 bp, Artificial Sequence
  Oligonucleotide for detection of SNP TSC0010416
atgttacgtttat

SEQ ID NO: 32976 - DNA, 13 bp, Artificial Sequence
  Oligonucleotide for detection of SNP TSC0010416
ataaacgtaacat

SEQ ID NO: 32977 - DNA, 13 bp, Artificial Sequence
  Oligonucleotide for detection of SNP TSC0010416
atggatgtagtat

SEQ ID NO: 32978 - DNA, 13 bp, Artificial Sequence
  Oligonucleotide for detection of SNP TSC0010416
atactacatccat

SEQ ID NO: 32979 - DNA, 13 bp, Artificial Sequence
  Oligonucleotide for detection of SNP TSC0010416
atggatatagtat

SEQ ID NO: 32980 - DNA, 13 bp, Artificial Sequence
  Oligonucleotide for detection of SNP TSC0010416
atactatatccat

SEQ ID NO: 32981 - DNA, 13 bp, Artificial Sequence
  Oligonucleotide for detection of SNP TSC0010416
atggacgtagtat

SEQ ID NO: 32982 - DNA, 13 bp, Artificial Sequence
  Oligonucleotide for detection of SNP TSC0010416
atactacgtccat

SEQ ID NO: 32983 - DNA, 13 bp, Artificial Sequence
  Oligonucleotide for detection of SNP TSC0010417
ttttagatttatg

SEQ ID NO: 32984 - DNA, 13 bp, Artificial Sequence
  Oligonucleotide for detection of SNP TSC0010417
cataaatctaaaa

SEQ ID NO: 32985 - DNA, 13 bp, Artificial Sequence
  Oligonucleotide for detection of SNP TSC0010417
ttttaggtttatg

SEQ ID NO: 32986 - DNA, 13 bp, Artificial Sequence
  Oligonucleotide for detection of SNP TSC0010417
cataaacctaaaa

SEQ ID NO: 32987 - DNA, 13 bp, Artificial Sequence
  Oligonucleotide for detection of SNP TSC0010424
attgtagtttttg

SEQ ID NO: 32988 - DNA, 13 bp, Artificial Sequence
  Oligonucleotide for detection of SNP TSC0010424
caaaaactacaat

SEQ ID NO: 32989 - DNA, 13 bp, Artificial Sequence
  Oligonucleotide for detection of SNP TSC0010460
tagattattaatg

SEQ ID NO: 32990 - DNA, 13 bp, Artificial Sequence
  Oligonucleotide for detection of SNP TSC0010460
cattaataatcta

SEQ ID NO: 32991 - DNA, 13 bp, Artificial Sequence
  Oligonucleotide for detection of SNP TSC0010460
tagattgttaatg

SEQ ID NO: 32992 - DNA, 13 bp, Artificial Sequence
  Oligonucleotide for detection of SNP TSC0010460
cattaacaatcta

SEQ ID NO: 32993 - DNA, 13 bp, Artificial Sequence
  Oligonucleotide for detection of SNP TSC0010463
atgtgatgtattt

SEQ ID NO: 32994 - DNA, 13 bp, Artificial Sequence
  Oligonucleotide for detection of SNP TSC0010463
aaatacatcacat

SEQ ID NO: 32995 - DNA, 13 bp, Artificial Sequence
  Oligonucleotide for detection of SNP TSC0010463
atgtgacgtattt

SEQ ID NO: 32996 - DNA, 13 bp, Artificial Sequence
  Oligonucleotide for detection of SNP TSC0010463
aaatacgtcacat

SEQ ID NO: 32997 - DNA, 13 bp, Artificial Sequence
  Oligonucleotide for detection of SNP TSC0010463
aggtatgttatat

SEQ ID NO: 32998 - DNA, 13 bp, Artificial Sequence
  Oligonucleotide for detection of SNP TSC0010463
atataacatacct

SEQ ID NO: 32999 - DNA, 13 bp, Artificial Sequence
  Oligonucleotide for detection of SNP TSC0010463
aggtatattatat

SEQ ID NO: 33000 - DNA, 13 bp, Artificial Sequence
  Oligonucleotide for detection of SNP TSC0010463
atataatatacct

SEQ ID NO: 33001 - DNA, 13 bp, Artificial Sequence
  Oligonucleotide for detection of SNP TSC0010463
aggtacgttatat

SEQ ID NO: 33002 - DNA, 13 bp, Artificial Sequence
  Oligonucleotide for detection of SNP TSC0010463
atataacgtacct

SEQ ID NO: 33003 - DNA, 13 bp, Artificial Sequence
  Oligonucleotide for detection of SNP TSC0010464
agttttgtttttg

SEQ ID NO: 33004 - DNA, 13 bp, Artificial Sequence
  Oligonucleotide for detection of SNP TSC0010464
caaaaacaaaact

SEQ ID NO: 33005 - DNA, 13 bp, Artificial Sequence
  Oligonucleotide for detection of SNP TSC0010465
gtgtatatatggt

SEQ ID NO: 33006 - DNA, 13 bp, Artificial Sequence
  Oligonucleotide for detection of SNP TSC0010465
accatatatacac

SEQ ID NO: 33007 - DNA, 13 bp, Artificial Sequence
  Oligonucleotide for detection of SNP TSC0010465
gtgtatgtatggt

SEQ ID NO: 33008 - DNA, 13 bp, Artificial Sequence
  Oligonucleotide for detection of SNP TSC0010465
accatacatacac

SEQ ID NO: 33009 - DNA, 13 bp, Artificial Sequence
  Oligonucleotide for detection of SNP TSC0010465
gtgtacgtatggt

SEQ ID NO: 33010 - DNA, 13 bp, Artificial Sequence
  Oligonucleotide for detection of SNP TSC0010465
accatacgtacac

SEQ ID NO: 33011 - DNA, 13 bp, Artificial Sequence
  Oligonucleotide for detection of SNP TSC0010465
attatatgtatay

SEQ ID NO: 33012 - DNA, 13 bp, Artificial Sequence
  Oligonucleotide for detection of SNP TSC0010465
rtatacatataat

SEQ ID NO: 33013 - DNA, 13 bp, Artificial Sequence
  Oligonucleotide for detection of SNP TSC0010465
attatacgtatay

SEQ ID NO: 33014 - DNA, 13 bp, Artificial Sequence
  Oligonucleotide for detection of SNP TSC0010465
rtatacgtataat

SEQ ID NO: 33015 - DNA, 13 bp, Artificial Sequence
  Oligonucleotide for detection of SNP TSC0010466
aaaaattgggtaa

SEQ ID NO: 33016 - DNA, 13 bp, Artificial Sequence
  Oligonucleotide for detection of SNP TSC0010466
ttacccaattttt

SEQ ID NO: 33017 - DNA, 13 bp, Artificial Sequence
  Oligonucleotide for detection of SNP TSC0010466
aaaaatggggtaa

SEQ ID NO: 33018 - DNA, 13 bp, Artificial Sequence
  Oligonucleotide for detection of SNP TSC0010466
ttaccccattttt

SEQ ID NO: 33019 - DNA, 13 bp, Artificial Sequence
  Oligonucleotide for detection of SNP TSC0010466
aaaaatcgggtaa

SEQ ID NO: 33020 - DNA, 13 bp, Artificial Sequence
  Oligonucleotide for detection of SNP TSC0010466
ttacccgattttt

SEQ ID NO: 33021 - DNA, 13 bp, Artificial Sequence
  Oligonucleotide for detection of SNP TSC0010466
ttgtttgattttt

SEQ ID NO: 33022 - DNA, 13 bp, Artificial Sequence
  Oligonucleotide for detection of SNP TSC0010466
aaaaatcaaacaa

SEQ ID NO: 33023 - DNA, 13 bp, Artificial Sequence
  Oligonucleotide for detection of SNP TSC0010466
ttgttttattttt

SEQ ID NO: 33024 - DNA, 13 bp, Artificial Sequence
  Oligonucleotide for detection of SNP TSC0010466
aaaaataaaacaa

SEQ ID NO: 33025 - DNA, 13 bp, Artificial Sequence
  Oligonucleotide for detection of SNP TSC0010466
ttgttcgattttt

SEQ ID NO: 33026 - DNA, 13 bp, Artificial Sequence
  Oligonucleotide for detection of SNP TSC0010466
aaaaatcgaacaa

SEQ ID NO: 33027 - DNA, 13 bp, Artificial Sequence
  Oligonucleotide for detection of SNP TSC0010467
ttaatatggtgaa

SEQ ID NO: 33028 - DNA, 13 bp, Artificial Sequence
  Oligonucleotide for detection of SNP TSC0010467
ttcaccatattaa

SEQ ID NO: 33029 - DNA, 13 bp, Artificial Sequence
  Oligonucleotide for detection of SNP TSC0010467
ttaatacggtgaa

SEQ ID NO: 33030 - DNA, 13 bp, Artificial Sequence
  Oligonucleotide for detection of SNP TSC0010467
ttcaccgtattaa

SEQ ID NO: 33031 - DNA, 13 bp, Artificial Sequence
  Oligonucleotide for detection of SNP TSC0010467
tttattgtattgg

SEQ ID NO: 33032 - DNA, 13 bp, Artificial Sequence
  Oligonucleotide for detection of SNP TSC0010467
ccaatacaataaa

SEQ ID NO: 33033 - DNA, 13 bp, Artificial Sequence
  Oligonucleotide for detection of SNP TSC0010467
tttattatattgg

SEQ ID NO: 33034 - DNA, 13 bp, Artificial Sequence
  Oligonucleotide for detection of SNP TSC0010467
ccaatataataaa

SEQ ID NO: 33035 - DNA, 13 bp, Artificial Sequence
  Oligonucleotide for detection of SNP TSC0010467
tttatcgtattgg

SEQ ID NO: 33036 - DNA, 13 bp, Artificial Sequence
  Oligonucleotide for detection of SNP TSC0010467
ccaatacgataaa

SEQ ID NO: 33037 - DNA, 13 bp, Artificial Sequence
  Oligonucleotide for detection of SNP TSC0010468
agttattgggagg

SEQ ID NO: 33038 - DNA, 13 bp, Artificial Sequence
  Oligonucleotide for detection of SNP TSC0010468
cctcccaataact

SEQ ID NO: 33039 - DNA, 13 bp, Artificial Sequence
  Oligonucleotide for detection of SNP TSC0010468
agttatcgggagg

SEQ ID NO: 33040 - DNA, 13 bp, Artificial Sequence
  Oligonucleotide for detection of SNP TSC0010468
cctcccgataact

SEQ ID NO: 33041 - DNA, 13 bp, Artificial Sequence
  Oligonucleotide for detection of SNP TSC0010468
ttttttggtagtt

SEQ ID NO: 33042 - DNA, 13 bp, Artificial Sequence
  Oligonucleotide for detection of SNP TSC0010468
aactaccaaaaaa

SEQ ID NO: 33043 - DNA, 13 bp, Artificial Sequence
  Oligonucleotide for detection of SNP TSC0010468
ttttttagtagtt

SEQ ID NO: 33044 - DNA, 13 bp, Artificial Sequence
  Oligonucleotide for detection of SNP TSC0010468
aactactaaaaaa

SEQ ID NO: 33045 - DNA, 13 bp, Artificial Sequence
  Oligonucleotide for detection of SNP TSC0010468
tttttcggtagtt

SEQ ID NO: 33046 - DNA, 13 bp, Artificial Sequence
  Oligonucleotide for detection of SNP TSC0010468
aactaccgaaaaa

SEQ ID NO: 33047 - DNA, 13 bp, Artificial Sequence
  Oligonucleotide for detection of SNP TSC0010470
gaattaattttta

SEQ ID NO: 33048 - DNA, 13 bp, Artificial Sequence
  Oligonucleotide for detection of SNP TSC0010470
taaaaattaattc

SEQ ID NO: 33049 - DNA, 13 bp, Artificial Sequence
  Oligonucleotide for detection of SNP TSC0010470
gaattagttttta

SEQ ID NO: 33050 - DNA, 13 bp, Artificial Sequence
  Oligonucleotide for detection of SNP TSC0010470
taaaaactaattc

SEQ ID NO: 33051 - DNA, 13 bp, Artificial Sequence
  Oligonucleotide for detection of SNP TSC0010478
tgtttgattaatt

SEQ ID NO: 33052 - DNA, 13 bp, Artificial Sequence
  Oligonucleotide for detection of SNP TSC0010478
aattaatcaaaca

SEQ ID NO: 33053 - DNA, 13 bp, Artificial Sequence
  Oligonucleotide for detection of SNP TSC0010478
tgtttggttaatt

SEQ ID NO: 33054 - DNA, 13 bp, Artificial Sequence
  Oligonucleotide for detection of SNP TSC0010478
aattaaccaaaca

SEQ ID NO: 33055 - DNA, 13 bp, Artificial Sequence
  Oligonucleotide for detection of SNP TSC0010481
gtttatgtttata

SEQ ID NO: 33056 - DNA, 13 bp, Artificial Sequence
  Oligonucleotide for detection of SNP TSC0010481
tataaacataaac

SEQ ID NO: 33057 - DNA, 13 bp, Artificial Sequence
  Oligonucleotide for detection of SNP TSC0010481
gtttatatttata

SEQ ID NO: 33058 - DNA, 13 bp, Artificial Sequence
  Oligonucleotide for detection of SNP TSC0010481
tataaatataaac

SEQ ID NO: 33059 - DNA, 13 bp, Artificial Sequence
  Oligonucleotide for detection of SNP TSC0010482
agtggatatatgg

SEQ ID NO: 33060 - DNA, 13 bp, Artificial Sequence
  Oligonucleotide for detection of SNP TSC0010482
ccatatatccact

SEQ ID NO: 33061 - DNA, 13 bp, Artificial Sequence
  Oligonucleotide for detection of SNP TSC0010482
agtggagatatgg

SEQ ID NO: 33062 - DNA, 13 bp, Artificial Sequence
  Oligonucleotide for detection of SNP TSC0010482
ccatatctccact

SEQ ID NO: 33063 - DNA, 13 bp, Artificial Sequence
  Oligonucleotide for detection of SNP TSC0010488
gtttttagattay

SEQ ID NO: 33064 - DNA, 13 bp, Artificial Sequence
  Oligonucleotide for detection of SNP TSC0010488
rtaatctaaaaac

SEQ ID NO: 33065 - DNA, 13 bp, Artificial Sequence
  Oligonucleotide for detection of SNP TSC0010488
gtttttggattay

SEQ ID NO: 33066 - DNA, 13 bp, Artificial Sequence
  Oligonucleotide for detection of SNP TSC0010488
rtaatccaaaaac

SEQ ID NO: 33067 - DNA, 13 bp, Artificial Sequence
  Oligonucleotide for detection of SNP TSC0010488
gttttcggattay

SEQ ID NO: 33068 - DNA, 13 bp, Artificial Sequence
  Oligonucleotide for detection of SNP TSC0010488
rtaatccgaaaac

SEQ ID NO: 33069 - DNA, 13 bp, Artificial Sequence
  Oligonucleotide for detection of SNP TSC0010488
gtaatttgagaay

SEQ ID NO: 33070 - DNA, 13 bp, Artificial Sequence
  Oligonucleotide for detection of SNP TSC0010488
rttctcaaattac

SEQ ID NO: 33071 - DNA, 13 bp, Artificial Sequence
  Oligonucleotide for detection of SNP TSC0010488
gtaattcgagaay

SEQ ID NO: 33072 - DNA, 13 bp, Artificial Sequence
  Oligonucleotide for detection of SNP TSC0010488
rttctcgaattac

SEQ ID NO: 33073 - DNA, 13 bp, Artificial Sequence
  Oligonucleotide for detection of SNP TSC0010496
tgaaaggaagtag

SEQ ID NO: 33074 - DNA, 13 bp, Artificial Sequence
  Oligonucleotide for detection of SNP TSC0010496
ctacttcctttca

SEQ ID NO: 33075 - DNA, 13 bp, Artificial Sequence
  Oligonucleotide for detection of SNP TSC0010496
tgaaagaaagtag

SEQ ID NO: 33076 - DNA, 13 bp, Artificial Sequence
  Oligonucleotide for detection of SNP TSC0010496
ctactttctttca

SEQ ID NO: 33077 - DNA, 13 bp, Artificial Sequence
  Oligonucleotide for detection of SNP TSC0010496
cgaaaggaagtag

SEQ ID NO: 33078 - DNA, 13 bp, Artificial Sequence
  Oligonucleotide for detection of SNP TSC0010496
ctacttcctttcg

SEQ ID NO: 33079 - DNA, 13 bp, Artificial Sequence
  Oligonucleotide for detection of SNP TSC0010496
cgaaagaaagtag

SEQ ID NO: 33080 - DNA, 13 bp, Artificial Sequence
  Oligonucleotide for detection of SNP TSC0010496
ctactttctttcg

SEQ ID NO: 33081 - DNA, 13 bp, Artificial Sequence
  Oligonucleotide for detection of SNP TSC0010502
tttttagtaggtt

SEQ ID NO: 33082 - DNA, 13 bp, Artificial Sequence
  Oligonucleotide for detection of SNP TSC0010502
aacctactaaaaa

SEQ ID NO: 33083 - DNA, 13 bp, Artificial Sequence
  Oligonucleotide for detection of SNP TSC0010502
tttttaataggtt

SEQ ID NO: 33084 - DNA, 13 bp, Artificial Sequence
  Oligonucleotide for detection of SNP TSC0010502
aacctattaaaaa

SEQ ID NO: 33085 - DNA, 13 bp, Artificial Sequence
  Oligonucleotide for detection of SNP TSC0010503
tggaaaaatagag

SEQ ID NO: 33086 - DNA, 13 bp, Artificial Sequence
  Oligonucleotide for detection of SNP TSC0010503
ctctatttttcca

SEQ ID NO: 33087 - DNA, 13 bp, Artificial Sequence
  Oligonucleotide for detection of SNP TSC0010503
tggaaatatagag

SEQ ID NO: 33088 - DNA, 13 bp, Artificial Sequence
  Oligonucleotide for detection of SNP TSC0010503
ctctatatttcca

SEQ ID NO: 33089 - DNA, 13 bp, Artificial Sequence
  Oligonucleotide for detection of SNP TSC0010513
tttagggtttttt

SEQ ID NO: 33090 - DNA, 13 bp, Artificial Sequence
  Oligonucleotide for detection of SNP TSC0010513
aaaaaaccctaaa

SEQ ID NO: 33091 - DNA, 13 bp, Artificial Sequence
  Oligonucleotide for detection of SNP TSC0010513
tttaggatttttt

SEQ ID NO: 33092 - DNA, 13 bp, Artificial Sequence
  Oligonucleotide for detection of SNP TSC0010513
aaaaaatcctaaa

SEQ ID NO: 33093 - DNA, 13 bp, Artificial Sequence
  Oligonucleotide for detection of SNP TSC0010514
ttatatgaattta

SEQ ID NO: 33094 - DNA, 13 bp, Artificial Sequence
  Oligonucleotide for detection of SNP TSC0010514
taaattcatataa

SEQ ID NO: 33095 - DNA, 13 bp, Artificial Sequence
  Oligonucleotide for detection of SNP TSC0010514
ttatattaattta

SEQ ID NO: 33096 - DNA, 13 bp, Artificial Sequence
  Oligonucleotide for detection of SNP TSC0010514
taaattaatataa

SEQ ID NO: 33097 - DNA, 13 bp, Artificial Sequence
  Oligonucleotide for detection of SNP TSC0010514
taaatttatatag

SEQ ID NO: 33098 - DNA, 13 bp, Artificial Sequence
  Oligonucleotide for detection of SNP TSC0010514
ctatataaattta

SEQ ID NO: 33099 - DNA, 13 bp, Artificial Sequence
  Oligonucleotide for detection of SNP TSC0010514
taaattaatatag

SEQ ID NO: 33100 - DNA, 13 bp, Artificial Sequence
  Oligonucleotide for detection of SNP TSC0010514
ctatattaattta

SEQ ID NO: 33101 - DNA, 13 bp, Artificial Sequence
  Oligonucleotide for detection of SNP TSC0010515
agtatttgtgtaa

SEQ ID NO: 33102 - DNA, 13 bp, Artificial Sequence
  Oligonucleotide for detection of SNP TSC0010515
ttacacaaatact

SEQ ID NO: 33103 - DNA, 13 bp, Artificial Sequence
  Oligonucleotide for detection of SNP TSC0010515
agtattcgtgtaa

SEQ ID NO: 33104 - DNA, 13 bp, Artificial Sequence
  Oligonucleotide for detection of SNP TSC0010515
ttacacgaatact

SEQ ID NO: 33105 - DNA, 13 bp, Artificial Sequence
  Oligonucleotide for detection of SNP TSC0010515
ttatataagtatt

SEQ ID NO: 33106 - DNA, 13 bp, Artificial Sequence
  Oligonucleotide for detection of SNP TSC0010515
aatacttatataa

SEQ ID NO: 33107 - DNA, 13 bp, Artificial Sequence
  Oligonucleotide for detection of SNP TSC0010515
ttatatgagtatt

SEQ ID NO: 33108 - DNA, 13 bp, Artificial Sequence
  Oligonucleotide for detection of SNP TSC0010515
aatactcatataa

SEQ ID NO: 33109 - DNA, 13 bp, Artificial Sequence
  Oligonucleotide for detection of SNP TSC0010515
ttatacgagtatt

SEQ ID NO: 33110 - DNA, 13 bp, Artificial Sequence
  Oligonucleotide for detection of SNP TSC0010515
aatactcgtataa

SEQ ID NO: 33111 - DNA, 13 bp, Artificial Sequence
  Oligonucleotide for detection of SNP TSC0010519
gttgatatttgtt

SEQ ID NO: 33112 - DNA, 13 bp, Artificial Sequence
  Oligonucleotide for detection of SNP TSC0010519
aacaaatatcaac

SEQ ID NO: 33113 - DNA, 13 bp, Artificial Sequence
  Oligonucleotide for detection of SNP TSC0010519
gttgatttttgtt

SEQ ID NO: 33114 - DNA, 13 bp, Artificial Sequence
  Oligonucleotide for detection of SNP TSC0010519
aacaaaaatcaac

SEQ ID NO: 33115 - DNA, 13 bp, Artificial Sequence
  Oligonucleotide for detection of SNP TSC0010519
agtaagtattaay

SEQ ID NO: 33116 - DNA, 13 bp, Artificial Sequence
  Oligonucleotide for detection of SNP TSC0010519
rttaatacttact

SEQ ID NO: 33117 - DNA, 13 bp, Artificial Sequence
  Oligonucleotide for detection of SNP TSC0010519
agtaagaattaay

SEQ ID NO: 33118 - DNA, 13 bp, Artificial Sequence
  Oligonucleotide for detection of SNP TSC0010519
rttaattcttact

SEQ ID NO: 33119 - DNA, 13 bp, Artificial Sequence
  Oligonucleotide for detection of SNP TSC0010520
ttttagatttagg

SEQ ID NO: 33120 - DNA, 13 bp, Artificial Sequence
  Oligonucleotide for detection of SNP TSC0010520
cctaaatctaaaa

SEQ ID NO: 33121 - DNA, 13 bp, Artificial Sequence
  Oligonucleotide for detection of SNP TSC0010520
ttttaggtttagg

SEQ ID NO: 33122 - DNA, 13 bp, Artificial Sequence
  Oligonucleotide for detection of SNP TSC0010520
cctaaacctaaaa

SEQ ID NO: 33123 - DNA, 13 bp, Artificial Sequence
  Oligonucleotide for detection of SNP TSC0010560
tttaggataaggg

SEQ ID NO: 33124 - DNA, 13 bp, Artificial Sequence
  Oligonucleotide for detection of SNP TSC0010560
cccttatcctaaa

SEQ ID NO: 33125 - DNA, 13 bp, Artificial Sequence
  Oligonucleotide for detection of SNP TSC0010560
tttaggttaaggg

SEQ ID NO: 33126 - DNA, 13 bp, Artificial Sequence
  Oligonucleotide for detection of SNP TSC0010560
cccttaacctaaa

SEQ ID NO: 33127 - DNA, 13 bp, Artificial Sequence
  Oligonucleotide for detection of SNP TSC0010560
tttttgttttggg

SEQ ID NO: 33128 - DNA, 13 bp, Artificial Sequence
  Oligonucleotide for detection of SNP TSC0010560
cccaaaacaaaaa

SEQ ID NO: 33129 - DNA, 13 bp, Artificial Sequence
  Oligonucleotide for detection of SNP TSC0010560
tttttgatttggg

SEQ ID NO: 33130 - DNA, 13 bp, Artificial Sequence
  Oligonucleotide for detection of SNP TSC0010560
cccaaatcaaaaa

SEQ ID NO: 33131 - DNA, 13 bp, Artificial Sequence
  Oligonucleotide for detection of SNP TSC0010561
agaaatgaataag

SEQ ID NO: 33132 - DNA, 13 bp, Artificial Sequence
  Oligonucleotide for detection of SNP TSC0010561
cttattcatttct

SEQ ID NO: 33133 - DNA, 13 bp, Artificial Sequence
  Oligonucleotide for detection of SNP TSC0010561
agaaataaataag

SEQ ID NO: 33134 - DNA, 13 bp, Artificial Sequence
  Oligonucleotide for detection of SNP TSC0010561
cttatttatttct

SEQ ID NO: 33135 - DNA, 13 bp, Artificial Sequence
  Oligonucleotide for detection of SNP TSC0010562
taattttaaattt

SEQ ID NO: 33136 - DNA, 13 bp, Artificial Sequence
  Oligonucleotide for detection of SNP TSC0010562
aaatttaaaatta

SEQ ID NO: 33137 - DNA, 13 bp, Artificial Sequence
  Oligonucleotide for detection of SNP TSC0010562
taatttgaaattt

SEQ ID NO: 33138 - DNA, 13 bp, Artificial Sequence
  Oligonucleotide for detection of SNP TSC0010562
aaatttcaaatta

SEQ ID NO: 33139 - DNA, 13 bp, Artificial Sequence
  Oligonucleotide for detection of SNP TSC0010562
taattcgaaattt

SEQ ID NO: 33140 - DNA, 13 bp, Artificial Sequence
  Oligonucleotide for detection of SNP TSC0010562
aaatttcgaatta

SEQ ID NO: 33141 - DNA, 13 bp, Artificial Sequence
  Oligonucleotide for detection of SNP TSC0010562
aagtttgggatta

SEQ ID NO: 33142 - DNA, 13 bp, Artificial Sequence
  Oligonucleotide for detection of SNP TSC0010562
taatcccaaactt

SEQ ID NO: 33143 - DNA, 13 bp, Artificial Sequence
  Oligonucleotide for detection of SNP TSC0010562
aagttttggatta

SEQ ID NO: 33144 - DNA, 13 bp, Artificial Sequence
  Oligonucleotide for detection of SNP TSC0010562
taatccaaaactt

SEQ ID NO: 33145 - DNA, 13 bp, Artificial Sequence
  Oligonucleotide for detection of SNP TSC0010562
aagtttcggatta

SEQ ID NO: 33146 - DNA, 13 bp, Artificial Sequence
  Oligonucleotide for detection of SNP TSC0010562
taatccgaaactt

SEQ ID NO: 33147 - DNA, 13 bp, Artificial Sequence
  Oligonucleotide for detection of SNP TSC0010563
agataaggttttt

SEQ ID NO: 33148 - DNA, 13 bp, Artificial Sequence
  Oligonucleotide for detection of SNP TSC0010563
aaaaaccttatct

SEQ ID NO: 33149 - DNA, 13 bp, Artificial Sequence
  Oligonucleotide for detection of SNP TSC0010563
agataaagttttt

SEQ ID NO: 33150 - DNA, 13 bp, Artificial Sequence
  Oligonucleotide for detection of SNP TSC0010563
aaaaactttatct

SEQ ID NO: 33151 - DNA, 13 bp, Artificial Sequence
  Oligonucleotide for detection of SNP TSC0010569
agagatagagata

SEQ ID NO: 33152 - DNA, 13 bp, Artificial Sequence
  Oligonucleotide for detection of SNP TSC0010569
tatctctatctct

SEQ ID NO: 33153 - DNA, 13 bp, Artificial Sequence
  Oligonucleotide for detection of SNP TSC0010569
agagatggagata

SEQ ID NO: 33154 - DNA, 13 bp, Artificial Sequence
  Oligonucleotide for detection of SNP TSC0010569
tatctccatctct

SEQ ID NO: 33155 - DNA, 13 bp, Artificial Sequence
  Oligonucleotide for detection of SNP TSC0010570
gtagtgagttagt

SEQ ID NO: 33156 - DNA, 13 bp, Artificial Sequence
  Oligonucleotide for detection of SNP TSC0010570
actaactcactac

SEQ ID NO: 33157 - DNA, 13 bp, Artificial Sequence
  Oligonucleotide for detection of SNP TSC0010570
gtagtgggttagt

SEQ ID NO: 33158 - DNA, 13 bp, Artificial Sequence
  Oligonucleotide for detection of SNP TSC0010570
actaacccactac

SEQ ID NO: 33159 - DNA, 13 bp, Artificial Sequence
  Oligonucleotide for detection of SNP TSC0010571
tttgtttattgty

SEQ ID NO: 33160 - DNA, 13 bp, Artificial Sequence
  Oligonucleotide for detection of SNP TSC0010571
racaataaacaaa

SEQ ID NO: 33161 - DNA, 13 bp, Artificial Sequence
  Oligonucleotide for detection of SNP TSC0010571
tttgttgattgty

SEQ ID NO: 33162 - DNA, 13 bp, Artificial Sequence
  Oligonucleotide for detection of SNP TSC0010571
racaatcaacaaa

SEQ ID NO: 33163 - DNA, 13 bp, Artificial Sequence
  Oligonucleotide for detection of SNP TSC0010571
tttgtcgattgty

SEQ ID NO: 33164 - DNA, 13 bp, Artificial Sequence
  Oligonucleotide for detection of SNP TSC0010571
racaatcgacaaa

SEQ ID NO: 33165 - DNA, 13 bp, Artificial Sequence
  Oligonucleotide for detection of SNP TSC0010571
gatagtgggtaag

SEQ ID NO: 33166 - DNA, 13 bp, Artificial Sequence
  Oligonucleotide for detection of SNP TSC0010571
cttacccactatc

SEQ ID NO: 33167 - DNA, 13 bp, Artificial Sequence
  Oligonucleotide for detection of SNP TSC0010571
gatagttggtaag

SEQ ID NO: 33168 - DNA, 13 bp, Artificial Sequence
  Oligonucleotide for detection of SNP TSC0010571
cttaccaactatc

SEQ ID NO: 33169 - DNA, 13 bp, Artificial Sequence
  Oligonucleotide for detection of SNP TSC0010571
gatagtcggtaag

SEQ ID NO: 33170 - DNA, 13 bp, Artificial Sequence
  Oligonucleotide for detection of SNP TSC0010571
cttaccgactatc

SEQ ID NO: 33171 - DNA, 13 bp, Artificial Sequence
  Oligonucleotide for detection of SNP TSC0010574
gtgaaatgtaggy

SEQ ID NO: 33172 - DNA, 13 bp, Artificial Sequence
  Oligonucleotide for detection of SNP TSC0010574
rcctacatttcac

SEQ ID NO: 33173 - DNA, 13 bp, Artificial Sequence
  Oligonucleotide for detection of SNP TSC0010574
gtgaaacgtaggy

SEQ ID NO: 33174 - DNA, 13 bp, Artificial Sequence
  Oligonucleotide for detection of SNP TSC0010574
rcctacgtttcac

SEQ ID NO: 33175 - DNA, 13 bp, Artificial Sequence
  Oligonucleotide for detection of SNP TSC0010574
gtttatgttttay

SEQ ID NO: 33176 - DNA, 13 bp, Artificial Sequence
  Oligonucleotide for detection of SNP TSC0010574
rtaaaacataaac

SEQ ID NO: 33177 - DNA, 13 bp, Artificial Sequence
  Oligonucleotide for detection of SNP TSC0010574
gtttatattttay

SEQ ID NO: 33178 - DNA, 13 bp, Artificial Sequence
  Oligonucleotide for detection of SNP TSC0010574
rtaaaatataaac

SEQ ID NO: 33179 - DNA, 13 bp, Artificial Sequence
  Oligonucleotide for detection of SNP TSC0010574
gtttacgttttay

SEQ ID NO: 33180 - DNA, 13 bp, Artificial Sequence
  Oligonucleotide for detection of SNP TSC0010574
rtaaaacgtaaac

SEQ ID NO: 33181 - DNA, 13 bp, Artificial Sequence
  Oligonucleotide for detection of SNP TSC0010577
agattttgtatag

SEQ ID NO: 33182 - DNA, 13 bp, Artificial Sequence
  Oligonucleotide for detection of SNP TSC0010577
ctatacaaaatct

SEQ ID NO: 33183 - DNA, 13 bp, Artificial Sequence
  Oligonucleotide for detection of SNP TSC0010577
agatttcgtatag

SEQ ID NO: 33184 - DNA, 13 bp, Artificial Sequence
  Oligonucleotide for detection of SNP TSC0010577
ctatacgaaatct

SEQ ID NO: 33185 - DNA, 13 bp, Artificial Sequence
  Oligonucleotide for detection of SNP TSC0010577
ttatgtgaagttt

SEQ ID NO: 33186 - DNA, 13 bp, Artificial Sequence
  Oligonucleotide for detection of SNP TSC0010577
aaacttcacataa

SEQ ID NO: 33187 - DNA, 13 bp, Artificial Sequence
  Oligonucleotide for detection of SNP TSC0010577
ttatgtaaagttt

SEQ ID NO: 33188 - DNA, 13 bp, Artificial Sequence
  Oligonucleotide for detection of SNP TSC0010577
aaactttacataa

SEQ ID NO: 33189 - DNA, 13 bp, Artificial Sequence
  Oligonucleotide for detection of SNP TSC0010577
ttatgcgaagttt

SEQ ID NO: 33190 - DNA, 13 bp, Artificial Sequence
  Oligonucleotide for detection of SNP TSC0010577
aaacttcgcataa

SEQ ID NO: 33191 - DNA, 13 bp, Artificial Sequence
  Oligonucleotide for detection of SNP TSC0010578
agtattgtattty

SEQ ID NO: 33192 - DNA, 13 bp, Artificial Sequence
  Oligonucleotide for detection of SNP TSC0010578
raaatacaatact

SEQ ID NO: 33193 - DNA, 13 bp, Artificial Sequence
  Oligonucleotide for detection of SNP TSC0010578
agtattatattty

SEQ ID NO: 33194 - DNA, 13 bp, Artificial Sequence
  Oligonucleotide for detection of SNP TSC0010578
raaatataatact

SEQ ID NO: 33195 - DNA, 13 bp, Artificial Sequence
  Oligonucleotide for detection of SNP TSC0010580
tgtataagtgatt

SEQ ID NO: 33196 - DNA, 13 bp, Artificial Sequence
  Oligonucleotide for detection of SNP TSC0010580
aatcacttataca

SEQ ID NO: 33197 - DNA, 13 bp, Artificial Sequence
  Oligonucleotide for detection of SNP TSC0010580
tgtatatgtgatt

SEQ ID NO: 33198 - DNA, 13 bp, Artificial Sequence
  Oligonucleotide for detection of SNP TSC0010580
aatcacatataca

SEQ ID NO: 33199 - DNA, 13 bp, Artificial Sequence
  Oligonucleotide for detection of SNP TSC0010580
tgtatacgtgatt

SEQ ID NO: 33200 - DNA, 13 bp, Artificial Sequence
  Oligonucleotide for detection of SNP TSC0010580
aatcacgtataca

SEQ ID NO: 33201 - DNA, 13 bp, Artificial Sequence
  Oligonucleotide for detection of SNP TSC0010580
agttatttgtgta

SEQ ID NO: 33202 - DNA, 13 bp, Artificial Sequence
  Oligonucleotide for detection of SNP TSC0010580
tacacaaataact

SEQ ID NO: 33203 - DNA, 13 bp, Artificial Sequence
  Oligonucleotide for detection of SNP TSC0010580
agttatgtgtgta

SEQ ID NO: 33204 - DNA, 13 bp, Artificial Sequence
  Oligonucleotide for detection of SNP TSC0010580
tacacacataact

SEQ ID NO: 33205 - DNA, 13 bp, Artificial Sequence
  Oligonucleotide for detection of SNP TSC0010580
agttacgtgtgta

SEQ ID NO: 33206 - DNA, 13 bp, Artificial Sequence
  Oligonucleotide for detection of SNP TSC0010580
tacacacgtaact

SEQ ID NO: 33207 - DNA, 13 bp, Artificial Sequence
  Oligonucleotide for detection of SNP TSC0010581
gggagggaattta

SEQ ID NO: 33208 - DNA, 13 bp, Artificial Sequence
  Oligonucleotide for detection of SNP TSC0010581
taaattccctccc

SEQ ID NO: 33209 - DNA, 13 bp, Artificial Sequence
  Oligonucleotide for detection of SNP TSC0010581
gggaggaaattta

SEQ ID NO: 33210 - DNA, 13 bp, Artificial Sequence
  Oligonucleotide for detection of SNP TSC0010581
taaatttcctccc

SEQ ID NO: 33211 - DNA, 13 bp, Artificial Sequence
  Oligonucleotide for detection of SNP TSC0010585
tagtataaataaa

SEQ ID NO: 33212 - DNA, 13 bp, Artificial Sequence
  Oligonucleotide for detection of SNP TSC0010585
tttatttatacta

SEQ ID NO: 33213 - DNA, 13 bp, Artificial Sequence
  Oligonucleotide for detection of SNP TSC0010585
tagtatgaataaa

SEQ ID NO: 33214 - DNA, 13 bp, Artificial Sequence
  Oligonucleotide for detection of SNP TSC0010585
tttattcatacta

SEQ ID NO: 33215 - DNA, 13 bp, Artificial Sequence
  Oligonucleotide for detection of SNP TSC0010588
aaggtatggaaat

SEQ ID NO: 33216 - DNA, 13 bp, Artificial Sequence
  Oligonucleotide for detection of SNP TSC0010588
atttccatacctt

SEQ ID NO: 33217 - DNA, 13 bp, Artificial Sequence
  Oligonucleotide for detection of SNP TSC0010588
aaggtacggaaat

SEQ ID NO: 33218 - DNA, 13 bp, Artificial Sequence
  Oligonucleotide for detection of SNP TSC0010588
atttccgtacctt

SEQ ID NO: 33219 - DNA, 13 bp, Artificial Sequence
  Oligonucleotide for detection of SNP TSC0010588
atttttgtgtttt

SEQ ID NO: 33220 - DNA, 13 bp, Artificial Sequence
  Oligonucleotide for detection of SNP TSC0010588
aaaacacaaaaat

SEQ ID NO: 33221 - DNA, 13 bp, Artificial Sequence
  Oligonucleotide for detection of SNP TSC0010588
atttttatgtttt

SEQ ID NO: 33222 - DNA, 13 bp, Artificial Sequence
  Oligonucleotide for detection of SNP TSC0010588
aaaacataaaaat

SEQ ID NO: 33223 - DNA, 13 bp, Artificial Sequence
  Oligonucleotide for detection of SNP TSC0010588
attttcgtgtttt

SEQ ID NO: 33224 - DNA, 13 bp, Artificial Sequence
  Oligonucleotide for detection of SNP TSC0010588
aaaacacgaaaat

SEQ ID NO: 33225 - DNA, 13 bp, Artificial Sequence
  Oligonucleotide for detection of SNP TSC0010589
tttgttaaaattt

SEQ ID NO: 33226 - DNA, 13 bp, Artificial Sequence
  Oligonucleotide for detection of SNP TSC0010589
aaattttaacaaa

SEQ ID NO: 33227 - DNA, 13 bp, Artificial Sequence
  Oligonucleotide for detection of SNP TSC0010589
tttgttgaaattt

SEQ ID NO: 33228 - DNA, 13 bp, Artificial Sequence
  Oligonucleotide for detection of SNP TSC0010589
aaatttcaacaaa

SEQ ID NO: 33229 - DNA, 13 bp, Artificial Sequence
  Oligonucleotide for detection of SNP TSC0010589
tttgtcgaaattt

SEQ ID NO: 33230 - DNA, 13 bp, Artificial Sequence
  Oligonucleotide for detection of SNP TSC0010589
aaatttcgacaaa

SEQ ID NO: 33231 - DNA, 13 bp, Artificial Sequence
  Oligonucleotide for detection of SNP TSC0010589
aagttttgataaa

SEQ ID NO: 33232 - DNA, 13 bp, Artificial Sequence
  Oligonucleotide for detection of SNP TSC0010589
tttatcaaaactt

SEQ ID NO: 33233 - DNA, 13 bp, Artificial Sequence
  Oligonucleotide for detection of SNP TSC0010589
aagtttcgataaa

SEQ ID NO: 33234 - DNA, 13 bp, Artificial Sequence
  Oligonucleotide for detection of SNP TSC0010589
tttatcgaaactt

SEQ ID NO: 33235 - DNA, 13 bp, Artificial Sequence
  Oligonucleotide for detection of SNP TSC0010590
ttttatatagtty

SEQ ID NO: 33236 - DNA, 13 bp, Artificial Sequence
  Oligonucleotide for detection of SNP TSC0010590
raactatataaaa

SEQ ID NO: 33237 - DNA, 13 bp, Artificial Sequence
  Oligonucleotide for detection of SNP TSC0010590
ttttatgtagtty

SEQ ID NO: 33238 - DNA, 13 bp, Artificial Sequence
  Oligonucleotide for detection of SNP TSC0010590
raactacataaaa

SEQ ID NO: 33239 - DNA, 13 bp, Artificial Sequence
  Oligonucleotide for detection of SNP TSC0010591
ggatatagttaaa

SEQ ID NO: 33240 - DNA, 13 bp, Artificial Sequence
  Oligonucleotide for detection of SNP TSC0010591
tttaactatatcc

SEQ ID NO: 33241 - DNA, 13 bp, Artificial Sequence
  Oligonucleotide for detection of SNP TSC0010591
ggatatggttaaa

SEQ ID NO: 33242 - DNA, 13 bp, Artificial Sequence
  Oligonucleotide for detection of SNP TSC0010591
tttaaccatatcc

SEQ ID NO: 33243 - DNA, 13 bp, Artificial Sequence
  Oligonucleotide for detection of SNP TSC0010591
ggatacggttaaa

SEQ ID NO: 33244 - DNA, 13 bp, Artificial Sequence
  Oligonucleotide for detection of SNP TSC0010591
tttaaccgtatcc

SEQ ID NO: 33245 - DNA, 13 bp, Artificial Sequence
  Oligonucleotide for detection of SNP TSC0010591
tttggttgtgtty

SEQ ID NO: 33246 - DNA, 13 bp, Artificial Sequence
  Oligonucleotide for detection of SNP TSC0010591
raacacaaccaaa

SEQ ID NO: 33247 - DNA, 13 bp, Artificial Sequence
  Oligonucleotide for detection of SNP TSC0010591
tttggtcgtgtty

SEQ ID NO: 33248 - DNA, 13 bp, Artificial Sequence
  Oligonucleotide for detection of SNP TSC0010591
raacacgaccaaa

SEQ ID NO: 33249 - DNA, 13 bp, Artificial Sequence
  Oligonucleotide for detection of SNP TSC0010599
gggtattgtttgt

SEQ ID NO: 33250 - DNA, 13 bp, Artificial Sequence
  Oligonucleotide for detection of SNP TSC0010599
acaaacaataccc

SEQ ID NO: 33251 - DNA, 13 bp, Artificial Sequence
  Oligonucleotide for detection of SNP TSC0010599
gggtatcgtttgt

SEQ ID NO: 33252 - DNA, 13 bp, Artificial Sequence
  Oligonucleotide for detection of SNP TSC0010599
acaaacgataccc

SEQ ID NO: 33253 - DNA, 13 bp, Artificial Sequence
  Oligonucleotide for detection of SNP TSC0010599
ataagtggtgtty

SEQ ID NO: 33254 - DNA, 13 bp, Artificial Sequence
  Oligonucleotide for detection of SNP TSC0010599
raacaccacttat

SEQ ID NO: 33255 - DNA, 13 bp, Artificial Sequence
  Oligonucleotide for detection of SNP TSC0010599
ataagtagtgtty

SEQ ID NO: 33256 - DNA, 13 bp, Artificial Sequence
  Oligonucleotide for detection of SNP TSC0010599
raacactacttat

SEQ ID NO: 33257 - DNA, 13 bp, Artificial Sequence
  Oligonucleotide for detection of SNP TSC0010599
ataagcggtgtty

SEQ ID NO: 33258 - DNA, 13 bp, Artificial Sequence
  Oligonucleotide for detection of SNP TSC0010599
raacaccgcttat

SEQ ID NO: 33259 - DNA, 13 bp, Artificial Sequence
  Oligonucleotide for detection of SNP TSC0010600
aaaaatttttatt

SEQ ID NO: 33260 - DNA, 13 bp, Artificial Sequence
  Oligonucleotide for detection of SNP TSC0010600
aataaaaattttt

SEQ ID NO: 33261 - DNA, 13 bp, Artificial Sequence
  Oligonucleotide for detection of SNP TSC0010600
aaaaatgtttatt

SEQ ID NO: 33262 - DNA, 13 bp, Artificial Sequence
  Oligonucleotide for detection of SNP TSC0010600
aataaacattttt

SEQ ID NO: 33263 - DNA, 13 bp, Artificial Sequence
  Oligonucleotide for detection of SNP TSC0010600
agtaaagattttt

SEQ ID NO: 33264 - DNA, 13 bp, Artificial Sequence
  Oligonucleotide for detection of SNP TSC0010600
aaaaatctttact

SEQ ID NO: 33265 - DNA, 13 bp, Artificial Sequence
  Oligonucleotide for detection of SNP TSC0010600
agtaaatattttt

SEQ ID NO: 33266 - DNA, 13 bp, Artificial Sequence
  Oligonucleotide for detection of SNP TSC0010600
aaaaatatttact

SEQ ID NO: 33267 - DNA, 13 bp, Artificial Sequence
  Oligonucleotide for detection of SNP TSC0010601
aagagtagtgtay

SEQ ID NO: 33268 - DNA, 13 bp, Artificial Sequence
  Oligonucleotide for detection of SNP TSC0010601
rtacactactctt

SEQ ID NO: 33269 - DNA, 13 bp, Artificial Sequence
  Oligonucleotide for detection of SNP TSC0010601
aagagttgtgtay

SEQ ID NO: 33270 - DNA, 13 bp, Artificial Sequence
  Oligonucleotide for detection of SNP TSC0010601
rtacacaactctt

SEQ ID NO: 33271 - DNA, 13 bp, Artificial Sequence
  Oligonucleotide for detection of SNP TSC0010601
aagagtcgtgtay

SEQ ID NO: 33272 - DNA, 13 bp, Artificial Sequence
  Oligonucleotide for detection of SNP TSC0010601
rtacacgactctt

SEQ ID NO: 33273 - DNA, 13 bp, Artificial Sequence
  Oligonucleotide for detection of SNP TSC0010601
gtatattgttttt

SEQ ID NO: 33274 - DNA, 13 bp, Artificial Sequence
  Oligonucleotide for detection of SNP TSC0010601
aaaaacaatatac

SEQ ID NO: 33275 - DNA, 13 bp, Artificial Sequence
  Oligonucleotide for detection of SNP TSC0010601
gtatatggttttt

SEQ ID NO: 33276 - DNA, 13 bp, Artificial Sequence
  Oligonucleotide for detection of SNP TSC0010601
aaaaaccatatac

SEQ ID NO: 33277 - DNA, 13 bp, Artificial Sequence
  Oligonucleotide for detection of SNP TSC0010601
gtatacggttttt

SEQ ID NO: 33278 - DNA, 13 bp, Artificial Sequence
  Oligonucleotide for detection of SNP TSC0010601
aaaaaccgtatac

SEQ ID NO: 33279 - DNA, 13 bp, Artificial Sequence
  Oligonucleotide for detection of SNP TSC0010602
gtttttattggat

SEQ ID NO: 33280 - DNA, 13 bp, Artificial Sequence
  Oligonucleotide for detection of SNP TSC0010602
atccaataaaaac

SEQ ID NO: 33281 - DNA, 13 bp, Artificial Sequence
  Oligonucleotide for detection of SNP TSC0010602
gtttttgttggat

SEQ ID NO: 33282 - DNA, 13 bp, Artificial Sequence
  Oligonucleotide for detection of SNP TSC0010602
atccaacaaaaac

SEQ ID NO: 33283 - DNA, 13 bp, Artificial Sequence
  Oligonucleotide for detection of SNP TSC0010603
tagtgtggaaaay

SEQ ID NO: 33284 - DNA, 13 bp, Artificial Sequence
  Oligonucleotide for detection of SNP TSC0010603
rttttccacacta

SEQ ID NO: 33285 - DNA, 13 bp, Artificial Sequence
  Oligonucleotide for detection of SNP TSC0010603
tagtgtagaaaay

SEQ ID NO: 33286 - DNA, 13 bp, Artificial Sequence
  Oligonucleotide for detection of SNP TSC0010603
rttttctacacta

SEQ ID NO: 33287 - DNA, 13 bp, Artificial Sequence
  Oligonucleotide for detection of SNP TSC0010604
ttgatttatttaa

SEQ ID NO: 33288 - DNA, 13 bp, Artificial Sequence
  Oligonucleotide for detection of SNP TSC0010604
ttaaataaatcaa

SEQ ID NO: 33289 - DNA, 13 bp, Artificial Sequence
  Oligonucleotide for detection of SNP TSC0010604
ttgattgatttaa

SEQ ID NO: 33290 - DNA, 13 bp, Artificial Sequence
  Oligonucleotide for detection of SNP TSC0010604
ttaaatcaatcaa

SEQ ID NO: 33291 - DNA, 13 bp, Artificial Sequence
  Oligonucleotide for detection of SNP TSC0010604
ttgggtgagttag

SEQ ID NO: 33292 - DNA, 13 bp, Artificial Sequence
  Oligonucleotide for detection of SNP TSC0010604
ctaactcacccaa

SEQ ID NO: 33293 - DNA, 13 bp, Artificial Sequence
  Oligonucleotide for detection of SNP TSC0010604
ttgggttagttag

SEQ ID NO: 33294 - DNA, 13 bp, Artificial Sequence
  Oligonucleotide for detection of SNP TSC0010604
ctaactaacccaa

SEQ ID NO: 33295 - DNA, 13 bp, Artificial Sequence
  Oligonucleotide for detection of SNP TSC0010605
ttggttaggtggg

SEQ ID NO: 33296 - DNA, 13 bp, Artificial Sequence
  Oligonucleotide for detection of SNP TSC0010605
cccacctaaccaa

SEQ ID NO: 33297 - DNA, 13 bp, Artificial Sequence
  Oligonucleotide for detection of SNP TSC0010605
ttggttgggtggg

SEQ ID NO: 33298 - DNA, 13 bp, Artificial Sequence
  Oligonucleotide for detection of SNP TSC0010605
cccacccaaccaa

SEQ ID NO: 33299 - DNA, 13 bp, Artificial Sequence
  Oligonucleotide for detection of SNP TSC0010606
gatgagtggttgt

SEQ ID NO: 33300 - DNA, 13 bp, Artificial Sequence
  Oligonucleotide for detection of SNP TSC0010606
acaaccactcatc

SEQ ID NO: 33301 - DNA, 13 bp, Artificial Sequence
  Oligonucleotide for detection of SNP TSC0010606
gacgagtggttgt

SEQ ID NO: 33302 - DNA, 13 bp, Artificial Sequence
  Oligonucleotide for detection of SNP TSC0010606
acaaccactcgtc

SEQ ID NO: 33303 - DNA, 13 bp, Artificial Sequence
  Oligonucleotide for detection of SNP TSC0010606
gatgagcggttgt

SEQ ID NO: 33304 - DNA, 13 bp, Artificial Sequence
  Oligonucleotide for detection of SNP TSC0010606
acaaccgctcatc

SEQ ID NO: 33305 - DNA, 13 bp, Artificial Sequence
  Oligonucleotide for detection of SNP TSC0010606
gacgagcggttgt

SEQ ID NO: 33306 - DNA, 13 bp, Artificial Sequence
  Oligonucleotide for detection of SNP TSC0010606
acaaccgctcgtc

SEQ ID NO: 33307 - DNA, 13 bp, Artificial Sequence
  Oligonucleotide for detection of SNP TSC0010606
ataattgtttgty

SEQ ID NO: 33308 - DNA, 13 bp, Artificial Sequence
  Oligonucleotide for detection of SNP TSC0010606
racaaacaattat

SEQ ID NO: 33309 - DNA, 13 bp, Artificial Sequence
  Oligonucleotide for detection of SNP TSC0010606
ataattatttgty

SEQ ID NO: 33310 - DNA, 13 bp, Artificial Sequence
  Oligonucleotide for detection of SNP TSC0010606
racaaataattat

SEQ ID NO: 33311 - DNA, 13 bp, Artificial Sequence
  Oligonucleotide for detection of SNP TSC0010606
ataatcgtttgty

SEQ ID NO: 33312 - DNA, 13 bp, Artificial Sequence
  Oligonucleotide for detection of SNP TSC0010606
racaaacgattat

SEQ ID NO: 33313 - DNA, 13 bp, Artificial Sequence
  Oligonucleotide for detection of SNP TSC0010606
ataattattcgty

SEQ ID NO: 33314 - DNA, 13 bp, Artificial Sequence
  Oligonucleotide for detection of SNP TSC0010606
racgaataattat

SEQ ID NO: 33315 - DNA, 13 bp, Artificial Sequence
  Oligonucleotide for detection of SNP TSC0010606
ataattgttcgty

SEQ ID NO: 33316 - DNA, 13 bp, Artificial Sequence
  Oligonucleotide for detection of SNP TSC0010606
racgaacaattat

SEQ ID NO: 33317 - DNA, 13 bp, Artificial Sequence
  Oligonucleotide for detection of SNP TSC0010606
ataatcgttcgty

SEQ ID NO: 33318 - DNA, 13 bp, Artificial Sequence
  Oligonucleotide for detection of SNP TSC0010606
racgaacgattat

SEQ ID NO: 33319 - DNA, 13 bp, Artificial Sequence
  Oligonucleotide for detection of SNP TSC0010607
gtatttgtggtta

SEQ ID NO: 33320 - DNA, 13 bp, Artificial Sequence
  Oligonucleotide for detection of SNP TSC0010607
taaccacaaatac

SEQ ID NO: 33321 - DNA, 13 bp, Artificial Sequence
  Oligonucleotide for detection of SNP TSC0010607
gtatttatggtta

SEQ ID NO: 33322 - DNA, 13 bp, Artificial Sequence
  Oligonucleotide for detection of SNP TSC0010607
taaccataaatac

SEQ ID NO: 33323 - DNA, 13 bp, Artificial Sequence
  Oligonucleotide for detection of SNP TSC0010608
ggggttaggaggg

SEQ ID NO: 33324 - DNA, 13 bp, Artificial Sequence
  Oligonucleotide for detection of SNP TSC0010608
ccctcctaacccc

SEQ ID NO: 33325 - DNA, 13 bp, Artificial Sequence
  Oligonucleotide for detection of SNP TSC0010608
ggggttgggaggg

SEQ ID NO: 33326 - DNA, 13 bp, Artificial Sequence
  Oligonucleotide for detection of SNP TSC0010608
ccctcccaacccc

SEQ ID NO: 33327 - DNA, 13 bp, Artificial Sequence
  Oligonucleotide for detection of SNP TSC0010609
taatgaaagtaga

SEQ ID NO: 33328 - DNA, 13 bp, Artificial Sequence
  Oligonucleotide for detection of SNP TSC0010609
tctactttcatta

SEQ ID NO: 33329 - DNA, 13 bp, Artificial Sequence
  Oligonucleotide for detection of SNP TSC0010609
taatgatagtaga

SEQ ID NO: 33330 - DNA, 13 bp, Artificial Sequence
  Oligonucleotide for detection of SNP TSC0010609
tctactatcatta

SEQ ID NO: 33331 - DNA, 13 bp, Artificial Sequence
  Oligonucleotide for detection of SNP TSC0010609
tttgtttttatta

SEQ ID NO: 33332 - DNA, 13 bp, Artificial Sequence
  Oligonucleotide for detection of SNP TSC0010609
taataaaaacaaa

SEQ ID NO: 33333 - DNA, 13 bp, Artificial Sequence
  Oligonucleotide for detection of SNP TSC0010609
tttgttgttatta

SEQ ID NO: 33334 - DNA, 13 bp, Artificial Sequence
  Oligonucleotide for detection of SNP TSC0010609
taataacaacaaa

SEQ ID NO: 33335 - DNA, 13 bp, Artificial Sequence
  Oligonucleotide for detection of SNP TSC0010610
tatgtagttggta

SEQ ID NO: 33336 - DNA, 13 bp, Artificial Sequence
  Oligonucleotide for detection of SNP TSC0010610
taccaactacata

SEQ ID NO: 33337 - DNA, 13 bp, Artificial Sequence
  Oligonucleotide for detection of SNP TSC0010610
tatgtaattggta

SEQ ID NO: 33338 - DNA, 13 bp, Artificial Sequence
  Oligonucleotide for detection of SNP TSC0010610
taccaattacata

SEQ ID NO: 33339 - DNA, 13 bp, Artificial Sequence
  Oligonucleotide for detection of SNP TSC0010611
gattttaagatta

SEQ ID NO: 33340 - DNA, 13 bp, Artificial Sequence
  Oligonucleotide for detection of SNP TSC0010611
taatcttaaaatc

SEQ ID NO: 33341 - DNA, 13 bp, Artificial Sequence
  Oligonucleotide for detection of SNP TSC0010611
gatttttagatta

SEQ ID NO: 33342 - DNA, 13 bp, Artificial Sequence
  Oligonucleotide for detection of SNP TSC0010611
taatctaaaaatc

SEQ ID NO: 33343 - DNA, 13 bp, Artificial Sequence
  Oligonucleotide for detection of SNP TSC0010612
agttttaaggtty

SEQ ID NO: 33344 - DNA, 13 bp, Artificial Sequence
  Oligonucleotide for detection of SNP TSC0010612
raaccttaaaact

SEQ ID NO: 33345 - DNA, 13 bp, Artificial Sequence
  Oligonucleotide for detection of SNP TSC0010612
agttttgaggtty

SEQ ID NO: 33346 - DNA, 13 bp, Artificial Sequence
  Oligonucleotide for detection of SNP TSC0010612
raacctcaaaact

SEQ ID NO: 33347 - DNA, 13 bp, Artificial Sequence
  Oligonucleotide for detection of SNP TSC0010613
gagtaggtaatga

SEQ ID NO: 33348 - DNA, 13 bp, Artificial Sequence
  Oligonucleotide for detection of SNP TSC0010613
tcattacctactc

SEQ ID NO: 33349 - DNA, 13 bp, Artificial Sequence
  Oligonucleotide for detection of SNP TSC0010613
gagtagttaatga

SEQ ID NO: 33350 - DNA, 13 bp, Artificial Sequence
  Oligonucleotide for detection of SNP TSC0010613
tcattaactactc

SEQ ID NO: 33351 - DNA, 13 bp, Artificial Sequence
  Oligonucleotide for detection of SNP TSC0010613
ttattgtttgtty

SEQ ID NO: 33352 - DNA, 13 bp, Artificial Sequence
  Oligonucleotide for detection of SNP TSC0010613
raacaaacaataa

SEQ ID NO: 33353 - DNA, 13 bp, Artificial Sequence
  Oligonucleotide for detection of SNP TSC0010613
ttattgattgtty

SEQ ID NO: 33354 - DNA, 13 bp, Artificial Sequence
  Oligonucleotide for detection of SNP TSC0010613
raacaatcaataa

SEQ ID NO: 33355 - DNA, 13 bp, Artificial Sequence
  Oligonucleotide for detection of SNP TSC0010614
tttattgtagagg

SEQ ID NO: 33356 - DNA, 13 bp, Artificial Sequence
  Oligonucleotide for detection of SNP TSC0010614
cctctacaataaa

SEQ ID NO: 33357 - DNA, 13 bp, Artificial Sequence
  Oligonucleotide for detection of SNP TSC0010614
tttattatagagg

SEQ ID NO: 33358 - DNA, 13 bp, Artificial Sequence
  Oligonucleotide for detection of SNP TSC0010614
cctctataataaa

SEQ ID NO: 33359 - DNA, 13 bp, Artificial Sequence
  Oligonucleotide for detection of SNP TSC0010615
ggagggaagtatg

SEQ ID NO: 33360 - DNA, 13 bp, Artificial Sequence
  Oligonucleotide for detection of SNP TSC0010615
catacttccctcc

SEQ ID NO: 33361 - DNA, 13 bp, Artificial Sequence
  Oligonucleotide for detection of SNP TSC0010615
ggagggtagtatg

SEQ ID NO: 33362 - DNA, 13 bp, Artificial Sequence
  Oligonucleotide for detection of SNP TSC0010615
catactaccctcc

SEQ ID NO: 33363 - DNA, 13 bp, Artificial Sequence
  Oligonucleotide for detection of SNP TSC0010615
ggagggaagtacg

SEQ ID NO: 33364 - DNA, 13 bp, Artificial Sequence
  Oligonucleotide for detection of SNP TSC0010615
cgtacttccctcc

SEQ ID NO: 33365 - DNA, 13 bp, Artificial Sequence
  Oligonucleotide for detection of SNP TSC0010615
ggagggtagtacg

SEQ ID NO: 33366 - DNA, 13 bp, Artificial Sequence
  Oligonucleotide for detection of SNP TSC0010615
cgtactaccctcc

SEQ ID NO: 33367 - DNA, 13 bp, Artificial Sequence
  Oligonucleotide for detection of SNP TSC0010615
tgtgtttttttty

SEQ ID NO: 33368 - DNA, 13 bp, Artificial Sequence
  Oligonucleotide for detection of SNP TSC0010615
raaaaaaaacaca

SEQ ID NO: 33369 - DNA, 13 bp, Artificial Sequence
  Oligonucleotide for detection of SNP TSC0010615
tgtgttgttttty

SEQ ID NO: 33370 - DNA, 13 bp, Artificial Sequence
  Oligonucleotide for detection of SNP TSC0010615
raaaaacaacaca

SEQ ID NO: 33371 - DNA, 13 bp, Artificial Sequence
  Oligonucleotide for detection of SNP TSC0010615
cgtgtttttttty

SEQ ID NO: 33372 - DNA, 13 bp, Artificial Sequence
  Oligonucleotide for detection of SNP TSC0010615
raaaaaaaacacg

SEQ ID NO: 33373 - DNA, 13 bp, Artificial Sequence
  Oligonucleotide for detection of SNP TSC0010615
cgtgttgttttty

SEQ ID NO: 33374 - DNA, 13 bp, Artificial Sequence
  Oligonucleotide for detection of SNP TSC0010615
raaaaacaacacg

SEQ ID NO: 33375 - DNA, 13 bp, Artificial Sequence
  Oligonucleotide for detection of SNP TSC0010616
gtgggggaggata

SEQ ID NO: 33376 - DNA, 13 bp, Artificial Sequence
  Oligonucleotide for detection of SNP TSC0010616
tatcctcccccac

SEQ ID NO: 33377 - DNA, 13 bp, Artificial Sequence
  Oligonucleotide for detection of SNP TSC0010616
gtggggaaggata

SEQ ID NO: 33378 - DNA, 13 bp, Artificial Sequence
  Oligonucleotide for detection of SNP TSC0010616
tatccttccccac

SEQ ID NO: 33379 - DNA, 13 bp, Artificial Sequence
  Oligonucleotide for detection of SNP TSC0010617
aagttatgaattt

SEQ ID NO: 33380 - DNA, 13 bp, Artificial Sequence
  Oligonucleotide for detection of SNP TSC0010617
aaattcataactt

SEQ ID NO: 33381 - DNA, 13 bp, Artificial Sequence
  Oligonucleotide for detection of SNP TSC0010617
aagttaggaattt

SEQ ID NO: 33382 - DNA, 13 bp, Artificial Sequence
  Oligonucleotide for detection of SNP TSC0010617
aaattcctaactt

SEQ ID NO: 33383 - DNA, 13 bp, Artificial Sequence
  Oligonucleotide for detection of SNP TSC0010617
aagttacgaattt

SEQ ID NO: 33384 - DNA, 13 bp, Artificial Sequence
  Oligonucleotide for detection of SNP TSC0010617
aaattcgtaactt

SEQ ID NO: 33385 - DNA, 13 bp, Artificial Sequence
  Oligonucleotide for detection of SNP TSC0010617
aagtttttggttt

SEQ ID NO: 33386 - DNA, 13 bp, Artificial Sequence
  Oligonucleotide for detection of SNP TSC0010617
aaaccaaaaactt

SEQ ID NO: 33387 - DNA, 13 bp, Artificial Sequence
  Oligonucleotide for detection of SNP TSC0010617
aagttcgtggttt

SEQ ID NO: 33388 - DNA, 13 bp, Artificial Sequence
  Oligonucleotide for detection of SNP TSC0010617
aaaccacgaactt

SEQ ID NO: 33389 - DNA, 13 bp, Artificial Sequence
  Oligonucleotide for detection of SNP TSC0010618
ttggtgaaaaata

SEQ ID NO: 33390 - DNA, 13 bp, Artificial Sequence
  Oligonucleotide for detection of SNP TSC0010618
tatttttcaccaa

SEQ ID NO: 33391 - DNA, 13 bp, Artificial Sequence
  Oligonucleotide for detection of SNP TSC0010618
ttggtggaaaata

SEQ ID NO: 33392 - DNA, 13 bp, Artificial Sequence
  Oligonucleotide for detection of SNP TSC0010618
tattttccaccaa

SEQ ID NO: 33393 - DNA, 13 bp, Artificial Sequence
  Oligonucleotide for detection of SNP TSC0010619
attaggaatgaat

SEQ ID NO: 33394 - DNA, 13 bp, Artificial Sequence
  Oligonucleotide for detection of SNP TSC0010619
attcattcctaat

SEQ ID NO: 33395 - DNA, 13 bp, Artificial Sequence
  Oligonucleotide for detection of SNP TSC0010619
attagggatgaat

SEQ ID NO: 33396 - DNA, 13 bp, Artificial Sequence
  Oligonucleotide for detection of SNP TSC0010619
attcatccctaat

SEQ ID NO: 33397 - DNA, 13 bp, Artificial Sequence
  Oligonucleotide for detection of SNP TSC0010620
aagataatattgy

SEQ ID NO: 33398 - DNA, 13 bp, Artificial Sequence
  Oligonucleotide for detection of SNP TSC0010620
rcaatattatctt

SEQ ID NO: 33399 - DNA, 13 bp, Artificial Sequence
  Oligonucleotide for detection of SNP TSC0010620
aagatagtattgy

SEQ ID NO: 33400 - DNA, 13 bp, Artificial Sequence
  Oligonucleotide for detection of SNP TSC0010620
rcaatactatctt

SEQ ID NO: 33401 - DNA, 13 bp, Artificial Sequence
  Oligonucleotide for detection of SNP TSC0010622
agagtaattatgg

SEQ ID NO: 33402 - DNA, 13 bp, Artificial Sequence
  Oligonucleotide for detection of SNP TSC0010622
ccataattactct

SEQ ID NO: 33403 - DNA, 13 bp, Artificial Sequence
  Oligonucleotide for detection of SNP TSC0010622
agagtagttatgg

SEQ ID NO: 33404 - DNA, 13 bp, Artificial Sequence
  Oligonucleotide for detection of SNP TSC0010622
ccataactactct

SEQ ID NO: 33405 - DNA, 13 bp, Artificial Sequence
  Oligonucleotide for detection of SNP TSC0010623
tttgttgggagta

SEQ ID NO: 33406 - DNA, 13 bp, Artificial Sequence
  Oligonucleotide for detection of SNP TSC0010623
tactcccaacaaa

SEQ ID NO: 33407 - DNA, 13 bp, Artificial Sequence
  Oligonucleotide for detection of SNP TSC0010623
tttgttaggagta

SEQ ID NO: 33408 - DNA, 13 bp, Artificial Sequence
  Oligonucleotide for detection of SNP TSC0010623
tactcctaacaaa

SEQ ID NO: 33409 - DNA, 13 bp, Artificial Sequence
  Oligonucleotide for detection of SNP TSC0010624
ggtagagttatta

SEQ ID NO: 33410 - DNA, 13 bp, Artificial Sequence
  Oligonucleotide for detection of SNP TSC0010624
taataactctacc

SEQ ID NO: 33411 - DNA, 13 bp, Artificial Sequence
  Oligonucleotide for detection of SNP TSC0010624
ggtagaattatta

SEQ ID NO: 33412 - DNA, 13 bp, Artificial Sequence
  Oligonucleotide for detection of SNP TSC0010624
taataattctacc

SEQ ID NO: 33413 - DNA, 13 bp, Artificial Sequence
  Oligonucleotide for detection of SNP TSC0010625
gtatggatatttt

SEQ ID NO: 33414 - DNA, 13 bp, Artificial Sequence
  Oligonucleotide for detection of SNP TSC0010625
aaaatatccatac

SEQ ID NO: 33415 - DNA, 13 bp, Artificial Sequence
  Oligonucleotide for detection of SNP TSC0010625
gtatggttatttt

SEQ ID NO: 33416 - DNA, 13 bp, Artificial Sequence
  Oligonucleotide for detection of SNP TSC0010625
aaaataaccatac

SEQ ID NO: 33417 - DNA, 13 bp, Artificial Sequence
  Oligonucleotide for detection of SNP TSC0010625
agggtgtttatay

SEQ ID NO: 33418 - DNA, 13 bp, Artificial Sequence
  Oligonucleotide for detection of SNP TSC0010625
rtataaacaccct

SEQ ID NO: 33419 - DNA, 13 bp, Artificial Sequence
  Oligonucleotide for detection of SNP TSC0010625
agggtggttatay

SEQ ID NO: 33420 - DNA, 13 bp, Artificial Sequence
  Oligonucleotide for detection of SNP TSC0010625
rtataaccaccct

SEQ ID NO: 33421 - DNA, 13 bp, Artificial Sequence
  Oligonucleotide for detection of SNP TSC0010626
ggatttaatttay

SEQ ID NO: 33422 - DNA, 13 bp, Artificial Sequence
  Oligonucleotide for detection of SNP TSC0010626
rtaaattaaatcc

SEQ ID NO: 33423 - DNA, 13 bp, Artificial Sequence
  Oligonucleotide for detection of SNP TSC0010626
ggatttgatttay

SEQ ID NO: 33424 - DNA, 13 bp, Artificial Sequence
  Oligonucleotide for detection of SNP TSC0010626
rtaaatcaaatcc

SEQ ID NO: 33425 - DNA, 13 bp, Artificial Sequence
  Oligonucleotide for detection of SNP TSC0010626
ggattcgatttay

SEQ ID NO: 33426 - DNA, 13 bp, Artificial Sequence
  Oligonucleotide for detection of SNP TSC0010626
rtaaatcgaatcc

SEQ ID NO: 33427 - DNA, 13 bp, Artificial Sequence
  Oligonucleotide for detection of SNP TSC0010626
gtgggttggatty

SEQ ID NO: 33428 - DNA, 13 bp, Artificial Sequence
  Oligonucleotide for detection of SNP TSC0010626
raatccaacccac

SEQ ID NO: 33429 - DNA, 13 bp, Artificial Sequence
  Oligonucleotide for detection of SNP TSC0010626
gtgggtcggatty

SEQ ID NO: 33430 - DNA, 13 bp, Artificial Sequence
  Oligonucleotide for detection of SNP TSC0010626
raatccgacccac

SEQ ID NO: 33431 - DNA, 13 bp, Artificial Sequence
  Oligonucleotide for detection of SNP TSC0010629
taaattgttatta

SEQ ID NO: 33432 - DNA, 13 bp, Artificial Sequence
  Oligonucleotide for detection of SNP TSC0010629
taataacaattta

SEQ ID NO: 33433 - DNA, 13 bp, Artificial Sequence
  Oligonucleotide for detection of SNP TSC0010629
taaatcgttatta

SEQ ID NO: 33434 - DNA, 13 bp, Artificial Sequence
  Oligonucleotide for detection of SNP TSC0010629
taataacgattta

SEQ ID NO: 33435 - DNA, 13 bp, Artificial Sequence
  Oligonucleotide for detection of SNP TSC0010629
taataatgattta

SEQ ID NO: 33436 - DNA, 13 bp, Artificial Sequence
  Oligonucleotide for detection of SNP TSC0010629
taaatcattatta

SEQ ID NO: 33437 - DNA, 13 bp, Artificial Sequence
  Oligonucleotide for detection of SNP TSC0010630
gaaattaaaaaaa

SEQ ID NO: 33438 - DNA, 13 bp, Artificial Sequence
  Oligonucleotide for detection of SNP TSC0010630
tttttttaatttc

SEQ ID NO: 33439 - DNA, 13 bp, Artificial Sequence
  Oligonucleotide for detection of SNP TSC0010630
gaaatttaaaaaa

SEQ ID NO: 33440 - DNA, 13 bp, Artificial Sequence
  Oligonucleotide for detection of SNP TSC0010630
ttttttaaatttc

SEQ ID NO: 33441 - DNA, 13 bp, Artificial Sequence
  Oligonucleotide for detection of SNP TSC0010630
tttttttaattty

SEQ ID NO: 33442 - DNA, 13 bp, Artificial Sequence
  Oligonucleotide for detection of SNP TSC0010630
raaattaaaaaaa

SEQ ID NO: 33443 - DNA, 13 bp, Artificial Sequence
  Oligonucleotide for detection of SNP TSC0010630
ttttttaaattty

SEQ ID NO: 33444 - DNA, 13 bp, Artificial Sequence
  Oligonucleotide for detection of SNP TSC0010630
raaatttaaaaaa

SEQ ID NO: 33445 - DNA, 13 bp, Artificial Sequence
  Oligonucleotide for detection of SNP TSC0010636
gaggtaggattgg

SEQ ID NO: 33446 - DNA, 13 bp, Artificial Sequence
  Oligonucleotide for detection of SNP TSC0010636
ccaatcctacctc

SEQ ID NO: 33447 - DNA, 13 bp, Artificial Sequence
  Oligonucleotide for detection of SNP TSC0010636
gaggtaagattgg

SEQ ID NO: 33448 - DNA, 13 bp, Artificial Sequence
  Oligonucleotide for detection of SNP TSC0010636
ccaatcttacctc

SEQ ID NO: 33449 - DNA, 13 bp, Artificial Sequence
  Oligonucleotide for detection of SNP TSC0010637
taaaggaagtgaa

SEQ ID NO: 33450 - DNA, 13 bp, Artificial Sequence
  Oligonucleotide for detection of SNP TSC0010637
ttcacttccttta

SEQ ID NO: 33451 - DNA, 13 bp, Artificial Sequence
  Oligonucleotide for detection of SNP TSC0010637
taaagggagtgaa

SEQ ID NO: 33452 - DNA, 13 bp, Artificial Sequence
  Oligonucleotide for detection of SNP TSC0010637
ttcactcccttta

SEQ ID NO: 33453 - DNA, 13 bp, Artificial Sequence
  Oligonucleotide for detection of SNP TSC0010638
ggagaaattttty

SEQ ID NO: 33454 - DNA, 13 bp, Artificial Sequence
  Oligonucleotide for detection of SNP TSC0010638
raaaaatttctcc

SEQ ID NO: 33455 - DNA, 13 bp, Artificial Sequence
  Oligonucleotide for detection of SNP TSC0010638
ggagaatttttty

SEQ ID NO: 33456 - DNA, 13 bp, Artificial Sequence
  Oligonucleotide for detection of SNP TSC0010638
raaaaaattctcc

SEQ ID NO: 33457 - DNA, 13 bp, Artificial Sequence
  Oligonucleotide for detection of SNP TSC0010638
gaaaaatttttty

SEQ ID NO: 33458 - DNA, 13 bp, Artificial Sequence
  Oligonucleotide for detection of SNP TSC0010638
raaaaaatttttc

SEQ ID NO: 33459 - DNA, 13 bp, Artificial Sequence
  Oligonucleotide for detection of SNP TSC0010638
gaaaaagttttty

SEQ ID NO: 33460 - DNA, 13 bp, Artificial Sequence
  Oligonucleotide for detection of SNP TSC0010638
raaaaactttttc

SEQ ID NO: 33461 - DNA, 13 bp, Artificial Sequence
  Oligonucleotide for detection of SNP TSC0010642
ggagagtatgttt

SEQ ID NO: 33462 - DNA, 13 bp, Artificial Sequence
  Oligonucleotide for detection of SNP TSC0010642
aaacatactctcc

SEQ ID NO: 33463 - DNA, 13 bp, Artificial Sequence
  Oligonucleotide for detection of SNP TSC0010642
ggagaggatgttt

SEQ ID NO: 33464 - DNA, 13 bp, Artificial Sequence
  Oligonucleotide for detection of SNP TSC0010642
aaacatcctctcc

SEQ ID NO: 33465 - DNA, 13 bp, Artificial Sequence
  Oligonucleotide for detection of SNP TSC0010642
aggtatgttttty

SEQ ID NO: 33466 - DNA, 13 bp, Artificial Sequence
  Oligonucleotide for detection of SNP TSC0010642
raaaaacatacct

SEQ ID NO: 33467 - DNA, 13 bp, Artificial Sequence
  Oligonucleotide for detection of SNP TSC0010642
aggtattttttty

SEQ ID NO: 33468 - DNA, 13 bp, Artificial Sequence
  Oligonucleotide for detection of SNP TSC0010642
raaaaaaatacct

SEQ ID NO: 33469 - DNA, 13 bp, Artificial Sequence
  Oligonucleotide for detection of SNP TSC0010643
ttgtttatgttgg

SEQ ID NO: 33470 - DNA, 13 bp, Artificial Sequence
  Oligonucleotide for detection of SNP TSC0010643
ccaacataaacaa

SEQ ID NO: 33471 - DNA, 13 bp, Artificial Sequence
  Oligonucleotide for detection of SNP TSC0010643
ttgtttgtgttgg

SEQ ID NO: 33472 - DNA, 13 bp, Artificial Sequence
  Oligonucleotide for detection of SNP TSC0010643
ccaacacaaacaa

SEQ ID NO: 33473 - DNA, 13 bp, Artificial Sequence
  Oligonucleotide for detection of SNP TSC0010644
ttttaggagttta

SEQ ID NO: 33474 - DNA, 13 bp, Artificial Sequence
  Oligonucleotide for detection of SNP TSC0010644
taaactcctaaaa

SEQ ID NO: 33475 - DNA, 13 bp, Artificial Sequence
  Oligonucleotide for detection of SNP TSC0010644
ttttagaagttta

SEQ ID NO: 33476 - DNA, 13 bp, Artificial Sequence
  Oligonucleotide for detection of SNP TSC0010644
taaacttctaaaa

SEQ ID NO: 33477 - DNA, 13 bp, Artificial Sequence
  Oligonucleotide for detection of SNP TSC0010645
agattaggggttg

SEQ ID NO: 33478 - DNA, 13 bp, Artificial Sequence
  Oligonucleotide for detection of SNP TSC0010645
caacccctaatct

SEQ ID NO: 33479 - DNA, 13 bp, Artificial Sequence
  Oligonucleotide for detection of SNP TSC0010645
agattaagggttg

SEQ ID NO: 33480 - DNA, 13 bp, Artificial Sequence
  Oligonucleotide for detection of SNP TSC0010645
caacccttaatct

SEQ ID NO: 33481 - DNA, 13 bp, Artificial Sequence
  Oligonucleotide for detection of SNP TSC0010646
gtaatgataatay

SEQ ID NO: 33482 - DNA, 13 bp, Artificial Sequence
  Oligonucleotide for detection of SNP TSC0010646
rtattatcattac

SEQ ID NO: 33483 - DNA, 13 bp, Artificial Sequence
  Oligonucleotide for detection of SNP TSC0010646
gtaatgttaatay

SEQ ID NO: 33484 - DNA, 13 bp, Artificial Sequence
  Oligonucleotide for detection of SNP TSC0010646
rtattaacattac

SEQ ID NO: 33485 - DNA, 13 bp, Artificial Sequence
  Oligonucleotide for detection of SNP TSC0010646
gtattgttattgy

SEQ ID NO: 33486 - DNA, 13 bp, Artificial Sequence
  Oligonucleotide for detection of SNP TSC0010646
rcaataacaatac

SEQ ID NO: 33487 - DNA, 13 bp, Artificial Sequence
  Oligonucleotide for detection of SNP TSC0010646
gtattggtattgy

SEQ ID NO: 33488 - DNA, 13 bp, Artificial Sequence
  Oligonucleotide for detection of SNP TSC0010646
rcaataccaatac

SEQ ID NO: 33489 - DNA, 13 bp, Artificial Sequence
  Oligonucleotide for detection of SNP TSC0010647
tgatgtttaatga

SEQ ID NO: 33490 - DNA, 13 bp, Artificial Sequence
  Oligonucleotide for detection of SNP TSC0010647
tcattaaacatca

SEQ ID NO: 33491 - DNA, 13 bp, Artificial Sequence
  Oligonucleotide for detection of SNP TSC0010647
tgatgtgtaatga

SEQ ID NO: 33492 - DNA, 13 bp, Artificial Sequence
  Oligonucleotide for detection of SNP TSC0010647
tcattacacatca

SEQ ID NO: 33493 - DNA, 13 bp, Artificial Sequence
  Oligonucleotide for detection of SNP TSC0010647
tgatgtttaacga

SEQ ID NO: 33494 - DNA, 13 bp, Artificial Sequence
  Oligonucleotide for detection of SNP TSC0010647
tcgttaaacatca

SEQ ID NO: 33495 - DNA, 13 bp, Artificial Sequence
  Oligonucleotide for detection of SNP TSC0010647
tgatgtgtaacga

SEQ ID NO: 33496 - DNA, 13 bp, Artificial Sequence
  Oligonucleotide for detection of SNP TSC0010647
tcgttacacatca

SEQ ID NO: 33497 - DNA, 13 bp, Artificial Sequence
  Oligonucleotide for detection of SNP TSC0010647
ttgttagatatta

SEQ ID NO: 33498 - DNA, 13 bp, Artificial Sequence
  Oligonucleotide for detection of SNP TSC0010647
taatatctaacaa

SEQ ID NO: 33499 - DNA, 13 bp, Artificial Sequence
  Oligonucleotide for detection of SNP TSC0010647
ttgttatatatta

SEQ ID NO: 33500 - DNA, 13 bp, Artificial Sequence
  Oligonucleotide for detection of SNP TSC0010647
taatatataacaa

SEQ ID NO: 33501 - DNA, 13 bp, Artificial Sequence
  Oligonucleotide for detection of SNP TSC0010647
tcgttagatatta

SEQ ID NO: 33502 - DNA, 13 bp, Artificial Sequence
  Oligonucleotide for detection of SNP TSC0010647
taatatctaacga

SEQ ID NO: 33503 - DNA, 13 bp, Artificial Sequence
  Oligonucleotide for detection of SNP TSC0010647
tcgttatatatta

SEQ ID NO: 33504 - DNA, 13 bp, Artificial Sequence
  Oligonucleotide for detection of SNP TSC0010647
taatatataacga

SEQ ID NO: 33505 - DNA, 13 bp, Artificial Sequence
  Oligonucleotide for detection of SNP TSC0010664
gtgtagattgagy

SEQ ID NO: 33506 - DNA, 13 bp, Artificial Sequence
  Oligonucleotide for detection of SNP TSC0010664
rctcaatctacac

SEQ ID NO: 33507 - DNA, 13 bp, Artificial Sequence
  Oligonucleotide for detection of SNP TSC0010664
gtgtagtttgagy

SEQ ID NO: 33508 - DNA, 13 bp, Artificial Sequence
  Oligonucleotide for detection of SNP TSC0010664
rctcaaactacac

SEQ ID NO: 33509 - DNA, 13 bp, Artificial Sequence
  Oligonucleotide for detection of SNP TSC0010664
gtttagtttgtay

SEQ ID NO: 33510 - DNA, 13 bp, Artificial Sequence
  Oligonucleotide for detection of SNP TSC0010664
rtacaaactaaac

SEQ ID NO: 33511 - DNA, 13 bp, Artificial Sequence
  Oligonucleotide for detection of SNP TSC0010664
gtttaggttgtay

SEQ ID NO: 33512 - DNA, 13 bp, Artificial Sequence
  Oligonucleotide for detection of SNP TSC0010664
rtacaacctaaac

SEQ ID NO: 33513 - DNA, 13 bp, Artificial Sequence
  Oligonucleotide for detection of SNP TSC0010673
tttgggtgttatg

SEQ ID NO: 33514 - DNA, 13 bp, Artificial Sequence
  Oligonucleotide for detection of SNP TSC0010673
cataacacccaaa

SEQ ID NO: 33515 - DNA, 13 bp, Artificial Sequence
  Oligonucleotide for detection of SNP TSC0010673
tttgggcgttatg

SEQ ID NO: 33516 - DNA, 13 bp, Artificial Sequence
  Oligonucleotide for detection of SNP TSC0010673
cataacgcccaaa

SEQ ID NO: 33517 - DNA, 13 bp, Artificial Sequence
  Oligonucleotide for detection of SNP TSC0010673
tatgatgtttaga

SEQ ID NO: 33518 - DNA, 13 bp, Artificial Sequence
  Oligonucleotide for detection of SNP TSC0010673
tctaaacatcata

SEQ ID NO: 33519 - DNA, 13 bp, Artificial Sequence
  Oligonucleotide for detection of SNP TSC0010673
tatgatatttaga

SEQ ID NO: 33520 - DNA, 13 bp, Artificial Sequence
  Oligonucleotide for detection of SNP TSC0010673
tctaaatatcata

SEQ ID NO: 33521 - DNA, 13 bp, Artificial Sequence
  Oligonucleotide for detection of SNP TSC0010673
tatgacgtttaga

SEQ ID NO: 33522 - DNA, 13 bp, Artificial Sequence
  Oligonucleotide for detection of SNP TSC0010673
tctaaacgtcata

SEQ ID NO: 33523 - DNA, 13 bp, Artificial Sequence
  Oligonucleotide for detection of SNP TSC0010674
atgtaggttggga

SEQ ID NO: 33524 - DNA, 13 bp, Artificial Sequence
  Oligonucleotide for detection of SNP TSC0010674
tcccaacctacat

SEQ ID NO: 33525 - DNA, 13 bp, Artificial Sequence
  Oligonucleotide for detection of SNP TSC0010674
atgtagattggga

SEQ ID NO: 33526 - DNA, 13 bp, Artificial Sequence
  Oligonucleotide for detection of SNP TSC0010674
tcccaatctacat

SEQ ID NO: 33527 - DNA, 13 bp, Artificial Sequence
  Oligonucleotide for detection of SNP TSC0010676
ttaagtgggtggg

SEQ ID NO: 33528 - DNA, 13 bp, Artificial Sequence
  Oligonucleotide for detection of SNP TSC0010676
cccacccacttaa

SEQ ID NO: 33529 - DNA, 13 bp, Artificial Sequence
  Oligonucleotide for detection of SNP TSC0010676
ttaagtaggtggg

SEQ ID NO: 33530 - DNA, 13 bp, Artificial Sequence
  Oligonucleotide for detection of SNP TSC0010676
cccacctacttaa

SEQ ID NO: 33531 - DNA, 13 bp, Artificial Sequence
  Oligonucleotide for detection of SNP TSC0010689
tttgtggtagtty

SEQ ID NO: 33532 - DNA, 13 bp, Artificial Sequence
  Oligonucleotide for detection of SNP TSC0010689
raactaccacaaa

SEQ ID NO: 33533 - DNA, 13 bp, Artificial Sequence
  Oligonucleotide for detection of SNP TSC0010689
tttgtgatagtty

SEQ ID NO: 33534 - DNA, 13 bp, Artificial Sequence
  Oligonucleotide for detection of SNP TSC0010689
raactatcacaaa

SEQ ID NO: 33535 - DNA, 13 bp, Artificial Sequence
  Oligonucleotide for detection of SNP TSC0010700
atgtaaaattgat

SEQ ID NO: 33536 - DNA, 13 bp, Artificial Sequence
  Oligonucleotide for detection of SNP TSC0010700
atcaattttacat

SEQ ID NO: 33537 - DNA, 13 bp, Artificial Sequence
  Oligonucleotide for detection of SNP TSC0010700
atgtaatattgat

SEQ ID NO: 33538 - DNA, 13 bp, Artificial Sequence
  Oligonucleotide for detection of SNP TSC0010700
atcaatattacat

SEQ ID NO: 33539 - DNA, 13 bp, Artificial Sequence
  Oligonucleotide for detection of SNP TSC0010700
attagttttgtat

SEQ ID NO: 33540 - DNA, 13 bp, Artificial Sequence
  Oligonucleotide for detection of SNP TSC0010700
atacaaaactaat

SEQ ID NO: 33541 - DNA, 13 bp, Artificial Sequence
  Oligonucleotide for detection of SNP TSC0010700
attagtattgtat

SEQ ID NO: 33542 - DNA, 13 bp, Artificial Sequence
  Oligonucleotide for detection of SNP TSC0010700
atacaatactaat

SEQ ID NO: 33543 - DNA, 13 bp, Artificial Sequence
  Oligonucleotide for detection of SNP TSC0010701
gaagtttagagag

SEQ ID NO: 33544 - DNA, 13 bp, Artificial Sequence
  Oligonucleotide for detection of SNP TSC0010701
ctctctaaacttc

SEQ ID NO: 33545 - DNA, 13 bp, Artificial Sequence
  Oligonucleotide for detection of SNP TSC0010701
gaagttgagagag

SEQ ID NO: 33546 - DNA, 13 bp, Artificial Sequence
  Oligonucleotide for detection of SNP TSC0010701
ctctctcaacttc

SEQ ID NO: 33547 - DNA, 13 bp, Artificial Sequence
  Oligonucleotide for detection of SNP TSC0010701
ttttttgagttty

SEQ ID NO: 33548 - DNA, 13 bp, Artificial Sequence
  Oligonucleotide for detection of SNP TSC0010701
raaactcaaaaaa

SEQ ID NO: 33549 - DNA, 13 bp, Artificial Sequence
  Oligonucleotide for detection of SNP TSC0010701
tttttttagttty

SEQ ID NO: 33550 - DNA, 13 bp, Artificial Sequence
  Oligonucleotide for detection of SNP TSC0010701
raaactaaaaaaa

SEQ ID NO: 33551 - DNA, 13 bp, Artificial Sequence
  Oligonucleotide for detection of SNP TSC0010702
tgtaggaatttty

SEQ ID NO: 33552 - DNA, 13 bp, Artificial Sequence
  Oligonucleotide for detection of SNP TSC0010702
raaaattcctaca

SEQ ID NO: 33553 - DNA, 13 bp, Artificial Sequence
  Oligonucleotide for detection of SNP TSC0010702
tgtagggatttty

SEQ ID NO: 33554 - DNA, 13 bp, Artificial Sequence
  Oligonucleotide for detection of SNP TSC0010702
raaaatccctaca

SEQ ID NO: 33555 - DNA, 13 bp, Artificial Sequence
  Oligonucleotide for detection of SNP TSC0010705
gtaattatttttg

SEQ ID NO: 33556 - DNA, 13 bp, Artificial Sequence
  Oligonucleotide for detection of SNP TSC0010705
caaaaataattac

SEQ ID NO: 33557 - DNA, 13 bp, Artificial Sequence
  Oligonucleotide for detection of SNP TSC0010705
gtaattgtttttg

SEQ ID NO: 33558 - DNA, 13 bp, Artificial Sequence
  Oligonucleotide for detection of SNP TSC0010705
caaaaacaattac

SEQ ID NO: 33559 - DNA, 13 bp, Artificial Sequence
  Oligonucleotide for detection of SNP TSC0010705
gtaatcgtttttg

SEQ ID NO: 33560 - DNA, 13 bp, Artificial Sequence
  Oligonucleotide for detection of SNP TSC0010705
caaaaacgattac

SEQ ID NO: 33561 - DNA, 13 bp, Artificial Sequence
  Oligonucleotide for detection of SNP TSC0010705
tagaggtgattgy

SEQ ID NO: 33562 - DNA, 13 bp, Artificial Sequence
  Oligonucleotide for detection of SNP TSC0010705
rcaatcacctcta

SEQ ID NO: 33563 - DNA, 13 bp, Artificial Sequence
  Oligonucleotide for detection of SNP TSC0010705
tagaggcgattgy

SEQ ID NO: 33564 - DNA, 13 bp, Artificial Sequence
  Oligonucleotide for detection of SNP TSC0010705
rcaatcgcctcta

SEQ ID NO: 33565 - DNA, 13 bp, Artificial Sequence
  Oligonucleotide for detection of SNP TSC0010707
tttattagaaaat

SEQ ID NO: 33566 - DNA, 13 bp, Artificial Sequence
  Oligonucleotide for detection of SNP TSC0010707
attttctaataaa

SEQ ID NO: 33567 - DNA, 13 bp, Artificial Sequence
  Oligonucleotide for detection of SNP TSC0010707
tttattggaaaat

SEQ ID NO: 33568 - DNA, 13 bp, Artificial Sequence
  Oligonucleotide for detection of SNP TSC0010707
attttccaataaa

SEQ ID NO: 33569 - DNA, 13 bp, Artificial Sequence
  Oligonucleotide for detection of SNP TSC0010707
tttatcggaaaat

SEQ ID NO: 33570 - DNA, 13 bp, Artificial Sequence
  Oligonucleotide for detection of SNP TSC0010707
attttccgataaa

SEQ ID NO: 33571 - DNA, 13 bp, Artificial Sequence
  Oligonucleotide for detection of SNP TSC0010707
attttttggtgga

SEQ ID NO: 33572 - DNA, 13 bp, Artificial Sequence
  Oligonucleotide for detection of SNP TSC0010707
tccaccaaaaaat

SEQ ID NO: 33573 - DNA, 13 bp, Artificial Sequence
  Oligonucleotide for detection of SNP TSC0010707
atttttcggtgga

SEQ ID NO: 33574 - DNA, 13 bp, Artificial Sequence
  Oligonucleotide for detection of SNP TSC0010707
tccaccgaaaaat

SEQ ID NO: 33575 - DNA, 13 bp, Artificial Sequence
  Oligonucleotide for detection of SNP TSC0010708
agagaggttaatt

SEQ ID NO: 33576 - DNA, 13 bp, Artificial Sequence
  Oligonucleotide for detection of SNP TSC0010708
aattaacctctct

SEQ ID NO: 33577 - DNA, 13 bp, Artificial Sequence
  Oligonucleotide for detection of SNP TSC0010708
agagagattaatt

SEQ ID NO: 33578 - DNA, 13 bp, Artificial Sequence
  Oligonucleotide for detection of SNP TSC0010708
aattaatctctct

SEQ ID NO: 33579 - DNA, 13 bp, Artificial Sequence
  Oligonucleotide for detection of SNP TSC0010709
tttattataaata

SEQ ID NO: 33580 - DNA, 13 bp, Artificial Sequence
  Oligonucleotide for detection of SNP TSC0010709
tatttataataaa

SEQ ID NO: 33581 - DNA, 13 bp, Artificial Sequence
  Oligonucleotide for detection of SNP TSC0010709
tatttatagtaag

SEQ ID NO: 33582 - DNA, 13 bp, Artificial Sequence
  Oligonucleotide for detection of SNP TSC0010709
cttactataaata

SEQ ID NO: 33583 - DNA, 13 bp, Artificial Sequence
  Oligonucleotide for detection of SNP TSC0010709
tatttagagtaag

SEQ ID NO: 33584 - DNA, 13 bp, Artificial Sequence
  Oligonucleotide for detection of SNP TSC0010709
cttactctaaata

SEQ ID NO: 33585 - DNA, 13 bp, Artificial Sequence
  Oligonucleotide for detection of SNP TSC0010710
tgttgtatgttta

SEQ ID NO: 33586 - DNA, 13 bp, Artificial Sequence
  Oligonucleotide for detection of SNP TSC0010710
taaacatacaaca

SEQ ID NO: 33587 - DNA, 13 bp, Artificial Sequence
  Oligonucleotide for detection of SNP TSC0010710
tgttgtgtgttta

SEQ ID NO: 33588 - DNA, 13 bp, Artificial Sequence
  Oligonucleotide for detection of SNP TSC0010710
taaacacacaaca

SEQ ID NO: 33589 - DNA, 13 bp, Artificial Sequence
  Oligonucleotide for detection of SNP TSC0010710
tgttgcgtgttta

SEQ ID NO: 33590 - DNA, 13 bp, Artificial Sequence
  Oligonucleotide for detection of SNP TSC0010710
taaacacgcaaca

SEQ ID NO: 33591 - DNA, 13 bp, Artificial Sequence
  Oligonucleotide for detection of SNP TSC0010710
tgggtatgtagta

SEQ ID NO: 33592 - DNA, 13 bp, Artificial Sequence
  Oligonucleotide for detection of SNP TSC0010710
tactacataccca

SEQ ID NO: 33593 - DNA, 13 bp, Artificial Sequence
  Oligonucleotide for detection of SNP TSC0010710
tgggtacgtagta

SEQ ID NO: 33594 - DNA, 13 bp, Artificial Sequence
  Oligonucleotide for detection of SNP TSC0010710
tactacgtaccca

SEQ ID NO: 33595 - DNA, 13 bp, Artificial Sequence
  Oligonucleotide for detection of SNP TSC0010711
atttttaatggaa

SEQ ID NO: 33596 - DNA, 13 bp, Artificial Sequence
  Oligonucleotide for detection of SNP TSC0010711
ttccattaaaaat

SEQ ID NO: 33597 - DNA, 13 bp, Artificial Sequence
  Oligonucleotide for detection of SNP TSC0010711
atttttgatggaa

SEQ ID NO: 33598 - DNA, 13 bp, Artificial Sequence
  Oligonucleotide for detection of SNP TSC0010711
ttccatcaaaaat

SEQ ID NO: 33599 - DNA, 13 bp, Artificial Sequence
  Oligonucleotide for detection of SNP TSC0010712
gtagatatattta

SEQ ID NO: 33600 - DNA, 13 bp, Artificial Sequence
  Oligonucleotide for detection of SNP TSC0010712
taaatatatctac

SEQ ID NO: 33601 - DNA, 13 bp, Artificial Sequence
  Oligonucleotide for detection of SNP TSC0010712
gtagatgtattta

SEQ ID NO: 33602 - DNA, 13 bp, Artificial Sequence
  Oligonucleotide for detection of SNP TSC0010712
taaatacatctac

SEQ ID NO: 33603 - DNA, 13 bp, Artificial Sequence
  Oligonucleotide for detection of SNP TSC0010712
gtagacgtattta

SEQ ID NO: 33604 - DNA, 13 bp, Artificial Sequence
  Oligonucleotide for detection of SNP TSC0010712
taaatacgtctac

SEQ ID NO: 33605 - DNA, 13 bp, Artificial Sequence
  Oligonucleotide for detection of SNP TSC0010712
tgagtgtgtttgy

SEQ ID NO: 33606 - DNA, 13 bp, Artificial Sequence
  Oligonucleotide for detection of SNP TSC0010712
rcaaacacactca

SEQ ID NO: 33607 - DNA, 13 bp, Artificial Sequence
  Oligonucleotide for detection of SNP TSC0010712
tgagtgcgtttgy

SEQ ID NO: 33608 - DNA, 13 bp, Artificial Sequence
  Oligonucleotide for detection of SNP TSC0010712
rcaaacgcactca

SEQ ID NO: 33609 - DNA, 13 bp, Artificial Sequence
  Oligonucleotide for detection of SNP TSC0010713
tgttttagttaat

SEQ ID NO: 33610 - DNA, 13 bp, Artificial Sequence
  Oligonucleotide for detection of SNP TSC0010713
attaactaaaaca

SEQ ID NO: 33611 - DNA, 13 bp, Artificial Sequence
  Oligonucleotide for detection of SNP TSC0010713
tgttttggttaat

SEQ ID NO: 33612 - DNA, 13 bp, Artificial Sequence
  Oligonucleotide for detection of SNP TSC0010713
attaaccaaaaca

SEQ ID NO: 33613 - DNA, 13 bp, Artificial Sequence
  Oligonucleotide for detection of SNP TSC0010713
tgtttcggttaat

SEQ ID NO: 33614 - DNA, 13 bp, Artificial Sequence
  Oligonucleotide for detection of SNP TSC0010713
attaaccgaaaca

SEQ ID NO: 33615 - DNA, 13 bp, Artificial Sequence
  Oligonucleotide for detection of SNP TSC0010713
attagttgggata

SEQ ID NO: 33616 - DNA, 13 bp, Artificial Sequence
  Oligonucleotide for detection of SNP TSC0010713
tatcccaactaat

SEQ ID NO: 33617 - DNA, 13 bp, Artificial Sequence
  Oligonucleotide for detection of SNP TSC0010713
attagtcgggata

SEQ ID NO: 33618 - DNA, 13 bp, Artificial Sequence
  Oligonucleotide for detection of SNP TSC0010713
tatcccgactaat

SEQ ID NO: 33619 - DNA, 13 bp, Artificial Sequence
  Oligonucleotide for detection of SNP TSC0010714
agaggtaatgaay

SEQ ID NO: 33620 - DNA, 13 bp, Artificial Sequence
  Oligonucleotide for detection of SNP TSC0010714
rttcattacctct

SEQ ID NO: 33621 - DNA, 13 bp, Artificial Sequence
  Oligonucleotide for detection of SNP TSC0010714
agaggtgatgaay

SEQ ID NO: 33622 - DNA, 13 bp, Artificial Sequence
  Oligonucleotide for detection of SNP TSC0010714
rttcatcacctct

SEQ ID NO: 33623 - DNA, 13 bp, Artificial Sequence
  Oligonucleotide for detection of SNP TSC0010714
agaggcgatgaay

SEQ ID NO: 33624 - DNA, 13 bp, Artificial Sequence
  Oligonucleotide for detection of SNP TSC0010714
rttcatcgcctct

SEQ ID NO: 33625 - DNA, 13 bp, Artificial Sequence
  Oligonucleotide for detection of SNP TSC0010714
gtttattgttttt

SEQ ID NO: 33626 - DNA, 13 bp, Artificial Sequence
  Oligonucleotide for detection of SNP TSC0010714
aaaaacaataaac

SEQ ID NO: 33627 - DNA, 13 bp, Artificial Sequence
  Oligonucleotide for detection of SNP TSC0010714
gtttatcgttttt

SEQ ID NO: 33628 - DNA, 13 bp, Artificial Sequence
  Oligonucleotide for detection of SNP TSC0010714
aaaaacgataaac

SEQ ID NO: 33629 - DNA, 13 bp, Artificial Sequence
  Oligonucleotide for detection of SNP TSC0010715
aaagaggttagaa

SEQ ID NO: 33630 - DNA, 13 bp, Artificial Sequence
  Oligonucleotide for detection of SNP TSC0010715
ttctaacctcttt

SEQ ID NO: 33631 - DNA, 13 bp, Artificial Sequence
  Oligonucleotide for detection of SNP TSC0010715
aaagagtttagaa

SEQ ID NO: 33632 - DNA, 13 bp, Artificial Sequence
  Oligonucleotide for detection of SNP TSC0010715
ttctaaactcttt

SEQ ID NO: 33633 - DNA, 13 bp, Artificial Sequence
  Oligonucleotide for detection of SNP TSC0010715
ttttggatttttt

SEQ ID NO: 33634 - DNA, 13 bp, Artificial Sequence
  Oligonucleotide for detection of SNP TSC0010715
aaaaaatccaaaa

SEQ ID NO: 33635 - DNA, 13 bp, Artificial Sequence
  Oligonucleotide for detection of SNP TSC0010716
gtaaaagtaatga

SEQ ID NO: 33636 - DNA, 13 bp, Artificial Sequence
  Oligonucleotide for detection of SNP TSC0010716
tcattacttttac

SEQ ID NO: 33637 - DNA, 13 bp, Artificial Sequence
  Oligonucleotide for detection of SNP TSC0010716
gtaaaaataatga

SEQ ID NO: 33638 - DNA, 13 bp, Artificial Sequence
  Oligonucleotide for detection of SNP TSC0010716
tcattatttttac

SEQ ID NO: 33639 - DNA, 13 bp, Artificial Sequence
  Oligonucleotide for detection of SNP TSC0010716
gtaaaagtaacga

SEQ ID NO: 33640 - DNA, 13 bp, Artificial Sequence
  Oligonucleotide for detection of SNP TSC0010716
tcgttacttttac

SEQ ID NO: 33641 - DNA, 13 bp, Artificial Sequence
  Oligonucleotide for detection of SNP TSC0010716
gtaaaaataacga

SEQ ID NO: 33642 - DNA, 13 bp, Artificial Sequence
  Oligonucleotide for detection of SNP TSC0010716
tcgttatttttac

SEQ ID NO: 33643 - DNA, 13 bp, Artificial Sequence
  Oligonucleotide for detection of SNP TSC0010718
tgattatttaggt

SEQ ID NO: 33644 - DNA, 13 bp, Artificial Sequence
  Oligonucleotide for detection of SNP TSC0010718
acctaaataatca

SEQ ID NO: 33645 - DNA, 13 bp, Artificial Sequence
  Oligonucleotide for detection of SNP TSC0010718
tgattagttaggt

SEQ ID NO: 33646 - DNA, 13 bp, Artificial Sequence
  Oligonucleotide for detection of SNP TSC0010718
acctaactaatca

SEQ ID NO: 33647 - DNA, 13 bp, Artificial Sequence
  Oligonucleotide for detection of SNP TSC0010718
atttgggtgatta

SEQ ID NO: 33648 - DNA, 13 bp, Artificial Sequence
  Oligonucleotide for detection of SNP TSC0010718
taatcacccaaat

SEQ ID NO: 33649 - DNA, 13 bp, Artificial Sequence
  Oligonucleotide for detection of SNP TSC0010718
atttggttgatta

SEQ ID NO: 33650 - DNA, 13 bp, Artificial Sequence
  Oligonucleotide for detection of SNP TSC0010718
taatcaaccaaat

SEQ ID NO: 33651 - DNA, 13 bp, Artificial Sequence
  Oligonucleotide for detection of SNP TSC0010719
attattgtttagg

SEQ ID NO: 33652 - DNA, 13 bp, Artificial Sequence
  Oligonucleotide for detection of SNP TSC0010719
cctaaacaataat

SEQ ID NO: 33653 - DNA, 13 bp, Artificial Sequence
  Oligonucleotide for detection of SNP TSC0010719
attattttttagg

SEQ ID NO: 33654 - DNA, 13 bp, Artificial Sequence
  Oligonucleotide for detection of SNP TSC0010719
cctaaaaaataat

SEQ ID NO: 33655 - DNA, 13 bp, Artificial Sequence
  Oligonucleotide for detection of SNP TSC0010719
tttagataatagt

SEQ ID NO: 33656 - DNA, 13 bp, Artificial Sequence
  Oligonucleotide for detection of SNP TSC0010719
actattatctaaa

SEQ ID NO: 33657 - DNA, 13 bp, Artificial Sequence
  Oligonucleotide for detection of SNP TSC0010719
tttagaaaatagt

SEQ ID NO: 33658 - DNA, 13 bp, Artificial Sequence
  Oligonucleotide for detection of SNP TSC0010719
actattttctaaa

SEQ ID NO: 33659 - DNA, 13 bp, Artificial Sequence
  Oligonucleotide for detection of SNP TSC0010720
ggtgattgtaatt

SEQ ID NO: 33660 - DNA, 13 bp, Artificial Sequence
  Oligonucleotide for detection of SNP TSC0010720
aattacaatcacc

SEQ ID NO: 33661 - DNA, 13 bp, Artificial Sequence
  Oligonucleotide for detection of SNP TSC0010720
ggtgatcgtaatt

SEQ ID NO: 33662 - DNA, 13 bp, Artificial Sequence
  Oligonucleotide for detection of SNP TSC0010720
aattacgatcacc

SEQ ID NO: 33663 - DNA, 13 bp, Artificial Sequence
  Oligonucleotide for detection of SNP TSC0010720
agttatgattaty

SEQ ID NO: 33664 - DNA, 13 bp, Artificial Sequence
  Oligonucleotide for detection of SNP TSC0010720
rataatcataact

SEQ ID NO: 33665 - DNA, 13 bp, Artificial Sequence
  Oligonucleotide for detection of SNP TSC0010720
agttataattaty

SEQ ID NO: 33666 - DNA, 13 bp, Artificial Sequence
  Oligonucleotide for detection of SNP TSC0010720
rataattataact

SEQ ID NO: 33667 - DNA, 13 bp, Artificial Sequence
  Oligonucleotide for detection of SNP TSC0010720
agttacgattaty

SEQ ID NO: 33668 - DNA, 13 bp, Artificial Sequence
  Oligonucleotide for detection of SNP TSC0010720
rataatcgtaact

SEQ ID NO: 33669 - DNA, 13 bp, Artificial Sequence
  Oligonucleotide for detection of SNP TSC0010721
tttgtaggtagtg

SEQ ID NO: 33670 - DNA, 13 bp, Artificial Sequence
  Oligonucleotide for detection of SNP TSC0010721
cactacctacaaa

SEQ ID NO: 33671 - DNA, 13 bp, Artificial Sequence
  Oligonucleotide for detection of SNP TSC0010721
tttgtaagtagtg

SEQ ID NO: 33672 - DNA, 13 bp, Artificial Sequence
  Oligonucleotide for detection of SNP TSC0010721
cactacttacaaa

SEQ ID NO: 33673 - DNA, 13 bp, Artificial Sequence
  Oligonucleotide for detection of SNP TSC0010728
ggaataaatgtaa

SEQ ID NO: 33674 - DNA, 13 bp, Artificial Sequence
  Oligonucleotide for detection of SNP TSC0010728
ttacatttattcc

SEQ ID NO: 33675 - DNA, 13 bp, Artificial Sequence
  Oligonucleotide for detection of SNP TSC0010728
ggaatagatgtaa

SEQ ID NO: 33676 - DNA, 13 bp, Artificial Sequence
  Oligonucleotide for detection of SNP TSC0010728
ttacatctattcc

SEQ ID NO: 33677 - DNA, 13 bp, Artificial Sequence
  Oligonucleotide for detection of SNP TSC0010729
ttataggtgagag

SEQ ID NO: 33678 - DNA, 13 bp, Artificial Sequence
  Oligonucleotide for detection of SNP TSC0010729
ctctcacctataa

SEQ ID NO: 33679 - DNA, 13 bp, Artificial Sequence
  Oligonucleotide for detection of SNP TSC0010729
ttatagatgagag

SEQ ID NO: 33680 - DNA, 13 bp, Artificial Sequence
  Oligonucleotide for detection of SNP TSC0010729
ctctcatctataa

SEQ ID NO: 33681 - DNA, 13 bp, Artificial Sequence
  Oligonucleotide for detection of SNP TSC0010730
ttgtgtagaagay

SEQ ID NO: 33682 - DNA, 13 bp, Artificial Sequence
  Oligonucleotide for detection of SNP TSC0010730
rtcttctacacaa

SEQ ID NO: 33683 - DNA, 13 bp, Artificial Sequence
  Oligonucleotide for detection of SNP TSC0010730
ttgtgtggaagay

SEQ ID NO: 33684 - DNA, 13 bp, Artificial Sequence
  Oligonucleotide for detection of SNP TSC0010730
rtcttccacacaa

SEQ ID NO: 33685 - DNA, 13 bp, Artificial Sequence
  Oligonucleotide for detection of SNP TSC0010734
tttttatgtgttg

SEQ ID NO: 33686 - DNA, 13 bp, Artificial Sequence
  Oligonucleotide for detection of SNP TSC0010734
caacacataaaaa

SEQ ID NO: 33687 - DNA, 13 bp, Artificial Sequence
  Oligonucleotide for detection of SNP TSC0010734
tttttacgtgttg

SEQ ID NO: 33688 - DNA, 13 bp, Artificial Sequence
  Oligonucleotide for detection of SNP TSC0010734
caacacgtaaaaa

SEQ ID NO: 33689 - DNA, 13 bp, Artificial Sequence
  Oligonucleotide for detection of SNP TSC0010734
taatatgtggaag

SEQ ID NO: 33690 - DNA, 13 bp, Artificial Sequence
  Oligonucleotide for detection of SNP TSC0010734
cttccacatatta

SEQ ID NO: 33691 - DNA, 13 bp, Artificial Sequence
  Oligonucleotide for detection of SNP TSC0010734
taatatatggaag

SEQ ID NO: 33692 - DNA, 13 bp, Artificial Sequence
  Oligonucleotide for detection of SNP TSC0010734
cttccatatatta

SEQ ID NO: 33693 - DNA, 13 bp, Artificial Sequence
  Oligonucleotide for detection of SNP TSC0010734
taatacgtggaag

SEQ ID NO: 33694 - DNA, 13 bp, Artificial Sequence
  Oligonucleotide for detection of SNP TSC0010734
cttccacgtatta

SEQ ID NO: 33695 - DNA, 13 bp, Artificial Sequence
  Oligonucleotide for detection of SNP TSC0010736
gaagttggtatga

SEQ ID NO: 33696 - DNA, 13 bp, Artificial Sequence
  Oligonucleotide for detection of SNP TSC0010736
tcataccaacttc

SEQ ID NO: 33697 - DNA, 13 bp, Artificial Sequence
  Oligonucleotide for detection of SNP TSC0010736
gaagttagtatga

SEQ ID NO: 33698 - DNA, 13 bp, Artificial Sequence
  Oligonucleotide for detection of SNP TSC0010736
tcatactaacttc

SEQ ID NO: 33699 - DNA, 13 bp, Artificial Sequence
  Oligonucleotide for detection of SNP TSC0010736
gaagtcggtatga

SEQ ID NO: 33700 - DNA, 13 bp, Artificial Sequence
  Oligonucleotide for detection of SNP TSC0010736
tcataccgacttc

SEQ ID NO: 33701 - DNA, 13 bp, Artificial Sequence
  Oligonucleotide for detection of SNP TSC0010738
tattttttaaaat

SEQ ID NO: 33702 - DNA, 13 bp, Artificial Sequence
  Oligonucleotide for detection of SNP TSC0010738
attttaaaaaata

SEQ ID NO: 33703 - DNA, 13 bp, Artificial Sequence
  Oligonucleotide for detection of SNP TSC0010738
tattttgtaaaat

SEQ ID NO: 33704 - DNA, 13 bp, Artificial Sequence
  Oligonucleotide for detection of SNP TSC0010738
attttacaaaata

SEQ ID NO: 33705 - DNA, 13 bp, Artificial Sequence
  Oligonucleotide for detection of SNP TSC0010738
attttagaaaata

SEQ ID NO: 33706 - DNA, 13 bp, Artificial Sequence
  Oligonucleotide for detection of SNP TSC0010738
tattttctaaaat

SEQ ID NO: 33707 - DNA, 13 bp, Artificial Sequence
  Oligonucleotide for detection of SNP TSC0010738
attttataaaata

SEQ ID NO: 33708 - DNA, 13 bp, Artificial Sequence
  Oligonucleotide for detection of SNP TSC0010738
tattttataaaat

SEQ ID NO: 33709 - DNA, 13 bp, Artificial Sequence
  Oligonucleotide for detection of SNP TSC0010739
ttagtttgtagat

SEQ ID NO: 33710 - DNA, 13 bp, Artificial Sequence
  Oligonucleotide for detection of SNP TSC0010739
atctacaaactaa

SEQ ID NO: 33711 - DNA, 13 bp, Artificial Sequence
  Oligonucleotide for detection of SNP TSC0010739
ttagttcgtagat

SEQ ID NO: 33712 - DNA, 13 bp, Artificial Sequence
  Oligonucleotide for detection of SNP TSC0010739
atctacgaactaa

SEQ ID NO: 33713 - DNA, 13 bp, Artificial Sequence
  Oligonucleotide for detection of SNP TSC0010739
atttatgagttag

SEQ ID NO: 33714 - DNA, 13 bp, Artificial Sequence
  Oligonucleotide for detection of SNP TSC0010739
ctaactcataaat

SEQ ID NO: 33715 - DNA, 13 bp, Artificial Sequence
  Oligonucleotide for detection of SNP TSC0010739
atttataagttag

SEQ ID NO: 33716 - DNA, 13 bp, Artificial Sequence
  Oligonucleotide for detection of SNP TSC0010739
ctaacttataaat

SEQ ID NO: 33717 - DNA, 13 bp, Artificial Sequence
  Oligonucleotide for detection of SNP TSC0010739
atttacgagttag

SEQ ID NO: 33718 - DNA, 13 bp, Artificial Sequence
  Oligonucleotide for detection of SNP TSC0010739
ctaactcgtaaat

SEQ ID NO: 33719 - DNA, 13 bp, Artificial Sequence
  Oligonucleotide for detection of SNP TSC0010740
aaaaaagaaaggt

SEQ ID NO: 33720 - DNA, 13 bp, Artificial Sequence
  Oligonucleotide for detection of SNP TSC0010740
acctttctttttt

SEQ ID NO: 33721 - DNA, 13 bp, Artificial Sequence
  Oligonucleotide for detection of SNP TSC0010740
aaaaaaaaaaggt

SEQ ID NO: 33722 - DNA, 13 bp, Artificial Sequence
  Oligonucleotide for detection of SNP TSC0010740
acctttttttttt

SEQ ID NO: 33723 - DNA, 13 bp, Artificial Sequence
  Oligonucleotide for detection of SNP TSC0010750
agaaattgaaata

SEQ ID NO: 33724 - DNA, 13 bp, Artificial Sequence
  Oligonucleotide for detection of SNP TSC0010750
tatttcaatttct

SEQ ID NO: 33725 - DNA, 13 bp, Artificial Sequence
  Oligonucleotide for detection of SNP TSC0010750
agaaatggaaata

SEQ ID NO: 33726 - DNA, 13 bp, Artificial Sequence
  Oligonucleotide for detection of SNP TSC0010750
tatttccatttct

SEQ ID NO: 33727 - DNA, 13 bp, Artificial Sequence
  Oligonucleotide for detection of SNP TSC0010750
agaaatcgaaata

SEQ ID NO: 33728 - DNA, 13 bp, Artificial Sequence
  Oligonucleotide for detection of SNP TSC0010750
tatttcgatttct

SEQ ID NO: 33729 - DNA, 13 bp, Artificial Sequence
  Oligonucleotide for detection of SNP TSC0010750
tgttttgattttt

SEQ ID NO: 33730 - DNA, 13 bp, Artificial Sequence
  Oligonucleotide for detection of SNP TSC0010750
aaaaatcaaaaca

SEQ ID NO: 33731 - DNA, 13 bp, Artificial Sequence
  Oligonucleotide for detection of SNP TSC0010750
tgtttttattttt

SEQ ID NO: 33732 - DNA, 13 bp, Artificial Sequence
  Oligonucleotide for detection of SNP TSC0010750
aaaaataaaaaca

SEQ ID NO: 33733 - DNA, 13 bp, Artificial Sequence
  Oligonucleotide for detection of SNP TSC0010750
tgtttcgattttt

SEQ ID NO: 33734 - DNA, 13 bp, Artificial Sequence
  Oligonucleotide for detection of SNP TSC0010750
aaaaatcgaaaca

SEQ ID NO: 33735 - DNA, 13 bp, Artificial Sequence
  Oligonucleotide for detection of SNP TSC0010751
gatttttgtgttt

SEQ ID NO: 33736 - DNA, 13 bp, Artificial Sequence
  Oligonucleotide for detection of SNP TSC0010751
aaacacaaaaatc

SEQ ID NO: 33737 - DNA, 13 bp, Artificial Sequence
  Oligonucleotide for detection of SNP TSC0010751
gattttcgtgttt

SEQ ID NO: 33738 - DNA, 13 bp, Artificial Sequence
  Oligonucleotide for detection of SNP TSC0010751
aaacacgaaaatc

SEQ ID NO: 33739 - DNA, 13 bp, Artificial Sequence
  Oligonucleotide for detection of SNP TSC0010751
aaatatggaggty

SEQ ID NO: 33740 - DNA, 13 bp, Artificial Sequence
  Oligonucleotide for detection of SNP TSC0010751
racctccatattt

SEQ ID NO: 33741 - DNA, 13 bp, Artificial Sequence
  Oligonucleotide for detection of SNP TSC0010751
aaatatagaggty

SEQ ID NO: 33742 - DNA, 13 bp, Artificial Sequence
  Oligonucleotide for detection of SNP TSC0010751
racctctatattt

SEQ ID NO: 33743 - DNA, 13 bp, Artificial Sequence
  Oligonucleotide for detection of SNP TSC0010751
aaatacggaggty

SEQ ID NO: 33744 - DNA, 13 bp, Artificial Sequence
  Oligonucleotide for detection of SNP TSC0010751
racctccgtattt

SEQ ID NO: 33745 - DNA, 13 bp, Artificial Sequence
  Oligonucleotide for detection of SNP TSC0010764
tagagatgtttga

SEQ ID NO: 33746 - DNA, 13 bp, Artificial Sequence
  Oligonucleotide for detection of SNP TSC0010764
tcaaacatctcta

SEQ ID NO: 33747 - DNA, 13 bp, Artificial Sequence
  Oligonucleotide for detection of SNP TSC0010764
tagagacgtttga

SEQ ID NO: 33748 - DNA, 13 bp, Artificial Sequence
  Oligonucleotide for detection of SNP TSC0010764
tcaaacgtctcta

SEQ ID NO: 33749 - DNA, 13 bp, Artificial Sequence
  Oligonucleotide for detection of SNP TSC0010764
ttaaatgttttta

SEQ ID NO: 33750 - DNA, 13 bp, Artificial Sequence
  Oligonucleotide for detection of SNP TSC0010764
taaaaacatttaa

SEQ ID NO: 33751 - DNA, 13 bp, Artificial Sequence
  Oligonucleotide for detection of SNP TSC0010764
ttaaatattttta

SEQ ID NO: 33752 - DNA, 13 bp, Artificial Sequence
  Oligonucleotide for detection of SNP TSC0010764
taaaaatatttaa

SEQ ID NO: 33753 - DNA, 13 bp, Artificial Sequence
  Oligonucleotide for detection of SNP TSC0010764
ttaaacgttttta

SEQ ID NO: 33754 - DNA, 13 bp, Artificial Sequence
  Oligonucleotide for detection of SNP TSC0010764
taaaaacgtttaa

SEQ ID NO: 33755 - DNA, 13 bp, Artificial Sequence
  Oligonucleotide for detection of SNP TSC0010786
atatttaatttga

SEQ ID NO: 33756 - DNA, 13 bp, Artificial Sequence
  Oligonucleotide for detection of SNP TSC0010786
tcaaattaaatat

SEQ ID NO: 33757 - DNA, 13 bp, Artificial Sequence
  Oligonucleotide for detection of SNP TSC0010786
atatttgatttga

SEQ ID NO: 33758 - DNA, 13 bp, Artificial Sequence
  Oligonucleotide for detection of SNP TSC0010786
tcaaatcaaatat

SEQ ID NO: 33759 - DNA, 13 bp, Artificial Sequence
  Oligonucleotide for detection of SNP TSC0010794
aggttatttttta

SEQ ID NO: 33760 - DNA, 13 bp, Artificial Sequence
  Oligonucleotide for detection of SNP TSC0010794
taaaaaataacct

SEQ ID NO: 33761 - DNA, 13 bp, Artificial Sequence
  Oligonucleotide for detection of SNP TSC0010794
aggttagttttta

SEQ ID NO: 33762 - DNA, 13 bp, Artificial Sequence
  Oligonucleotide for detection of SNP TSC0010794
taaaaactaacct

SEQ ID NO: 33763 - DNA, 13 bp, Artificial Sequence
  Oligonucleotide for detection of SNP TSC0010794
tggagagtgattt

SEQ ID NO: 33764 - DNA, 13 bp, Artificial Sequence
  Oligonucleotide for detection of SNP TSC0010794
aaatcactctcca

SEQ ID NO: 33765 - DNA, 13 bp, Artificial Sequence
  Oligonucleotide for detection of SNP TSC0010794
tggagattgattt

SEQ ID NO: 33766 - DNA, 13 bp, Artificial Sequence
  Oligonucleotide for detection of SNP TSC0010794
aaatcaatctcca

SEQ ID NO: 33767 - DNA, 13 bp, Artificial Sequence
  Oligonucleotide for detection of SNP TSC0010795
gttaaggtatgta

SEQ ID NO: 33768 - DNA, 13 bp, Artificial Sequence
  Oligonucleotide for detection of SNP TSC0010795
tacataccttaac

SEQ ID NO: 33769 - DNA, 13 bp, Artificial Sequence
  Oligonucleotide for detection of SNP TSC0010795
gttaagatatgta

SEQ ID NO: 33770 - DNA, 13 bp, Artificial Sequence
  Oligonucleotide for detection of SNP TSC0010795
tacatatcttaac

SEQ ID NO: 33771 - DNA, 13 bp, Artificial Sequence
  Oligonucleotide for detection of SNP TSC0010797
gaaggatgggtaa

SEQ ID NO: 33772 - DNA, 13 bp, Artificial Sequence
  Oligonucleotide for detection of SNP TSC0010797
ttacccatccttc

SEQ ID NO: 33773 - DNA, 13 bp, Artificial Sequence
  Oligonucleotide for detection of SNP TSC0010797
gaaggacgggtaa

SEQ ID NO: 33774 - DNA, 13 bp, Artificial Sequence
  Oligonucleotide for detection of SNP TSC0010797
ttacccgtccttc

SEQ ID NO: 33775 - DNA, 13 bp, Artificial Sequence
  Oligonucleotide for detection of SNP TSC0010797
ttatttgttttty

SEQ ID NO: 33776 - DNA, 13 bp, Artificial Sequence
  Oligonucleotide for detection of SNP TSC0010797
raaaaacaaataa

SEQ ID NO: 33777 - DNA, 13 bp, Artificial Sequence
  Oligonucleotide for detection of SNP TSC0010797
ttatttattttty

SEQ ID NO: 33778 - DNA, 13 bp, Artificial Sequence
  Oligonucleotide for detection of SNP TSC0010797
raaaaataaataa

SEQ ID NO: 33779 - DNA, 13 bp, Artificial Sequence
  Oligonucleotide for detection of SNP TSC0010797
ttattcgttttty

SEQ ID NO: 33780 - DNA, 13 bp, Artificial Sequence
  Oligonucleotide for detection of SNP TSC0010797
raaaaacgaataa

SEQ ID NO: 33781 - DNA, 13 bp, Artificial Sequence
  Oligonucleotide for detection of SNP TSC0010799
ttggtagtttttt

SEQ ID NO: 33782 - DNA, 13 bp, Artificial Sequence
  Oligonucleotide for detection of SNP TSC0010799
aaaaaactaccaa

SEQ ID NO: 33783 - DNA, 13 bp, Artificial Sequence
  Oligonucleotide for detection of SNP TSC0010799
ttggtaatttttt

SEQ ID NO: 33784 - DNA, 13 bp, Artificial Sequence
  Oligonucleotide for detection of SNP TSC0010799
aaaaaattaccaa

SEQ ID NO: 33785 - DNA, 13 bp, Artificial Sequence
  Oligonucleotide for detection of SNP TSC0010806
ggtgaatggatag

SEQ ID NO: 33786 - DNA, 13 bp, Artificial Sequence
  Oligonucleotide for detection of SNP TSC0010806
ctatccattcacc

SEQ ID NO: 33787 - DNA, 13 bp, Artificial Sequence
  Oligonucleotide for detection of SNP TSC0010806
ggtgaacggatag

SEQ ID NO: 33788 - DNA, 13 bp, Artificial Sequence
  Oligonucleotide for detection of SNP TSC0010806
ctatccgttcacc

SEQ ID NO: 33789 - DNA, 13 bp, Artificial Sequence
  Oligonucleotide for detection of SNP TSC0010806
ttgtttgtttaty

SEQ ID NO: 33790 - DNA, 13 bp, Artificial Sequence
  Oligonucleotide for detection of SNP TSC0010806
rataaacaaacaa

SEQ ID NO: 33791 - DNA, 13 bp, Artificial Sequence
  Oligonucleotide for detection of SNP TSC0010806
ttgtttatttaty

SEQ ID NO: 33792 - DNA, 13 bp, Artificial Sequence
  Oligonucleotide for detection of SNP TSC0010806
rataaataaacaa

SEQ ID NO: 33793 - DNA, 13 bp, Artificial Sequence
  Oligonucleotide for detection of SNP TSC0010806
ttgttcgtttaty

SEQ ID NO: 33794 - DNA, 13 bp, Artificial Sequence
  Oligonucleotide for detection of SNP TSC0010806
rataaacgaacaa

SEQ ID NO: 33795 - DNA, 13 bp, Artificial Sequence
  Oligonucleotide for detection of SNP TSC0010809
ttatttgttatga

SEQ ID NO: 33796 - DNA, 13 bp, Artificial Sequence
  Oligonucleotide for detection of SNP TSC0010809
tcataacaaataa

SEQ ID NO: 33797 - DNA, 13 bp, Artificial Sequence
  Oligonucleotide for detection of SNP TSC0010809
ttattttttatga

SEQ ID NO: 33798 - DNA, 13 bp, Artificial Sequence
  Oligonucleotide for detection of SNP TSC0010809
tcataaaaaataa

SEQ ID NO: 33799 - DNA, 13 bp, Artificial Sequence
  Oligonucleotide for detection of SNP TSC0010809
ttataataagtga

SEQ ID NO: 33800 - DNA, 13 bp, Artificial Sequence
  Oligonucleotide for detection of SNP TSC0010809
tcacttattataa

SEQ ID NO: 33801 - DNA, 13 bp, Artificial Sequence
  Oligonucleotide for detection of SNP TSC0010809
ttataaaaagtga

SEQ ID NO: 33802 - DNA, 13 bp, Artificial Sequence
  Oligonucleotide for detection of SNP TSC0010809
tcactttttataa

SEQ ID NO: 33803 - DNA, 13 bp, Artificial Sequence
  Oligonucleotide for detection of SNP TSC0010814
tatttagagtttg

SEQ ID NO: 33804 - DNA, 13 bp, Artificial Sequence
  Oligonucleotide for detection of SNP TSC0010814
caaactctaaata

SEQ ID NO: 33805 - DNA, 13 bp, Artificial Sequence
  Oligonucleotide for detection of SNP TSC0010814
tatttatagtttg

SEQ ID NO: 33806 - DNA, 13 bp, Artificial Sequence
  Oligonucleotide for detection of SNP TSC0010814
caaactataaata

SEQ ID NO: 33807 - DNA, 13 bp, Artificial Sequence
  Oligonucleotide for detection of SNP TSC0010814
taaattttgagta

SEQ ID NO: 33808 - DNA, 13 bp, Artificial Sequence
  Oligonucleotide for detection of SNP TSC0010814
tactcaaaattta

SEQ ID NO: 33809 - DNA, 13 bp, Artificial Sequence
  Oligonucleotide for detection of SNP TSC0010814
taaattatgagta

SEQ ID NO: 33810 - DNA, 13 bp, Artificial Sequence
  Oligonucleotide for detection of SNP TSC0010814
tactcataattta

SEQ ID NO: 33811 - DNA, 13 bp, Artificial Sequence
  Oligonucleotide for detection of SNP TSC0010820
tgtgtgtgatgat

SEQ ID NO: 33812 - DNA, 13 bp, Artificial Sequence
  Oligonucleotide for detection of SNP TSC0010820
atcatcacacaca

SEQ ID NO: 33813 - DNA, 13 bp, Artificial Sequence
  Oligonucleotide for detection of SNP TSC0010820
tgtgtgcgatgat

SEQ ID NO: 33814 - DNA, 13 bp, Artificial Sequence
  Oligonucleotide for detection of SNP TSC0010820
atcatcgcacaca

SEQ ID NO: 33815 - DNA, 13 bp, Artificial Sequence
  Oligonucleotide for detection of SNP TSC0010820
attattgtatata

SEQ ID NO: 33816 - DNA, 13 bp, Artificial Sequence
  Oligonucleotide for detection of SNP TSC0010820
tatatacaataat

SEQ ID NO: 33817 - DNA, 13 bp, Artificial Sequence
  Oligonucleotide for detection of SNP TSC0010820
attattatatata

SEQ ID NO: 33818 - DNA, 13 bp, Artificial Sequence
  Oligonucleotide for detection of SNP TSC0010820
tatatataataat

SEQ ID NO: 33819 - DNA, 13 bp, Artificial Sequence
  Oligonucleotide for detection of SNP TSC0010820
attatcgtatata

SEQ ID NO: 33820 - DNA, 13 bp, Artificial Sequence
  Oligonucleotide for detection of SNP TSC0010820
tatatacgataat

SEQ ID NO: 33821 - DNA, 13 bp, Artificial Sequence
  Oligonucleotide for detection of SNP TSC0010821
agttgtatgattt

SEQ ID NO: 33822 - DNA, 13 bp, Artificial Sequence
  Oligonucleotide for detection of SNP TSC0010821
aaatcatacaact

SEQ ID NO: 33823 - DNA, 13 bp, Artificial Sequence
  Oligonucleotide for detection of SNP TSC0010821
agttgtgtgattt

SEQ ID NO: 33824 - DNA, 13 bp, Artificial Sequence
  Oligonucleotide for detection of SNP TSC0010821
aaatcacacaact

SEQ ID NO: 33825 - DNA, 13 bp, Artificial Sequence
  Oligonucleotide for detection of SNP TSC0010832
ttagtttgtttty

SEQ ID NO: 33826 - DNA, 13 bp, Artificial Sequence
  Oligonucleotide for detection of SNP TSC0010832
raaaacaaactaa

SEQ ID NO: 33827 - DNA, 13 bp, Artificial Sequence
  Oligonucleotide for detection of SNP TSC0010832
ttagttcgtttty

SEQ ID NO: 33828 - DNA, 13 bp, Artificial Sequence
  Oligonucleotide for detection of SNP TSC0010832
raaaacgaactaa

SEQ ID NO: 33829 - DNA, 13 bp, Artificial Sequence
  Oligonucleotide for detection of SNP TSC0010832
gaaaatggattaa

SEQ ID NO: 33830 - DNA, 13 bp, Artificial Sequence
  Oligonucleotide for detection of SNP TSC0010832
ttaatccattttc

SEQ ID NO: 33831 - DNA, 13 bp, Artificial Sequence
  Oligonucleotide for detection of SNP TSC0010832
gaaaatagattaa

SEQ ID NO: 33832 - DNA, 13 bp, Artificial Sequence
  Oligonucleotide for detection of SNP TSC0010832
ttaatctattttc

SEQ ID NO: 33833 - DNA, 13 bp, Artificial Sequence
  Oligonucleotide for detection of SNP TSC0010832
gaaaacggattaa

SEQ ID NO: 33834 - DNA, 13 bp, Artificial Sequence
  Oligonucleotide for detection of SNP TSC0010832
ttaatccgttttc

SEQ ID NO: 33835 - DNA, 13 bp, Artificial Sequence
  Oligonucleotide for detection of SNP TSC0010834
atttggaaagtat

SEQ ID NO: 33836 - DNA, 13 bp, Artificial Sequence
  Oligonucleotide for detection of SNP TSC0010834
atactttccaaat

SEQ ID NO: 33837 - DNA, 13 bp, Artificial Sequence
  Oligonucleotide for detection of SNP TSC0010834
atttgggaagtat

SEQ ID NO: 33838 - DNA, 13 bp, Artificial Sequence
  Oligonucleotide for detection of SNP TSC0010834
atacttcccaaat

SEQ ID NO: 33839 - DNA, 13 bp, Artificial Sequence
  Oligonucleotide for detection of SNP TSC0010836
tttgagattttaa

SEQ ID NO: 33840 - DNA, 13 bp, Artificial Sequence
  Oligonucleotide for detection of SNP TSC0010836
ttaaaatctcaaa

SEQ ID NO: 33841 - DNA, 13 bp, Artificial Sequence
  Oligonucleotide for detection of SNP TSC0010836
tttgaggttttaa

SEQ ID NO: 33842 - DNA, 13 bp, Artificial Sequence
  Oligonucleotide for detection of SNP TSC0010836
ttaaaacctcaaa

SEQ ID NO: 33843 - DNA, 13 bp, Artificial Sequence
  Oligonucleotide for detection of SNP TSC0010837
tttattagttagt

SEQ ID NO: 33844 - DNA, 13 bp, Artificial Sequence
  Oligonucleotide for detection of SNP TSC0010837
actaactaataaa

SEQ ID NO: 33845 - DNA, 13 bp, Artificial Sequence
  Oligonucleotide for detection of SNP TSC0010837
tttatttgttagt

SEQ ID NO: 33846 - DNA, 13 bp, Artificial Sequence
  Oligonucleotide for detection of SNP TSC0010837
actaacaaataaa

SEQ ID NO: 33847 - DNA, 13 bp, Artificial Sequence
  Oligonucleotide for detection of SNP TSC0010837
tttattcgttagt

SEQ ID NO: 33848 - DNA, 13 bp, Artificial Sequence
  Oligonucleotide for detection of SNP TSC0010837
actaacgaataaa

SEQ ID NO: 33849 - DNA, 13 bp, Artificial Sequence
  Oligonucleotide for detection of SNP TSC0010837
attgattggtgag

SEQ ID NO: 33850 - DNA, 13 bp, Artificial Sequence
  Oligonucleotide for detection of SNP TSC0010837
ctcaccaatcaat

SEQ ID NO: 33851 - DNA, 13 bp, Artificial Sequence
  Oligonucleotide for detection of SNP TSC0010837
attgatgggtgag

SEQ ID NO: 33852 - DNA, 13 bp, Artificial Sequence
  Oligonucleotide for detection of SNP TSC0010837
ctcacccatcaat

SEQ ID NO: 33853 - DNA, 13 bp, Artificial Sequence
  Oligonucleotide for detection of SNP TSC0010837
attgacgggtgag

SEQ ID NO: 33854 - DNA, 13 bp, Artificial Sequence
  Oligonucleotide for detection of SNP TSC0010837
ctcacccgtcaat

SEQ ID NO: 33855 - DNA, 13 bp, Artificial Sequence
  Oligonucleotide for detection of SNP TSC0010838
tattattatgtgg

SEQ ID NO: 33856 - DNA, 13 bp, Artificial Sequence
  Oligonucleotide for detection of SNP TSC0010838
ccacataataata

SEQ ID NO: 33857 - DNA, 13 bp, Artificial Sequence
  Oligonucleotide for detection of SNP TSC0010838
tattatgatgtgg

SEQ ID NO: 33858 - DNA, 13 bp, Artificial Sequence
  Oligonucleotide for detection of SNP TSC0010838
ccacatcataata

SEQ ID NO: 33859 - DNA, 13 bp, Artificial Sequence
  Oligonucleotide for detection of SNP TSC0010838
tattattacgtgg

SEQ ID NO: 33860 - DNA, 13 bp, Artificial Sequence
  Oligonucleotide for detection of SNP TSC0010838
ccacgtaataata

SEQ ID NO: 33861 - DNA, 13 bp, Artificial Sequence
  Oligonucleotide for detection of SNP TSC0010838
tattatgacgtgg

SEQ ID NO: 33862 - DNA, 13 bp, Artificial Sequence
  Oligonucleotide for detection of SNP TSC0010838
ccacgtcataata

SEQ ID NO: 33863 - DNA, 13 bp, Artificial Sequence
  Oligonucleotide for detection of SNP TSC0010838
ttatgtgatggtg

SEQ ID NO: 33864 - DNA, 13 bp, Artificial Sequence
  Oligonucleotide for detection of SNP TSC0010838
caccatcacataa

SEQ ID NO: 33865 - DNA, 13 bp, Artificial Sequence
  Oligonucleotide for detection of SNP TSC0010838
ttatgttatggtg

SEQ ID NO: 33866 - DNA, 13 bp, Artificial Sequence
  Oligonucleotide for detection of SNP TSC0010838
caccataacataa

SEQ ID NO: 33867 - DNA, 13 bp, Artificial Sequence
  Oligonucleotide for detection of SNP TSC0010838
ttacgtgatggtg

SEQ ID NO: 33868 - DNA, 13 bp, Artificial Sequence
  Oligonucleotide for detection of SNP TSC0010838
caccatcacgtaa

SEQ ID NO: 33869 - DNA, 13 bp, Artificial Sequence
  Oligonucleotide for detection of SNP TSC0010838
ttacgttatggtg

SEQ ID NO: 33870 - DNA, 13 bp, Artificial Sequence
  Oligonucleotide for detection of SNP TSC0010838
caccataacgtaa

SEQ ID NO: 33871 - DNA, 13 bp, Artificial Sequence
  Oligonucleotide for detection of SNP TSC0010839
aggtaaggaagay

SEQ ID NO: 33872 - DNA, 13 bp, Artificial Sequence
  Oligonucleotide for detection of SNP TSC0010839
rtcttccttacct

SEQ ID NO: 33873 - DNA, 13 bp, Artificial Sequence
  Oligonucleotide for detection of SNP TSC0010839
aggtaaagaagay

SEQ ID NO: 33874 - DNA, 13 bp, Artificial Sequence
  Oligonucleotide for detection of SNP TSC0010839
rtcttctttacct

SEQ ID NO: 33875 - DNA, 13 bp, Artificial Sequence
  Oligonucleotide for detection of SNP TSC0010843
gttagaggtagty

SEQ ID NO: 33876 - DNA, 13 bp, Artificial Sequence
  Oligonucleotide for detection of SNP TSC0010843
ractacctctaac

SEQ ID NO: 33877 - DNA, 13 bp, Artificial Sequence
  Oligonucleotide for detection of SNP TSC0010843
gttagaagtagty

SEQ ID NO: 33878 - DNA, 13 bp, Artificial Sequence
  Oligonucleotide for detection of SNP TSC0010843
ractacttctaac

SEQ ID NO: 33879 - DNA, 13 bp, Artificial Sequence
  Oligonucleotide for detection of SNP TSC0010847
gtatttgataatg

SEQ ID NO: 33880 - DNA, 13 bp, Artificial Sequence
  Oligonucleotide for detection of SNP TSC0010847
cattatcaaatac

SEQ ID NO: 33881 - DNA, 13 bp, Artificial Sequence
  Oligonucleotide for detection of SNP TSC0010847
gtattttataatg

SEQ ID NO: 33882 - DNA, 13 bp, Artificial Sequence
  Oligonucleotide for detection of SNP TSC0010847
cattataaaatac

SEQ ID NO: 33883 - DNA, 13 bp, Artificial Sequence
  Oligonucleotide for detection of SNP TSC0010847
tattattagatgy

SEQ ID NO: 33884 - DNA, 13 bp, Artificial Sequence
  Oligonucleotide for detection of SNP TSC0010847
rcatctaataata

SEQ ID NO: 33885 - DNA, 13 bp, Artificial Sequence
  Oligonucleotide for detection of SNP TSC0010847
tattataagatgy

SEQ ID NO: 33886 - DNA, 13 bp, Artificial Sequence
  Oligonucleotide for detection of SNP TSC0010847
rcatcttataata

SEQ ID NO: 33887 - DNA, 13 bp, Artificial Sequence
  Oligonucleotide for detection of SNP TSC0010850
tttaaatgtggty

SEQ ID NO: 33888 - DNA, 13 bp, Artificial Sequence
  Oligonucleotide for detection of SNP TSC0010850
raccacatttaaa

SEQ ID NO: 33889 - DNA, 13 bp, Artificial Sequence
  Oligonucleotide for detection of SNP TSC0010850
tttaaacgtggty

SEQ ID NO: 33890 - DNA, 13 bp, Artificial Sequence
  Oligonucleotide for detection of SNP TSC0010850
raccacgtttaaa

SEQ ID NO: 33891 - DNA, 13 bp, Artificial Sequence
  Oligonucleotide for detection of SNP TSC0010850
tttaaatgcggty

SEQ ID NO: 33892 - DNA, 13 bp, Artificial Sequence
  Oligonucleotide for detection of SNP TSC0010850
raccgcatttaaa

SEQ ID NO: 33893 - DNA, 13 bp, Artificial Sequence
  Oligonucleotide for detection of SNP TSC0010850
tttaaacgcggty

SEQ ID NO: 33894 - DNA, 13 bp, Artificial Sequence
  Oligonucleotide for detection of SNP TSC0010850
raccgcgtttaaa

SEQ ID NO: 33895 - DNA, 13 bp, Artificial Sequence
  Oligonucleotide for detection of SNP TSC0010850
gattgtgtttgaa

SEQ ID NO: 33896 - DNA, 13 bp, Artificial Sequence
  Oligonucleotide for detection of SNP TSC0010850
ttcaaacacaatc

SEQ ID NO: 33897 - DNA, 13 bp, Artificial Sequence
  Oligonucleotide for detection of SNP TSC0010850
gattgtatttgaa

SEQ ID NO: 33898 - DNA, 13 bp, Artificial Sequence
  Oligonucleotide for detection of SNP TSC0010850
ttcaaatacaatc

SEQ ID NO: 33899 - DNA, 13 bp, Artificial Sequence
  Oligonucleotide for detection of SNP TSC0010850
gatcgtgtttgaa

SEQ ID NO: 33900 - DNA, 13 bp, Artificial Sequence
  Oligonucleotide for detection of SNP TSC0010850
ttcaaacacgatc

SEQ ID NO: 33901 - DNA, 13 bp, Artificial Sequence
  Oligonucleotide for detection of SNP TSC0010850
gatcgtatttgaa

SEQ ID NO: 33902 - DNA, 13 bp, Artificial Sequence
  Oligonucleotide for detection of SNP TSC0010850
ttcaaatacgatc

SEQ ID NO: 33903 - DNA, 13 bp, Artificial Sequence
  Oligonucleotide for detection of SNP TSC0010850
gattgcgtttgaa

SEQ ID NO: 33904 - DNA, 13 bp, Artificial Sequence
  Oligonucleotide for detection of SNP TSC0010850
ttcaaacgcaatc

SEQ ID NO: 33905 - DNA, 13 bp, Artificial Sequence
  Oligonucleotide for detection of SNP TSC0010850
gatcgcgtttgaa

SEQ ID NO: 33906 - DNA, 13 bp, Artificial Sequence
  Oligonucleotide for detection of SNP TSC0010850
ttcaaacgcgatc

SEQ ID NO: 33907 - DNA, 13 bp, Artificial Sequence
  Oligonucleotide for detection of SNP TSC0010851
atatttgtaaaga

SEQ ID NO: 33908 - DNA, 13 bp, Artificial Sequence
  Oligonucleotide for detection of SNP TSC0010851
tctttacaaatat

SEQ ID NO: 33909 - DNA, 13 bp, Artificial Sequence
  Oligonucleotide for detection of SNP TSC0010851
atatttataaaga

SEQ ID NO: 33910 - DNA, 13 bp, Artificial Sequence
  Oligonucleotide for detection of SNP TSC0010851
tctttataaatat

SEQ ID NO: 33911 - DNA, 13 bp, Artificial Sequence
  Oligonucleotide for detection of SNP TSC0010852
atttttgttttta

SEQ ID NO: 33912 - DNA, 13 bp, Artificial Sequence
  Oligonucleotide for detection of SNP TSC0010852
taaaaacaaaaat

SEQ ID NO: 33913 - DNA, 13 bp, Artificial Sequence
  Oligonucleotide for detection of SNP TSC0010852
atttttattttta

SEQ ID NO: 33914 - DNA, 13 bp, Artificial Sequence
  Oligonucleotide for detection of SNP TSC0010852
taaaaataaaaat

SEQ ID NO: 33915 - DNA, 13 bp, Artificial Sequence
  Oligonucleotide for detection of SNP TSC0010853
taggtaaatttty

SEQ ID NO: 33916 - DNA, 13 bp, Artificial Sequence
  Oligonucleotide for detection of SNP TSC0010853
raaaatttaccta

SEQ ID NO: 33917 - DNA, 13 bp, Artificial Sequence
  Oligonucleotide for detection of SNP TSC0010853
taggtatatttty

SEQ ID NO: 33918 - DNA, 13 bp, Artificial Sequence
  Oligonucleotide for detection of SNP TSC0010853
raaaatataccta

SEQ ID NO: 33919 - DNA, 13 bp, Artificial Sequence
  Oligonucleotide for detection of SNP TSC0010853
ggaggtttgtttg

SEQ ID NO: 33920 - DNA, 13 bp, Artificial Sequence
  Oligonucleotide for detection of SNP TSC0010853
caaacaaacctcc

SEQ ID NO: 33921 - DNA, 13 bp, Artificial Sequence
  Oligonucleotide for detection of SNP TSC0010853
ggaggtgtgtttg

SEQ ID NO: 33922 - DNA, 13 bp, Artificial Sequence
  Oligonucleotide for detection of SNP TSC0010853
caaacacacctcc

SEQ ID NO: 33923 - DNA, 13 bp, Artificial Sequence
  Oligonucleotide for detection of SNP TSC0010854
tagaaaaaagatt

SEQ ID NO: 33924 - DNA, 13 bp, Artificial Sequence
  Oligonucleotide for detection of SNP TSC0010854
aatcttttttcta

SEQ ID NO: 33925 - DNA, 13 bp, Artificial Sequence
  Oligonucleotide for detection of SNP TSC0010854
tagaaataagatt

SEQ ID NO: 33926 - DNA, 13 bp, Artificial Sequence
  Oligonucleotide for detection of SNP TSC0010854
aatcttatttcta

SEQ ID NO: 33927 - DNA, 13 bp, Artificial Sequence
  Oligonucleotide for detection of SNP TSC0010854
aattttttttttg

SEQ ID NO: 33928 - DNA, 13 bp, Artificial Sequence
  Oligonucleotide for detection of SNP TSC0010854
caaaaaaaaaatt

SEQ ID NO: 33929 - DNA, 13 bp, Artificial Sequence
  Oligonucleotide for detection of SNP TSC0010854
aattttgtttttg

SEQ ID NO: 33930 - DNA, 13 bp, Artificial Sequence
  Oligonucleotide for detection of SNP TSC0010854
caaaaacaaaatt

SEQ ID NO: 33931 - DNA, 13 bp, Artificial Sequence
  Oligonucleotide for detection of SNP TSC0010855
tatttaattaaty

SEQ ID NO: 33932 - DNA, 13 bp, Artificial Sequence
  Oligonucleotide for detection of SNP TSC0010855
rattaattaaata

SEQ ID NO: 33933 - DNA, 13 bp, Artificial Sequence
  Oligonucleotide for detection of SNP TSC0010855
tatttagttaaty

SEQ ID NO: 33934 - DNA, 13 bp, Artificial Sequence
  Oligonucleotide for detection of SNP TSC0010855
rattaactaaata

SEQ ID NO: 33935 - DNA, 13 bp, Artificial Sequence
  Oligonucleotide for detection of SNP TSC0010856
tatataatgtgtg

SEQ ID NO: 33936 - DNA, 13 bp, Artificial Sequence
  Oligonucleotide for detection of SNP TSC0010856
cacacattatata

SEQ ID NO: 33937 - DNA, 13 bp, Artificial Sequence
  Oligonucleotide for detection of SNP TSC0010856
tatatagtgtgtg

SEQ ID NO: 33938 - DNA, 13 bp, Artificial Sequence
  Oligonucleotide for detection of SNP TSC0010856
cacacactatata

SEQ ID NO: 33939 - DNA, 13 bp, Artificial Sequence
  Oligonucleotide for detection of SNP TSC0010857
atgattgattgaa

SEQ ID NO: 33940 - DNA, 13 bp, Artificial Sequence
  Oligonucleotide for detection of SNP TSC0010857
ttcaatcaatcat

SEQ ID NO: 33941 - DNA, 13 bp, Artificial Sequence
  Oligonucleotide for detection of SNP TSC0010857
atgattaattgaa

SEQ ID NO: 33942 - DNA, 13 bp, Artificial Sequence
  Oligonucleotide for detection of SNP TSC0010857
ttcaattaatcat

SEQ ID NO: 33943 - DNA, 13 bp, Artificial Sequence
  Oligonucleotide for detection of SNP TSC0010857
acgattgattgaa

SEQ ID NO: 33944 - DNA, 13 bp, Artificial Sequence
  Oligonucleotide for detection of SNP TSC0010857
ttcaatcaatcgt

SEQ ID NO: 33945 - DNA, 13 bp, Artificial Sequence
  Oligonucleotide for detection of SNP TSC0010857
acgattaattgaa

SEQ ID NO: 33946 - DNA, 13 bp, Artificial Sequence
  Oligonucleotide for detection of SNP TSC0010857
ttcaattaatcgt

SEQ ID NO: 33947 - DNA, 13 bp, Artificial Sequence
  Oligonucleotide for detection of SNP TSC0010858
taggttataataa

SEQ ID NO: 33948 - DNA, 13 bp, Artificial Sequence
  Oligonucleotide for detection of SNP TSC0010858
ttattataaccta

SEQ ID NO: 33949 - DNA, 13 bp, Artificial Sequence
  Oligonucleotide for detection of SNP TSC0010858
taggttgtaataa

SEQ ID NO: 33950 - DNA, 13 bp, Artificial Sequence
  Oligonucleotide for detection of SNP TSC0010858
ttattacaaccta

SEQ ID NO: 33951 - DNA, 13 bp, Artificial Sequence
  Oligonucleotide for detection of SNP TSC0010860
gtgttaaatttty

SEQ ID NO: 33952 - DNA, 13 bp, Artificial Sequence
  Oligonucleotide for detection of SNP TSC0010860
raaaatttaacac

SEQ ID NO: 33953 - DNA, 13 bp, Artificial Sequence
  Oligonucleotide for detection of SNP TSC0010860
gtgttatatttty

SEQ ID NO: 33954 - DNA, 13 bp, Artificial Sequence
  Oligonucleotide for detection of SNP TSC0010860
raaaatataacac

SEQ ID NO: 33955 - DNA, 13 bp, Artificial Sequence
  Oligonucleotide for detection of SNP TSC0010860
gggggtttagtay

SEQ ID NO: 33956 - DNA, 13 bp, Artificial Sequence
  Oligonucleotide for detection of SNP TSC0010860
rtactaaaccccc

SEQ ID NO: 33957 - DNA, 13 bp, Artificial Sequence
  Oligonucleotide for detection of SNP TSC0010860
gggggtatagtay

SEQ ID NO: 33958 - DNA, 13 bp, Artificial Sequence
  Oligonucleotide for detection of SNP TSC0010860
rtactataccccc

SEQ ID NO: 33959 - DNA, 13 bp, Artificial Sequence
  Oligonucleotide for detection of SNP TSC0010864
ttggaaggtttty

SEQ ID NO: 33960 - DNA, 13 bp, Artificial Sequence
  Oligonucleotide for detection of SNP TSC0010864
raaaaccttccaa

SEQ ID NO: 33961 - DNA, 13 bp, Artificial Sequence
  Oligonucleotide for detection of SNP TSC0010864
ttggaaagtttty

SEQ ID NO: 33962 - DNA, 13 bp, Artificial Sequence
  Oligonucleotide for detection of SNP TSC0010864
raaaactttccaa

SEQ ID NO: 33963 - DNA, 13 bp, Artificial Sequence
  Oligonucleotide for detection of SNP TSC0010865
agttttattttgg

SEQ ID NO: 33964 - DNA, 13 bp, Artificial Sequence
  Oligonucleotide for detection of SNP TSC0010865
ccaaaataaaact

SEQ ID NO: 33965 - DNA, 13 bp, Artificial Sequence
  Oligonucleotide for detection of SNP TSC0010865
agttttgttttgg

SEQ ID NO: 33966 - DNA, 13 bp, Artificial Sequence
  Oligonucleotide for detection of SNP TSC0010865
ccaaaacaaaact

SEQ ID NO: 33967 - DNA, 13 bp, Artificial Sequence
  Oligonucleotide for detection of SNP TSC0010865
agtttcgttttgg

SEQ ID NO: 33968 - DNA, 13 bp, Artificial Sequence
  Oligonucleotide for detection of SNP TSC0010865
ccaaaacgaaact

SEQ ID NO: 33969 - DNA, 13 bp, Artificial Sequence
  Oligonucleotide for detection of SNP TSC0010865
ttaagatggaatt

SEQ ID NO: 33970 - DNA, 13 bp, Artificial Sequence
  Oligonucleotide for detection of SNP TSC0010865
aattccatcttaa

SEQ ID NO: 33971 - DNA, 13 bp, Artificial Sequence
  Oligonucleotide for detection of SNP TSC0010865
ttaagacggaatt

SEQ ID NO: 33972 - DNA, 13 bp, Artificial Sequence
  Oligonucleotide for detection of SNP TSC0010865
aattccgtcttaa

SEQ ID NO: 33973 - DNA, 13 bp, Artificial Sequence
  Oligonucleotide for detection of SNP TSC0010866
gattggtggttaa

SEQ ID NO: 33974 - DNA, 13 bp, Artificial Sequence
  Oligonucleotide for detection of SNP TSC0010866
ttaaccaccaatc

SEQ ID NO: 33975 - DNA, 13 bp, Artificial Sequence
  Oligonucleotide for detection of SNP TSC0010866
gattggcggttaa

SEQ ID NO: 33976 - DNA, 13 bp, Artificial Sequence
  Oligonucleotide for detection of SNP TSC0010866
ttaaccgccaatc

SEQ ID NO: 33977 - DNA, 13 bp, Artificial Sequence
  Oligonucleotide for detection of SNP TSC0010866
ttgattattaaty

SEQ ID NO: 33978 - DNA, 13 bp, Artificial Sequence
  Oligonucleotide for detection of SNP TSC0010866
rattaataatcaa

SEQ ID NO: 33979 - DNA, 13 bp, Artificial Sequence
  Oligonucleotide for detection of SNP TSC0010866
ttgattgttaaty

SEQ ID NO: 33980 - DNA, 13 bp, Artificial Sequence
  Oligonucleotide for detection of SNP TSC0010866
rattaacaatcaa

SEQ ID NO: 33981 - DNA, 13 bp, Artificial Sequence
  Oligonucleotide for detection of SNP TSC0010866
ttgatcgttaaty

SEQ ID NO: 33982 - DNA, 13 bp, Artificial Sequence
  Oligonucleotide for detection of SNP TSC0010866
rattaacgatcaa

SEQ ID NO: 33983 - DNA, 13 bp, Artificial Sequence
  Oligonucleotide for detection of SNP TSC0010869
ttattttggggat

SEQ ID NO: 33984 - DNA, 13 bp, Artificial Sequence
  Oligonucleotide for detection of SNP TSC0010869
atccccaaaataa

SEQ ID NO: 33985 - DNA, 13 bp, Artificial Sequence
  Oligonucleotide for detection of SNP TSC0010869
ttatttcggggat

SEQ ID NO: 33986 - DNA, 13 bp, Artificial Sequence
  Oligonucleotide for detection of SNP TSC0010869
atccccgaaataa

SEQ ID NO: 33987 - DNA, 13 bp, Artificial Sequence
  Oligonucleotide for detection of SNP TSC0010869
atttttggagtga

SEQ ID NO: 33988 - DNA, 13 bp, Artificial Sequence
  Oligonucleotide for detection of SNP TSC0010869
tcactccaaaaat

SEQ ID NO: 33989 - DNA, 13 bp, Artificial Sequence
  Oligonucleotide for detection of SNP TSC0010869
atttttagagtga

SEQ ID NO: 33990 - DNA, 13 bp, Artificial Sequence
  Oligonucleotide for detection of SNP TSC0010869
tcactctaaaaat

SEQ ID NO: 33991 - DNA, 13 bp, Artificial Sequence
  Oligonucleotide for detection of SNP TSC0010869
attttcggagtga

SEQ ID NO: 33992 - DNA, 13 bp, Artificial Sequence
  Oligonucleotide for detection of SNP TSC0010869
tcactccgaaaat

SEQ ID NO: 33993 - DNA, 13 bp, Artificial Sequence
  Oligonucleotide for detection of SNP TSC0010870
ataattggttatt

SEQ ID NO: 33994 - DNA, 13 bp, Artificial Sequence
  Oligonucleotide for detection of SNP TSC0010870
aataaccaattat

SEQ ID NO: 33995 - DNA, 13 bp, Artificial Sequence
  Oligonucleotide for detection of SNP TSC0010870
ataatttgttatt

SEQ ID NO: 33996 - DNA, 13 bp, Artificial Sequence
  Oligonucleotide for detection of SNP TSC0010870
aataacaaattat

SEQ ID NO: 33997 - DNA, 13 bp, Artificial Sequence
  Oligonucleotide for detection of SNP TSC0010870
agtgattagttgt

SEQ ID NO: 33998 - DNA, 13 bp, Artificial Sequence
  Oligonucleotide for detection of SNP TSC0010870
acaactaatcact

SEQ ID NO: 33999 - DNA, 13 bp, Artificial Sequence
  Oligonucleotide for detection of SNP TSC0010870
agtgataagttgt

SEQ ID NO: 34000 - DNA, 13 bp, Artificial Sequence
  Oligonucleotide for detection of SNP TSC0010870
acaacttatcact

SEQ ID NO: 34001 - DNA, 13 bp, Artificial Sequence
  Oligonucleotide for detection of SNP TSC0010871
ttttgagtttatt

SEQ ID NO: 34002 - DNA, 13 bp, Artificial Sequence
  Oligonucleotide for detection of SNP TSC0010871
aataaactcaaaa

SEQ ID NO: 34003 - DNA, 13 bp, Artificial Sequence
  Oligonucleotide for detection of SNP TSC0010871
ttttgattttatt

SEQ ID NO: 34004 - DNA, 13 bp, Artificial Sequence
  Oligonucleotide for detection of SNP TSC0010871
aataaaatcaaaa

SEQ ID NO: 34005 - DNA, 13 bp, Artificial Sequence
  Oligonucleotide for detection of SNP TSC0010871
aatgggtttagga

SEQ ID NO: 34006 - DNA, 13 bp, Artificial Sequence
  Oligonucleotide for detection of SNP TSC0010871
tcctaaacccatt

SEQ ID NO: 34007 - DNA, 13 bp, Artificial Sequence
  Oligonucleotide for detection of SNP TSC0010871
aatgggattagga

SEQ ID NO: 34008 - DNA, 13 bp, Artificial Sequence
  Oligonucleotide for detection of SNP TSC0010871
tcctaatcccatt

SEQ ID NO: 34009 - DNA, 13 bp, Artificial Sequence
  Oligonucleotide for detection of SNP TSC0010876
aagtagagtttaa

SEQ ID NO: 34010 - DNA, 13 bp, Artificial Sequence
  Oligonucleotide for detection of SNP TSC0010876
ttaaactctactt

SEQ ID NO: 34011 - DNA, 13 bp, Artificial Sequence
  Oligonucleotide for detection of SNP TSC0010876
aagtagtgtttaa

SEQ ID NO: 34012 - DNA, 13 bp, Artificial Sequence
  Oligonucleotide for detection of SNP TSC0010876
ttaaacactactt

SEQ ID NO: 34013 - DNA, 13 bp, Artificial Sequence
  Oligonucleotide for detection of SNP TSC0010876
ttggattttgttt

SEQ ID NO: 34014 - DNA, 13 bp, Artificial Sequence
  Oligonucleotide for detection of SNP TSC0010876
aaacaaaatccaa

SEQ ID NO: 34015 - DNA, 13 bp, Artificial Sequence
  Oligonucleotide for detection of SNP TSC0010876
ttggatattgttt

SEQ ID NO: 34016 - DNA, 13 bp, Artificial Sequence
  Oligonucleotide for detection of SNP TSC0010876
aaacaatatccaa

SEQ ID NO: 34017 - DNA, 13 bp, Artificial Sequence
  Oligonucleotide for detection of SNP TSC0010877
aattatatttata

SEQ ID NO: 34018 - DNA, 13 bp, Artificial Sequence
  Oligonucleotide for detection of SNP TSC0010877
tataaatataatt

SEQ ID NO: 34019 - DNA, 13 bp, Artificial Sequence
  Oligonucleotide for detection of SNP TSC0010877
aattatgtttata

SEQ ID NO: 34020 - DNA, 13 bp, Artificial Sequence
  Oligonucleotide for detection of SNP TSC0010877
tataaacataatt

SEQ ID NO: 34021 - DNA, 13 bp, Artificial Sequence
  Oligonucleotide for detection of SNP TSC0010887
tggtaaagtttta

SEQ ID NO: 34022 - DNA, 13 bp, Artificial Sequence
  Oligonucleotide for detection of SNP TSC0010887
taaaactttacca

SEQ ID NO: 34023 - DNA, 13 bp, Artificial Sequence
  Oligonucleotide for detection of SNP TSC0010887
tggtaaggtttta

SEQ ID NO: 34024 - DNA, 13 bp, Artificial Sequence
  Oligonucleotide for detection of SNP TSC0010887
taaaaccttacca

SEQ ID NO: 34025 - DNA, 13 bp, Artificial Sequence
  Oligonucleotide for detection of SNP TSC0010892
ataaaattaggat

SEQ ID NO: 34026 - DNA, 13 bp, Artificial Sequence
  Oligonucleotide for detection of SNP TSC0010892
atcctaattttat

SEQ ID NO: 34027 - DNA, 13 bp, Artificial Sequence
  Oligonucleotide for detection of SNP TSC0010892
ataaaagtaggat

SEQ ID NO: 34028 - DNA, 13 bp, Artificial Sequence
  Oligonucleotide for detection of SNP TSC0010892
atcctacttttat

SEQ ID NO: 34029 - DNA, 13 bp, Artificial Sequence
  Oligonucleotide for detection of SNP TSC0010892
attttatttttgt

SEQ ID NO: 34030 - DNA, 13 bp, Artificial Sequence
  Oligonucleotide for detection of SNP TSC0010892
acaaaaataaaat

SEQ ID NO: 34031 - DNA, 13 bp, Artificial Sequence
  Oligonucleotide for detection of SNP TSC0010893
aagtatatattta

SEQ ID NO: 34032 - DNA, 13 bp, Artificial Sequence
  Oligonucleotide for detection of SNP TSC0010893
taaatatatactt

SEQ ID NO: 34033 - DNA, 13 bp, Artificial Sequence
  Oligonucleotide for detection of SNP TSC0010893
aagtatgtattta

SEQ ID NO: 34034 - DNA, 13 bp, Artificial Sequence
  Oligonucleotide for detection of SNP TSC0010893
taaatacatactt

SEQ ID NO: 34035 - DNA, 13 bp, Artificial Sequence
  Oligonucleotide for detection of SNP TSC0010893
aagtacgtattta

SEQ ID NO: 34036 - DNA, 13 bp, Artificial Sequence
  Oligonucleotide for detection of SNP TSC0010893
taaatacgtactt

SEQ ID NO: 34037 - DNA, 13 bp, Artificial Sequence
  Oligonucleotide for detection of SNP TSC0010893
taaatatgtattt

SEQ ID NO: 34038 - DNA, 13 bp, Artificial Sequence
  Oligonucleotide for detection of SNP TSC0010893
aaatacatattta

SEQ ID NO: 34039 - DNA, 13 bp, Artificial Sequence
  Oligonucleotide for detection of SNP TSC0010893
taaatacgtattt

SEQ ID NO: 34040 - DNA, 13 bp, Artificial Sequence
  Oligonucleotide for detection of SNP TSC0010893
aaatacgtattta

SEQ ID NO: 34041 - DNA, 13 bp, Artificial Sequence
  Oligonucleotide for detection of SNP TSC0010894
gtgattatgtaag

SEQ ID NO: 34042 - DNA, 13 bp, Artificial Sequence
  Oligonucleotide for detection of SNP TSC0010894
cttacataatcac

SEQ ID NO: 34043 - DNA, 13 bp, Artificial Sequence
  Oligonucleotide for detection of SNP TSC0010894
gtgattgtgtaag

SEQ ID NO: 34044 - DNA, 13 bp, Artificial Sequence
  Oligonucleotide for detection of SNP TSC0010894
cttacacaatcac

SEQ ID NO: 34045 - DNA, 13 bp, Artificial Sequence
  Oligonucleotide for detection of SNP TSC0010894
gtgatcgtgtaag

SEQ ID NO: 34046 - DNA, 13 bp, Artificial Sequence
  Oligonucleotide for detection of SNP TSC0010894
cttacacgatcac

SEQ ID NO: 34047 - DNA, 13 bp, Artificial Sequence
  Oligonucleotide for detection of SNP TSC0010894
tttatatgattay

SEQ ID NO: 34048 - DNA, 13 bp, Artificial Sequence
  Oligonucleotide for detection of SNP TSC0010894
rtaatcatataaa

SEQ ID NO: 34049 - DNA, 13 bp, Artificial Sequence
  Oligonucleotide for detection of SNP TSC0010894
tttatacgattay

SEQ ID NO: 34050 - DNA, 13 bp, Artificial Sequence
  Oligonucleotide for detection of SNP TSC0010894
rtaatcgtataaa

SEQ ID NO: 34051 - DNA, 13 bp, Artificial Sequence
  Oligonucleotide for detection of SNP TSC0010898
ggtgtgggttaty

SEQ ID NO: 34052 - DNA, 13 bp, Artificial Sequence
  Oligonucleotide for detection of SNP TSC0010898
rataacccacacc

SEQ ID NO: 34053 - DNA, 13 bp, Artificial Sequence
  Oligonucleotide for detection of SNP TSC0010898
ggtgtgagttaty

SEQ ID NO: 34054 - DNA, 13 bp, Artificial Sequence
  Oligonucleotide for detection of SNP TSC0010898
rataactcacacc

SEQ ID NO: 34055 - DNA, 13 bp, Artificial Sequence
  Oligonucleotide for detection of SNP TSC0010899
gtttttgtaagag

SEQ ID NO: 34056 - DNA, 13 bp, Artificial Sequence
  Oligonucleotide for detection of SNP TSC0010899
ctcttacaaaaac

SEQ ID NO: 34057 - DNA, 13 bp, Artificial Sequence
  Oligonucleotide for detection of SNP TSC0010899
gtttttataagag

SEQ ID NO: 34058 - DNA, 13 bp, Artificial Sequence
  Oligonucleotide for detection of SNP TSC0010899
ctcttataaaaac

SEQ ID NO: 34059 - DNA, 13 bp, Artificial Sequence
  Oligonucleotide for detection of SNP TSC0010900
tgatttggtgagt

SEQ ID NO: 34060 - DNA, 13 bp, Artificial Sequence
  Oligonucleotide for detection of SNP TSC0010900
actcaccaaatca

SEQ ID NO: 34061 - DNA, 13 bp, Artificial Sequence
  Oligonucleotide for detection of SNP TSC0010900
tgattttgtgagt

SEQ ID NO: 34062 - DNA, 13 bp, Artificial Sequence
  Oligonucleotide for detection of SNP TSC0010900
actcacaaaatca

SEQ ID NO: 34063 - DNA, 13 bp, Artificial Sequence
  Oligonucleotide for detection of SNP TSC0010900
atttattaagtta

SEQ ID NO: 34064 - DNA, 13 bp, Artificial Sequence
  Oligonucleotide for detection of SNP TSC0010900
taacttaataaat

SEQ ID NO: 34065 - DNA, 13 bp, Artificial Sequence
  Oligonucleotide for detection of SNP TSC0010900
atttataaagtta

SEQ ID NO: 34066 - DNA, 13 bp, Artificial Sequence
  Oligonucleotide for detection of SNP TSC0010900
taactttataaat

SEQ ID NO: 34067 - DNA, 13 bp, Artificial Sequence
  Oligonucleotide for detection of SNP TSC0010902
ttaatatgatatt

SEQ ID NO: 34068 - DNA, 13 bp, Artificial Sequence
  Oligonucleotide for detection of SNP TSC0010902
aatatcatattaa

SEQ ID NO: 34069 - DNA, 13 bp, Artificial Sequence
  Oligonucleotide for detection of SNP TSC0010902
ttaatacgatatt

SEQ ID NO: 34070 - DNA, 13 bp, Artificial Sequence
  Oligonucleotide for detection of SNP TSC0010902
aatatcgtattaa

SEQ ID NO: 34071 - DNA, 13 bp, Artificial Sequence
  Oligonucleotide for detection of SNP TSC0010902
aatgttgtattag

SEQ ID NO: 34072 - DNA, 13 bp, Artificial Sequence
  Oligonucleotide for detection of SNP TSC0010902
ctaatacaacatt

SEQ ID NO: 34073 - DNA, 13 bp, Artificial Sequence
  Oligonucleotide for detection of SNP TSC0010902
aatgttatattag

SEQ ID NO: 34074 - DNA, 13 bp, Artificial Sequence
  Oligonucleotide for detection of SNP TSC0010902
ctaatataacatt

SEQ ID NO: 34075 - DNA, 13 bp, Artificial Sequence
  Oligonucleotide for detection of SNP TSC0010902
aatgtcgtattag

SEQ ID NO: 34076 - DNA, 13 bp, Artificial Sequence
  Oligonucleotide for detection of SNP TSC0010902
ctaatacgacatt

SEQ ID NO: 34077 - DNA, 13 bp, Artificial Sequence
  Oligonucleotide for detection of SNP TSC0010903
ataatagtaagtt

SEQ ID NO: 34078 - DNA, 13 bp, Artificial Sequence
  Oligonucleotide for detection of SNP TSC0010903
aacttactattat

SEQ ID NO: 34079 - DNA, 13 bp, Artificial Sequence
  Oligonucleotide for detection of SNP TSC0010903
ataataataagtt

SEQ ID NO: 34080 - DNA, 13 bp, Artificial Sequence
  Oligonucleotide for detection of SNP TSC0010903
aacttattattat

SEQ ID NO: 34081 - DNA, 13 bp, Artificial Sequence
  Oligonucleotide for detection of SNP TSC0010904
aattattttttay

SEQ ID NO: 34082 - DNA, 13 bp, Artificial Sequence
  Oligonucleotide for detection of SNP TSC0010904
rtaaaaaataatt

SEQ ID NO: 34083 - DNA, 13 bp, Artificial Sequence
  Oligonucleotide for detection of SNP TSC0010904
aattatgttttay

SEQ ID NO: 34084 - DNA, 13 bp, Artificial Sequence
  Oligonucleotide for detection of SNP TSC0010904
rtaaaacataatt

SEQ ID NO: 34085 - DNA, 13 bp, Artificial Sequence
  Oligonucleotide for detection of SNP TSC0010904
aattacgttttay

SEQ ID NO: 34086 - DNA, 13 bp, Artificial Sequence
  Oligonucleotide for detection of SNP TSC0010904
rtaaaacgtaatt

SEQ ID NO: 34087 - DNA, 13 bp, Artificial Sequence
  Oligonucleotide for detection of SNP TSC0010904
gtgggatgtgatt

SEQ ID NO: 34088 - DNA, 13 bp, Artificial Sequence
  Oligonucleotide for detection of SNP TSC0010904
aatcacatcccac

SEQ ID NO: 34089 - DNA, 13 bp, Artificial Sequence
  Oligonucleotide for detection of SNP TSC0010904
gtgggacgtgatt

SEQ ID NO: 34090 - DNA, 13 bp, Artificial Sequence
  Oligonucleotide for detection of SNP TSC0010904
aatcacgtcccac

SEQ ID NO: 34091 - DNA, 13 bp, Artificial Sequence
  Oligonucleotide for detection of SNP TSC0010905
ttgagaggataay

SEQ ID NO: 34092 - DNA, 13 bp, Artificial Sequence
  Oligonucleotide for detection of SNP TSC0010905
rttatcctctcaa

SEQ ID NO: 34093 - DNA, 13 bp, Artificial Sequence
  Oligonucleotide for detection of SNP TSC0010905
ttgagaagataay

SEQ ID NO: 34094 - DNA, 13 bp, Artificial Sequence
  Oligonucleotide for detection of SNP TSC0010905
rttatcttctcaa

SEQ ID NO: 34095 - DNA, 13 bp, Artificial Sequence
  Oligonucleotide for detection of SNP TSC0010906
tttaatatgagty

SEQ ID NO: 34096 - DNA, 13 bp, Artificial Sequence
  Oligonucleotide for detection of SNP TSC0010906
ractcatattaaa

SEQ ID NO: 34097 - DNA, 13 bp, Artificial Sequence
  Oligonucleotide for detection of SNP TSC0010906
tttaatgtgagty

SEQ ID NO: 34098 - DNA, 13 bp, Artificial Sequence
  Oligonucleotide for detection of SNP TSC0010906
ractcacattaaa

SEQ ID NO: 34099 - DNA, 13 bp, Artificial Sequence
  Oligonucleotide for detection of SNP TSC0010906
tttaacgtgagty

SEQ ID NO: 34100 - DNA, 13 bp, Artificial Sequence
  Oligonucleotide for detection of SNP TSC0010906
ractcacgttaaa

SEQ ID NO: 34101 - DNA, 13 bp, Artificial Sequence
  Oligonucleotide for detection of SNP TSC0010906
ggtttatgttaaa

SEQ ID NO: 34102 - DNA, 13 bp, Artificial Sequence
  Oligonucleotide for detection of SNP TSC0010906
tttaacataaacc

SEQ ID NO: 34103 - DNA, 13 bp, Artificial Sequence
  Oligonucleotide for detection of SNP TSC0010906
ggtttacgttaaa

SEQ ID NO: 34104 - DNA, 13 bp, Artificial Sequence
  Oligonucleotide for detection of SNP TSC0010906
tttaacgtaaacc

SEQ ID NO: 34105 - DNA, 13 bp, Artificial Sequence
  Oligonucleotide for detection of SNP TSC0010909
aaatgagtaagag

SEQ ID NO: 34106 - DNA, 13 bp, Artificial Sequence
  Oligonucleotide for detection of SNP TSC0010909
ctcttactcattt

SEQ ID NO: 34107 - DNA, 13 bp, Artificial Sequence
  Oligonucleotide for detection of SNP TSC0010909
aaatgaataagag

SEQ ID NO: 34108 - DNA, 13 bp, Artificial Sequence
  Oligonucleotide for detection of SNP TSC0010909
ctcttattcattt

SEQ ID NO: 34109 - DNA, 13 bp, Artificial Sequence
  Oligonucleotide for detection of SNP TSC0010912
ggagggttggaga

SEQ ID NO: 34110 - DNA, 13 bp, Artificial Sequence
  Oligonucleotide for detection of SNP TSC0010912
tctccaaccctcc

SEQ ID NO: 34111 - DNA, 13 bp, Artificial Sequence
  Oligonucleotide for detection of SNP TSC0010912
ggaggggtggaga

SEQ ID NO: 34112 - DNA, 13 bp, Artificial Sequence
  Oligonucleotide for detection of SNP TSC0010912
tctccacccctcc

SEQ ID NO: 34113 - DNA, 13 bp, Artificial Sequence
  Oligonucleotide for detection of SNP TSC0010913
attaaatgattag

SEQ ID NO: 34114 - DNA, 13 bp, Artificial Sequence
  Oligonucleotide for detection of SNP TSC0010913
ctaatcatttaat

SEQ ID NO: 34115 - DNA, 13 bp, Artificial Sequence
  Oligonucleotide for detection of SNP TSC0010913
attaaacgattag

SEQ ID NO: 34116 - DNA, 13 bp, Artificial Sequence
  Oligonucleotide for detection of SNP TSC0010913
ctaatcgtttaat

SEQ ID NO: 34117 - DNA, 13 bp, Artificial Sequence
  Oligonucleotide for detection of SNP TSC0010913
ttaattgtttggt

SEQ ID NO: 34118 - DNA, 13 bp, Artificial Sequence
  Oligonucleotide for detection of SNP TSC0010913
accaaacaattaa

SEQ ID NO: 34119 - DNA, 13 bp, Artificial Sequence
  Oligonucleotide for detection of SNP TSC0010913
ttaattatttggt

SEQ ID NO: 34120 - DNA, 13 bp, Artificial Sequence
  Oligonucleotide for detection of SNP TSC0010913
accaaataattaa

SEQ ID NO: 34121 - DNA, 13 bp, Artificial Sequence
  Oligonucleotide for detection of SNP TSC0010913
ttaatcgtttggt

SEQ ID NO: 34122 - DNA, 13 bp, Artificial Sequence
  Oligonucleotide for detection of SNP TSC0010913
accaaacgattaa

SEQ ID NO: 34123 - DNA, 13 bp, Artificial Sequence
  Oligonucleotide for detection of SNP TSC0010914
aagggggtttttt

SEQ ID NO: 34124 - DNA, 13 bp, Artificial Sequence
  Oligonucleotide for detection of SNP TSC0010914
aaaaaaccccctt

SEQ ID NO: 34125 - DNA, 13 bp, Artificial Sequence
  Oligonucleotide for detection of SNP TSC0010914
aaggggatttttt

SEQ ID NO: 34126 - DNA, 13 bp, Artificial Sequence
  Oligonucleotide for detection of SNP TSC0010914
aaaaaatcccctt

SEQ ID NO: 34127 - DNA, 13 bp, Artificial Sequence
  Oligonucleotide for detection of SNP TSC0010915
taattgaattttt

SEQ ID NO: 34128 - DNA, 13 bp, Artificial Sequence
  Oligonucleotide for detection of SNP TSC0010915
aaaaattcaatta

SEQ ID NO: 34129 - DNA, 13 bp, Artificial Sequence
  Oligonucleotide for detection of SNP TSC0010915
taattgtattttt

SEQ ID NO: 34130 - DNA, 13 bp, Artificial Sequence
  Oligonucleotide for detection of SNP TSC0010915
aaaaatacaatta

SEQ ID NO: 34131 - DNA, 13 bp, Artificial Sequence
  Oligonucleotide for detection of SNP TSC0010915
aaaaatttaattg

SEQ ID NO: 34132 - DNA, 13 bp, Artificial Sequence
  Oligonucleotide for detection of SNP TSC0010915
caattaaattttt

SEQ ID NO: 34133 - DNA, 13 bp, Artificial Sequence
  Oligonucleotide for detection of SNP TSC0010915
aaaaatgtaattg

SEQ ID NO: 34134 - DNA, 13 bp, Artificial Sequence
  Oligonucleotide for detection of SNP TSC0010915
caattacattttt

SEQ ID NO: 34135 - DNA, 13 bp, Artificial Sequence
  Oligonucleotide for detection of SNP TSC0010916
tagagagaaggaa

SEQ ID NO: 34136 - DNA, 13 bp, Artificial Sequence
  Oligonucleotide for detection of SNP TSC0010916
ttccttctctcta

SEQ ID NO: 34137 - DNA, 13 bp, Artificial Sequence
  Oligonucleotide for detection of SNP TSC0010916
tagagaaaaggaa

SEQ ID NO: 34138 - DNA, 13 bp, Artificial Sequence
  Oligonucleotide for detection of SNP TSC0010916
ttccttttctcta

SEQ ID NO: 34139 - DNA, 13 bp, Artificial Sequence
  Oligonucleotide for detection of SNP TSC0010917
taaaatgatttta

SEQ ID NO: 34140 - DNA, 13 bp, Artificial Sequence
  Oligonucleotide for detection of SNP TSC0010917
taaaatcatttta

SEQ ID NO: 34141 - DNA, 13 bp, Artificial Sequence
  Oligonucleotide for detection of SNP TSC0010917
taaaattatttta

SEQ ID NO: 34142 - DNA, 13 bp, Artificial Sequence
  Oligonucleotide for detection of SNP TSC0010917
taaaataatttta

SEQ ID NO: 34143 - DNA, 13 bp, Artificial Sequence
  Oligonucleotide for detection of SNP TSC0010918
tgtttggtaattg

SEQ ID NO: 34144 - DNA, 13 bp, Artificial Sequence
  Oligonucleotide for detection of SNP TSC0010918
caattaccaaaca

SEQ ID NO: 34145 - DNA, 13 bp, Artificial Sequence
  Oligonucleotide for detection of SNP TSC0010918
tgtttgataattg

SEQ ID NO: 34146 - DNA, 13 bp, Artificial Sequence
  Oligonucleotide for detection of SNP TSC0010918
caattatcaaaca

SEQ ID NO: 34147 - DNA, 13 bp, Artificial Sequence
  Oligonucleotide for detection of SNP TSC0010918
tgtttggtaatcg

SEQ ID NO: 34148 - DNA, 13 bp, Artificial Sequence
  Oligonucleotide for detection of SNP TSC0010918
cgattaccaaaca

SEQ ID NO: 34149 - DNA, 13 bp, Artificial Sequence
  Oligonucleotide for detection of SNP TSC0010918
tgtttgataatcg

SEQ ID NO: 34150 - DNA, 13 bp, Artificial Sequence
  Oligonucleotide for detection of SNP TSC0010918
cgattatcaaaca

SEQ ID NO: 34151 - DNA, 13 bp, Artificial Sequence
  Oligonucleotide for detection of SNP TSC0010921
attatggtggtat

SEQ ID NO: 34152 - DNA, 13 bp, Artificial Sequence
  Oligonucleotide for detection of SNP TSC0010921
ataccaccataat

SEQ ID NO: 34153 - DNA, 13 bp, Artificial Sequence
  Oligonucleotide for detection of SNP TSC0010921
attatgatggtat

SEQ ID NO: 34154 - DNA, 13 bp, Artificial Sequence
  Oligonucleotide for detection of SNP TSC0010921
ataccatcataat

SEQ ID NO: 34155 - DNA, 13 bp, Artificial Sequence
  Oligonucleotide for detection of SNP TSC0010922
aagggagttaatg

SEQ ID NO: 34156 - DNA, 13 bp, Artificial Sequence
  Oligonucleotide for detection of SNP TSC0010922
cattaactccctt

SEQ ID NO: 34157 - DNA, 13 bp, Artificial Sequence
  Oligonucleotide for detection of SNP TSC0010922
aagggaattaatg

SEQ ID NO: 34158 - DNA, 13 bp, Artificial Sequence
  Oligonucleotide for detection of SNP TSC0010922
cattaattccctt

SEQ ID NO: 34159 - DNA, 13 bp, Artificial Sequence
  Oligonucleotide for detection of SNP TSC0010923
taataattggttg

SEQ ID NO: 34160 - DNA, 13 bp, Artificial Sequence
  Oligonucleotide for detection of SNP TSC0010923
caaccaattatta

SEQ ID NO: 34161 - DNA, 13 bp, Artificial Sequence
  Oligonucleotide for detection of SNP TSC0010923
taataagtggttg

SEQ ID NO: 34162 - DNA, 13 bp, Artificial Sequence
  Oligonucleotide for detection of SNP TSC0010923
caaccacttatta

SEQ ID NO: 34163 - DNA, 13 bp, Artificial Sequence
  Oligonucleotide for detection of SNP TSC0010923
taattagttgtta

SEQ ID NO: 34164 - DNA, 13 bp, Artificial Sequence
  Oligonucleotide for detection of SNP TSC0010923
taacaactaatta

SEQ ID NO: 34165 - DNA, 13 bp, Artificial Sequence
  Oligonucleotide for detection of SNP TSC0010923
taattatttgtta

SEQ ID NO: 34166 - DNA, 13 bp, Artificial Sequence
  Oligonucleotide for detection of SNP TSC0010923
taacaaataatta

SEQ ID NO: 34167 - DNA, 13 bp, Artificial Sequence
  Oligonucleotide for detection of SNP TSC0010928
agtaaattttatt

SEQ ID NO: 34168 - DNA, 13 bp, Artificial Sequence
  Oligonucleotide for detection of SNP TSC0010928
aataaaatttact

SEQ ID NO: 34169 - DNA, 13 bp, Artificial Sequence
  Oligonucleotide for detection of SNP TSC0010928
agtaaagtttatt

SEQ ID NO: 34170 - DNA, 13 bp, Artificial Sequence
  Oligonucleotide for detection of SNP TSC0010928
aataaactttact

SEQ ID NO: 34171 - DNA, 13 bp, Artificial Sequence
  Oligonucleotide for detection of SNP TSC0010928
aatggagtttgtt

SEQ ID NO: 34172 - DNA, 13 bp, Artificial Sequence
  Oligonucleotide for detection of SNP TSC0010928
aacaaactccatt

SEQ ID NO: 34173 - DNA, 13 bp, Artificial Sequence
  Oligonucleotide for detection of SNP TSC0010928
aatggattttgtt

SEQ ID NO: 34174 - DNA, 13 bp, Artificial Sequence
  Oligonucleotide for detection of SNP TSC0010928
aacaaaatccatt

SEQ ID NO: 34175 - DNA, 13 bp, Artificial Sequence
  Oligonucleotide for detection of SNP TSC0010929
aagaggagagtat

SEQ ID NO: 34176 - DNA, 13 bp, Artificial Sequence
  Oligonucleotide for detection of SNP TSC0010929
atactctcctctt

SEQ ID NO: 34177 - DNA, 13 bp, Artificial Sequence
  Oligonucleotide for detection of SNP TSC0010929
aagaggggagtat

SEQ ID NO: 34178 - DNA, 13 bp, Artificial Sequence
  Oligonucleotide for detection of SNP TSC0010929
atactcccctctt

SEQ ID NO: 34179 - DNA, 13 bp, Artificial Sequence
  Oligonucleotide for detection of SNP TSC0010930
aattttaaagaga

SEQ ID NO: 34180 - DNA, 13 bp, Artificial Sequence
  Oligonucleotide for detection of SNP TSC0010930
tctctttaaaatt

SEQ ID NO: 34181 - DNA, 13 bp, Artificial Sequence
  Oligonucleotide for detection of SNP TSC0010930
aattttgaagaga

SEQ ID NO: 34182 - DNA, 13 bp, Artificial Sequence
  Oligonucleotide for detection of SNP TSC0010930
tctcttcaaaatt

SEQ ID NO: 34183 - DNA, 13 bp, Artificial Sequence
  Oligonucleotide for detection of SNP TSC0010932
tagtttagtagat

SEQ ID NO: 34184 - DNA, 13 bp, Artificial Sequence
  Oligonucleotide for detection of SNP TSC0010932
atctactaaacta

SEQ ID NO: 34185 - DNA, 13 bp, Artificial Sequence
  Oligonucleotide for detection of SNP TSC0010932
tagtttggtagat

SEQ ID NO: 34186 - DNA, 13 bp, Artificial Sequence
  Oligonucleotide for detection of SNP TSC0010932
atctaccaaacta

SEQ ID NO: 34187 - DNA, 13 bp, Artificial Sequence
  Oligonucleotide for detection of SNP TSC0010932
tagttcggtagat

SEQ ID NO: 34188 - DNA, 13 bp, Artificial Sequence
  Oligonucleotide for detection of SNP TSC0010932
atctaccgaacta

SEQ ID NO: 34189 - DNA, 13 bp, Artificial Sequence
  Oligonucleotide for detection of SNP TSC0010932
atttgttgagttg

SEQ ID NO: 34190 - DNA, 13 bp, Artificial Sequence
  Oligonucleotide for detection of SNP TSC0010932
caactcaacaaat

SEQ ID NO: 34191 - DNA, 13 bp, Artificial Sequence
  Oligonucleotide for detection of SNP TSC0010932
atttgtcgagttg

SEQ ID NO: 34192 - DNA, 13 bp, Artificial Sequence
  Oligonucleotide for detection of SNP TSC0010932
caactcgacaaat

SEQ ID NO: 34193 - DNA, 13 bp, Artificial Sequence
  Oligonucleotide for detection of SNP TSC0010934
ttaattgttgtat

SEQ ID NO: 34194 - DNA, 13 bp, Artificial Sequence
  Oligonucleotide for detection of SNP TSC0010934
atacaacaattaa

SEQ ID NO: 34195 - DNA, 13 bp, Artificial Sequence
  Oligonucleotide for detection of SNP TSC0010934
ttaatttttgtat

SEQ ID NO: 34196 - DNA, 13 bp, Artificial Sequence
  Oligonucleotide for detection of SNP TSC0010934
atacaaaaattaa

SEQ ID NO: 34197 - DNA, 13 bp, Artificial Sequence
  Oligonucleotide for detection of SNP TSC0010934
atataataattag

SEQ ID NO: 34198 - DNA, 13 bp, Artificial Sequence
  Oligonucleotide for detection of SNP TSC0010934
ctaattattatat

SEQ ID NO: 34199 - DNA, 13 bp, Artificial Sequence
  Oligonucleotide for detection of SNP TSC0010934
atataaaaattag

SEQ ID NO: 34200 - DNA, 13 bp, Artificial Sequence
  Oligonucleotide for detection of SNP TSC0010934
ctaatttttatat

SEQ ID NO: 34201 - DNA, 13 bp, Artificial Sequence
  Oligonucleotide for detection of SNP TSC0010935
ttttaagtgattt

SEQ ID NO: 34202 - DNA, 13 bp, Artificial Sequence
  Oligonucleotide for detection of SNP TSC0010935
aaatcacttaaaa

SEQ ID NO: 34203 - DNA, 13 bp, Artificial Sequence
  Oligonucleotide for detection of SNP TSC0010935
ttttaattgattt

SEQ ID NO: 34204 - DNA, 13 bp, Artificial Sequence
  Oligonucleotide for detection of SNP TSC0010935
aaatcaattaaaa

SEQ ID NO: 34205 - DNA, 13 bp, Artificial Sequence
  Oligonucleotide for detection of SNP TSC0010935
agattatttgagg

SEQ ID NO: 34206 - DNA, 13 bp, Artificial Sequence
  Oligonucleotide for detection of SNP TSC0010935
cctcaaataatct

SEQ ID NO: 34207 - DNA, 13 bp, Artificial Sequence
  Oligonucleotide for detection of SNP TSC0010935
agattaattgagg

SEQ ID NO: 34208 - DNA, 13 bp, Artificial Sequence
  Oligonucleotide for detection of SNP TSC0010935
cctcaattaatct

SEQ ID NO: 34209 - DNA, 13 bp, Artificial Sequence
  Oligonucleotide for detection of SNP TSC0010937
attataatgtatt

SEQ ID NO: 34210 - DNA, 13 bp, Artificial Sequence
  Oligonucleotide for detection of SNP TSC0010937
aatacattataat

SEQ ID NO: 34211 - DNA, 13 bp, Artificial Sequence
  Oligonucleotide for detection of SNP TSC0010937
attatagtgtatt

SEQ ID NO: 34212 - DNA, 13 bp, Artificial Sequence
  Oligonucleotide for detection of SNP TSC0010937
aatacactataat

SEQ ID NO: 34213 - DNA, 13 bp, Artificial Sequence
  Oligonucleotide for detection of SNP TSC0010938
tagggaattataa

SEQ ID NO: 34214 - DNA, 13 bp, Artificial Sequence
  Oligonucleotide for detection of SNP TSC0010938
ttataattcccta

SEQ ID NO: 34215 - DNA, 13 bp, Artificial Sequence
  Oligonucleotide for detection of SNP TSC0010938
tagggatttataa

SEQ ID NO: 34216 - DNA, 13 bp, Artificial Sequence
  Oligonucleotide for detection of SNP TSC0010938
ttataaatcccta

SEQ ID NO: 34217 - DNA, 13 bp, Artificial Sequence
  Oligonucleotide for detection of SNP TSC0010938
ttgtagttttttg

SEQ ID NO: 34218 - DNA, 13 bp, Artificial Sequence
  Oligonucleotide for detection of SNP TSC0010938
caaaaaactacaa

SEQ ID NO: 34219 - DNA, 13 bp, Artificial Sequence
  Oligonucleotide for detection of SNP TSC0010938
ttgtaggtttttg

SEQ ID NO: 34220 - DNA, 13 bp, Artificial Sequence
  Oligonucleotide for detection of SNP TSC0010938
caaaaacctacaa

SEQ ID NO: 34221 - DNA, 13 bp, Artificial Sequence
  Oligonucleotide for detection of SNP TSC0010939
tgttaggtttttt

SEQ ID NO: 34222 - DNA, 13 bp, Artificial Sequence
  Oligonucleotide for detection of SNP TSC0010939
aaaaaacctaaca

SEQ ID NO: 34223 - DNA, 13 bp, Artificial Sequence
  Oligonucleotide for detection of SNP TSC0010939
tgttagttttttt

SEQ ID NO: 34224 - DNA, 13 bp, Artificial Sequence
  Oligonucleotide for detection of SNP TSC0010939
aaaaaaactaaca

SEQ ID NO: 34225 - DNA, 13 bp, Artificial Sequence
  Oligonucleotide for detection of SNP TSC0010939
aggggatttgata

SEQ ID NO: 34226 - DNA, 13 bp, Artificial Sequence
  Oligonucleotide for detection of SNP TSC0010939
tatcaaatcccct

SEQ ID NO: 34227 - DNA, 13 bp, Artificial Sequence
  Oligonucleotide for detection of SNP TSC0010939
aggggaattgata

SEQ ID NO: 34228 - DNA, 13 bp, Artificial Sequence
  Oligonucleotide for detection of SNP TSC0010939
tatcaattcccct

SEQ ID NO: 34229 - DNA, 13 bp, Artificial Sequence
  Oligonucleotide for detection of SNP TSC0010940
gtaaggaaattag

SEQ ID NO: 34230 - DNA, 13 bp, Artificial Sequence
  Oligonucleotide for detection of SNP TSC0010940
ctaatttccttac

SEQ ID NO: 34231 - DNA, 13 bp, Artificial Sequence
  Oligonucleotide for detection of SNP TSC0010940
gtaaggtaattag

SEQ ID NO: 34232 - DNA, 13 bp, Artificial Sequence
  Oligonucleotide for detection of SNP TSC0010940
ctaattaccttac

SEQ ID NO: 34233 - DNA, 13 bp, Artificial Sequence
  Oligonucleotide for detection of SNP TSC0010940
ttggtttttttgy

SEQ ID NO: 34234 - DNA, 13 bp, Artificial Sequence
  Oligonucleotide for detection of SNP TSC0010940
rcaaaaaaaccaa

SEQ ID NO: 34235 - DNA, 13 bp, Artificial Sequence
  Oligonucleotide for detection of SNP TSC0010940
ttggttgttttgy

SEQ ID NO: 34236 - DNA, 13 bp, Artificial Sequence
  Oligonucleotide for detection of SNP TSC0010940
rcaaaacaaccaa

SEQ ID NO: 34237 - DNA, 13 bp, Artificial Sequence
  Oligonucleotide for detection of SNP TSC0010941
ttatgtgtttatt

SEQ ID NO: 34238 - DNA, 13 bp, Artificial Sequence
  Oligonucleotide for detection of SNP TSC0010941
aataaacacataa

SEQ ID NO: 34239 - DNA, 13 bp, Artificial Sequence
  Oligonucleotide for detection of SNP TSC0010941
ttatgtttttatt

SEQ ID NO: 34240 - DNA, 13 bp, Artificial Sequence
  Oligonucleotide for detection of SNP TSC0010941
aataaaaacataa

SEQ ID NO: 34241 - DNA, 13 bp, Artificial Sequence
  Oligonucleotide for detection of SNP TSC0010941
ttacgtgtttatt

SEQ ID NO: 34242 - DNA, 13 bp, Artificial Sequence
  Oligonucleotide for detection of SNP TSC0010941
aataaacacgtaa

SEQ ID NO: 34243 - DNA, 13 bp, Artificial Sequence
  Oligonucleotide for detection of SNP TSC0010941
ttacgtttttatt

SEQ ID NO: 34244 - DNA, 13 bp, Artificial Sequence
  Oligonucleotide for detection of SNP TSC0010941
aataaaaacgtaa

SEQ ID NO: 34245 - DNA, 13 bp, Artificial Sequence
  Oligonucleotide for detection of SNP TSC0010941
ttatgcgtttatt

SEQ ID NO: 34246 - DNA, 13 bp, Artificial Sequence
  Oligonucleotide for detection of SNP TSC0010941
aataaacgcataa

SEQ ID NO: 34247 - DNA, 13 bp, Artificial Sequence
  Oligonucleotide for detection of SNP TSC0010941
ttacgcgtttatt

SEQ ID NO: 34248 - DNA, 13 bp, Artificial Sequence
  Oligonucleotide for detection of SNP TSC0010941
aataaacgcgtaa

SEQ ID NO: 34249 - DNA, 13 bp, Artificial Sequence
  Oligonucleotide for detection of SNP TSC0010941
agtgggtgtgtgg

SEQ ID NO: 34250 - DNA, 13 bp, Artificial Sequence
  Oligonucleotide for detection of SNP TSC0010941
ccacacacccact

SEQ ID NO: 34251 - DNA, 13 bp, Artificial Sequence
  Oligonucleotide for detection of SNP TSC0010941
agtgggagtgtgg

SEQ ID NO: 34252 - DNA, 13 bp, Artificial Sequence
  Oligonucleotide for detection of SNP TSC0010941
ccacactcccact

SEQ ID NO: 34253 - DNA, 13 bp, Artificial Sequence
  Oligonucleotide for detection of SNP TSC0010941
agtgggcgtgtgg

SEQ ID NO: 34254 - DNA, 13 bp, Artificial Sequence
  Oligonucleotide for detection of SNP TSC0010941
ccacacgcccact

SEQ ID NO: 34255 - DNA, 13 bp, Artificial Sequence
  Oligonucleotide for detection of SNP TSC0010941
agtgggagcgtgg

SEQ ID NO: 34256 - DNA, 13 bp, Artificial Sequence
  Oligonucleotide for detection of SNP TSC0010941
ccacgctcccact

SEQ ID NO: 34257 - DNA, 13 bp, Artificial Sequence
  Oligonucleotide for detection of SNP TSC0010941
agtgggtgcgtgg

SEQ ID NO: 34258 - DNA, 13 bp, Artificial Sequence
  Oligonucleotide for detection of SNP TSC0010941
ccacgcacccact

SEQ ID NO: 34259 - DNA, 13 bp, Artificial Sequence
  Oligonucleotide for detection of SNP TSC0010941
agtgggcgcgtgg

SEQ ID NO: 34260 - DNA, 13 bp, Artificial Sequence
  Oligonucleotide for detection of SNP TSC0010941
ccacgcgcccact

SEQ ID NO: 34261 - DNA, 13 bp, Artificial Sequence
  Oligonucleotide for detection of SNP TSC0010942
ttaaaaattagat

SEQ ID NO: 34262 - DNA, 13 bp, Artificial Sequence
  Oligonucleotide for detection of SNP TSC0010942
atctaatttttaa

SEQ ID NO: 34263 - DNA, 13 bp, Artificial Sequence
  Oligonucleotide for detection of SNP TSC0010942
ttaaaagttagat

SEQ ID NO: 34264 - DNA, 13 bp, Artificial Sequence
  Oligonucleotide for detection of SNP TSC0010942
atctaacttttaa

SEQ ID NO: 34265 - DNA, 13 bp, Artificial Sequence
  Oligonucleotide for detection of SNP TSC0010944
attttggttattg

SEQ ID NO: 34266 - DNA, 13 bp, Artificial Sequence
  Oligonucleotide for detection of SNP TSC0010944
caataaccaaaat

SEQ ID NO: 34267 - DNA, 13 bp, Artificial Sequence
  Oligonucleotide for detection of SNP TSC0010944
attttgtttattg

SEQ ID NO: 34268 - DNA, 13 bp, Artificial Sequence
  Oligonucleotide for detection of SNP TSC0010944
caataaacaaaat

SEQ ID NO: 34269 - DNA, 13 bp, Artificial Sequence
  Oligonucleotide for detection of SNP TSC0010944
tagtaattaaaat

SEQ ID NO: 34270 - DNA, 13 bp, Artificial Sequence
  Oligonucleotide for detection of SNP TSC0010944
attttaattacta

SEQ ID NO: 34271 - DNA, 13 bp, Artificial Sequence
  Oligonucleotide for detection of SNP TSC0010944
tagtaaataaaat

SEQ ID NO: 34272 - DNA, 13 bp, Artificial Sequence
  Oligonucleotide for detection of SNP TSC0010944
attttatttacta

SEQ ID NO: 34273 - DNA, 13 bp, Artificial Sequence
  Oligonucleotide for detection of SNP TSC0010945
atggtagtgattt

SEQ ID NO: 34274 - DNA, 13 bp, Artificial Sequence
  Oligonucleotide for detection of SNP TSC0010945
aaatcactaccat

SEQ ID NO: 34275 - DNA, 13 bp, Artificial Sequence
  Oligonucleotide for detection of SNP TSC0010945
atggtaatgattt

SEQ ID NO: 34276 - DNA, 13 bp, Artificial Sequence
  Oligonucleotide for detection of SNP TSC0010945
aaatcattaccat

SEQ ID NO: 34277 - DNA, 13 bp, Artificial Sequence
  Oligonucleotide for detection of SNP TSC0010947
atatttaattttt

SEQ ID NO: 34278 - DNA, 13 bp, Artificial Sequence
  Oligonucleotide for detection of SNP TSC0010947
aaaaattaaatat

SEQ ID NO: 34279 - DNA, 13 bp, Artificial Sequence
  Oligonucleotide for detection of SNP TSC0010947
atattttattttt

SEQ ID NO: 34280 - DNA, 13 bp, Artificial Sequence
  Oligonucleotide for detection of SNP TSC0010947
aaaaataaaatat

SEQ ID NO: 34281 - DNA, 13 bp, Artificial Sequence
  Oligonucleotide for detection of SNP TSC0010947
agaagttaagtat

SEQ ID NO: 34282 - DNA, 13 bp, Artificial Sequence
  Oligonucleotide for detection of SNP TSC0010947
atacttaacttct

SEQ ID NO: 34283 - DNA, 13 bp, Artificial Sequence
  Oligonucleotide for detection of SNP TSC0010947
agaagtgaagtat

SEQ ID NO: 34284 - DNA, 13 bp, Artificial Sequence
  Oligonucleotide for detection of SNP TSC0010947
atacttcacttct

SEQ ID NO: 34285 - DNA, 13 bp, Artificial Sequence
  Oligonucleotide for detection of SNP TSC0010948
tagaaggatggat

SEQ ID NO: 34286 - DNA, 13 bp, Artificial Sequence
  Oligonucleotide for detection of SNP TSC0010948
atccatccttcta

SEQ ID NO: 34287 - DNA, 13 bp, Artificial Sequence
  Oligonucleotide for detection of SNP TSC0010948
tagaagtatggat

SEQ ID NO: 34288 - DNA, 13 bp, Artificial Sequence
  Oligonucleotide for detection of SNP TSC0010948
atccatacttcta

SEQ ID NO: 34289 - DNA, 13 bp, Artificial Sequence
  Oligonucleotide for detection of SNP TSC0010948
atttatttttttg

SEQ ID NO: 34290 - DNA, 13 bp, Artificial Sequence
  Oligonucleotide for detection of SNP TSC0010948
caaaaaaataaat

SEQ ID NO: 34291 - DNA, 13 bp, Artificial Sequence
  Oligonucleotide for detection of SNP TSC0010949
ttggtgtgtaaga

SEQ ID NO: 34292 - DNA, 13 bp, Artificial Sequence
  Oligonucleotide for detection of SNP TSC0010949
tcttacacaccaa

SEQ ID NO: 34293 - DNA, 13 bp, Artificial Sequence
  Oligonucleotide for detection of SNP TSC0010949
ttggtgggtaaga

SEQ ID NO: 34294 - DNA, 13 bp, Artificial Sequence
  Oligonucleotide for detection of SNP TSC0010949
tcttacccaccaa

SEQ ID NO: 34295 - DNA, 13 bp, Artificial Sequence
  Oligonucleotide for detection of SNP TSC0010949
ttggtgcgtaaga

SEQ ID NO: 34296 - DNA, 13 bp, Artificial Sequence
  Oligonucleotide for detection of SNP TSC0010949
tcttacgcaccaa

SEQ ID NO: 34297 - DNA, 13 bp, Artificial Sequence
  Oligonucleotide for detection of SNP TSC0010949
ttttgtgtattag

SEQ ID NO: 34298 - DNA, 13 bp, Artificial Sequence
  Oligonucleotide for detection of SNP TSC0010949
ctaatacacaaaa

SEQ ID NO: 34299 - DNA, 13 bp, Artificial Sequence
  Oligonucleotide for detection of SNP TSC0010949
ttttgtttattag

SEQ ID NO: 34300 - DNA, 13 bp, Artificial Sequence
  Oligonucleotide for detection of SNP TSC0010949
ctaataaacaaaa

SEQ ID NO: 34301 - DNA, 13 bp, Artificial Sequence
  Oligonucleotide for detection of SNP TSC0010949
ttttgcgtattag

SEQ ID NO: 34302 - DNA, 13 bp, Artificial Sequence
  Oligonucleotide for detection of SNP TSC0010949
ctaatacgcaaaa

SEQ ID NO: 34303 - DNA, 13 bp, Artificial Sequence
  Oligonucleotide for detection of SNP TSC0010950
ttttttttgagty

SEQ ID NO: 34304 - DNA, 13 bp, Artificial Sequence
  Oligonucleotide for detection of SNP TSC0010950
ractcaaaaaaaa

SEQ ID NO: 34305 - DNA, 13 bp, Artificial Sequence
  Oligonucleotide for detection of SNP TSC0010950
ttttttgtgagty

SEQ ID NO: 34306 - DNA, 13 bp, Artificial Sequence
  Oligonucleotide for detection of SNP TSC0010950
ractcacaaaaaa

SEQ ID NO: 34307 - DNA, 13 bp, Artificial Sequence
  Oligonucleotide for detection of SNP TSC0010950
tttttcgtgagty

SEQ ID NO: 34308 - DNA, 13 bp, Artificial Sequence
  Oligonucleotide for detection of SNP TSC0010950
ractcacgaaaaa

SEQ ID NO: 34309 - DNA, 13 bp, Artificial Sequence
  Oligonucleotide for detection of SNP TSC0010950
ggtttaggagggg

SEQ ID NO: 34310 - DNA, 13 bp, Artificial Sequence
  Oligonucleotide for detection of SNP TSC0010950
cccctcctaaacc

SEQ ID NO: 34311 - DNA, 13 bp, Artificial Sequence
  Oligonucleotide for detection of SNP TSC0010950
ggtttatgagggg

SEQ ID NO: 34312 - DNA, 13 bp, Artificial Sequence
  Oligonucleotide for detection of SNP TSC0010950
cccctcataaacc

SEQ ID NO: 34313 - DNA, 13 bp, Artificial Sequence
  Oligonucleotide for detection of SNP TSC0010950
ggtttacgagggg

SEQ ID NO: 34314 - DNA, 13 bp, Artificial Sequence
  Oligonucleotide for detection of SNP TSC0010950
cccctcgtaaacc

SEQ ID NO: 34315 - DNA, 13 bp, Artificial Sequence
  Oligonucleotide for detection of SNP TSC0010951
gttgtagagatgy

SEQ ID NO: 34316 - DNA, 13 bp, Artificial Sequence
  Oligonucleotide for detection of SNP TSC0010951
rcatctctacaac

SEQ ID NO: 34317 - DNA, 13 bp, Artificial Sequence
  Oligonucleotide for detection of SNP TSC0010951
gttgtaaagatgy

SEQ ID NO: 34318 - DNA, 13 bp, Artificial Sequence
  Oligonucleotide for detection of SNP TSC0010951
rcatctttacaac

SEQ ID NO: 34319 - DNA, 13 bp, Artificial Sequence
  Oligonucleotide for detection of SNP TSC0010953
agtttgattttty

SEQ ID NO: 34320 - DNA, 13 bp, Artificial Sequence
  Oligonucleotide for detection of SNP TSC0010953
raaaaatcaaact

SEQ ID NO: 34321 - DNA, 13 bp, Artificial Sequence
  Oligonucleotide for detection of SNP TSC0010953
agtttgtttttty

SEQ ID NO: 34322 - DNA, 13 bp, Artificial Sequence
  Oligonucleotide for detection of SNP TSC0010953
raaaaaacaaact

SEQ ID NO: 34323 - DNA, 13 bp, Artificial Sequence
  Oligonucleotide for detection of SNP TSC0010953
ggagagttaggtt

SEQ ID NO: 34324 - DNA, 13 bp, Artificial Sequence
  Oligonucleotide for detection of SNP TSC0010953
aacctaactctcc

SEQ ID NO: 34325 - DNA, 13 bp, Artificial Sequence
  Oligonucleotide for detection of SNP TSC0010953
ggagaggtaggtt

SEQ ID NO: 34326 - DNA, 13 bp, Artificial Sequence
  Oligonucleotide for detection of SNP TSC0010953
aacctacctctcc

SEQ ID NO: 34327 - DNA, 13 bp, Artificial Sequence
  Oligonucleotide for detection of SNP TSC0010958
gttaaaagtggag

SEQ ID NO: 34328 - DNA, 13 bp, Artificial Sequence
  Oligonucleotide for detection of SNP TSC0010958
ctccacttttaac

SEQ ID NO: 34329 - DNA, 13 bp, Artificial Sequence
  Oligonucleotide for detection of SNP TSC0010958
gttaaaggtggag

SEQ ID NO: 34330 - DNA, 13 bp, Artificial Sequence
  Oligonucleotide for detection of SNP TSC0010958
ctccacctttaac

SEQ ID NO: 34331 - DNA, 13 bp, Artificial Sequence
  Oligonucleotide for detection of SNP TSC0010963
aggttgattttga

SEQ ID NO: 34332 - DNA, 13 bp, Artificial Sequence
  Oligonucleotide for detection of SNP TSC0010963
tcaaaatcaacct

SEQ ID NO: 34333 - DNA, 13 bp, Artificial Sequence
  Oligonucleotide for detection of SNP TSC0010963
aggttggttttga

SEQ ID NO: 34334 - DNA, 13 bp, Artificial Sequence
  Oligonucleotide for detection of SNP TSC0010963
tcaaaaccaacct

SEQ ID NO: 34335 - DNA, 13 bp, Artificial Sequence
  Oligonucleotide for detection of SNP TSC0010965
agaagagggtggg

SEQ ID NO: 34336 - DNA, 13 bp, Artificial Sequence
  Oligonucleotide for detection of SNP TSC0010965
cccaccctcttct

SEQ ID NO: 34337 - DNA, 13 bp, Artificial Sequence
  Oligonucleotide for detection of SNP TSC0010965
agaagaaggtggg

SEQ ID NO: 34338 - DNA, 13 bp, Artificial Sequence
  Oligonucleotide for detection of SNP TSC0010965
cccaccttcttct

SEQ ID NO: 34339 - DNA, 13 bp, Artificial Sequence
  Oligonucleotide for detection of SNP TSC0010966
gaattgggatttt

SEQ ID NO: 34340 - DNA, 13 bp, Artificial Sequence
  Oligonucleotide for detection of SNP TSC0010966
aaaatcccaattc

SEQ ID NO: 34341 - DNA, 13 bp, Artificial Sequence
  Oligonucleotide for detection of SNP TSC0010966
gaattgagatttt

SEQ ID NO: 34342 - DNA, 13 bp, Artificial Sequence
  Oligonucleotide for detection of SNP TSC0010966
aaaatctcaattc

SEQ ID NO: 34343 - DNA, 13 bp, Artificial Sequence
  Oligonucleotide for detection of SNP TSC0010967
attagggttggag

SEQ ID NO: 34344 - DNA, 13 bp, Artificial Sequence
  Oligonucleotide for detection of SNP TSC0010967
ctccaaccctaat

SEQ ID NO: 34345 - DNA, 13 bp, Artificial Sequence
  Oligonucleotide for detection of SNP TSC0010967
attaggattggag

SEQ ID NO: 34346 - DNA, 13 bp, Artificial Sequence
  Oligonucleotide for detection of SNP TSC0010967
ctccaatcctaat

SEQ ID NO: 34347 - DNA, 13 bp, Artificial Sequence
  Oligonucleotide for detection of SNP TSC0010968
ttatttgtttttg

SEQ ID NO: 34348 - DNA, 13 bp, Artificial Sequence
  Oligonucleotide for detection of SNP TSC0010968
caaaaacaaataa

SEQ ID NO: 34349 - DNA, 13 bp, Artificial Sequence
  Oligonucleotide for detection of SNP TSC0010968
ttattcgtttttg

SEQ ID NO: 34350 - DNA, 13 bp, Artificial Sequence
  Oligonucleotide for detection of SNP TSC0010968
caaaaacgaataa

SEQ ID NO: 34351 - DNA, 13 bp, Artificial Sequence
  Oligonucleotide for detection of SNP TSC0010968
tagaggtgagtgg

SEQ ID NO: 34352 - DNA, 13 bp, Artificial Sequence
  Oligonucleotide for detection of SNP TSC0010968
ccactcacctcta

SEQ ID NO: 34353 - DNA, 13 bp, Artificial Sequence
  Oligonucleotide for detection of SNP TSC0010968
tagaggcgagtgg

SEQ ID NO: 34354 - DNA, 13 bp, Artificial Sequence
  Oligonucleotide for detection of SNP TSC0010968
ccactcgcctcta

SEQ ID NO: 34355 - DNA, 13 bp, Artificial Sequence
  Oligonucleotide for detection of SNP TSC0010969
tttttttgtgtag

SEQ ID NO: 34356 - DNA, 13 bp, Artificial Sequence
  Oligonucleotide for detection of SNP TSC0010969
ctacacaaaaaaa

SEQ ID NO: 34357 - DNA, 13 bp, Artificial Sequence
  Oligonucleotide for detection of SNP TSC0010969
ttttttcgtgtag

SEQ ID NO: 34358 - DNA, 13 bp, Artificial Sequence
  Oligonucleotide for detection of SNP TSC0010969
ctacacgaaaaaa

SEQ ID NO: 34359 - DNA, 13 bp, Artificial Sequence
  Oligonucleotide for detection of SNP TSC0010969
ttatatgaaagga

SEQ ID NO: 34360 - DNA, 13 bp, Artificial Sequence
  Oligonucleotide for detection of SNP TSC0010969
tcctttcatataa

SEQ ID NO: 34361 - DNA, 13 bp, Artificial Sequence
  Oligonucleotide for detection of SNP TSC0010969
ttatataaaagga

SEQ ID NO: 34362 - DNA, 13 bp, Artificial Sequence
  Oligonucleotide for detection of SNP TSC0010969
tccttttatataa

SEQ ID NO: 34363 - DNA, 13 bp, Artificial Sequence
  Oligonucleotide for detection of SNP TSC0010969
ttatacgaaagga

SEQ ID NO: 34364 - DNA, 13 bp, Artificial Sequence
  Oligonucleotide for detection of SNP TSC0010969
tcctttcgtataa

SEQ ID NO: 34365 - DNA, 13 bp, Artificial Sequence
  Oligonucleotide for detection of SNP TSC0010970
ttttttgaaatta

SEQ ID NO: 34366 - DNA, 13 bp, Artificial Sequence
  Oligonucleotide for detection of SNP TSC0010970
taatttcaaaaaa

SEQ ID NO: 34367 - DNA, 13 bp, Artificial Sequence
  Oligonucleotide for detection of SNP TSC0010971
gtgttgatattgt

SEQ ID NO: 34368 - DNA, 13 bp, Artificial Sequence
  Oligonucleotide for detection of SNP TSC0010971
acaatatcaacac

SEQ ID NO: 34369 - DNA, 13 bp, Artificial Sequence
  Oligonucleotide for detection of SNP TSC0010971
gtgttggtattgt

SEQ ID NO: 34370 - DNA, 13 bp, Artificial Sequence
  Oligonucleotide for detection of SNP TSC0010971
acaataccaacac

SEQ ID NO: 34371 - DNA, 13 bp, Artificial Sequence
  Oligonucleotide for detection of SNP TSC0010972
tttttgtgtttaa

SEQ ID NO: 34372 - DNA, 13 bp, Artificial Sequence
  Oligonucleotide for detection of SNP TSC0010972
ttaaacacaaaaa

SEQ ID NO: 34373 - DNA, 13 bp, Artificial Sequence
  Oligonucleotide for detection of SNP TSC0010972
tttttgcgtttaa

SEQ ID NO: 34374 - DNA, 13 bp, Artificial Sequence
  Oligonucleotide for detection of SNP TSC0010972
ttaaacgcaaaaa

SEQ ID NO: 34375 - DNA, 13 bp, Artificial Sequence
  Oligonucleotide for detection of SNP TSC0010972
ttaaatgtaaaga

SEQ ID NO: 34376 - DNA, 13 bp, Artificial Sequence
  Oligonucleotide for detection of SNP TSC0010972
tctttacatttaa

SEQ ID NO: 34377 - DNA, 13 bp, Artificial Sequence
  Oligonucleotide for detection of SNP TSC0010972
ttaaatataaaga

SEQ ID NO: 34378 - DNA, 13 bp, Artificial Sequence
  Oligonucleotide for detection of SNP TSC0010972
tctttatatttaa

SEQ ID NO: 34379 - DNA, 13 bp, Artificial Sequence
  Oligonucleotide for detection of SNP TSC0010972
ttaaacgtaaaga

SEQ ID NO: 34380 - DNA, 13 bp, Artificial Sequence
  Oligonucleotide for detection of SNP TSC0010972
tctttacgtttaa

SEQ ID NO: 34381 - DNA, 13 bp, Artificial Sequence
  Oligonucleotide for detection of SNP TSC0010974
tgaggagaaaatt

SEQ ID NO: 34382 - DNA, 13 bp, Artificial Sequence
  Oligonucleotide for detection of SNP TSC0010974
aattttctcctca

SEQ ID NO: 34383 - DNA, 13 bp, Artificial Sequence
  Oligonucleotide for detection of SNP TSC0010974
tgaggaaaaaatt

SEQ ID NO: 34384 - DNA, 13 bp, Artificial Sequence
  Oligonucleotide for detection of SNP TSC0010974
aattttttcctca

SEQ ID NO: 34385 - DNA, 13 bp, Artificial Sequence
  Oligonucleotide for detection of SNP TSC0010975
taggtatggaaga

SEQ ID NO: 34386 - DNA, 13 bp, Artificial Sequence
  Oligonucleotide for detection of SNP TSC0010975
tcttccataccta

SEQ ID NO: 34387 - DNA, 13 bp, Artificial Sequence
  Oligonucleotide for detection of SNP TSC0010975
taggtacggaaga

SEQ ID NO: 34388 - DNA, 13 bp, Artificial Sequence
  Oligonucleotide for detection of SNP TSC0010975
tcttccgtaccta

SEQ ID NO: 34389 - DNA, 13 bp, Artificial Sequence
  Oligonucleotide for detection of SNP TSC0010975
tttttcgtgttta

SEQ ID NO: 34390 - DNA, 13 bp, Artificial Sequence
  Oligonucleotide for detection of SNP TSC0010975
taaacacgaaaaa

SEQ ID NO: 34391 - DNA, 13 bp, Artificial Sequence
  Oligonucleotide for detection of SNP TSC0010976
tatggtaaagtat

SEQ ID NO: 34392 - DNA, 13 bp, Artificial Sequence
  Oligonucleotide for detection of SNP TSC0010976
atactttaccata

SEQ ID NO: 34393 - DNA, 13 bp, Artificial Sequence
  Oligonucleotide for detection of SNP TSC0010976
tatggtgaagtat

SEQ ID NO: 34394 - DNA, 13 bp, Artificial Sequence
  Oligonucleotide for detection of SNP TSC0010976
atacttcaccata

SEQ ID NO: 34395 - DNA, 13 bp, Artificial Sequence
  Oligonucleotide for detection of SNP TSC0010977
gagataaatagag

SEQ ID NO: 34396 - DNA, 13 bp, Artificial Sequence
  Oligonucleotide for detection of SNP TSC0010977
ctctatttatctc

SEQ ID NO: 34397 - DNA, 13 bp, Artificial Sequence
  Oligonucleotide for detection of SNP TSC0010977
gagatagatagag

SEQ ID NO: 34398 - DNA, 13 bp, Artificial Sequence
  Oligonucleotide for detection of SNP TSC0010977
ctctatctatctc

SEQ ID NO: 34399 - DNA, 13 bp, Artificial Sequence
  Oligonucleotide for detection of SNP TSC0010978
taaaaagttatta

SEQ ID NO: 34400 - DNA, 13 bp, Artificial Sequence
  Oligonucleotide for detection of SNP TSC0010978
taataacttttta

SEQ ID NO: 34401 - DNA, 13 bp, Artificial Sequence
  Oligonucleotide for detection of SNP TSC0010979
gggatgagggtay

SEQ ID NO: 34402 - DNA, 13 bp, Artificial Sequence
  Oligonucleotide for detection of SNP TSC0010979
rtaccctcatccc

SEQ ID NO: 34403 - DNA, 13 bp, Artificial Sequence
  Oligonucleotide for detection of SNP TSC0010979
gggatgggggtay

SEQ ID NO: 34404 - DNA, 13 bp, Artificial Sequence
  Oligonucleotide for detection of SNP TSC0010979
rtacccccatccc

SEQ ID NO: 34405 - DNA, 13 bp, Artificial Sequence
  Oligonucleotide for detection of SNP TSC0010980
tgtttggattatt

SEQ ID NO: 34406 - DNA, 13 bp, Artificial Sequence
  Oligonucleotide for detection of SNP TSC0010980
aataatccaaaca

SEQ ID NO: 34407 - DNA, 13 bp, Artificial Sequence
  Oligonucleotide for detection of SNP TSC0010980
tgtttgtattatt

SEQ ID NO: 34408 - DNA, 13 bp, Artificial Sequence
  Oligonucleotide for detection of SNP TSC0010980
aataatacaaaca

SEQ ID NO: 34409 - DNA, 13 bp, Artificial Sequence
  Oligonucleotide for detection of SNP TSC0010980
aataatttaggta

SEQ ID NO: 34410 - DNA, 13 bp, Artificial Sequence
  Oligonucleotide for detection of SNP TSC0010980
tacctaaattatt

SEQ ID NO: 34411 - DNA, 13 bp, Artificial Sequence
  Oligonucleotide for detection of SNP TSC0010980
aataatataggta

SEQ ID NO: 34412 - DNA, 13 bp, Artificial Sequence
  Oligonucleotide for detection of SNP TSC0010980
tacctatattatt

SEQ ID NO: 34413 - DNA, 13 bp, Artificial Sequence
  Oligonucleotide for detection of SNP TSC0010981
tttttaggatgaa

SEQ ID NO: 34414 - DNA, 13 bp, Artificial Sequence
  Oligonucleotide for detection of SNP TSC0010981
ttcatcctaaaaa

SEQ ID NO: 34415 - DNA, 13 bp, Artificial Sequence
  Oligonucleotide for detection of SNP TSC0010981
tttttaagatgaa

SEQ ID NO: 34416 - DNA, 13 bp, Artificial Sequence
  Oligonucleotide for detection of SNP TSC0010981
ttcatcttaaaaa

SEQ ID NO: 34417 - DNA, 13 bp, Artificial Sequence
  Oligonucleotide for detection of SNP TSC0010982
tttagagaaattt

SEQ ID NO: 34418 - DNA, 13 bp, Artificial Sequence
  Oligonucleotide for detection of SNP TSC0010982
aaatttctctaaa

SEQ ID NO: 34419 - DNA, 13 bp, Artificial Sequence
  Oligonucleotide for detection of SNP TSC0010982
tttagaaaaattt

SEQ ID NO: 34420 - DNA, 13 bp, Artificial Sequence
  Oligonucleotide for detection of SNP TSC0010982
aaatttttctaaa

SEQ ID NO: 34421 - DNA, 13 bp, Artificial Sequence
  Oligonucleotide for detection of SNP TSC0010983
gtgggtgtttaty

SEQ ID NO: 34422 - DNA, 13 bp, Artificial Sequence
  Oligonucleotide for detection of SNP TSC0010983
rataaacacccac

SEQ ID NO: 34423 - DNA, 13 bp, Artificial Sequence
  Oligonucleotide for detection of SNP TSC0010983
gtgggtatttaty

SEQ ID NO: 34424 - DNA, 13 bp, Artificial Sequence
  Oligonucleotide for detection of SNP TSC0010983
rataaatacccac

SEQ ID NO: 34425 - DNA, 13 bp, Artificial Sequence
  Oligonucleotide for detection of SNP TSC0010984
atgaggatgggaa

SEQ ID NO: 34426 - DNA, 13 bp, Artificial Sequence
  Oligonucleotide for detection of SNP TSC0010984
ttcccatcctcat

SEQ ID NO: 34427 - DNA, 13 bp, Artificial Sequence
  Oligonucleotide for detection of SNP TSC0010984
atgaggttgggaa

SEQ ID NO: 34428 - DNA, 13 bp, Artificial Sequence
  Oligonucleotide for detection of SNP TSC0010984
ttcccaacctcat

SEQ ID NO: 34429 - DNA, 13 bp, Artificial Sequence
  Oligonucleotide for detection of SNP TSC0010985
atagttatgaagg

SEQ ID NO: 34430 - DNA, 13 bp, Artificial Sequence
  Oligonucleotide for detection of SNP TSC0010985
ccttcataactat

SEQ ID NO: 34431 - DNA, 13 bp, Artificial Sequence
  Oligonucleotide for detection of SNP TSC0010985
atagttttgaagg

SEQ ID NO: 34432 - DNA, 13 bp, Artificial Sequence
  Oligonucleotide for detection of SNP TSC0010985
ccttcaaaactat

SEQ ID NO: 34433 - DNA, 13 bp, Artificial Sequence
  Oligonucleotide for detection of SNP TSC0010985
tttttatgattat

SEQ ID NO: 34434 - DNA, 13 bp, Artificial Sequence
  Oligonucleotide for detection of SNP TSC0010985
ataatcataaaaa

SEQ ID NO: 34435 - DNA, 13 bp, Artificial Sequence
  Oligonucleotide for detection of SNP TSC0010985
tttttaggattat

SEQ ID NO: 34436 - DNA, 13 bp, Artificial Sequence
  Oligonucleotide for detection of SNP TSC0010985
ataatcctaaaaa

SEQ ID NO: 34437 - DNA, 13 bp, Artificial Sequence
  Oligonucleotide for detection of SNP TSC0010986
ttttaattttaag

SEQ ID NO: 34438 - DNA, 13 bp, Artificial Sequence
  Oligonucleotide for detection of SNP TSC0010986
cttaaaattaaaa

SEQ ID NO: 34439 - DNA, 13 bp, Artificial Sequence
  Oligonucleotide for detection of SNP TSC0010986
ttttaagtttaag

SEQ ID NO: 34440 - DNA, 13 bp, Artificial Sequence
  Oligonucleotide for detection of SNP TSC0010986
cttaaacttaaaa

SEQ ID NO: 34441 - DNA, 13 bp, Artificial Sequence
  Oligonucleotide for detection of SNP TSC0010986
tttagagttagaa

SEQ ID NO: 34442 - DNA, 13 bp, Artificial Sequence
  Oligonucleotide for detection of SNP TSC0010986
ttctaactctaaa

SEQ ID NO: 34443 - DNA, 13 bp, Artificial Sequence
  Oligonucleotide for detection of SNP TSC0010986
tttagatttagaa

SEQ ID NO: 34444 - DNA, 13 bp, Artificial Sequence
  Oligonucleotide for detection of SNP TSC0010986
ttctaaatctaaa

SEQ ID NO: 34445 - DNA, 13 bp, Artificial Sequence
  Oligonucleotide for detection of SNP TSC0010987
gtataggattatt

SEQ ID NO: 34446 - DNA, 13 bp, Artificial Sequence
  Oligonucleotide for detection of SNP TSC0010987
aataatcctatac

SEQ ID NO: 34447 - DNA, 13 bp, Artificial Sequence
  Oligonucleotide for detection of SNP TSC0010987
gtatagaattatt

SEQ ID NO: 34448 - DNA, 13 bp, Artificial Sequence
  Oligonucleotide for detection of SNP TSC0010987
aataattctatac

SEQ ID NO: 34449 - DNA, 13 bp, Artificial Sequence
  Oligonucleotide for detection of SNP TSC0010988
ttaaagtggttaa

SEQ ID NO: 34450 - DNA, 13 bp, Artificial Sequence
  Oligonucleotide for detection of SNP TSC0010988
ttaaccactttaa

SEQ ID NO: 34451 - DNA, 13 bp, Artificial Sequence
  Oligonucleotide for detection of SNP TSC0010988
ttaaagcggttaa

SEQ ID NO: 34452 - DNA, 13 bp, Artificial Sequence
  Oligonucleotide for detection of SNP TSC0010988
ttaaccgctttaa

SEQ ID NO: 34453 - DNA, 13 bp, Artificial Sequence
  Oligonucleotide for detection of SNP TSC0010988
ttagttgttttga

SEQ ID NO: 34454 - DNA, 13 bp, Artificial Sequence
  Oligonucleotide for detection of SNP TSC0010988
tcaaaacaactaa

SEQ ID NO: 34455 - DNA, 13 bp, Artificial Sequence
  Oligonucleotide for detection of SNP TSC0010988
ttagttattttga

SEQ ID NO: 34456 - DNA, 13 bp, Artificial Sequence
  Oligonucleotide for detection of SNP TSC0010988
tcaaaataactaa

SEQ ID NO: 34457 - DNA, 13 bp, Artificial Sequence
  Oligonucleotide for detection of SNP TSC0010988
ttagtcgttttga

SEQ ID NO: 34458 - DNA, 13 bp, Artificial Sequence
  Oligonucleotide for detection of SNP TSC0010988
tcaaaacgactaa

SEQ ID NO: 34459 - DNA, 13 bp, Artificial Sequence
  Oligonucleotide for detection of SNP TSC0010989
ttttaatgtagtt

SEQ ID NO: 34460 - DNA, 13 bp, Artificial Sequence
  Oligonucleotide for detection of SNP TSC0010989
aactacattaaaa

SEQ ID NO: 34461 - DNA, 13 bp, Artificial Sequence
  Oligonucleotide for detection of SNP TSC0010989
ttttaacgtagtt

SEQ ID NO: 34462 - DNA, 13 bp, Artificial Sequence
  Oligonucleotide for detection of SNP TSC0010989
aactacgttaaaa

SEQ ID NO: 34463 - DNA, 13 bp, Artificial Sequence
  Oligonucleotide for detection of SNP TSC0010989
agttatgttggag

SEQ ID NO: 34464 - DNA, 13 bp, Artificial Sequence
  Oligonucleotide for detection of SNP TSC0010989
ctccaacataact

SEQ ID NO: 34465 - DNA, 13 bp, Artificial Sequence
  Oligonucleotide for detection of SNP TSC0010989
agttatattggag

SEQ ID NO: 34466 - DNA, 13 bp, Artificial Sequence
  Oligonucleotide for detection of SNP TSC0010989
ctccaatataact

SEQ ID NO: 34467 - DNA, 13 bp, Artificial Sequence
  Oligonucleotide for detection of SNP TSC0010989
agttacgttggag

SEQ ID NO: 34468 - DNA, 13 bp, Artificial Sequence
  Oligonucleotide for detection of SNP TSC0010989
ctccaacgtaact

SEQ ID NO: 34469 - DNA, 13 bp, Artificial Sequence
  Oligonucleotide for detection of SNP TSC0010990
tagtttggaggtg

SEQ ID NO: 34470 - DNA, 13 bp, Artificial Sequence
  Oligonucleotide for detection of SNP TSC0010990
cacctccaaacta

SEQ ID NO: 34471 - DNA, 13 bp, Artificial Sequence
  Oligonucleotide for detection of SNP TSC0010990
tagtttagaggtg

SEQ ID NO: 34472 - DNA, 13 bp, Artificial Sequence
  Oligonucleotide for detection of SNP TSC0010990
cacctctaaacta

SEQ ID NO: 34473 - DNA, 13 bp, Artificial Sequence
  Oligonucleotide for detection of SNP TSC0010991
aaaagagaaagaa

SEQ ID NO: 34474 - DNA, 13 bp, Artificial Sequence
  Oligonucleotide for detection of SNP TSC0010991
ttctttctctttt

SEQ ID NO: 34475 - DNA, 13 bp, Artificial Sequence
  Oligonucleotide for detection of SNP TSC0010991
aaaagaaaaagaa

SEQ ID NO: 34476 - DNA, 13 bp, Artificial Sequence
  Oligonucleotide for detection of SNP TSC0010991
ttctttttctttt

SEQ ID NO: 34477 - DNA, 13 bp, Artificial Sequence
  Oligonucleotide for detection of SNP TSC0010992
tagttaaatatat

SEQ ID NO: 34478 - DNA, 13 bp, Artificial Sequence
  Oligonucleotide for detection of SNP TSC0010992
atatatttaacta

SEQ ID NO: 34479 - DNA, 13 bp, Artificial Sequence
  Oligonucleotide for detection of SNP TSC0010992
tagttatatatat

SEQ ID NO: 34480 - DNA, 13 bp, Artificial Sequence
  Oligonucleotide for detection of SNP TSC0010992
atatatataacta

SEQ ID NO: 34481 - DNA, 13 bp, Artificial Sequence
  Oligonucleotide for detection of SNP TSC0010992
atgtgtttggttg

SEQ ID NO: 34482 - DNA, 13 bp, Artificial Sequence
  Oligonucleotide for detection of SNP TSC0010992
caaccaaacacat

SEQ ID NO: 34483 - DNA, 13 bp, Artificial Sequence
  Oligonucleotide for detection of SNP TSC0010992
atgtgtatggttg

SEQ ID NO: 34484 - DNA, 13 bp, Artificial Sequence
  Oligonucleotide for detection of SNP TSC0010992
caaccatacacat

SEQ ID NO: 34485 - DNA, 13 bp, Artificial Sequence
  Oligonucleotide for detection of SNP TSC0010993
tttagagaaaaag

SEQ ID NO: 34486 - DNA, 13 bp, Artificial Sequence
  Oligonucleotide for detection of SNP TSC0010993
ctttttctctaaa

SEQ ID NO: 34487 - DNA, 13 bp, Artificial Sequence
  Oligonucleotide for detection of SNP TSC0010993
tttagaaaaaaag

SEQ ID NO: 34488 - DNA, 13 bp, Artificial Sequence
  Oligonucleotide for detection of SNP TSC0010993
ctttttttctaaa

SEQ ID NO: 34489 - DNA, 13 bp, Artificial Sequence
  Oligonucleotide for detection of SNP TSC0011000
gtttaaattattt

SEQ ID NO: 34490 - DNA, 13 bp, Artificial Sequence
  Oligonucleotide for detection of SNP TSC0011000
aaataatttaaac

SEQ ID NO: 34491 - DNA, 13 bp, Artificial Sequence
  Oligonucleotide for detection of SNP TSC0011000
gtttaagttattt

SEQ ID NO: 34492 - DNA, 13 bp, Artificial Sequence
  Oligonucleotide for detection of SNP TSC0011000
aaataacttaaac

SEQ ID NO: 34493 - DNA, 13 bp, Artificial Sequence
  Oligonucleotide for detection of SNP TSC0011001
tggtttgatttgg

SEQ ID NO: 34494 - DNA, 13 bp, Artificial Sequence
  Oligonucleotide for detection of SNP TSC0011001
ccaaatcaaacca

SEQ ID NO: 34495 - DNA, 13 bp, Artificial Sequence
  Oligonucleotide for detection of SNP TSC0011001
tggttttatttgg

SEQ ID NO: 34496 - DNA, 13 bp, Artificial Sequence
  Oligonucleotide for detection of SNP TSC0011001
ccaaataaaacca

SEQ ID NO: 34497 - DNA, 13 bp, Artificial Sequence
  Oligonucleotide for detection of SNP TSC0011001
ttagattaggtta

SEQ ID NO: 34498 - DNA, 13 bp, Artificial Sequence
  Oligonucleotide for detection of SNP TSC0011001
taacctaatctaa

SEQ ID NO: 34499 - DNA, 13 bp, Artificial Sequence
  Oligonucleotide for detection of SNP TSC0011001
ttagataaggtta

SEQ ID NO: 34500 - DNA, 13 bp, Artificial Sequence
  Oligonucleotide for detection of SNP TSC0011001
taaccttatctaa

SEQ ID NO: 34501 - DNA, 13 bp, Artificial Sequence
  Oligonucleotide for detection of SNP TSC0011002
tatataaaaggaa

SEQ ID NO: 34502 - DNA, 13 bp, Artificial Sequence
  Oligonucleotide for detection of SNP TSC0011002
ttccttttatata

SEQ ID NO: 34503 - DNA, 13 bp, Artificial Sequence
  Oligonucleotide for detection of SNP TSC0011002
tatatagaaggaa

SEQ ID NO: 34504 - DNA, 13 bp, Artificial Sequence
  Oligonucleotide for detection of SNP TSC0011002
ttccttctatata

SEQ ID NO: 34505 - DNA, 13 bp, Artificial Sequence
  Oligonucleotide for detection of SNP TSC0011003
ggttagtggggtt

SEQ ID NO: 34506 - DNA, 13 bp, Artificial Sequence
  Oligonucleotide for detection of SNP TSC0011003
aaccccactaacc

SEQ ID NO: 34507 - DNA, 13 bp, Artificial Sequence
  Oligonucleotide for detection of SNP TSC0011003
ggttagcggggtt

SEQ ID NO: 34508 - DNA, 13 bp, Artificial Sequence
  Oligonucleotide for detection of SNP TSC0011003
aaccccgctaacc

SEQ ID NO: 34509 - DNA, 13 bp, Artificial Sequence
  Oligonucleotide for detection of SNP TSC0011003
agtttcgttgaty

SEQ ID NO: 34510 - DNA, 13 bp, Artificial Sequence
  Oligonucleotide for detection of SNP TSC0011003
ratcaacgaaact

SEQ ID NO: 34511 - DNA, 13 bp, Artificial Sequence
  Oligonucleotide for detection of SNP TSC0011004
gaggatagtttga

SEQ ID NO: 34512 - DNA, 13 bp, Artificial Sequence
  Oligonucleotide for detection of SNP TSC0011004
tcaaactatcctc

SEQ ID NO: 34513 - DNA, 13 bp, Artificial Sequence
  Oligonucleotide for detection of SNP TSC0011004
gaggattgtttga

SEQ ID NO: 34514 - DNA, 13 bp, Artificial Sequence
  Oligonucleotide for detection of SNP TSC0011004
tcaaacaatcctc

SEQ ID NO: 34515 - DNA, 13 bp, Artificial Sequence
  Oligonucleotide for detection of SNP TSC0011004
gaggatcgtttga

SEQ ID NO: 34516 - DNA, 13 bp, Artificial Sequence
  Oligonucleotide for detection of SNP TSC0011004
tcaaacgatcctc

SEQ ID NO: 34517 - DNA, 13 bp, Artificial Sequence
  Oligonucleotide for detection of SNP TSC0011004
ttaagttatttty

SEQ ID NO: 34518 - DNA, 13 bp, Artificial Sequence
  Oligonucleotide for detection of SNP TSC0011004
raaaataacttaa

SEQ ID NO: 34519 - DNA, 13 bp, Artificial Sequence
  Oligonucleotide for detection of SNP TSC0011006
tattttattagty

SEQ ID NO: 34520 - DNA, 13 bp, Artificial Sequence
  Oligonucleotide for detection of SNP TSC0011006
ractaataaaata

SEQ ID NO: 34521 - DNA, 13 bp, Artificial Sequence
  Oligonucleotide for detection of SNP TSC0011006
tatttttttagty

SEQ ID NO: 34522 - DNA, 13 bp, Artificial Sequence
  Oligonucleotide for detection of SNP TSC0011006
ractaaaaaaata

SEQ ID NO: 34523 - DNA, 13 bp, Artificial Sequence
  Oligonucleotide for detection of SNP TSC0011006
ggttgataaagta

SEQ ID NO: 34524 - DNA, 13 bp, Artificial Sequence
  Oligonucleotide for detection of SNP TSC0011006
tactttatcaacc

SEQ ID NO: 34525 - DNA, 13 bp, Artificial Sequence
  Oligonucleotide for detection of SNP TSC0011006
ggttgaaaaagta

SEQ ID NO: 34526 - DNA, 13 bp, Artificial Sequence
  Oligonucleotide for detection of SNP TSC0011006
tactttttcaacc

SEQ ID NO: 34527 - DNA, 13 bp, Artificial Sequence
  Oligonucleotide for detection of SNP TSC0011007
tttgaaaaaaaty

SEQ ID NO: 34528 - DNA, 13 bp, Artificial Sequence
  Oligonucleotide for detection of SNP TSC0011007
ratttttttcaaa

SEQ ID NO: 34529 - DNA, 13 bp, Artificial Sequence
  Oligonucleotide for detection of SNP TSC0011007
tttgaataaaaty

SEQ ID NO: 34530 - DNA, 13 bp, Artificial Sequence
  Oligonucleotide for detection of SNP TSC0011007
rattttattcaaa

SEQ ID NO: 34531 - DNA, 13 bp, Artificial Sequence
  Oligonucleotide for detection of SNP TSC0011007
gattttttttaga

SEQ ID NO: 34532 - DNA, 13 bp, Artificial Sequence
  Oligonucleotide for detection of SNP TSC0011007
tctaaaaaaaatc

SEQ ID NO: 34533 - DNA, 13 bp, Artificial Sequence
  Oligonucleotide for detection of SNP TSC0011007
gattttgtttaga

SEQ ID NO: 34534 - DNA, 13 bp, Artificial Sequence
  Oligonucleotide for detection of SNP TSC0011007
tctaaacaaaatc

SEQ ID NO: 34535 - DNA, 13 bp, Artificial Sequence
  Oligonucleotide for detection of SNP TSC0011008
ttttaaatttaaa

SEQ ID NO: 34536 - DNA, 13 bp, Artificial Sequence
  Oligonucleotide for detection of SNP TSC0011008
tttaaatttaaaa

SEQ ID NO: 34537 - DNA, 13 bp, Artificial Sequence
  Oligonucleotide for detection of SNP TSC0011008
ttttaattttaaa

SEQ ID NO: 34538 - DNA, 13 bp, Artificial Sequence
  Oligonucleotide for detection of SNP TSC0011008
tttaaaattaaaa

SEQ ID NO: 34539 - DNA, 13 bp, Artificial Sequence
  Oligonucleotide for detection of SNP TSC0011008
tttaaatttgaag

SEQ ID NO: 34540 - DNA, 13 bp, Artificial Sequence
  Oligonucleotide for detection of SNP TSC0011008
cttcaaatttaaa

SEQ ID NO: 34541 - DNA, 13 bp, Artificial Sequence
  Oligonucleotide for detection of SNP TSC0011008
tttaaagttgaag

SEQ ID NO: 34542 - DNA, 13 bp, Artificial Sequence
  Oligonucleotide for detection of SNP TSC0011008
cttcaactttaaa

SEQ ID NO: 34543 - DNA, 13 bp, Artificial Sequence
  Oligonucleotide for detection of SNP TSC0011009
aatgtaaattgta

SEQ ID NO: 34544 - DNA, 13 bp, Artificial Sequence
  Oligonucleotide for detection of SNP TSC0011009
tacaatttacatt

SEQ ID NO: 34545 - DNA, 13 bp, Artificial Sequence
  Oligonucleotide for detection of SNP TSC0011009
aatgtagattgta

SEQ ID NO: 34546 - DNA, 13 bp, Artificial Sequence
  Oligonucleotide for detection of SNP TSC0011009
tacaatctacatt

SEQ ID NO: 34547 - DNA, 13 bp, Artificial Sequence
  Oligonucleotide for detection of SNP TSC0011010
ttagttagtttta

SEQ ID NO: 34548 - DNA, 13 bp, Artificial Sequence
  Oligonucleotide for detection of SNP TSC0011010
taaaactaactaa

SEQ ID NO: 34549 - DNA, 13 bp, Artificial Sequence
  Oligonucleotide for detection of SNP TSC0011010
ttagttggtttta

SEQ ID NO: 34550 - DNA, 13 bp, Artificial Sequence
  Oligonucleotide for detection of SNP TSC0011010
taaaaccaactaa

SEQ ID NO: 34551 - DNA, 13 bp, Artificial Sequence
  Oligonucleotide for detection of SNP TSC0011012
tttgttattattt

SEQ ID NO: 34552 - DNA, 13 bp, Artificial Sequence
  Oligonucleotide for detection of SNP TSC0011012
aaataataacaaa

SEQ ID NO: 34553 - DNA, 13 bp, Artificial Sequence
  Oligonucleotide for detection of SNP TSC0011012
tttgtcgttattt

SEQ ID NO: 34554 - DNA, 13 bp, Artificial Sequence
  Oligonucleotide for detection of SNP TSC0011012
aaataacgacaaa

SEQ ID NO: 34555 - DNA, 13 bp, Artificial Sequence
  Oligonucleotide for detection of SNP TSC0011012
aagtaatgataaa

SEQ ID NO: 34556 - DNA, 13 bp, Artificial Sequence
  Oligonucleotide for detection of SNP TSC0011012
tttatcattactt

SEQ ID NO: 34557 - DNA, 13 bp, Artificial Sequence
  Oligonucleotide for detection of SNP TSC0011012
aagtaacgataaa

SEQ ID NO: 34558 - DNA, 13 bp, Artificial Sequence
  Oligonucleotide for detection of SNP TSC0011012
tttatcgttactt

SEQ ID NO: 34559 - DNA, 13 bp, Artificial Sequence
  Oligonucleotide for detection of SNP TSC0011015
attttgtttttay

SEQ ID NO: 34560 - DNA, 13 bp, Artificial Sequence
  Oligonucleotide for detection of SNP TSC0011015
rtaaaaacaaaat

SEQ ID NO: 34561 - DNA, 13 bp, Artificial Sequence
  Oligonucleotide for detection of SNP TSC0011015
atttcgattttay

SEQ ID NO: 34562 - DNA, 13 bp, Artificial Sequence
  Oligonucleotide for detection of SNP TSC0011015
rtaaaatcgaaat

SEQ ID NO: 34563 - DNA, 13 bp, Artificial Sequence
  Oligonucleotide for detection of SNP TSC0011015
atttcgtttttay

SEQ ID NO: 34564 - DNA, 13 bp, Artificial Sequence
  Oligonucleotide for detection of SNP TSC0011015
rtaaaaacgaaat

SEQ ID NO: 34565 - DNA, 13 bp, Artificial Sequence
  Oligonucleotide for detection of SNP TSC0011015
gtagaattggggt

SEQ ID NO: 34566 - DNA, 13 bp, Artificial Sequence
  Oligonucleotide for detection of SNP TSC0011015
accccaattctac

SEQ ID NO: 34567 - DNA, 13 bp, Artificial Sequence
  Oligonucleotide for detection of SNP TSC0011015
gtagaaatggggt

SEQ ID NO: 34568 - DNA, 13 bp, Artificial Sequence
  Oligonucleotide for detection of SNP TSC0011015
accccatttctac

SEQ ID NO: 34569 - DNA, 13 bp, Artificial Sequence
  Oligonucleotide for detection of SNP TSC0011015
gtagaatcggggt

SEQ ID NO: 34570 - DNA, 13 bp, Artificial Sequence
  Oligonucleotide for detection of SNP TSC0011015
accccgattctac

SEQ ID NO: 34571 - DNA, 13 bp, Artificial Sequence
  Oligonucleotide for detection of SNP TSC0011015
gtagaaacggggt

SEQ ID NO: 34572 - DNA, 13 bp, Artificial Sequence
  Oligonucleotide for detection of SNP TSC0011015
accccgtttctac

SEQ ID NO: 34573 - DNA, 13 bp, Artificial Sequence
  Oligonucleotide for detection of SNP TSC0011017
agtttggttttag

SEQ ID NO: 34574 - DNA, 13 bp, Artificial Sequence
  Oligonucleotide for detection of SNP TSC0011017
ctaaaaccaaact

SEQ ID NO: 34575 - DNA, 13 bp, Artificial Sequence
  Oligonucleotide for detection of SNP TSC0011017
agtttgtttttag

SEQ ID NO: 34576 - DNA, 13 bp, Artificial Sequence
  Oligonucleotide for detection of SNP TSC0011017
ctaaaaacaaact

SEQ ID NO: 34577 - DNA, 13 bp, Artificial Sequence
  Oligonucleotide for detection of SNP TSC0011017
ttagagttaggtt

SEQ ID NO: 34578 - DNA, 13 bp, Artificial Sequence
  Oligonucleotide for detection of SNP TSC0011017
aacctaactctaa

SEQ ID NO: 34579 - DNA, 13 bp, Artificial Sequence
  Oligonucleotide for detection of SNP TSC0011017
ttagagataggtt

SEQ ID NO: 34580 - DNA, 13 bp, Artificial Sequence
  Oligonucleotide for detection of SNP TSC0011017
aacctatctctaa

SEQ ID NO: 34581 - DNA, 13 bp, Artificial Sequence
  Oligonucleotide for detection of SNP TSC0011018
tgtaatatattgt

SEQ ID NO: 34582 - DNA, 13 bp, Artificial Sequence
  Oligonucleotide for detection of SNP TSC0011018
acaatatattaca

SEQ ID NO: 34583 - DNA, 13 bp, Artificial Sequence
  Oligonucleotide for detection of SNP TSC0011018
tgtaatgtattgt

SEQ ID NO: 34584 - DNA, 13 bp, Artificial Sequence
  Oligonucleotide for detection of SNP TSC0011018
acaatacattaca

SEQ ID NO: 34585 - DNA, 13 bp, Artificial Sequence
  Oligonucleotide for detection of SNP TSC0011019
ttgggtagtgttg

SEQ ID NO: 34586 - DNA, 13 bp, Artificial Sequence
  Oligonucleotide for detection of SNP TSC0011019
caacactacccaa

SEQ ID NO: 34587 - DNA, 13 bp, Artificial Sequence
  Oligonucleotide for detection of SNP TSC0011019
ttgggtggtgttg

SEQ ID NO: 34588 - DNA, 13 bp, Artificial Sequence
  Oligonucleotide for detection of SNP TSC0011019
caacaccacccaa

SEQ ID NO: 34589 - DNA, 13 bp, Artificial Sequence
  Oligonucleotide for detection of SNP TSC0011019
ttgggcggtgttg

SEQ ID NO: 34590 - DNA, 13 bp, Artificial Sequence
  Oligonucleotide for detection of SNP TSC0011019
caacaccgcccaa

SEQ ID NO: 34591 - DNA, 13 bp, Artificial Sequence
  Oligonucleotide for detection of SNP TSC0011019
taatattgtttag

SEQ ID NO: 34592 - DNA, 13 bp, Artificial Sequence
  Oligonucleotide for detection of SNP TSC0011019
ctaaacaatatta

SEQ ID NO: 34593 - DNA, 13 bp, Artificial Sequence
  Oligonucleotide for detection of SNP TSC0011019
taatatcgtttag

SEQ ID NO: 34594 - DNA, 13 bp, Artificial Sequence
  Oligonucleotide for detection of SNP TSC0011019
ctaaacgatatta

SEQ ID NO: 34595 - DNA, 13 bp, Artificial Sequence
  Oligonucleotide for detection of SNP TSC0011022
aggtttgggtaty

SEQ ID NO: 34596 - DNA, 13 bp, Artificial Sequence
  Oligonucleotide for detection of SNP TSC0011022
ratacccaaacct

SEQ ID NO: 34597 - DNA, 13 bp, Artificial Sequence
  Oligonucleotide for detection of SNP TSC0011022
aggtttaggtaty

SEQ ID NO: 34598 - DNA, 13 bp, Artificial Sequence
  Oligonucleotide for detection of SNP TSC0011022
ratacctaaacct

SEQ ID NO: 34599 - DNA, 13 bp, Artificial Sequence
  Oligonucleotide for detection of SNP TSC0011023
aaatgggaaagag

SEQ ID NO: 34600 - DNA, 13 bp, Artificial Sequence
  Oligonucleotide for detection of SNP TSC0011023
ctctttcccattt

SEQ ID NO: 34601 - DNA, 13 bp, Artificial Sequence
  Oligonucleotide for detection of SNP TSC0011023
aaatggaaaagag

SEQ ID NO: 34602 - DNA, 13 bp, Artificial Sequence
  Oligonucleotide for detection of SNP TSC0011023
ctcttttccattt

SEQ ID NO: 34603 - DNA, 13 bp, Artificial Sequence
  Oligonucleotide for detection of SNP TSC0011027
ggaaaagtttgty

SEQ ID NO: 34604 - DNA, 13 bp, Artificial Sequence
  Oligonucleotide for detection of SNP TSC0011027
racaaacttttcc

SEQ ID NO: 34605 - DNA, 13 bp, Artificial Sequence
  Oligonucleotide for detection of SNP TSC0011027
ggaaaaatttgty

SEQ ID NO: 34606 - DNA, 13 bp, Artificial Sequence
  Oligonucleotide for detection of SNP TSC0011027
racaaatttttcc

SEQ ID NO: 34607 - DNA, 13 bp, Artificial Sequence
  Oligonucleotide for detection of SNP TSC0011028
gggaaaaggaagt

SEQ ID NO: 34608 - DNA, 13 bp, Artificial Sequence
  Oligonucleotide for detection of SNP TSC0011028
acttccttttccc

SEQ ID NO: 34609 - DNA, 13 bp, Artificial Sequence
  Oligonucleotide for detection of SNP TSC0011028
gggaaagggaagt

SEQ ID NO: 34610 - DNA, 13 bp, Artificial Sequence
  Oligonucleotide for detection of SNP TSC0011028
acttccctttccc

SEQ ID NO: 34611 - DNA, 13 bp, Artificial Sequence
  Oligonucleotide for detection of SNP TSC0011029
gtatatatttgaa

SEQ ID NO: 34612 - DNA, 13 bp, Artificial Sequence
  Oligonucleotide for detection of SNP TSC0011029
ttcaaatatatac

SEQ ID NO: 34613 - DNA, 13 bp, Artificial Sequence
  Oligonucleotide for detection of SNP TSC0011029
gtatatgtttgaa

SEQ ID NO: 34614 - DNA, 13 bp, Artificial Sequence
  Oligonucleotide for detection of SNP TSC0011029
ttcaaacatatac

SEQ ID NO: 34615 - DNA, 13 bp, Artificial Sequence
  Oligonucleotide for detection of SNP TSC0011029
gtatacgtttgaa

SEQ ID NO: 34616 - DNA, 13 bp, Artificial Sequence
  Oligonucleotide for detection of SNP TSC0011029
ttcaaacgtatac

SEQ ID NO: 34617 - DNA, 13 bp, Artificial Sequence
  Oligonucleotide for detection of SNP TSC0011029
tttaagtgtgtay

SEQ ID NO: 34618 - DNA, 13 bp, Artificial Sequence
  Oligonucleotide for detection of SNP TSC0011029
rtacacacttaaa

SEQ ID NO: 34619 - DNA, 13 bp, Artificial Sequence
  Oligonucleotide for detection of SNP TSC0011029
tttaagcgtgtay

SEQ ID NO: 34620 - DNA, 13 bp, Artificial Sequence
  Oligonucleotide for detection of SNP TSC0011029
rtacacgcttaaa

SEQ ID NO: 34621 - DNA, 13 bp, Artificial Sequence
  Oligonucleotide for detection of SNP TSC0011030
tggatgatatagg

SEQ ID NO: 34622 - DNA, 13 bp, Artificial Sequence
  Oligonucleotide for detection of SNP TSC0011030
cctatatcatcca

SEQ ID NO: 34623 - DNA, 13 bp, Artificial Sequence
  Oligonucleotide for detection of SNP TSC0011030
tggatggtatagg

SEQ ID NO: 34624 - DNA, 13 bp, Artificial Sequence
  Oligonucleotide for detection of SNP TSC0011030
cctataccatcca

SEQ ID NO: 34625 - DNA, 13 bp, Artificial Sequence
  Oligonucleotide for detection of SNP TSC0011031
ttaagatgaagga

SEQ ID NO: 34626 - DNA, 13 bp, Artificial Sequence
  Oligonucleotide for detection of SNP TSC0011031
tccttcatcttaa

SEQ ID NO: 34627 - DNA, 13 bp, Artificial Sequence
  Oligonucleotide for detection of SNP TSC0011031
ttaagacgaagga

SEQ ID NO: 34628 - DNA, 13 bp, Artificial Sequence
  Oligonucleotide for detection of SNP TSC0011031
tccttcgtcttaa

SEQ ID NO: 34629 - DNA, 13 bp, Artificial Sequence
  Oligonucleotide for detection of SNP TSC0011032
gaatttgattaty

SEQ ID NO: 34630 - DNA, 13 bp, Artificial Sequence
  Oligonucleotide for detection of SNP TSC0011032
rataatcaaattc

SEQ ID NO: 34631 - DNA, 13 bp, Artificial Sequence
  Oligonucleotide for detection of SNP TSC0011032
gaatttaattaty

SEQ ID NO: 34632 - DNA, 13 bp, Artificial Sequence
  Oligonucleotide for detection of SNP TSC0011032
rataattaaattc

SEQ ID NO: 34633 - DNA, 13 bp, Artificial Sequence
  Oligonucleotide for detection of SNP TSC0011033
aaaagttattaaa

SEQ ID NO: 34634 - DNA, 13 bp, Artificial Sequence
  Oligonucleotide for detection of SNP TSC0011033
tttaataactttt

SEQ ID NO: 34635 - DNA, 13 bp, Artificial Sequence
  Oligonucleotide for detection of SNP TSC0011033
aaaagtgattaaa

SEQ ID NO: 34636 - DNA, 13 bp, Artificial Sequence
  Oligonucleotide for detection of SNP TSC0011033
tttaatcactttt

SEQ ID NO: 34637 - DNA, 13 bp, Artificial Sequence
  Oligonucleotide for detection of SNP TSC0011033
aaaagcgattaaa

SEQ ID NO: 34638 - DNA, 13 bp, Artificial Sequence
  Oligonucleotide for detection of SNP TSC0011033
tttaatcgctttt

SEQ ID NO: 34639 - DNA, 13 bp, Artificial Sequence
  Oligonucleotide for detection of SNP TSC0011033
tttagtggttttt

SEQ ID NO: 34640 - DNA, 13 bp, Artificial Sequence
  Oligonucleotide for detection of SNP TSC0011033
aaaaaccactaaa

SEQ ID NO: 34641 - DNA, 13 bp, Artificial Sequence
  Oligonucleotide for detection of SNP TSC0011033
tttagttgttttt

SEQ ID NO: 34642 - DNA, 13 bp, Artificial Sequence
  Oligonucleotide for detection of SNP TSC0011033
aaaaacaactaaa

SEQ ID NO: 34643 - DNA, 13 bp, Artificial Sequence
  Oligonucleotide for detection of SNP TSC0011033
tttagtcgttttt

SEQ ID NO: 34644 - DNA, 13 bp, Artificial Sequence
  Oligonucleotide for detection of SNP TSC0011033
aaaaacgactaaa

SEQ ID NO: 34645 - DNA, 13 bp, Artificial Sequence
  Oligonucleotide for detection of SNP TSC0011034
tatagtattatga

SEQ ID NO: 34646 - DNA, 13 bp, Artificial Sequence
  Oligonucleotide for detection of SNP TSC0011034
tcataatactata

SEQ ID NO: 34647 - DNA, 13 bp, Artificial Sequence
  Oligonucleotide for detection of SNP TSC0011034
tatagttttatga

SEQ ID NO: 34648 - DNA, 13 bp, Artificial Sequence
  Oligonucleotide for detection of SNP TSC0011034
tcataaaactata

SEQ ID NO: 34649 - DNA, 13 bp, Artificial Sequence
  Oligonucleotide for detection of SNP TSC0011034
ttataatgttatg

SEQ ID NO: 34650 - DNA, 13 bp, Artificial Sequence
  Oligonucleotide for detection of SNP TSC0011034
cataacattataa

SEQ ID NO: 34651 - DNA, 13 bp, Artificial Sequence
  Oligonucleotide for detection of SNP TSC0011034
ttataaggttatg

SEQ ID NO: 34652 - DNA, 13 bp, Artificial Sequence
  Oligonucleotide for detection of SNP TSC0011034
cataaccttataa

SEQ ID NO: 34653 - DNA, 13 bp, Artificial Sequence
  Oligonucleotide for detection of SNP TSC0011037
ggttgatgttgat

SEQ ID NO: 34654 - DNA, 13 bp, Artificial Sequence
  Oligonucleotide for detection of SNP TSC0011037
atcaacatcaacc

SEQ ID NO: 34655 - DNA, 13 bp, Artificial Sequence
  Oligonucleotide for detection of SNP TSC0011037
ggttgacgttgat

SEQ ID NO: 34656 - DNA, 13 bp, Artificial Sequence
  Oligonucleotide for detection of SNP TSC0011037
atcaacgtcaacc

SEQ ID NO: 34657 - DNA, 13 bp, Artificial Sequence
  Oligonucleotide for detection of SNP TSC0011037
attaatgttaaty

SEQ ID NO: 34658 - DNA, 13 bp, Artificial Sequence
  Oligonucleotide for detection of SNP TSC0011037
rattaacattaat

SEQ ID NO: 34659 - DNA, 13 bp, Artificial Sequence
  Oligonucleotide for detection of SNP TSC0011037
attaatattaaty

SEQ ID NO: 34660 - DNA, 13 bp, Artificial Sequence
  Oligonucleotide for detection of SNP TSC0011037
rattaatattaat

SEQ ID NO: 34661 - DNA, 13 bp, Artificial Sequence
  Oligonucleotide for detection of SNP TSC0011037
attaacgttaaty

SEQ ID NO: 34662 - DNA, 13 bp, Artificial Sequence
  Oligonucleotide for detection of SNP TSC0011037
rattaacgttaat

SEQ ID NO: 34663 - DNA, 13 bp, Artificial Sequence
  Oligonucleotide for detection of SNP TSC0011038
attgttatttttg

SEQ ID NO: 34664 - DNA, 13 bp, Artificial Sequence
  Oligonucleotide for detection of SNP TSC0011038
caaaaataacaat

SEQ ID NO: 34665 - DNA, 13 bp, Artificial Sequence
  Oligonucleotide for detection of SNP TSC0011038
attgttgtttttg

SEQ ID NO: 34666 - DNA, 13 bp, Artificial Sequence
  Oligonucleotide for detection of SNP TSC0011038
caaaaacaacaat

SEQ ID NO: 34667 - DNA, 13 bp, Artificial Sequence
  Oligonucleotide for detection of SNP TSC0011038
attgtcgtttttg

SEQ ID NO: 34668 - DNA, 13 bp, Artificial Sequence
  Oligonucleotide for detection of SNP TSC0011038
caaaaacgacaat

SEQ ID NO: 34669 - DNA, 13 bp, Artificial Sequence
  Oligonucleotide for detection of SNP TSC0011038
taggaatgatagt

SEQ ID NO: 34670 - DNA, 13 bp, Artificial Sequence
  Oligonucleotide for detection of SNP TSC0011038
actatcattccta

SEQ ID NO: 34671 - DNA, 13 bp, Artificial Sequence
  Oligonucleotide for detection of SNP TSC0011038
taggaacgatagt

SEQ ID NO: 34672 - DNA, 13 bp, Artificial Sequence
  Oligonucleotide for detection of SNP TSC0011038
actatcgttccta

SEQ ID NO: 34673 - DNA, 13 bp, Artificial Sequence
  Oligonucleotide for detection of SNP TSC0011039
aggtgatagattt

SEQ ID NO: 34674 - DNA, 13 bp, Artificial Sequence
  Oligonucleotide for detection of SNP TSC0011039
aaatctatcacct

SEQ ID NO: 34675 - DNA, 13 bp, Artificial Sequence
  Oligonucleotide for detection of SNP TSC0011039
aggtgagagattt

SEQ ID NO: 34676 - DNA, 13 bp, Artificial Sequence
  Oligonucleotide for detection of SNP TSC0011039
aaatctctcacct

SEQ ID NO: 34677 - DNA, 13 bp, Artificial Sequence
  Oligonucleotide for detection of SNP TSC0011039
aggcgatagattt

SEQ ID NO: 34678 - DNA, 13 bp, Artificial Sequence
  Oligonucleotide for detection of SNP TSC0011039
aaatctatcgcct

SEQ ID NO: 34679 - DNA, 13 bp, Artificial Sequence
  Oligonucleotide for detection of SNP TSC0011039
aggcgagagattt

SEQ ID NO: 34680 - DNA, 13 bp, Artificial Sequence
  Oligonucleotide for detection of SNP TSC0011039
aaatctctcgcct

SEQ ID NO: 34681 - DNA, 13 bp, Artificial Sequence
  Oligonucleotide for detection of SNP TSC0011039
aagtttgttgttt

SEQ ID NO: 34682 - DNA, 13 bp, Artificial Sequence
  Oligonucleotide for detection of SNP TSC0011039
aaacaacaaactt

SEQ ID NO: 34683 - DNA, 13 bp, Artificial Sequence
  Oligonucleotide for detection of SNP TSC0011039
aagttttttgttt

SEQ ID NO: 34684 - DNA, 13 bp, Artificial Sequence
  Oligonucleotide for detection of SNP TSC0011039
aaacaaaaaactt

SEQ ID NO: 34685 - DNA, 13 bp, Artificial Sequence
  Oligonucleotide for detection of SNP TSC0011039
aagtttgtcgttt

SEQ ID NO: 34686 - DNA, 13 bp, Artificial Sequence
  Oligonucleotide for detection of SNP TSC0011039
aaacgacaaactt

SEQ ID NO: 34687 - DNA, 13 bp, Artificial Sequence
  Oligonucleotide for detection of SNP TSC0011039
aagtttttcgttt

SEQ ID NO: 34688 - DNA, 13 bp, Artificial Sequence
  Oligonucleotide for detection of SNP TSC0011039
aaacgaaaaactt

SEQ ID NO: 34689 - DNA, 13 bp, Artificial Sequence
  Oligonucleotide for detection of SNP TSC0011040
tagtgatgggatg

SEQ ID NO: 34690 - DNA, 13 bp, Artificial Sequence
  Oligonucleotide for detection of SNP TSC0011040
catcccatcacta

SEQ ID NO: 34691 - DNA, 13 bp, Artificial Sequence
  Oligonucleotide for detection of SNP TSC0011040
tagtgacgggatg

SEQ ID NO: 34692 - DNA, 13 bp, Artificial Sequence
  Oligonucleotide for detection of SNP TSC0011040
catcccgtcacta

SEQ ID NO: 34693 - DNA, 13 bp, Artificial Sequence
  Oligonucleotide for detection of SNP TSC0011040
tattttattatta

SEQ ID NO: 34694 - DNA, 13 bp, Artificial Sequence
  Oligonucleotide for detection of SNP TSC0011040
taataataaaata

SEQ ID NO: 34695 - DNA, 13 bp, Artificial Sequence
  Oligonucleotide for detection of SNP TSC0011040
tatttcgttatta

SEQ ID NO: 34696 - DNA, 13 bp, Artificial Sequence
  Oligonucleotide for detection of SNP TSC0011040
taataacgaaata

SEQ ID NO: 34697 - DNA, 13 bp, Artificial Sequence
  Oligonucleotide for detection of SNP TSC0011041
aattaagataatt

SEQ ID NO: 34698 - DNA, 13 bp, Artificial Sequence
  Oligonucleotide for detection of SNP TSC0011041
aattatcttaatt

SEQ ID NO: 34699 - DNA, 13 bp, Artificial Sequence
  Oligonucleotide for detection of SNP TSC0011041
aattaaaataatt

SEQ ID NO: 34700 - DNA, 13 bp, Artificial Sequence
  Oligonucleotide for detection of SNP TSC0011041
aattattttaatt

SEQ ID NO: 34701 - DNA, 13 bp, Artificial Sequence
  Oligonucleotide for detection of SNP TSC0011042
gtattaagtattt

SEQ ID NO: 34702 - DNA, 13 bp, Artificial Sequence
  Oligonucleotide for detection of SNP TSC0011042
aaatacttaatac

SEQ ID NO: 34703 - DNA, 13 bp, Artificial Sequence
  Oligonucleotide for detection of SNP TSC0011042
gtattaggtattt

SEQ ID NO: 34704 - DNA, 13 bp, Artificial Sequence
  Oligonucleotide for detection of SNP TSC0011042
aaatacctaatac

SEQ ID NO: 34705 - DNA, 13 bp, Artificial Sequence
  Oligonucleotide for detection of SNP TSC0011043
agataatggtttt

SEQ ID NO: 34706 - DNA, 13 bp, Artificial Sequence
  Oligonucleotide for detection of SNP TSC0011043
aaaaccattatct

SEQ ID NO: 34707 - DNA, 13 bp, Artificial Sequence
  Oligonucleotide for detection of SNP TSC0011043
agataacggtttt

SEQ ID NO: 34708 - DNA, 13 bp, Artificial Sequence
  Oligonucleotide for detection of SNP TSC0011043
aaaaccgttatct

SEQ ID NO: 34709 - DNA, 13 bp, Artificial Sequence
  Oligonucleotide for detection of SNP TSC0011043
aaagttgttattt

SEQ ID NO: 34710 - DNA, 13 bp, Artificial Sequence
  Oligonucleotide for detection of SNP TSC0011043
aaataacaacttt

SEQ ID NO: 34711 - DNA, 13 bp, Artificial Sequence
  Oligonucleotide for detection of SNP TSC0011043
aaagttattattt

SEQ ID NO: 34712 - DNA, 13 bp, Artificial Sequence
  Oligonucleotide for detection of SNP TSC0011043
aaataataacttt

SEQ ID NO: 34713 - DNA, 13 bp, Artificial Sequence
  Oligonucleotide for detection of SNP TSC0011043
aaagtcgttattt

SEQ ID NO: 34714 - DNA, 13 bp, Artificial Sequence
  Oligonucleotide for detection of SNP TSC0011043
aaataacgacttt

SEQ ID NO: 34715 - DNA, 13 bp, Artificial Sequence
  Oligonucleotide for detection of SNP TSC0011044
aattaagatagaa

SEQ ID NO: 34716 - DNA, 13 bp, Artificial Sequence
  Oligonucleotide for detection of SNP TSC0011044
ttctatcttaatt

SEQ ID NO: 34717 - DNA, 13 bp, Artificial Sequence
  Oligonucleotide for detection of SNP TSC0011044
aattaaaatagaa

SEQ ID NO: 34718 - DNA, 13 bp, Artificial Sequence
  Oligonucleotide for detection of SNP TSC0011044
ttctattttaatt

SEQ ID NO: 34719 - DNA, 13 bp, Artificial Sequence
  Oligonucleotide for detection of SNP TSC0011045
tttagaatagagt

SEQ ID NO: 34720 - DNA, 13 bp, Artificial Sequence
  Oligonucleotide for detection of SNP TSC0011045
actctattctaaa

SEQ ID NO: 34721 - DNA, 13 bp, Artificial Sequence
  Oligonucleotide for detection of SNP TSC0011045
tttagagtagagt

SEQ ID NO: 34722 - DNA, 13 bp, Artificial Sequence
  Oligonucleotide for detection of SNP TSC0011045
actctactctaaa

SEQ ID NO: 34723 - DNA, 13 bp, Artificial Sequence
  Oligonucleotide for detection of SNP TSC0011046
aaaaatatatagy

SEQ ID NO: 34724 - DNA, 13 bp, Artificial Sequence
  Oligonucleotide for detection of SNP TSC0011046
rctatatattttt

SEQ ID NO: 34725 - DNA, 13 bp, Artificial Sequence
  Oligonucleotide for detection of SNP TSC0011046
aaaaatgtatagy

SEQ ID NO: 34726 - DNA, 13 bp, Artificial Sequence
  Oligonucleotide for detection of SNP TSC0011046
rctatacattttt

SEQ ID NO: 34727 - DNA, 13 bp, Artificial Sequence
  Oligonucleotide for detection of SNP TSC0011048
gtttatgtggaat

SEQ ID NO: 34728 - DNA, 13 bp, Artificial Sequence
  Oligonucleotide for detection of SNP TSC0011048
attccacataaac

SEQ ID NO: 34729 - DNA, 13 bp, Artificial Sequence
  Oligonucleotide for detection of SNP TSC0011048
gtttatatggaat

SEQ ID NO: 34730 - DNA, 13 bp, Artificial Sequence
  Oligonucleotide for detection of SNP TSC0011048
attccatataaac

SEQ ID NO: 34731 - DNA, 13 bp, Artificial Sequence
  Oligonucleotide for detection of SNP TSC0011049
tagtgatagattt

SEQ ID NO: 34732 - DNA, 13 bp, Artificial Sequence
  Oligonucleotide for detection of SNP TSC0011049
aaatctatcacta

SEQ ID NO: 34733 - DNA, 13 bp, Artificial Sequence
  Oligonucleotide for detection of SNP TSC0011049
tagtgagagattt

SEQ ID NO: 34734 - DNA, 13 bp, Artificial Sequence
  Oligonucleotide for detection of SNP TSC0011049
aaatctctcacta

SEQ ID NO: 34735 - DNA, 13 bp, Artificial Sequence
  Oligonucleotide for detection of SNP TSC0011049
aggtttgttattg

SEQ ID NO: 34736 - DNA, 13 bp, Artificial Sequence
  Oligonucleotide for detection of SNP TSC0011049
caataacaaacct

SEQ ID NO: 34737 - DNA, 13 bp, Artificial Sequence
  Oligonucleotide for detection of SNP TSC0011049
aggttttttattg

SEQ ID NO: 34738 - DNA, 13 bp, Artificial Sequence
  Oligonucleotide for detection of SNP TSC0011049
caataaaaaacct

SEQ ID NO: 34739 - DNA, 13 bp, Artificial Sequence
  Oligonucleotide for detection of SNP TSC0011050
ggtagtgtttagy

SEQ ID NO: 34740 - DNA, 13 bp, Artificial Sequence
  Oligonucleotide for detection of SNP TSC0011050
rctaaacactacc

SEQ ID NO: 34741 - DNA, 13 bp, Artificial Sequence
  Oligonucleotide for detection of SNP TSC0011050
ggtagtatttagy

SEQ ID NO: 34742 - DNA, 13 bp, Artificial Sequence
  Oligonucleotide for detection of SNP TSC0011050
rctaaatactacc

SEQ ID NO: 34743 - DNA, 13 bp, Artificial Sequence
  Oligonucleotide for detection of SNP TSC0011053
attatagtatttt

SEQ ID NO: 34744 - DNA, 13 bp, Artificial Sequence
  Oligonucleotide for detection of SNP TSC0011053
aaaatactataat

SEQ ID NO: 34745 - DNA, 13 bp, Artificial Sequence
  Oligonucleotide for detection of SNP TSC0011053
attatattatttt

SEQ ID NO: 34746 - DNA, 13 bp, Artificial Sequence
  Oligonucleotide for detection of SNP TSC0011053
aaaataatataat

SEQ ID NO: 34747 - DNA, 13 bp, Artificial Sequence
  Oligonucleotide for detection of SNP TSC0011053
agagtgttatggt

SEQ ID NO: 34748 - DNA, 13 bp, Artificial Sequence
  Oligonucleotide for detection of SNP TSC0011053
accataacactct

SEQ ID NO: 34749 - DNA, 13 bp, Artificial Sequence
  Oligonucleotide for detection of SNP TSC0011053
agagtgatatggt

SEQ ID NO: 34750 - DNA, 13 bp, Artificial Sequence
  Oligonucleotide for detection of SNP TSC0011053
accatatcactct

SEQ ID NO: 34751 - DNA, 13 bp, Artificial Sequence
  Oligonucleotide for detection of SNP TSC0011054
ttattggtgagta

SEQ ID NO: 34752 - DNA, 13 bp, Artificial Sequence
  Oligonucleotide for detection of SNP TSC0011054
tactcaccaataa

SEQ ID NO: 34753 - DNA, 13 bp, Artificial Sequence
  Oligonucleotide for detection of SNP TSC0011054
ttattgatgagta

SEQ ID NO: 34754 - DNA, 13 bp, Artificial Sequence
  Oligonucleotide for detection of SNP TSC0011054
tactcatcaataa

SEQ ID NO: 34755 - DNA, 13 bp, Artificial Sequence
  Oligonucleotide for detection of SNP TSC0011055
agttttagattat

SEQ ID NO: 34756 - DNA, 13 bp, Artificial Sequence
  Oligonucleotide for detection of SNP TSC0011055
ataatctaaaact

SEQ ID NO: 34757 - DNA, 13 bp, Artificial Sequence
  Oligonucleotide for detection of SNP TSC0011055
agtttttgattat

SEQ ID NO: 34758 - DNA, 13 bp, Artificial Sequence
  Oligonucleotide for detection of SNP TSC0011055
ataatcaaaaact

SEQ ID NO: 34759 - DNA, 13 bp, Artificial Sequence
  Oligonucleotide for detection of SNP TSC0011055
agttttcgattat

SEQ ID NO: 34760 - DNA, 13 bp, Artificial Sequence
  Oligonucleotide for detection of SNP TSC0011055
ataatcgaaaact

SEQ ID NO: 34761 - DNA, 13 bp, Artificial Sequence
  Oligonucleotide for detection of SNP TSC0011055
atgatttagagtt

SEQ ID NO: 34762 - DNA, 13 bp, Artificial Sequence
  Oligonucleotide for detection of SNP TSC0011055
aactctaaatcat

SEQ ID NO: 34763 - DNA, 13 bp, Artificial Sequence
  Oligonucleotide for detection of SNP TSC0011055
atgattgagagtt

SEQ ID NO: 34764 - DNA, 13 bp, Artificial Sequence
  Oligonucleotide for detection of SNP TSC0011055
aactctcaatcat

SEQ ID NO: 34765 - DNA, 13 bp, Artificial Sequence
  Oligonucleotide for detection of SNP TSC0011055
atgatcgagagtt

SEQ ID NO: 34766 - DNA, 13 bp, Artificial Sequence
  Oligonucleotide for detection of SNP TSC0011055
aactctcgatcat

SEQ ID NO: 34767 - DNA, 13 bp, Artificial Sequence
  Oligonucleotide for detection of SNP TSC0011056
aaaaaattttaga

SEQ ID NO: 34768 - DNA, 13 bp, Artificial Sequence
  Oligonucleotide for detection of SNP TSC0011056
tctaaaatttttt

SEQ ID NO: 34769 - DNA, 13 bp, Artificial Sequence
  Oligonucleotide for detection of SNP TSC0011056
aaaaaaatttaga

SEQ ID NO: 34770 - DNA, 13 bp, Artificial Sequence
  Oligonucleotide for detection of SNP TSC0011056
tctaaattttttt

SEQ ID NO: 34771 - DNA, 13 bp, Artificial Sequence
  Oligonucleotide for detection of SNP TSC0011059
tataaagaaaggt

SEQ ID NO: 34772 - DNA, 13 bp, Artificial Sequence
  Oligonucleotide for detection of SNP TSC0011059
acctttctttata

SEQ ID NO: 34773 - DNA, 13 bp, Artificial Sequence
  Oligonucleotide for detection of SNP TSC0011059
tataaaaaaaggt

SEQ ID NO: 34774 - DNA, 13 bp, Artificial Sequence
  Oligonucleotide for detection of SNP TSC0011059
acctttttttata

SEQ ID NO: 34775 - DNA, 13 bp, Artificial Sequence
  Oligonucleotide for detection of SNP TSC0011060
ttttggagtttag

SEQ ID NO: 34776 - DNA, 13 bp, Artificial Sequence
  Oligonucleotide for detection of SNP TSC0011060
ctaaactccaaaa

SEQ ID NO: 34777 - DNA, 13 bp, Artificial Sequence
  Oligonucleotide for detection of SNP TSC0011060
ttttggggtttag

SEQ ID NO: 34778 - DNA, 13 bp, Artificial Sequence
  Oligonucleotide for detection of SNP TSC0011060
ctaaaccccaaaa

SEQ ID NO: 34779 - DNA, 13 bp, Artificial Sequence
  Oligonucleotide for detection of SNP TSC0011061
aaaattagtttgg

SEQ ID NO: 34780 - DNA, 13 bp, Artificial Sequence
  Oligonucleotide for detection of SNP TSC0011061
ccaaactaatttt

SEQ ID NO: 34781 - DNA, 13 bp, Artificial Sequence
  Oligonucleotide for detection of SNP TSC0011061
aaaattggtttgg

SEQ ID NO: 34782 - DNA, 13 bp, Artificial Sequence
  Oligonucleotide for detection of SNP TSC0011061
ccaaaccaatttt

SEQ ID NO: 34783 - DNA, 13 bp, Artificial Sequence
  Oligonucleotide for detection of SNP TSC0011061
aaaatcggtttgg

SEQ ID NO: 34784 - DNA, 13 bp, Artificial Sequence
  Oligonucleotide for detection of SNP TSC0011061
ccaaaccgatttt

SEQ ID NO: 34785 - DNA, 13 bp, Artificial Sequence
  Oligonucleotide for detection of SNP TSC0011061
ttaggttggtttt

SEQ ID NO: 34786 - DNA, 13 bp, Artificial Sequence
  Oligonucleotide for detection of SNP TSC0011061
aaaaccaacctaa

SEQ ID NO: 34787 - DNA, 13 bp, Artificial Sequence
  Oligonucleotide for detection of SNP TSC0011061
ttaggtcggtttt

SEQ ID NO: 34788 - DNA, 13 bp, Artificial Sequence
  Oligonucleotide for detection of SNP TSC0011061
aaaaccgacctaa

SEQ ID NO: 34789 - DNA, 13 bp, Artificial Sequence
  Oligonucleotide for detection of SNP TSC0011062
aggaaatggagag

SEQ ID NO: 34790 - DNA, 13 bp, Artificial Sequence
  Oligonucleotide for detection of SNP TSC0011062
ctctccatttcct

SEQ ID NO: 34791 - DNA, 13 bp, Artificial Sequence
  Oligonucleotide for detection of SNP TSC0011062
aggaaacggagag

SEQ ID NO: 34792 - DNA, 13 bp, Artificial Sequence
  Oligonucleotide for detection of SNP TSC0011062
ctctccgtttcct

SEQ ID NO: 34793 - DNA, 13 bp, Artificial Sequence
  Oligonucleotide for detection of SNP TSC0011063
gtttagagaaaga

SEQ ID NO: 34794 - DNA, 13 bp, Artificial Sequence
  Oligonucleotide for detection of SNP TSC0011063
tctttctctaaac

SEQ ID NO: 34795 - DNA, 13 bp, Artificial Sequence
  Oligonucleotide for detection of SNP TSC0011063
gtttagggaaaga

SEQ ID NO: 34796 - DNA, 13 bp, Artificial Sequence
  Oligonucleotide for detection of SNP TSC0011063
tctttccctaaac

SEQ ID NO: 34797 - DNA, 13 bp, Artificial Sequence
  Oligonucleotide for detection of SNP TSC0011064
gttattgttattt

SEQ ID NO: 34798 - DNA, 13 bp, Artificial Sequence
  Oligonucleotide for detection of SNP TSC0011064
aaataacaataac

SEQ ID NO: 34799 - DNA, 13 bp, Artificial Sequence
  Oligonucleotide for detection of SNP TSC0011064
gttattattattt

SEQ ID NO: 34800 - DNA, 13 bp, Artificial Sequence
  Oligonucleotide for detection of SNP TSC0011064
aaataataataac

SEQ ID NO: 34801 - DNA, 13 bp, Artificial Sequence
  Oligonucleotide for detection of SNP TSC0011065
taatatagtttay

SEQ ID NO: 34802 - DNA, 13 bp, Artificial Sequence
  Oligonucleotide for detection of SNP TSC0011065
rtaaactatatta

SEQ ID NO: 34803 - DNA, 13 bp, Artificial Sequence
  Oligonucleotide for detection of SNP TSC0011065
taatatggtttay

SEQ ID NO: 34804 - DNA, 13 bp, Artificial Sequence
  Oligonucleotide for detection of SNP TSC0011065
rtaaaccatatta

SEQ ID NO: 34805 - DNA, 13 bp, Artificial Sequence
  Oligonucleotide for detection of SNP TSC0011065
taatacggtttay

SEQ ID NO: 34806 - DNA, 13 bp, Artificial Sequence
  Oligonucleotide for detection of SNP TSC0011065
rtaaaccgtatta

SEQ ID NO: 34807 - DNA, 13 bp, Artificial Sequence
  Oligonucleotide for detection of SNP TSC0011065
gtgaattgtattg

SEQ ID NO: 34808 - DNA, 13 bp, Artificial Sequence
  Oligonucleotide for detection of SNP TSC0011065
caatacaattcac

SEQ ID NO: 34809 - DNA, 13 bp, Artificial Sequence
  Oligonucleotide for detection of SNP TSC0011065
gtgaatcgtattg

SEQ ID NO: 34810 - DNA, 13 bp, Artificial Sequence
  Oligonucleotide for detection of SNP TSC0011065
caatacgattcac

SEQ ID NO: 34811 - DNA, 13 bp, Artificial Sequence
  Oligonucleotide for detection of SNP TSC0011066
tatttagtaggtt

SEQ ID NO: 34812 - DNA, 13 bp, Artificial Sequence
  Oligonucleotide for detection of SNP TSC0011066
aacctactaaata

SEQ ID NO: 34813 - DNA, 13 bp, Artificial Sequence
  Oligonucleotide for detection of SNP TSC0011066
tatttaataggtt

SEQ ID NO: 34814 - DNA, 13 bp, Artificial Sequence
  Oligonucleotide for detection of SNP TSC0011066
aacctattaaata

SEQ ID NO: 34815 - DNA, 13 bp, Artificial Sequence
  Oligonucleotide for detection of SNP TSC0011067
ttaattatgagtg

SEQ ID NO: 34816 - DNA, 13 bp, Artificial Sequence
  Oligonucleotide for detection of SNP TSC0011067
cactcataattaa

SEQ ID NO: 34817 - DNA, 13 bp, Artificial Sequence
  Oligonucleotide for detection of SNP TSC0011067
ttaattgtgagtg

SEQ ID NO: 34818 - DNA, 13 bp, Artificial Sequence
  Oligonucleotide for detection of SNP TSC0011067
cactcacaattaa

SEQ ID NO: 34819 - DNA, 13 bp, Artificial Sequence
  Oligonucleotide for detection of SNP TSC0011067
ttaatcgtgagtg

SEQ ID NO: 34820 - DNA, 13 bp, Artificial Sequence
  Oligonucleotide for detection of SNP TSC0011067
cactcacgattaa

SEQ ID NO: 34821 - DNA, 13 bp, Artificial Sequence
  Oligonucleotide for detection of SNP TSC0011068
ttgggaggttgag

SEQ ID NO: 34822 - DNA, 13 bp, Artificial Sequence
  Oligonucleotide for detection of SNP TSC0011068
ctcaacctcccaa

SEQ ID NO: 34823 - DNA, 13 bp, Artificial Sequence
  Oligonucleotide for detection of SNP TSC0011068
ttgggaagttgag

SEQ ID NO: 34824 - DNA, 13 bp, Artificial Sequence
  Oligonucleotide for detection of SNP TSC0011068
ctcaacttcccaa

SEQ ID NO: 34825 - DNA, 13 bp, Artificial Sequence
  Oligonucleotide for detection of SNP TSC0011068
ttgggaggtcgag

SEQ ID NO: 34826 - DNA, 13 bp, Artificial Sequence
  Oligonucleotide for detection of SNP TSC0011068
ctcgacctcccaa

SEQ ID NO: 34827 - DNA, 13 bp, Artificial Sequence
  Oligonucleotide for detection of SNP TSC0011068
ttgggaagtcgag

SEQ ID NO: 34828 - DNA, 13 bp, Artificial Sequence
  Oligonucleotide for detection of SNP TSC0011068
ctcgacttcccaa

SEQ ID NO: 34829 - DNA, 13 bp, Artificial Sequence
  Oligonucleotide for detection of SNP TSC0011070
tgagatgaattgg

SEQ ID NO: 34830 - DNA, 13 bp, Artificial Sequence
  Oligonucleotide for detection of SNP TSC0011070
ccaattcatctca

SEQ ID NO: 34831 - DNA, 13 bp, Artificial Sequence
  Oligonucleotide for detection of SNP TSC0011070
tgagattaattgg

SEQ ID NO: 34832 - DNA, 13 bp, Artificial Sequence
  Oligonucleotide for detection of SNP TSC0011070
ccaattaatctca

SEQ ID NO: 34833 - DNA, 13 bp, Artificial Sequence
  Oligonucleotide for detection of SNP TSC0011070
ttagtttatttta

SEQ ID NO: 34834 - DNA, 13 bp, Artificial Sequence
  Oligonucleotide for detection of SNP TSC0011070
taaaataaactaa

SEQ ID NO: 34835 - DNA, 13 bp, Artificial Sequence
  Oligonucleotide for detection of SNP TSC0011070
ttagttaatttta

SEQ ID NO: 34836 - DNA, 13 bp, Artificial Sequence
  Oligonucleotide for detection of SNP TSC0011070
taaaattaactaa

SEQ ID NO: 34837 - DNA, 13 bp, Artificial Sequence
  Oligonucleotide for detection of SNP TSC0011073
gtgattgatttta

SEQ ID NO: 34838 - DNA, 13 bp, Artificial Sequence
  Oligonucleotide for detection of SNP TSC0011073
taaaatcaatcac

SEQ ID NO: 34839 - DNA, 13 bp, Artificial Sequence
  Oligonucleotide for detection of SNP TSC0011073
gtgattaatttta

SEQ ID NO: 34840 - DNA, 13 bp, Artificial Sequence
  Oligonucleotide for detection of SNP TSC0011073
taaaattaatcac

SEQ ID NO: 34841 - DNA, 13 bp, Artificial Sequence
  Oligonucleotide for detection of SNP TSC0011074
taaatgggtaatt

SEQ ID NO: 34842 - DNA, 13 bp, Artificial Sequence
  Oligonucleotide for detection of SNP TSC0011074
aattacccattta

SEQ ID NO: 34843 - DNA, 13 bp, Artificial Sequence
  Oligonucleotide for detection of SNP TSC0011074
taaatgtgtaatt

SEQ ID NO: 34844 - DNA, 13 bp, Artificial Sequence
  Oligonucleotide for detection of SNP TSC0011074
aattacacattta

SEQ ID NO: 34845 - DNA, 13 bp, Artificial Sequence
  Oligonucleotide for detection of SNP TSC0011074
aattatttatttg

SEQ ID NO: 34846 - DNA, 13 bp, Artificial Sequence
  Oligonucleotide for detection of SNP TSC0011074
caaataaataatt

SEQ ID NO: 34847 - DNA, 13 bp, Artificial Sequence
  Oligonucleotide for detection of SNP TSC0011078
agtttaattagtg

SEQ ID NO: 34848 - DNA, 13 bp, Artificial Sequence
  Oligonucleotide for detection of SNP TSC0011078
cactaattaaact

SEQ ID NO: 34849 - DNA, 13 bp, Artificial Sequence
  Oligonucleotide for detection of SNP TSC0011078
agtttagttagtg

SEQ ID NO: 34850 - DNA, 13 bp, Artificial Sequence
  Oligonucleotide for detection of SNP TSC0011078
cactaactaaact

SEQ ID NO: 34851 - DNA, 13 bp, Artificial Sequence
  Oligonucleotide for detection of SNP TSC0011079
atagatattttty

SEQ ID NO: 34852 - DNA, 13 bp, Artificial Sequence
  Oligonucleotide for detection of SNP TSC0011079
raaaaatatctat

SEQ ID NO: 34853 - DNA, 13 bp, Artificial Sequence
  Oligonucleotide for detection of SNP TSC0011079
atagatgttttty

SEQ ID NO: 34854 - DNA, 13 bp, Artificial Sequence
  Oligonucleotide for detection of SNP TSC0011079
raaaaacatctat

SEQ ID NO: 34855 - DNA, 13 bp, Artificial Sequence
  Oligonucleotide for detection of SNP TSC0011080
tggggttggggtg

SEQ ID NO: 34856 - DNA, 13 bp, Artificial Sequence
  Oligonucleotide for detection of SNP TSC0011080
caccccaacccca

SEQ ID NO: 34857 - DNA, 13 bp, Artificial Sequence
  Oligonucleotide for detection of SNP TSC0011080
tggggtgggggtg

SEQ ID NO: 34858 - DNA, 13 bp, Artificial Sequence
  Oligonucleotide for detection of SNP TSC0011080
cacccccacccca

SEQ ID NO: 34859 - DNA, 13 bp, Artificial Sequence
  Oligonucleotide for detection of SNP TSC0011080
cggggttggggtg

SEQ ID NO: 34860 - DNA, 13 bp, Artificial Sequence
  Oligonucleotide for detection of SNP TSC0011080
caccccaaccccg

SEQ ID NO: 34861 - DNA, 13 bp, Artificial Sequence
  Oligonucleotide for detection of SNP TSC0011080
cggggtgggggtg

SEQ ID NO: 34862 - DNA, 13 bp, Artificial Sequence
  Oligonucleotide for detection of SNP TSC0011080
cacccccaccccg

SEQ ID NO: 34863 - DNA, 13 bp, Artificial Sequence
  Oligonucleotide for detection of SNP TSC0011080
tggggtcggggtg

SEQ ID NO: 34864 - DNA, 13 bp, Artificial Sequence
  Oligonucleotide for detection of SNP TSC0011080
caccccgacccca

SEQ ID NO: 34865 - DNA, 13 bp, Artificial Sequence
  Oligonucleotide for detection of SNP TSC0011080
cggggtcggggtg

SEQ ID NO: 34866 - DNA, 13 bp, Artificial Sequence
  Oligonucleotide for detection of SNP TSC0011080
caccccgaccccg

SEQ ID NO: 34867 - DNA, 13 bp, Artificial Sequence
  Oligonucleotide for detection of SNP TSC0011080
tattttgattttg

SEQ ID NO: 34868 - DNA, 13 bp, Artificial Sequence
  Oligonucleotide for detection of SNP TSC0011080
caaaatcaaaata

SEQ ID NO: 34869 - DNA, 13 bp, Artificial Sequence
  Oligonucleotide for detection of SNP TSC0011080
tatttttattttg

SEQ ID NO: 34870 - DNA, 13 bp, Artificial Sequence
  Oligonucleotide for detection of SNP TSC0011080
caaaataaaaata

SEQ ID NO: 34871 - DNA, 13 bp, Artificial Sequence
  Oligonucleotide for detection of SNP TSC0011080
tatttcgattttg

SEQ ID NO: 34872 - DNA, 13 bp, Artificial Sequence
  Oligonucleotide for detection of SNP TSC0011080
caaaatcgaaata

SEQ ID NO: 34873 - DNA, 13 bp, Artificial Sequence
  Oligonucleotide for detection of SNP TSC0011080
tatttttatttcg

SEQ ID NO: 34874 - DNA, 13 bp, Artificial Sequence
  Oligonucleotide for detection of SNP TSC0011080
cgaaataaaaata

SEQ ID NO: 34875 - DNA, 13 bp, Artificial Sequence
  Oligonucleotide for detection of SNP TSC0011080
tattttgatttcg

SEQ ID NO: 34876 - DNA, 13 bp, Artificial Sequence
  Oligonucleotide for detection of SNP TSC0011080
cgaaatcaaaata

SEQ ID NO: 34877 - DNA, 13 bp, Artificial Sequence
  Oligonucleotide for detection of SNP TSC0011080
tatttcgatttcg

SEQ ID NO: 34878 - DNA, 13 bp, Artificial Sequence
  Oligonucleotide for detection of SNP TSC0011080
cgaaatcgaaata

SEQ ID NO: 34879 - DNA, 13 bp, Artificial Sequence
  Oligonucleotide for detection of SNP TSC0011081
attgatgttttta

SEQ ID NO: 34880 - DNA, 13 bp, Artificial Sequence
  Oligonucleotide for detection of SNP TSC0011081
taaaaacatcaat

SEQ ID NO: 34881 - DNA, 13 bp, Artificial Sequence
  Oligonucleotide for detection of SNP TSC0011081
attgattttttta

SEQ ID NO: 34882 - DNA, 13 bp, Artificial Sequence
  Oligonucleotide for detection of SNP TSC0011081
taaaaaaatcaat

SEQ ID NO: 34883 - DNA, 13 bp, Artificial Sequence
  Oligonucleotide for detection of SNP TSC0011081
attgacgttttta

SEQ ID NO: 34884 - DNA, 13 bp, Artificial Sequence
  Oligonucleotide for detection of SNP TSC0011081
taaaaacgtcaat

SEQ ID NO: 34885 - DNA, 13 bp, Artificial Sequence
  Oligonucleotide for detection of SNP TSC0011081
taaagatgttaat

SEQ ID NO: 34886 - DNA, 13 bp, Artificial Sequence
  Oligonucleotide for detection of SNP TSC0011081
attaacatcttta

SEQ ID NO: 34887 - DNA, 13 bp, Artificial Sequence
  Oligonucleotide for detection of SNP TSC0011081
taaagaagttaat

SEQ ID NO: 34888 - DNA, 13 bp, Artificial Sequence
  Oligonucleotide for detection of SNP TSC0011081
attaacttcttta

SEQ ID NO: 34889 - DNA, 13 bp, Artificial Sequence
  Oligonucleotide for detection of SNP TSC0011081
taaagacgttaat

SEQ ID NO: 34890 - DNA, 13 bp, Artificial Sequence
  Oligonucleotide for detection of SNP TSC0011081
attaacgtcttta

SEQ ID NO: 34891 - DNA, 13 bp, Artificial Sequence
  Oligonucleotide for detection of SNP TSC0011082
agggaatgttggy

SEQ ID NO: 34892 - DNA, 13 bp, Artificial Sequence
  Oligonucleotide for detection of SNP TSC0011082
rccaacattccct

SEQ ID NO: 34893 - DNA, 13 bp, Artificial Sequence
  Oligonucleotide for detection of SNP TSC0011082
agggaacgttggy

SEQ ID NO: 34894 - DNA, 13 bp, Artificial Sequence
  Oligonucleotide for detection of SNP TSC0011082
rccaacgttccct

SEQ ID NO: 34895 - DNA, 13 bp, Artificial Sequence
  Oligonucleotide for detection of SNP TSC0011082
gttagtgtttttt

SEQ ID NO: 34896 - DNA, 13 bp, Artificial Sequence
  Oligonucleotide for detection of SNP TSC0011082
aaaaaacactaac

SEQ ID NO: 34897 - DNA, 13 bp, Artificial Sequence
  Oligonucleotide for detection of SNP TSC0011082
gttagtatttttt

SEQ ID NO: 34898 - DNA, 13 bp, Artificial Sequence
  Oligonucleotide for detection of SNP TSC0011082
aaaaaatactaac

SEQ ID NO: 34899 - DNA, 13 bp, Artificial Sequence
  Oligonucleotide for detection of SNP TSC0011082
gttagcgtttttt

SEQ ID NO: 34900 - DNA, 13 bp, Artificial Sequence
  Oligonucleotide for detection of SNP TSC0011082
aaaaaacgctaac

SEQ ID NO: 34901 - DNA, 13 bp, Artificial Sequence
  Oligonucleotide for detection of SNP TSC0011083
attttaagagtaa

SEQ ID NO: 34902 - DNA, 13 bp, Artificial Sequence
  Oligonucleotide for detection of SNP TSC0011083
ttactcttaaaat

SEQ ID NO: 34903 - DNA, 13 bp, Artificial Sequence
  Oligonucleotide for detection of SNP TSC0011083
attttaggagtaa

SEQ ID NO: 34904 - DNA, 13 bp, Artificial Sequence
  Oligonucleotide for detection of SNP TSC0011083
ttactcctaaaat

SEQ ID NO: 34905 - DNA, 13 bp, Artificial Sequence
  Oligonucleotide for detection of SNP TSC0011084
tgatttatttaty

SEQ ID NO: 34906 - DNA, 13 bp, Artificial Sequence
  Oligonucleotide for detection of SNP TSC0011084
rataaataaatca

SEQ ID NO: 34907 - DNA, 13 bp, Artificial Sequence
  Oligonucleotide for detection of SNP TSC0011084
tgatttgtttaty

SEQ ID NO: 34908 - DNA, 13 bp, Artificial Sequence
  Oligonucleotide for detection of SNP TSC0011084
rataaacaaatca

SEQ ID NO: 34909 - DNA, 13 bp, Artificial Sequence
  Oligonucleotide for detection of SNP TSC0011084
tgattcgtttaty

SEQ ID NO: 34910 - DNA, 13 bp, Artificial Sequence
  Oligonucleotide for detection of SNP TSC0011084
rataaacgaatca

SEQ ID NO: 34911 - DNA, 13 bp, Artificial Sequence
  Oligonucleotide for detection of SNP TSC0011084
gatgggtggatta

SEQ ID NO: 34912 - DNA, 13 bp, Artificial Sequence
  Oligonucleotide for detection of SNP TSC0011084
taatccacccatc

SEQ ID NO: 34913 - DNA, 13 bp, Artificial Sequence
  Oligonucleotide for detection of SNP TSC0011084
gatgggcggatta

SEQ ID NO: 34914 - DNA, 13 bp, Artificial Sequence
  Oligonucleotide for detection of SNP TSC0011084
taatccgcccatc

SEQ ID NO: 34915 - DNA, 13 bp, Artificial Sequence
  Oligonucleotide for detection of SNP TSC0011088
tattgtttttgta

SEQ ID NO: 34916 - DNA, 13 bp, Artificial Sequence
  Oligonucleotide for detection of SNP TSC0011088
tacaaaaacaata

SEQ ID NO: 34917 - DNA, 13 bp, Artificial Sequence
  Oligonucleotide for detection of SNP TSC0011088
tattgtgtttgta

SEQ ID NO: 34918 - DNA, 13 bp, Artificial Sequence
  Oligonucleotide for detection of SNP TSC0011088
tacaaacacaata

SEQ ID NO: 34919 - DNA, 13 bp, Artificial Sequence
  Oligonucleotide for detection of SNP TSC0011088
tatcgtttttgta

SEQ ID NO: 34920 - DNA, 13 bp, Artificial Sequence
  Oligonucleotide for detection of SNP TSC0011088
tacaaaaacgata

SEQ ID NO: 34921 - DNA, 13 bp, Artificial Sequence
  Oligonucleotide for detection of SNP TSC0011088
tatcgtgtttgta

SEQ ID NO: 34922 - DNA, 13 bp, Artificial Sequence
  Oligonucleotide for detection of SNP TSC0011088
tacaaacacgata

SEQ ID NO: 34923 - DNA, 13 bp, Artificial Sequence
  Oligonucleotide for detection of SNP TSC0011088
tgtagagatggta

SEQ ID NO: 34924 - DNA, 13 bp, Artificial Sequence
  Oligonucleotide for detection of SNP TSC0011088
taccatctctaca

SEQ ID NO: 34925 - DNA, 13 bp, Artificial Sequence
  Oligonucleotide for detection of SNP TSC0011088
tgtagatatggta

SEQ ID NO: 34926 - DNA, 13 bp, Artificial Sequence
  Oligonucleotide for detection of SNP TSC0011088
taccatatctaca

SEQ ID NO: 34927 - DNA, 13 bp, Artificial Sequence
  Oligonucleotide for detection of SNP TSC0011088
tgtagagacggta

SEQ ID NO: 34928 - DNA, 13 bp, Artificial Sequence
  Oligonucleotide for detection of SNP TSC0011088
taccgtctctaca

SEQ ID NO: 34929 - DNA, 13 bp, Artificial Sequence
  Oligonucleotide for detection of SNP TSC0011088
tgtagatacggta

SEQ ID NO: 34930 - DNA, 13 bp, Artificial Sequence
  Oligonucleotide for detection of SNP TSC0011088
taccgtatctaca

SEQ ID NO: 34931 - DNA, 13 bp, Artificial Sequence
  Oligonucleotide for detection of SNP TSC0011092
gttataatgtggt

SEQ ID NO: 34932 - DNA, 13 bp, Artificial Sequence
  Oligonucleotide for detection of SNP TSC0011092
accacattataac

SEQ ID NO: 34933 - DNA, 13 bp, Artificial Sequence
  Oligonucleotide for detection of SNP TSC0011092
gttatagtgtggt

SEQ ID NO: 34934 - DNA, 13 bp, Artificial Sequence
  Oligonucleotide for detection of SNP TSC0011092
accacactataac

SEQ ID NO: 34935 - DNA, 13 bp, Artificial Sequence
  Oligonucleotide for detection of SNP TSC0011092
gttataacgtggt

SEQ ID NO: 34936 - DNA, 13 bp, Artificial Sequence
  Oligonucleotide for detection of SNP TSC0011092
accacgttataac

SEQ ID NO: 34937 - DNA, 13 bp, Artificial Sequence
  Oligonucleotide for detection of SNP TSC0011092
gttatagcgtggt

SEQ ID NO: 34938 - DNA, 13 bp, Artificial Sequence
  Oligonucleotide for detection of SNP TSC0011092
accacgctataac

SEQ ID NO: 34939 - DNA, 13 bp, Artificial Sequence
  Oligonucleotide for detection of SNP TSC0011093
gtgtggggataaa

SEQ ID NO: 34940 - DNA, 13 bp, Artificial Sequence
  Oligonucleotide for detection of SNP TSC0011093
tttatccccacac

SEQ ID NO: 34941 - DNA, 13 bp, Artificial Sequence
  Oligonucleotide for detection of SNP TSC0011093
gtgtggagataaa

SEQ ID NO: 34942 - DNA, 13 bp, Artificial Sequence
  Oligonucleotide for detection of SNP TSC0011093
tttatctccacac

SEQ ID NO: 34943 - DNA, 13 bp, Artificial Sequence
  Oligonucleotide for detection of SNP TSC0011094
tgagaaaggaagg

SEQ ID NO: 34944 - DNA, 13 bp, Artificial Sequence
  Oligonucleotide for detection of SNP TSC0011094
ccttcctttctca

SEQ ID NO: 34945 - DNA, 13 bp, Artificial Sequence
  Oligonucleotide for detection of SNP TSC0011094
tgagaagggaagg

SEQ ID NO: 34946 - DNA, 13 bp, Artificial Sequence
  Oligonucleotide for detection of SNP TSC0011094
ccttcccttctca

SEQ ID NO: 34947 - DNA, 13 bp, Artificial Sequence
  Oligonucleotide for detection of SNP TSC0011094
cgagaaaggaagg

SEQ ID NO: 34948 - DNA, 13 bp, Artificial Sequence
  Oligonucleotide for detection of SNP TSC0011094
ccttcctttctcg

SEQ ID NO: 34949 - DNA, 13 bp, Artificial Sequence
  Oligonucleotide for detection of SNP TSC0011094
cgagaagggaagg

SEQ ID NO: 34950 - DNA, 13 bp, Artificial Sequence
  Oligonucleotide for detection of SNP TSC0011094
ccttcccttctcg

SEQ ID NO: 34951 - DNA, 13 bp, Artificial Sequence
  Oligonucleotide for detection of SNP TSC0011099
aagaatatatttt

SEQ ID NO: 34952 - DNA, 13 bp, Artificial Sequence
  Oligonucleotide for detection of SNP TSC0011099
aaaatatattctt

SEQ ID NO: 34953 - DNA, 13 bp, Artificial Sequence
  Oligonucleotide for detection of SNP TSC0011099
aagaatgtatttt

SEQ ID NO: 34954 - DNA, 13 bp, Artificial Sequence
  Oligonucleotide for detection of SNP TSC0011099
aaaatacattctt

SEQ ID NO: 34955 - DNA, 13 bp, Artificial Sequence
  Oligonucleotide for detection of SNP TSC0011100
tgttgtttgtttt

SEQ ID NO: 34956 - DNA, 13 bp, Artificial Sequence
  Oligonucleotide for detection of SNP TSC0011100
aaaacaaacaaca

SEQ ID NO: 34957 - DNA, 13 bp, Artificial Sequence
  Oligonucleotide for detection of SNP TSC0011100
tgttgtatgtttt

SEQ ID NO: 34958 - DNA, 13 bp, Artificial Sequence
  Oligonucleotide for detection of SNP TSC0011100
aaaacatacaaca

SEQ ID NO: 34959 - DNA, 13 bp, Artificial Sequence
  Oligonucleotide for detection of SNP TSC0011100
aaaataaataata

SEQ ID NO: 34960 - DNA, 13 bp, Artificial Sequence
  Oligonucleotide for detection of SNP TSC0011100
tattatttatttt

SEQ ID NO: 34961 - DNA, 13 bp, Artificial Sequence
  Oligonucleotide for detection of SNP TSC0011101
attataagtgtty

SEQ ID NO: 34962 - DNA, 13 bp, Artificial Sequence
  Oligonucleotide for detection of SNP TSC0011101
raacacttataat

SEQ ID NO: 34963 - DNA, 13 bp, Artificial Sequence
  Oligonucleotide for detection of SNP TSC0011101
attataggtgtty

SEQ ID NO: 34964 - DNA, 13 bp, Artificial Sequence
  Oligonucleotide for detection of SNP TSC0011101
raacacctataat

SEQ ID NO: 34965 - DNA, 13 bp, Artificial Sequence
  Oligonucleotide for detection of SNP TSC0011101
attataagcgtty

SEQ ID NO: 34966 - DNA, 13 bp, Artificial Sequence
  Oligonucleotide for detection of SNP TSC0011101
raacgcttataat

SEQ ID NO: 34967 - DNA, 13 bp, Artificial Sequence
  Oligonucleotide for detection of SNP TSC0011101
attataggcgtty

SEQ ID NO: 34968 - DNA, 13 bp, Artificial Sequence
  Oligonucleotide for detection of SNP TSC0011101
raacgcctataat

SEQ ID NO: 34969 - DNA, 13 bp, Artificial Sequence
  Oligonucleotide for detection of SNP TSC0011104
aagaataagtatg

SEQ ID NO: 34970 - DNA, 13 bp, Artificial Sequence
  Oligonucleotide for detection of SNP TSC0011104
catacttattctt

SEQ ID NO: 34971 - DNA, 13 bp, Artificial Sequence
  Oligonucleotide for detection of SNP TSC0011104
aagaattagtatg

SEQ ID NO: 34972 - DNA, 13 bp, Artificial Sequence
  Oligonucleotide for detection of SNP TSC0011104
catactaattctt

SEQ ID NO: 34973 - DNA, 13 bp, Artificial Sequence
  Oligonucleotide for detection of SNP TSC0011104
tatatttattttt

SEQ ID NO: 34974 - DNA, 13 bp, Artificial Sequence
  Oligonucleotide for detection of SNP TSC0011104
aaaaataaatata

SEQ ID NO: 34975 - DNA, 13 bp, Artificial Sequence
  Oligonucleotide for detection of SNP TSC0011104
tatattaattttt

SEQ ID NO: 34976 - DNA, 13 bp, Artificial Sequence
  Oligonucleotide for detection of SNP TSC0011104
aaaaattaatata

SEQ ID NO: 34977 - DNA, 13 bp, Artificial Sequence
  Oligonucleotide for detection of SNP TSC0011109
atgaggaataaay

SEQ ID NO: 34978 - DNA, 13 bp, Artificial Sequence
  Oligonucleotide for detection of SNP TSC0011109
rtttattcctcat

SEQ ID NO: 34979 - DNA, 13 bp, Artificial Sequence
  Oligonucleotide for detection of SNP TSC0011109
atgagggataaay

SEQ ID NO: 34980 - DNA, 13 bp, Artificial Sequence
  Oligonucleotide for detection of SNP TSC0011109
rtttatccctcat

SEQ ID NO: 34981 - DNA, 13 bp, Artificial Sequence
  Oligonucleotide for detection of SNP TSC0011110
atagggtgtgttg

SEQ ID NO: 34982 - DNA, 13 bp, Artificial Sequence
  Oligonucleotide for detection of SNP TSC0011110
caacacaccctat

SEQ ID NO: 34983 - DNA, 13 bp, Artificial Sequence
  Oligonucleotide for detection of SNP TSC0011110
atagggcgtgttg

SEQ ID NO: 34984 - DNA, 13 bp, Artificial Sequence
  Oligonucleotide for detection of SNP TSC0011110
caacacgccctat

SEQ ID NO: 34985 - DNA, 13 bp, Artificial Sequence
  Oligonucleotide for detection of SNP TSC0011110
atagggtgtgtcg

SEQ ID NO: 34986 - DNA, 13 bp, Artificial Sequence
  Oligonucleotide for detection of SNP TSC0011110
cgacacaccctat

SEQ ID NO: 34987 - DNA, 13 bp, Artificial Sequence
  Oligonucleotide for detection of SNP TSC0011110
atagggcgtgtcg

SEQ ID NO: 34988 - DNA, 13 bp, Artificial Sequence
  Oligonucleotide for detection of SNP TSC0011110
cgacacgccctat

SEQ ID NO: 34989 - DNA, 13 bp, Artificial Sequence
  Oligonucleotide for detection of SNP TSC0011110
tggtatgttttat

SEQ ID NO: 34990 - DNA, 13 bp, Artificial Sequence
  Oligonucleotide for detection of SNP TSC0011110
ataaaacatacca

SEQ ID NO: 34991 - DNA, 13 bp, Artificial Sequence
  Oligonucleotide for detection of SNP TSC0011110
tggtatattttat

SEQ ID NO: 34992 - DNA, 13 bp, Artificial Sequence
  Oligonucleotide for detection of SNP TSC0011110
ataaaatatacca

SEQ ID NO: 34993 - DNA, 13 bp, Artificial Sequence
  Oligonucleotide for detection of SNP TSC0011110
cggtatgttttat

SEQ ID NO: 34994 - DNA, 13 bp, Artificial Sequence
  Oligonucleotide for detection of SNP TSC0011110
ataaaacataccg

SEQ ID NO: 34995 - DNA, 13 bp, Artificial Sequence
  Oligonucleotide for detection of SNP TSC0011110
cggtatattttat

SEQ ID NO: 34996 - DNA, 13 bp, Artificial Sequence
  Oligonucleotide for detection of SNP TSC0011110
ataaaatataccg

SEQ ID NO: 34997 - DNA, 13 bp, Artificial Sequence
  Oligonucleotide for detection of SNP TSC0011110
tggtacgttttat

SEQ ID NO: 34998 - DNA, 13 bp, Artificial Sequence
  Oligonucleotide for detection of SNP TSC0011110
ataaaacgtacca

SEQ ID NO: 34999 - DNA, 13 bp, Artificial Sequence
  Oligonucleotide for detection of SNP TSC0011110
cggtacgttttat

SEQ ID NO: 35000 - DNA, 13 bp, Artificial Sequence
  Oligonucleotide for detection of SNP TSC0011110
ataaaacgtaccg

SEQ ID NO: 35001 - DNA, 13 bp, Artificial Sequence
  Oligonucleotide for detection of SNP TSC0011111
tgtttagtagata

SEQ ID NO: 35002 - DNA, 13 bp, Artificial Sequence
  Oligonucleotide for detection of SNP TSC0011111
tatctactaaaca

SEQ ID NO: 35003 - DNA, 13 bp, Artificial Sequence
  Oligonucleotide for detection of SNP TSC0011111
tgtttaatagata

SEQ ID NO: 35004 - DNA, 13 bp, Artificial Sequence
  Oligonucleotide for detection of SNP TSC0011111
tatctattaaaca

SEQ ID NO: 35005 - DNA, 13 bp, Artificial Sequence
  Oligonucleotide for detection of SNP TSC0011114
gaaagaataaatt

SEQ ID NO: 35006 - DNA, 13 bp, Artificial Sequence
  Oligonucleotide for detection of SNP TSC0011114
aatttattctttc

SEQ ID NO: 35007 - DNA, 13 bp, Artificial Sequence
  Oligonucleotide for detection of SNP TSC0011114
gaaagattaaatt

SEQ ID NO: 35008 - DNA, 13 bp, Artificial Sequence
  Oligonucleotide for detection of SNP TSC0011114
aatttaatctttc

SEQ ID NO: 35009 - DNA, 13 bp, Artificial Sequence
  Oligonucleotide for detection of SNP TSC0011114
aatttgtttttty

SEQ ID NO: 35010 - DNA, 13 bp, Artificial Sequence
  Oligonucleotide for detection of SNP TSC0011114
raaaaaacaaatt

SEQ ID NO: 35011 - DNA, 13 bp, Artificial Sequence
  Oligonucleotide for detection of SNP TSC0011114
aatttggttttty

SEQ ID NO: 35012 - DNA, 13 bp, Artificial Sequence
  Oligonucleotide for detection of SNP TSC0011114
raaaaaccaaatt

SEQ ID NO: 35013 - DNA, 13 bp, Artificial Sequence
  Oligonucleotide for detection of SNP TSC0011117
tttgggaaggatg

SEQ ID NO: 35014 - DNA, 13 bp, Artificial Sequence
  Oligonucleotide for detection of SNP TSC0011117
catccttcccaaa

SEQ ID NO: 35015 - DNA, 13 bp, Artificial Sequence
  Oligonucleotide for detection of SNP TSC0011117
tttggggaggatg

SEQ ID NO: 35016 - DNA, 13 bp, Artificial Sequence
  Oligonucleotide for detection of SNP TSC0011117
catcctccccaaa

SEQ ID NO: 35017 - DNA, 13 bp, Artificial Sequence
  Oligonucleotide for detection of SNP TSC0011120
gtatttgtgatty

SEQ ID NO: 35018 - DNA, 13 bp, Artificial Sequence
  Oligonucleotide for detection of SNP TSC0011120
raatcacaaatac

SEQ ID NO: 35019 - DNA, 13 bp, Artificial Sequence
  Oligonucleotide for detection of SNP TSC0011120
gtatttatgatty

SEQ ID NO: 35020 - DNA, 13 bp, Artificial Sequence
  Oligonucleotide for detection of SNP TSC0011120
raatcataaatac

SEQ ID NO: 35021 - DNA, 13 bp, Artificial Sequence
  Oligonucleotide for detection of SNP TSC0011121
tgtagatgtttta

SEQ ID NO: 35022 - DNA, 13 bp, Artificial Sequence
  Oligonucleotide for detection of SNP TSC0011121
taaaacatctaca

SEQ ID NO: 35023 - DNA, 13 bp, Artificial Sequence
  Oligonucleotide for detection of SNP TSC0011121
tgtagacgtttta

SEQ ID NO: 35024 - DNA, 13 bp, Artificial Sequence
  Oligonucleotide for detection of SNP TSC0011121
taaaacgtctaca

SEQ ID NO: 35025 - DNA, 13 bp, Artificial Sequence
  Oligonucleotide for detection of SNP TSC0011121
tgaggtgtttata

SEQ ID NO: 35026 - DNA, 13 bp, Artificial Sequence
  Oligonucleotide for detection of SNP TSC0011121
tataaacacctca

SEQ ID NO: 35027 - DNA, 13 bp, Artificial Sequence
  Oligonucleotide for detection of SNP TSC0011121
tgaggtatttata

SEQ ID NO: 35028 - DNA, 13 bp, Artificial Sequence
  Oligonucleotide for detection of SNP TSC0011121
tataaatacctca

SEQ ID NO: 35029 - DNA, 13 bp, Artificial Sequence
  Oligonucleotide for detection of SNP TSC0011121
tgaggcgtttata

SEQ ID NO: 35030 - DNA, 13 bp, Artificial Sequence
  Oligonucleotide for detection of SNP TSC0011121
tataaacgcctca

SEQ ID NO: 35031 - DNA, 13 bp, Artificial Sequence
  Oligonucleotide for detection of SNP TSC0011122
ataaaaatggata

SEQ ID NO: 35032 - DNA, 13 bp, Artificial Sequence
  Oligonucleotide for detection of SNP TSC0011122
tatccatttttat

SEQ ID NO: 35033 - DNA, 13 bp, Artificial Sequence
  Oligonucleotide for detection of SNP TSC0011122
ataaaagtggata

SEQ ID NO: 35034 - DNA, 13 bp, Artificial Sequence
  Oligonucleotide for detection of SNP TSC0011122
tatccacttttat

SEQ ID NO: 35035 - DNA, 13 bp, Artificial Sequence
  Oligonucleotide for detection of SNP TSC0011123
tttttagttgttt

SEQ ID NO: 35036 - DNA, 13 bp, Artificial Sequence
  Oligonucleotide for detection of SNP TSC0011123
aaacaactaaaaa

SEQ ID NO: 35037 - DNA, 13 bp, Artificial Sequence
  Oligonucleotide for detection of SNP TSC0011123
tttttaattgttt

SEQ ID NO: 35038 - DNA, 13 bp, Artificial Sequence
  Oligonucleotide for detection of SNP TSC0011123
aaacaattaaaaa

SEQ ID NO: 35039 - DNA, 13 bp, Artificial Sequence
  Oligonucleotide for detection of SNP TSC0011124
aatttagttattg

SEQ ID NO: 35040 - DNA, 13 bp, Artificial Sequence
  Oligonucleotide for detection of SNP TSC0011124
caataactaaatt

SEQ ID NO: 35041 - DNA, 13 bp, Artificial Sequence
  Oligonucleotide for detection of SNP TSC0011124
aatttaattattg

SEQ ID NO: 35042 - DNA, 13 bp, Artificial Sequence
  Oligonucleotide for detection of SNP TSC0011124
caataattaaatt

SEQ ID NO: 35043 - DNA, 13 bp, Artificial Sequence
  Oligonucleotide for detection of SNP TSC0011128
tggattagtaaag

SEQ ID NO: 35044 - DNA, 13 bp, Artificial Sequence
  Oligonucleotide for detection of SNP TSC0011128
ctttactaatcca

SEQ ID NO: 35045 - DNA, 13 bp, Artificial Sequence
  Oligonucleotide for detection of SNP TSC0011128
tggattggtaaag

SEQ ID NO: 35046 - DNA, 13 bp, Artificial Sequence
  Oligonucleotide for detection of SNP TSC0011128
ctttaccaatcca

SEQ ID NO: 35047 - DNA, 13 bp, Artificial Sequence
  Oligonucleotide for detection of SNP TSC0011129
tataaaatagaaa

SEQ ID NO: 35048 - DNA, 13 bp, Artificial Sequence
  Oligonucleotide for detection of SNP TSC0011129
tttctattttata

SEQ ID NO: 35049 - DNA, 13 bp, Artificial Sequence
  Oligonucleotide for detection of SNP TSC0011129
tataaagtagaaa

SEQ ID NO: 35050 - DNA, 13 bp, Artificial Sequence
  Oligonucleotide for detection of SNP TSC0011129
tttctactttata

SEQ ID NO: 35051 - DNA, 13 bp, Artificial Sequence
  Oligonucleotide for detection of SNP TSC0011130
tgttatgataatt

SEQ ID NO: 35052 - DNA, 13 bp, Artificial Sequence
  Oligonucleotide for detection of SNP TSC0011130
aattatcataaca

SEQ ID NO: 35053 - DNA, 13 bp, Artificial Sequence
  Oligonucleotide for detection of SNP TSC0011130
tgttataataatt

SEQ ID NO: 35054 - DNA, 13 bp, Artificial Sequence
  Oligonucleotide for detection of SNP TSC0011130
aattattataaca

SEQ ID NO: 35055 - DNA, 13 bp, Artificial Sequence
  Oligonucleotide for detection of SNP TSC0011131
ggttttattatty

SEQ ID NO: 35056 - DNA, 13 bp, Artificial Sequence
  Oligonucleotide for detection of SNP TSC0011131
raataataaaacc

SEQ ID NO: 35057 - DNA, 13 bp, Artificial Sequence
  Oligonucleotide for detection of SNP TSC0011131
ggttttgttatty

SEQ ID NO: 35058 - DNA, 13 bp, Artificial Sequence
  Oligonucleotide for detection of SNP TSC0011131
raataacaaaacc

SEQ ID NO: 35059 - DNA, 13 bp, Artificial Sequence
  Oligonucleotide for detection of SNP TSC0011131
ggtttcgttatty

SEQ ID NO: 35060 - DNA, 13 bp, Artificial Sequence
  Oligonucleotide for detection of SNP TSC0011131
raataacgaaacc

SEQ ID NO: 35061 - DNA, 13 bp, Artificial Sequence
  Oligonucleotide for detection of SNP TSC0011131
gggtgatggagty

SEQ ID NO: 35062 - DNA, 13 bp, Artificial Sequence
  Oligonucleotide for detection of SNP TSC0011131
ractccatcaccc

SEQ ID NO: 35063 - DNA, 13 bp, Artificial Sequence
  Oligonucleotide for detection of SNP TSC0011131
gggtgacggagty

SEQ ID NO: 35064 - DNA, 13 bp, Artificial Sequence
  Oligonucleotide for detection of SNP TSC0011131
ractccgtcaccc

SEQ ID NO: 35065 - DNA, 13 bp, Artificial Sequence
  Oligonucleotide for detection of SNP TSC0011132
gtggggtgtagty

SEQ ID NO: 35066 - DNA, 13 bp, Artificial Sequence
  Oligonucleotide for detection of SNP TSC0011132
ractacaccccac

SEQ ID NO: 35067 - DNA, 13 bp, Artificial Sequence
  Oligonucleotide for detection of SNP TSC0011132
gtggggcgtagty

SEQ ID NO: 35068 - DNA, 13 bp, Artificial Sequence
  Oligonucleotide for detection of SNP TSC0011132
ractacgccccac

SEQ ID NO: 35069 - DNA, 13 bp, Artificial Sequence
  Oligonucleotide for detection of SNP TSC0011132
ggttgtgttttay

SEQ ID NO: 35070 - DNA, 13 bp, Artificial Sequence
  Oligonucleotide for detection of SNP TSC0011132
rtaaaacacaacc

SEQ ID NO: 35071 - DNA, 13 bp, Artificial Sequence
  Oligonucleotide for detection of SNP TSC0011132
ggttgtattttay

SEQ ID NO: 35072 - DNA, 13 bp, Artificial Sequence
  Oligonucleotide for detection of SNP TSC0011132
rtaaaatacaacc

SEQ ID NO: 35073 - DNA, 13 bp, Artificial Sequence
  Oligonucleotide for detection of SNP TSC0011132
ggttgcgttttay

SEQ ID NO: 35074 - DNA, 13 bp, Artificial Sequence
  Oligonucleotide for detection of SNP TSC0011132
rtaaaacgcaacc

SEQ ID NO: 35075 - DNA, 13 bp, Artificial Sequence
  Oligonucleotide for detection of SNP TSC0011137
ttatttgagttat

SEQ ID NO: 35076 - DNA, 13 bp, Artificial Sequence
  Oligonucleotide for detection of SNP TSC0011137
ataactcaaataa

SEQ ID NO: 35077 - DNA, 13 bp, Artificial Sequence
  Oligonucleotide for detection of SNP TSC0011137
ttatttaagttat

SEQ ID NO: 35078 - DNA, 13 bp, Artificial Sequence
  Oligonucleotide for detection of SNP TSC0011137
ataacttaaataa

SEQ ID NO: 35079 - DNA, 13 bp, Artificial Sequence
  Oligonucleotide for detection of SNP TSC0011139
atatatattatta

SEQ ID NO: 35080 - DNA, 13 bp, Artificial Sequence
  Oligonucleotide for detection of SNP TSC0011139
taataatatatat

SEQ ID NO: 35081 - DNA, 13 bp, Artificial Sequence
  Oligonucleotide for detection of SNP TSC0011139
atatattttatta

SEQ ID NO: 35082 - DNA, 13 bp, Artificial Sequence
  Oligonucleotide for detection of SNP TSC0011139
taataaaatatat

SEQ ID NO: 35083 - DNA, 13 bp, Artificial Sequence
  Oligonucleotide for detection of SNP TSC0011139
tggtggtgtgtgt

SEQ ID NO: 35084 - DNA, 13 bp, Artificial Sequence
  Oligonucleotide for detection of SNP TSC0011139
acacacaccacca

SEQ ID NO: 35085 - DNA, 13 bp, Artificial Sequence
  Oligonucleotide for detection of SNP TSC0011139
tggtggagtgtgt

SEQ ID NO: 35086 - DNA, 13 bp, Artificial Sequence
  Oligonucleotide for detection of SNP TSC0011139
acacactccacca

SEQ ID NO: 35087 - DNA, 13 bp, Artificial Sequence
  Oligonucleotide for detection of SNP TSC0011140
atggtggtgtgtg

SEQ ID NO: 35088 - DNA, 13 bp, Artificial Sequence
  Oligonucleotide for detection of SNP TSC0011140
cacacaccaccat

SEQ ID NO: 35089 - DNA, 13 bp, Artificial Sequence
  Oligonucleotide for detection of SNP TSC0011140
atggtgatgtgtg

SEQ ID NO: 35090 - DNA, 13 bp, Artificial Sequence
  Oligonucleotide for detection of SNP TSC0011140
cacacatcaccat

SEQ ID NO: 35091 - DNA, 13 bp, Artificial Sequence
  Oligonucleotide for detection of SNP TSC0011141
ttttttagtttat

SEQ ID NO: 35092 - DNA, 13 bp, Artificial Sequence
  Oligonucleotide for detection of SNP TSC0011141
ataaactaaaaaa

SEQ ID NO: 35093 - DNA, 13 bp, Artificial Sequence
  Oligonucleotide for detection of SNP TSC0011141
ataaattaaaaaa

SEQ ID NO: 35094 - DNA, 13 bp, Artificial Sequence
  Oligonucleotide for detection of SNP TSC0011141
ttttttaatttat

SEQ ID NO: 35095 - DNA, 13 bp, Artificial Sequence
  Oligonucleotide for detection of SNP TSC0011141
ataaataaaaaaa

SEQ ID NO: 35096 - DNA, 13 bp, Artificial Sequence
  Oligonucleotide for detection of SNP TSC0011141
tttttttatttat

SEQ ID NO: 35097 - DNA, 13 bp, Artificial Sequence
  Oligonucleotide for detection of SNP TSC0011142
ggtggtattggtg

SEQ ID NO: 35098 - DNA, 13 bp, Artificial Sequence
  Oligonucleotide for detection of SNP TSC0011142
caccaataccacc

SEQ ID NO: 35099 - DNA, 13 bp, Artificial Sequence
  Oligonucleotide for detection of SNP TSC0011142
ggtggtgttggtg

SEQ ID NO: 35100 - DNA, 13 bp, Artificial Sequence
  Oligonucleotide for detection of SNP TSC0011142
caccaacaccacc

SEQ ID NO: 35101 - DNA, 13 bp, Artificial Sequence
  Oligonucleotide for detection of SNP TSC0011142
ggtggcgttggtg

SEQ ID NO: 35102 - DNA, 13 bp, Artificial Sequence
  Oligonucleotide for detection of SNP TSC0011142
caccaacgccacc

SEQ ID NO: 35103 - DNA, 13 bp, Artificial Sequence
  Oligonucleotide for detection of SNP TSC0011142
tattagtgttaty

SEQ ID NO: 35104 - DNA, 13 bp, Artificial Sequence
  Oligonucleotide for detection of SNP TSC0011142
rataacactaata

SEQ ID NO: 35105 - DNA, 13 bp, Artificial Sequence
  Oligonucleotide for detection of SNP TSC0011142
tattagcgttaty

SEQ ID NO: 35106 - DNA, 13 bp, Artificial Sequence
  Oligonucleotide for detection of SNP TSC0011142
rataacgctaata

SEQ ID NO: 35107 - DNA, 13 bp, Artificial Sequence
  Oligonucleotide for detection of SNP TSC0011143
tataatatatttg

SEQ ID NO: 35108 - DNA, 13 bp, Artificial Sequence
  Oligonucleotide for detection of SNP TSC0011143
caaatatattata

SEQ ID NO: 35109 - DNA, 13 bp, Artificial Sequence
  Oligonucleotide for detection of SNP TSC0011143
tataatgtatttg

SEQ ID NO: 35110 - DNA, 13 bp, Artificial Sequence
  Oligonucleotide for detection of SNP TSC0011143
caaatacattata

SEQ ID NO: 35111 - DNA, 13 bp, Artificial Sequence
  Oligonucleotide for detection of SNP TSC0011143
tataacgtatttg

SEQ ID NO: 35112 - DNA, 13 bp, Artificial Sequence
  Oligonucleotide for detection of SNP TSC0011143
caaatacgttata

SEQ ID NO: 35113 - DNA, 13 bp, Artificial Sequence
  Oligonucleotide for detection of SNP TSC0011143
taggtatgttata

SEQ ID NO: 35114 - DNA, 13 bp, Artificial Sequence
  Oligonucleotide for detection of SNP TSC0011143
tataacataccta

SEQ ID NO: 35115 - DNA, 13 bp, Artificial Sequence
  Oligonucleotide for detection of SNP TSC0011143
taggtacgttata

SEQ ID NO: 35116 - DNA, 13 bp, Artificial Sequence
  Oligonucleotide for detection of SNP TSC0011143
tataacgtaccta

SEQ ID NO: 35117 - DNA, 13 bp, Artificial Sequence
  Oligonucleotide for detection of SNP TSC0011144
attaagataagtt

SEQ ID NO: 35118 - DNA, 13 bp, Artificial Sequence
  Oligonucleotide for detection of SNP TSC0011144
aacttatcttaat

SEQ ID NO: 35119 - DNA, 13 bp, Artificial Sequence
  Oligonucleotide for detection of SNP TSC0011144
attaaggtaagtt

SEQ ID NO: 35120 - DNA, 13 bp, Artificial Sequence
  Oligonucleotide for detection of SNP TSC0011144
aacttaccttaat

SEQ ID NO: 35121 - DNA, 13 bp, Artificial Sequence
  Oligonucleotide for detection of SNP TSC0011145
ataaaggttggtt

SEQ ID NO: 35122 - DNA, 13 bp, Artificial Sequence
  Oligonucleotide for detection of SNP TSC0011145
aaccaacctttat

SEQ ID NO: 35123 - DNA, 13 bp, Artificial Sequence
  Oligonucleotide for detection of SNP TSC0011145
ataaagattggtt

SEQ ID NO: 35124 - DNA, 13 bp, Artificial Sequence
  Oligonucleotide for detection of SNP TSC0011145
aaccaatctttat

SEQ ID NO: 35125 - DNA, 13 bp, Artificial Sequence
  Oligonucleotide for detection of SNP TSC0011146
tttattagaagag

SEQ ID NO: 35126 - DNA, 13 bp, Artificial Sequence
  Oligonucleotide for detection of SNP TSC0011146
ctcttctaataaa

SEQ ID NO: 35127 - DNA, 13 bp, Artificial Sequence
  Oligonucleotide for detection of SNP TSC0011146
tttattggaagag

SEQ ID NO: 35128 - DNA, 13 bp, Artificial Sequence
  Oligonucleotide for detection of SNP TSC0011146
ctcttccaataaa

SEQ ID NO: 35129 - DNA, 13 bp, Artificial Sequence
  Oligonucleotide for detection of SNP TSC0011146
tttatcggaagag

SEQ ID NO: 35130 - DNA, 13 bp, Artificial Sequence
  Oligonucleotide for detection of SNP TSC0011146
ctcttccgataaa

SEQ ID NO: 35131 - DNA, 13 bp, Artificial Sequence
  Oligonucleotide for detection of SNP TSC0011146
tttttttggtaag

SEQ ID NO: 35132 - DNA, 13 bp, Artificial Sequence
  Oligonucleotide for detection of SNP TSC0011146
cttaccaaaaaaa

SEQ ID NO: 35133 - DNA, 13 bp, Artificial Sequence
  Oligonucleotide for detection of SNP TSC0011146
ttttttcggtaag

SEQ ID NO: 35134 - DNA, 13 bp, Artificial Sequence
  Oligonucleotide for detection of SNP TSC0011146
cttaccgaaaaaa

SEQ ID NO: 35135 - DNA, 13 bp, Artificial Sequence
  Oligonucleotide for detection of SNP TSC0011147
attatttttattt

SEQ ID NO: 35136 - DNA, 13 bp, Artificial Sequence
  Oligonucleotide for detection of SNP TSC0011147
aaataaaaataat

SEQ ID NO: 35137 - DNA, 13 bp, Artificial Sequence
  Oligonucleotide for detection of SNP TSC0011148
ttgaatgggaatt

SEQ ID NO: 35138 - DNA, 13 bp, Artificial Sequence
  Oligonucleotide for detection of SNP TSC0011148
aattcccattcaa

SEQ ID NO: 35139 - DNA, 13 bp, Artificial Sequence
  Oligonucleotide for detection of SNP TSC0011148
ttgaataggaatt

SEQ ID NO: 35140 - DNA, 13 bp, Artificial Sequence
  Oligonucleotide for detection of SNP TSC0011148
aattcctattcaa

SEQ ID NO: 35141 - DNA, 13 bp, Artificial Sequence
  Oligonucleotide for detection of SNP TSC0011153
atatagatattat

SEQ ID NO: 35142 - DNA, 13 bp, Artificial Sequence
  Oligonucleotide for detection of SNP TSC0011153
ataatatctatat

SEQ ID NO: 35143 - DNA, 13 bp, Artificial Sequence
  Oligonucleotide for detection of SNP TSC0011153
atataggtattat

SEQ ID NO: 35144 - DNA, 13 bp, Artificial Sequence
  Oligonucleotide for detection of SNP TSC0011153
ataatacctatat

SEQ ID NO: 35145 - DNA, 13 bp, Artificial Sequence
  Oligonucleotide for detection of SNP TSC0011154
aatttaatggttg

SEQ ID NO: 35146 - DNA, 13 bp, Artificial Sequence
  Oligonucleotide for detection of SNP TSC0011154
caaccattaaatt

SEQ ID NO: 35147 - DNA, 13 bp, Artificial Sequence
  Oligonucleotide for detection of SNP TSC0011154
aatttagtggttg

SEQ ID NO: 35148 - DNA, 13 bp, Artificial Sequence
  Oligonucleotide for detection of SNP TSC0011154
caaccactaaatt

SEQ ID NO: 35149 - DNA, 13 bp, Artificial Sequence
  Oligonucleotide for detection of SNP TSC0011155
atatattatttaa

SEQ ID NO: 35150 - DNA, 13 bp, Artificial Sequence
  Oligonucleotide for detection of SNP TSC0011155
ttaaataatatat

SEQ ID NO: 35151 - DNA, 13 bp, Artificial Sequence
  Oligonucleotide for detection of SNP TSC0011155
ttgaattgtatgt

SEQ ID NO: 35152 - DNA, 13 bp, Artificial Sequence
  Oligonucleotide for detection of SNP TSC0011155
acatacaattcaa

SEQ ID NO: 35153 - DNA, 13 bp, Artificial Sequence
  Oligonucleotide for detection of SNP TSC0011155
ttgaatggtatgt

SEQ ID NO: 35154 - DNA, 13 bp, Artificial Sequence
  Oligonucleotide for detection of SNP TSC0011155
acataccattcaa

SEQ ID NO: 35155 - DNA, 13 bp, Artificial Sequence
  Oligonucleotide for detection of SNP TSC0011156
atatgtgtttagt

SEQ ID NO: 35156 - DNA, 13 bp, Artificial Sequence
  Oligonucleotide for detection of SNP TSC0011156
actaaacacatat

SEQ ID NO: 35157 - DNA, 13 bp, Artificial Sequence
  Oligonucleotide for detection of SNP TSC0011156
atatgtatttagt

SEQ ID NO: 35158 - DNA, 13 bp, Artificial Sequence
  Oligonucleotide for detection of SNP TSC0011156
actaaatacatat

SEQ ID NO: 35159 - DNA, 13 bp, Artificial Sequence
  Oligonucleotide for detection of SNP TSC0011156
atacgtgtttagt

SEQ ID NO: 35160 - DNA, 13 bp, Artificial Sequence
  Oligonucleotide for detection of SNP TSC0011156
actaaacacgtat

SEQ ID NO: 35161 - DNA, 13 bp, Artificial Sequence
  Oligonucleotide for detection of SNP TSC0011156
atacgtatttagt

SEQ ID NO: 35162 - DNA, 13 bp, Artificial Sequence
  Oligonucleotide for detection of SNP TSC0011156
actaaatacgtat

SEQ ID NO: 35163 - DNA, 13 bp, Artificial Sequence
  Oligonucleotide for detection of SNP TSC0011157
tatgaggttttta

SEQ ID NO: 35164 - DNA, 13 bp, Artificial Sequence
  Oligonucleotide for detection of SNP TSC0011157
taaaaacctcata

SEQ ID NO: 35165 - DNA, 13 bp, Artificial Sequence
  Oligonucleotide for detection of SNP TSC0011157
tatgagtttttta

SEQ ID NO: 35166 - DNA, 13 bp, Artificial Sequence
  Oligonucleotide for detection of SNP TSC0011157
taaaaaactcata

SEQ ID NO: 35167 - DNA, 13 bp, Artificial Sequence
  Oligonucleotide for detection of SNP TSC0011157
taaagattttata

SEQ ID NO: 35168 - DNA, 13 bp, Artificial Sequence
  Oligonucleotide for detection of SNP TSC0011157
tataaaatcttta

SEQ ID NO: 35169 - DNA, 13 bp, Artificial Sequence
  Oligonucleotide for detection of SNP TSC0011157
taaagaatttata

SEQ ID NO: 35170 - DNA, 13 bp, Artificial Sequence
  Oligonucleotide for detection of SNP TSC0011157
tataaattcttta

SEQ ID NO: 35171 - DNA, 13 bp, Artificial Sequence
  Oligonucleotide for detection of SNP TSC0011158
gtgtttttttaaa

SEQ ID NO: 35172 - DNA, 13 bp, Artificial Sequence
  Oligonucleotide for detection of SNP TSC0011158
tttaaaaaaacac

SEQ ID NO: 35173 - DNA, 13 bp, Artificial Sequence
  Oligonucleotide for detection of SNP TSC0011158
gtgtttgtttaaa

SEQ ID NO: 35174 - DNA, 13 bp, Artificial Sequence
  Oligonucleotide for detection of SNP TSC0011158
tttaaacaaacac

SEQ ID NO: 35175 - DNA, 13 bp, Artificial Sequence
  Oligonucleotide for detection of SNP TSC0011158
tttgaagagatay

SEQ ID NO: 35176 - DNA, 13 bp, Artificial Sequence
  Oligonucleotide for detection of SNP TSC0011158
rtatctcttcaaa

SEQ ID NO: 35177 - DNA, 13 bp, Artificial Sequence
  Oligonucleotide for detection of SNP TSC0011158
tttgaatagatay

SEQ ID NO: 35178 - DNA, 13 bp, Artificial Sequence
  Oligonucleotide for detection of SNP TSC0011158
rtatctattcaaa

SEQ ID NO: 35179 - DNA, 13 bp, Artificial Sequence
  Oligonucleotide for detection of SNP TSC0011159
tattatagatttt

SEQ ID NO: 35180 - DNA, 13 bp, Artificial Sequence
  Oligonucleotide for detection of SNP TSC0011159
aaaatctataata

SEQ ID NO: 35181 - DNA, 13 bp, Artificial Sequence
  Oligonucleotide for detection of SNP TSC0011159
tattatggatttt

SEQ ID NO: 35182 - DNA, 13 bp, Artificial Sequence
  Oligonucleotide for detection of SNP TSC0011159
aaaatccataata

SEQ ID NO: 35183 - DNA, 13 bp, Artificial Sequence
  Oligonucleotide for detection of SNP TSC0011159
tattacggatttt

SEQ ID NO: 35184 - DNA, 13 bp, Artificial Sequence
  Oligonucleotide for detection of SNP TSC0011159
aaaatccgtaata

SEQ ID NO: 35185 - DNA, 13 bp, Artificial Sequence
  Oligonucleotide for detection of SNP TSC0011159
agagtttgtgatg

SEQ ID NO: 35186 - DNA, 13 bp, Artificial Sequence
  Oligonucleotide for detection of SNP TSC0011159
catcacaaactct

SEQ ID NO: 35187 - DNA, 13 bp, Artificial Sequence
  Oligonucleotide for detection of SNP TSC0011159
agagttcgtgatg

SEQ ID NO: 35188 - DNA, 13 bp, Artificial Sequence
  Oligonucleotide for detection of SNP TSC0011159
catcacgaactct

SEQ ID NO: 35189 - DNA, 13 bp, Artificial Sequence
  Oligonucleotide for detection of SNP TSC0011160
ttttgttttttag

SEQ ID NO: 35190 - DNA, 13 bp, Artificial Sequence
  Oligonucleotide for detection of SNP TSC0011160
ctaaaaaacaaaa

SEQ ID NO: 35191 - DNA, 13 bp, Artificial Sequence
  Oligonucleotide for detection of SNP TSC0011160
ttgggggataaga

SEQ ID NO: 35192 - DNA, 13 bp, Artificial Sequence
  Oligonucleotide for detection of SNP TSC0011160
tcttatcccccaa

SEQ ID NO: 35193 - DNA, 13 bp, Artificial Sequence
  Oligonucleotide for detection of SNP TSC0011160
ttggggtataaga

SEQ ID NO: 35194 - DNA, 13 bp, Artificial Sequence
  Oligonucleotide for detection of SNP TSC0011160
tcttataccccaa

SEQ ID NO: 35195 - DNA, 13 bp, Artificial Sequence
  Oligonucleotide for detection of SNP TSC0011162
tatgtgtggatty

SEQ ID NO: 35196 - DNA, 13 bp, Artificial Sequence
  Oligonucleotide for detection of SNP TSC0011162
raatccacacata

SEQ ID NO: 35197 - DNA, 13 bp, Artificial Sequence
  Oligonucleotide for detection of SNP TSC0011162
tacgtgtggatty

SEQ ID NO: 35198 - DNA, 13 bp, Artificial Sequence
  Oligonucleotide for detection of SNP TSC0011162
raatccacacgta

SEQ ID NO: 35199 - DNA, 13 bp, Artificial Sequence
  Oligonucleotide for detection of SNP TSC0011162
tatgtgcggatty

SEQ ID NO: 35200 - DNA, 13 bp, Artificial Sequence
  Oligonucleotide for detection of SNP TSC0011162
raatccgcacata

SEQ ID NO: 35201 - DNA, 13 bp, Artificial Sequence
  Oligonucleotide for detection of SNP TSC0011162
tacgtgcggatty

SEQ ID NO: 35202 - DNA, 13 bp, Artificial Sequence
  Oligonucleotide for detection of SNP TSC0011162
raatccgcacgta

SEQ ID NO: 35203 - DNA, 13 bp, Artificial Sequence
  Oligonucleotide for detection of SNP TSC0011162
gagtttgtatgtg

SEQ ID NO: 35204 - DNA, 13 bp, Artificial Sequence
  Oligonucleotide for detection of SNP TSC0011162
cacatacaaactc

SEQ ID NO: 35205 - DNA, 13 bp, Artificial Sequence
  Oligonucleotide for detection of SNP TSC0011162
gagtttatatgtg

SEQ ID NO: 35206 - DNA, 13 bp, Artificial Sequence
  Oligonucleotide for detection of SNP TSC0011162
cacatataaactc

SEQ ID NO: 35207 - DNA, 13 bp, Artificial Sequence
  Oligonucleotide for detection of SNP TSC0011162
gagttcgtatgtg

SEQ ID NO: 35208 - DNA, 13 bp, Artificial Sequence
  Oligonucleotide for detection of SNP TSC0011162
cacatacgaactc

SEQ ID NO: 35209 - DNA, 13 bp, Artificial Sequence
  Oligonucleotide for detection of SNP TSC0011162
gagtttatacgtg

SEQ ID NO: 35210 - DNA, 13 bp, Artificial Sequence
  Oligonucleotide for detection of SNP TSC0011162
cacgtataaactc

SEQ ID NO: 35211 - DNA, 13 bp, Artificial Sequence
  Oligonucleotide for detection of SNP TSC0011162
gagtttgtacgtg

SEQ ID NO: 35212 - DNA, 13 bp, Artificial Sequence
  Oligonucleotide for detection of SNP TSC0011162
cacgtacaaactc

SEQ ID NO: 35213 - DNA, 13 bp, Artificial Sequence
  Oligonucleotide for detection of SNP TSC0011162
gagttcgtacgtg

SEQ ID NO: 35214 - DNA, 13 bp, Artificial Sequence
  Oligonucleotide for detection of SNP TSC0011162
cacgtacgaactc

SEQ ID NO: 35215 - DNA, 13 bp, Artificial Sequence
  Oligonucleotide for detection of SNP TSC0011163
tagggtgtatgta

SEQ ID NO: 35216 - DNA, 13 bp, Artificial Sequence
  Oligonucleotide for detection of SNP TSC0011163
tacatacacccta

SEQ ID NO: 35217 - DNA, 13 bp, Artificial Sequence
  Oligonucleotide for detection of SNP TSC0011163
tagggtatatgta

SEQ ID NO: 35218 - DNA, 13 bp, Artificial Sequence
  Oligonucleotide for detection of SNP TSC0011163
tacatatacccta

SEQ ID NO: 35219 - DNA, 13 bp, Artificial Sequence
  Oligonucleotide for detection of SNP TSC0011164
tattatgttaatt

SEQ ID NO: 35220 - DNA, 13 bp, Artificial Sequence
  Oligonucleotide for detection of SNP TSC0011164
aattaacataata

SEQ ID NO: 35221 - DNA, 13 bp, Artificial Sequence
  Oligonucleotide for detection of SNP TSC0011164
tattatattaatt

SEQ ID NO: 35222 - DNA, 13 bp, Artificial Sequence
  Oligonucleotide for detection of SNP TSC0011164
aattaatataata

SEQ ID NO: 35223 - DNA, 13 bp, Artificial Sequence
  Oligonucleotide for detection of SNP TSC0011165
agttaatgtatty

SEQ ID NO: 35224 - DNA, 13 bp, Artificial Sequence
  Oligonucleotide for detection of SNP TSC0011165
raatacattaact

SEQ ID NO: 35225 - DNA, 13 bp, Artificial Sequence
  Oligonucleotide for detection of SNP TSC0011165
agttaacgtatty

SEQ ID NO: 35226 - DNA, 13 bp, Artificial Sequence
  Oligonucleotide for detection of SNP TSC0011165
raatacgttaact

SEQ ID NO: 35227 - DNA, 13 bp, Artificial Sequence
  Oligonucleotide for detection of SNP TSC0011165
gggtatgttggtt

SEQ ID NO: 35228 - DNA, 13 bp, Artificial Sequence
  Oligonucleotide for detection of SNP TSC0011165
aaccaacataccc

SEQ ID NO: 35229 - DNA, 13 bp, Artificial Sequence
  Oligonucleotide for detection of SNP TSC0011165
gggtatattggtt

SEQ ID NO: 35230 - DNA, 13 bp, Artificial Sequence
  Oligonucleotide for detection of SNP TSC0011165
aaccaatataccc

SEQ ID NO: 35231 - DNA, 13 bp, Artificial Sequence
  Oligonucleotide for detection of SNP TSC0011165
gggtacgttggtt

SEQ ID NO: 35232 - DNA, 13 bp, Artificial Sequence
  Oligonucleotide for detection of SNP TSC0011165
aaccaacgtaccc

SEQ ID NO: 35233 - DNA, 13 bp, Artificial Sequence
  Oligonucleotide for detection of SNP TSC0011166
agtttaatttttt

SEQ ID NO: 35234 - DNA, 13 bp, Artificial Sequence
  Oligonucleotide for detection of SNP TSC0011166
aaaaaattaaact

SEQ ID NO: 35235 - DNA, 13 bp, Artificial Sequence
  Oligonucleotide for detection of SNP TSC0011166
agtttagtttttt

SEQ ID NO: 35236 - DNA, 13 bp, Artificial Sequence
  Oligonucleotide for detection of SNP TSC0011166
aaaaaactaaact

SEQ ID NO: 35237 - DNA, 13 bp, Artificial Sequence
  Oligonucleotide for detection of SNP TSC0011169
atgtatagatata

SEQ ID NO: 35238 - DNA, 13 bp, Artificial Sequence
  Oligonucleotide for detection of SNP TSC0011169
tatatctatacat

SEQ ID NO: 35239 - DNA, 13 bp, Artificial Sequence
  Oligonucleotide for detection of SNP TSC0011169
atgtatggatata

SEQ ID NO: 35240 - DNA, 13 bp, Artificial Sequence
  Oligonucleotide for detection of SNP TSC0011169
tatatccatacat

SEQ ID NO: 35241 - DNA, 13 bp, Artificial Sequence
  Oligonucleotide for detection of SNP TSC0011169
atgtacggatata

SEQ ID NO: 35242 - DNA, 13 bp, Artificial Sequence
  Oligonucleotide for detection of SNP TSC0011169
tatatccgtacat

SEQ ID NO: 35243 - DNA, 13 bp, Artificial Sequence
  Oligonucleotide for detection of SNP TSC0011169
tatatttgtatat

SEQ ID NO: 35244 - DNA, 13 bp, Artificial Sequence
  Oligonucleotide for detection of SNP TSC0011169
atatacaaatata

SEQ ID NO: 35245 - DNA, 13 bp, Artificial Sequence
  Oligonucleotide for detection of SNP TSC0011169
tatattcgtatat

SEQ ID NO: 35246 - DNA, 13 bp, Artificial Sequence
  Oligonucleotide for detection of SNP TSC0011169
atatacgaatata

SEQ ID NO: 35247 - DNA, 13 bp, Artificial Sequence
  Oligonucleotide for detection of SNP TSC0011172
ttgttggatgaay

SEQ ID NO: 35248 - DNA, 13 bp, Artificial Sequence
  Oligonucleotide for detection of SNP TSC0011172
rttcatccaacaa

SEQ ID NO: 35249 - DNA, 13 bp, Artificial Sequence
  Oligonucleotide for detection of SNP TSC0011172
ttgttgaatgaay

SEQ ID NO: 35250 - DNA, 13 bp, Artificial Sequence
  Oligonucleotide for detection of SNP TSC0011172
rttcattcaacaa

SEQ ID NO: 35251 - DNA, 13 bp, Artificial Sequence
  Oligonucleotide for detection of SNP TSC0011175
tttatagatttga

SEQ ID NO: 35252 - DNA, 13 bp, Artificial Sequence
  Oligonucleotide for detection of SNP TSC0011175
tcaaatctataaa

SEQ ID NO: 35253 - DNA, 13 bp, Artificial Sequence
  Oligonucleotide for detection of SNP TSC0011175
tttatatatttga

SEQ ID NO: 35254 - DNA, 13 bp, Artificial Sequence
  Oligonucleotide for detection of SNP TSC0011175
tcaaatatataaa

SEQ ID NO: 35255 - DNA, 13 bp, Artificial Sequence
  Oligonucleotide for detection of SNP TSC0011175
ttaaatttgtaga

SEQ ID NO: 35256 - DNA, 13 bp, Artificial Sequence
  Oligonucleotide for detection of SNP TSC0011175
tctacaaatttaa

SEQ ID NO: 35257 - DNA, 13 bp, Artificial Sequence
  Oligonucleotide for detection of SNP TSC0011175
ttaaatatgtaga

SEQ ID NO: 35258 - DNA, 13 bp, Artificial Sequence
  Oligonucleotide for detection of SNP TSC0011175
tctacatatttaa

SEQ ID NO: 35259 - DNA, 13 bp, Artificial Sequence
  Oligonucleotide for detection of SNP TSC0011176
tatggtaagtggg

SEQ ID NO: 35260 - DNA, 13 bp, Artificial Sequence
  Oligonucleotide for detection of SNP TSC0011176
cccacttaccata

SEQ ID NO: 35261 - DNA, 13 bp, Artificial Sequence
  Oligonucleotide for detection of SNP TSC0011176
tatggttagtggg

SEQ ID NO: 35262 - DNA, 13 bp, Artificial Sequence
  Oligonucleotide for detection of SNP TSC0011176
cccactaaccata

SEQ ID NO: 35263 - DNA, 13 bp, Artificial Sequence
  Oligonucleotide for detection of SNP TSC0011176
tttatttattatg

SEQ ID NO: 35264 - DNA, 13 bp, Artificial Sequence
  Oligonucleotide for detection of SNP TSC0011176
cataataaataaa

SEQ ID NO: 35265 - DNA, 13 bp, Artificial Sequence
  Oligonucleotide for detection of SNP TSC0011177
attgtttatatta

SEQ ID NO: 35266 - DNA, 13 bp, Artificial Sequence
  Oligonucleotide for detection of SNP TSC0011177
taatataaacaat

SEQ ID NO: 35267 - DNA, 13 bp, Artificial Sequence
  Oligonucleotide for detection of SNP TSC0011177
attgttgatatta

SEQ ID NO: 35268 - DNA, 13 bp, Artificial Sequence
  Oligonucleotide for detection of SNP TSC0011177
taatatcaacaat

SEQ ID NO: 35269 - DNA, 13 bp, Artificial Sequence
  Oligonucleotide for detection of SNP TSC0011177
taatgtgagtaat

SEQ ID NO: 35270 - DNA, 13 bp, Artificial Sequence
  Oligonucleotide for detection of SNP TSC0011177
attactcacatta

SEQ ID NO: 35271 - DNA, 13 bp, Artificial Sequence
  Oligonucleotide for detection of SNP TSC0011177
taatgttagtaat

SEQ ID NO: 35272 - DNA, 13 bp, Artificial Sequence
  Oligonucleotide for detection of SNP TSC0011177
attactaacatta

SEQ ID NO: 35273 - DNA, 13 bp, Artificial Sequence
  Oligonucleotide for detection of SNP TSC0011178
ttgtttatattay

SEQ ID NO: 35274 - DNA, 13 bp, Artificial Sequence
  Oligonucleotide for detection of SNP TSC0011178
rtaatataaacaa

SEQ ID NO: 35275 - DNA, 13 bp, Artificial Sequence
  Oligonucleotide for detection of SNP TSC0011178
ttgtttgtattay

SEQ ID NO: 35276 - DNA, 13 bp, Artificial Sequence
  Oligonucleotide for detection of SNP TSC0011178
rtaatacaaacaa

SEQ ID NO: 35277 - DNA, 13 bp, Artificial Sequence
  Oligonucleotide for detection of SNP TSC0011178
ttgttcgtattay

SEQ ID NO: 35278 - DNA, 13 bp, Artificial Sequence
  Oligonucleotide for detection of SNP TSC0011178
rtaatacgaacaa

SEQ ID NO: 35279 - DNA, 13 bp, Artificial Sequence
  Oligonucleotide for detection of SNP TSC0011178
gtaatgtgagtaa

SEQ ID NO: 35280 - DNA, 13 bp, Artificial Sequence
  Oligonucleotide for detection of SNP TSC0011178
ttactcacattac

SEQ ID NO: 35281 - DNA, 13 bp, Artificial Sequence
  Oligonucleotide for detection of SNP TSC0011178
gtaatgcgagtaa

SEQ ID NO: 35282 - DNA, 13 bp, Artificial Sequence
  Oligonucleotide for detection of SNP TSC0011178
ttactcgcattac

SEQ ID NO: 35283 - DNA, 13 bp, Artificial Sequence
  Oligonucleotide for detection of SNP TSC0011179
atttggggtaatt

SEQ ID NO: 35284 - DNA, 13 bp, Artificial Sequence
  Oligonucleotide for detection of SNP TSC0011179
aattaccccaaat

SEQ ID NO: 35285 - DNA, 13 bp, Artificial Sequence
  Oligonucleotide for detection of SNP TSC0011179
atttggagtaatt

SEQ ID NO: 35286 - DNA, 13 bp, Artificial Sequence
  Oligonucleotide for detection of SNP TSC0011179
aattactccaaat

SEQ ID NO: 35287 - DNA, 13 bp, Artificial Sequence
  Oligonucleotide for detection of SNP TSC0011182
ttttttattgtta

SEQ ID NO: 35288 - DNA, 13 bp, Artificial Sequence
  Oligonucleotide for detection of SNP TSC0011182
taacaataaaaaa

SEQ ID NO: 35289 - DNA, 13 bp, Artificial Sequence
  Oligonucleotide for detection of SNP TSC0011182
ttttttgttgtta

SEQ ID NO: 35290 - DNA, 13 bp, Artificial Sequence
  Oligonucleotide for detection of SNP TSC0011182
taacaacaaaaaa

SEQ ID NO: 35291 - DNA, 13 bp, Artificial Sequence
  Oligonucleotide for detection of SNP TSC0011183
tataaaggtgtta

SEQ ID NO: 35292 - DNA, 13 bp, Artificial Sequence
  Oligonucleotide for detection of SNP TSC0011183
taacacctttata

SEQ ID NO: 35293 - DNA, 13 bp, Artificial Sequence
  Oligonucleotide for detection of SNP TSC0011183
tataaaagtgtta

SEQ ID NO: 35294 - DNA, 13 bp, Artificial Sequence
  Oligonucleotide for detection of SNP TSC0011183
taacacttttata

SEQ ID NO: 35295 - DNA, 13 bp, Artificial Sequence
  Oligonucleotide for detection of SNP TSC0011184
taatagaataaay

SEQ ID NO: 35296 - DNA, 13 bp, Artificial Sequence
  Oligonucleotide for detection of SNP TSC0011184
rtttattctatta

SEQ ID NO: 35297 - DNA, 13 bp, Artificial Sequence
  Oligonucleotide for detection of SNP TSC0011184
taataggataaay

SEQ ID NO: 35298 - DNA, 13 bp, Artificial Sequence
  Oligonucleotide for detection of SNP TSC0011184
rtttatcctatta

SEQ ID NO: 35299 - DNA, 13 bp, Artificial Sequence
  Oligonucleotide for detection of SNP TSC0011186
tagaaatggggtt

SEQ ID NO: 35300 - DNA, 13 bp, Artificial Sequence
  Oligonucleotide for detection of SNP TSC0011186
aaccccatttcta

SEQ ID NO: 35301 - DNA, 13 bp, Artificial Sequence
  Oligonucleotide for detection of SNP TSC0011186
tagaaacggggtt

SEQ ID NO: 35302 - DNA, 13 bp, Artificial Sequence
  Oligonucleotide for detection of SNP TSC0011186
aaccccgtttcta

SEQ ID NO: 35303 - DNA, 13 bp, Artificial Sequence
  Oligonucleotide for detection of SNP TSC0011189
gttttaatgtata

SEQ ID NO: 35304 - DNA, 13 bp, Artificial Sequence
  Oligonucleotide for detection of SNP TSC0011189
tatacattaaaac

SEQ ID NO: 35305 - DNA, 13 bp, Artificial Sequence
  Oligonucleotide for detection of SNP TSC0011189
gttttagtgtata

SEQ ID NO: 35306 - DNA, 13 bp, Artificial Sequence
  Oligonucleotide for detection of SNP TSC0011189
tatacactaaaac

SEQ ID NO: 35307 - DNA, 13 bp, Artificial Sequence
  Oligonucleotide for detection of SNP TSC0011189
gttttaacgtata

SEQ ID NO: 35308 - DNA, 13 bp, Artificial Sequence
  Oligonucleotide for detection of SNP TSC0011189
tatacgttaaaac

SEQ ID NO: 35309 - DNA, 13 bp, Artificial Sequence
  Oligonucleotide for detection of SNP TSC0011189
gttttagcgtata

SEQ ID NO: 35310 - DNA, 13 bp, Artificial Sequence
  Oligonucleotide for detection of SNP TSC0011189
tatacgctaaaac

SEQ ID NO: 35311 - DNA, 13 bp, Artificial Sequence
  Oligonucleotide for detection of SNP TSC0011190
ggtgtgatggtty

SEQ ID NO: 35312 - DNA, 13 bp, Artificial Sequence
  Oligonucleotide for detection of SNP TSC0011190
raaccatcacacc

SEQ ID NO: 35313 - DNA, 13 bp, Artificial Sequence
  Oligonucleotide for detection of SNP TSC0011190
ggtgtggtggtty

SEQ ID NO: 35314 - DNA, 13 bp, Artificial Sequence
  Oligonucleotide for detection of SNP TSC0011190
raaccaccacacc

SEQ ID NO: 35315 - DNA, 13 bp, Artificial Sequence
  Oligonucleotide for detection of SNP TSC0011191
tttataaattaay

SEQ ID NO: 35316 - DNA, 13 bp, Artificial Sequence
  Oligonucleotide for detection of SNP TSC0011191
rttaatttataaa

SEQ ID NO: 35317 - DNA, 13 bp, Artificial Sequence
  Oligonucleotide for detection of SNP TSC0011191
tttatagattaay

SEQ ID NO: 35318 - DNA, 13 bp, Artificial Sequence
  Oligonucleotide for detection of SNP TSC0011191
rttaatctataaa

SEQ ID NO: 35319 - DNA, 13 bp, Artificial Sequence
  Oligonucleotide for detection of SNP TSC0011192
gtttgtaatttta

SEQ ID NO: 35320 - DNA, 13 bp, Artificial Sequence
  Oligonucleotide for detection of SNP TSC0011192
taaaattacaaac

SEQ ID NO: 35321 - DNA, 13 bp, Artificial Sequence
  Oligonucleotide for detection of SNP TSC0011192
gtttgttatttta

SEQ ID NO: 35322 - DNA, 13 bp, Artificial Sequence
  Oligonucleotide for detection of SNP TSC0011192
taaaataacaaac

SEQ ID NO: 35323 - DNA, 13 bp, Artificial Sequence
  Oligonucleotide for detection of SNP TSC0011192
tgggattataggy

SEQ ID NO: 35324 - DNA, 13 bp, Artificial Sequence
  Oligonucleotide for detection of SNP TSC0011192
rcctataatccca

SEQ ID NO: 35325 - DNA, 13 bp, Artificial Sequence
  Oligonucleotide for detection of SNP TSC0011192
tgggataataggy

SEQ ID NO: 35326 - DNA, 13 bp, Artificial Sequence
  Oligonucleotide for detection of SNP TSC0011192
rcctattatccca

SEQ ID NO: 35327 - DNA, 13 bp, Artificial Sequence
  Oligonucleotide for detection of SNP TSC0011196
gttggaatagaaa

SEQ ID NO: 35328 - DNA, 13 bp, Artificial Sequence
  Oligonucleotide for detection of SNP TSC0011196
tttctattccaac

SEQ ID NO: 35329 - DNA, 13 bp, Artificial Sequence
  Oligonucleotide for detection of SNP TSC0011196
gttggattagaaa

SEQ ID NO: 35330 - DNA, 13 bp, Artificial Sequence
  Oligonucleotide for detection of SNP TSC0011196
tttctaatccaac

SEQ ID NO: 35331 - DNA, 13 bp, Artificial Sequence
  Oligonucleotide for detection of SNP TSC0011196
tttttgttttagy

SEQ ID NO: 35332 - DNA, 13 bp, Artificial Sequence
  Oligonucleotide for detection of SNP TSC0011196
rctaaaacaaaaa

SEQ ID NO: 35333 - DNA, 13 bp, Artificial Sequence
  Oligonucleotide for detection of SNP TSC0011196
tttttggtttagy

SEQ ID NO: 35334 - DNA, 13 bp, Artificial Sequence
  Oligonucleotide for detection of SNP TSC0011196
rctaaaccaaaaa

SEQ ID NO: 35335 - DNA, 13 bp, Artificial Sequence
  Oligonucleotide for detection of SNP TSC0011197
ttttaaggttggy

SEQ ID NO: 35336 - DNA, 13 bp, Artificial Sequence
  Oligonucleotide for detection of SNP TSC0011197
rccaaccttaaaa

SEQ ID NO: 35337 - DNA, 13 bp, Artificial Sequence
  Oligonucleotide for detection of SNP TSC0011197
ttttaaagttggy

SEQ ID NO: 35338 - DNA, 13 bp, Artificial Sequence
  Oligonucleotide for detection of SNP TSC0011197
rccaactttaaaa

SEQ ID NO: 35339 - DNA, 13 bp, Artificial Sequence
  Oligonucleotide for detection of SNP TSC0011197
ttttaaggtcggy

SEQ ID NO: 35340 - DNA, 13 bp, Artificial Sequence
  Oligonucleotide for detection of SNP TSC0011197
rccgaccttaaaa

SEQ ID NO: 35341 - DNA, 13 bp, Artificial Sequence
  Oligonucleotide for detection of SNP TSC0011197
ttttaaagtcggy

SEQ ID NO: 35342 - DNA, 13 bp, Artificial Sequence
  Oligonucleotide for detection of SNP TSC0011197
rccgactttaaaa

SEQ ID NO: 35343 - DNA, 13 bp, Artificial Sequence
  Oligonucleotide for detection of SNP TSC0011199
atatttataatat

SEQ ID NO: 35344 - DNA, 13 bp, Artificial Sequence
  Oligonucleotide for detection of SNP TSC0011199
atattataaatat

SEQ ID NO: 35345 - DNA, 13 bp, Artificial Sequence
  Oligonucleotide for detection of SNP TSC0011199
atatttgtaatat

SEQ ID NO: 35346 - DNA, 13 bp, Artificial Sequence
  Oligonucleotide for detection of SNP TSC0011199
atattacaaatat

SEQ ID NO: 35347 - DNA, 13 bp, Artificial Sequence
  Oligonucleotide for detection of SNP TSC0011199
atattcgtaatat

SEQ ID NO: 35348 - DNA, 13 bp, Artificial Sequence
  Oligonucleotide for detection of SNP TSC0011199
atattacgaatat

SEQ ID NO: 35349 - DNA, 13 bp, Artificial Sequence
  Oligonucleotide for detection of SNP TSC0011199
atgttgtggatat

SEQ ID NO: 35350 - DNA, 13 bp, Artificial Sequence
  Oligonucleotide for detection of SNP TSC0011199
atatccacaacat

SEQ ID NO: 35351 - DNA, 13 bp, Artificial Sequence
  Oligonucleotide for detection of SNP TSC0011199
atgttgcggatat

SEQ ID NO: 35352 - DNA, 13 bp, Artificial Sequence
  Oligonucleotide for detection of SNP TSC0011199
atatccgcaacat

SEQ ID NO: 35353 - DNA, 13 bp, Artificial Sequence
  Oligonucleotide for detection of SNP TSC0011200
gtgattattttty

SEQ ID NO: 35354 - DNA, 13 bp, Artificial Sequence
  Oligonucleotide for detection of SNP TSC0011200
raaaaataatcac

SEQ ID NO: 35355 - DNA, 13 bp, Artificial Sequence
  Oligonucleotide for detection of SNP TSC0011200
gtgattgttttty

SEQ ID NO: 35356 - DNA, 13 bp, Artificial Sequence
  Oligonucleotide for detection of SNP TSC0011200
raaaaacaatcac

SEQ ID NO: 35357 - DNA, 13 bp, Artificial Sequence
  Oligonucleotide for detection of SNP TSC0011201
agaaggatggtgt

SEQ ID NO: 35358 - DNA, 13 bp, Artificial Sequence
  Oligonucleotide for detection of SNP TSC0011201
acaccatccttct

SEQ ID NO: 35359 - DNA, 13 bp, Artificial Sequence
  Oligonucleotide for detection of SNP TSC0011201
agaaggttggtgt

SEQ ID NO: 35360 - DNA, 13 bp, Artificial Sequence
  Oligonucleotide for detection of SNP TSC0011201
acaccaaccttct

SEQ ID NO: 35361 - DNA, 13 bp, Artificial Sequence
  Oligonucleotide for detection of SNP TSC0011201
atattattttttt

SEQ ID NO: 35362 - DNA, 13 bp, Artificial Sequence
  Oligonucleotide for detection of SNP TSC0011201
aaaaaaataatat

SEQ ID NO: 35363 - DNA, 13 bp, Artificial Sequence
  Oligonucleotide for detection of SNP TSC0011201
atattaatttttt

SEQ ID NO: 35364 - DNA, 13 bp, Artificial Sequence
  Oligonucleotide for detection of SNP TSC0011201
aaaaaattaatat

SEQ ID NO: 35365 - DNA, 13 bp, Artificial Sequence
  Oligonucleotide for detection of SNP TSC0011203
tgtaatgtagtay

SEQ ID NO: 35366 - DNA, 13 bp, Artificial Sequence
  Oligonucleotide for detection of SNP TSC0011203
rtactacattaca

SEQ ID NO: 35367 - DNA, 13 bp, Artificial Sequence
  Oligonucleotide for detection of SNP TSC0011203
tgtaatatagtay

SEQ ID NO: 35368 - DNA, 13 bp, Artificial Sequence
  Oligonucleotide for detection of SNP TSC0011203
rtactatattaca

SEQ ID NO: 35369 - DNA, 13 bp, Artificial Sequence
  Oligonucleotide for detection of SNP TSC0011204
aataaagttttat

SEQ ID NO: 35370 - DNA, 13 bp, Artificial Sequence
  Oligonucleotide for detection of SNP TSC0011204
ataaaactttatt

SEQ ID NO: 35371 - DNA, 13 bp, Artificial Sequence
  Oligonucleotide for detection of SNP TSC0011204
aataaatttttat

SEQ ID NO: 35372 - DNA, 13 bp, Artificial Sequence
  Oligonucleotide for detection of SNP TSC0011204
ataaaaatttatt

SEQ ID NO: 35373 - DNA, 13 bp, Artificial Sequence
  Oligonucleotide for detection of SNP TSC0011204
atgaggttttatt

SEQ ID NO: 35374 - DNA, 13 bp, Artificial Sequence
  Oligonucleotide for detection of SNP TSC0011204
aataaaacctcat

SEQ ID NO: 35375 - DNA, 13 bp, Artificial Sequence
  Oligonucleotide for detection of SNP TSC0011204
atgaggatttatt

SEQ ID NO: 35376 - DNA, 13 bp, Artificial Sequence
  Oligonucleotide for detection of SNP TSC0011204
aataaatcctcat

SEQ ID NO: 35377 - DNA, 13 bp, Artificial Sequence
  Oligonucleotide for detection of SNP TSC0011205
aagtttaagggat

SEQ ID NO: 35378 - DNA, 13 bp, Artificial Sequence
  Oligonucleotide for detection of SNP TSC0011205
atcccttaaactt

SEQ ID NO: 35379 - DNA, 13 bp, Artificial Sequence
  Oligonucleotide for detection of SNP TSC0011205
aagtttgagggat

SEQ ID NO: 35380 - DNA, 13 bp, Artificial Sequence
  Oligonucleotide for detection of SNP TSC0011205
atccctcaaactt

SEQ ID NO: 35381 - DNA, 13 bp, Artificial Sequence
  Oligonucleotide for detection of SNP TSC0011205
aagttcgagggat

SEQ ID NO: 35382 - DNA, 13 bp, Artificial Sequence
  Oligonucleotide for detection of SNP TSC0011205
atccctcgaactt

SEQ ID NO: 35383 - DNA, 13 bp, Artificial Sequence
  Oligonucleotide for detection of SNP TSC0011205
attttttgaattt

SEQ ID NO: 35384 - DNA, 13 bp, Artificial Sequence
  Oligonucleotide for detection of SNP TSC0011205
aaattcaaaaaat

SEQ ID NO: 35385 - DNA, 13 bp, Artificial Sequence
  Oligonucleotide for detection of SNP TSC0011205
atttttcgaattt

SEQ ID NO: 35386 - DNA, 13 bp, Artificial Sequence
  Oligonucleotide for detection of SNP TSC0011205
aaattcgaaaaat

SEQ ID NO: 35387 - DNA, 13 bp, Artificial Sequence
  Oligonucleotide for detection of SNP TSC0011206
ttgttagagggta

SEQ ID NO: 35388 - DNA, 13 bp, Artificial Sequence
  Oligonucleotide for detection of SNP TSC0011206
taccctctaacaa

SEQ ID NO: 35389 - DNA, 13 bp, Artificial Sequence
  Oligonucleotide for detection of SNP TSC0011206
ttgttaaagggta

SEQ ID NO: 35390 - DNA, 13 bp, Artificial Sequence
  Oligonucleotide for detection of SNP TSC0011206
taccctttaacaa

SEQ ID NO: 35391 - DNA, 13 bp, Artificial Sequence
  Oligonucleotide for detection of SNP TSC0011208
ggtttaaaaaaat

SEQ ID NO: 35392 - DNA, 13 bp, Artificial Sequence
  Oligonucleotide for detection of SNP TSC0011208
atttttttaaacc

SEQ ID NO: 35393 - DNA, 13 bp, Artificial Sequence
  Oligonucleotide for detection of SNP TSC0011208
ggtttagaaaaat

SEQ ID NO: 35394 - DNA, 13 bp, Artificial Sequence
  Oligonucleotide for detection of SNP TSC0011208
atttttctaaacc

SEQ ID NO: 35395 - DNA, 13 bp, Artificial Sequence
  Oligonucleotide for detection of SNP TSC0011211
gtggtagtttgta

SEQ ID NO: 35396 - DNA, 13 bp, Artificial Sequence
  Oligonucleotide for detection of SNP TSC0011211
tacaaactaccac

SEQ ID NO: 35397 - DNA, 13 bp, Artificial Sequence
  Oligonucleotide for detection of SNP TSC0011211
gtggtaatttgta

SEQ ID NO: 35398 - DNA, 13 bp, Artificial Sequence
  Oligonucleotide for detection of SNP TSC0011211
tacaaattaccac

SEQ ID NO: 35399 - DNA, 13 bp, Artificial Sequence
  Oligonucleotide for detection of SNP TSC0011213
tttatagatgtaa

SEQ ID NO: 35400 - DNA, 13 bp, Artificial Sequence
  Oligonucleotide for detection of SNP TSC0011213
ttacatctataaa

SEQ ID NO: 35401 - DNA, 13 bp, Artificial Sequence
  Oligonucleotide for detection of SNP TSC0011213
tttataaatgtaa

SEQ ID NO: 35402 - DNA, 13 bp, Artificial Sequence
  Oligonucleotide for detection of SNP TSC0011213
ttacatttataaa

SEQ ID NO: 35403 - DNA, 13 bp, Artificial Sequence
  Oligonucleotide for detection of SNP TSC0011214
attttaaatttga

SEQ ID NO: 35404 - DNA, 13 bp, Artificial Sequence
  Oligonucleotide for detection of SNP TSC0011214
tcaaatttaaaat

SEQ ID NO: 35405 - DNA, 13 bp, Artificial Sequence
  Oligonucleotide for detection of SNP TSC0011214
attttatatttga

SEQ ID NO: 35406 - DNA, 13 bp, Artificial Sequence
  Oligonucleotide for detection of SNP TSC0011214
tcaaatataaaat

SEQ ID NO: 35407 - DNA, 13 bp, Artificial Sequence
  Oligonucleotide for detection of SNP TSC0011214
ttagatttggggt

SEQ ID NO: 35408 - DNA, 13 bp, Artificial Sequence
  Oligonucleotide for detection of SNP TSC0011214
accccaaatctaa

SEQ ID NO: 35409 - DNA, 13 bp, Artificial Sequence
  Oligonucleotide for detection of SNP TSC0011214
ttagatatggggt

SEQ ID NO: 35410 - DNA, 13 bp, Artificial Sequence
  Oligonucleotide for detection of SNP TSC0011214
accccatatctaa

SEQ ID NO: 35411 - DNA, 13 bp, Artificial Sequence
  Oligonucleotide for detection of SNP TSC0011215
gagattttgttay

SEQ ID NO: 35412 - DNA, 13 bp, Artificial Sequence
  Oligonucleotide for detection of SNP TSC0011215
rtaacaaaatctc

SEQ ID NO: 35413 - DNA, 13 bp, Artificial Sequence
  Oligonucleotide for detection of SNP TSC0011215
gagattgtgttay

SEQ ID NO: 35414 - DNA, 13 bp, Artificial Sequence
  Oligonucleotide for detection of SNP TSC0011215
rtaacacaatctc

SEQ ID NO: 35415 - DNA, 13 bp, Artificial Sequence
  Oligonucleotide for detection of SNP TSC0011215
gagatttcgttay

SEQ ID NO: 35416 - DNA, 13 bp, Artificial Sequence
  Oligonucleotide for detection of SNP TSC0011215
rtaacgaaatctc

SEQ ID NO: 35417 - DNA, 13 bp, Artificial Sequence
  Oligonucleotide for detection of SNP TSC0011215
gagatcgtgttay

SEQ ID NO: 35418 - DNA, 13 bp, Artificial Sequence
  Oligonucleotide for detection of SNP TSC0011215
rtaacacgatctc

SEQ ID NO: 35419 - DNA, 13 bp, Artificial Sequence
  Oligonucleotide for detection of SNP TSC0011215
gagattgcgttay

SEQ ID NO: 35420 - DNA, 13 bp, Artificial Sequence
  Oligonucleotide for detection of SNP TSC0011215
rtaacgcaatctc

SEQ ID NO: 35421 - DNA, 13 bp, Artificial Sequence
  Oligonucleotide for detection of SNP TSC0011215
gagatcgcgttay

SEQ ID NO: 35422 - DNA, 13 bp, Artificial Sequence
  Oligonucleotide for detection of SNP TSC0011215
rtaacgcgatctc

SEQ ID NO: 35423 - DNA, 13 bp, Artificial Sequence
  Oligonucleotide for detection of SNP TSC0011215
gtggtgggattty

SEQ ID NO: 35424 - DNA, 13 bp, Artificial Sequence
  Oligonucleotide for detection of SNP TSC0011215
raaatcccaccac

SEQ ID NO: 35425 - DNA, 13 bp, Artificial Sequence
  Oligonucleotide for detection of SNP TSC0011215
gtggtgtgattty

SEQ ID NO: 35426 - DNA, 13 bp, Artificial Sequence
  Oligonucleotide for detection of SNP TSC0011215
raaatcacaccac

SEQ ID NO: 35427 - DNA, 13 bp, Artificial Sequence
  Oligonucleotide for detection of SNP TSC0011215
gtggcgggattty

SEQ ID NO: 35428 - DNA, 13 bp, Artificial Sequence
  Oligonucleotide for detection of SNP TSC0011215
raaatcccgccac

SEQ ID NO: 35429 - DNA, 13 bp, Artificial Sequence
  Oligonucleotide for detection of SNP TSC0011215
gtggcgtgattty

SEQ ID NO: 35430 - DNA, 13 bp, Artificial Sequence
  Oligonucleotide for detection of SNP TSC0011215
raaatcacgccac

SEQ ID NO: 35431 - DNA, 13 bp, Artificial Sequence
  Oligonucleotide for detection of SNP TSC0011215
gtggtgcgattty

SEQ ID NO: 35432 - DNA, 13 bp, Artificial Sequence
  Oligonucleotide for detection of SNP TSC0011215
raaatcgcaccac

SEQ ID NO: 35433 - DNA, 13 bp, Artificial Sequence
  Oligonucleotide for detection of SNP TSC0011215
gtggcgcgattty

SEQ ID NO: 35434 - DNA, 13 bp, Artificial Sequence
  Oligonucleotide for detection of SNP TSC0011215
raaatcgcgccac

SEQ ID NO: 35435 - DNA, 13 bp, Artificial Sequence
  Oligonucleotide for detection of SNP TSC0011220
gttttagtgtgta

SEQ ID NO: 35436 - DNA, 13 bp, Artificial Sequence
  Oligonucleotide for detection of SNP TSC0011220
tacacactaaaac

SEQ ID NO: 35437 - DNA, 13 bp, Artificial Sequence
  Oligonucleotide for detection of SNP TSC0011220
gttttaatgtgta

SEQ ID NO: 35438 - DNA, 13 bp, Artificial Sequence
  Oligonucleotide for detection of SNP TSC0011220
tacacattaaaac

SEQ ID NO: 35439 - DNA, 13 bp, Artificial Sequence
  Oligonucleotide for detection of SNP TSC0011221
tagtgaagtggaa

SEQ ID NO: 35440 - DNA, 13 bp, Artificial Sequence
  Oligonucleotide for detection of SNP TSC0011221
ttccacttcacta

SEQ ID NO: 35441 - DNA, 13 bp, Artificial Sequence
  Oligonucleotide for detection of SNP TSC0011221
tagtgaggtggaa

SEQ ID NO: 35442 - DNA, 13 bp, Artificial Sequence
  Oligonucleotide for detection of SNP TSC0011221
ttccacctcacta

SEQ ID NO: 35443 - DNA, 13 bp, Artificial Sequence
  Oligonucleotide for detection of SNP TSC0011223
tttttaatagaga

SEQ ID NO: 35444 - DNA, 13 bp, Artificial Sequence
  Oligonucleotide for detection of SNP TSC0011223
tctctattaaaaa

SEQ ID NO: 35445 - DNA, 13 bp, Artificial Sequence
  Oligonucleotide for detection of SNP TSC0011223
tttttagtagaga

SEQ ID NO: 35446 - DNA, 13 bp, Artificial Sequence
  Oligonucleotide for detection of SNP TSC0011223
tctctactaaaaa

SEQ ID NO: 35447 - DNA, 13 bp, Artificial Sequence
  Oligonucleotide for detection of SNP TSC0011230
ataggtagatggg

SEQ ID NO: 35448 - DNA, 13 bp, Artificial Sequence
  Oligonucleotide for detection of SNP TSC0011230
cccatctacctat

SEQ ID NO: 35449 - DNA, 13 bp, Artificial Sequence
  Oligonucleotide for detection of SNP TSC0011230
ataggtggatggg

SEQ ID NO: 35450 - DNA, 13 bp, Artificial Sequence
  Oligonucleotide for detection of SNP TSC0011230
cccatccacctat

SEQ ID NO: 35451 - DNA, 13 bp, Artificial Sequence
  Oligonucleotide for detection of SNP TSC0011230
ataggcggatggg

SEQ ID NO: 35452 - DNA, 13 bp, Artificial Sequence
  Oligonucleotide for detection of SNP TSC0011230
cccatccgcctat

SEQ ID NO: 35453 - DNA, 13 bp, Artificial Sequence
  Oligonucleotide for detection of SNP TSC0011230
tttatttgtttat

SEQ ID NO: 35454 - DNA, 13 bp, Artificial Sequence
  Oligonucleotide for detection of SNP TSC0011230
ataaacaaataaa

SEQ ID NO: 35455 - DNA, 13 bp, Artificial Sequence
  Oligonucleotide for detection of SNP TSC0011230
tttattcgtttat

SEQ ID NO: 35456 - DNA, 13 bp, Artificial Sequence
  Oligonucleotide for detection of SNP TSC0011230
ataaacgaataaa

SEQ ID NO: 35457 - DNA, 13 bp, Artificial Sequence
  Oligonucleotide for detection of SNP TSC0011232
tatagttgtttty

SEQ ID NO: 35458 - DNA, 13 bp, Artificial Sequence
  Oligonucleotide for detection of SNP TSC0011232
raaaacaactata

SEQ ID NO: 35459 - DNA, 13 bp, Artificial Sequence
  Oligonucleotide for detection of SNP TSC0011232
tatagtcgtttty

SEQ ID NO: 35460 - DNA, 13 bp, Artificial Sequence
  Oligonucleotide for detection of SNP TSC0011232
raaaacgactata

SEQ ID NO: 35461 - DNA, 13 bp, Artificial Sequence
  Oligonucleotide for detection of SNP TSC0011232
gaggatggttgtg

SEQ ID NO: 35462 - DNA, 13 bp, Artificial Sequence
  Oligonucleotide for detection of SNP TSC0011232
cacaaccatcctc

SEQ ID NO: 35463 - DNA, 13 bp, Artificial Sequence
  Oligonucleotide for detection of SNP TSC0011232
gaggatagttgtg

SEQ ID NO: 35464 - DNA, 13 bp, Artificial Sequence
  Oligonucleotide for detection of SNP TSC0011232
cacaactatcctc

SEQ ID NO: 35465 - DNA, 13 bp, Artificial Sequence
  Oligonucleotide for detection of SNP TSC0011232
gaggacggttgtg

SEQ ID NO: 35466 - DNA, 13 bp, Artificial Sequence
  Oligonucleotide for detection of SNP TSC0011232
cacaaccgtcctc

SEQ ID NO: 35467 - DNA, 13 bp, Artificial Sequence
  Oligonucleotide for detection of SNP TSC0011233
attaatataaagt

SEQ ID NO: 35468 - DNA, 13 bp, Artificial Sequence
  Oligonucleotide for detection of SNP TSC0011233
actttatattaat

SEQ ID NO: 35469 - DNA, 13 bp, Artificial Sequence
  Oligonucleotide for detection of SNP TSC0011233
attaatttaaagt

SEQ ID NO: 35470 - DNA, 13 bp, Artificial Sequence
  Oligonucleotide for detection of SNP TSC0011233
actttaaattaat

SEQ ID NO: 35471 - DNA, 13 bp, Artificial Sequence
  Oligonucleotide for detection of SNP TSC0011233
attttatgttagt

SEQ ID NO: 35472 - DNA, 13 bp, Artificial Sequence
  Oligonucleotide for detection of SNP TSC0011233
actaacataaaat

SEQ ID NO: 35473 - DNA, 13 bp, Artificial Sequence
  Oligonucleotide for detection of SNP TSC0011233
attttaggttagt

SEQ ID NO: 35474 - DNA, 13 bp, Artificial Sequence
  Oligonucleotide for detection of SNP TSC0011233
actaacctaaaat

SEQ ID NO: 35475 - DNA, 13 bp, Artificial Sequence
  Oligonucleotide for detection of SNP TSC0011234
tagagatagtagg

SEQ ID NO: 35476 - DNA, 13 bp, Artificial Sequence
  Oligonucleotide for detection of SNP TSC0011234
cctactatctcta

SEQ ID NO: 35477 - DNA, 13 bp, Artificial Sequence
  Oligonucleotide for detection of SNP TSC0011234
tagagagagtagg

SEQ ID NO: 35478 - DNA, 13 bp, Artificial Sequence
  Oligonucleotide for detection of SNP TSC0011234
cctactctctcta

SEQ ID NO: 35479 - DNA, 13 bp, Artificial Sequence
  Oligonucleotide for detection of SNP TSC0011234
tttgttttttttg

SEQ ID NO: 35480 - DNA, 13 bp, Artificial Sequence
  Oligonucleotide for detection of SNP TSC0011234
caaaaaaaacaaa

SEQ ID NO: 35481 - DNA, 13 bp, Artificial Sequence
  Oligonucleotide for detection of SNP TSC0011235
agggtttgtttaa

SEQ ID NO: 35482 - DNA, 13 bp, Artificial Sequence
  Oligonucleotide for detection of SNP TSC0011235
ttaaacaaaccct

SEQ ID NO: 35483 - DNA, 13 bp, Artificial Sequence
  Oligonucleotide for detection of SNP TSC0011235
agggttcgtttaa

SEQ ID NO: 35484 - DNA, 13 bp, Artificial Sequence
  Oligonucleotide for detection of SNP TSC0011235
ttaaacgaaccct

SEQ ID NO: 35485 - DNA, 13 bp, Artificial Sequence
  Oligonucleotide for detection of SNP TSC0011235
ttgaatgaatttt

SEQ ID NO: 35486 - DNA, 13 bp, Artificial Sequence
  Oligonucleotide for detection of SNP TSC0011235
aaaattcattcaa

SEQ ID NO: 35487 - DNA, 13 bp, Artificial Sequence
  Oligonucleotide for detection of SNP TSC0011235
ttgaataaatttt

SEQ ID NO: 35488 - DNA, 13 bp, Artificial Sequence
  Oligonucleotide for detection of SNP TSC0011235
aaaatttattcaa

SEQ ID NO: 35489 - DNA, 13 bp, Artificial Sequence
  Oligonucleotide for detection of SNP TSC0011235
ttgaacgaatttt

SEQ ID NO: 35490 - DNA, 13 bp, Artificial Sequence
  Oligonucleotide for detection of SNP TSC0011235
aaaattcgttcaa

SEQ ID NO: 35491 - DNA, 13 bp, Artificial Sequence
  Oligonucleotide for detection of SNP TSC0011237
gttttgagtgaaa

SEQ ID NO: 35492 - DNA, 13 bp, Artificial Sequence
  Oligonucleotide for detection of SNP TSC0011237
tttcactcaaaac

SEQ ID NO: 35493 - DNA, 13 bp, Artificial Sequence
  Oligonucleotide for detection of SNP TSC0011237
gttttgtgtgaaa

SEQ ID NO: 35494 - DNA, 13 bp, Artificial Sequence
  Oligonucleotide for detection of SNP TSC0011237
tttcacacaaaac

SEQ ID NO: 35495 - DNA, 13 bp, Artificial Sequence
  Oligonucleotide for detection of SNP TSC0011237
gttttgcgtgaaa

SEQ ID NO: 35496 - DNA, 13 bp, Artificial Sequence
  Oligonucleotide for detection of SNP TSC0011237
tttcacgcaaaac

SEQ ID NO: 35497 - DNA, 13 bp, Artificial Sequence
  Oligonucleotide for detection of SNP TSC0011237
ttttatttagggy

SEQ ID NO: 35498 - DNA, 13 bp, Artificial Sequence
  Oligonucleotide for detection of SNP TSC0011237
rccctaaataaaa

SEQ ID NO: 35499 - DNA, 13 bp, Artificial Sequence
  Oligonucleotide for detection of SNP TSC0011237
ttttatgtagggy

SEQ ID NO: 35500 - DNA, 13 bp, Artificial Sequence
  Oligonucleotide for detection of SNP TSC0011237
rccctacataaaa

SEQ ID NO: 35501 - DNA, 13 bp, Artificial Sequence
  Oligonucleotide for detection of SNP TSC0011237
ttttacgtagggy

SEQ ID NO: 35502 - DNA, 13 bp, Artificial Sequence
  Oligonucleotide for detection of SNP TSC0011237
rccctacgtaaaa

SEQ ID NO: 35503 - DNA, 13 bp, Artificial Sequence
  Oligonucleotide for detection of SNP TSC0011238
aatataggtagag

SEQ ID NO: 35504 - DNA, 13 bp, Artificial Sequence
  Oligonucleotide for detection of SNP TSC0011238
ctctacctatatt

SEQ ID NO: 35505 - DNA, 13 bp, Artificial Sequence
  Oligonucleotide for detection of SNP TSC0011238
aatataagtagag

SEQ ID NO: 35506 - DNA, 13 bp, Artificial Sequence
  Oligonucleotide for detection of SNP TSC0011238
ctctacttatatt

SEQ ID NO: 35507 - DNA, 13 bp, Artificial Sequence
  Oligonucleotide for detection of SNP TSC0011240
gtatatattagtt

SEQ ID NO: 35508 - DNA, 13 bp, Artificial Sequence
  Oligonucleotide for detection of SNP TSC0011240
aactaatatatac

SEQ ID NO: 35509 - DNA, 13 bp, Artificial Sequence
  Oligonucleotide for detection of SNP TSC0011240
gtatatgttagtt

SEQ ID NO: 35510 - DNA, 13 bp, Artificial Sequence
  Oligonucleotide for detection of SNP TSC0011240
aactaacatatac

SEQ ID NO: 35511 - DNA, 13 bp, Artificial Sequence
  Oligonucleotide for detection of SNP TSC0011240
gtatacgttagtt

SEQ ID NO: 35512 - DNA, 13 bp, Artificial Sequence
  Oligonucleotide for detection of SNP TSC0011240
aactaacgtatac

SEQ ID NO: 35513 - DNA, 13 bp, Artificial Sequence
  Oligonucleotide for detection of SNP TSC0011240
agttgatgtgtgy

SEQ ID NO: 35514 - DNA, 13 bp, Artificial Sequence
  Oligonucleotide for detection of SNP TSC0011240
rcacacatcaact

SEQ ID NO: 35515 - DNA, 13 bp, Artificial Sequence
  Oligonucleotide for detection of SNP TSC0011240
agttgacgtgtgy

SEQ ID NO: 35516 - DNA, 13 bp, Artificial Sequence
  Oligonucleotide for detection of SNP TSC0011240
rcacacgtcaact

SEQ ID NO: 35517 - DNA, 13 bp, Artificial Sequence
  Oligonucleotide for detection of SNP TSC0011246
ggagattgaggta

SEQ ID NO: 35518 - DNA, 13 bp, Artificial Sequence
  Oligonucleotide for detection of SNP TSC0011246
tacctcaatctcc

SEQ ID NO: 35519 - DNA, 13 bp, Artificial Sequence
  Oligonucleotide for detection of SNP TSC0011246
ggagatagaggta

SEQ ID NO: 35520 - DNA, 13 bp, Artificial Sequence
  Oligonucleotide for detection of SNP TSC0011246
tacctctatctcc

SEQ ID NO: 35521 - DNA, 13 bp, Artificial Sequence
  Oligonucleotide for detection of SNP TSC0011247
ttgttttttaggt

SEQ ID NO: 35522 - DNA, 13 bp, Artificial Sequence
  Oligonucleotide for detection of SNP TSC0011247
acctaaaaaacaa

SEQ ID NO: 35523 - DNA, 13 bp, Artificial Sequence
  Oligonucleotide for detection of SNP TSC0011247
ttgtttgttaggt

SEQ ID NO: 35524 - DNA, 13 bp, Artificial Sequence
  Oligonucleotide for detection of SNP TSC0011247
acctaacaaacaa

SEQ ID NO: 35525 - DNA, 13 bp, Artificial Sequence
  Oligonucleotide for detection of SNP TSC0011247
tcgttttttaggt

SEQ ID NO: 35526 - DNA, 13 bp, Artificial Sequence
  Oligonucleotide for detection of SNP TSC0011247
acctaaaaaacga

SEQ ID NO: 35527 - DNA, 13 bp, Artificial Sequence
  Oligonucleotide for detection of SNP TSC0011247
tcgtttgttaggt

SEQ ID NO: 35528 - DNA, 13 bp, Artificial Sequence
  Oligonucleotide for detection of SNP TSC0011247
acctaacaaacga

SEQ ID NO: 35529 - DNA, 13 bp, Artificial Sequence
  Oligonucleotide for detection of SNP TSC0011247
atttgggaggtgg

SEQ ID NO: 35530 - DNA, 13 bp, Artificial Sequence
  Oligonucleotide for detection of SNP TSC0011247
ccacctcccaaat

SEQ ID NO: 35531 - DNA, 13 bp, Artificial Sequence
  Oligonucleotide for detection of SNP TSC0011247
atttggtaggtgg

SEQ ID NO: 35532 - DNA, 13 bp, Artificial Sequence
  Oligonucleotide for detection of SNP TSC0011247
ccacctaccaaat

SEQ ID NO: 35533 - DNA, 13 bp, Artificial Sequence
  Oligonucleotide for detection of SNP TSC0011247
atttgggaggcgg

SEQ ID NO: 35534 - DNA, 13 bp, Artificial Sequence
  Oligonucleotide for detection of SNP TSC0011247
ccgcctcccaaat

SEQ ID NO: 35535 - DNA, 13 bp, Artificial Sequence
  Oligonucleotide for detection of SNP TSC0011247
atttggtaggcgg

SEQ ID NO: 35536 - DNA, 13 bp, Artificial Sequence
  Oligonucleotide for detection of SNP TSC0011247
ccgcctaccaaat

SEQ ID NO: 35537 - DNA, 13 bp, Artificial Sequence
  Oligonucleotide for detection of SNP TSC0011248
tgttggtgggtta

SEQ ID NO: 35538 - DNA, 13 bp, Artificial Sequence
  Oligonucleotide for detection of SNP TSC0011248
taacccaccaaca

SEQ ID NO: 35539 - DNA, 13 bp, Artificial Sequence
  Oligonucleotide for detection of SNP TSC0011248
tgttggcgggtta

SEQ ID NO: 35540 - DNA, 13 bp, Artificial Sequence
  Oligonucleotide for detection of SNP TSC0011248
taacccgccaaca

SEQ ID NO: 35541 - DNA, 13 bp, Artificial Sequence
  Oligonucleotide for detection of SNP TSC0011248
tgatttgttagta

SEQ ID NO: 35542 - DNA, 13 bp, Artificial Sequence
  Oligonucleotide for detection of SNP TSC0011248
tactaacaaatca

SEQ ID NO: 35543 - DNA, 13 bp, Artificial Sequence
  Oligonucleotide for detection of SNP TSC0011248
tgatttattagta

SEQ ID NO: 35544 - DNA, 13 bp, Artificial Sequence
  Oligonucleotide for detection of SNP TSC0011248
tactaataaatca

SEQ ID NO: 35545 - DNA, 13 bp, Artificial Sequence
  Oligonucleotide for detection of SNP TSC0011248
tgattcgttagta

SEQ ID NO: 35546 - DNA, 13 bp, Artificial Sequence
  Oligonucleotide for detection of SNP TSC0011248
tactaacgaatca

SEQ ID NO: 35547 - DNA, 13 bp, Artificial Sequence
  Oligonucleotide for detection of SNP TSC0011249
ttgtgaatttgtg

SEQ ID NO: 35548 - DNA, 13 bp, Artificial Sequence
  Oligonucleotide for detection of SNP TSC0011249
cacaaattcacaa

SEQ ID NO: 35549 - DNA, 13 bp, Artificial Sequence
  Oligonucleotide for detection of SNP TSC0011249
ttgtgattttgtg

SEQ ID NO: 35550 - DNA, 13 bp, Artificial Sequence
  Oligonucleotide for detection of SNP TSC0011249
cacaaaatcacaa

SEQ ID NO: 35551 - DNA, 13 bp, Artificial Sequence
  Oligonucleotide for detection of SNP TSC0011249
ttgtgaattcgtg

SEQ ID NO: 35552 - DNA, 13 bp, Artificial Sequence
  Oligonucleotide for detection of SNP TSC0011249
cacgaattcacaa

SEQ ID NO: 35553 - DNA, 13 bp, Artificial Sequence
  Oligonucleotide for detection of SNP TSC0011249
ttgtgatttcgtg

SEQ ID NO: 35554 - DNA, 13 bp, Artificial Sequence
  Oligonucleotide for detection of SNP TSC0011249
cacgaaatcacaa

SEQ ID NO: 35555 - DNA, 13 bp, Artificial Sequence
  Oligonucleotide for detection of SNP TSC0011249
ttgtgaatttgcg

SEQ ID NO: 35556 - DNA, 13 bp, Artificial Sequence
  Oligonucleotide for detection of SNP TSC0011249
cgcaaattcacaa

SEQ ID NO: 35557 - DNA, 13 bp, Artificial Sequence
  Oligonucleotide for detection of SNP TSC0011249
ttgtgattttgcg

SEQ ID NO: 35558 - DNA, 13 bp, Artificial Sequence
  Oligonucleotide for detection of SNP TSC0011249
cgcaaaatcacaa

SEQ ID NO: 35559 - DNA, 13 bp, Artificial Sequence
  Oligonucleotide for detection of SNP TSC0011249
ttgtgaattcgcg

SEQ ID NO: 35560 - DNA, 13 bp, Artificial Sequence
  Oligonucleotide for detection of SNP TSC0011249
cgcgaattcacaa

SEQ ID NO: 35561 - DNA, 13 bp, Artificial Sequence
  Oligonucleotide for detection of SNP TSC0011249
ttgtgatttcgcg

SEQ ID NO: 35562 - DNA, 13 bp, Artificial Sequence
  Oligonucleotide for detection of SNP TSC0011249
cgcgaaatcacaa

SEQ ID NO: 35563 - DNA, 13 bp, Artificial Sequence
  Oligonucleotide for detection of SNP TSC0011249
tgtgagtttataa

SEQ ID NO: 35564 - DNA, 13 bp, Artificial Sequence
  Oligonucleotide for detection of SNP TSC0011249
ttataaactcaca

SEQ ID NO: 35565 - DNA, 13 bp, Artificial Sequence
  Oligonucleotide for detection of SNP TSC0011249
tgtgaggttataa

SEQ ID NO: 35566 - DNA, 13 bp, Artificial Sequence
  Oligonucleotide for detection of SNP TSC0011249
ttataacctcaca

SEQ ID NO: 35567 - DNA, 13 bp, Artificial Sequence
  Oligonucleotide for detection of SNP TSC0011249
cgtgagtttataa

SEQ ID NO: 35568 - DNA, 13 bp, Artificial Sequence
  Oligonucleotide for detection of SNP TSC0011249
ttataaactcacg

SEQ ID NO: 35569 - DNA, 13 bp, Artificial Sequence
  Oligonucleotide for detection of SNP TSC0011249
cgtgaggttataa

SEQ ID NO: 35570 - DNA, 13 bp, Artificial Sequence
  Oligonucleotide for detection of SNP TSC0011249
ttataacctcacg

SEQ ID NO: 35571 - DNA, 13 bp, Artificial Sequence
  Oligonucleotide for detection of SNP TSC0011249
tgcgagtttataa

SEQ ID NO: 35572 - DNA, 13 bp, Artificial Sequence
  Oligonucleotide for detection of SNP TSC0011249
ttataaactcgca

SEQ ID NO: 35573 - DNA, 13 bp, Artificial Sequence
  Oligonucleotide for detection of SNP TSC0011249
tgcgaggttataa

SEQ ID NO: 35574 - DNA, 13 bp, Artificial Sequence
  Oligonucleotide for detection of SNP TSC0011249
ttataacctcgca

SEQ ID NO: 35575 - DNA, 13 bp, Artificial Sequence
  Oligonucleotide for detection of SNP TSC0011249
cgcgagtttataa

SEQ ID NO: 35576 - DNA, 13 bp, Artificial Sequence
  Oligonucleotide for detection of SNP TSC0011249
ttataaactcgcg

SEQ ID NO: 35577 - DNA, 13 bp, Artificial Sequence
  Oligonucleotide for detection of SNP TSC0011249
cgcgaggttataa

SEQ ID NO: 35578 - DNA, 13 bp, Artificial Sequence
  Oligonucleotide for detection of SNP TSC0011249
ttataacctcgcg

SEQ ID NO: 35579 - DNA, 13 bp, Artificial Sequence
  Oligonucleotide for detection of SNP TSC0011250
aaataataaagaa

SEQ ID NO: 35580 - DNA, 13 bp, Artificial Sequence
  Oligonucleotide for detection of SNP TSC0011250
ttctttattattt

SEQ ID NO: 35581 - DNA, 13 bp, Artificial Sequence
  Oligonucleotide for detection of SNP TSC0011250
aaataaaaaagaa

SEQ ID NO: 35582 - DNA, 13 bp, Artificial Sequence
  Oligonucleotide for detection of SNP TSC0011250
ttcttttttattt

SEQ ID NO: 35583 - DNA, 13 bp, Artificial Sequence
  Oligonucleotide for detection of SNP TSC0011251
tttgttaatttty

SEQ ID NO: 35584 - DNA, 13 bp, Artificial Sequence
  Oligonucleotide for detection of SNP TSC0011251
raaaattaacaaa

SEQ ID NO: 35585 - DNA, 13 bp, Artificial Sequence
  Oligonucleotide for detection of SNP TSC0011251
tttgtttatttty

SEQ ID NO: 35586 - DNA, 13 bp, Artificial Sequence
  Oligonucleotide for detection of SNP TSC0011251
raaaataaacaaa

SEQ ID NO: 35587 - DNA, 13 bp, Artificial Sequence
  Oligonucleotide for detection of SNP TSC0011251
gaagattaataaa

SEQ ID NO: 35588 - DNA, 13 bp, Artificial Sequence
  Oligonucleotide for detection of SNP TSC0011251
tttattaatcttc

SEQ ID NO: 35589 - DNA, 13 bp, Artificial Sequence
  Oligonucleotide for detection of SNP TSC0011251
gaagataaataaa

SEQ ID NO: 35590 - DNA, 13 bp, Artificial Sequence
  Oligonucleotide for detection of SNP TSC0011251
tttatttatcttc

SEQ ID NO: 35591 - DNA, 13 bp, Artificial Sequence
  Oligonucleotide for detection of SNP TSC0011252
tattttgtttaay

SEQ ID NO: 35592 - DNA, 13 bp, Artificial Sequence
  Oligonucleotide for detection of SNP TSC0011252
rttaaacaaaata

SEQ ID NO: 35593 - DNA, 13 bp, Artificial Sequence
  Oligonucleotide for detection of SNP TSC0011252
tattttttttaay

SEQ ID NO: 35594 - DNA, 13 bp, Artificial Sequence
  Oligonucleotide for detection of SNP TSC0011252
rttaaaaaaaata

SEQ ID NO: 35595 - DNA, 13 bp, Artificial Sequence
  Oligonucleotide for detection of SNP TSC0011252
gttagataaaata

SEQ ID NO: 35596 - DNA, 13 bp, Artificial Sequence
  Oligonucleotide for detection of SNP TSC0011252
tattttatctaac

SEQ ID NO: 35597 - DNA, 13 bp, Artificial Sequence
  Oligonucleotide for detection of SNP TSC0011252
gttagaaaaaata

SEQ ID NO: 35598 - DNA, 13 bp, Artificial Sequence
  Oligonucleotide for detection of SNP TSC0011252
tattttttctaac

SEQ ID NO: 35599 - DNA, 13 bp, Artificial Sequence
  Oligonucleotide for detection of SNP TSC0011255
tagattgtttgag

SEQ ID NO: 35600 - DNA, 13 bp, Artificial Sequence
  Oligonucleotide for detection of SNP TSC0011255
ctcaaacaatcta

SEQ ID NO: 35601 - DNA, 13 bp, Artificial Sequence
  Oligonucleotide for detection of SNP TSC0011255
tagattttttgag

SEQ ID NO: 35602 - DNA, 13 bp, Artificial Sequence
  Oligonucleotide for detection of SNP TSC0011255
ctcaaaaaatcta

SEQ ID NO: 35603 - DNA, 13 bp, Artificial Sequence
  Oligonucleotide for detection of SNP TSC0011255
tttaggtaatttg

SEQ ID NO: 35604 - DNA, 13 bp, Artificial Sequence
  Oligonucleotide for detection of SNP TSC0011255
caaattacctaaa

SEQ ID NO: 35605 - DNA, 13 bp, Artificial Sequence
  Oligonucleotide for detection of SNP TSC0011255
tttaggaaatttg

SEQ ID NO: 35606 - DNA, 13 bp, Artificial Sequence
  Oligonucleotide for detection of SNP TSC0011255
caaatttcctaaa

SEQ ID NO: 35607 - DNA, 13 bp, Artificial Sequence
  Oligonucleotide for detection of SNP TSC0011256
tgtagttagttaa

SEQ ID NO: 35608 - DNA, 13 bp, Artificial Sequence
  Oligonucleotide for detection of SNP TSC0011256
ttaactaactaca

SEQ ID NO: 35609 - DNA, 13 bp, Artificial Sequence
  Oligonucleotide for detection of SNP TSC0011256
tgtagtgagttaa

SEQ ID NO: 35610 - DNA, 13 bp, Artificial Sequence
  Oligonucleotide for detection of SNP TSC0011256
ttaactcactaca

SEQ ID NO: 35611 - DNA, 13 bp, Artificial Sequence
  Oligonucleotide for detection of SNP TSC0011256
ttggttgattgta

SEQ ID NO: 35612 - DNA, 13 bp, Artificial Sequence
  Oligonucleotide for detection of SNP TSC0011256
tacaatcaaccaa

SEQ ID NO: 35613 - DNA, 13 bp, Artificial Sequence
  Oligonucleotide for detection of SNP TSC0011256
ttggtttattgta

SEQ ID NO: 35614 - DNA, 13 bp, Artificial Sequence
  Oligonucleotide for detection of SNP TSC0011256
tacaataaaccaa

SEQ ID NO: 35615 - DNA, 13 bp, Artificial Sequence
  Oligonucleotide for detection of SNP TSC0011259
tttggtgttaggg

SEQ ID NO: 35616 - DNA, 13 bp, Artificial Sequence
  Oligonucleotide for detection of SNP TSC0011259
ccctaacaccaaa

SEQ ID NO: 35617 - DNA, 13 bp, Artificial Sequence
  Oligonucleotide for detection of SNP TSC0011259
tttggtattaggg

SEQ ID NO: 35618 - DNA, 13 bp, Artificial Sequence
  Oligonucleotide for detection of SNP TSC0011259
ccctaataccaaa

SEQ ID NO: 35619 - DNA, 13 bp, Artificial Sequence
  Oligonucleotide for detection of SNP TSC0011260
tttgtatgtgtaa

SEQ ID NO: 35620 - DNA, 13 bp, Artificial Sequence
  Oligonucleotide for detection of SNP TSC0011260
ttacacatacaaa

SEQ ID NO: 35621 - DNA, 13 bp, Artificial Sequence
  Oligonucleotide for detection of SNP TSC0011260
tttgtacgtgtaa

SEQ ID NO: 35622 - DNA, 13 bp, Artificial Sequence
  Oligonucleotide for detection of SNP TSC0011260
ttacacgtacaaa

SEQ ID NO: 35623 - DNA, 13 bp, Artificial Sequence
  Oligonucleotide for detection of SNP TSC0011260
ttatatgtataaa

SEQ ID NO: 35624 - DNA, 13 bp, Artificial Sequence
  Oligonucleotide for detection of SNP TSC0011260
tttatacatataa

SEQ ID NO: 35625 - DNA, 13 bp, Artificial Sequence
  Oligonucleotide for detection of SNP TSC0011260
ttatatatataaa

SEQ ID NO: 35626 - DNA, 13 bp, Artificial Sequence
  Oligonucleotide for detection of SNP TSC0011260
tttatatatataa

SEQ ID NO: 35627 - DNA, 13 bp, Artificial Sequence
  Oligonucleotide for detection of SNP TSC0011260
ttatacgtataaa

SEQ ID NO: 35628 - DNA, 13 bp, Artificial Sequence
  Oligonucleotide for detection of SNP TSC0011260
tttatacgtataa

SEQ ID NO: 35629 - DNA, 13 bp, Artificial Sequence
  Oligonucleotide for detection of SNP TSC0011261
gtgagttgagaty

SEQ ID NO: 35630 - DNA, 13 bp, Artificial Sequence
  Oligonucleotide for detection of SNP TSC0011261
ratctcaactcac

SEQ ID NO: 35631 - DNA, 13 bp, Artificial Sequence
  Oligonucleotide for detection of SNP TSC0011261
gtgagtcgagaty

SEQ ID NO: 35632 - DNA, 13 bp, Artificial Sequence
  Oligonucleotide for detection of SNP TSC0011261
ratctcgactcac

SEQ ID NO: 35633 - DNA, 13 bp, Artificial Sequence
  Oligonucleotide for detection of SNP TSC0011262
aatgtgatgaatg

SEQ ID NO: 35634 - DNA, 13 bp, Artificial Sequence
  Oligonucleotide for detection of SNP TSC0011262
cattcatcacatt

SEQ ID NO: 35635 - DNA, 13 bp, Artificial Sequence
  Oligonucleotide for detection of SNP TSC0011262
aatgtgttgaatg

SEQ ID NO: 35636 - DNA, 13 bp, Artificial Sequence
  Oligonucleotide for detection of SNP TSC0011262
cattcaacacatt

SEQ ID NO: 35637 - DNA, 13 bp, Artificial Sequence
  Oligonucleotide for detection of SNP TSC0011262
aacgtgatgaatg

SEQ ID NO: 35638 - DNA, 13 bp, Artificial Sequence
  Oligonucleotide for detection of SNP TSC0011262
cattcatcacgtt

SEQ ID NO: 35639 - DNA, 13 bp, Artificial Sequence
  Oligonucleotide for detection of SNP TSC0011262
aacgtgttgaatg

SEQ ID NO: 35640 - DNA, 13 bp, Artificial Sequence
  Oligonucleotide for detection of SNP TSC0011262
cattcaacacgtt

SEQ ID NO: 35641 - DNA, 13 bp, Artificial Sequence
  Oligonucleotide for detection of SNP TSC0011262
tatttattatgtt

SEQ ID NO: 35642 - DNA, 13 bp, Artificial Sequence
  Oligonucleotide for detection of SNP TSC0011262
aacataataaata

SEQ ID NO: 35643 - DNA, 13 bp, Artificial Sequence
  Oligonucleotide for detection of SNP TSC0011262
tatttaatatgtt

SEQ ID NO: 35644 - DNA, 13 bp, Artificial Sequence
  Oligonucleotide for detection of SNP TSC0011262
aacatattaaata

SEQ ID NO: 35645 - DNA, 13 bp, Artificial Sequence
  Oligonucleotide for detection of SNP TSC0011262
tatttattacgtt

SEQ ID NO: 35646 - DNA, 13 bp, Artificial Sequence
  Oligonucleotide for detection of SNP TSC0011262
aacgtaataaata

SEQ ID NO: 35647 - DNA, 13 bp, Artificial Sequence
  Oligonucleotide for detection of SNP TSC0011262
tatttaatacgtt

SEQ ID NO: 35648 - DNA, 13 bp, Artificial Sequence
  Oligonucleotide for detection of SNP TSC0011262
aacgtattaaata

SEQ ID NO: 35649 - DNA, 13 bp, Artificial Sequence
  Oligonucleotide for detection of SNP TSC0011263
gaaataataataa

SEQ ID NO: 35650 - DNA, 13 bp, Artificial Sequence
  Oligonucleotide for detection of SNP TSC0011263
ttattattatttc

SEQ ID NO: 35651 - DNA, 13 bp, Artificial Sequence
  Oligonucleotide for detection of SNP TSC0011263
gaaatattaataa

SEQ ID NO: 35652 - DNA, 13 bp, Artificial Sequence
  Oligonucleotide for detection of SNP TSC0011263
ttattaatatttc

SEQ ID NO: 35653 - DNA, 13 bp, Artificial Sequence
  Oligonucleotide for detection of SNP TSC0011263
ttgttgttgttty

SEQ ID NO: 35654 - DNA, 13 bp, Artificial Sequence
  Oligonucleotide for detection of SNP TSC0011263
raaacaacaacaa

SEQ ID NO: 35655 - DNA, 13 bp, Artificial Sequence
  Oligonucleotide for detection of SNP TSC0011263
ttgttggtgttty

SEQ ID NO: 35656 - DNA, 13 bp, Artificial Sequence
  Oligonucleotide for detection of SNP TSC0011263
raaacaccaacaa

SEQ ID NO: 35657 - DNA, 13 bp, Artificial Sequence
  Oligonucleotide for detection of SNP TSC0011264
aagtttatttatg

SEQ ID NO: 35658 - DNA, 13 bp, Artificial Sequence
  Oligonucleotide for detection of SNP TSC0011264
cataaataaactt

SEQ ID NO: 35659 - DNA, 13 bp, Artificial Sequence
  Oligonucleotide for detection of SNP TSC0011264
aagtttgtttatg

SEQ ID NO: 35660 - DNA, 13 bp, Artificial Sequence
  Oligonucleotide for detection of SNP TSC0011264
cataaacaaactt

SEQ ID NO: 35661 - DNA, 13 bp, Artificial Sequence
  Oligonucleotide for detection of SNP TSC0011264
aagtttatttacg

SEQ ID NO: 35662 - DNA, 13 bp, Artificial Sequence
  Oligonucleotide for detection of SNP TSC0011264
cgtaaataaactt

SEQ ID NO: 35663 - DNA, 13 bp, Artificial Sequence
  Oligonucleotide for detection of SNP TSC0011264
aagtttgtttacg

SEQ ID NO: 35664 - DNA, 13 bp, Artificial Sequence
  Oligonucleotide for detection of SNP TSC0011264
cgtaaacaaactt

SEQ ID NO: 35665 - DNA, 13 bp, Artificial Sequence
  Oligonucleotide for detection of SNP TSC0011265
gtttgaatggtag

SEQ ID NO: 35666 - DNA, 13 bp, Artificial Sequence
  Oligonucleotide for detection of SNP TSC0011265
ctaccattcaaac

SEQ ID NO: 35667 - DNA, 13 bp, Artificial Sequence
  Oligonucleotide for detection of SNP TSC0011265
gtttgattggtag

SEQ ID NO: 35668 - DNA, 13 bp, Artificial Sequence
  Oligonucleotide for detection of SNP TSC0011265
ctaccaatcaaac

SEQ ID NO: 35669 - DNA, 13 bp, Artificial Sequence
  Oligonucleotide for detection of SNP TSC0011265
ttgttatttaagy

SEQ ID NO: 35670 - DNA, 13 bp, Artificial Sequence
  Oligonucleotide for detection of SNP TSC0011265
rcttaaataacaa

SEQ ID NO: 35671 - DNA, 13 bp, Artificial Sequence
  Oligonucleotide for detection of SNP TSC0011265
ttgttaattaagy

SEQ ID NO: 35672 - DNA, 13 bp, Artificial Sequence
  Oligonucleotide for detection of SNP TSC0011265
rcttaattaacaa

SEQ ID NO: 35673 - DNA, 13 bp, Artificial Sequence
  Oligonucleotide for detection of SNP TSC0011266
ataaagattttat

SEQ ID NO: 35674 - DNA, 13 bp, Artificial Sequence
  Oligonucleotide for detection of SNP TSC0011266
ataaaatctttat

SEQ ID NO: 35675 - DNA, 13 bp, Artificial Sequence
  Oligonucleotide for detection of SNP TSC0011266
ataaaggttttat

SEQ ID NO: 35676 - DNA, 13 bp, Artificial Sequence
  Oligonucleotide for detection of SNP TSC0011266
ataaaacctttat

SEQ ID NO: 35677 - DNA, 13 bp, Artificial Sequence
  Oligonucleotide for detection of SNP TSC0011267
atataggttgtgt

SEQ ID NO: 35678 - DNA, 13 bp, Artificial Sequence
  Oligonucleotide for detection of SNP TSC0011267
acacaacctatat

SEQ ID NO: 35679 - DNA, 13 bp, Artificial Sequence
  Oligonucleotide for detection of SNP TSC0011267
atatagattgtgt

SEQ ID NO: 35680 - DNA, 13 bp, Artificial Sequence
  Oligonucleotide for detection of SNP TSC0011267
acacaatctatat

SEQ ID NO: 35681 - DNA, 13 bp, Artificial Sequence
  Oligonucleotide for detection of SNP TSC0011268
gattaggttggty

SEQ ID NO: 35682 - DNA, 13 bp, Artificial Sequence
  Oligonucleotide for detection of SNP TSC0011268
raccaacctaatc

SEQ ID NO: 35683 - DNA, 13 bp, Artificial Sequence
  Oligonucleotide for detection of SNP TSC0011268
gattagattggty

SEQ ID NO: 35684 - DNA, 13 bp, Artificial Sequence
  Oligonucleotide for detection of SNP TSC0011268
raccaatctaatc

SEQ ID NO: 35685 - DNA, 13 bp, Artificial Sequence
  Oligonucleotide for detection of SNP TSC0011269
attttggaagata

SEQ ID NO: 35686 - DNA, 13 bp, Artificial Sequence
  Oligonucleotide for detection of SNP TSC0011269
tatcttccaaaat

SEQ ID NO: 35687 - DNA, 13 bp, Artificial Sequence
  Oligonucleotide for detection of SNP TSC0011269
attttgaaagata

SEQ ID NO: 35688 - DNA, 13 bp, Artificial Sequence
  Oligonucleotide for detection of SNP TSC0011269
tatctttcaaaat

SEQ ID NO: 35689 - DNA, 13 bp, Artificial Sequence
  Oligonucleotide for detection of SNP TSC0011270
tttttaaggatta

SEQ ID NO: 35690 - DNA, 13 bp, Artificial Sequence
  Oligonucleotide for detection of SNP TSC0011270
taatccttaaaaa

SEQ ID NO: 35691 - DNA, 13 bp, Artificial Sequence
  Oligonucleotide for detection of SNP TSC0011270
tttttatggatta

SEQ ID NO: 35692 - DNA, 13 bp, Artificial Sequence
  Oligonucleotide for detection of SNP TSC0011270
taatccataaaaa

SEQ ID NO: 35693 - DNA, 13 bp, Artificial Sequence
  Oligonucleotide for detection of SNP TSC0011270
taatttttggaga

SEQ ID NO: 35694 - DNA, 13 bp, Artificial Sequence
  Oligonucleotide for detection of SNP TSC0011270
tctccaaaaatta

SEQ ID NO: 35695 - DNA, 13 bp, Artificial Sequence
  Oligonucleotide for detection of SNP TSC0011270
taatttatggaga

SEQ ID NO: 35696 - DNA, 13 bp, Artificial Sequence
  Oligonucleotide for detection of SNP TSC0011270
tctccataaatta

SEQ ID NO: 35697 - DNA, 13 bp, Artificial Sequence
  Oligonucleotide for detection of SNP TSC0011271
tgtataatttttt

SEQ ID NO: 35698 - DNA, 13 bp, Artificial Sequence
  Oligonucleotide for detection of SNP TSC0011271
aaaaaattataca

SEQ ID NO: 35699 - DNA, 13 bp, Artificial Sequence
  Oligonucleotide for detection of SNP TSC0011271
tgtatattttttt

SEQ ID NO: 35700 - DNA, 13 bp, Artificial Sequence
  Oligonucleotide for detection of SNP TSC0011271
aaaaaaatataca

SEQ ID NO: 35701 - DNA, 13 bp, Artificial Sequence
  Oligonucleotide for detection of SNP TSC0011271
aagaagttgtata

SEQ ID NO: 35702 - DNA, 13 bp, Artificial Sequence
  Oligonucleotide for detection of SNP TSC0011271
tatacaacttctt

SEQ ID NO: 35703 - DNA, 13 bp, Artificial Sequence
  Oligonucleotide for detection of SNP TSC0011271
aagaagatgtata

SEQ ID NO: 35704 - DNA, 13 bp, Artificial Sequence
  Oligonucleotide for detection of SNP TSC0011271
tatacatcttctt

SEQ ID NO: 35705 - DNA, 13 bp, Artificial Sequence
  Oligonucleotide for detection of SNP TSC0011273
tataagatttgtt

SEQ ID NO: 35706 - DNA, 13 bp, Artificial Sequence
  Oligonucleotide for detection of SNP TSC0011273
aacaaatcttata

SEQ ID NO: 35707 - DNA, 13 bp, Artificial Sequence
  Oligonucleotide for detection of SNP TSC0011273
tataagttttgtt

SEQ ID NO: 35708 - DNA, 13 bp, Artificial Sequence
  Oligonucleotide for detection of SNP TSC0011273
aacaaaacttata

SEQ ID NO: 35709 - DNA, 13 bp, Artificial Sequence
  Oligonucleotide for detection of SNP TSC0011273
aataaattttgta

SEQ ID NO: 35710 - DNA, 13 bp, Artificial Sequence
  Oligonucleotide for detection of SNP TSC0011273
tacaaaatttatt

SEQ ID NO: 35711 - DNA, 13 bp, Artificial Sequence
  Oligonucleotide for detection of SNP TSC0011273
aataaaatttgta

SEQ ID NO: 35712 - DNA, 13 bp, Artificial Sequence
  Oligonucleotide for detection of SNP TSC0011273
tacaaattttatt

SEQ ID NO: 35713 - DNA, 13 bp, Artificial Sequence
  Oligonucleotide for detection of SNP TSC0011274
taatggggtttta

SEQ ID NO: 35714 - DNA, 13 bp, Artificial Sequence
  Oligonucleotide for detection of SNP TSC0011274
taaaaccccatta

SEQ ID NO: 35715 - DNA, 13 bp, Artificial Sequence
  Oligonucleotide for detection of SNP TSC0011274
taatggagtttta

SEQ ID NO: 35716 - DNA, 13 bp, Artificial Sequence
  Oligonucleotide for detection of SNP TSC0011274
taaaactccatta

SEQ ID NO: 35717 - DNA, 13 bp, Artificial Sequence
  Oligonucleotide for detection of SNP TSC0011275
tgttatagtgggy

SEQ ID NO: 35718 - DNA, 13 bp, Artificial Sequence
  Oligonucleotide for detection of SNP TSC0011275
rcccactataaca

SEQ ID NO: 35719 - DNA, 13 bp, Artificial Sequence
  Oligonucleotide for detection of SNP TSC0011275
tgttatggtgggy

SEQ ID NO: 35720 - DNA, 13 bp, Artificial Sequence
  Oligonucleotide for detection of SNP TSC0011275
rcccaccataaca

SEQ ID NO: 35721 - DNA, 13 bp, Artificial Sequence
  Oligonucleotide for detection of SNP TSC0011275
tgttatagcgggy

SEQ ID NO: 35722 - DNA, 13 bp, Artificial Sequence
  Oligonucleotide for detection of SNP TSC0011275
rcccgctataaca

SEQ ID NO: 35723 - DNA, 13 bp, Artificial Sequence
  Oligonucleotide for detection of SNP TSC0011275
tgttacggtgggy

SEQ ID NO: 35724 - DNA, 13 bp, Artificial Sequence
  Oligonucleotide for detection of SNP TSC0011275
rcccaccgtaaca

SEQ ID NO: 35725 - DNA, 13 bp, Artificial Sequence
  Oligonucleotide for detection of SNP TSC0011275
tgttatggcgggy

SEQ ID NO: 35726 - DNA, 13 bp, Artificial Sequence
  Oligonucleotide for detection of SNP TSC0011275
rcccgccataaca

SEQ ID NO: 35727 - DNA, 13 bp, Artificial Sequence
  Oligonucleotide for detection of SNP TSC0011275
tgttacggcgggy

SEQ ID NO: 35728 - DNA, 13 bp, Artificial Sequence
  Oligonucleotide for detection of SNP TSC0011275
rcccgccgtaaca

SEQ ID NO: 35729 - DNA, 13 bp, Artificial Sequence
  Oligonucleotide for detection of SNP TSC0011275
gtttgttgtgata

SEQ ID NO: 35730 - DNA, 13 bp, Artificial Sequence
  Oligonucleotide for detection of SNP TSC0011275
tatcacaacaaac

SEQ ID NO: 35731 - DNA, 13 bp, Artificial Sequence
  Oligonucleotide for detection of SNP TSC0011275
gttcgttgtgata

SEQ ID NO: 35732 - DNA, 13 bp, Artificial Sequence
  Oligonucleotide for detection of SNP TSC0011275
tatcacaacgaac

SEQ ID NO: 35733 - DNA, 13 bp, Artificial Sequence
  Oligonucleotide for detection of SNP TSC0011275
gtttgtcgtgata

SEQ ID NO: 35734 - DNA, 13 bp, Artificial Sequence
  Oligonucleotide for detection of SNP TSC0011275
tatcacgacaaac

SEQ ID NO: 35735 - DNA, 13 bp, Artificial Sequence
  Oligonucleotide for detection of SNP TSC0011275
gttcgtcgtgata

SEQ ID NO: 35736 - DNA, 13 bp, Artificial Sequence
  Oligonucleotide for detection of SNP TSC0011275
tatcacgacgaac

SEQ ID NO: 35737 - DNA, 13 bp, Artificial Sequence
  Oligonucleotide for detection of SNP TSC0011276
tgtgtgagtgtgt

SEQ ID NO: 35738 - DNA, 13 bp, Artificial Sequence
  Oligonucleotide for detection of SNP TSC0011276
acacactcacaca

SEQ ID NO: 35739 - DNA, 13 bp, Artificial Sequence
  Oligonucleotide for detection of SNP TSC0011277
gaaattagataay

SEQ ID NO: 35740 - DNA, 13 bp, Artificial Sequence
  Oligonucleotide for detection of SNP TSC0011277
rttatctaatttc

SEQ ID NO: 35741 - DNA, 13 bp, Artificial Sequence
  Oligonucleotide for detection of SNP TSC0011277
gaaattggataay

SEQ ID NO: 35742 - DNA, 13 bp, Artificial Sequence
  Oligonucleotide for detection of SNP TSC0011277
rttatccaatttc

SEQ ID NO: 35743 - DNA, 13 bp, Artificial Sequence
  Oligonucleotide for detection of SNP TSC0011277
gaaatcggataay

SEQ ID NO: 35744 - DNA, 13 bp, Artificial Sequence
  Oligonucleotide for detection of SNP TSC0011277
rttatccgatttc

SEQ ID NO: 35745 - DNA, 13 bp, Artificial Sequence
  Oligonucleotide for detection of SNP TSC0011277
gttgtttgattty

SEQ ID NO: 35746 - DNA, 13 bp, Artificial Sequence
  Oligonucleotide for detection of SNP TSC0011277
raaatcaaacaac

SEQ ID NO: 35747 - DNA, 13 bp, Artificial Sequence
  Oligonucleotide for detection of SNP TSC0011277
gttgttcgattty

SEQ ID NO: 35748 - DNA, 13 bp, Artificial Sequence
  Oligonucleotide for detection of SNP TSC0011277
raaatcgaacaac

SEQ ID NO: 35749 - DNA, 13 bp, Artificial Sequence
  Oligonucleotide for detection of SNP TSC0011278
gagataggattag

SEQ ID NO: 35750 - DNA, 13 bp, Artificial Sequence
  Oligonucleotide for detection of SNP TSC0011278
ctaatcctatctc

SEQ ID NO: 35751 - DNA, 13 bp, Artificial Sequence
  Oligonucleotide for detection of SNP TSC0011278
gagataagattag

SEQ ID NO: 35752 - DNA, 13 bp, Artificial Sequence
  Oligonucleotide for detection of SNP TSC0011278
ctaatcttatctc

SEQ ID NO: 35753 - DNA, 13 bp, Artificial Sequence
  Oligonucleotide for detection of SNP TSC0011279
ggttttattttga

SEQ ID NO: 35754 - DNA, 13 bp, Artificial Sequence
  Oligonucleotide for detection of SNP TSC0011279
tcaaaataaaacc

SEQ ID NO: 35755 - DNA, 13 bp, Artificial Sequence
  Oligonucleotide for detection of SNP TSC0011279
ggttttgttttga

SEQ ID NO: 35756 - DNA, 13 bp, Artificial Sequence
  Oligonucleotide for detection of SNP TSC0011279
tcaaaacaaaacc

SEQ ID NO: 35757 - DNA, 13 bp, Artificial Sequence
  Oligonucleotide for detection of SNP TSC0011279
ggttttatttcga

SEQ ID NO: 35758 - DNA, 13 bp, Artificial Sequence
  Oligonucleotide for detection of SNP TSC0011279
tcgaaataaaacc

SEQ ID NO: 35759 - DNA, 13 bp, Artificial Sequence
  Oligonucleotide for detection of SNP TSC0011279
ggtttcgttttga

SEQ ID NO: 35760 - DNA, 13 bp, Artificial Sequence
  Oligonucleotide for detection of SNP TSC0011279
tcaaaacgaaacc

SEQ ID NO: 35761 - DNA, 13 bp, Artificial Sequence
  Oligonucleotide for detection of SNP TSC0011279
ggttttgtttcga

SEQ ID NO: 35762 - DNA, 13 bp, Artificial Sequence
  Oligonucleotide for detection of SNP TSC0011279
tcgaaacaaaacc

SEQ ID NO: 35763 - DNA, 13 bp, Artificial Sequence
  Oligonucleotide for detection of SNP TSC0011279
ggtttcgtttcga

SEQ ID NO: 35764 - DNA, 13 bp, Artificial Sequence
  Oligonucleotide for detection of SNP TSC0011279
tcgaaacgaaacc

SEQ ID NO: 35765 - DNA, 13 bp, Artificial Sequence
  Oligonucleotide for detection of SNP TSC0011279
ttgaaatggggty

SEQ ID NO: 35766 - DNA, 13 bp, Artificial Sequence
  Oligonucleotide for detection of SNP TSC0011279
raccccatttcaa

SEQ ID NO: 35767 - DNA, 13 bp, Artificial Sequence
  Oligonucleotide for detection of SNP TSC0011279
tcgaaatggggty

SEQ ID NO: 35768 - DNA, 13 bp, Artificial Sequence
  Oligonucleotide for detection of SNP TSC0011279
raccccatttcga

SEQ ID NO: 35769 - DNA, 13 bp, Artificial Sequence
  Oligonucleotide for detection of SNP TSC0011279
ttgaaacggggty

SEQ ID NO: 35770 - DNA, 13 bp, Artificial Sequence
  Oligonucleotide for detection of SNP TSC0011279
raccccgtttcaa

SEQ ID NO: 35771 - DNA, 13 bp, Artificial Sequence
  Oligonucleotide for detection of SNP TSC0011279
tcgaaacggggty

SEQ ID NO: 35772 - DNA, 13 bp, Artificial Sequence
  Oligonucleotide for detection of SNP TSC0011279
raccccgtttcga

SEQ ID NO: 35773 - DNA, 13 bp, Artificial Sequence
  Oligonucleotide for detection of SNP TSC0011280
ttttttgaaaata

SEQ ID NO: 35774 - DNA, 13 bp, Artificial Sequence
  Oligonucleotide for detection of SNP TSC0011280
tattttcaaaaaa

SEQ ID NO: 35775 - DNA, 13 bp, Artificial Sequence
  Oligonucleotide for detection of SNP TSC0011283
agaataattaata

SEQ ID NO: 35776 - DNA, 13 bp, Artificial Sequence
  Oligonucleotide for detection of SNP TSC0011283
tattaattattct

SEQ ID NO: 35777 - DNA, 13 bp, Artificial Sequence
  Oligonucleotide for detection of SNP TSC0011283
agaatatttaata

SEQ ID NO: 35778 - DNA, 13 bp, Artificial Sequence
  Oligonucleotide for detection of SNP TSC0011283
tattaaatattct

SEQ ID NO: 35779 - DNA, 13 bp, Artificial Sequence
  Oligonucleotide for detection of SNP TSC0011283
tattaattgtttt

SEQ ID NO: 35780 - DNA, 13 bp, Artificial Sequence
  Oligonucleotide for detection of SNP TSC0011283
aaaacaattaata

SEQ ID NO: 35781 - DNA, 13 bp, Artificial Sequence
  Oligonucleotide for detection of SNP TSC0011283
tattaaatgtttt

SEQ ID NO: 35782 - DNA, 13 bp, Artificial Sequence
  Oligonucleotide for detection of SNP TSC0011283
aaaacatttaata

SEQ ID NO: 35783 - DNA, 13 bp, Artificial Sequence
  Oligonucleotide for detection of SNP TSC0011285
ttgggtaaatagg

SEQ ID NO: 35784 - DNA, 13 bp, Artificial Sequence
  Oligonucleotide for detection of SNP TSC0011285
cctatttacccaa

SEQ ID NO: 35785 - DNA, 13 bp, Artificial Sequence
  Oligonucleotide for detection of SNP TSC0011285
ttgggtgaatagg

SEQ ID NO: 35786 - DNA, 13 bp, Artificial Sequence
  Oligonucleotide for detection of SNP TSC0011285
cctattcacccaa

SEQ ID NO: 35787 - DNA, 13 bp, Artificial Sequence
  Oligonucleotide for detection of SNP TSC0011285
tcgggtaaatagg

SEQ ID NO: 35788 - DNA, 13 bp, Artificial Sequence
  Oligonucleotide for detection of SNP TSC0011285
cctatttacccga

SEQ ID NO: 35789 - DNA, 13 bp, Artificial Sequence
  Oligonucleotide for detection of SNP TSC0011285
tcgggtgaatagg

SEQ ID NO: 35790 - DNA, 13 bp, Artificial Sequence
  Oligonucleotide for detection of SNP TSC0011285
cctattcacccga

SEQ ID NO: 35791 - DNA, 13 bp, Artificial Sequence
  Oligonucleotide for detection of SNP TSC0011286
ttgatatggaata

SEQ ID NO: 35792 - DNA, 13 bp, Artificial Sequence
  Oligonucleotide for detection of SNP TSC0011286
tattccatatcaa

SEQ ID NO: 35793 - DNA, 13 bp, Artificial Sequence
  Oligonucleotide for detection of SNP TSC0011286
ttgatacggaata

SEQ ID NO: 35794 - DNA, 13 bp, Artificial Sequence
  Oligonucleotide for detection of SNP TSC0011286
tattccgtatcaa

SEQ ID NO: 35795 - DNA, 13 bp, Artificial Sequence
  Oligonucleotide for detection of SNP TSC0011286
tgttttgtgttaa

SEQ ID NO: 35796 - DNA, 13 bp, Artificial Sequence
  Oligonucleotide for detection of SNP TSC0011286
ttaacacaaaaca

SEQ ID NO: 35797 - DNA, 13 bp, Artificial Sequence
  Oligonucleotide for detection of SNP TSC0011286
tgttttatgttaa

SEQ ID NO: 35798 - DNA, 13 bp, Artificial Sequence
  Oligonucleotide for detection of SNP TSC0011286
ttaacataaaaca

SEQ ID NO: 35799 - DNA, 13 bp, Artificial Sequence
  Oligonucleotide for detection of SNP TSC0011286
tgtttcgtgttaa

SEQ ID NO: 35800 - DNA, 13 bp, Artificial Sequence
  Oligonucleotide for detection of SNP TSC0011286
ttaacacgaaaca

SEQ ID NO: 35801 - DNA, 13 bp, Artificial Sequence
  Oligonucleotide for detection of SNP TSC0011287
ttgggagtgattg

SEQ ID NO: 35802 - DNA, 13 bp, Artificial Sequence
  Oligonucleotide for detection of SNP TSC0011287
caatcactcccaa

SEQ ID NO: 35803 - DNA, 13 bp, Artificial Sequence
  Oligonucleotide for detection of SNP TSC0011287
ttgggaatgattg

SEQ ID NO: 35804 - DNA, 13 bp, Artificial Sequence
  Oligonucleotide for detection of SNP TSC0011287
caatcattcccaa

SEQ ID NO: 35805 - DNA, 13 bp, Artificial Sequence
  Oligonucleotide for detection of SNP TSC0011288
ttagaggtttgta

SEQ ID NO: 35806 - DNA, 13 bp, Artificial Sequence
  Oligonucleotide for detection of SNP TSC0011288
tacaaacctctaa

SEQ ID NO: 35807 - DNA, 13 bp, Artificial Sequence
  Oligonucleotide for detection of SNP TSC0011288
ttagagatttgta

SEQ ID NO: 35808 - DNA, 13 bp, Artificial Sequence
  Oligonucleotide for detection of SNP TSC0011288
tacaaatctctaa

SEQ ID NO: 35809 - DNA, 13 bp, Artificial Sequence
  Oligonucleotide for detection of SNP TSC0011289
tagttttttaagt

SEQ ID NO: 35810 - DNA, 13 bp, Artificial Sequence
  Oligonucleotide for detection of SNP TSC0011289
acttaaaaaacta

SEQ ID NO: 35811 - DNA, 13 bp, Artificial Sequence
  Oligonucleotide for detection of SNP TSC0011289
tagtttgttaagt

SEQ ID NO: 35812 - DNA, 13 bp, Artificial Sequence
  Oligonucleotide for detection of SNP TSC0011289
acttaacaaacta

SEQ ID NO: 35813 - DNA, 13 bp, Artificial Sequence
  Oligonucleotide for detection of SNP TSC0011289
atttgggaggtta

SEQ ID NO: 35814 - DNA, 13 bp, Artificial Sequence
  Oligonucleotide for detection of SNP TSC0011289
taacctcccaaat

SEQ ID NO: 35815 - DNA, 13 bp, Artificial Sequence
  Oligonucleotide for detection of SNP TSC0011289
atttggtaggtta

SEQ ID NO: 35816 - DNA, 13 bp, Artificial Sequence
  Oligonucleotide for detection of SNP TSC0011289
taacctaccaaat

SEQ ID NO: 35817 - DNA, 13 bp, Artificial Sequence
  Oligonucleotide for detection of SNP TSC0011290
atagaaatattga

SEQ ID NO: 35818 - DNA, 13 bp, Artificial Sequence
  Oligonucleotide for detection of SNP TSC0011290
tcaatatttctat

SEQ ID NO: 35819 - DNA, 13 bp, Artificial Sequence
  Oligonucleotide for detection of SNP TSC0011290
atagaattattga

SEQ ID NO: 35820 - DNA, 13 bp, Artificial Sequence
  Oligonucleotide for detection of SNP TSC0011290
tcaataattctat

SEQ ID NO: 35821 - DNA, 13 bp, Artificial Sequence
  Oligonucleotide for detection of SNP TSC0011290
ttagtatttttgt

SEQ ID NO: 35822 - DNA, 13 bp, Artificial Sequence
  Oligonucleotide for detection of SNP TSC0011290
acaaaaatactaa

SEQ ID NO: 35823 - DNA, 13 bp, Artificial Sequence
  Oligonucleotide for detection of SNP TSC0011290
ttagtaattttgt

SEQ ID NO: 35824 - DNA, 13 bp, Artificial Sequence
  Oligonucleotide for detection of SNP TSC0011290
acaaaattactaa

SEQ ID NO: 35825 - DNA, 13 bp, Artificial Sequence
  Oligonucleotide for detection of SNP TSC0011291
ataatggaaagta

SEQ ID NO: 35826 - DNA, 13 bp, Artificial Sequence
  Oligonucleotide for detection of SNP TSC0011291
tactttccattat

SEQ ID NO: 35827 - DNA, 13 bp, Artificial Sequence
  Oligonucleotide for detection of SNP TSC0011291
ataatgtaaagta

SEQ ID NO: 35828 - DNA, 13 bp, Artificial Sequence
  Oligonucleotide for detection of SNP TSC0011291
tactttacattat

SEQ ID NO: 35829 - DNA, 13 bp, Artificial Sequence
  Oligonucleotide for detection of SNP TSC0011291
tattttttattat

SEQ ID NO: 35830 - DNA, 13 bp, Artificial Sequence
  Oligonucleotide for detection of SNP TSC0011291
ataataaaaaata

SEQ ID NO: 35831 - DNA, 13 bp, Artificial Sequence
  Oligonucleotide for detection of SNP TSC0011291
tattttatattat

SEQ ID NO: 35832 - DNA, 13 bp, Artificial Sequence
  Oligonucleotide for detection of SNP TSC0011291
ataatataaaata

SEQ ID NO: 35833 - DNA, 13 bp, Artificial Sequence
  Oligonucleotide for detection of SNP TSC0011292
gtggtttgagagy

SEQ ID NO: 35834 - DNA, 13 bp, Artificial Sequence
  Oligonucleotide for detection of SNP TSC0011292
rctctcaaaccac

SEQ ID NO: 35835 - DNA, 13 bp, Artificial Sequence
  Oligonucleotide for detection of SNP TSC0011292
gtggttcgagagy

SEQ ID NO: 35836 - DNA, 13 bp, Artificial Sequence
  Oligonucleotide for detection of SNP TSC0011292
rctctcgaaccac

SEQ ID NO: 35837 - DNA, 13 bp, Artificial Sequence
  Oligonucleotide for detection of SNP TSC0011292
gtttttgggttay

SEQ ID NO: 35838 - DNA, 13 bp, Artificial Sequence
  Oligonucleotide for detection of SNP TSC0011292
rtaacccaaaaac

SEQ ID NO: 35839 - DNA, 13 bp, Artificial Sequence
  Oligonucleotide for detection of SNP TSC0011292
gtttttaggttay

SEQ ID NO: 35840 - DNA, 13 bp, Artificial Sequence
  Oligonucleotide for detection of SNP TSC0011292
rtaacctaaaaac

SEQ ID NO: 35841 - DNA, 13 bp, Artificial Sequence
  Oligonucleotide for detection of SNP TSC0011292
gttttcgggttay

SEQ ID NO: 35842 - DNA, 13 bp, Artificial Sequence
  Oligonucleotide for detection of SNP TSC0011292
rtaacccgaaaac

SEQ ID NO: 35843 - DNA, 13 bp, Artificial Sequence
  Oligonucleotide for detection of SNP TSC0011293
aaaatttggagat

SEQ ID NO: 35844 - DNA, 13 bp, Artificial Sequence
  Oligonucleotide for detection of SNP TSC0011293
atctccaaatttt

SEQ ID NO: 35845 - DNA, 13 bp, Artificial Sequence
  Oligonucleotide for detection of SNP TSC0011293
aaaattcggagat

SEQ ID NO: 35846 - DNA, 13 bp, Artificial Sequence
  Oligonucleotide for detection of SNP TSC0011293
atctccgaatttt

SEQ ID NO: 35847 - DNA, 13 bp, Artificial Sequence
  Oligonucleotide for detection of SNP TSC0011293
atttttggatttt

SEQ ID NO: 35848 - DNA, 13 bp, Artificial Sequence
  Oligonucleotide for detection of SNP TSC0011293
aaaatccaaaaat

SEQ ID NO: 35849 - DNA, 13 bp, Artificial Sequence
  Oligonucleotide for detection of SNP TSC0011293
atttttagatttt

SEQ ID NO: 35850 - DNA, 13 bp, Artificial Sequence
  Oligonucleotide for detection of SNP TSC0011293
aaaatctaaaaat

SEQ ID NO: 35851 - DNA, 13 bp, Artificial Sequence
  Oligonucleotide for detection of SNP TSC0011293
attttcggatttt

SEQ ID NO: 35852 - DNA, 13 bp, Artificial Sequence
  Oligonucleotide for detection of SNP TSC0011293
aaaatccgaaaat

SEQ ID NO: 35853 - DNA, 13 bp, Artificial Sequence
  Oligonucleotide for detection of SNP TSC0011295
tattatatatatt

SEQ ID NO: 35854 - DNA, 13 bp, Artificial Sequence
  Oligonucleotide for detection of SNP TSC0011295
aatatatataata

SEQ ID NO: 35855 - DNA, 13 bp, Artificial Sequence
  Oligonucleotide for detection of SNP TSC0011295
tattatgtatatt

SEQ ID NO: 35856 - DNA, 13 bp, Artificial Sequence
  Oligonucleotide for detection of SNP TSC0011295
aatatacataata

SEQ ID NO: 35857 - DNA, 13 bp, Artificial Sequence
  Oligonucleotide for detection of SNP TSC0011297
tttggtagtggty

SEQ ID NO: 35858 - DNA, 13 bp, Artificial Sequence
  Oligonucleotide for detection of SNP TSC0011297
raccactaccaaa

SEQ ID NO: 35859 - DNA, 13 bp, Artificial Sequence
  Oligonucleotide for detection of SNP TSC0011297
tttggtggtggty

SEQ ID NO: 35860 - DNA, 13 bp, Artificial Sequence
  Oligonucleotide for detection of SNP TSC0011297
raccaccaccaaa

SEQ ID NO: 35861 - DNA, 13 bp, Artificial Sequence
  Oligonucleotide for detection of SNP TSC0011297
tttggcggtggty

SEQ ID NO: 35862 - DNA, 13 bp, Artificial Sequence
  Oligonucleotide for detection of SNP TSC0011297
raccaccgccaaa

SEQ ID NO: 35863 - DNA, 13 bp, Artificial Sequence
  Oligonucleotide for detection of SNP TSC0011297
ggttattgttagg

SEQ ID NO: 35864 - DNA, 13 bp, Artificial Sequence
  Oligonucleotide for detection of SNP TSC0011297
cctaacaataacc

SEQ ID NO: 35865 - DNA, 13 bp, Artificial Sequence
  Oligonucleotide for detection of SNP TSC0011297
ggttatcgttagg

SEQ ID NO: 35866 - DNA, 13 bp, Artificial Sequence
  Oligonucleotide for detection of SNP TSC0011297
cctaacgataacc

SEQ ID NO: 35867 - DNA, 13 bp, Artificial Sequence
  Oligonucleotide for detection of SNP TSC0011303
ttgtagtgttagg

SEQ ID NO: 35868 - DNA, 13 bp, Artificial Sequence
  Oligonucleotide for detection of SNP TSC0011303
cctaacactacaa

SEQ ID NO: 35869 - DNA, 13 bp, Artificial Sequence
  Oligonucleotide for detection of SNP TSC0011303
tcgtagtgttagg

SEQ ID NO: 35870 - DNA, 13 bp, Artificial Sequence
  Oligonucleotide for detection of SNP TSC0011303
cctaacactacga

SEQ ID NO: 35871 - DNA, 13 bp, Artificial Sequence
  Oligonucleotide for detection of SNP TSC0011303
ttgtagcgttagg

SEQ ID NO: 35872 - DNA, 13 bp, Artificial Sequence
  Oligonucleotide for detection of SNP TSC0011303
cctaacgctacaa

SEQ ID NO: 35873 - DNA, 13 bp, Artificial Sequence
  Oligonucleotide for detection of SNP TSC0011303
tcgtagcgttagg

SEQ ID NO: 35874 - DNA, 13 bp, Artificial Sequence
  Oligonucleotide for detection of SNP TSC0011303
cctaacgctacga

SEQ ID NO: 35875 - DNA, 13 bp, Artificial Sequence
  Oligonucleotide for detection of SNP TSC0011303
tttaatgttatgg

SEQ ID NO: 35876 - DNA, 13 bp, Artificial Sequence
  Oligonucleotide for detection of SNP TSC0011303
ccataacattaaa

SEQ ID NO: 35877 - DNA, 13 bp, Artificial Sequence
  Oligonucleotide for detection of SNP TSC0011303
tttaatattatgg

SEQ ID NO: 35878 - DNA, 13 bp, Artificial Sequence
  Oligonucleotide for detection of SNP TSC0011303
ccataatattaaa

SEQ ID NO: 35879 - DNA, 13 bp, Artificial Sequence
  Oligonucleotide for detection of SNP TSC0011303
tttaacgttatgg

SEQ ID NO: 35880 - DNA, 13 bp, Artificial Sequence
  Oligonucleotide for detection of SNP TSC0011303
ccataacgttaaa

SEQ ID NO: 35881 - DNA, 13 bp, Artificial Sequence
  Oligonucleotide for detection of SNP TSC0011303
tttaatattacgg

SEQ ID NO: 35882 - DNA, 13 bp, Artificial Sequence
  Oligonucleotide for detection of SNP TSC0011303
ccgtaatattaaa

SEQ ID NO: 35883 - DNA, 13 bp, Artificial Sequence
  Oligonucleotide for detection of SNP TSC0011303
tttaatgttacgg

SEQ ID NO: 35884 - DNA, 13 bp, Artificial Sequence
  Oligonucleotide for detection of SNP TSC0011303
ccgtaacattaaa

SEQ ID NO: 35885 - DNA, 13 bp, Artificial Sequence
  Oligonucleotide for detection of SNP TSC0011303
tttaacgttacgg

SEQ ID NO: 35886 - DNA, 13 bp, Artificial Sequence
  Oligonucleotide for detection of SNP TSC0011303
ccgtaacgttaaa

SEQ ID NO: 35887 - DNA, 13 bp, Artificial Sequence
  Oligonucleotide for detection of SNP TSC0011304
tgaaaatgggggt

SEQ ID NO: 35888 - DNA, 13 bp, Artificial Sequence
  Oligonucleotide for detection of SNP TSC0011304
acccccattttca

SEQ ID NO: 35889 - DNA, 13 bp, Artificial Sequence
  Oligonucleotide for detection of SNP TSC0011304
tgaaaacgggggt

SEQ ID NO: 35890 - DNA, 13 bp, Artificial Sequence
  Oligonucleotide for detection of SNP TSC0011304
acccccgttttca

SEQ ID NO: 35891 - DNA, 13 bp, Artificial Sequence
  Oligonucleotide for detection of SNP TSC0011304
attttcgttttta

SEQ ID NO: 35892 - DNA, 13 bp, Artificial Sequence
  Oligonucleotide for detection of SNP TSC0011304
taaaaacgaaaat

SEQ ID NO: 35893 - DNA, 13 bp, Artificial Sequence
  Oligonucleotide for detection of SNP TSC0011305
ggttttattgttt

SEQ ID NO: 35894 - DNA, 13 bp, Artificial Sequence
  Oligonucleotide for detection of SNP TSC0011305
aaacaataaaacc

SEQ ID NO: 35895 - DNA, 13 bp, Artificial Sequence
  Oligonucleotide for detection of SNP TSC0011305
ggttttgttgttt

SEQ ID NO: 35896 - DNA, 13 bp, Artificial Sequence
  Oligonucleotide for detection of SNP TSC0011305
aaacaacaaaacc

SEQ ID NO: 35897 - DNA, 13 bp, Artificial Sequence
  Oligonucleotide for detection of SNP TSC0011306
aattttgttaaaa

SEQ ID NO: 35898 - DNA, 13 bp, Artificial Sequence
  Oligonucleotide for detection of SNP TSC0011306
ttttaacaaaatt

SEQ ID NO: 35899 - DNA, 13 bp, Artificial Sequence
  Oligonucleotide for detection of SNP TSC0011306
aattttattaaaa

SEQ ID NO: 35900 - DNA, 13 bp, Artificial Sequence
  Oligonucleotide for detection of SNP TSC0011306
ttttaataaaatt

SEQ ID NO: 35901 - DNA, 13 bp, Artificial Sequence
  Oligonucleotide for detection of SNP TSC0011307
tagagtatatata

SEQ ID NO: 35902 - DNA, 13 bp, Artificial Sequence
  Oligonucleotide for detection of SNP TSC0011307
tatatatactcta

SEQ ID NO: 35903 - DNA, 13 bp, Artificial Sequence
  Oligonucleotide for detection of SNP TSC0011307
tagagtgtatata

SEQ ID NO: 35904 - DNA, 13 bp, Artificial Sequence
  Oligonucleotide for detection of SNP TSC0011307
tatatacactcta

SEQ ID NO: 35905 - DNA, 13 bp, Artificial Sequence
  Oligonucleotide for detection of SNP TSC0011307
tagagcgtatata

SEQ ID NO: 35906 - DNA, 13 bp, Artificial Sequence
  Oligonucleotide for detection of SNP TSC0011307
tatatacgctcta

SEQ ID NO: 35907 - DNA, 13 bp, Artificial Sequence
  Oligonucleotide for detection of SNP TSC0011307
tgtatatgtttta

SEQ ID NO: 35908 - DNA, 13 bp, Artificial Sequence
  Oligonucleotide for detection of SNP TSC0011307
taaaacatataca

SEQ ID NO: 35909 - DNA, 13 bp, Artificial Sequence
  Oligonucleotide for detection of SNP TSC0011307
tgtatacgtttta

SEQ ID NO: 35910 - DNA, 13 bp, Artificial Sequence
  Oligonucleotide for detection of SNP TSC0011307
taaaacgtataca

SEQ ID NO: 35911 - DNA, 13 bp, Artificial Sequence
  Oligonucleotide for detection of SNP TSC0011308
ataaggagattta

SEQ ID NO: 35912 - DNA, 13 bp, Artificial Sequence
  Oligonucleotide for detection of SNP TSC0011308
taaatctccttat

SEQ ID NO: 35913 - DNA, 13 bp, Artificial Sequence
  Oligonucleotide for detection of SNP TSC0011308
ataaggtgattta

SEQ ID NO: 35914 - DNA, 13 bp, Artificial Sequence
  Oligonucleotide for detection of SNP TSC0011308
taaatcaccttat

SEQ ID NO: 35915 - DNA, 13 bp, Artificial Sequence
  Oligonucleotide for detection of SNP TSC0011308
ataaggcgattta

SEQ ID NO: 35916 - DNA, 13 bp, Artificial Sequence
  Oligonucleotide for detection of SNP TSC0011308
taaatcgccttat

SEQ ID NO: 35917 - DNA, 13 bp, Artificial Sequence
  Oligonucleotide for detection of SNP TSC0011308
tgggtttttttgt

SEQ ID NO: 35918 - DNA, 13 bp, Artificial Sequence
  Oligonucleotide for detection of SNP TSC0011308
acaaaaaaaccca

SEQ ID NO: 35919 - DNA, 13 bp, Artificial Sequence
  Oligonucleotide for detection of SNP TSC0011308
tgggttgttttgt

SEQ ID NO: 35920 - DNA, 13 bp, Artificial Sequence
  Oligonucleotide for detection of SNP TSC0011308
acaaaacaaccca

SEQ ID NO: 35921 - DNA, 13 bp, Artificial Sequence
  Oligonucleotide for detection of SNP TSC0011308
tgggtcgttttgt

SEQ ID NO: 35922 - DNA, 13 bp, Artificial Sequence
  Oligonucleotide for detection of SNP TSC0011308
acaaaacgaccca

SEQ ID NO: 35923 - DNA, 13 bp, Artificial Sequence
  Oligonucleotide for detection of SNP TSC0011309
tgaaaaatttagt

SEQ ID NO: 35924 - DNA, 13 bp, Artificial Sequence
  Oligonucleotide for detection of SNP TSC0011309
actaaatttttca

SEQ ID NO: 35925 - DNA, 13 bp, Artificial Sequence
  Oligonucleotide for detection of SNP TSC0011309
tgaaaattttagt

SEQ ID NO: 35926 - DNA, 13 bp, Artificial Sequence
  Oligonucleotide for detection of SNP TSC0011309
actaaaattttca

SEQ ID NO: 35927 - DNA, 13 bp, Artificial Sequence
  Oligonucleotide for detection of SNP TSC0011309
attgggtttttta

SEQ ID NO: 35928 - DNA, 13 bp, Artificial Sequence
  Oligonucleotide for detection of SNP TSC0011309
taaaaaacccaat

SEQ ID NO: 35929 - DNA, 13 bp, Artificial Sequence
  Oligonucleotide for detection of SNP TSC0011309
attggggttttta

SEQ ID NO: 35930 - DNA, 13 bp, Artificial Sequence
  Oligonucleotide for detection of SNP TSC0011309
taaaaaccccaat

SEQ ID NO: 35931 - DNA, 13 bp, Artificial Sequence
  Oligonucleotide for detection of SNP TSC0011310
tgtaagagatttt

SEQ ID NO: 35932 - DNA, 13 bp, Artificial Sequence
  Oligonucleotide for detection of SNP TSC0011310
aaaatctcttaca

SEQ ID NO: 35933 - DNA, 13 bp, Artificial Sequence
  Oligonucleotide for detection of SNP TSC0011310
tgtaagggatttt

SEQ ID NO: 35934 - DNA, 13 bp, Artificial Sequence
  Oligonucleotide for detection of SNP TSC0011310
aaaatcccttaca

SEQ ID NO: 35935 - DNA, 13 bp, Artificial Sequence
  Oligonucleotide for detection of SNP TSC0011310
cgtaagagatttt

SEQ ID NO: 35936 - DNA, 13 bp, Artificial Sequence
  Oligonucleotide for detection of SNP TSC0011310
aaaatctcttacg

SEQ ID NO: 35937 - DNA, 13 bp, Artificial Sequence
  Oligonucleotide for detection of SNP TSC0011310
cgtaagggatttt

SEQ ID NO: 35938 - DNA, 13 bp, Artificial Sequence
  Oligonucleotide for detection of SNP TSC0011310
aaaatcccttacg

SEQ ID NO: 35939 - DNA, 13 bp, Artificial Sequence
  Oligonucleotide for detection of SNP TSC0011312
ataataaaaaatg

SEQ ID NO: 35940 - DNA, 13 bp, Artificial Sequence
  Oligonucleotide for detection of SNP TSC0011312
cattttttattat

SEQ ID NO: 35941 - DNA, 13 bp, Artificial Sequence
  Oligonucleotide for detection of SNP TSC0011312
ataatataaaatg

SEQ ID NO: 35942 - DNA, 13 bp, Artificial Sequence
  Oligonucleotide for detection of SNP TSC0011312
cattttatattat

SEQ ID NO: 35943 - DNA, 13 bp, Artificial Sequence
  Oligonucleotide for detection of SNP TSC0011312
tattttttgttgt

SEQ ID NO: 35944 - DNA, 13 bp, Artificial Sequence
  Oligonucleotide for detection of SNP TSC0011312
acaacaaaaaata

SEQ ID NO: 35945 - DNA, 13 bp, Artificial Sequence
  Oligonucleotide for detection of SNP TSC0011312
tattttgtgttgt

SEQ ID NO: 35946 - DNA, 13 bp, Artificial Sequence
  Oligonucleotide for detection of SNP TSC0011312
acaacacaaaata

SEQ ID NO: 35947 - DNA, 13 bp, Artificial Sequence
  Oligonucleotide for detection of SNP TSC0011313
ttgtaagtgttag

SEQ ID NO: 35948 - DNA, 13 bp, Artificial Sequence
  Oligonucleotide for detection of SNP TSC0011313
ctaacacttacaa

SEQ ID NO: 35949 - DNA, 13 bp, Artificial Sequence
  Oligonucleotide for detection of SNP TSC0011313
ttgtaaatgttag

SEQ ID NO: 35950 - DNA, 13 bp, Artificial Sequence
  Oligonucleotide for detection of SNP TSC0011313
ctaacatttacaa

SEQ ID NO: 35951 - DNA, 13 bp, Artificial Sequence
  Oligonucleotide for detection of SNP TSC0011314
ttgtttgttttat

SEQ ID NO: 35952 - DNA, 13 bp, Artificial Sequence
  Oligonucleotide for detection of SNP TSC0011314
ataaaacaaacaa

SEQ ID NO: 35953 - DNA, 13 bp, Artificial Sequence
  Oligonucleotide for detection of SNP TSC0011314
ttgttttttttat

SEQ ID NO: 35954 - DNA, 13 bp, Artificial Sequence
  Oligonucleotide for detection of SNP TSC0011314
ataaaaaaaacaa

SEQ ID NO: 35955 - DNA, 13 bp, Artificial Sequence
  Oligonucleotide for detection of SNP TSC0011314
ttgttcgttttat

SEQ ID NO: 35956 - DNA, 13 bp, Artificial Sequence
  Oligonucleotide for detection of SNP TSC0011314
ataaaacgaacaa

SEQ ID NO: 35957 - DNA, 13 bp, Artificial Sequence
  Oligonucleotide for detection of SNP TSC0011314
ataaagtggataa

SEQ ID NO: 35958 - DNA, 13 bp, Artificial Sequence
  Oligonucleotide for detection of SNP TSC0011314
ttatccactttat

SEQ ID NO: 35959 - DNA, 13 bp, Artificial Sequence
  Oligonucleotide for detection of SNP TSC0011314
ataaagaggataa

SEQ ID NO: 35960 - DNA, 13 bp, Artificial Sequence
  Oligonucleotide for detection of SNP TSC0011314
ttatcctctttat

SEQ ID NO: 35961 - DNA, 13 bp, Artificial Sequence
  Oligonucleotide for detection of SNP TSC0011314
ataaagcggataa

SEQ ID NO: 35962 - DNA, 13 bp, Artificial Sequence
  Oligonucleotide for detection of SNP TSC0011314
ttatccgctttat

SEQ ID NO: 35963 - DNA, 13 bp, Artificial Sequence
  Oligonucleotide for detection of SNP TSC0011315
agtgtaatgtttt

SEQ ID NO: 35964 - DNA, 13 bp, Artificial Sequence
  Oligonucleotide for detection of SNP TSC0011315
aaaacattacact

SEQ ID NO: 35965 - DNA, 13 bp, Artificial Sequence
  Oligonucleotide for detection of SNP TSC0011315
agtgtagtgtttt

SEQ ID NO: 35966 - DNA, 13 bp, Artificial Sequence
  Oligonucleotide for detection of SNP TSC0011315
aaaacactacact

SEQ ID NO: 35967 - DNA, 13 bp, Artificial Sequence
  Oligonucleotide for detection of SNP TSC0011318
attgttattgggg

SEQ ID NO: 35968 - DNA, 13 bp, Artificial Sequence
  Oligonucleotide for detection of SNP TSC0011318
ccccaataacaat

SEQ ID NO: 35969 - DNA, 13 bp, Artificial Sequence
  Oligonucleotide for detection of SNP TSC0011318
attgttgttgggg

SEQ ID NO: 35970 - DNA, 13 bp, Artificial Sequence
  Oligonucleotide for detection of SNP TSC0011318
ccccaacaacaat

SEQ ID NO: 35971 - DNA, 13 bp, Artificial Sequence
  Oligonucleotide for detection of SNP TSC0011319
tttttttgtggta

SEQ ID NO: 35972 - DNA, 13 bp, Artificial Sequence
  Oligonucleotide for detection of SNP TSC0011319
taccacaaaaaaa

SEQ ID NO: 35973 - DNA, 13 bp, Artificial Sequence
  Oligonucleotide for detection of SNP TSC0011319
ttttttcgtggta

SEQ ID NO: 35974 - DNA, 13 bp, Artificial Sequence
  Oligonucleotide for detection of SNP TSC0011319
taccacgaaaaaa

SEQ ID NO: 35975 - DNA, 13 bp, Artificial Sequence
  Oligonucleotide for detection of SNP TSC0011319
tgttatggggaga

SEQ ID NO: 35976 - DNA, 13 bp, Artificial Sequence
  Oligonucleotide for detection of SNP TSC0011319
tctccccataaca

SEQ ID NO: 35977 - DNA, 13 bp, Artificial Sequence
  Oligonucleotide for detection of SNP TSC0011319
tgttatagggaga

SEQ ID NO: 35978 - DNA, 13 bp, Artificial Sequence
  Oligonucleotide for detection of SNP TSC0011319
tctccctataaca

SEQ ID NO: 35979 - DNA, 13 bp, Artificial Sequence
  Oligonucleotide for detection of SNP TSC0011319
tgttacggggaga

SEQ ID NO: 35980 - DNA, 13 bp, Artificial Sequence
  Oligonucleotide for detection of SNP TSC0011319
tctccccgtaaca

SEQ ID NO: 35981 - DNA, 13 bp, Artificial Sequence
  Oligonucleotide for detection of SNP TSC0011325
tggtaaaaagaat

SEQ ID NO: 35982 - DNA, 13 bp, Artificial Sequence
  Oligonucleotide for detection of SNP TSC0011325
attctttttacca

SEQ ID NO: 35983 - DNA, 13 bp, Artificial Sequence
  Oligonucleotide for detection of SNP TSC0011325
tggtaataagaat

SEQ ID NO: 35984 - DNA, 13 bp, Artificial Sequence
  Oligonucleotide for detection of SNP TSC0011325
attcttattacca

SEQ ID NO: 35985 - DNA, 13 bp, Artificial Sequence
  Oligonucleotide for detection of SNP TSC0011325
attttttttatta

SEQ ID NO: 35986 - DNA, 13 bp, Artificial Sequence
  Oligonucleotide for detection of SNP TSC0011325
taataaaaaaaat

SEQ ID NO: 35987 - DNA, 13 bp, Artificial Sequence
  Oligonucleotide for detection of SNP TSC0011325
atttttattatta

SEQ ID NO: 35988 - DNA, 13 bp, Artificial Sequence
  Oligonucleotide for detection of SNP TSC0011325
taataataaaaat

SEQ ID NO: 35989 - DNA, 13 bp, Artificial Sequence
  Oligonucleotide for detection of SNP TSC0011326
gttttaattgtaa

SEQ ID NO: 35990 - DNA, 13 bp, Artificial Sequence
  Oligonucleotide for detection of SNP TSC0011326
ttacaattaaaac

SEQ ID NO: 35991 - DNA, 13 bp, Artificial Sequence
  Oligonucleotide for detection of SNP TSC0011326
gttttatttgtaa

SEQ ID NO: 35992 - DNA, 13 bp, Artificial Sequence
  Oligonucleotide for detection of SNP TSC0011326
ttacaaataaaac

SEQ ID NO: 35993 - DNA, 13 bp, Artificial Sequence
  Oligonucleotide for detection of SNP TSC0011326
ttgtagttaagay

SEQ ID NO: 35994 - DNA, 13 bp, Artificial Sequence
  Oligonucleotide for detection of SNP TSC0011326
rtcttaactacaa

SEQ ID NO: 35995 - DNA, 13 bp, Artificial Sequence
  Oligonucleotide for detection of SNP TSC0011326
ttgtaggtaagay

SEQ ID NO: 35996 - DNA, 13 bp, Artificial Sequence
  Oligonucleotide for detection of SNP TSC0011326
rtcttacctacaa

SEQ ID NO: 35997 - DNA, 13 bp, Artificial Sequence
  Oligonucleotide for detection of SNP TSC0011328
attttattaatty

SEQ ID NO: 35998 - DNA, 13 bp, Artificial Sequence
  Oligonucleotide for detection of SNP TSC0011328
raattaataaaat

SEQ ID NO: 35999 - DNA, 13 bp, Artificial Sequence
  Oligonucleotide for detection of SNP TSC0011328
attttagtaatty

SEQ ID NO: 36000 - DNA, 13 bp, Artificial Sequence
  Oligonucleotide for detection of SNP TSC0011328
raattactaaaat

SEQ ID NO: 36001 - DNA, 13 bp, Artificial Sequence
  Oligonucleotide for detection of SNP TSC0011328
gagttggtagaat

SEQ ID NO: 36002 - DNA, 13 bp, Artificial Sequence
  Oligonucleotide for detection of SNP TSC0011328
attctaccaactc

SEQ ID NO: 36003 - DNA, 13 bp, Artificial Sequence
  Oligonucleotide for detection of SNP TSC0011328
gagttgttagaat

SEQ ID NO: 36004 - DNA, 13 bp, Artificial Sequence
  Oligonucleotide for detection of SNP TSC0011328
attctaacaactc

SEQ ID NO: 36005 - DNA, 13 bp, Artificial Sequence
  Oligonucleotide for detection of SNP TSC0011329
gttattggagagt

SEQ ID NO: 36006 - DNA, 13 bp, Artificial Sequence
  Oligonucleotide for detection of SNP TSC0011329
actctccaataac

SEQ ID NO: 36007 - DNA, 13 bp, Artificial Sequence
  Oligonucleotide for detection of SNP TSC0011329
gttattagagagt

SEQ ID NO: 36008 - DNA, 13 bp, Artificial Sequence
  Oligonucleotide for detection of SNP TSC0011329
actctctaataac

SEQ ID NO: 36009 - DNA, 13 bp, Artificial Sequence
  Oligonucleotide for detection of SNP TSC0011330
tgattaattttay

SEQ ID NO: 36010 - DNA, 13 bp, Artificial Sequence
  Oligonucleotide for detection of SNP TSC0011330
rtaaaattaatca

SEQ ID NO: 36011 - DNA, 13 bp, Artificial Sequence
  Oligonucleotide for detection of SNP TSC0011330
tgattagttttay

SEQ ID NO: 36012 - DNA, 13 bp, Artificial Sequence
  Oligonucleotide for detection of SNP TSC0011330
rtaaaactaatca

SEQ ID NO: 36013 - DNA, 13 bp, Artificial Sequence
  Oligonucleotide for detection of SNP TSC0011334
tttttggtgggta

SEQ ID NO: 36014 - DNA, 13 bp, Artificial Sequence
  Oligonucleotide for detection of SNP TSC0011334
tacccaccaaaaa

SEQ ID NO: 36015 - DNA, 13 bp, Artificial Sequence
  Oligonucleotide for detection of SNP TSC0011334
tttttgatgggta

SEQ ID NO: 36016 - DNA, 13 bp, Artificial Sequence
  Oligonucleotide for detection of SNP TSC0011334
tacccatcaaaaa

SEQ ID NO: 36017 - DNA, 13 bp, Artificial Sequence
  Oligonucleotide for detection of SNP TSC0011339
ttgttagtgttgt

SEQ ID NO: 36018 - DNA, 13 bp, Artificial Sequence
  Oligonucleotide for detection of SNP TSC0011339
acaacactaacaa

SEQ ID NO: 36019 - DNA, 13 bp, Artificial Sequence
  Oligonucleotide for detection of SNP TSC0011339
ttgttattgttgt

SEQ ID NO: 36020 - DNA, 13 bp, Artificial Sequence
  Oligonucleotide for detection of SNP TSC0011339
acaacaataacaa

SEQ ID NO: 36021 - DNA, 13 bp, Artificial Sequence
  Oligonucleotide for detection of SNP TSC0011339
tcgttagtgttgt

SEQ ID NO: 36022 - DNA, 13 bp, Artificial Sequence
  Oligonucleotide for detection of SNP TSC0011339
acaacactaacga

SEQ ID NO: 36023 - DNA, 13 bp, Artificial Sequence
  Oligonucleotide for detection of SNP TSC0011339
tcgttattgttgt

SEQ ID NO: 36024 - DNA, 13 bp, Artificial Sequence
  Oligonucleotide for detection of SNP TSC0011339
acaacaataacga

SEQ ID NO: 36025 - DNA, 13 bp, Artificial Sequence
  Oligonucleotide for detection of SNP TSC0011339
ataatattaatga

SEQ ID NO: 36026 - DNA, 13 bp, Artificial Sequence
  Oligonucleotide for detection of SNP TSC0011339
tcattaatattat

SEQ ID NO: 36027 - DNA, 13 bp, Artificial Sequence
  Oligonucleotide for detection of SNP TSC0011339
ataataataatga

SEQ ID NO: 36028 - DNA, 13 bp, Artificial Sequence
  Oligonucleotide for detection of SNP TSC0011339
tcattattattat

SEQ ID NO: 36029 - DNA, 13 bp, Artificial Sequence
  Oligonucleotide for detection of SNP TSC0011339
ataatattaacga

SEQ ID NO: 36030 - DNA, 13 bp, Artificial Sequence
  Oligonucleotide for detection of SNP TSC0011339
tcgttaatattat

SEQ ID NO: 36031 - DNA, 13 bp, Artificial Sequence
  Oligonucleotide for detection of SNP TSC0011339
ataataataacga

SEQ ID NO: 36032 - DNA, 13 bp, Artificial Sequence
  Oligonucleotide for detection of SNP TSC0011339
tcgttattattat

SEQ ID NO: 36033 - DNA, 13 bp, Artificial Sequence
  Oligonucleotide for detection of SNP TSC0011342
tagtttaggtaaa

SEQ ID NO: 36034 - DNA, 13 bp, Artificial Sequence
  Oligonucleotide for detection of SNP TSC0011342
tttacctaaacta

SEQ ID NO: 36035 - DNA, 13 bp, Artificial Sequence
  Oligonucleotide for detection of SNP TSC0011342
tagttcgggtaaa

SEQ ID NO: 36036 - DNA, 13 bp, Artificial Sequence
  Oligonucleotide for detection of SNP TSC0011342
tttacccgaacta

SEQ ID NO: 36037 - DNA, 13 bp, Artificial Sequence
  Oligonucleotide for detection of SNP TSC0011342
tttgtttgggttg

SEQ ID NO: 36038 - DNA, 13 bp, Artificial Sequence
  Oligonucleotide for detection of SNP TSC0011342
caacccaaacaaa

SEQ ID NO: 36039 - DNA, 13 bp, Artificial Sequence
  Oligonucleotide for detection of SNP TSC0011342
tttgttcgggttg

SEQ ID NO: 36040 - DNA, 13 bp, Artificial Sequence
  Oligonucleotide for detection of SNP TSC0011342
caacccgaacaaa

SEQ ID NO: 36041 - DNA, 13 bp, Artificial Sequence
  Oligonucleotide for detection of SNP TSC0011343
aataaataaaaaa

SEQ ID NO: 36042 - DNA, 13 bp, Artificial Sequence
  Oligonucleotide for detection of SNP TSC0011343
ttttttatttatt

SEQ ID NO: 36043 - DNA, 13 bp, Artificial Sequence
  Oligonucleotide for detection of SNP TSC0011344
tattttgttgtta

SEQ ID NO: 36044 - DNA, 13 bp, Artificial Sequence
  Oligonucleotide for detection of SNP TSC0011344
taacaacaaaata

SEQ ID NO: 36045 - DNA, 13 bp, Artificial Sequence
  Oligonucleotide for detection of SNP TSC0011345
aattttgtttttt

SEQ ID NO: 36046 - DNA, 13 bp, Artificial Sequence
  Oligonucleotide for detection of SNP TSC0011345
aaaaaacaaaatt

SEQ ID NO: 36047 - DNA, 13 bp, Artificial Sequence
  Oligonucleotide for detection of SNP TSC0011345
aaaaaagagaatt

SEQ ID NO: 36048 - DNA, 13 bp, Artificial Sequence
  Oligonucleotide for detection of SNP TSC0011345
aattctctttttt

SEQ ID NO: 36049 - DNA, 13 bp, Artificial Sequence
  Oligonucleotide for detection of SNP TSC0011345
aaaaaatagaatt

SEQ ID NO: 36050 - DNA, 13 bp, Artificial Sequence
  Oligonucleotide for detection of SNP TSC0011345
aattctatttttt

SEQ ID NO: 36051 - DNA, 13 bp, Artificial Sequence
  Oligonucleotide for detection of SNP TSC0011347
gtatatatagagg

SEQ ID NO: 36052 - DNA, 13 bp, Artificial Sequence
  Oligonucleotide for detection of SNP TSC0011347
cctctatatatac

SEQ ID NO: 36053 - DNA, 13 bp, Artificial Sequence
  Oligonucleotide for detection of SNP TSC0011347
gtatatttagagg

SEQ ID NO: 36054 - DNA, 13 bp, Artificial Sequence
  Oligonucleotide for detection of SNP TSC0011347
cctctaaatatac

SEQ ID NO: 36055 - DNA, 13 bp, Artificial Sequence
  Oligonucleotide for detection of SNP TSC0011347
tttttgtgtatgy

SEQ ID NO: 36056 - DNA, 13 bp, Artificial Sequence
  Oligonucleotide for detection of SNP TSC0011347
rcatacacaaaaa

SEQ ID NO: 36057 - DNA, 13 bp, Artificial Sequence
  Oligonucleotide for detection of SNP TSC0011347
tttttgggtatgy

SEQ ID NO: 36058 - DNA, 13 bp, Artificial Sequence
  Oligonucleotide for detection of SNP TSC0011347
rcatacccaaaaa

SEQ ID NO: 36059 - DNA, 13 bp, Artificial Sequence
  Oligonucleotide for detection of SNP TSC0011348
gatttataatgtt

SEQ ID NO: 36060 - DNA, 13 bp, Artificial Sequence
  Oligonucleotide for detection of SNP TSC0011348
aacattataaatc

SEQ ID NO: 36061 - DNA, 13 bp, Artificial Sequence
  Oligonucleotide for detection of SNP TSC0011348
gatttagaatgtt

SEQ ID NO: 36062 - DNA, 13 bp, Artificial Sequence
  Oligonucleotide for detection of SNP TSC0011348
aacattctaaatc

SEQ ID NO: 36063 - DNA, 13 bp, Artificial Sequence
  Oligonucleotide for detection of SNP TSC0011348
agtattgtgaaty

SEQ ID NO: 36064 - DNA, 13 bp, Artificial Sequence
  Oligonucleotide for detection of SNP TSC0011348
rattcacaatact

SEQ ID NO: 36065 - DNA, 13 bp, Artificial Sequence
  Oligonucleotide for detection of SNP TSC0011348
agtattttgaaty

SEQ ID NO: 36066 - DNA, 13 bp, Artificial Sequence
  Oligonucleotide for detection of SNP TSC0011348
rattcaaaatact

SEQ ID NO: 36067 - DNA, 13 bp, Artificial Sequence
  Oligonucleotide for detection of SNP TSC0011349
ttaaataattttg

SEQ ID NO: 36068 - DNA, 13 bp, Artificial Sequence
  Oligonucleotide for detection of SNP TSC0011349
caaaattatttaa

SEQ ID NO: 36069 - DNA, 13 bp, Artificial Sequence
  Oligonucleotide for detection of SNP TSC0011349
ttaaattattttg

SEQ ID NO: 36070 - DNA, 13 bp, Artificial Sequence
  Oligonucleotide for detection of SNP TSC0011349
caaaataatttaa

SEQ ID NO: 36071 - DNA, 13 bp, Artificial Sequence
  Oligonucleotide for detection of SNP TSC0011349
taaaattgtttaa

SEQ ID NO: 36072 - DNA, 13 bp, Artificial Sequence
  Oligonucleotide for detection of SNP TSC0011349
ttaaacaatttta

SEQ ID NO: 36073 - DNA, 13 bp, Artificial Sequence
  Oligonucleotide for detection of SNP TSC0011349
taaaatagtttaa

SEQ ID NO: 36074 - DNA, 13 bp, Artificial Sequence
  Oligonucleotide for detection of SNP TSC0011349
ttaaactatttta

SEQ ID NO: 36075 - DNA, 13 bp, Artificial Sequence
  Oligonucleotide for detection of SNP TSC0011350
ttatataaatttt

SEQ ID NO: 36076 - DNA, 13 bp, Artificial Sequence
  Oligonucleotide for detection of SNP TSC0011350
aaaatttatataa

SEQ ID NO: 36077 - DNA, 13 bp, Artificial Sequence
  Oligonucleotide for detection of SNP TSC0011350
ttatatgaatttt

SEQ ID NO: 36078 - DNA, 13 bp, Artificial Sequence
  Oligonucleotide for detection of SNP TSC0011350
aaaattcatataa

SEQ ID NO: 36079 - DNA, 13 bp, Artificial Sequence
  Oligonucleotide for detection of SNP TSC0011350
ttatacgaatttt

SEQ ID NO: 36080 - DNA, 13 bp, Artificial Sequence
  Oligonucleotide for detection of SNP TSC0011350
aaaattcgtataa

SEQ ID NO: 36081 - DNA, 13 bp, Artificial Sequence
  Oligonucleotide for detection of SNP TSC0011350
agagtttgtataa

SEQ ID NO: 36082 - DNA, 13 bp, Artificial Sequence
  Oligonucleotide for detection of SNP TSC0011350
ttatacaaactct

SEQ ID NO: 36083 - DNA, 13 bp, Artificial Sequence
  Oligonucleotide for detection of SNP TSC0011350
agagttcgtataa

SEQ ID NO: 36084 - DNA, 13 bp, Artificial Sequence
  Oligonucleotide for detection of SNP TSC0011350
ttatacgaactct

SEQ ID NO: 36085 - DNA, 13 bp, Artificial Sequence
  Oligonucleotide for detection of SNP TSC0011352
aaattaaggttty

SEQ ID NO: 36086 - DNA, 13 bp, Artificial Sequence
  Oligonucleotide for detection of SNP TSC0011352
raaaccttaattt

SEQ ID NO: 36087 - DNA, 13 bp, Artificial Sequence
  Oligonucleotide for detection of SNP TSC0011352
aaattatggttty

SEQ ID NO: 36088 - DNA, 13 bp, Artificial Sequence
  Oligonucleotide for detection of SNP TSC0011352
raaaccataattt

SEQ ID NO: 36089 - DNA, 13 bp, Artificial Sequence
  Oligonucleotide for detection of SNP TSC0011352
gagattttaattt

SEQ ID NO: 36090 - DNA, 13 bp, Artificial Sequence
  Oligonucleotide for detection of SNP TSC0011352
aaattaaaatctc

SEQ ID NO: 36091 - DNA, 13 bp, Artificial Sequence
  Oligonucleotide for detection of SNP TSC0011352
gagattataattt

SEQ ID NO: 36092 - DNA, 13 bp, Artificial Sequence
  Oligonucleotide for detection of SNP TSC0011352
aaattataatctc

SEQ ID NO: 36093 - DNA, 13 bp, Artificial Sequence
  Oligonucleotide for detection of SNP TSC0011355
tttagggtttgaa

SEQ ID NO: 36094 - DNA, 13 bp, Artificial Sequence
  Oligonucleotide for detection of SNP TSC0011355
ttcaaaccctaaa

SEQ ID NO: 36095 - DNA, 13 bp, Artificial Sequence
  Oligonucleotide for detection of SNP TSC0011355
tttaggatttgaa

SEQ ID NO: 36096 - DNA, 13 bp, Artificial Sequence
  Oligonucleotide for detection of SNP TSC0011355
ttcaaatcctaaa

SEQ ID NO: 36097 - DNA, 13 bp, Artificial Sequence
  Oligonucleotide for detection of SNP TSC0011356
agtaatataaatt

SEQ ID NO: 36098 - DNA, 13 bp, Artificial Sequence
  Oligonucleotide for detection of SNP TSC0011356
aatttatattact

SEQ ID NO: 36099 - DNA, 13 bp, Artificial Sequence
  Oligonucleotide for detection of SNP TSC0011356
agtaatgtaaatt

SEQ ID NO: 36100 - DNA, 13 bp, Artificial Sequence
  Oligonucleotide for detection of SNP TSC0011356
aatttacattact

SEQ ID NO: 36101 - DNA, 13 bp, Artificial Sequence
  Oligonucleotide for detection of SNP TSC0011356
agtaacgtaaatt

SEQ ID NO: 36102 - DNA, 13 bp, Artificial Sequence
  Oligonucleotide for detection of SNP TSC0011356
aatttacgttact

SEQ ID NO: 36103 - DNA, 13 bp, Artificial Sequence
  Oligonucleotide for detection of SNP TSC0011356
agtttgtgttatt

SEQ ID NO: 36104 - DNA, 13 bp, Artificial Sequence
  Oligonucleotide for detection of SNP TSC0011356
aataacacaaact

SEQ ID NO: 36105 - DNA, 13 bp, Artificial Sequence
  Oligonucleotide for detection of SNP TSC0011356
agtttgcgttatt

SEQ ID NO: 36106 - DNA, 13 bp, Artificial Sequence
  Oligonucleotide for detection of SNP TSC0011356
aataacgcaaact

SEQ ID NO: 36107 - DNA, 13 bp, Artificial Sequence
  Oligonucleotide for detection of SNP TSC0011357
ataggggagatta

SEQ ID NO: 36108 - DNA, 13 bp, Artificial Sequence
  Oligonucleotide for detection of SNP TSC0011357
taatctcccctat

SEQ ID NO: 36109 - DNA, 13 bp, Artificial Sequence
  Oligonucleotide for detection of SNP TSC0011357
atagggaagatta

SEQ ID NO: 36110 - DNA, 13 bp, Artificial Sequence
  Oligonucleotide for detection of SNP TSC0011357
taatcttccctat

SEQ ID NO: 36111 - DNA, 13 bp, Artificial Sequence
  Oligonucleotide for detection of SNP TSC0011358
tgtttagtttggy

SEQ ID NO: 36112 - DNA, 13 bp, Artificial Sequence
  Oligonucleotide for detection of SNP TSC0011358
rccaaactaaaca

SEQ ID NO: 36113 - DNA, 13 bp, Artificial Sequence
  Oligonucleotide for detection of SNP TSC0011358
tgtttaatttggy

SEQ ID NO: 36114 - DNA, 13 bp, Artificial Sequence
  Oligonucleotide for detection of SNP TSC0011358
rccaaattaaaca

SEQ ID NO: 36115 - DNA, 13 bp, Artificial Sequence
  Oligonucleotide for detection of SNP TSC0011361
ttttattttatat

SEQ ID NO: 36116 - DNA, 13 bp, Artificial Sequence
  Oligonucleotide for detection of SNP TSC0011361
atataaaataaaa

SEQ ID NO: 36117 - DNA, 13 bp, Artificial Sequence
  Oligonucleotide for detection of SNP TSC0011361
ttttatgttatat

SEQ ID NO: 36118 - DNA, 13 bp, Artificial Sequence
  Oligonucleotide for detection of SNP TSC0011361
atataacataaaa

SEQ ID NO: 36119 - DNA, 13 bp, Artificial Sequence
  Oligonucleotide for detection of SNP TSC0011361
atatgagatggaa

SEQ ID NO: 36120 - DNA, 13 bp, Artificial Sequence
  Oligonucleotide for detection of SNP TSC0011361
ttccatctcatat

SEQ ID NO: 36121 - DNA, 13 bp, Artificial Sequence
  Oligonucleotide for detection of SNP TSC0011361
atatgatatggaa

SEQ ID NO: 36122 - DNA, 13 bp, Artificial Sequence
  Oligonucleotide for detection of SNP TSC0011361
ttccatatcatat

SEQ ID NO: 36123 - DNA, 13 bp, Artificial Sequence
  Oligonucleotide for detection of SNP TSC0011362
tattaaaatttty

SEQ ID NO: 36124 - DNA, 13 bp, Artificial Sequence
  Oligonucleotide for detection of SNP TSC0011362
raaaattttaata

SEQ ID NO: 36125 - DNA, 13 bp, Artificial Sequence
  Oligonucleotide for detection of SNP TSC0011362
tattaagatttty

SEQ ID NO: 36126 - DNA, 13 bp, Artificial Sequence
  Oligonucleotide for detection of SNP TSC0011362
raaaatcttaata

SEQ ID NO: 36127 - DNA, 13 bp, Artificial Sequence
  Oligonucleotide for detection of SNP TSC0011363
gttttatttattt

SEQ ID NO: 36128 - DNA, 13 bp, Artificial Sequence
  Oligonucleotide for detection of SNP TSC0011363
aaataaataaaac

SEQ ID NO: 36129 - DNA, 13 bp, Artificial Sequence
  Oligonucleotide for detection of SNP TSC0011363
gttttagttattt

SEQ ID NO: 36130 - DNA, 13 bp, Artificial Sequence
  Oligonucleotide for detection of SNP TSC0011363
aaataactaaaac

SEQ ID NO: 36131 - DNA, 13 bp, Artificial Sequence
  Oligonucleotide for detection of SNP TSC0011363
aagtaagtaaaay

SEQ ID NO: 36132 - DNA, 13 bp, Artificial Sequence
  Oligonucleotide for detection of SNP TSC0011363
rttttacttactt

SEQ ID NO: 36133 - DNA, 13 bp, Artificial Sequence
  Oligonucleotide for detection of SNP TSC0011363
aagtaattaaaay

SEQ ID NO: 36134 - DNA, 13 bp, Artificial Sequence
  Oligonucleotide for detection of SNP TSC0011363
rttttaattactt

SEQ ID NO: 36135 - DNA, 13 bp, Artificial Sequence
  Oligonucleotide for detection of SNP TSC0011364
atagaaatatttg

SEQ ID NO: 36136 - DNA, 13 bp, Artificial Sequence
  Oligonucleotide for detection of SNP TSC0011364
caaatatttctat

SEQ ID NO: 36137 - DNA, 13 bp, Artificial Sequence
  Oligonucleotide for detection of SNP TSC0011364
atagaattatttg

SEQ ID NO: 36138 - DNA, 13 bp, Artificial Sequence
  Oligonucleotide for detection of SNP TSC0011364
caaataattctat

SEQ ID NO: 36139 - DNA, 13 bp, Artificial Sequence
  Oligonucleotide for detection of SNP TSC0011364
taagtgtttttgt

SEQ ID NO: 36140 - DNA, 13 bp, Artificial Sequence
  Oligonucleotide for detection of SNP TSC0011364
acaaaaacactta

SEQ ID NO: 36141 - DNA, 13 bp, Artificial Sequence
  Oligonucleotide for detection of SNP TSC0011364
taagtgattttgt

SEQ ID NO: 36142 - DNA, 13 bp, Artificial Sequence
  Oligonucleotide for detection of SNP TSC0011364
acaaaatcactta

SEQ ID NO: 36143 - DNA, 13 bp, Artificial Sequence
  Oligonucleotide for detection of SNP TSC0011365
ttttatattttat

SEQ ID NO: 36144 - DNA, 13 bp, Artificial Sequence
  Oligonucleotide for detection of SNP TSC0011365
ataaaatataaaa

SEQ ID NO: 36145 - DNA, 13 bp, Artificial Sequence
  Oligonucleotide for detection of SNP TSC0011365
ataaaatgtaaaa

SEQ ID NO: 36146 - DNA, 13 bp, Artificial Sequence
  Oligonucleotide for detection of SNP TSC0011365
ttttacattttat

SEQ ID NO: 36147 - DNA, 13 bp, Artificial Sequence
  Oligonucleotide for detection of SNP TSC0011365
ataaaaagtaaaa

SEQ ID NO: 36148 - DNA, 13 bp, Artificial Sequence
  Oligonucleotide for detection of SNP TSC0011365
ttttactttttat

SEQ ID NO: 36149 - DNA, 13 bp, Artificial Sequence
  Oligonucleotide for detection of SNP TSC0011367
gtttttttgggta

SEQ ID NO: 36150 - DNA, 13 bp, Artificial Sequence
  Oligonucleotide for detection of SNP TSC0011367
tacccaaaaaaac

SEQ ID NO: 36151 - DNA, 13 bp, Artificial Sequence
  Oligonucleotide for detection of SNP TSC0011367
gtttttgtgggta

SEQ ID NO: 36152 - DNA, 13 bp, Artificial Sequence
  Oligonucleotide for detection of SNP TSC0011367
tacccacaaaaac

SEQ ID NO: 36153 - DNA, 13 bp, Artificial Sequence
  Oligonucleotide for detection of SNP TSC0011367
tatttagagaaay

SEQ ID NO: 36154 - DNA, 13 bp, Artificial Sequence
  Oligonucleotide for detection of SNP TSC0011367
rtttctctaaata

SEQ ID NO: 36155 - DNA, 13 bp, Artificial Sequence
  Oligonucleotide for detection of SNP TSC0011367
tatttatagaaay

SEQ ID NO: 36156 - DNA, 13 bp, Artificial Sequence
  Oligonucleotide for detection of SNP TSC0011367
rtttctataaata

SEQ ID NO: 36157 - DNA, 13 bp, Artificial Sequence
  Oligonucleotide for detection of SNP TSC0011368
gatttattaatay

SEQ ID NO: 36158 - DNA, 13 bp, Artificial Sequence
  Oligonucleotide for detection of SNP TSC0011368
rtattaataaatc

SEQ ID NO: 36159 - DNA, 13 bp, Artificial Sequence
  Oligonucleotide for detection of SNP TSC0011368
gatttagtaatay

SEQ ID NO: 36160 - DNA, 13 bp, Artificial Sequence
  Oligonucleotide for detection of SNP TSC0011368
rtattactaaatc

SEQ ID NO: 36161 - DNA, 13 bp, Artificial Sequence
  Oligonucleotide for detection of SNP TSC0011368
gtgttagtaagty

SEQ ID NO: 36162 - DNA, 13 bp, Artificial Sequence
  Oligonucleotide for detection of SNP TSC0011368
racttactaacac

SEQ ID NO: 36163 - DNA, 13 bp, Artificial Sequence
  Oligonucleotide for detection of SNP TSC0011368
gtgttattaagty

SEQ ID NO: 36164 - DNA, 13 bp, Artificial Sequence
  Oligonucleotide for detection of SNP TSC0011368
racttaataacac

SEQ ID NO: 36165 - DNA, 13 bp, Artificial Sequence
  Oligonucleotide for detection of SNP TSC0011369
agtttaagttaaa

SEQ ID NO: 36166 - DNA, 13 bp, Artificial Sequence
  Oligonucleotide for detection of SNP TSC0011369
tttaacttaaact

SEQ ID NO: 36167 - DNA, 13 bp, Artificial Sequence
  Oligonucleotide for detection of SNP TSC0011369
agtttatgttaaa

SEQ ID NO: 36168 - DNA, 13 bp, Artificial Sequence
  Oligonucleotide for detection of SNP TSC0011369
tttaacataaact

SEQ ID NO: 36169 - DNA, 13 bp, Artificial Sequence
  Oligonucleotide for detection of SNP TSC0011369
tttaatttgaatt

SEQ ID NO: 36170 - DNA, 13 bp, Artificial Sequence
  Oligonucleotide for detection of SNP TSC0011369
aattcaaattaaa

SEQ ID NO: 36171 - DNA, 13 bp, Artificial Sequence
  Oligonucleotide for detection of SNP TSC0011370
aaaaaagaagtaa

SEQ ID NO: 36172 - DNA, 13 bp, Artificial Sequence
  Oligonucleotide for detection of SNP TSC0011370
ttacttctttttt

SEQ ID NO: 36173 - DNA, 13 bp, Artificial Sequence
  Oligonucleotide for detection of SNP TSC0011370
aaaaaaaaagtaa

SEQ ID NO: 36174 - DNA, 13 bp, Artificial Sequence
  Oligonucleotide for detection of SNP TSC0011370
ttacttttttttt

SEQ ID NO: 36175 - DNA, 13 bp, Artificial Sequence
  Oligonucleotide for detection of SNP TSC0011376
tatttgagggata

SEQ ID NO: 36176 - DNA, 13 bp, Artificial Sequence
  Oligonucleotide for detection of SNP TSC0011376
tatccctcaaata

SEQ ID NO: 36177 - DNA, 13 bp, Artificial Sequence
  Oligonucleotide for detection of SNP TSC0011376
tatttgggggata

SEQ ID NO: 36178 - DNA, 13 bp, Artificial Sequence
  Oligonucleotide for detection of SNP TSC0011376
tatcccccaaata

SEQ ID NO: 36179 - DNA, 13 bp, Artificial Sequence
  Oligonucleotide for detection of SNP TSC0011377
ttgatttggggat

SEQ ID NO: 36180 - DNA, 13 bp, Artificial Sequence
  Oligonucleotide for detection of SNP TSC0011377
atccccaaatcaa

SEQ ID NO: 36181 - DNA, 13 bp, Artificial Sequence
  Oligonucleotide for detection of SNP TSC0011377
ttgattcggggat

SEQ ID NO: 36182 - DNA, 13 bp, Artificial Sequence
  Oligonucleotide for detection of SNP TSC0011377
atccccgaatcaa

SEQ ID NO: 36183 - DNA, 13 bp, Artificial Sequence
  Oligonucleotide for detection of SNP TSC0011377
atttttgaattaa

SEQ ID NO: 36184 - DNA, 13 bp, Artificial Sequence
  Oligonucleotide for detection of SNP TSC0011377
ttaattcaaaaat

SEQ ID NO: 36185 - DNA, 13 bp, Artificial Sequence
  Oligonucleotide for detection of SNP TSC0011377
atttttaaattaa

SEQ ID NO: 36186 - DNA, 13 bp, Artificial Sequence
  Oligonucleotide for detection of SNP TSC0011377
ttaatttaaaaat

SEQ ID NO: 36187 - DNA, 13 bp, Artificial Sequence
  Oligonucleotide for detection of SNP TSC0011377
attttcgaattaa

SEQ ID NO: 36188 - DNA, 13 bp, Artificial Sequence
  Oligonucleotide for detection of SNP TSC0011377
ttaattcgaaaat

SEQ ID NO: 36189 - DNA, 13 bp, Artificial Sequence
  Oligonucleotide for detection of SNP TSC0011378
tttaaaggattta

SEQ ID NO: 36190 - DNA, 13 bp, Artificial Sequence
  Oligonucleotide for detection of SNP TSC0011378
taaatcctttaaa

SEQ ID NO: 36191 - DNA, 13 bp, Artificial Sequence
  Oligonucleotide for detection of SNP TSC0011378
tttaaatgattta

SEQ ID NO: 36192 - DNA, 13 bp, Artificial Sequence
  Oligonucleotide for detection of SNP TSC0011378
taaatcatttaaa

SEQ ID NO: 36193 - DNA, 13 bp, Artificial Sequence
  Oligonucleotide for detection of SNP TSC0011378
tgagttttttaaa

SEQ ID NO: 36194 - DNA, 13 bp, Artificial Sequence
  Oligonucleotide for detection of SNP TSC0011378
tttaaaaaactca

SEQ ID NO: 36195 - DNA, 13 bp, Artificial Sequence
  Oligonucleotide for detection of SNP TSC0011378
tgagttatttaaa

SEQ ID NO: 36196 - DNA, 13 bp, Artificial Sequence
  Oligonucleotide for detection of SNP TSC0011378
tttaaataactca

SEQ ID NO: 36197 - DNA, 13 bp, Artificial Sequence
  Oligonucleotide for detection of SNP TSC0011379
ttattaattgttt

SEQ ID NO: 36198 - DNA, 13 bp, Artificial Sequence
  Oligonucleotide for detection of SNP TSC0011379
aaacaattaataa

SEQ ID NO: 36199 - DNA, 13 bp, Artificial Sequence
  Oligonucleotide for detection of SNP TSC0011379
ttattagttgttt

SEQ ID NO: 36200 - DNA, 13 bp, Artificial Sequence
  Oligonucleotide for detection of SNP TSC0011379
aaacaactaataa

SEQ ID NO: 36201 - DNA, 13 bp, Artificial Sequence
  Oligonucleotide for detection of SNP TSC0011384
tggttatgattty

SEQ ID NO: 36202 - DNA, 13 bp, Artificial Sequence
  Oligonucleotide for detection of SNP TSC0011384
raaatcataacca

SEQ ID NO: 36203 - DNA, 13 bp, Artificial Sequence
  Oligonucleotide for detection of SNP TSC0011384
tggttacgattty

SEQ ID NO: 36204 - DNA, 13 bp, Artificial Sequence
  Oligonucleotide for detection of SNP TSC0011384
raaatcgtaacca

SEQ ID NO: 36205 - DNA, 13 bp, Artificial Sequence
  Oligonucleotide for detection of SNP TSC0011384
gaaattgtaatta

SEQ ID NO: 36206 - DNA, 13 bp, Artificial Sequence
  Oligonucleotide for detection of SNP TSC0011384
taattacaatttc

SEQ ID NO: 36207 - DNA, 13 bp, Artificial Sequence
  Oligonucleotide for detection of SNP TSC0011384
gaaattataatta

SEQ ID NO: 36208 - DNA, 13 bp, Artificial Sequence
  Oligonucleotide for detection of SNP TSC0011384
taattataatttc

SEQ ID NO: 36209 - DNA, 13 bp, Artificial Sequence
  Oligonucleotide for detection of SNP TSC0011384
gaaatcgtaatta

SEQ ID NO: 36210 - DNA, 13 bp, Artificial Sequence
  Oligonucleotide for detection of SNP TSC0011384
taattacgatttc

SEQ ID NO: 36211 - DNA, 13 bp, Artificial Sequence
  Oligonucleotide for detection of SNP TSC0011387
gtatttgagaaga

SEQ ID NO: 36212 - DNA, 13 bp, Artificial Sequence
  Oligonucleotide for detection of SNP TSC0011387
tcttctcaaatac

SEQ ID NO: 36213 - DNA, 13 bp, Artificial Sequence
  Oligonucleotide for detection of SNP TSC0011387
gtattttagaaga

SEQ ID NO: 36214 - DNA, 13 bp, Artificial Sequence
  Oligonucleotide for detection of SNP TSC0011387
tcttctaaaatac

SEQ ID NO: 36215 - DNA, 13 bp, Artificial Sequence
  Oligonucleotide for detection of SNP TSC0011387
tttttttaagtgy

SEQ ID NO: 36216 - DNA, 13 bp, Artificial Sequence
  Oligonucleotide for detection of SNP TSC0011387
rcacttaaaaaaa

SEQ ID NO: 36217 - DNA, 13 bp, Artificial Sequence
  Oligonucleotide for detection of SNP TSC0011390
gttggtatggtgg

SEQ ID NO: 36218 - DNA, 13 bp, Artificial Sequence
  Oligonucleotide for detection of SNP TSC0011390
ccaccataccaac

SEQ ID NO: 36219 - DNA, 13 bp, Artificial Sequence
  Oligonucleotide for detection of SNP TSC0011390
gttggtgtggtgg

SEQ ID NO: 36220 - DNA, 13 bp, Artificial Sequence
  Oligonucleotide for detection of SNP TSC0011390
ccaccacaccaac

SEQ ID NO: 36221 - DNA, 13 bp, Artificial Sequence
  Oligonucleotide for detection of SNP TSC0011390
gtcggtatggtgg

SEQ ID NO: 36222 - DNA, 13 bp, Artificial Sequence
  Oligonucleotide for detection of SNP TSC0011390
ccaccataccgac

SEQ ID NO: 36223 - DNA, 13 bp, Artificial Sequence
  Oligonucleotide for detection of SNP TSC0011390
gtcggtgtggtgg

SEQ ID NO: 36224 - DNA, 13 bp, Artificial Sequence
  Oligonucleotide for detection of SNP TSC0011390
ccaccacaccgac

SEQ ID NO: 36225 - DNA, 13 bp, Artificial Sequence
  Oligonucleotide for detection of SNP TSC0011390
gttggtacggtgg

SEQ ID NO: 36226 - DNA, 13 bp, Artificial Sequence
  Oligonucleotide for detection of SNP TSC0011390
ccaccgtaccaac

SEQ ID NO: 36227 - DNA, 13 bp, Artificial Sequence
  Oligonucleotide for detection of SNP TSC0011390
gttggcgtggtgg

SEQ ID NO: 36228 - DNA, 13 bp, Artificial Sequence
  Oligonucleotide for detection of SNP TSC0011390
ccaccacgccaac

SEQ ID NO: 36229 - DNA, 13 bp, Artificial Sequence
  Oligonucleotide for detection of SNP TSC0011390
gtcggtacggtgg

SEQ ID NO: 36230 - DNA, 13 bp, Artificial Sequence
  Oligonucleotide for detection of SNP TSC0011390
ccaccgtaccgac

SEQ ID NO: 36231 - DNA, 13 bp, Artificial Sequence
  Oligonucleotide for detection of SNP TSC0011390
gttggtgcggtgg

SEQ ID NO: 36232 - DNA, 13 bp, Artificial Sequence
  Oligonucleotide for detection of SNP TSC0011390
ccaccgcaccaac

SEQ ID NO: 36233 - DNA, 13 bp, Artificial Sequence
  Oligonucleotide for detection of SNP TSC0011390
gtcggcgtggtgg

SEQ ID NO: 36234 - DNA, 13 bp, Artificial Sequence
  Oligonucleotide for detection of SNP TSC0011390
ccaccacgccgac

SEQ ID NO: 36235 - DNA, 13 bp, Artificial Sequence
  Oligonucleotide for detection of SNP TSC0011390
gtcggtgcggtgg

SEQ ID NO: 36236 - DNA, 13 bp, Artificial Sequence
  Oligonucleotide for detection of SNP TSC0011390
ccaccgcaccgac

SEQ ID NO: 36237 - DNA, 13 bp, Artificial Sequence
  Oligonucleotide for detection of SNP TSC0011390
gttggcgcggtgg

SEQ ID NO: 36238 - DNA, 13 bp, Artificial Sequence
  Oligonucleotide for detection of SNP TSC0011390
ccaccgcgccaac

SEQ ID NO: 36239 - DNA, 13 bp, Artificial Sequence
  Oligonucleotide for detection of SNP TSC0011390
gtcggcgcggtgg

SEQ ID NO: 36240 - DNA, 13 bp, Artificial Sequence
  Oligonucleotide for detection of SNP TSC0011390
ccaccgcgccgac

SEQ ID NO: 36241 - DNA, 13 bp, Artificial Sequence
  Oligonucleotide for detection of SNP TSC0011390
ttattgtgttggy

SEQ ID NO: 36242 - DNA, 13 bp, Artificial Sequence
  Oligonucleotide for detection of SNP TSC0011390
rccaacacaataa

SEQ ID NO: 36243 - DNA, 13 bp, Artificial Sequence
  Oligonucleotide for detection of SNP TSC0011390
ttatcgtgttggy

SEQ ID NO: 36244 - DNA, 13 bp, Artificial Sequence
  Oligonucleotide for detection of SNP TSC0011390
rccaacacgataa

SEQ ID NO: 36245 - DNA, 13 bp, Artificial Sequence
  Oligonucleotide for detection of SNP TSC0011390
ttattgtgtcggy

SEQ ID NO: 36246 - DNA, 13 bp, Artificial Sequence
  Oligonucleotide for detection of SNP TSC0011390
rccgacacaataa

SEQ ID NO: 36247 - DNA, 13 bp, Artificial Sequence
  Oligonucleotide for detection of SNP TSC0011390
ttattgcgttggy

SEQ ID NO: 36248 - DNA, 13 bp, Artificial Sequence
  Oligonucleotide for detection of SNP TSC0011390
rccaacgcaataa

SEQ ID NO: 36249 - DNA, 13 bp, Artificial Sequence
  Oligonucleotide for detection of SNP TSC0011390
ttatcgtgtcggy

SEQ ID NO: 36250 - DNA, 13 bp, Artificial Sequence
  Oligonucleotide for detection of SNP TSC0011390
rccgacacgataa

SEQ ID NO: 36251 - DNA, 13 bp, Artificial Sequence
  Oligonucleotide for detection of SNP TSC0011390
ttatcgcgttggy

SEQ ID NO: 36252 - DNA, 13 bp, Artificial Sequence
  Oligonucleotide for detection of SNP TSC0011390
rccaacgcgataa

SEQ ID NO: 36253 - DNA, 13 bp, Artificial Sequence
  Oligonucleotide for detection of SNP TSC0011390
ttattgcgtcggy

SEQ ID NO: 36254 - DNA, 13 bp, Artificial Sequence
  Oligonucleotide for detection of SNP TSC0011390
rccgacgcaataa

SEQ ID NO: 36255 - DNA, 13 bp, Artificial Sequence
  Oligonucleotide for detection of SNP TSC0011390
ttatcgcgtcggy

SEQ ID NO: 36256 - DNA, 13 bp, Artificial Sequence
  Oligonucleotide for detection of SNP TSC0011390
rccgacgcgataa

SEQ ID NO: 36257 - DNA, 13 bp, Artificial Sequence
  Oligonucleotide for detection of SNP TSC0011391
taattttagtatt

SEQ ID NO: 36258 - DNA, 13 bp, Artificial Sequence
  Oligonucleotide for detection of SNP TSC0011391
aatactaaaatta

SEQ ID NO: 36259 - DNA, 13 bp, Artificial Sequence
  Oligonucleotide for detection of SNP TSC0011391
taatttgagtatt

SEQ ID NO: 36260 - DNA, 13 bp, Artificial Sequence
  Oligonucleotide for detection of SNP TSC0011391
aatactcaaatta

SEQ ID NO: 36261 - DNA, 13 bp, Artificial Sequence
  Oligonucleotide for detection of SNP TSC0011391
taattcgagtatt

SEQ ID NO: 36262 - DNA, 13 bp, Artificial Sequence
  Oligonucleotide for detection of SNP TSC0011391
aatactcgaatta

SEQ ID NO: 36263 - DNA, 13 bp, Artificial Sequence
  Oligonucleotide for detection of SNP TSC0011391
agtgttgggatta

SEQ ID NO: 36264 - DNA, 13 bp, Artificial Sequence
  Oligonucleotide for detection of SNP TSC0011391
taatcccaacact

SEQ ID NO: 36265 - DNA, 13 bp, Artificial Sequence
  Oligonucleotide for detection of SNP TSC0011391
agtgtttggatta

SEQ ID NO: 36266 - DNA, 13 bp, Artificial Sequence
  Oligonucleotide for detection of SNP TSC0011391
taatccaaacact

SEQ ID NO: 36267 - DNA, 13 bp, Artificial Sequence
  Oligonucleotide for detection of SNP TSC0011391
agtgttcggatta

SEQ ID NO: 36268 - DNA, 13 bp, Artificial Sequence
  Oligonucleotide for detection of SNP TSC0011391
taatccgaacact

SEQ ID NO: 36269 - DNA, 13 bp, Artificial Sequence
  Oligonucleotide for detection of SNP TSC0011392
ttatattgtttgt

SEQ ID NO: 36270 - DNA, 13 bp, Artificial Sequence
  Oligonucleotide for detection of SNP TSC0011392
acaaacaatataa

SEQ ID NO: 36271 - DNA, 13 bp, Artificial Sequence
  Oligonucleotide for detection of SNP TSC0011392
ttatatcgtttgt

SEQ ID NO: 36272 - DNA, 13 bp, Artificial Sequence
  Oligonucleotide for detection of SNP TSC0011392
acaaacgatataa

SEQ ID NO: 36273 - DNA, 13 bp, Artificial Sequence
  Oligonucleotide for detection of SNP TSC0011392
ataagtggtatga

SEQ ID NO: 36274 - DNA, 13 bp, Artificial Sequence
  Oligonucleotide for detection of SNP TSC0011392
tcataccacttat

SEQ ID NO: 36275 - DNA, 13 bp, Artificial Sequence
  Oligonucleotide for detection of SNP TSC0011392
ataagtagtatga

SEQ ID NO: 36276 - DNA, 13 bp, Artificial Sequence
  Oligonucleotide for detection of SNP TSC0011392
tcatactacttat

SEQ ID NO: 36277 - DNA, 13 bp, Artificial Sequence
  Oligonucleotide for detection of SNP TSC0011392
ataagcggtatga

SEQ ID NO: 36278 - DNA, 13 bp, Artificial Sequence
  Oligonucleotide for detection of SNP TSC0011392
tcataccgcttat

SEQ ID NO: 36279 - DNA, 13 bp, Artificial Sequence
  Oligonucleotide for detection of SNP TSC0011393
aatttatgtgttt

SEQ ID NO: 36280 - DNA, 13 bp, Artificial Sequence
  Oligonucleotide for detection of SNP TSC0011393
aaacacataaatt

SEQ ID NO: 36281 - DNA, 13 bp, Artificial Sequence
  Oligonucleotide for detection of SNP TSC0011393
aatttacgtgttt

SEQ ID NO: 36282 - DNA, 13 bp, Artificial Sequence
  Oligonucleotide for detection of SNP TSC0011393
aaacacgtaaatt

SEQ ID NO: 36283 - DNA, 13 bp, Artificial Sequence
  Oligonucleotide for detection of SNP TSC0011393
agatatgtgggtt

SEQ ID NO: 36284 - DNA, 13 bp, Artificial Sequence
  Oligonucleotide for detection of SNP TSC0011393
aacccacatatct

SEQ ID NO: 36285 - DNA, 13 bp, Artificial Sequence
  Oligonucleotide for detection of SNP TSC0011393
agatatatgggtt

SEQ ID NO: 36286 - DNA, 13 bp, Artificial Sequence
  Oligonucleotide for detection of SNP TSC0011393
aacccatatatct

SEQ ID NO: 36287 - DNA, 13 bp, Artificial Sequence
  Oligonucleotide for detection of SNP TSC0011393
agatacgtgggtt

SEQ ID NO: 36288 - DNA, 13 bp, Artificial Sequence
  Oligonucleotide for detection of SNP TSC0011393
aacccacgtatct

SEQ ID NO: 36289 - DNA, 13 bp, Artificial Sequence
  Oligonucleotide for detection of SNP TSC0011394
agataatgtggty

SEQ ID NO: 36290 - DNA, 13 bp, Artificial Sequence
  Oligonucleotide for detection of SNP TSC0011394
raccacattatct

SEQ ID NO: 36291 - DNA, 13 bp, Artificial Sequence
  Oligonucleotide for detection of SNP TSC0011394
agataacgtggty

SEQ ID NO: 36292 - DNA, 13 bp, Artificial Sequence
  Oligonucleotide for detection of SNP TSC0011394
raccacgttatct

SEQ ID NO: 36293 - DNA, 13 bp, Artificial Sequence
  Oligonucleotide for detection of SNP TSC0011394
gattatgttgttt

SEQ ID NO: 36294 - DNA, 13 bp, Artificial Sequence
  Oligonucleotide for detection of SNP TSC0011394
aaacaacataatc

SEQ ID NO: 36295 - DNA, 13 bp, Artificial Sequence
  Oligonucleotide for detection of SNP TSC0011394
gattatattgttt

SEQ ID NO: 36296 - DNA, 13 bp, Artificial Sequence
  Oligonucleotide for detection of SNP TSC0011394
aaacaatataatc

SEQ ID NO: 36297 - DNA, 13 bp, Artificial Sequence
  Oligonucleotide for detection of SNP TSC0011394
gattacgttgttt

SEQ ID NO: 36298 - DNA, 13 bp, Artificial Sequence
  Oligonucleotide for detection of SNP TSC0011394
aaacaacgtaatc

SEQ ID NO: 36299 - DNA, 13 bp, Artificial Sequence
  Oligonucleotide for detection of SNP TSC0011395
ttaagtgtgttgg

SEQ ID NO: 36300 - DNA, 13 bp, Artificial Sequence
  Oligonucleotide for detection of SNP TSC0011395
ccaacacacttaa

SEQ ID NO: 36301 - DNA, 13 bp, Artificial Sequence
  Oligonucleotide for detection of SNP TSC0011395
ttaagtatgttgg

SEQ ID NO: 36302 - DNA, 13 bp, Artificial Sequence
  Oligonucleotide for detection of SNP TSC0011395
ccaacatacttaa

SEQ ID NO: 36303 - DNA, 13 bp, Artificial Sequence
  Oligonucleotide for detection of SNP TSC0011396
gtttttagttgga

SEQ ID NO: 36304 - DNA, 13 bp, Artificial Sequence
  Oligonucleotide for detection of SNP TSC0011396
tccaactaaaaac

SEQ ID NO: 36305 - DNA, 13 bp, Artificial Sequence
  Oligonucleotide for detection of SNP TSC0011396
gtttttggttgga

SEQ ID NO: 36306 - DNA, 13 bp, Artificial Sequence
  Oligonucleotide for detection of SNP TSC0011396
tccaaccaaaaac

SEQ ID NO: 36307 - DNA, 13 bp, Artificial Sequence
  Oligonucleotide for detection of SNP TSC0011397
tgtaggttaggaa

SEQ ID NO: 36308 - DNA, 13 bp, Artificial Sequence
  Oligonucleotide for detection of SNP TSC0011397
ttcctaacctaca

SEQ ID NO: 36309 - DNA, 13 bp, Artificial Sequence
  Oligonucleotide for detection of SNP TSC0011397
tgtagggtaggaa

SEQ ID NO: 36310 - DNA, 13 bp, Artificial Sequence
  Oligonucleotide for detection of SNP TSC0011397
ttcctaccctaca

SEQ ID NO: 36311 - DNA, 13 bp, Artificial Sequence
  Oligonucleotide for detection of SNP TSC0011397
tttttagtttata

SEQ ID NO: 36312 - DNA, 13 bp, Artificial Sequence
  Oligonucleotide for detection of SNP TSC0011397
tataaactaaaaa

SEQ ID NO: 36313 - DNA, 13 bp, Artificial Sequence
  Oligonucleotide for detection of SNP TSC0011397
tttttattttata

SEQ ID NO: 36314 - DNA, 13 bp, Artificial Sequence
  Oligonucleotide for detection of SNP TSC0011397
tataaaataaaaa

SEQ ID NO: 36315 - DNA, 13 bp, Artificial Sequence
  Oligonucleotide for detection of SNP TSC0011400
agatattgatgaa

SEQ ID NO: 36316 - DNA, 13 bp, Artificial Sequence
  Oligonucleotide for detection of SNP TSC0011400
ttcatcaatatct

SEQ ID NO: 36317 - DNA, 13 bp, Artificial Sequence
  Oligonucleotide for detection of SNP TSC0011400
agatatcgatgaa

SEQ ID NO: 36318 - DNA, 13 bp, Artificial Sequence
  Oligonucleotide for detection of SNP TSC0011400
ttcatcgatatct

SEQ ID NO: 36319 - DNA, 13 bp, Artificial Sequence
  Oligonucleotide for detection of SNP TSC0011400
tttattggtattt

SEQ ID NO: 36320 - DNA, 13 bp, Artificial Sequence
  Oligonucleotide for detection of SNP TSC0011400
aaataccaataaa

SEQ ID NO: 36321 - DNA, 13 bp, Artificial Sequence
  Oligonucleotide for detection of SNP TSC0011400
tttattagtattt

SEQ ID NO: 36322 - DNA, 13 bp, Artificial Sequence
  Oligonucleotide for detection of SNP TSC0011400
aaatactaataaa

SEQ ID NO: 36323 - DNA, 13 bp, Artificial Sequence
  Oligonucleotide for detection of SNP TSC0011400
tttatcggtattt

SEQ ID NO: 36324 - DNA, 13 bp, Artificial Sequence
  Oligonucleotide for detection of SNP TSC0011400
aaataccgataaa

SEQ ID NO: 36325 - DNA, 13 bp, Artificial Sequence
  Oligonucleotide for detection of SNP TSC0011403
gtatgaattttgt

SEQ ID NO: 36326 - DNA, 13 bp, Artificial Sequence
  Oligonucleotide for detection of SNP TSC0011403
acaaaattcatac

SEQ ID NO: 36327 - DNA, 13 bp, Artificial Sequence
  Oligonucleotide for detection of SNP TSC0011403
gtatgagttttgt

SEQ ID NO: 36328 - DNA, 13 bp, Artificial Sequence
  Oligonucleotide for detection of SNP TSC0011403
acaaaactcatac

SEQ ID NO: 36329 - DNA, 13 bp, Artificial Sequence
  Oligonucleotide for detection of SNP TSC0011404
tagtatattatgg

SEQ ID NO: 36330 - DNA, 13 bp, Artificial Sequence
  Oligonucleotide for detection of SNP TSC0011404
ccataatatacta

SEQ ID NO: 36331 - DNA, 13 bp, Artificial Sequence
  Oligonucleotide for detection of SNP TSC0011404
tagtatgttatgg

SEQ ID NO: 36332 - DNA, 13 bp, Artificial Sequence
  Oligonucleotide for detection of SNP TSC0011404
ccataacatacta

SEQ ID NO: 36333 - DNA, 13 bp, Artificial Sequence
  Oligonucleotide for detection of SNP TSC0011405
gttggaatgtaat

SEQ ID NO: 36334 - DNA, 13 bp, Artificial Sequence
  Oligonucleotide for detection of SNP TSC0011405
attacattccaac

SEQ ID NO: 36335 - DNA, 13 bp, Artificial Sequence
  Oligonucleotide for detection of SNP TSC0011405
gttggagtgtaat

SEQ ID NO: 36336 - DNA, 13 bp, Artificial Sequence
  Oligonucleotide for detection of SNP TSC0011405
attacactccaac

SEQ ID NO: 36337 - DNA, 13 bp, Artificial Sequence
  Oligonucleotide for detection of SNP TSC0011406
agtgttaggatta

SEQ ID NO: 36338 - DNA, 13 bp, Artificial Sequence
  Oligonucleotide for detection of SNP TSC0011406
taatcctaacact

SEQ ID NO: 36339 - DNA, 13 bp, Artificial Sequence
  Oligonucleotide for detection of SNP TSC0011416
gtttgtgaaaggg

SEQ ID NO: 36340 - DNA, 13 bp, Artificial Sequence
  Oligonucleotide for detection of SNP TSC0011416
ccctttcacaaac

SEQ ID NO: 36341 - DNA, 13 bp, Artificial Sequence
  Oligonucleotide for detection of SNP TSC0011416
gtttgtaaaaggg

SEQ ID NO: 36342 - DNA, 13 bp, Artificial Sequence
  Oligonucleotide for detection of SNP TSC0011416
cccttttacaaac

SEQ ID NO: 36343 - DNA, 13 bp, Artificial Sequence
  Oligonucleotide for detection of SNP TSC0011417
gttataagttgta

SEQ ID NO: 36344 - DNA, 13 bp, Artificial Sequence
  Oligonucleotide for detection of SNP TSC0011417
tacaacttataac

SEQ ID NO: 36345 - DNA, 13 bp, Artificial Sequence
  Oligonucleotide for detection of SNP TSC0011417
gttatacgttgta

SEQ ID NO: 36346 - DNA, 13 bp, Artificial Sequence
  Oligonucleotide for detection of SNP TSC0011417
tacaacgtataac

SEQ ID NO: 36347 - DNA, 13 bp, Artificial Sequence
  Oligonucleotide for detection of SNP TSC0011417
tgtaatttatagy

SEQ ID NO: 36348 - DNA, 13 bp, Artificial Sequence
  Oligonucleotide for detection of SNP TSC0011417
rctataaattaca

SEQ ID NO: 36349 - DNA, 13 bp, Artificial Sequence
  Oligonucleotide for detection of SNP TSC0011417
tgtaatgtatagy

SEQ ID NO: 36350 - DNA, 13 bp, Artificial Sequence
  Oligonucleotide for detection of SNP TSC0011417
rctatacattaca

SEQ ID NO: 36351 - DNA, 13 bp, Artificial Sequence
  Oligonucleotide for detection of SNP TSC0011417
tgtaacgtatagy

SEQ ID NO: 36352 - DNA, 13 bp, Artificial Sequence
  Oligonucleotide for detection of SNP TSC0011417
rctatacgttaca

SEQ ID NO: 36353 - DNA, 13 bp, Artificial Sequence
  Oligonucleotide for detection of SNP TSC0011418
atggtaggatgtg

SEQ ID NO: 36354 - DNA, 13 bp, Artificial Sequence
  Oligonucleotide for detection of SNP TSC0011418
cacatcctaccat

SEQ ID NO: 36355 - DNA, 13 bp, Artificial Sequence
  Oligonucleotide for detection of SNP TSC0011418
atggtaagatgtg

SEQ ID NO: 36356 - DNA, 13 bp, Artificial Sequence
  Oligonucleotide for detection of SNP TSC0011418
cacatcttaccat

SEQ ID NO: 36357 - DNA, 13 bp, Artificial Sequence
  Oligonucleotide for detection of SNP TSC0011421
atgtaagttaaat

SEQ ID NO: 36358 - DNA, 13 bp, Artificial Sequence
  Oligonucleotide for detection of SNP TSC0011421
atttaacttacat

SEQ ID NO: 36359 - DNA, 13 bp, Artificial Sequence
  Oligonucleotide for detection of SNP TSC0011421
atgtaaattaaat

SEQ ID NO: 36360 - DNA, 13 bp, Artificial Sequence
  Oligonucleotide for detection of SNP TSC0011421
atttaatttacat

SEQ ID NO: 36361 - DNA, 13 bp, Artificial Sequence
  Oligonucleotide for detection of SNP TSC0011422
tatattgtataat

SEQ ID NO: 36362 - DNA, 13 bp, Artificial Sequence
  Oligonucleotide for detection of SNP TSC0011422
attatacaatata

SEQ ID NO: 36363 - DNA, 13 bp, Artificial Sequence
  Oligonucleotide for detection of SNP TSC0011422
tatattatataat

SEQ ID NO: 36364 - DNA, 13 bp, Artificial Sequence
  Oligonucleotide for detection of SNP TSC0011422
attatataatata

SEQ ID NO: 36365 - DNA, 13 bp, Artificial Sequence
  Oligonucleotide for detection of SNP TSC0011423
agtgagtgatgay

SEQ ID NO: 36366 - DNA, 13 bp, Artificial Sequence
  Oligonucleotide for detection of SNP TSC0011423
rtcatcactcact

SEQ ID NO: 36367 - DNA, 13 bp, Artificial Sequence
  Oligonucleotide for detection of SNP TSC0011423
agtgagcgatgay

SEQ ID NO: 36368 - DNA, 13 bp, Artificial Sequence
  Oligonucleotide for detection of SNP TSC0011423
rtcatcgctcact

SEQ ID NO: 36369 - DNA, 13 bp, Artificial Sequence
  Oligonucleotide for detection of SNP TSC0011423
gttattgtttatt

SEQ ID NO: 36370 - DNA, 13 bp, Artificial Sequence
  Oligonucleotide for detection of SNP TSC0011423
aataaacaataac

SEQ ID NO: 36371 - DNA, 13 bp, Artificial Sequence
  Oligonucleotide for detection of SNP TSC0011423
gttattatttatt

SEQ ID NO: 36372 - DNA, 13 bp, Artificial Sequence
  Oligonucleotide for detection of SNP TSC0011423
aataaataataac

SEQ ID NO: 36373 - DNA, 13 bp, Artificial Sequence
  Oligonucleotide for detection of SNP TSC0011423
gttatcgtttatt

SEQ ID NO: 36374 - DNA, 13 bp, Artificial Sequence
  Oligonucleotide for detection of SNP TSC0011423
aataaacgataac

SEQ ID NO: 36375 - DNA, 13 bp, Artificial Sequence
  Oligonucleotide for detection of SNP TSC0011424
gtttgttgataag

SEQ ID NO: 36376 - DNA, 13 bp, Artificial Sequence
  Oligonucleotide for detection of SNP TSC0011424
cttatcaacaaac

SEQ ID NO: 36377 - DNA, 13 bp, Artificial Sequence
  Oligonucleotide for detection of SNP TSC0011424
gtttgtcgataag

SEQ ID NO: 36378 - DNA, 13 bp, Artificial Sequence
  Oligonucleotide for detection of SNP TSC0011424
cttatcgacaaac

SEQ ID NO: 36379 - DNA, 13 bp, Artificial Sequence
  Oligonucleotide for detection of SNP TSC0011424
tttgttgatagay

SEQ ID NO: 36380 - DNA, 13 bp, Artificial Sequence
  Oligonucleotide for detection of SNP TSC0011424
rtctatcaacaaa

SEQ ID NO: 36381 - DNA, 13 bp, Artificial Sequence
  Oligonucleotide for detection of SNP TSC0011424
tttgttaatagay

SEQ ID NO: 36382 - DNA, 13 bp, Artificial Sequence
  Oligonucleotide for detection of SNP TSC0011424
rtctattaacaaa

SEQ ID NO: 36383 - DNA, 13 bp, Artificial Sequence
  Oligonucleotide for detection of SNP TSC0011424
tttgtcgatagay

SEQ ID NO: 36384 - DNA, 13 bp, Artificial Sequence
  Oligonucleotide for detection of SNP TSC0011424
rtctatcgacaaa

SEQ ID NO: 36385 - DNA, 13 bp, Artificial Sequence
  Oligonucleotide for detection of SNP TSC0011425
gttaagagaggta

SEQ ID NO: 36386 - DNA, 13 bp, Artificial Sequence
  Oligonucleotide for detection of SNP TSC0011425
tacctctcttaac

SEQ ID NO: 36387 - DNA, 13 bp, Artificial Sequence
  Oligonucleotide for detection of SNP TSC0011425
gttaagggaggta

SEQ ID NO: 36388 - DNA, 13 bp, Artificial Sequence
  Oligonucleotide for detection of SNP TSC0011425
tacctcccttaac

SEQ ID NO: 36389 - DNA, 13 bp, Artificial Sequence
  Oligonucleotide for detection of SNP TSC0011428
gttggggtaattt

SEQ ID NO: 36390 - DNA, 13 bp, Artificial Sequence
  Oligonucleotide for detection of SNP TSC0011428
aaattaccccaac

SEQ ID NO: 36391 - DNA, 13 bp, Artificial Sequence
  Oligonucleotide for detection of SNP TSC0011428
gttgggataattt

SEQ ID NO: 36392 - DNA, 13 bp, Artificial Sequence
  Oligonucleotide for detection of SNP TSC0011428
aaattatcccaac

SEQ ID NO: 36393 - DNA, 13 bp, Artificial Sequence
  Oligonucleotide for detection of SNP TSC0011429
ttagggatatttt

SEQ ID NO: 36394 - DNA, 13 bp, Artificial Sequence
  Oligonucleotide for detection of SNP TSC0011429
aaaatatccctaa

SEQ ID NO: 36395 - DNA, 13 bp, Artificial Sequence
  Oligonucleotide for detection of SNP TSC0011429
ttaggggtatttt

SEQ ID NO: 36396 - DNA, 13 bp, Artificial Sequence
  Oligonucleotide for detection of SNP TSC0011429
aaaatacccctaa

SEQ ID NO: 36397 - DNA, 13 bp, Artificial Sequence
  Oligonucleotide for detection of SNP TSC0011430
ttaatagaatttt

SEQ ID NO: 36398 - DNA, 13 bp, Artificial Sequence
  Oligonucleotide for detection of SNP TSC0011430
aaaattctattaa

SEQ ID NO: 36399 - DNA, 13 bp, Artificial Sequence
  Oligonucleotide for detection of SNP TSC0011431
taataaaattttt

SEQ ID NO: 36400 - DNA, 13 bp, Artificial Sequence
  Oligonucleotide for detection of SNP TSC0011431
aaaaattttatta

SEQ ID NO: 36401 - DNA, 13 bp, Artificial Sequence
  Oligonucleotide for detection of SNP TSC0011431
taataatattttt

SEQ ID NO: 36402 - DNA, 13 bp, Artificial Sequence
  Oligonucleotide for detection of SNP TSC0011431
aaaaatattatta

SEQ ID NO: 36403 - DNA, 13 bp, Artificial Sequence
  Oligonucleotide for detection of SNP TSC0011431
aagggttttgtta

SEQ ID NO: 36404 - DNA, 13 bp, Artificial Sequence
  Oligonucleotide for detection of SNP TSC0011431
taacaaaaccctt

SEQ ID NO: 36405 - DNA, 13 bp, Artificial Sequence
  Oligonucleotide for detection of SNP TSC0011431
aagggtattgtta

SEQ ID NO: 36406 - DNA, 13 bp, Artificial Sequence
  Oligonucleotide for detection of SNP TSC0011431
taacaataccctt

SEQ ID NO: 36407 - DNA, 13 bp, Artificial Sequence
  Oligonucleotide for detection of SNP TSC0011432
gttttaatttttg

SEQ ID NO: 36408 - DNA, 13 bp, Artificial Sequence
  Oligonucleotide for detection of SNP TSC0011432
caaaaattaaaac

SEQ ID NO: 36409 - DNA, 13 bp, Artificial Sequence
  Oligonucleotide for detection of SNP TSC0011432
gttttagtttttg

SEQ ID NO: 36410 - DNA, 13 bp, Artificial Sequence
  Oligonucleotide for detection of SNP TSC0011432
caaaaactaaaac

SEQ ID NO: 36411 - DNA, 13 bp, Artificial Sequence
  Oligonucleotide for detection of SNP TSC0011433
aaatgtgtttaaa

SEQ ID NO: 36412 - DNA, 13 bp, Artificial Sequence
  Oligonucleotide for detection of SNP TSC0011433
tttaaacacattt

SEQ ID NO: 36413 - DNA, 13 bp, Artificial Sequence
  Oligonucleotide for detection of SNP TSC0011434
tggaaaaatatay

SEQ ID NO: 36414 - DNA, 13 bp, Artificial Sequence
  Oligonucleotide for detection of SNP TSC0011434
rtatatttttcca

SEQ ID NO: 36415 - DNA, 13 bp, Artificial Sequence
  Oligonucleotide for detection of SNP TSC0011434
tggaaagatatay

SEQ ID NO: 36416 - DNA, 13 bp, Artificial Sequence
  Oligonucleotide for detection of SNP TSC0011434
rtatatctttcca

SEQ ID NO: 36417 - DNA, 13 bp, Artificial Sequence
  Oligonucleotide for detection of SNP TSC0011438
gttaataatttaa

SEQ ID NO: 36418 - DNA, 13 bp, Artificial Sequence
  Oligonucleotide for detection of SNP TSC0011438
ttaaattattaac

SEQ ID NO: 36419 - DNA, 13 bp, Artificial Sequence
  Oligonucleotide for detection of SNP TSC0011438
gttaattatttaa

SEQ ID NO: 36420 - DNA, 13 bp, Artificial Sequence
  Oligonucleotide for detection of SNP TSC0011438
ttaaataattaac

SEQ ID NO: 36421 - DNA, 13 bp, Artificial Sequence
  Oligonucleotide for detection of SNP TSC0011438
ttgaattattgay

SEQ ID NO: 36422 - DNA, 13 bp, Artificial Sequence
  Oligonucleotide for detection of SNP TSC0011438
rtcaataattcaa

SEQ ID NO: 36423 - DNA, 13 bp, Artificial Sequence
  Oligonucleotide for detection of SNP TSC0011438
ttgaatgattgay

SEQ ID NO: 36424 - DNA, 13 bp, Artificial Sequence
  Oligonucleotide for detection of SNP TSC0011438
rtcaatcattcaa

SEQ ID NO: 36425 - DNA, 13 bp, Artificial Sequence
  Oligonucleotide for detection of SNP TSC0011439
ttaatgataaggg

SEQ ID NO: 36426 - DNA, 13 bp, Artificial Sequence
  Oligonucleotide for detection of SNP TSC0011439
cccttatcattaa

SEQ ID NO: 36427 - DNA, 13 bp, Artificial Sequence
  Oligonucleotide for detection of SNP TSC0011439
ttaatggtaaggg

SEQ ID NO: 36428 - DNA, 13 bp, Artificial Sequence
  Oligonucleotide for detection of SNP TSC0011439
cccttaccattaa

SEQ ID NO: 36429 - DNA, 13 bp, Artificial Sequence
  Oligonucleotide for detection of SNP TSC0011440
aatgataagggaa

SEQ ID NO: 36430 - DNA, 13 bp, Artificial Sequence
  Oligonucleotide for detection of SNP TSC0011440
ttcccttatcatt

SEQ ID NO: 36431 - DNA, 13 bp, Artificial Sequence
  Oligonucleotide for detection of SNP TSC0011440
aatgatgagggaa

SEQ ID NO: 36432 - DNA, 13 bp, Artificial Sequence
  Oligonucleotide for detection of SNP TSC0011440
ttccctcatcatt

SEQ ID NO: 36433 - DNA, 13 bp, Artificial Sequence
  Oligonucleotide for detection of SNP TSC0011441
tatgaagttttta

SEQ ID NO: 36434 - DNA, 13 bp, Artificial Sequence
  Oligonucleotide for detection of SNP TSC0011441
taaaaacttcata

SEQ ID NO: 36435 - DNA, 13 bp, Artificial Sequence
  Oligonucleotide for detection of SNP TSC0011441
tatgaatttttta

SEQ ID NO: 36436 - DNA, 13 bp, Artificial Sequence
  Oligonucleotide for detection of SNP TSC0011441
taaaaaattcata

SEQ ID NO: 36437 - DNA, 13 bp, Artificial Sequence
  Oligonucleotide for detection of SNP TSC0011441
taaaaattttatg

SEQ ID NO: 36438 - DNA, 13 bp, Artificial Sequence
  Oligonucleotide for detection of SNP TSC0011441
cataaaattttta

SEQ ID NO: 36439 - DNA, 13 bp, Artificial Sequence
  Oligonucleotide for detection of SNP TSC0011441
taaaaaatttatg

SEQ ID NO: 36440 - DNA, 13 bp, Artificial Sequence
  Oligonucleotide for detection of SNP TSC0011441
cataaatttttta

SEQ ID NO: 36441 - DNA, 13 bp, Artificial Sequence
  Oligonucleotide for detection of SNP TSC0011442
atatattgttttt

SEQ ID NO: 36442 - DNA, 13 bp, Artificial Sequence
  Oligonucleotide for detection of SNP TSC0011442
aaaaacaatatat

SEQ ID NO: 36443 - DNA, 13 bp, Artificial Sequence
  Oligonucleotide for detection of SNP TSC0011442
atatatcgttttt

SEQ ID NO: 36444 - DNA, 13 bp, Artificial Sequence
  Oligonucleotide for detection of SNP TSC0011442
aaaaacgatatat

SEQ ID NO: 36445 - DNA, 13 bp, Artificial Sequence
  Oligonucleotide for detection of SNP TSC0011442
aggggtggtgtgt

SEQ ID NO: 36446 - DNA, 13 bp, Artificial Sequence
  Oligonucleotide for detection of SNP TSC0011442
acacaccacccct

SEQ ID NO: 36447 - DNA, 13 bp, Artificial Sequence
  Oligonucleotide for detection of SNP TSC0011442
aggggtagtgtgt

SEQ ID NO: 36448 - DNA, 13 bp, Artificial Sequence
  Oligonucleotide for detection of SNP TSC0011442
acacactacccct

SEQ ID NO: 36449 - DNA, 13 bp, Artificial Sequence
  Oligonucleotide for detection of SNP TSC0011442
aggggcggtgtgt

SEQ ID NO: 36450 - DNA, 13 bp, Artificial Sequence
  Oligonucleotide for detection of SNP TSC0011442
acacaccgcccct

SEQ ID NO: 36451 - DNA, 13 bp, Artificial Sequence
  Oligonucleotide for detection of SNP TSC0011443
gatatggttagga

SEQ ID NO: 36452 - DNA, 13 bp, Artificial Sequence
  Oligonucleotide for detection of SNP TSC0011443
tcctaaccatatc

SEQ ID NO: 36453 - DNA, 13 bp, Artificial Sequence
  Oligonucleotide for detection of SNP TSC0011443
gatatgattagga

SEQ ID NO: 36454 - DNA, 13 bp, Artificial Sequence
  Oligonucleotide for detection of SNP TSC0011443
tcctaatcatatc

SEQ ID NO: 36455 - DNA, 13 bp, Artificial Sequence
  Oligonucleotide for detection of SNP TSC0011444
ttatgggtatttt

SEQ ID NO: 36456 - DNA, 13 bp, Artificial Sequence
  Oligonucleotide for detection of SNP TSC0011444
aaaatacccataa

SEQ ID NO: 36457 - DNA, 13 bp, Artificial Sequence
  Oligonucleotide for detection of SNP TSC0011444
ttatggatatttt

SEQ ID NO: 36458 - DNA, 13 bp, Artificial Sequence
  Oligonucleotide for detection of SNP TSC0011444
aaaatatccataa

SEQ ID NO: 36459 - DNA, 13 bp, Artificial Sequence
  Oligonucleotide for detection of SNP TSC0011445
ttaatatgtttta

SEQ ID NO: 36460 - DNA, 13 bp, Artificial Sequence
  Oligonucleotide for detection of SNP TSC0011445
taaaacatattaa

SEQ ID NO: 36461 - DNA, 13 bp, Artificial Sequence
  Oligonucleotide for detection of SNP TSC0011445
ttaatacgtttta

SEQ ID NO: 36462 - DNA, 13 bp, Artificial Sequence
  Oligonucleotide for detection of SNP TSC0011445
taaaacgtattaa

SEQ ID NO: 36463 - DNA, 13 bp, Artificial Sequence
  Oligonucleotide for detection of SNP TSC0011445
tggagtgtattgg

SEQ ID NO: 36464 - DNA, 13 bp, Artificial Sequence
  Oligonucleotide for detection of SNP TSC0011445
ccaatacactcca

SEQ ID NO: 36465 - DNA, 13 bp, Artificial Sequence
  Oligonucleotide for detection of SNP TSC0011445
tggagtatattgg

SEQ ID NO: 36466 - DNA, 13 bp, Artificial Sequence
  Oligonucleotide for detection of SNP TSC0011445
ccaatatactcca

SEQ ID NO: 36467 - DNA, 13 bp, Artificial Sequence
  Oligonucleotide for detection of SNP TSC0011445
tggagcgtattgg

SEQ ID NO: 36468 - DNA, 13 bp, Artificial Sequence
  Oligonucleotide for detection of SNP TSC0011445
ccaatacgctcca

SEQ ID NO: 36469 - DNA, 13 bp, Artificial Sequence
  Oligonucleotide for detection of SNP TSC0011446
ttatggttatttt

SEQ ID NO: 36470 - DNA, 13 bp, Artificial Sequence
  Oligonucleotide for detection of SNP TSC0011446
aaaataaccataa

SEQ ID NO: 36471 - DNA, 13 bp, Artificial Sequence
  Oligonucleotide for detection of SNP TSC0011446
aggatggttatga

SEQ ID NO: 36472 - DNA, 13 bp, Artificial Sequence
  Oligonucleotide for detection of SNP TSC0011446
tcataaccatcct

SEQ ID NO: 36473 - DNA, 13 bp, Artificial Sequence
  Oligonucleotide for detection of SNP TSC0011446
aggatgtttatga

SEQ ID NO: 36474 - DNA, 13 bp, Artificial Sequence
  Oligonucleotide for detection of SNP TSC0011446
tcataaacatcct

SEQ ID NO: 36475 - DNA, 13 bp, Artificial Sequence
  Oligonucleotide for detection of SNP TSC0011448
gtggaaagtgatt

SEQ ID NO: 36476 - DNA, 13 bp, Artificial Sequence
  Oligonucleotide for detection of SNP TSC0011448
aatcactttccac

SEQ ID NO: 36477 - DNA, 13 bp, Artificial Sequence
  Oligonucleotide for detection of SNP TSC0011448
gtggaaggtgatt

SEQ ID NO: 36478 - DNA, 13 bp, Artificial Sequence
  Oligonucleotide for detection of SNP TSC0011448
aatcaccttccac

SEQ ID NO: 36479 - DNA, 13 bp, Artificial Sequence
  Oligonucleotide for detection of SNP TSC0011450
tggggtatagggg

SEQ ID NO: 36480 - DNA, 13 bp, Artificial Sequence
  Oligonucleotide for detection of SNP TSC0011450
cccctatacccca

SEQ ID NO: 36481 - DNA, 13 bp, Artificial Sequence
  Oligonucleotide for detection of SNP TSC0011450
tggggtgtagggg

SEQ ID NO: 36482 - DNA, 13 bp, Artificial Sequence
  Oligonucleotide for detection of SNP TSC0011450
cccctacacccca

SEQ ID NO: 36483 - DNA, 13 bp, Artificial Sequence
  Oligonucleotide for detection of SNP TSC0011450
tggggcgtagggg

SEQ ID NO: 36484 - DNA, 13 bp, Artificial Sequence
  Oligonucleotide for detection of SNP TSC0011450
cccctacgcccca

SEQ ID NO: 36485 - DNA, 13 bp, Artificial Sequence
  Oligonucleotide for detection of SNP TSC0011451
tgttttttaggtt

SEQ ID NO: 36486 - DNA, 13 bp, Artificial Sequence
  Oligonucleotide for detection of SNP TSC0011451
aacctaaaaaaca

SEQ ID NO: 36487 - DNA, 13 bp, Artificial Sequence
  Oligonucleotide for detection of SNP TSC0011451
tgttttgtaggtt

SEQ ID NO: 36488 - DNA, 13 bp, Artificial Sequence
  Oligonucleotide for detection of SNP TSC0011451
aacctacaaaaca

SEQ ID NO: 36489 - DNA, 13 bp, Artificial Sequence
  Oligonucleotide for detection of SNP TSC0011451
cgttttttaggtt

SEQ ID NO: 36490 - DNA, 13 bp, Artificial Sequence
  Oligonucleotide for detection of SNP TSC0011451
aacctaaaaaacg

SEQ ID NO: 36491 - DNA, 13 bp, Artificial Sequence
  Oligonucleotide for detection of SNP TSC0011451
cgttttgtaggtt

SEQ ID NO: 36492 - DNA, 13 bp, Artificial Sequence
  Oligonucleotide for detection of SNP TSC0011451
aacctacaaaacg

SEQ ID NO: 36493 - DNA, 13 bp, Artificial Sequence
  Oligonucleotide for detection of SNP TSC0011451
aatttgaaaggtg

SEQ ID NO: 36494 - DNA, 13 bp, Artificial Sequence
  Oligonucleotide for detection of SNP TSC0011451
cacctttcaaatt

SEQ ID NO: 36495 - DNA, 13 bp, Artificial Sequence
  Oligonucleotide for detection of SNP TSC0011451
aatttgtaaggtg

SEQ ID NO: 36496 - DNA, 13 bp, Artificial Sequence
  Oligonucleotide for detection of SNP TSC0011451
caccttacaaatt

SEQ ID NO: 36497 - DNA, 13 bp, Artificial Sequence
  Oligonucleotide for detection of SNP TSC0011451
aatttgaaaggcg

SEQ ID NO: 36498 - DNA, 13 bp, Artificial Sequence
  Oligonucleotide for detection of SNP TSC0011451
cgcctttcaaatt

SEQ ID NO: 36499 - DNA, 13 bp, Artificial Sequence
  Oligonucleotide for detection of SNP TSC0011451
aatttgtaaggcg

SEQ ID NO: 36500 - DNA, 13 bp, Artificial Sequence
  Oligonucleotide for detection of SNP TSC0011451
cgccttacaaatt

SEQ ID NO: 36501 - DNA, 13 bp, Artificial Sequence
  Oligonucleotide for detection of SNP TSC0011452
taaagtaaatatt

SEQ ID NO: 36502 - DNA, 13 bp, Artificial Sequence
  Oligonucleotide for detection of SNP TSC0011452
aatatttacttta

SEQ ID NO: 36503 - DNA, 13 bp, Artificial Sequence
  Oligonucleotide for detection of SNP TSC0011452
taaagtgaatatt

SEQ ID NO: 36504 - DNA, 13 bp, Artificial Sequence
  Oligonucleotide for detection of SNP TSC0011452
aatattcacttta

SEQ ID NO: 36505 - DNA, 13 bp, Artificial Sequence
  Oligonucleotide for detection of SNP TSC0011452
taaagcgaatatt

SEQ ID NO: 36506 - DNA, 13 bp, Artificial Sequence
  Oligonucleotide for detection of SNP TSC0011452
aatattcgcttta

SEQ ID NO: 36507 - DNA, 13 bp, Artificial Sequence
  Oligonucleotide for detection of SNP TSC0011452
aatgtttgtttta

SEQ ID NO: 36508 - DNA, 13 bp, Artificial Sequence
  Oligonucleotide for detection of SNP TSC0011452
taaaacaaacatt

SEQ ID NO: 36509 - DNA, 13 bp, Artificial Sequence
  Oligonucleotide for detection of SNP TSC0011452
aatgttcgtttta

SEQ ID NO: 36510 - DNA, 13 bp, Artificial Sequence
  Oligonucleotide for detection of SNP TSC0011452
taaaacgaacatt

SEQ ID NO: 36511 - DNA, 13 bp, Artificial Sequence
  Oligonucleotide for detection of SNP TSC0011453
tgtttttgtaaaa

SEQ ID NO: 36512 - DNA, 13 bp, Artificial Sequence
  Oligonucleotide for detection of SNP TSC0011453
ttttacaaaaaca

SEQ ID NO: 36513 - DNA, 13 bp, Artificial Sequence
  Oligonucleotide for detection of SNP TSC0011453
tgttttcgtaaaa

SEQ ID NO: 36514 - DNA, 13 bp, Artificial Sequence
  Oligonucleotide for detection of SNP TSC0011453
ttttacgaaaaca

SEQ ID NO: 36515 - DNA, 13 bp, Artificial Sequence
  Oligonucleotide for detection of SNP TSC0011453
ttttgtgaagata

SEQ ID NO: 36516 - DNA, 13 bp, Artificial Sequence
  Oligonucleotide for detection of SNP TSC0011453
tatcttcacaaaa

SEQ ID NO: 36517 - DNA, 13 bp, Artificial Sequence
  Oligonucleotide for detection of SNP TSC0011453
ttttgtaaagata

SEQ ID NO: 36518 - DNA, 13 bp, Artificial Sequence
  Oligonucleotide for detection of SNP TSC0011453
tatctttacaaaa

SEQ ID NO: 36519 - DNA, 13 bp, Artificial Sequence
  Oligonucleotide for detection of SNP TSC0011453
ttttgcgaagata

SEQ ID NO: 36520 - DNA, 13 bp, Artificial Sequence
  Oligonucleotide for detection of SNP TSC0011453
tatcttcgcaaaa

SEQ ID NO: 36521 - DNA, 13 bp, Artificial Sequence
  Oligonucleotide for detection of SNP TSC0011454
ggtatggttatag

SEQ ID NO: 36522 - DNA, 13 bp, Artificial Sequence
  Oligonucleotide for detection of SNP TSC0011454
ctataaccatacc

SEQ ID NO: 36523 - DNA, 13 bp, Artificial Sequence
  Oligonucleotide for detection of SNP TSC0011454
ggtatgattatag

SEQ ID NO: 36524 - DNA, 13 bp, Artificial Sequence
  Oligonucleotide for detection of SNP TSC0011454
ctataatcatacc

SEQ ID NO: 36525 - DNA, 13 bp, Artificial Sequence
  Oligonucleotide for detection of SNP TSC0011455
tattgtaattttt

SEQ ID NO: 36526 - DNA, 13 bp, Artificial Sequence
  Oligonucleotide for detection of SNP TSC0011455
aaaaattacaata

SEQ ID NO: 36527 - DNA, 13 bp, Artificial Sequence
  Oligonucleotide for detection of SNP TSC0011455
tattgtgattttt

SEQ ID NO: 36528 - DNA, 13 bp, Artificial Sequence
  Oligonucleotide for detection of SNP TSC0011455
aaaaatcacaata

SEQ ID NO: 36529 - DNA, 13 bp, Artificial Sequence
  Oligonucleotide for detection of SNP TSC0011455
tattgcgattttt

SEQ ID NO: 36530 - DNA, 13 bp, Artificial Sequence
  Oligonucleotide for detection of SNP TSC0011455
aaaaatcgcaata

SEQ ID NO: 36531 - DNA, 13 bp, Artificial Sequence
  Oligonucleotide for detection of SNP TSC0011455
agaggttgtagtg

SEQ ID NO: 36532 - DNA, 13 bp, Artificial Sequence
  Oligonucleotide for detection of SNP TSC0011455
cactacaacctct

SEQ ID NO: 36533 - DNA, 13 bp, Artificial Sequence
  Oligonucleotide for detection of SNP TSC0011455
agaggtcgtagtg

SEQ ID NO: 36534 - DNA, 13 bp, Artificial Sequence
  Oligonucleotide for detection of SNP TSC0011455
cactacgacctct

SEQ ID NO: 36535 - DNA, 13 bp, Artificial Sequence
  Oligonucleotide for detection of SNP TSC0011456
atttgaggttggg

SEQ ID NO: 36536 - DNA, 13 bp, Artificial Sequence
  Oligonucleotide for detection of SNP TSC0011456
cccaacctcaaat

SEQ ID NO: 36537 - DNA, 13 bp, Artificial Sequence
  Oligonucleotide for detection of SNP TSC0011456
atttgaagttggg

SEQ ID NO: 36538 - DNA, 13 bp, Artificial Sequence
  Oligonucleotide for detection of SNP TSC0011456
cccaacttcaaat

SEQ ID NO: 36539 - DNA, 13 bp, Artificial Sequence
  Oligonucleotide for detection of SNP TSC0011456
atttgaggtcggg

SEQ ID NO: 36540 - DNA, 13 bp, Artificial Sequence
  Oligonucleotide for detection of SNP TSC0011456
cccgacctcaaat

SEQ ID NO: 36541 - DNA, 13 bp, Artificial Sequence
  Oligonucleotide for detection of SNP TSC0011456
atttgaagtcggg

SEQ ID NO: 36542 - DNA, 13 bp, Artificial Sequence
  Oligonucleotide for detection of SNP TSC0011456
cccgacttcaaat

SEQ ID NO: 36543 - DNA, 13 bp, Artificial Sequence
  Oligonucleotide for detection of SNP TSC0011458
tagtgttgtattg

SEQ ID NO: 36544 - DNA, 13 bp, Artificial Sequence
  Oligonucleotide for detection of SNP TSC0011458
caatacaacacta

SEQ ID NO: 36545 - DNA, 13 bp, Artificial Sequence
  Oligonucleotide for detection of SNP TSC0011458
tagtgtcgtattg

SEQ ID NO: 36546 - DNA, 13 bp, Artificial Sequence
  Oligonucleotide for detection of SNP TSC0011458
caatacgacacta

SEQ ID NO: 36547 - DNA, 13 bp, Artificial Sequence
  Oligonucleotide for detection of SNP TSC0011458
tagtatggtatta

SEQ ID NO: 36548 - DNA, 13 bp, Artificial Sequence
  Oligonucleotide for detection of SNP TSC0011458
taataccatacta

SEQ ID NO: 36549 - DNA, 13 bp, Artificial Sequence
  Oligonucleotide for detection of SNP TSC0011458
tagtatagtatta

SEQ ID NO: 36550 - DNA, 13 bp, Artificial Sequence
  Oligonucleotide for detection of SNP TSC0011458
taatactatacta

SEQ ID NO: 36551 - DNA, 13 bp, Artificial Sequence
  Oligonucleotide for detection of SNP TSC0011458
tagtacggtatta

SEQ ID NO: 36552 - DNA, 13 bp, Artificial Sequence
  Oligonucleotide for detection of SNP TSC0011458
taataccgtacta

SEQ ID NO: 36553 - DNA, 13 bp, Artificial Sequence
  Oligonucleotide for detection of SNP TSC0011459
tgaggtgtatatt

SEQ ID NO: 36554 - DNA, 13 bp, Artificial Sequence
  Oligonucleotide for detection of SNP TSC0011459
aatatacacctca

SEQ ID NO: 36555 - DNA, 13 bp, Artificial Sequence
  Oligonucleotide for detection of SNP TSC0011459
tgaggtatatatt

SEQ ID NO: 36556 - DNA, 13 bp, Artificial Sequence
  Oligonucleotide for detection of SNP TSC0011459
aatatatacctca

SEQ ID NO: 36557 - DNA, 13 bp, Artificial Sequence
  Oligonucleotide for detection of SNP TSC0011461
tgtggtgatggtt

SEQ ID NO: 36558 - DNA, 13 bp, Artificial Sequence
  Oligonucleotide for detection of SNP TSC0011461
aaccatcaccaca

SEQ ID NO: 36559 - DNA, 13 bp, Artificial Sequence
  Oligonucleotide for detection of SNP TSC0011461
tgtggtaatggtt

SEQ ID NO: 36560 - DNA, 13 bp, Artificial Sequence
  Oligonucleotide for detection of SNP TSC0011461
aaccattaccaca

SEQ ID NO: 36561 - DNA, 13 bp, Artificial Sequence
  Oligonucleotide for detection of SNP TSC0011466
tttataaataaat

SEQ ID NO: 36562 - DNA, 13 bp, Artificial Sequence
  Oligonucleotide for detection of SNP TSC0011466
atttatttataaa

SEQ ID NO: 36563 - DNA, 13 bp, Artificial Sequence
  Oligonucleotide for detection of SNP TSC0011466
tttatatataaat

SEQ ID NO: 36564 - DNA, 13 bp, Artificial Sequence
  Oligonucleotide for detection of SNP TSC0011466
atttatatataaa

SEQ ID NO: 36565 - DNA, 13 bp, Artificial Sequence
  Oligonucleotide for detection of SNP TSC0011466
atttgtttgtaaa

SEQ ID NO: 36566 - DNA, 13 bp, Artificial Sequence
  Oligonucleotide for detection of SNP TSC0011466
tttacaaacaaat

SEQ ID NO: 36567 - DNA, 13 bp, Artificial Sequence
  Oligonucleotide for detection of SNP TSC0011466
atttgtgtgtaaa

SEQ ID NO: 36568 - DNA, 13 bp, Artificial Sequence
  Oligonucleotide for detection of SNP TSC0011466
tttacacacaaat

SEQ ID NO: 36569 - DNA, 13 bp, Artificial Sequence
  Oligonucleotide for detection of SNP TSC0011467
tataaagaagtta

SEQ ID NO: 36570 - DNA, 13 bp, Artificial Sequence
  Oligonucleotide for detection of SNP TSC0011467
taacttctttata

SEQ ID NO: 36571 - DNA, 13 bp, Artificial Sequence
  Oligonucleotide for detection of SNP TSC0011467
tataaaaaagtta

SEQ ID NO: 36572 - DNA, 13 bp, Artificial Sequence
  Oligonucleotide for detection of SNP TSC0011467
taacttttttata

SEQ ID NO: 36573 - DNA, 13 bp, Artificial Sequence
  Oligonucleotide for detection of SNP TSC0011469
tgtagggtggtgt

SEQ ID NO: 36574 - DNA, 13 bp, Artificial Sequence
  Oligonucleotide for detection of SNP TSC0011469
acaccaccctaca

SEQ ID NO: 36575 - DNA, 13 bp, Artificial Sequence
  Oligonucleotide for detection of SNP TSC0011469
tgtaggatggtgt

SEQ ID NO: 36576 - DNA, 13 bp, Artificial Sequence
  Oligonucleotide for detection of SNP TSC0011469
acaccatcctaca

SEQ ID NO: 36577 - DNA, 13 bp, Artificial Sequence
  Oligonucleotide for detection of SNP TSC0011469
tgtagggcggtgt

SEQ ID NO: 36578 - DNA, 13 bp, Artificial Sequence
  Oligonucleotide for detection of SNP TSC0011469
acaccgccctaca

SEQ ID NO: 36579 - DNA, 13 bp, Artificial Sequence
  Oligonucleotide for detection of SNP TSC0011469
tgtaggacggtgt

SEQ ID NO: 36580 - DNA, 13 bp, Artificial Sequence
  Oligonucleotide for detection of SNP TSC0011469
acaccgtcctaca

SEQ ID NO: 36581 - DNA, 13 bp, Artificial Sequence
  Oligonucleotide for detection of SNP TSC0011470
attttaataataa

SEQ ID NO: 36582 - DNA, 13 bp, Artificial Sequence
  Oligonucleotide for detection of SNP TSC0011470
ttattattaaaat

SEQ ID NO: 36583 - DNA, 13 bp, Artificial Sequence
  Oligonucleotide for detection of SNP TSC0011470
attttattaataa

SEQ ID NO: 36584 - DNA, 13 bp, Artificial Sequence
  Oligonucleotide for detection of SNP TSC0011470
ttattaataaaat

SEQ ID NO: 36585 - DNA, 13 bp, Artificial Sequence
  Oligonucleotide for detection of SNP TSC0011470
ttgttattaaaat

SEQ ID NO: 36586 - DNA, 13 bp, Artificial Sequence
  Oligonucleotide for detection of SNP TSC0011470
attttaataacaa

SEQ ID NO: 36587 - DNA, 13 bp, Artificial Sequence
  Oligonucleotide for detection of SNP TSC0011470
ttgttaataaaat

SEQ ID NO: 36588 - DNA, 13 bp, Artificial Sequence
  Oligonucleotide for detection of SNP TSC0011470
attttattaacaa

SEQ ID NO: 36589 - DNA, 13 bp, Artificial Sequence
  Oligonucleotide for detection of SNP TSC0011471
ttttttggggaat

SEQ ID NO: 36590 - DNA, 13 bp, Artificial Sequence
  Oligonucleotide for detection of SNP TSC0011471
attccccaaaaaa

SEQ ID NO: 36591 - DNA, 13 bp, Artificial Sequence
  Oligonucleotide for detection of SNP TSC0011471
ttttttagggaat

SEQ ID NO: 36592 - DNA, 13 bp, Artificial Sequence
  Oligonucleotide for detection of SNP TSC0011471
attccctaaaaaa

SEQ ID NO: 36593 - DNA, 13 bp, Artificial Sequence
  Oligonucleotide for detection of SNP TSC0011472
taaatttgtatty

SEQ ID NO: 36594 - DNA, 13 bp, Artificial Sequence
  Oligonucleotide for detection of SNP TSC0011472
raatacaaattta

SEQ ID NO: 36595 - DNA, 13 bp, Artificial Sequence
  Oligonucleotide for detection of SNP TSC0011472
taaattcgtatty

SEQ ID NO: 36596 - DNA, 13 bp, Artificial Sequence
  Oligonucleotide for detection of SNP TSC0011472
raatacgaattta

SEQ ID NO: 36597 - DNA, 13 bp, Artificial Sequence
  Oligonucleotide for detection of SNP TSC0011472
gaatatgagttta

SEQ ID NO: 36598 - DNA, 13 bp, Artificial Sequence
  Oligonucleotide for detection of SNP TSC0011472
taaactcatattc

SEQ ID NO: 36599 - DNA, 13 bp, Artificial Sequence
  Oligonucleotide for detection of SNP TSC0011472
gaatataagttta

SEQ ID NO: 36600 - DNA, 13 bp, Artificial Sequence
  Oligonucleotide for detection of SNP TSC0011472
taaacttatattc

SEQ ID NO: 36601 - DNA, 13 bp, Artificial Sequence
  Oligonucleotide for detection of SNP TSC0011472
gaatacgagttta

SEQ ID NO: 36602 - DNA, 13 bp, Artificial Sequence
  Oligonucleotide for detection of SNP TSC0011472
taaactcgtattc

SEQ ID NO: 36603 - DNA, 13 bp, Artificial Sequence
  Oligonucleotide for detection of SNP TSC0011473
aagttatttgagg

SEQ ID NO: 36604 - DNA, 13 bp, Artificial Sequence
  Oligonucleotide for detection of SNP TSC0011473
cctcaaataactt

SEQ ID NO: 36605 - DNA, 13 bp, Artificial Sequence
  Oligonucleotide for detection of SNP TSC0011473
aagttagttgagg

SEQ ID NO: 36606 - DNA, 13 bp, Artificial Sequence
  Oligonucleotide for detection of SNP TSC0011473
cctcaactaactt

SEQ ID NO: 36607 - DNA, 13 bp, Artificial Sequence
  Oligonucleotide for detection of SNP TSC0011473
ttttaggtggttt

SEQ ID NO: 36608 - DNA, 13 bp, Artificial Sequence
  Oligonucleotide for detection of SNP TSC0011473
aaaccacctaaaa

SEQ ID NO: 36609 - DNA, 13 bp, Artificial Sequence
  Oligonucleotide for detection of SNP TSC0011473
ttttagttggttt

SEQ ID NO: 36610 - DNA, 13 bp, Artificial Sequence
  Oligonucleotide for detection of SNP TSC0011473
aaaccaactaaaa

SEQ ID NO: 36611 - DNA, 13 bp, Artificial Sequence
  Oligonucleotide for detection of SNP TSC0011474
tttgttaaggtty

SEQ ID NO: 36612 - DNA, 13 bp, Artificial Sequence
  Oligonucleotide for detection of SNP TSC0011474
raaccttaacaaa

SEQ ID NO: 36613 - DNA, 13 bp, Artificial Sequence
  Oligonucleotide for detection of SNP TSC0011474
tttgttgaggtty

SEQ ID NO: 36614 - DNA, 13 bp, Artificial Sequence
  Oligonucleotide for detection of SNP TSC0011474
raacctcaacaaa

SEQ ID NO: 36615 - DNA, 13 bp, Artificial Sequence
  Oligonucleotide for detection of SNP TSC0011474
tttgtcgaggtty

SEQ ID NO: 36616 - DNA, 13 bp, Artificial Sequence
  Oligonucleotide for detection of SNP TSC0011474
raacctcgacaaa

SEQ ID NO: 36617 - DNA, 13 bp, Artificial Sequence
  Oligonucleotide for detection of SNP TSC0011474
gagttttggtaaa

SEQ ID NO: 36618 - DNA, 13 bp, Artificial Sequence
  Oligonucleotide for detection of SNP TSC0011474
tttaccaaaactc

SEQ ID NO: 36619 - DNA, 13 bp, Artificial Sequence
  Oligonucleotide for detection of SNP TSC0011474
gagtttcggtaaa

SEQ ID NO: 36620 - DNA, 13 bp, Artificial Sequence
  Oligonucleotide for detection of SNP TSC0011474
tttaccgaaactc

SEQ ID NO: 36621 - DNA, 13 bp, Artificial Sequence
  Oligonucleotide for detection of SNP TSC0011475
taaaatgaatagy

SEQ ID NO: 36622 - DNA, 13 bp, Artificial Sequence
  Oligonucleotide for detection of SNP TSC0011475
rctattcatttta

SEQ ID NO: 36623 - DNA, 13 bp, Artificial Sequence
  Oligonucleotide for detection of SNP TSC0011475
taaaataaatagy

SEQ ID NO: 36624 - DNA, 13 bp, Artificial Sequence
  Oligonucleotide for detection of SNP TSC0011475
rctatttatttta

SEQ ID NO: 36625 - DNA, 13 bp, Artificial Sequence
  Oligonucleotide for detection of SNP TSC0011476
tgtggtggaaaay

SEQ ID NO: 36626 - DNA, 13 bp, Artificial Sequence
  Oligonucleotide for detection of SNP TSC0011476
rttttccaccaca

SEQ ID NO: 36627 - DNA, 13 bp, Artificial Sequence
  Oligonucleotide for detection of SNP TSC0011476
tgtggtagaaaay

SEQ ID NO: 36628 - DNA, 13 bp, Artificial Sequence
  Oligonucleotide for detection of SNP TSC0011476
rttttctaccaca

SEQ ID NO: 36629 - DNA, 13 bp, Artificial Sequence
  Oligonucleotide for detection of SNP TSC0011478
tatggtgaaatty

SEQ ID NO: 36630 - DNA, 13 bp, Artificial Sequence
  Oligonucleotide for detection of SNP TSC0011478
raatttcaccata

SEQ ID NO: 36631 - DNA, 13 bp, Artificial Sequence
  Oligonucleotide for detection of SNP TSC0011478
tatggtaaaatty

SEQ ID NO: 36632 - DNA, 13 bp, Artificial Sequence
  Oligonucleotide for detection of SNP TSC0011478
raattttaccata

SEQ ID NO: 36633 - DNA, 13 bp, Artificial Sequence
  Oligonucleotide for detection of SNP TSC0011478
tacggtgaaatty

SEQ ID NO: 36634 - DNA, 13 bp, Artificial Sequence
  Oligonucleotide for detection of SNP TSC0011478
raatttcaccgta

SEQ ID NO: 36635 - DNA, 13 bp, Artificial Sequence
  Oligonucleotide for detection of SNP TSC0011478
tacggtaaaatty

SEQ ID NO: 36636 - DNA, 13 bp, Artificial Sequence
  Oligonucleotide for detection of SNP TSC0011478
raattttaccgta

SEQ ID NO: 36637 - DNA, 13 bp, Artificial Sequence
  Oligonucleotide for detection of SNP TSC0011479
taagaaattgaaa

SEQ ID NO: 36638 - DNA, 13 bp, Artificial Sequence
  Oligonucleotide for detection of SNP TSC0011479
tttcaatttctta

SEQ ID NO: 36639 - DNA, 13 bp, Artificial Sequence
  Oligonucleotide for detection of SNP TSC0011479
taagaagttgaaa

SEQ ID NO: 36640 - DNA, 13 bp, Artificial Sequence
  Oligonucleotide for detection of SNP TSC0011479
tttcaacttctta

SEQ ID NO: 36641 - DNA, 13 bp, Artificial Sequence
  Oligonucleotide for detection of SNP TSC0011482
attagaaaaagga

SEQ ID NO: 36642 - DNA, 13 bp, Artificial Sequence
  Oligonucleotide for detection of SNP TSC0011482
tcctttttctaat

SEQ ID NO: 36643 - DNA, 13 bp, Artificial Sequence
  Oligonucleotide for detection of SNP TSC0011482
attagagaaagga

SEQ ID NO: 36644 - DNA, 13 bp, Artificial Sequence
  Oligonucleotide for detection of SNP TSC0011482
tcctttctctaat

SEQ ID NO: 36645 - DNA, 13 bp, Artificial Sequence
  Oligonucleotide for detection of SNP TSC0011483
aggtgggtggaty

SEQ ID NO: 36646 - DNA, 13 bp, Artificial Sequence
  Oligonucleotide for detection of SNP TSC0011483
ratccacccacct

SEQ ID NO: 36647 - DNA, 13 bp, Artificial Sequence
  Oligonucleotide for detection of SNP TSC0011483
aggtggttggaty

SEQ ID NO: 36648 - DNA, 13 bp, Artificial Sequence
  Oligonucleotide for detection of SNP TSC0011483
ratccaaccacct

SEQ ID NO: 36649 - DNA, 13 bp, Artificial Sequence
  Oligonucleotide for detection of SNP TSC0011483
gatttatttattt

SEQ ID NO: 36650 - DNA, 13 bp, Artificial Sequence
  Oligonucleotide for detection of SNP TSC0011483
aaataaataaatc

SEQ ID NO: 36651 - DNA, 13 bp, Artificial Sequence
  Oligonucleotide for detection of SNP TSC0011484
tgtaaatggagaa

SEQ ID NO: 36652 - DNA, 13 bp, Artificial Sequence
  Oligonucleotide for detection of SNP TSC0011484
ttctccatttaca

SEQ ID NO: 36653 - DNA, 13 bp, Artificial Sequence
  Oligonucleotide for detection of SNP TSC0011484
tgtaaacggagaa

SEQ ID NO: 36654 - DNA, 13 bp, Artificial Sequence
  Oligonucleotide for detection of SNP TSC0011484
ttctccgtttaca

SEQ ID NO: 36655 - DNA, 13 bp, Artificial Sequence
  Oligonucleotide for detection of SNP TSC0011484
ttttttgtttgta

SEQ ID NO: 36656 - DNA, 13 bp, Artificial Sequence
  Oligonucleotide for detection of SNP TSC0011484
tacaaacaaaaaa

SEQ ID NO: 36657 - DNA, 13 bp, Artificial Sequence
  Oligonucleotide for detection of SNP TSC0011484
ttttttatttgta

SEQ ID NO: 36658 - DNA, 13 bp, Artificial Sequence
  Oligonucleotide for detection of SNP TSC0011484
tacaaataaaaaa

SEQ ID NO: 36659 - DNA, 13 bp, Artificial Sequence
  Oligonucleotide for detection of SNP TSC0011484
tttttcgtttgta

SEQ ID NO: 36660 - DNA, 13 bp, Artificial Sequence
  Oligonucleotide for detection of SNP TSC0011484
tacaaacgaaaaa

SEQ ID NO: 36661 - DNA, 13 bp, Artificial Sequence
  Oligonucleotide for detection of SNP TSC0011485
taatttatttttt

SEQ ID NO: 36662 - DNA, 13 bp, Artificial Sequence
  Oligonucleotide for detection of SNP TSC0011485
aaaaaataaatta

SEQ ID NO: 36663 - DNA, 13 bp, Artificial Sequence
  Oligonucleotide for detection of SNP TSC0011485
taatttttttttt

SEQ ID NO: 36664 - DNA, 13 bp, Artificial Sequence
  Oligonucleotide for detection of SNP TSC0011485
aaaaaaaaaatta

SEQ ID NO: 36665 - DNA, 13 bp, Artificial Sequence
  Oligonucleotide for detection of SNP TSC0011485
aagaggtgggttg

SEQ ID NO: 36666 - DNA, 13 bp, Artificial Sequence
  Oligonucleotide for detection of SNP TSC0011485
caacccacctctt

SEQ ID NO: 36667 - DNA, 13 bp, Artificial Sequence
  Oligonucleotide for detection of SNP TSC0011485
aagaggggggttg

SEQ ID NO: 36668 - DNA, 13 bp, Artificial Sequence
  Oligonucleotide for detection of SNP TSC0011485
caacccccctctt

SEQ ID NO: 36669 - DNA, 13 bp, Artificial Sequence
  Oligonucleotide for detection of SNP TSC0011489
aaggatatttttt

SEQ ID NO: 36670 - DNA, 13 bp, Artificial Sequence
  Oligonucleotide for detection of SNP TSC0011489
aaaaaatatcctt

SEQ ID NO: 36671 - DNA, 13 bp, Artificial Sequence
  Oligonucleotide for detection of SNP TSC0011489
aaggatgtttttt

SEQ ID NO: 36672 - DNA, 13 bp, Artificial Sequence
  Oligonucleotide for detection of SNP TSC0011489
aaaaaacatcctt

SEQ ID NO: 36673 - DNA, 13 bp, Artificial Sequence
  Oligonucleotide for detection of SNP TSC0011489
aaggacgtttttt

SEQ ID NO: 36674 - DNA, 13 bp, Artificial Sequence
  Oligonucleotide for detection of SNP TSC0011489
aaaaaacgtcctt

SEQ ID NO: 36675 - DNA, 13 bp, Artificial Sequence
  Oligonucleotide for detection of SNP TSC0011489
agaaaatgttttt

SEQ ID NO: 36676 - DNA, 13 bp, Artificial Sequence
  Oligonucleotide for detection of SNP TSC0011489
aaaaacattttct

SEQ ID NO: 36677 - DNA, 13 bp, Artificial Sequence
  Oligonucleotide for detection of SNP TSC0011489
agaaaacgttttt

SEQ ID NO: 36678 - DNA, 13 bp, Artificial Sequence
  Oligonucleotide for detection of SNP TSC0011489
aaaaacgttttct

SEQ ID NO: 36679 - DNA, 13 bp, Artificial Sequence
  Oligonucleotide for detection of SNP TSC0011493
ttaagaaaataat

SEQ ID NO: 36680 - DNA, 13 bp, Artificial Sequence
  Oligonucleotide for detection of SNP TSC0011493
attattttcttaa

SEQ ID NO: 36681 - DNA, 13 bp, Artificial Sequence
  Oligonucleotide for detection of SNP TSC0011493
ttaagataataat

SEQ ID NO: 36682 - DNA, 13 bp, Artificial Sequence
  Oligonucleotide for detection of SNP TSC0011493
attattatcttaa

SEQ ID NO: 36683 - DNA, 13 bp, Artificial Sequence
  Oligonucleotide for detection of SNP TSC0011493
attatttttttga

SEQ ID NO: 36684 - DNA, 13 bp, Artificial Sequence
  Oligonucleotide for detection of SNP TSC0011493
tcaaaaaaataat

SEQ ID NO: 36685 - DNA, 13 bp, Artificial Sequence
  Oligonucleotide for detection of SNP TSC0011494
tggtagttttaty

SEQ ID NO: 36686 - DNA, 13 bp, Artificial Sequence
  Oligonucleotide for detection of SNP TSC0011494
rataaaactacca

SEQ ID NO: 36687 - DNA, 13 bp, Artificial Sequence
  Oligonucleotide for detection of SNP TSC0011494
tggtaggtttaty

SEQ ID NO: 36688 - DNA, 13 bp, Artificial Sequence
  Oligonucleotide for detection of SNP TSC0011494
rataaacctacca

SEQ ID NO: 36689 - DNA, 13 bp, Artificial Sequence
  Oligonucleotide for detection of SNP TSC0011494
ggtagatttatta

SEQ ID NO: 36690 - DNA, 13 bp, Artificial Sequence
  Oligonucleotide for detection of SNP TSC0011494
taataaatctacc

SEQ ID NO: 36691 - DNA, 13 bp, Artificial Sequence
  Oligonucleotide for detection of SNP TSC0011495
gatttgggatgta

SEQ ID NO: 36692 - DNA, 13 bp, Artificial Sequence
  Oligonucleotide for detection of SNP TSC0011495
tacatcccaaatc

SEQ ID NO: 36693 - DNA, 13 bp, Artificial Sequence
  Oligonucleotide for detection of SNP TSC0011495
gatttgtgatgta

SEQ ID NO: 36694 - DNA, 13 bp, Artificial Sequence
  Oligonucleotide for detection of SNP TSC0011495
tacatcacaaatc

SEQ ID NO: 36695 - DNA, 13 bp, Artificial Sequence
  Oligonucleotide for detection of SNP TSC0011495
tatattttagaty

SEQ ID NO: 36696 - DNA, 13 bp, Artificial Sequence
  Oligonucleotide for detection of SNP TSC0011495
ratctaaaatata

SEQ ID NO: 36697 - DNA, 13 bp, Artificial Sequence
  Oligonucleotide for detection of SNP TSC0011495
tatattatagaty

SEQ ID NO: 36698 - DNA, 13 bp, Artificial Sequence
  Oligonucleotide for detection of SNP TSC0011495
ratctataatata

SEQ ID NO: 36699 - DNA, 13 bp, Artificial Sequence
  Oligonucleotide for detection of SNP TSC0011498
aaaaatatgtatt

SEQ ID NO: 36700 - DNA, 13 bp, Artificial Sequence
  Oligonucleotide for detection of SNP TSC0011498
aatacatattttt

SEQ ID NO: 36701 - DNA, 13 bp, Artificial Sequence
  Oligonucleotide for detection of SNP TSC0011498
aaaaatttgtatt

SEQ ID NO: 36702 - DNA, 13 bp, Artificial Sequence
  Oligonucleotide for detection of SNP TSC0011498
aatacaaattttt

SEQ ID NO: 36703 - DNA, 13 bp, Artificial Sequence
  Oligonucleotide for detection of SNP TSC0011498
aatatatgttttt

SEQ ID NO: 36704 - DNA, 13 bp, Artificial Sequence
  Oligonucleotide for detection of SNP TSC0011498
aaaaacatatatt

SEQ ID NO: 36705 - DNA, 13 bp, Artificial Sequence
  Oligonucleotide for detection of SNP TSC0011498
aatataagttttt

SEQ ID NO: 36706 - DNA, 13 bp, Artificial Sequence
  Oligonucleotide for detection of SNP TSC0011498
aaaaacttatatt

SEQ ID NO: 36707 - DNA, 13 bp, Artificial Sequence
  Oligonucleotide for detection of SNP TSC0011500
atgtaatgggata

SEQ ID NO: 36708 - DNA, 13 bp, Artificial Sequence
  Oligonucleotide for detection of SNP TSC0011500
tatcccattacat

SEQ ID NO: 36709 - DNA, 13 bp, Artificial Sequence
  Oligonucleotide for detection of SNP TSC0011500
atgtaacgggata

SEQ ID NO: 36710 - DNA, 13 bp, Artificial Sequence
  Oligonucleotide for detection of SNP TSC0011500
tatcccgttacat

SEQ ID NO: 36711 - DNA, 13 bp, Artificial Sequence
  Oligonucleotide for detection of SNP TSC0011500
tgttttgttgtat

SEQ ID NO: 36712 - DNA, 13 bp, Artificial Sequence
  Oligonucleotide for detection of SNP TSC0011500
atacaacaaaaca

SEQ ID NO: 36713 - DNA, 13 bp, Artificial Sequence
  Oligonucleotide for detection of SNP TSC0011500
tgttttattgtat

SEQ ID NO: 36714 - DNA, 13 bp, Artificial Sequence
  Oligonucleotide for detection of SNP TSC0011500
atacaataaaaca

SEQ ID NO: 36715 - DNA, 13 bp, Artificial Sequence
  Oligonucleotide for detection of SNP TSC0011500
tgtttcgttgtat

SEQ ID NO: 36716 - DNA, 13 bp, Artificial Sequence
  Oligonucleotide for detection of SNP TSC0011500
atacaacgaaaca

SEQ ID NO: 36717 - DNA, 13 bp, Artificial Sequence
  Oligonucleotide for detection of SNP TSC0011501
atttttaatgtgg

SEQ ID NO: 36718 - DNA, 13 bp, Artificial Sequence
  Oligonucleotide for detection of SNP TSC0011501
ccacattaaaaat

SEQ ID NO: 36719 - DNA, 13 bp, Artificial Sequence
  Oligonucleotide for detection of SNP TSC0011501
atttttgatgtgg

SEQ ID NO: 36720 - DNA, 13 bp, Artificial Sequence
  Oligonucleotide for detection of SNP TSC0011501
ccacatcaaaaat

SEQ ID NO: 36721 - DNA, 13 bp, Artificial Sequence
  Oligonucleotide for detection of SNP TSC0011504
tgaataggtgatg

SEQ ID NO: 36722 - DNA, 13 bp, Artificial Sequence
  Oligonucleotide for detection of SNP TSC0011504
catcacctattca

SEQ ID NO: 36723 - DNA, 13 bp, Artificial Sequence
  Oligonucleotide for detection of SNP TSC0011504
tgaataagtgatg

SEQ ID NO: 36724 - DNA, 13 bp, Artificial Sequence
  Oligonucleotide for detection of SNP TSC0011504
catcacttattca

SEQ ID NO: 36725 - DNA, 13 bp, Artificial Sequence
  Oligonucleotide for detection of SNP TSC0011505
tgagttatgtgta

SEQ ID NO: 36726 - DNA, 13 bp, Artificial Sequence
  Oligonucleotide for detection of SNP TSC0011505
tacacataactca

SEQ ID NO: 36727 - DNA, 13 bp, Artificial Sequence
  Oligonucleotide for detection of SNP TSC0011505
tgagttgtgtgta

SEQ ID NO: 36728 - DNA, 13 bp, Artificial Sequence
  Oligonucleotide for detection of SNP TSC0011505
tacacacaactca

SEQ ID NO: 36729 - DNA, 13 bp, Artificial Sequence
  Oligonucleotide for detection of SNP TSC0011505
tgagttatgcgta

SEQ ID NO: 36730 - DNA, 13 bp, Artificial Sequence
  Oligonucleotide for detection of SNP TSC0011505
tacgcataactca

SEQ ID NO: 36731 - DNA, 13 bp, Artificial Sequence
  Oligonucleotide for detection of SNP TSC0011505
tgagtcgtgtgta

SEQ ID NO: 36732 - DNA, 13 bp, Artificial Sequence
  Oligonucleotide for detection of SNP TSC0011505
tacacacgactca

SEQ ID NO: 36733 - DNA, 13 bp, Artificial Sequence
  Oligonucleotide for detection of SNP TSC0011505
tgagttgtgcgta

SEQ ID NO: 36734 - DNA, 13 bp, Artificial Sequence
  Oligonucleotide for detection of SNP TSC0011505
tacgcacaactca

SEQ ID NO: 36735 - DNA, 13 bp, Artificial Sequence
  Oligonucleotide for detection of SNP TSC0011505
tgagtcgtgcgta

SEQ ID NO: 36736 - DNA, 13 bp, Artificial Sequence
  Oligonucleotide for detection of SNP TSC0011505
tacgcacgactca

SEQ ID NO: 36737 - DNA, 13 bp, Artificial Sequence
  Oligonucleotide for detection of SNP TSC0011505
tatgtatggttta

SEQ ID NO: 36738 - DNA, 13 bp, Artificial Sequence
  Oligonucleotide for detection of SNP TSC0011505
taaaccatacata

SEQ ID NO: 36739 - DNA, 13 bp, Artificial Sequence
  Oligonucleotide for detection of SNP TSC0011505
tacgtatggttta

SEQ ID NO: 36740 - DNA, 13 bp, Artificial Sequence
  Oligonucleotide for detection of SNP TSC0011505
taaaccatacgta

SEQ ID NO: 36741 - DNA, 13 bp, Artificial Sequence
  Oligonucleotide for detection of SNP TSC0011505
tatgtacggttta

SEQ ID NO: 36742 - DNA, 13 bp, Artificial Sequence
  Oligonucleotide for detection of SNP TSC0011505
taaaccgtacata

SEQ ID NO: 36743 - DNA, 13 bp, Artificial Sequence
  Oligonucleotide for detection of SNP TSC0011505
tacgtacggttta

SEQ ID NO: 36744 - DNA, 13 bp, Artificial Sequence
  Oligonucleotide for detection of SNP TSC0011505
taaaccgtacgta

SEQ ID NO: 36745 - DNA, 13 bp, Artificial Sequence
  Oligonucleotide for detection of SNP TSC0011506
ttattgggaattt

SEQ ID NO: 36746 - DNA, 13 bp, Artificial Sequence
  Oligonucleotide for detection of SNP TSC0011506
aaattcccaataa

SEQ ID NO: 36747 - DNA, 13 bp, Artificial Sequence
  Oligonucleotide for detection of SNP TSC0011506
ttattgtgaattt

SEQ ID NO: 36748 - DNA, 13 bp, Artificial Sequence
  Oligonucleotide for detection of SNP TSC0011506
aaattcacaataa

SEQ ID NO: 36749 - DNA, 13 bp, Artificial Sequence
  Oligonucleotide for detection of SNP TSC0011506
aaatttttagtaa

SEQ ID NO: 36750 - DNA, 13 bp, Artificial Sequence
  Oligonucleotide for detection of SNP TSC0011506
ttactaaaaattt

SEQ ID NO: 36751 - DNA, 13 bp, Artificial Sequence
  Oligonucleotide for detection of SNP TSC0011506
aaatttatagtaa

SEQ ID NO: 36752 - DNA, 13 bp, Artificial Sequence
  Oligonucleotide for detection of SNP TSC0011506
ttactataaattt

SEQ ID NO: 36753 - DNA, 13 bp, Artificial Sequence
  Oligonucleotide for detection of SNP TSC0011507
tttttaataaaat

SEQ ID NO: 36754 - DNA, 13 bp, Artificial Sequence
  Oligonucleotide for detection of SNP TSC0011507
attttattaaaaa

SEQ ID NO: 36755 - DNA, 13 bp, Artificial Sequence
  Oligonucleotide for detection of SNP TSC0011507
tttttagtaaaat

SEQ ID NO: 36756 - DNA, 13 bp, Artificial Sequence
  Oligonucleotide for detection of SNP TSC0011507
attttactaaaaa

SEQ ID NO: 36757 - DNA, 13 bp, Artificial Sequence
  Oligonucleotide for detection of SNP TSC0011508
tagtatatatata

SEQ ID NO: 36758 - DNA, 13 bp, Artificial Sequence
  Oligonucleotide for detection of SNP TSC0011508
tatatatatacta

SEQ ID NO: 36759 - DNA, 13 bp, Artificial Sequence
  Oligonucleotide for detection of SNP TSC0011508
tagtatgtatata

SEQ ID NO: 36760 - DNA, 13 bp, Artificial Sequence
  Oligonucleotide for detection of SNP TSC0011508
tatatacatacta

SEQ ID NO: 36761 - DNA, 13 bp, Artificial Sequence
  Oligonucleotide for detection of SNP TSC0011510
tttgtaatgttta

SEQ ID NO: 36762 - DNA, 13 bp, Artificial Sequence
  Oligonucleotide for detection of SNP TSC0011510
taaacattacaaa

SEQ ID NO: 36763 - DNA, 13 bp, Artificial Sequence
  Oligonucleotide for detection of SNP TSC0011510
tttgtagtgttta

SEQ ID NO: 36764 - DNA, 13 bp, Artificial Sequence
  Oligonucleotide for detection of SNP TSC0011510
taaacactacaaa

SEQ ID NO: 36765 - DNA, 13 bp, Artificial Sequence
  Oligonucleotide for detection of SNP TSC0011511
aaaaggtaaagag

SEQ ID NO: 36766 - DNA, 13 bp, Artificial Sequence
  Oligonucleotide for detection of SNP TSC0011511
ctctttacctttt

SEQ ID NO: 36767 - DNA, 13 bp, Artificial Sequence
  Oligonucleotide for detection of SNP TSC0011511
aaaagggaaagag

SEQ ID NO: 36768 - DNA, 13 bp, Artificial Sequence
  Oligonucleotide for detection of SNP TSC0011511
ctctttccctttt

SEQ ID NO: 36769 - DNA, 13 bp, Artificial Sequence
  Oligonucleotide for detection of SNP TSC0011512
taataatggttay

SEQ ID NO: 36770 - DNA, 13 bp, Artificial Sequence
  Oligonucleotide for detection of SNP TSC0011512
rtaaccattatta

SEQ ID NO: 36771 - DNA, 13 bp, Artificial Sequence
  Oligonucleotide for detection of SNP TSC0011512
taataacggttay

SEQ ID NO: 36772 - DNA, 13 bp, Artificial Sequence
  Oligonucleotide for detection of SNP TSC0011512
rtaaccgttatta

SEQ ID NO: 36773 - DNA, 13 bp, Artificial Sequence
  Oligonucleotide for detection of SNP TSC0011512
gtggttgttgtta

SEQ ID NO: 36774 - DNA, 13 bp, Artificial Sequence
  Oligonucleotide for detection of SNP TSC0011512
taacaacaaccac

SEQ ID NO: 36775 - DNA, 13 bp, Artificial Sequence
  Oligonucleotide for detection of SNP TSC0011512
gtggttattgtta

SEQ ID NO: 36776 - DNA, 13 bp, Artificial Sequence
  Oligonucleotide for detection of SNP TSC0011512
taacaataaccac

SEQ ID NO: 36777 - DNA, 13 bp, Artificial Sequence
  Oligonucleotide for detection of SNP TSC0011512
gtggtcgttgtta

SEQ ID NO: 36778 - DNA, 13 bp, Artificial Sequence
  Oligonucleotide for detection of SNP TSC0011512
taacaacgaccac

SEQ ID NO: 36779 - DNA, 13 bp, Artificial Sequence
  Oligonucleotide for detection of SNP TSC0011513
ggtttatgttggt

SEQ ID NO: 36780 - DNA, 13 bp, Artificial Sequence
  Oligonucleotide for detection of SNP TSC0011513
accaacataaacc

SEQ ID NO: 36781 - DNA, 13 bp, Artificial Sequence
  Oligonucleotide for detection of SNP TSC0011513
ggtttacgttggt

SEQ ID NO: 36782 - DNA, 13 bp, Artificial Sequence
  Oligonucleotide for detection of SNP TSC0011513
accaacgtaaacc

SEQ ID NO: 36783 - DNA, 13 bp, Artificial Sequence
  Oligonucleotide for detection of SNP TSC0011513
ggtttatgtcggt

SEQ ID NO: 36784 - DNA, 13 bp, Artificial Sequence
  Oligonucleotide for detection of SNP TSC0011513
accgacataaacc

SEQ ID NO: 36785 - DNA, 13 bp, Artificial Sequence
  Oligonucleotide for detection of SNP TSC0011513
ggtttacgtcggt

SEQ ID NO: 36786 - DNA, 13 bp, Artificial Sequence
  Oligonucleotide for detection of SNP TSC0011513
accgacgtaaacc

SEQ ID NO: 36787 - DNA, 13 bp, Artificial Sequence
  Oligonucleotide for detection of SNP TSC0011513
attgatgtgagty

SEQ ID NO: 36788 - DNA, 13 bp, Artificial Sequence
  Oligonucleotide for detection of SNP TSC0011513
ractcacatcaat

SEQ ID NO: 36789 - DNA, 13 bp, Artificial Sequence
  Oligonucleotide for detection of SNP TSC0011513
attgatatgagty

SEQ ID NO: 36790 - DNA, 13 bp, Artificial Sequence
  Oligonucleotide for detection of SNP TSC0011513
ractcatatcaat

SEQ ID NO: 36791 - DNA, 13 bp, Artificial Sequence
  Oligonucleotide for detection of SNP TSC0011513
atcgatgtgagty

SEQ ID NO: 36792 - DNA, 13 bp, Artificial Sequence
  Oligonucleotide for detection of SNP TSC0011513
ractcacatcgat

SEQ ID NO: 36793 - DNA, 13 bp, Artificial Sequence
  Oligonucleotide for detection of SNP TSC0011513
atcgatatgagty

SEQ ID NO: 36794 - DNA, 13 bp, Artificial Sequence
  Oligonucleotide for detection of SNP TSC0011513
ractcatatcgat

SEQ ID NO: 36795 - DNA, 13 bp, Artificial Sequence
  Oligonucleotide for detection of SNP TSC0011513
attgacgtgagty

SEQ ID NO: 36796 - DNA, 13 bp, Artificial Sequence
  Oligonucleotide for detection of SNP TSC0011513
ractcacgtcaat

SEQ ID NO: 36797 - DNA, 13 bp, Artificial Sequence
  Oligonucleotide for detection of SNP TSC0011513
atcgacgtgagty

SEQ ID NO: 36798 - DNA, 13 bp, Artificial Sequence
  Oligonucleotide for detection of SNP TSC0011513
ractcacgtcgat

SEQ ID NO: 36799 - DNA, 13 bp, Artificial Sequence
  Oligonucleotide for detection of SNP TSC0011515
tgtgtgatgggtg

SEQ ID NO: 36800 - DNA, 13 bp, Artificial Sequence
  Oligonucleotide for detection of SNP TSC0011515
cacccatcacaca

SEQ ID NO: 36801 - DNA, 13 bp, Artificial Sequence
  Oligonucleotide for detection of SNP TSC0011515
tgtgtggtgggtg

SEQ ID NO: 36802 - DNA, 13 bp, Artificial Sequence
  Oligonucleotide for detection of SNP TSC0011515
cacccaccacaca

SEQ ID NO: 36803 - DNA, 13 bp, Artificial Sequence
  Oligonucleotide for detection of SNP TSC0011515
cgtgtgatgggtg

SEQ ID NO: 36804 - DNA, 13 bp, Artificial Sequence
  Oligonucleotide for detection of SNP TSC0011515
cacccatcacacg

SEQ ID NO: 36805 - DNA, 13 bp, Artificial Sequence
  Oligonucleotide for detection of SNP TSC0011515
cgtgtggtgggtg

SEQ ID NO: 36806 - DNA, 13 bp, Artificial Sequence
  Oligonucleotide for detection of SNP TSC0011515
cacccaccacacg

SEQ ID NO: 36807 - DNA, 13 bp, Artificial Sequence
  Oligonucleotide for detection of SNP TSC0011516
tttgttgtgtata

SEQ ID NO: 36808 - DNA, 13 bp, Artificial Sequence
  Oligonucleotide for detection of SNP TSC0011516
tatacacaacaaa

SEQ ID NO: 36809 - DNA, 13 bp, Artificial Sequence
  Oligonucleotide for detection of SNP TSC0011517
ttaattatatttt

SEQ ID NO: 36810 - DNA, 13 bp, Artificial Sequence
  Oligonucleotide for detection of SNP TSC0011517
aaaatataattaa

SEQ ID NO: 36811 - DNA, 13 bp, Artificial Sequence
  Oligonucleotide for detection of SNP TSC0011517
ttaattgtatttt

SEQ ID NO: 36812 - DNA, 13 bp, Artificial Sequence
  Oligonucleotide for detection of SNP TSC0011517
aaaatacaattaa

SEQ ID NO: 36813 - DNA, 13 bp, Artificial Sequence
  Oligonucleotide for detection of SNP TSC0011519
gagaatagaggta

SEQ ID NO: 36814 - DNA, 13 bp, Artificial Sequence
  Oligonucleotide for detection of SNP TSC0011519
tacctctattctc

SEQ ID NO: 36815 - DNA, 13 bp, Artificial Sequence
  Oligonucleotide for detection of SNP TSC0011519
gagaatggaggta

SEQ ID NO: 36816 - DNA, 13 bp, Artificial Sequence
  Oligonucleotide for detection of SNP TSC0011519
tacctccattctc

SEQ ID NO: 36817 - DNA, 13 bp, Artificial Sequence
  Oligonucleotide for detection of SNP TSC0011519
gagaacggaggta

SEQ ID NO: 36818 - DNA, 13 bp, Artificial Sequence
  Oligonucleotide for detection of SNP TSC0011519
tacctccgttctc

SEQ ID NO: 36819 - DNA, 13 bp, Artificial Sequence
  Oligonucleotide for detection of SNP TSC0011519
tgttttcgtttty

SEQ ID NO: 36820 - DNA, 13 bp, Artificial Sequence
  Oligonucleotide for detection of SNP TSC0011519
raaaacgaaaaca

SEQ ID NO: 36821 - DNA, 13 bp, Artificial Sequence
  Oligonucleotide for detection of SNP TSC0011524
tgatagggaaatt

SEQ ID NO: 36822 - DNA, 13 bp, Artificial Sequence
  Oligonucleotide for detection of SNP TSC0011524
aatttccctatca

SEQ ID NO: 36823 - DNA, 13 bp, Artificial Sequence
  Oligonucleotide for detection of SNP TSC0011524
tgatagtgaaatt

SEQ ID NO: 36824 - DNA, 13 bp, Artificial Sequence
  Oligonucleotide for detection of SNP TSC0011524
aatttcactatca

SEQ ID NO: 36825 - DNA, 13 bp, Artificial Sequence
  Oligonucleotide for detection of SNP TSC0011524
cgatagggaaatt

SEQ ID NO: 36826 - DNA, 13 bp, Artificial Sequence
  Oligonucleotide for detection of SNP TSC0011524
aatttccctatcg

SEQ ID NO: 36827 - DNA, 13 bp, Artificial Sequence
  Oligonucleotide for detection of SNP TSC0011524
cgatagtgaaatt

SEQ ID NO: 36828 - DNA, 13 bp, Artificial Sequence
  Oligonucleotide for detection of SNP TSC0011524
aatttcactatcg

SEQ ID NO: 36829 - DNA, 13 bp, Artificial Sequence
  Oligonucleotide for detection of SNP TSC0011524
aatttttttattg

SEQ ID NO: 36830 - DNA, 13 bp, Artificial Sequence
  Oligonucleotide for detection of SNP TSC0011524
caataaaaaaatt

SEQ ID NO: 36831 - DNA, 13 bp, Artificial Sequence
  Oligonucleotide for detection of SNP TSC0011524
aattttattattg

SEQ ID NO: 36832 - DNA, 13 bp, Artificial Sequence
  Oligonucleotide for detection of SNP TSC0011524
caataataaaatt

SEQ ID NO: 36833 - DNA, 13 bp, Artificial Sequence
  Oligonucleotide for detection of SNP TSC0011524
aatttttttatcg

SEQ ID NO: 36834 - DNA, 13 bp, Artificial Sequence
  Oligonucleotide for detection of SNP TSC0011524
cgataaaaaaatt

SEQ ID NO: 36835 - DNA, 13 bp, Artificial Sequence
  Oligonucleotide for detection of SNP TSC0011524
aattttattatcg

SEQ ID NO: 36836 - DNA, 13 bp, Artificial Sequence
  Oligonucleotide for detection of SNP TSC0011524
cgataataaaatt

SEQ ID NO: 36837 - DNA, 13 bp, Artificial Sequence
  Oligonucleotide for detection of SNP TSC0011528
tgaggaggattga

SEQ ID NO: 36838 - DNA, 13 bp, Artificial Sequence
  Oligonucleotide for detection of SNP TSC0011528
tcaatcctcctca

SEQ ID NO: 36839 - DNA, 13 bp, Artificial Sequence
  Oligonucleotide for detection of SNP TSC0011528
tgaggatgattga

SEQ ID NO: 36840 - DNA, 13 bp, Artificial Sequence
  Oligonucleotide for detection of SNP TSC0011528
tcaatcatcctca

SEQ ID NO: 36841 - DNA, 13 bp, Artificial Sequence
  Oligonucleotide for detection of SNP TSC0011528
ttagtttttttta

SEQ ID NO: 36842 - DNA, 13 bp, Artificial Sequence
  Oligonucleotide for detection of SNP TSC0011528
taaaaaaaactaa

SEQ ID NO: 36843 - DNA, 13 bp, Artificial Sequence
  Oligonucleotide for detection of SNP TSC0011528
ttagttattttta

SEQ ID NO: 36844 - DNA, 13 bp, Artificial Sequence
  Oligonucleotide for detection of SNP TSC0011528
taaaaataactaa

SEQ ID NO: 36845 - DNA, 13 bp, Artificial Sequence
  Oligonucleotide for detection of SNP TSC0011529
gatgtatgaaaga

SEQ ID NO: 36846 - DNA, 13 bp, Artificial Sequence
  Oligonucleotide for detection of SNP TSC0011529
tctttcatacatc

SEQ ID NO: 36847 - DNA, 13 bp, Artificial Sequence
  Oligonucleotide for detection of SNP TSC0011529
gatgtaggaaaga

SEQ ID NO: 36848 - DNA, 13 bp, Artificial Sequence
  Oligonucleotide for detection of SNP TSC0011529
tctttcctacatc

SEQ ID NO: 36849 - DNA, 13 bp, Artificial Sequence
  Oligonucleotide for detection of SNP TSC0011529
gacgtatgaaaga

SEQ ID NO: 36850 - DNA, 13 bp, Artificial Sequence
  Oligonucleotide for detection of SNP TSC0011529
tctttcatacgtc

SEQ ID NO: 36851 - DNA, 13 bp, Artificial Sequence
  Oligonucleotide for detection of SNP TSC0011529
gacgtaggaaaga

SEQ ID NO: 36852 - DNA, 13 bp, Artificial Sequence
  Oligonucleotide for detection of SNP TSC0011529
tctttcctacgtc

SEQ ID NO: 36853 - DNA, 13 bp, Artificial Sequence
  Oligonucleotide for detection of SNP TSC0011529
gatgtacgaaaga

SEQ ID NO: 36854 - DNA, 13 bp, Artificial Sequence
  Oligonucleotide for detection of SNP TSC0011529
tctttcgtacatc

SEQ ID NO: 36855 - DNA, 13 bp, Artificial Sequence
  Oligonucleotide for detection of SNP TSC0011529
gacgtacgaaaga

SEQ ID NO: 36856 - DNA, 13 bp, Artificial Sequence
  Oligonucleotide for detection of SNP TSC0011529
tctttcgtacgtc

SEQ ID NO: 36857 - DNA, 13 bp, Artificial Sequence
  Oligonucleotide for detection of SNP TSC0011529
tttttcgtgtgty

SEQ ID NO: 36858 - DNA, 13 bp, Artificial Sequence
  Oligonucleotide for detection of SNP TSC0011529
racacacgaaaaa

SEQ ID NO: 36859 - DNA, 13 bp, Artificial Sequence
  Oligonucleotide for detection of SNP TSC0011529
ttttttttgcgty

SEQ ID NO: 36860 - DNA, 13 bp, Artificial Sequence
  Oligonucleotide for detection of SNP TSC0011529
racgcaaaaaaaa

SEQ ID NO: 36861 - DNA, 13 bp, Artificial Sequence
  Oligonucleotide for detection of SNP TSC0011529
ttttttgtgcgty

SEQ ID NO: 36862 - DNA, 13 bp, Artificial Sequence
  Oligonucleotide for detection of SNP TSC0011529
racgcacaaaaaa

SEQ ID NO: 36863 - DNA, 13 bp, Artificial Sequence
  Oligonucleotide for detection of SNP TSC0011529
tttttcgtgcgty

SEQ ID NO: 36864 - DNA, 13 bp, Artificial Sequence
  Oligonucleotide for detection of SNP TSC0011529
racgcacgaaaaa

SEQ ID NO: 36865 - DNA, 13 bp, Artificial Sequence
  Oligonucleotide for detection of SNP TSC0011530
tttattataatta

SEQ ID NO: 36866 - DNA, 13 bp, Artificial Sequence
  Oligonucleotide for detection of SNP TSC0011530
taattataataaa

SEQ ID NO: 36867 - DNA, 13 bp, Artificial Sequence
  Oligonucleotide for detection of SNP TSC0011530
tttattgtaatta

SEQ ID NO: 36868 - DNA, 13 bp, Artificial Sequence
  Oligonucleotide for detection of SNP TSC0011530
taattacaataaa

SEQ ID NO: 36869 - DNA, 13 bp, Artificial Sequence
  Oligonucleotide for detection of SNP TSC0011530
tttatcgtaatta

SEQ ID NO: 36870 - DNA, 13 bp, Artificial Sequence
  Oligonucleotide for detection of SNP TSC0011530
taattacgataaa

SEQ ID NO: 36871 - DNA, 13 bp, Artificial Sequence
  Oligonucleotide for detection of SNP TSC0011530
tagttatgatgag

SEQ ID NO: 36872 - DNA, 13 bp, Artificial Sequence
  Oligonucleotide for detection of SNP TSC0011530
ctcatcataacta

SEQ ID NO: 36873 - DNA, 13 bp, Artificial Sequence
  Oligonucleotide for detection of SNP TSC0011530
tagttacgatgag

SEQ ID NO: 36874 - DNA, 13 bp, Artificial Sequence
  Oligonucleotide for detection of SNP TSC0011530
ctcatcgtaacta

SEQ ID NO: 36875 - DNA, 13 bp, Artificial Sequence
  Oligonucleotide for detection of SNP TSC0011531
taagtaggtaagg

SEQ ID NO: 36876 - DNA, 13 bp, Artificial Sequence
  Oligonucleotide for detection of SNP TSC0011531
ccttacctactta

SEQ ID NO: 36877 - DNA, 13 bp, Artificial Sequence
  Oligonucleotide for detection of SNP TSC0011531
taagtaagtaagg

SEQ ID NO: 36878 - DNA, 13 bp, Artificial Sequence
  Oligonucleotide for detection of SNP TSC0011531
ccttacttactta

SEQ ID NO: 36879 - DNA, 13 bp, Artificial Sequence
  Oligonucleotide for detection of SNP TSC0011532
aaaaagatattgy

SEQ ID NO: 36880 - DNA, 13 bp, Artificial Sequence
  Oligonucleotide for detection of SNP TSC0011532
rcaatatcttttt

SEQ ID NO: 36881 - DNA, 13 bp, Artificial Sequence
  Oligonucleotide for detection of SNP TSC0011532
aaaaaggtattgy

SEQ ID NO: 36882 - DNA, 13 bp, Artificial Sequence
  Oligonucleotide for detection of SNP TSC0011532
rcaataccttttt

SEQ ID NO: 36883 - DNA, 13 bp, Artificial Sequence
  Oligonucleotide for detection of SNP TSC0011535
ttatttatagaaa

SEQ ID NO: 36884 - DNA, 13 bp, Artificial Sequence
  Oligonucleotide for detection of SNP TSC0011535
tttctataaataa

SEQ ID NO: 36885 - DNA, 13 bp, Artificial Sequence
  Oligonucleotide for detection of SNP TSC0011535
ttatttttagaaa

SEQ ID NO: 36886 - DNA, 13 bp, Artificial Sequence
  Oligonucleotide for detection of SNP TSC0011535
tttctaaaaataa

SEQ ID NO: 36887 - DNA, 13 bp, Artificial Sequence
  Oligonucleotide for detection of SNP TSC0011535
tttttataaataa

SEQ ID NO: 36888 - DNA, 13 bp, Artificial Sequence
  Oligonucleotide for detection of SNP TSC0011535
ttatttataaaaa

SEQ ID NO: 36889 - DNA, 13 bp, Artificial Sequence
  Oligonucleotide for detection of SNP TSC0011535
tttttagaaataa

SEQ ID NO: 36890 - DNA, 13 bp, Artificial Sequence
  Oligonucleotide for detection of SNP TSC0011535
ttatttctaaaaa

SEQ ID NO: 36891 - DNA, 13 bp, Artificial Sequence
  Oligonucleotide for detection of SNP TSC0011536
tttatggttatgt

SEQ ID NO: 36892 - DNA, 13 bp, Artificial Sequence
  Oligonucleotide for detection of SNP TSC0011536
acataaccataaa

SEQ ID NO: 36893 - DNA, 13 bp, Artificial Sequence
  Oligonucleotide for detection of SNP TSC0011536
tttatgtttatgt

SEQ ID NO: 36894 - DNA, 13 bp, Artificial Sequence
  Oligonucleotide for detection of SNP TSC0011536
acataaacataaa

SEQ ID NO: 36895 - DNA, 13 bp, Artificial Sequence
  Oligonucleotide for detection of SNP TSC0011536
atatgattataaa

SEQ ID NO: 36896 - DNA, 13 bp, Artificial Sequence
  Oligonucleotide for detection of SNP TSC0011536
tttataatcatat

SEQ ID NO: 36897 - DNA, 13 bp, Artificial Sequence
  Oligonucleotide for detection of SNP TSC0011536
atatgaatataaa

SEQ ID NO: 36898 - DNA, 13 bp, Artificial Sequence
  Oligonucleotide for detection of SNP TSC0011536
tttatattcatat

SEQ ID NO: 36899 - DNA, 13 bp, Artificial Sequence
  Oligonucleotide for detection of SNP TSC0011539
attatatgatatt

SEQ ID NO: 36900 - DNA, 13 bp, Artificial Sequence
  Oligonucleotide for detection of SNP TSC0011539
aatatcatataat

SEQ ID NO: 36901 - DNA, 13 bp, Artificial Sequence
  Oligonucleotide for detection of SNP TSC0011539
attatacgatatt

SEQ ID NO: 36902 - DNA, 13 bp, Artificial Sequence
  Oligonucleotide for detection of SNP TSC0011539
aatatcgtataat

SEQ ID NO: 36903 - DNA, 13 bp, Artificial Sequence
  Oligonucleotide for detection of SNP TSC0011539
aatgttgtataat

SEQ ID NO: 36904 - DNA, 13 bp, Artificial Sequence
  Oligonucleotide for detection of SNP TSC0011539
attatacaacatt

SEQ ID NO: 36905 - DNA, 13 bp, Artificial Sequence
  Oligonucleotide for detection of SNP TSC0011539
aatgttatataat

SEQ ID NO: 36906 - DNA, 13 bp, Artificial Sequence
  Oligonucleotide for detection of SNP TSC0011539
attatataacatt

SEQ ID NO: 36907 - DNA, 13 bp, Artificial Sequence
  Oligonucleotide for detection of SNP TSC0011539
aatgtcgtataat

SEQ ID NO: 36908 - DNA, 13 bp, Artificial Sequence
  Oligonucleotide for detection of SNP TSC0011539
attatacgacatt

SEQ ID NO: 36909 - DNA, 13 bp, Artificial Sequence
  Oligonucleotide for detection of SNP TSC0011540
taatgagatagtg

SEQ ID NO: 36910 - DNA, 13 bp, Artificial Sequence
  Oligonucleotide for detection of SNP TSC0011540
cactatctcatta

SEQ ID NO: 36911 - DNA, 13 bp, Artificial Sequence
  Oligonucleotide for detection of SNP TSC0011540
taatgaaatagtg

SEQ ID NO: 36912 - DNA, 13 bp, Artificial Sequence
  Oligonucleotide for detection of SNP TSC0011540
cactatttcatta

SEQ ID NO: 36913 - DNA, 13 bp, Artificial Sequence
  Oligonucleotide for detection of SNP TSC0011541
tagtaagtttaay

SEQ ID NO: 36914 - DNA, 13 bp, Artificial Sequence
  Oligonucleotide for detection of SNP TSC0011541
rttaaacttacta

SEQ ID NO: 36915 - DNA, 13 bp, Artificial Sequence
  Oligonucleotide for detection of SNP TSC0011541
tagtaattttaay

SEQ ID NO: 36916 - DNA, 13 bp, Artificial Sequence
  Oligonucleotide for detection of SNP TSC0011541
rttaaaattacta

SEQ ID NO: 36917 - DNA, 13 bp, Artificial Sequence
  Oligonucleotide for detection of SNP TSC0011541
gttgaatttgttg

SEQ ID NO: 36918 - DNA, 13 bp, Artificial Sequence
  Oligonucleotide for detection of SNP TSC0011541
caacaaattcaac

SEQ ID NO: 36919 - DNA, 13 bp, Artificial Sequence
  Oligonucleotide for detection of SNP TSC0011541
gttgaaattgttg

SEQ ID NO: 36920 - DNA, 13 bp, Artificial Sequence
  Oligonucleotide for detection of SNP TSC0011541
caacaatttcaac

SEQ ID NO: 36921 - DNA, 13 bp, Artificial Sequence
  Oligonucleotide for detection of SNP TSC0011542
agaaataaagttt

SEQ ID NO: 36922 - DNA, 13 bp, Artificial Sequence
  Oligonucleotide for detection of SNP TSC0011542
aaactttatttct

SEQ ID NO: 36923 - DNA, 13 bp, Artificial Sequence
  Oligonucleotide for detection of SNP TSC0011542
agaaatgaagttt

SEQ ID NO: 36924 - DNA, 13 bp, Artificial Sequence
  Oligonucleotide for detection of SNP TSC0011542
aaacttcatttct

SEQ ID NO: 36925 - DNA, 13 bp, Artificial Sequence
  Oligonucleotide for detection of SNP TSC0011542
agaaacgaagttt

SEQ ID NO: 36926 - DNA, 13 bp, Artificial Sequence
  Oligonucleotide for detection of SNP TSC0011542
aaacttcgtttct

SEQ ID NO: 36927 - DNA, 13 bp, Artificial Sequence
  Oligonucleotide for detection of SNP TSC0011543
ttttttaaattgt

SEQ ID NO: 36928 - DNA, 13 bp, Artificial Sequence
  Oligonucleotide for detection of SNP TSC0011543
acaatttaaaaaa

SEQ ID NO: 36929 - DNA, 13 bp, Artificial Sequence
  Oligonucleotide for detection of SNP TSC0011543
ttttttgaattgt

SEQ ID NO: 36930 - DNA, 13 bp, Artificial Sequence
  Oligonucleotide for detection of SNP TSC0011543
acaattcaaaaaa

SEQ ID NO: 36931 - DNA, 13 bp, Artificial Sequence
  Oligonucleotide for detection of SNP TSC0011544
ataaaagtaattt

SEQ ID NO: 36932 - DNA, 13 bp, Artificial Sequence
  Oligonucleotide for detection of SNP TSC0011544
aaattacttttat

SEQ ID NO: 36933 - DNA, 13 bp, Artificial Sequence
  Oligonucleotide for detection of SNP TSC0011544
ataaaaataattt

SEQ ID NO: 36934 - DNA, 13 bp, Artificial Sequence
  Oligonucleotide for detection of SNP TSC0011544
aaattatttttat

SEQ ID NO: 36935 - DNA, 13 bp, Artificial Sequence
  Oligonucleotide for detection of SNP TSC0011545
tattttaatagta

SEQ ID NO: 36936 - DNA, 13 bp, Artificial Sequence
  Oligonucleotide for detection of SNP TSC0011545
tactattaaaata

SEQ ID NO: 36937 - DNA, 13 bp, Artificial Sequence
  Oligonucleotide for detection of SNP TSC0011545
tattttgatagta

SEQ ID NO: 36938 - DNA, 13 bp, Artificial Sequence
  Oligonucleotide for detection of SNP TSC0011545
tactatcaaaata

SEQ ID NO: 36939 - DNA, 13 bp, Artificial Sequence
  Oligonucleotide for detection of SNP TSC0011545
tatttcgatagta

SEQ ID NO: 36940 - DNA, 13 bp, Artificial Sequence
  Oligonucleotide for detection of SNP TSC0011545
tactatcgaaata

SEQ ID NO: 36941 - DNA, 13 bp, Artificial Sequence
  Oligonucleotide for detection of SNP TSC0011545
tattattggggta

SEQ ID NO: 36942 - DNA, 13 bp, Artificial Sequence
  Oligonucleotide for detection of SNP TSC0011545
taccccaataata

SEQ ID NO: 36943 - DNA, 13 bp, Artificial Sequence
  Oligonucleotide for detection of SNP TSC0011545
tattatcggggta

SEQ ID NO: 36944 - DNA, 13 bp, Artificial Sequence
  Oligonucleotide for detection of SNP TSC0011545
taccccgataata

SEQ ID NO: 36945 - DNA, 13 bp, Artificial Sequence
  Oligonucleotide for detection of SNP TSC0011547
tgttaaaaaaaay

SEQ ID NO: 36946 - DNA, 13 bp, Artificial Sequence
  Oligonucleotide for detection of SNP TSC0011547
rttttttttaaca

SEQ ID NO: 36947 - DNA, 13 bp, Artificial Sequence
  Oligonucleotide for detection of SNP TSC0011547
tgttaagaaaaay

SEQ ID NO: 36948 - DNA, 13 bp, Artificial Sequence
  Oligonucleotide for detection of SNP TSC0011547
rtttttcttaaca

SEQ ID NO: 36949 - DNA, 13 bp, Artificial Sequence
  Oligonucleotide for detection of SNP TSC0011548
atttttgtattgy

SEQ ID NO: 36950 - DNA, 13 bp, Artificial Sequence
  Oligonucleotide for detection of SNP TSC0011548
rcaatacaaaaat

SEQ ID NO: 36951 - DNA, 13 bp, Artificial Sequence
  Oligonucleotide for detection of SNP TSC0011548
atttttatattgy

SEQ ID NO: 36952 - DNA, 13 bp, Artificial Sequence
  Oligonucleotide for detection of SNP TSC0011548
rcaatataaaaat

SEQ ID NO: 36953 - DNA, 13 bp, Artificial Sequence
  Oligonucleotide for detection of SNP TSC0011553
atatatatatgtg

SEQ ID NO: 36954 - DNA, 13 bp, Artificial Sequence
  Oligonucleotide for detection of SNP TSC0011553
cacatatatatat

SEQ ID NO: 36955 - DNA, 13 bp, Artificial Sequence
  Oligonucleotide for detection of SNP TSC0011553
atatatgtatgtg

SEQ ID NO: 36956 - DNA, 13 bp, Artificial Sequence
  Oligonucleotide for detection of SNP TSC0011553
cacatacatatat

SEQ ID NO: 36957 - DNA, 13 bp, Artificial Sequence
  Oligonucleotide for detection of SNP TSC0011555
aaattaattgtaa

SEQ ID NO: 36958 - DNA, 13 bp, Artificial Sequence
  Oligonucleotide for detection of SNP TSC0011555
ttacaattaattt

SEQ ID NO: 36959 - DNA, 13 bp, Artificial Sequence
  Oligonucleotide for detection of SNP TSC0011555
aaattagttgtaa

SEQ ID NO: 36960 - DNA, 13 bp, Artificial Sequence
  Oligonucleotide for detection of SNP TSC0011555
ttacaactaattt

SEQ ID NO: 36961 - DNA, 13 bp, Artificial Sequence
  Oligonucleotide for detection of SNP TSC0011556
taattatggtatt

SEQ ID NO: 36962 - DNA, 13 bp, Artificial Sequence
  Oligonucleotide for detection of SNP TSC0011556
aataccataatta

SEQ ID NO: 36963 - DNA, 13 bp, Artificial Sequence
  Oligonucleotide for detection of SNP TSC0011556
taattacggtatt

SEQ ID NO: 36964 - DNA, 13 bp, Artificial Sequence
  Oligonucleotide for detection of SNP TSC0011556
aataccgtaatta

SEQ ID NO: 36965 - DNA, 13 bp, Artificial Sequence
  Oligonucleotide for detection of SNP TSC0011556
agtgttgtggttg

SEQ ID NO: 36966 - DNA, 13 bp, Artificial Sequence
  Oligonucleotide for detection of SNP TSC0011556
caaccacaacact

SEQ ID NO: 36967 - DNA, 13 bp, Artificial Sequence
  Oligonucleotide for detection of SNP TSC0011556
agtgttatggttg

SEQ ID NO: 36968 - DNA, 13 bp, Artificial Sequence
  Oligonucleotide for detection of SNP TSC0011556
caaccataacact

SEQ ID NO: 36969 - DNA, 13 bp, Artificial Sequence
  Oligonucleotide for detection of SNP TSC0011556
agtgtcgtggttg

SEQ ID NO: 36970 - DNA, 13 bp, Artificial Sequence
  Oligonucleotide for detection of SNP TSC0011556
caaccacgacact

SEQ ID NO: 36971 - DNA, 13 bp, Artificial Sequence
  Oligonucleotide for detection of SNP TSC0011557
attatatggtttg

SEQ ID NO: 36972 - DNA, 13 bp, Artificial Sequence
  Oligonucleotide for detection of SNP TSC0011557
caaaccatataat

SEQ ID NO: 36973 - DNA, 13 bp, Artificial Sequence
  Oligonucleotide for detection of SNP TSC0011557
attatacggtttg

SEQ ID NO: 36974 - DNA, 13 bp, Artificial Sequence
  Oligonucleotide for detection of SNP TSC0011557
caaaccgtataat

SEQ ID NO: 36975 - DNA, 13 bp, Artificial Sequence
  Oligonucleotide for detection of SNP TSC0011557
taaattgtgtgat

SEQ ID NO: 36976 - DNA, 13 bp, Artificial Sequence
  Oligonucleotide for detection of SNP TSC0011557
atcacacaattta

SEQ ID NO: 36977 - DNA, 13 bp, Artificial Sequence
  Oligonucleotide for detection of SNP TSC0011557
taaattatgtgat

SEQ ID NO: 36978 - DNA, 13 bp, Artificial Sequence
  Oligonucleotide for detection of SNP TSC0011557
atcacataattta

SEQ ID NO: 36979 - DNA, 13 bp, Artificial Sequence
  Oligonucleotide for detection of SNP TSC0011557
taaatcgtgtgat

SEQ ID NO: 36980 - DNA, 13 bp, Artificial Sequence
  Oligonucleotide for detection of SNP TSC0011557
atcacacgattta

SEQ ID NO: 36981 - DNA, 13 bp, Artificial Sequence
  Oligonucleotide for detection of SNP TSC0011559
ttgaggaggagty

SEQ ID NO: 36982 - DNA, 13 bp, Artificial Sequence
  Oligonucleotide for detection of SNP TSC0011559
ractcctcctcaa

SEQ ID NO: 36983 - DNA, 13 bp, Artificial Sequence
  Oligonucleotide for detection of SNP TSC0011559
ttgaggtggagty

SEQ ID NO: 36984 - DNA, 13 bp, Artificial Sequence
  Oligonucleotide for detection of SNP TSC0011559
ractccacctcaa

SEQ ID NO: 36985 - DNA, 13 bp, Artificial Sequence
  Oligonucleotide for detection of SNP TSC0011559
ttgaggcggagty

SEQ ID NO: 36986 - DNA, 13 bp, Artificial Sequence
  Oligonucleotide for detection of SNP TSC0011559
ractccgcctcaa

SEQ ID NO: 36987 - DNA, 13 bp, Artificial Sequence
  Oligonucleotide for detection of SNP TSC0011559
gatttttttttaa

SEQ ID NO: 36988 - DNA, 13 bp, Artificial Sequence
  Oligonucleotide for detection of SNP TSC0011559
ttaaaaaaaaatc

SEQ ID NO: 36989 - DNA, 13 bp, Artificial Sequence
  Oligonucleotide for detection of SNP TSC0011560
gtagtgaagtgat

SEQ ID NO: 36990 - DNA, 13 bp, Artificial Sequence
  Oligonucleotide for detection of SNP TSC0011560
atcacttcactac

SEQ ID NO: 36991 - DNA, 13 bp, Artificial Sequence
  Oligonucleotide for detection of SNP TSC0011560
gtagtggagtgat

SEQ ID NO: 36992 - DNA, 13 bp, Artificial Sequence
  Oligonucleotide for detection of SNP TSC0011560
atcactccactac

SEQ ID NO: 36993 - DNA, 13 bp, Artificial Sequence
  Oligonucleotide for detection of SNP TSC0011560
gtagtgaagcgat

SEQ ID NO: 36994 - DNA, 13 bp, Artificial Sequence
  Oligonucleotide for detection of SNP TSC0011560
atcgcttcactac

SEQ ID NO: 36995 - DNA, 13 bp, Artificial Sequence
  Oligonucleotide for detection of SNP TSC0011560
gtagtggagcgat

SEQ ID NO: 36996 - DNA, 13 bp, Artificial Sequence
  Oligonucleotide for detection of SNP TSC0011560
atcgctccactac

SEQ ID NO: 36997 - DNA, 13 bp, Artificial Sequence
  Oligonucleotide for detection of SNP TSC0011561
taggagtttaaga

SEQ ID NO: 36998 - DNA, 13 bp, Artificial Sequence
  Oligonucleotide for detection of SNP TSC0011561
tcttaaactccta

SEQ ID NO: 36999 - DNA, 13 bp, Artificial Sequence
  Oligonucleotide for detection of SNP TSC0011561
taggagattaaga

SEQ ID NO: 37000 - DNA, 13 bp, Artificial Sequence
  Oligonucleotide for detection of SNP TSC0011561
tcttaatctccta

SEQ ID NO: 37001 - DNA, 13 bp, Artificial Sequence
  Oligonucleotide for detection of SNP TSC0011565
aaaattaaatttt

SEQ ID NO: 37002 - DNA, 13 bp, Artificial Sequence
  Oligonucleotide for detection of SNP TSC0011565
aaaatttaatttt

SEQ ID NO: 37003 - DNA, 13 bp, Artificial Sequence
  Oligonucleotide for detection of SNP TSC0011565
aaagtttgatttt

SEQ ID NO: 37004 - DNA, 13 bp, Artificial Sequence
  Oligonucleotide for detection of SNP TSC0011565
aaaatcaaacttt

SEQ ID NO: 37005 - DNA, 13 bp, Artificial Sequence
  Oligonucleotide for detection of SNP TSC0011565
aaagttagatttt

SEQ ID NO: 37006 - DNA, 13 bp, Artificial Sequence
  Oligonucleotide for detection of SNP TSC0011565
aaaatctaacttt

SEQ ID NO: 37007 - DNA, 13 bp, Artificial Sequence
  Oligonucleotide for detection of SNP TSC0011566
aatagggtgtggg

SEQ ID NO: 37008 - DNA, 13 bp, Artificial Sequence
  Oligonucleotide for detection of SNP TSC0011566
cccacaccctatt

SEQ ID NO: 37009 - DNA, 13 bp, Artificial Sequence
  Oligonucleotide for detection of SNP TSC0011566
aataggatgtggg

SEQ ID NO: 37010 - DNA, 13 bp, Artificial Sequence
  Oligonucleotide for detection of SNP TSC0011566
cccacatcctatt

SEQ ID NO: 37011 - DNA, 13 bp, Artificial Sequence
  Oligonucleotide for detection of SNP TSC0011567
tagtttattagtt

SEQ ID NO: 37012 - DNA, 13 bp, Artificial Sequence
  Oligonucleotide for detection of SNP TSC0011567
aactaataaacta

SEQ ID NO: 37013 - DNA, 13 bp, Artificial Sequence
  Oligonucleotide for detection of SNP TSC0011567
tagttttttagtt

SEQ ID NO: 37014 - DNA, 13 bp, Artificial Sequence
  Oligonucleotide for detection of SNP TSC0011567
aactaaaaaacta

SEQ ID NO: 37015 - DNA, 13 bp, Artificial Sequence
  Oligonucleotide for detection of SNP TSC0011567
agttggtaggttg

SEQ ID NO: 37016 - DNA, 13 bp, Artificial Sequence
  Oligonucleotide for detection of SNP TSC0011567
caacctaccaact

SEQ ID NO: 37017 - DNA, 13 bp, Artificial Sequence
  Oligonucleotide for detection of SNP TSC0011567
agttgggaggttg

SEQ ID NO: 37018 - DNA, 13 bp, Artificial Sequence
  Oligonucleotide for detection of SNP TSC0011567
caacctcccaact

SEQ ID NO: 37019 - DNA, 13 bp, Artificial Sequence
  Oligonucleotide for detection of SNP TSC0011568
agtaaatgttgty

SEQ ID NO: 37020 - DNA, 13 bp, Artificial Sequence
  Oligonucleotide for detection of SNP TSC0011568
racaacatttact

SEQ ID NO: 37021 - DNA, 13 bp, Artificial Sequence
  Oligonucleotide for detection of SNP TSC0011568
agtaaaagttgty

SEQ ID NO: 37022 - DNA, 13 bp, Artificial Sequence
  Oligonucleotide for detection of SNP TSC0011568
racaacttttact

SEQ ID NO: 37023 - DNA, 13 bp, Artificial Sequence
  Oligonucleotide for detection of SNP TSC0011568
ggtaatatttgtt

SEQ ID NO: 37024 - DNA, 13 bp, Artificial Sequence
  Oligonucleotide for detection of SNP TSC0011568
aacaaatattacc

SEQ ID NO: 37025 - DNA, 13 bp, Artificial Sequence
  Oligonucleotide for detection of SNP TSC0011568
ggtaatttttgtt

SEQ ID NO: 37026 - DNA, 13 bp, Artificial Sequence
  Oligonucleotide for detection of SNP TSC0011568
aacaaaaattacc

SEQ ID NO: 37027 - DNA, 13 bp, Artificial Sequence
  Oligonucleotide for detection of SNP TSC0011569
aatgttgttttgt

SEQ ID NO: 37028 - DNA, 13 bp, Artificial Sequence
  Oligonucleotide for detection of SNP TSC0011569
acaaaacaacatt

SEQ ID NO: 37029 - DNA, 13 bp, Artificial Sequence
  Oligonucleotide for detection of SNP TSC0011569
aatgtttttttgt

SEQ ID NO: 37030 - DNA, 13 bp, Artificial Sequence
  Oligonucleotide for detection of SNP TSC0011569
acaaaaaaacatt

SEQ ID NO: 37031 - DNA, 13 bp, Artificial Sequence
  Oligonucleotide for detection of SNP TSC0011569
ataaggtaatatt

SEQ ID NO: 37032 - DNA, 13 bp, Artificial Sequence
  Oligonucleotide for detection of SNP TSC0011569
aatattaccttat

SEQ ID NO: 37033 - DNA, 13 bp, Artificial Sequence
  Oligonucleotide for detection of SNP TSC0011569
ataaggaaatatt

SEQ ID NO: 37034 - DNA, 13 bp, Artificial Sequence
  Oligonucleotide for detection of SNP TSC0011569
aatatttccttat

SEQ ID NO: 37035 - DNA, 13 bp, Artificial Sequence
  Oligonucleotide for detection of SNP TSC0011570
gatataatttgay

SEQ ID NO: 37036 - DNA, 13 bp, Artificial Sequence
  Oligonucleotide for detection of SNP TSC0011570
rtcaaattatatc

SEQ ID NO: 37037 - DNA, 13 bp, Artificial Sequence
  Oligonucleotide for detection of SNP TSC0011570
gatatagtttgay

SEQ ID NO: 37038 - DNA, 13 bp, Artificial Sequence
  Oligonucleotide for detection of SNP TSC0011570
rtcaaactatatc

SEQ ID NO: 37039 - DNA, 13 bp, Artificial Sequence
  Oligonucleotide for detection of SNP TSC0011573
atttttgtggtag

SEQ ID NO: 37040 - DNA, 13 bp, Artificial Sequence
  Oligonucleotide for detection of SNP TSC0011573
ctaccacaaaaat

SEQ ID NO: 37041 - DNA, 13 bp, Artificial Sequence
  Oligonucleotide for detection of SNP TSC0011573
atttttatggtag

SEQ ID NO: 37042 - DNA, 13 bp, Artificial Sequence
  Oligonucleotide for detection of SNP TSC0011573
ctaccataaaaat

SEQ ID NO: 37043 - DNA, 13 bp, Artificial Sequence
  Oligonucleotide for detection of SNP TSC0011574
tatattatgtgtg

SEQ ID NO: 37044 - DNA, 13 bp, Artificial Sequence
  Oligonucleotide for detection of SNP TSC0011574
cacacataatata

SEQ ID NO: 37045 - DNA, 13 bp, Artificial Sequence
  Oligonucleotide for detection of SNP TSC0011575
aatggtgtgtgag

SEQ ID NO: 37046 - DNA, 13 bp, Artificial Sequence
  Oligonucleotide for detection of SNP TSC0011575
ctcacacaccatt

SEQ ID NO: 37047 - DNA, 13 bp, Artificial Sequence
  Oligonucleotide for detection of SNP TSC0011575
aatggtatgtgag

SEQ ID NO: 37048 - DNA, 13 bp, Artificial Sequence
  Oligonucleotide for detection of SNP TSC0011575
ctcacataccatt

SEQ ID NO: 37049 - DNA, 13 bp, Artificial Sequence
  Oligonucleotide for detection of SNP TSC0011577
gattggattatat

SEQ ID NO: 37050 - DNA, 13 bp, Artificial Sequence
  Oligonucleotide for detection of SNP TSC0011577
atataatccaatc

SEQ ID NO: 37051 - DNA, 13 bp, Artificial Sequence
  Oligonucleotide for detection of SNP TSC0011577
gattgggttatat

SEQ ID NO: 37052 - DNA, 13 bp, Artificial Sequence
  Oligonucleotide for detection of SNP TSC0011577
atataacccaatc

SEQ ID NO: 37053 - DNA, 13 bp, Artificial Sequence
  Oligonucleotide for detection of SNP TSC0011579
taatgtataaatg

SEQ ID NO: 37054 - DNA, 13 bp, Artificial Sequence
  Oligonucleotide for detection of SNP TSC0011579
catttatacatta

SEQ ID NO: 37055 - DNA, 13 bp, Artificial Sequence
  Oligonucleotide for detection of SNP TSC0011579
taatgtgtaaatg

SEQ ID NO: 37056 - DNA, 13 bp, Artificial Sequence
  Oligonucleotide for detection of SNP TSC0011579
catttacacatta

SEQ ID NO: 37057 - DNA, 13 bp, Artificial Sequence
  Oligonucleotide for detection of SNP TSC0011579
taatgcgtaaatg

SEQ ID NO: 37058 - DNA, 13 bp, Artificial Sequence
  Oligonucleotide for detection of SNP TSC0011579
catttacgcatta

SEQ ID NO: 37059 - DNA, 13 bp, Artificial Sequence
  Oligonucleotide for detection of SNP TSC0011579
tatttatgtattg

SEQ ID NO: 37060 - DNA, 13 bp, Artificial Sequence
  Oligonucleotide for detection of SNP TSC0011579
caatacataaata

SEQ ID NO: 37061 - DNA, 13 bp, Artificial Sequence
  Oligonucleotide for detection of SNP TSC0011579
tatttacgtattg

SEQ ID NO: 37062 - DNA, 13 bp, Artificial Sequence
  Oligonucleotide for detection of SNP TSC0011579
caatacgtaaata

SEQ ID NO: 37063 - DNA, 13 bp, Artificial Sequence
  Oligonucleotide for detection of SNP TSC0011580
atttttatttagt

SEQ ID NO: 37064 - DNA, 13 bp, Artificial Sequence
  Oligonucleotide for detection of SNP TSC0011580
actaaataaaaat

SEQ ID NO: 37065 - DNA, 13 bp, Artificial Sequence
  Oligonucleotide for detection of SNP TSC0011580
atttttgtttagt

SEQ ID NO: 37066 - DNA, 13 bp, Artificial Sequence
  Oligonucleotide for detection of SNP TSC0011580
actaaacaaaaat

SEQ ID NO: 37067 - DNA, 13 bp, Artificial Sequence
  Oligonucleotide for detection of SNP TSC0011580
attttcgtttagt

SEQ ID NO: 37068 - DNA, 13 bp, Artificial Sequence
  Oligonucleotide for detection of SNP TSC0011580
actaaacgaaaat

SEQ ID NO: 37069 - DNA, 13 bp, Artificial Sequence
  Oligonucleotide for detection of SNP TSC0011580
attaagtggagat

SEQ ID NO: 37070 - DNA, 13 bp, Artificial Sequence
  Oligonucleotide for detection of SNP TSC0011580
atctccacttaat

SEQ ID NO: 37071 - DNA, 13 bp, Artificial Sequence
  Oligonucleotide for detection of SNP TSC0011580
attaagcggagat

SEQ ID NO: 37072 - DNA, 13 bp, Artificial Sequence
  Oligonucleotide for detection of SNP TSC0011580
atctccgcttaat

SEQ ID NO: 37073 - DNA, 13 bp, Artificial Sequence
  Oligonucleotide for detection of SNP TSC0011581
aggaaatagatta

SEQ ID NO: 37074 - DNA, 13 bp, Artificial Sequence
  Oligonucleotide for detection of SNP TSC0011581
taatctatttcct

SEQ ID NO: 37075 - DNA, 13 bp, Artificial Sequence
  Oligonucleotide for detection of SNP TSC0011581
aggaaagagatta

SEQ ID NO: 37076 - DNA, 13 bp, Artificial Sequence
  Oligonucleotide for detection of SNP TSC0011581
taatctctttcct

SEQ ID NO: 37077 - DNA, 13 bp, Artificial Sequence
  Oligonucleotide for detection of SNP TSC0011581
taatttgtttttt

SEQ ID NO: 37078 - DNA, 13 bp, Artificial Sequence
  Oligonucleotide for detection of SNP TSC0011581
aaaaaacaaatta

SEQ ID NO: 37079 - DNA, 13 bp, Artificial Sequence
  Oligonucleotide for detection of SNP TSC0011582
tgtttgttttgat

SEQ ID NO: 37080 - DNA, 13 bp, Artificial Sequence
  Oligonucleotide for detection of SNP TSC0011582
atcaaaacaaaca

SEQ ID NO: 37081 - DNA, 13 bp, Artificial Sequence
  Oligonucleotide for detection of SNP TSC0011582
tgtttggtttgat

SEQ ID NO: 37082 - DNA, 13 bp, Artificial Sequence
  Oligonucleotide for detection of SNP TSC0011582
atcaaaccaaaca

SEQ ID NO: 37083 - DNA, 13 bp, Artificial Sequence
  Oligonucleotide for detection of SNP TSC0011582
tgttcgttttgat

SEQ ID NO: 37084 - DNA, 13 bp, Artificial Sequence
  Oligonucleotide for detection of SNP TSC0011582
atcaaaacgaaca

SEQ ID NO: 37085 - DNA, 13 bp, Artificial Sequence
  Oligonucleotide for detection of SNP TSC0011582
tgttcggtttgat

SEQ ID NO: 37086 - DNA, 13 bp, Artificial Sequence
  Oligonucleotide for detection of SNP TSC0011582
atcaaaccgaaca

SEQ ID NO: 37087 - DNA, 13 bp, Artificial Sequence
  Oligonucleotide for detection of SNP TSC0011582
attagggtgaata

SEQ ID NO: 37088 - DNA, 13 bp, Artificial Sequence
  Oligonucleotide for detection of SNP TSC0011582
tattcaccctaat

SEQ ID NO: 37089 - DNA, 13 bp, Artificial Sequence
  Oligonucleotide for detection of SNP TSC0011582
attaggttgaata

SEQ ID NO: 37090 - DNA, 13 bp, Artificial Sequence
  Oligonucleotide for detection of SNP TSC0011582
tattcaacctaat

SEQ ID NO: 37091 - DNA, 13 bp, Artificial Sequence
  Oligonucleotide for detection of SNP TSC0011582
attagggcgaata

SEQ ID NO: 37092 - DNA, 13 bp, Artificial Sequence
  Oligonucleotide for detection of SNP TSC0011582
tattcgccctaat

SEQ ID NO: 37093 - DNA, 13 bp, Artificial Sequence
  Oligonucleotide for detection of SNP TSC0011582
attaggtcgaata

SEQ ID NO: 37094 - DNA, 13 bp, Artificial Sequence
  Oligonucleotide for detection of SNP TSC0011582
tattcgacctaat

SEQ ID NO: 37095 - DNA, 13 bp, Artificial Sequence
  Oligonucleotide for detection of SNP TSC0011583
tggtaggtaagta

SEQ ID NO: 37096 - DNA, 13 bp, Artificial Sequence
  Oligonucleotide for detection of SNP TSC0011583
tacttacctacca

SEQ ID NO: 37097 - DNA, 13 bp, Artificial Sequence
  Oligonucleotide for detection of SNP TSC0011583
tggtagataagta

SEQ ID NO: 37098 - DNA, 13 bp, Artificial Sequence
  Oligonucleotide for detection of SNP TSC0011583
tacttatctacca

SEQ ID NO: 37099 - DNA, 13 bp, Artificial Sequence
  Oligonucleotide for detection of SNP TSC0011584
tatttataaaaat

SEQ ID NO: 37100 - DNA, 13 bp, Artificial Sequence
  Oligonucleotide for detection of SNP TSC0011584
atttttataaata

SEQ ID NO: 37101 - DNA, 13 bp, Artificial Sequence
  Oligonucleotide for detection of SNP TSC0011584
atttttgtgggtg

SEQ ID NO: 37102 - DNA, 13 bp, Artificial Sequence
  Oligonucleotide for detection of SNP TSC0011584
cacccacaaaaat

SEQ ID NO: 37103 - DNA, 13 bp, Artificial Sequence
  Oligonucleotide for detection of SNP TSC0011584
atttttttgggtg

SEQ ID NO: 37104 - DNA, 13 bp, Artificial Sequence
  Oligonucleotide for detection of SNP TSC0011584
cacccaaaaaaat

SEQ ID NO: 37105 - DNA, 13 bp, Artificial Sequence
  Oligonucleotide for detection of SNP TSC0011585
atgaagtgtgaaa

SEQ ID NO: 37106 - DNA, 13 bp, Artificial Sequence
  Oligonucleotide for detection of SNP TSC0011585
tttcacacttcat

SEQ ID NO: 37107 - DNA, 13 bp, Artificial Sequence
  Oligonucleotide for detection of SNP TSC0011585
atgaagggtgaaa

SEQ ID NO: 37108 - DNA, 13 bp, Artificial Sequence
  Oligonucleotide for detection of SNP TSC0011585
tttcacccttcat

SEQ ID NO: 37109 - DNA, 13 bp, Artificial Sequence
  Oligonucleotide for detection of SNP TSC0011585
atgaagcgtgaaa

SEQ ID NO: 37110 - DNA, 13 bp, Artificial Sequence
  Oligonucleotide for detection of SNP TSC0011585
tttcacgcttcat

SEQ ID NO: 37111 - DNA, 13 bp, Artificial Sequence
  Oligonucleotide for detection of SNP TSC0011585
ttttacgttttat

SEQ ID NO: 37112 - DNA, 13 bp, Artificial Sequence
  Oligonucleotide for detection of SNP TSC0011585
ataaaacgtaaaa

SEQ ID NO: 37113 - DNA, 13 bp, Artificial Sequence
  Oligonucleotide for detection of SNP TSC0011591
ttatgggtaggaa

SEQ ID NO: 37114 - DNA, 13 bp, Artificial Sequence
  Oligonucleotide for detection of SNP TSC0011591
ttcctacccataa

SEQ ID NO: 37115 - DNA, 13 bp, Artificial Sequence
  Oligonucleotide for detection of SNP TSC0011591
ttatggttaggaa

SEQ ID NO: 37116 - DNA, 13 bp, Artificial Sequence
  Oligonucleotide for detection of SNP TSC0011591
ttcctaaccataa

SEQ ID NO: 37117 - DNA, 13 bp, Artificial Sequence
  Oligonucleotide for detection of SNP TSC0011591
tttttatttataa

SEQ ID NO: 37118 - DNA, 13 bp, Artificial Sequence
  Oligonucleotide for detection of SNP TSC0011591
ttataaataaaaa

SEQ ID NO: 37119 - DNA, 13 bp, Artificial Sequence
  Oligonucleotide for detection of SNP TSC0011591
tttttaattataa

SEQ ID NO: 37120 - DNA, 13 bp, Artificial Sequence
  Oligonucleotide for detection of SNP TSC0011591
ttataattaaaaa

SEQ ID NO: 37121 - DNA, 13 bp, Artificial Sequence
  Oligonucleotide for detection of SNP TSC0011592
agtttgattaata

SEQ ID NO: 37122 - DNA, 13 bp, Artificial Sequence
  Oligonucleotide for detection of SNP TSC0011592
tattaatcaaact

SEQ ID NO: 37123 - DNA, 13 bp, Artificial Sequence
  Oligonucleotide for detection of SNP TSC0011592
agtttggttaata

SEQ ID NO: 37124 - DNA, 13 bp, Artificial Sequence
  Oligonucleotide for detection of SNP TSC0011592
tattaaccaaact

SEQ ID NO: 37125 - DNA, 13 bp, Artificial Sequence
  Oligonucleotide for detection of SNP TSC0011593
gtgtatgtatata

SEQ ID NO: 37126 - DNA, 13 bp, Artificial Sequence
  Oligonucleotide for detection of SNP TSC0011593
tatatacatacac

SEQ ID NO: 37127 - DNA, 13 bp, Artificial Sequence
  Oligonucleotide for detection of SNP TSC0011593
gtgtatatatata

SEQ ID NO: 37128 - DNA, 13 bp, Artificial Sequence
  Oligonucleotide for detection of SNP TSC0011593
tatatatatacac

SEQ ID NO: 37129 - DNA, 13 bp, Artificial Sequence
  Oligonucleotide for detection of SNP TSC0011597
ggttaaggtggga

SEQ ID NO: 37130 - DNA, 13 bp, Artificial Sequence
  Oligonucleotide for detection of SNP TSC0011597
tcccaccttaacc

SEQ ID NO: 37131 - DNA, 13 bp, Artificial Sequence
  Oligonucleotide for detection of SNP TSC0011597
ggttaatgtggga

SEQ ID NO: 37132 - DNA, 13 bp, Artificial Sequence
  Oligonucleotide for detection of SNP TSC0011597
tcccacattaacc

SEQ ID NO: 37133 - DNA, 13 bp, Artificial Sequence
  Oligonucleotide for detection of SNP TSC0011597
ttttattttagty

SEQ ID NO: 37134 - DNA, 13 bp, Artificial Sequence
  Oligonucleotide for detection of SNP TSC0011597
ractaaaataaaa

SEQ ID NO: 37135 - DNA, 13 bp, Artificial Sequence
  Oligonucleotide for detection of SNP TSC0011597
ttttatattagty

SEQ ID NO: 37136 - DNA, 13 bp, Artificial Sequence
  Oligonucleotide for detection of SNP TSC0011597
ractaatataaaa

SEQ ID NO: 37137 - DNA, 13 bp, Artificial Sequence
  Oligonucleotide for detection of SNP TSC0011599
tatttatagagga

SEQ ID NO: 37138 - DNA, 13 bp, Artificial Sequence
  Oligonucleotide for detection of SNP TSC0011599
tcctctataaata

SEQ ID NO: 37139 - DNA, 13 bp, Artificial Sequence
  Oligonucleotide for detection of SNP TSC0011599
tatttagagagga

SEQ ID NO: 37140 - DNA, 13 bp, Artificial Sequence
  Oligonucleotide for detection of SNP TSC0011599
tcctctctaaata

SEQ ID NO: 37141 - DNA, 13 bp, Artificial Sequence
  Oligonucleotide for detection of SNP TSC0011599
ttttttgtgggtg

SEQ ID NO: 37142 - DNA, 13 bp, Artificial Sequence
  Oligonucleotide for detection of SNP TSC0011599
cacccacaaaaaa

SEQ ID NO: 37143 - DNA, 13 bp, Artificial Sequence
  Oligonucleotide for detection of SNP TSC0011599
ttttttttgggtg

SEQ ID NO: 37144 - DNA, 13 bp, Artificial Sequence
  Oligonucleotide for detection of SNP TSC0011599
cacccaaaaaaaa

SEQ ID NO: 37145 - DNA, 13 bp, Artificial Sequence
  Oligonucleotide for detection of SNP TSC0011602
tatgagagaatta

SEQ ID NO: 37146 - DNA, 13 bp, Artificial Sequence
  Oligonucleotide for detection of SNP TSC0011602
taattctctcata

SEQ ID NO: 37147 - DNA, 13 bp, Artificial Sequence
  Oligonucleotide for detection of SNP TSC0011602
tatgagtgaatta

SEQ ID NO: 37148 - DNA, 13 bp, Artificial Sequence
  Oligonucleotide for detection of SNP TSC0011602
taattcactcata

SEQ ID NO: 37149 - DNA, 13 bp, Artificial Sequence
  Oligonucleotide for detection of SNP TSC0011602
tatgagcgaatta

SEQ ID NO: 37150 - DNA, 13 bp, Artificial Sequence
  Oligonucleotide for detection of SNP TSC0011602
taattcgctcata

SEQ ID NO: 37151 - DNA, 13 bp, Artificial Sequence
  Oligonucleotide for detection of SNP TSC0011602
tgatttttttata

SEQ ID NO: 37152 - DNA, 13 bp, Artificial Sequence
  Oligonucleotide for detection of SNP TSC0011602
tataaaaaaatca

SEQ ID NO: 37153 - DNA, 13 bp, Artificial Sequence
  Oligonucleotide for detection of SNP TSC0011602
tgatttgtttata

SEQ ID NO: 37154 - DNA, 13 bp, Artificial Sequence
  Oligonucleotide for detection of SNP TSC0011602
tataaacaaatca

SEQ ID NO: 37155 - DNA, 13 bp, Artificial Sequence
  Oligonucleotide for detection of SNP TSC0011602
tgattcgtttata

SEQ ID NO: 37156 - DNA, 13 bp, Artificial Sequence
  Oligonucleotide for detection of SNP TSC0011602
tataaacgaatca

SEQ ID NO: 37157 - DNA, 13 bp, Artificial Sequence
  Oligonucleotide for detection of SNP TSC0011603
ttgagtatgaggt

SEQ ID NO: 37158 - DNA, 13 bp, Artificial Sequence
  Oligonucleotide for detection of SNP TSC0011603
acctcatactcaa

SEQ ID NO: 37159 - DNA, 13 bp, Artificial Sequence
  Oligonucleotide for detection of SNP TSC0011603
ttgagtttgaggt

SEQ ID NO: 37160 - DNA, 13 bp, Artificial Sequence
  Oligonucleotide for detection of SNP TSC0011603
acctcaaactcaa

SEQ ID NO: 37161 - DNA, 13 bp, Artificial Sequence
  Oligonucleotide for detection of SNP TSC0011603
attttatatttag

SEQ ID NO: 37162 - DNA, 13 bp, Artificial Sequence
  Oligonucleotide for detection of SNP TSC0011603
ctaaatataaaat

SEQ ID NO: 37163 - DNA, 13 bp, Artificial Sequence
  Oligonucleotide for detection of SNP TSC0011603
attttaaatttag

SEQ ID NO: 37164 - DNA, 13 bp, Artificial Sequence
  Oligonucleotide for detection of SNP TSC0011603
ctaaatttaaaat

SEQ ID NO: 37165 - DNA, 13 bp, Artificial Sequence
  Oligonucleotide for detection of SNP TSC0011605
gggtgttggggtt

SEQ ID NO: 37166 - DNA, 13 bp, Artificial Sequence
  Oligonucleotide for detection of SNP TSC0011605
aaccccaacaccc

SEQ ID NO: 37167 - DNA, 13 bp, Artificial Sequence
  Oligonucleotide for detection of SNP TSC0011605
gggtgtcggggtt

SEQ ID NO: 37168 - DNA, 13 bp, Artificial Sequence
  Oligonucleotide for detection of SNP TSC0011605
aaccccgacaccc

SEQ ID NO: 37169 - DNA, 13 bp, Artificial Sequence
  Oligonucleotide for detection of SNP TSC0011605
agttttgatatty

SEQ ID NO: 37170 - DNA, 13 bp, Artificial Sequence
  Oligonucleotide for detection of SNP TSC0011605
raatatcaaaact

SEQ ID NO: 37171 - DNA, 13 bp, Artificial Sequence
  Oligonucleotide for detection of SNP TSC0011605
agttttaatatty

SEQ ID NO: 37172 - DNA, 13 bp, Artificial Sequence
  Oligonucleotide for detection of SNP TSC0011605
raatattaaaact

SEQ ID NO: 37173 - DNA, 13 bp, Artificial Sequence
  Oligonucleotide for detection of SNP TSC0011605
agtttcgatatty

SEQ ID NO: 37174 - DNA, 13 bp, Artificial Sequence
  Oligonucleotide for detection of SNP TSC0011605
raatatcgaaact

SEQ ID NO: 37175 - DNA, 13 bp, Artificial Sequence
  Oligonucleotide for detection of SNP TSC0011606
ttatttaatttga

SEQ ID NO: 37176 - DNA, 13 bp, Artificial Sequence
  Oligonucleotide for detection of SNP TSC0011606
tcaaattaaataa

SEQ ID NO: 37177 - DNA, 13 bp, Artificial Sequence
  Oligonucleotide for detection of SNP TSC0011606
ttatttgatttga

SEQ ID NO: 37178 - DNA, 13 bp, Artificial Sequence
  Oligonucleotide for detection of SNP TSC0011606
tcaaatcaaataa

SEQ ID NO: 37179 - DNA, 13 bp, Artificial Sequence
  Oligonucleotide for detection of SNP TSC0011606
ttattcgatttga

SEQ ID NO: 37180 - DNA, 13 bp, Artificial Sequence
  Oligonucleotide for detection of SNP TSC0011606
tcaaatcgaataa

SEQ ID NO: 37181 - DNA, 13 bp, Artificial Sequence
  Oligonucleotide for detection of SNP TSC0011606
ttagattgaataa

SEQ ID NO: 37182 - DNA, 13 bp, Artificial Sequence
  Oligonucleotide for detection of SNP TSC0011606
ttattcaatctaa

SEQ ID NO: 37183 - DNA, 13 bp, Artificial Sequence
  Oligonucleotide for detection of SNP TSC0011606
ttagatcgaataa

SEQ ID NO: 37184 - DNA, 13 bp, Artificial Sequence
  Oligonucleotide for detection of SNP TSC0011606
ttattcgatctaa

SEQ ID NO: 37185 - DNA, 13 bp, Artificial Sequence
  Oligonucleotide for detection of SNP TSC0011607
gtttttaagaagt

SEQ ID NO: 37186 - DNA, 13 bp, Artificial Sequence
  Oligonucleotide for detection of SNP TSC0011607
acttcttaaaaac

SEQ ID NO: 37187 - DNA, 13 bp, Artificial Sequence
  Oligonucleotide for detection of SNP TSC0011607
gtttttgagaagt

SEQ ID NO: 37188 - DNA, 13 bp, Artificial Sequence
  Oligonucleotide for detection of SNP TSC0011607
acttctcaaaaac

SEQ ID NO: 37189 - DNA, 13 bp, Artificial Sequence
  Oligonucleotide for detection of SNP TSC0011607
gttttcgagaagt

SEQ ID NO: 37190 - DNA, 13 bp, Artificial Sequence
  Oligonucleotide for detection of SNP TSC0011607
acttctcgaaaac

SEQ ID NO: 37191 - DNA, 13 bp, Artificial Sequence
  Oligonucleotide for detection of SNP TSC0011607
attttttggaaay

SEQ ID NO: 37192 - DNA, 13 bp, Artificial Sequence
  Oligonucleotide for detection of SNP TSC0011607
rtttccaaaaaat

SEQ ID NO: 37193 - DNA, 13 bp, Artificial Sequence
  Oligonucleotide for detection of SNP TSC0011607
atttttcggaaay

SEQ ID NO: 37194 - DNA, 13 bp, Artificial Sequence
  Oligonucleotide for detection of SNP TSC0011607
rtttccgaaaaat

SEQ ID NO: 37195 - DNA, 13 bp, Artificial Sequence
  Oligonucleotide for detection of SNP TSC0011609
gttttttgatgty

SEQ ID NO: 37196 - DNA, 13 bp, Artificial Sequence
  Oligonucleotide for detection of SNP TSC0011609
racatcaaaaaac

SEQ ID NO: 37197 - DNA, 13 bp, Artificial Sequence
  Oligonucleotide for detection of SNP TSC0011609
gtttttcgatgty

SEQ ID NO: 37198 - DNA, 13 bp, Artificial Sequence
  Oligonucleotide for detection of SNP TSC0011609
racatcgaaaaac

SEQ ID NO: 37199 - DNA, 13 bp, Artificial Sequence
  Oligonucleotide for detection of SNP TSC0011609
ggtattgaaagay

SEQ ID NO: 37200 - DNA, 13 bp, Artificial Sequence
  Oligonucleotide for detection of SNP TSC0011609
rtctttcaatacc

SEQ ID NO: 37201 - DNA, 13 bp, Artificial Sequence
  Oligonucleotide for detection of SNP TSC0011609
ggtattaaaagay

SEQ ID NO: 37202 - DNA, 13 bp, Artificial Sequence
  Oligonucleotide for detection of SNP TSC0011609
rtcttttaatacc

SEQ ID NO: 37203 - DNA, 13 bp, Artificial Sequence
  Oligonucleotide for detection of SNP TSC0011609
ggtatcgaaagay

SEQ ID NO: 37204 - DNA, 13 bp, Artificial Sequence
  Oligonucleotide for detection of SNP TSC0011609
rtctttcgatacc

SEQ ID NO: 37205 - DNA, 13 bp, Artificial Sequence
  Oligonucleotide for detection of SNP TSC0011610
gttgttgtatgta

SEQ ID NO: 37206 - DNA, 13 bp, Artificial Sequence
  Oligonucleotide for detection of SNP TSC0011610
tacatacaacaac

SEQ ID NO: 37207 - DNA, 13 bp, Artificial Sequence
  Oligonucleotide for detection of SNP TSC0011610
gttgttatatgta

SEQ ID NO: 37208 - DNA, 13 bp, Artificial Sequence
  Oligonucleotide for detection of SNP TSC0011610
tacatataacaac

SEQ ID NO: 37209 - DNA, 13 bp, Artificial Sequence
  Oligonucleotide for detection of SNP TSC0011612
tttaaataaaata

SEQ ID NO: 37210 - DNA, 13 bp, Artificial Sequence
  Oligonucleotide for detection of SNP TSC0011612
tattttatttaaa

SEQ ID NO: 37211 - DNA, 13 bp, Artificial Sequence
  Oligonucleotide for detection of SNP TSC0011613
ttagatagttttg

SEQ ID NO: 37212 - DNA, 13 bp, Artificial Sequence
  Oligonucleotide for detection of SNP TSC0011613
caaaactatctaa

SEQ ID NO: 37213 - DNA, 13 bp, Artificial Sequence
  Oligonucleotide for detection of SNP TSC0011613
ttagattgttttg

SEQ ID NO: 37214 - DNA, 13 bp, Artificial Sequence
  Oligonucleotide for detection of SNP TSC0011613
caaaacaatctaa

SEQ ID NO: 37215 - DNA, 13 bp, Artificial Sequence
  Oligonucleotide for detection of SNP TSC0011613
tagagttgtttgg

SEQ ID NO: 37216 - DNA, 13 bp, Artificial Sequence
  Oligonucleotide for detection of SNP TSC0011613
ccaaacaactcta

SEQ ID NO: 37217 - DNA, 13 bp, Artificial Sequence
  Oligonucleotide for detection of SNP TSC0011613
tagagtagtttgg

SEQ ID NO: 37218 - DNA, 13 bp, Artificial Sequence
  Oligonucleotide for detection of SNP TSC0011613
ccaaactactcta

SEQ ID NO: 37219 - DNA, 13 bp, Artificial Sequence
  Oligonucleotide for detection of SNP TSC0011614
atgtatatattat

SEQ ID NO: 37220 - DNA, 13 bp, Artificial Sequence
  Oligonucleotide for detection of SNP TSC0011614
ataatatatacat

SEQ ID NO: 37221 - DNA, 13 bp, Artificial Sequence
  Oligonucleotide for detection of SNP TSC0011614
atgtatgtattat

SEQ ID NO: 37222 - DNA, 13 bp, Artificial Sequence
  Oligonucleotide for detection of SNP TSC0011614
ataatacatacat

SEQ ID NO: 37223 - DNA, 13 bp, Artificial Sequence
  Oligonucleotide for detection of SNP TSC0011614
acgtatatattat

SEQ ID NO: 37224 - DNA, 13 bp, Artificial Sequence
  Oligonucleotide for detection of SNP TSC0011614
ataatatatacgt

SEQ ID NO: 37225 - DNA, 13 bp, Artificial Sequence
  Oligonucleotide for detection of SNP TSC0011614
acgtatgtattat

SEQ ID NO: 37226 - DNA, 13 bp, Artificial Sequence
  Oligonucleotide for detection of SNP TSC0011614
ataatacatacgt

SEQ ID NO: 37227 - DNA, 13 bp, Artificial Sequence
  Oligonucleotide for detection of SNP TSC0011614
atgtacgtattat

SEQ ID NO: 37228 - DNA, 13 bp, Artificial Sequence
  Oligonucleotide for detection of SNP TSC0011614
ataatacgtacat

SEQ ID NO: 37229 - DNA, 13 bp, Artificial Sequence
  Oligonucleotide for detection of SNP TSC0011614
acgtacgtattat

SEQ ID NO: 37230 - DNA, 13 bp, Artificial Sequence
  Oligonucleotide for detection of SNP TSC0011614
ataatacgtacgt

SEQ ID NO: 37231 - DNA, 13 bp, Artificial Sequence
  Oligonucleotide for detection of SNP TSC0011614
atgatgtgtatgt

SEQ ID NO: 37232 - DNA, 13 bp, Artificial Sequence
  Oligonucleotide for detection of SNP TSC0011614
acatacacatcat

SEQ ID NO: 37233 - DNA, 13 bp, Artificial Sequence
  Oligonucleotide for detection of SNP TSC0011614
atgatgtgtacgt

SEQ ID NO: 37234 - DNA, 13 bp, Artificial Sequence
  Oligonucleotide for detection of SNP TSC0011614
acgtacacatcat

SEQ ID NO: 37235 - DNA, 13 bp, Artificial Sequence
  Oligonucleotide for detection of SNP TSC0011614
atgatgcgtatgt

SEQ ID NO: 37236 - DNA, 13 bp, Artificial Sequence
  Oligonucleotide for detection of SNP TSC0011614
acatacgcatcat

SEQ ID NO: 37237 - DNA, 13 bp, Artificial Sequence
  Oligonucleotide for detection of SNP TSC0011614
atgatgcgtacgt

SEQ ID NO: 37238 - DNA, 13 bp, Artificial Sequence
  Oligonucleotide for detection of SNP TSC0011614
acgtacgcatcat

SEQ ID NO: 37239 - DNA, 13 bp, Artificial Sequence
  Oligonucleotide for detection of SNP TSC0011615
atttatatggtty

SEQ ID NO: 37240 - DNA, 13 bp, Artificial Sequence
  Oligonucleotide for detection of SNP TSC0011615
raaccatataaat

SEQ ID NO: 37241 - DNA, 13 bp, Artificial Sequence
  Oligonucleotide for detection of SNP TSC0011615
atttatgtggtty

SEQ ID NO: 37242 - DNA, 13 bp, Artificial Sequence
  Oligonucleotide for detection of SNP TSC0011615
raaccacataaat

SEQ ID NO: 37243 - DNA, 13 bp, Artificial Sequence
  Oligonucleotide for detection of SNP TSC0011616
tgttggaaaaaaa

SEQ ID NO: 37244 - DNA, 13 bp, Artificial Sequence
  Oligonucleotide for detection of SNP TSC0011616
tttttttccaaca

SEQ ID NO: 37245 - DNA, 13 bp, Artificial Sequence
  Oligonucleotide for detection of SNP TSC0011616
tgttgggaaaaaa

SEQ ID NO: 37246 - DNA, 13 bp, Artificial Sequence
  Oligonucleotide for detection of SNP TSC0011616
ttttttcccaaca

SEQ ID NO: 37247 - DNA, 13 bp, Artificial Sequence
  Oligonucleotide for detection of SNP TSC0011618
atattttgagaaa

SEQ ID NO: 37248 - DNA, 13 bp, Artificial Sequence
  Oligonucleotide for detection of SNP TSC0011618
tttctcaaaatat

SEQ ID NO: 37249 - DNA, 13 bp, Artificial Sequence
  Oligonucleotide for detection of SNP TSC0011618
atatttcgagaaa

SEQ ID NO: 37250 - DNA, 13 bp, Artificial Sequence
  Oligonucleotide for detection of SNP TSC0011618
tttctcgaaatat

SEQ ID NO: 37251 - DNA, 13 bp, Artificial Sequence
  Oligonucleotide for detection of SNP TSC0011618
ttttttgaaatat

SEQ ID NO: 37252 - DNA, 13 bp, Artificial Sequence
  Oligonucleotide for detection of SNP TSC0011618
atatttcaaaaaa

SEQ ID NO: 37253 - DNA, 13 bp, Artificial Sequence
  Oligonucleotide for detection of SNP TSC0011618
ttttttaaaatat

SEQ ID NO: 37254 - DNA, 13 bp, Artificial Sequence
  Oligonucleotide for detection of SNP TSC0011618
atattttaaaaaa

SEQ ID NO: 37255 - DNA, 13 bp, Artificial Sequence
  Oligonucleotide for detection of SNP TSC0011618
tttttcgaaatat

SEQ ID NO: 37256 - DNA, 13 bp, Artificial Sequence
  Oligonucleotide for detection of SNP TSC0011618
atatttcgaaaaa

SEQ ID NO: 37257 - DNA, 13 bp, Artificial Sequence
  Oligonucleotide for detection of SNP TSC0011621
gattttatttgag

SEQ ID NO: 37258 - DNA, 13 bp, Artificial Sequence
  Oligonucleotide for detection of SNP TSC0011621
ctcaaataaaatc

SEQ ID NO: 37259 - DNA, 13 bp, Artificial Sequence
  Oligonucleotide for detection of SNP TSC0011621
gattttttttgag

SEQ ID NO: 37260 - DNA, 13 bp, Artificial Sequence
  Oligonucleotide for detection of SNP TSC0011621
ctcaaaaaaaatc

SEQ ID NO: 37261 - DNA, 13 bp, Artificial Sequence
  Oligonucleotide for detection of SNP TSC0011621
tttagataaaaty

SEQ ID NO: 37262 - DNA, 13 bp, Artificial Sequence
  Oligonucleotide for detection of SNP TSC0011621
rattttatctaaa

SEQ ID NO: 37263 - DNA, 13 bp, Artificial Sequence
  Oligonucleotide for detection of SNP TSC0011621
tttagagaaaaty

SEQ ID NO: 37264 - DNA, 13 bp, Artificial Sequence
  Oligonucleotide for detection of SNP TSC0011621
rattttctctaaa

SEQ ID NO: 37265 - DNA, 13 bp, Artificial Sequence
  Oligonucleotide for detection of SNP TSC0011627
gttagtaaggttg

SEQ ID NO: 37266 - DNA, 13 bp, Artificial Sequence
  Oligonucleotide for detection of SNP TSC0011627
caaccttactaac

SEQ ID NO: 37267 - DNA, 13 bp, Artificial Sequence
  Oligonucleotide for detection of SNP TSC0011627
gttagtgaggttg

SEQ ID NO: 37268 - DNA, 13 bp, Artificial Sequence
  Oligonucleotide for detection of SNP TSC0011627
caacctcactaac

SEQ ID NO: 37269 - DNA, 13 bp, Artificial Sequence
  Oligonucleotide for detection of SNP TSC0011627
gttagcgaggttg

SEQ ID NO: 37270 - DNA, 13 bp, Artificial Sequence
  Oligonucleotide for detection of SNP TSC0011627
caacctcgctaac

SEQ ID NO: 37271 - DNA, 13 bp, Artificial Sequence
  Oligonucleotide for detection of SNP TSC0011629
ttatggagtatat

SEQ ID NO: 37272 - DNA, 13 bp, Artificial Sequence
  Oligonucleotide for detection of SNP TSC0011629
atatactccataa

SEQ ID NO: 37273 - DNA, 13 bp, Artificial Sequence
  Oligonucleotide for detection of SNP TSC0011629
ttatggtgtatat

SEQ ID NO: 37274 - DNA, 13 bp, Artificial Sequence
  Oligonucleotide for detection of SNP TSC0011629
atatacaccataa

SEQ ID NO: 37275 - DNA, 13 bp, Artificial Sequence
  Oligonucleotide for detection of SNP TSC0011629
ttatggcgtatat

SEQ ID NO: 37276 - DNA, 13 bp, Artificial Sequence
  Oligonucleotide for detection of SNP TSC0011629
atatacgccataa

SEQ ID NO: 37277 - DNA, 13 bp, Artificial Sequence
  Oligonucleotide for detection of SNP TSC0011629
atgtattttataa

SEQ ID NO: 37278 - DNA, 13 bp, Artificial Sequence
  Oligonucleotide for detection of SNP TSC0011629
ttataaaatacat

SEQ ID NO: 37279 - DNA, 13 bp, Artificial Sequence
  Oligonucleotide for detection of SNP TSC0011629
atgtatgttataa

SEQ ID NO: 37280 - DNA, 13 bp, Artificial Sequence
  Oligonucleotide for detection of SNP TSC0011629
ttataacatacat

SEQ ID NO: 37281 - DNA, 13 bp, Artificial Sequence
  Oligonucleotide for detection of SNP TSC0011629
atgtacgttataa

SEQ ID NO: 37282 - DNA, 13 bp, Artificial Sequence
  Oligonucleotide for detection of SNP TSC0011629
ttataacgtacat

SEQ ID NO: 37283 - DNA, 13 bp, Artificial Sequence
  Oligonucleotide for detection of SNP TSC0011630
gaagttattgtgt

SEQ ID NO: 37284 - DNA, 13 bp, Artificial Sequence
  Oligonucleotide for detection of SNP TSC0011630
acacaataacttc

SEQ ID NO: 37285 - DNA, 13 bp, Artificial Sequence
  Oligonucleotide for detection of SNP TSC0011630
gaagttgttgtgt

SEQ ID NO: 37286 - DNA, 13 bp, Artificial Sequence
  Oligonucleotide for detection of SNP TSC0011630
acacaacaacttc

SEQ ID NO: 37287 - DNA, 13 bp, Artificial Sequence
  Oligonucleotide for detection of SNP TSC0011630
gaagtcgttgtgt

SEQ ID NO: 37288 - DNA, 13 bp, Artificial Sequence
  Oligonucleotide for detection of SNP TSC0011630
acacaacgacttc

SEQ ID NO: 37289 - DNA, 13 bp, Artificial Sequence
  Oligonucleotide for detection of SNP TSC0011630
atatagtggttty

SEQ ID NO: 37290 - DNA, 13 bp, Artificial Sequence
  Oligonucleotide for detection of SNP TSC0011630
raaaccactatat

SEQ ID NO: 37291 - DNA, 13 bp, Artificial Sequence
  Oligonucleotide for detection of SNP TSC0011630
atatagcggttty

SEQ ID NO: 37292 - DNA, 13 bp, Artificial Sequence
  Oligonucleotide for detection of SNP TSC0011630
raaaccgctatat

SEQ ID NO: 37293 - DNA, 13 bp, Artificial Sequence
  Oligonucleotide for detection of SNP TSC0011632
gatttagtattta

SEQ ID NO: 37294 - DNA, 13 bp, Artificial Sequence
  Oligonucleotide for detection of SNP TSC0011632
taaatactaaatc

SEQ ID NO: 37295 - DNA, 13 bp, Artificial Sequence
  Oligonucleotide for detection of SNP TSC0011632
gatttaatattta

SEQ ID NO: 37296 - DNA, 13 bp, Artificial Sequence
  Oligonucleotide for detection of SNP TSC0011632
taaatattaaatc

SEQ ID NO: 37297 - DNA, 13 bp, Artificial Sequence
  Oligonucleotide for detection of SNP TSC0011633
tttgtttttttay

SEQ ID NO: 37298 - DNA, 13 bp, Artificial Sequence
  Oligonucleotide for detection of SNP TSC0011633
rtaaaaaaacaaa

SEQ ID NO: 37299 - DNA, 13 bp, Artificial Sequence
  Oligonucleotide for detection of SNP TSC0011633
tttgttgttttay

SEQ ID NO: 37300 - DNA, 13 bp, Artificial Sequence
  Oligonucleotide for detection of SNP TSC0011633
rtaaaacaacaaa

SEQ ID NO: 37301 - DNA, 13 bp, Artificial Sequence
  Oligonucleotide for detection of SNP TSC0011633
tttgtcgttttay

SEQ ID NO: 37302 - DNA, 13 bp, Artificial Sequence
  Oligonucleotide for detection of SNP TSC0011633
rtaaaacgacaaa

SEQ ID NO: 37303 - DNA, 13 bp, Artificial Sequence
  Oligonucleotide for detection of SNP TSC0011633
gtggaggggtaag

SEQ ID NO: 37304 - DNA, 13 bp, Artificial Sequence
  Oligonucleotide for detection of SNP TSC0011633
cttacccctccac

SEQ ID NO: 37305 - DNA, 13 bp, Artificial Sequence
  Oligonucleotide for detection of SNP TSC0011633
gtggagtggtaag

SEQ ID NO: 37306 - DNA, 13 bp, Artificial Sequence
  Oligonucleotide for detection of SNP TSC0011633
cttaccactccac

SEQ ID NO: 37307 - DNA, 13 bp, Artificial Sequence
  Oligonucleotide for detection of SNP TSC0011633
gtggagcggtaag

SEQ ID NO: 37308 - DNA, 13 bp, Artificial Sequence
  Oligonucleotide for detection of SNP TSC0011633
cttaccgctccac

SEQ ID NO: 37309 - DNA, 13 bp, Artificial Sequence
  Oligonucleotide for detection of SNP TSC0011634
ttatttagtgtgg

SEQ ID NO: 37310 - DNA, 13 bp, Artificial Sequence
  Oligonucleotide for detection of SNP TSC0011634
ccacactaaataa

SEQ ID NO: 37311 - DNA, 13 bp, Artificial Sequence
  Oligonucleotide for detection of SNP TSC0011634
ttatttggtgtgg

SEQ ID NO: 37312 - DNA, 13 bp, Artificial Sequence
  Oligonucleotide for detection of SNP TSC0011634
ccacaccaaataa

SEQ ID NO: 37313 - DNA, 13 bp, Artificial Sequence
  Oligonucleotide for detection of SNP TSC0011634
ttattcggtgtgg

SEQ ID NO: 37314 - DNA, 13 bp, Artificial Sequence
  Oligonucleotide for detection of SNP TSC0011634
ccacaccgaataa

SEQ ID NO: 37315 - DNA, 13 bp, Artificial Sequence
  Oligonucleotide for detection of SNP TSC0011634
ttatattgagtga

SEQ ID NO: 37316 - DNA, 13 bp, Artificial Sequence
  Oligonucleotide for detection of SNP TSC0011634
tcactcaatataa

SEQ ID NO: 37317 - DNA, 13 bp, Artificial Sequence
  Oligonucleotide for detection of SNP TSC0011634
ttatatcgagtga

SEQ ID NO: 37318 - DNA, 13 bp, Artificial Sequence
  Oligonucleotide for detection of SNP TSC0011634
tcactcgatataa

SEQ ID NO: 37319 - DNA, 13 bp, Artificial Sequence
  Oligonucleotide for detection of SNP TSC0011636
gaggtttaaggay

SEQ ID NO: 37320 - DNA, 13 bp, Artificial Sequence
  Oligonucleotide for detection of SNP TSC0011636
rtccttaaacctc

SEQ ID NO: 37321 - DNA, 13 bp, Artificial Sequence
  Oligonucleotide for detection of SNP TSC0011636
gaggttgaaggay

SEQ ID NO: 37322 - DNA, 13 bp, Artificial Sequence
  Oligonucleotide for detection of SNP TSC0011636
rtccttcaacctc

SEQ ID NO: 37323 - DNA, 13 bp, Artificial Sequence
  Oligonucleotide for detection of SNP TSC0011636
gaggtcgaaggay

SEQ ID NO: 37324 - DNA, 13 bp, Artificial Sequence
  Oligonucleotide for detection of SNP TSC0011636
rtccttcgacctc

SEQ ID NO: 37325 - DNA, 13 bp, Artificial Sequence
  Oligonucleotide for detection of SNP TSC0011636
gtttttgggttty

SEQ ID NO: 37326 - DNA, 13 bp, Artificial Sequence
  Oligonucleotide for detection of SNP TSC0011636
raaacccaaaaac

SEQ ID NO: 37327 - DNA, 13 bp, Artificial Sequence
  Oligonucleotide for detection of SNP TSC0011636
gttttttggttty

SEQ ID NO: 37328 - DNA, 13 bp, Artificial Sequence
  Oligonucleotide for detection of SNP TSC0011636
raaaccaaaaaac

SEQ ID NO: 37329 - DNA, 13 bp, Artificial Sequence
  Oligonucleotide for detection of SNP TSC0011636
gtttttcggttty

SEQ ID NO: 37330 - DNA, 13 bp, Artificial Sequence
  Oligonucleotide for detection of SNP TSC0011636
raaaccgaaaaac

SEQ ID NO: 37331 - DNA, 13 bp, Artificial Sequence
  Oligonucleotide for detection of SNP TSC0011638
tattttataatat

SEQ ID NO: 37332 - DNA, 13 bp, Artificial Sequence
  Oligonucleotide for detection of SNP TSC0011638
atattataaaata

SEQ ID NO: 37333 - DNA, 13 bp, Artificial Sequence
  Oligonucleotide for detection of SNP TSC0011638
tattttttaatat

SEQ ID NO: 37334 - DNA, 13 bp, Artificial Sequence
  Oligonucleotide for detection of SNP TSC0011638
atattaaaaaata

SEQ ID NO: 37335 - DNA, 13 bp, Artificial Sequence
  Oligonucleotide for detection of SNP TSC0011638
atattataagatg

SEQ ID NO: 37336 - DNA, 13 bp, Artificial Sequence
  Oligonucleotide for detection of SNP TSC0011638
catcttataatat

SEQ ID NO: 37337 - DNA, 13 bp, Artificial Sequence
  Oligonucleotide for detection of SNP TSC0011638
atattagaagatg

SEQ ID NO: 37338 - DNA, 13 bp, Artificial Sequence
  Oligonucleotide for detection of SNP TSC0011638
catcttctaatat

SEQ ID NO: 37339 - DNA, 13 bp, Artificial Sequence
  Oligonucleotide for detection of SNP TSC0011639
taaggtatgggag

SEQ ID NO: 37340 - DNA, 13 bp, Artificial Sequence
  Oligonucleotide for detection of SNP TSC0011639
ctcccatacctta

SEQ ID NO: 37341 - DNA, 13 bp, Artificial Sequence
  Oligonucleotide for detection of SNP TSC0011639
taaggtgtgggag

SEQ ID NO: 37342 - DNA, 13 bp, Artificial Sequence
  Oligonucleotide for detection of SNP TSC0011639
ctcccacacctta

SEQ ID NO: 37343 - DNA, 13 bp, Artificial Sequence
  Oligonucleotide for detection of SNP TSC0011639
taaggcgtgggag

SEQ ID NO: 37344 - DNA, 13 bp, Artificial Sequence
  Oligonucleotide for detection of SNP TSC0011639
ctcccacgcctta

SEQ ID NO: 37345 - DNA, 13 bp, Artificial Sequence
  Oligonucleotide for detection of SNP TSC0011640
tttgatgtgtatt

SEQ ID NO: 37346 - DNA, 13 bp, Artificial Sequence
  Oligonucleotide for detection of SNP TSC0011640
aatacacatcaaa

SEQ ID NO: 37347 - DNA, 13 bp, Artificial Sequence
  Oligonucleotide for detection of SNP TSC0011640
tttgatatgtatt

SEQ ID NO: 37348 - DNA, 13 bp, Artificial Sequence
  Oligonucleotide for detection of SNP TSC0011640
aatacatatcaaa

SEQ ID NO: 37349 - DNA, 13 bp, Artificial Sequence
  Oligonucleotide for detection of SNP TSC0011641
ttagtatggagtt

SEQ ID NO: 37350 - DNA, 13 bp, Artificial Sequence
  Oligonucleotide for detection of SNP TSC0011641
aactccatactaa

SEQ ID NO: 37351 - DNA, 13 bp, Artificial Sequence
  Oligonucleotide for detection of SNP TSC0011641
ttagtacggagtt

SEQ ID NO: 37352 - DNA, 13 bp, Artificial Sequence
  Oligonucleotide for detection of SNP TSC0011641
aactccgtactaa

SEQ ID NO: 37353 - DNA, 13 bp, Artificial Sequence
  Oligonucleotide for detection of SNP TSC0011641
aattttgtgttga

SEQ ID NO: 37354 - DNA, 13 bp, Artificial Sequence
  Oligonucleotide for detection of SNP TSC0011641
tcaacacaaaatt

SEQ ID NO: 37355 - DNA, 13 bp, Artificial Sequence
  Oligonucleotide for detection of SNP TSC0011641
aatttcgtgttga

SEQ ID NO: 37356 - DNA, 13 bp, Artificial Sequence
  Oligonucleotide for detection of SNP TSC0011641
tcaacacgaaatt

SEQ ID NO: 37357 - DNA, 13 bp, Artificial Sequence
  Oligonucleotide for detection of SNP TSC0011642
attaagatataga

SEQ ID NO: 37358 - DNA, 13 bp, Artificial Sequence
  Oligonucleotide for detection of SNP TSC0011642
tctatatcttaat

SEQ ID NO: 37359 - DNA, 13 bp, Artificial Sequence
  Oligonucleotide for detection of SNP TSC0011642
attaagttataga

SEQ ID NO: 37360 - DNA, 13 bp, Artificial Sequence
  Oligonucleotide for detection of SNP TSC0011642
tctataacttaat

SEQ ID NO: 37361 - DNA, 13 bp, Artificial Sequence
  Oligonucleotide for detection of SNP TSC0011642
tttgtgttttggt

SEQ ID NO: 37362 - DNA, 13 bp, Artificial Sequence
  Oligonucleotide for detection of SNP TSC0011642
accaaaacacaaa

SEQ ID NO: 37363 - DNA, 13 bp, Artificial Sequence
  Oligonucleotide for detection of SNP TSC0011642
tttgtgatttggt

SEQ ID NO: 37364 - DNA, 13 bp, Artificial Sequence
  Oligonucleotide for detection of SNP TSC0011642
accaaatcacaaa

SEQ ID NO: 37365 - DNA, 13 bp, Artificial Sequence
  Oligonucleotide for detection of SNP TSC0011643
gttttttttgttg

SEQ ID NO: 37366 - DNA, 13 bp, Artificial Sequence
  Oligonucleotide for detection of SNP TSC0011643
caacaaaaaaaac

SEQ ID NO: 37367 - DNA, 13 bp, Artificial Sequence
  Oligonucleotide for detection of SNP TSC0011643
gtttttgttgttg

SEQ ID NO: 37368 - DNA, 13 bp, Artificial Sequence
  Oligonucleotide for detection of SNP TSC0011643
caacaacaaaaac

SEQ ID NO: 37369 - DNA, 13 bp, Artificial Sequence
  Oligonucleotide for detection of SNP TSC0011643
gtttttttcgttg

SEQ ID NO: 37370 - DNA, 13 bp, Artificial Sequence
  Oligonucleotide for detection of SNP TSC0011643
caacgaaaaaaac

SEQ ID NO: 37371 - DNA, 13 bp, Artificial Sequence
  Oligonucleotide for detection of SNP TSC0011643
gtttttgtcgttg

SEQ ID NO: 37372 - DNA, 13 bp, Artificial Sequence
  Oligonucleotide for detection of SNP TSC0011643
caacgacaaaaac

SEQ ID NO: 37373 - DNA, 13 bp, Artificial Sequence
  Oligonucleotide for detection of SNP TSC0011643
taatgggaaaggy

SEQ ID NO: 37374 - DNA, 13 bp, Artificial Sequence
  Oligonucleotide for detection of SNP TSC0011643
rcctttcccatta

SEQ ID NO: 37375 - DNA, 13 bp, Artificial Sequence
  Oligonucleotide for detection of SNP TSC0011643
taatggtaaaggy

SEQ ID NO: 37376 - DNA, 13 bp, Artificial Sequence
  Oligonucleotide for detection of SNP TSC0011643
rcctttaccatta

SEQ ID NO: 37377 - DNA, 13 bp, Artificial Sequence
  Oligonucleotide for detection of SNP TSC0011643
taacgggaaaggy

SEQ ID NO: 37378 - DNA, 13 bp, Artificial Sequence
  Oligonucleotide for detection of SNP TSC0011643
rcctttcccgtta

SEQ ID NO: 37379 - DNA, 13 bp, Artificial Sequence
  Oligonucleotide for detection of SNP TSC0011643
taacggtaaaggy

SEQ ID NO: 37380 - DNA, 13 bp, Artificial Sequence
  Oligonucleotide for detection of SNP TSC0011643
rcctttaccgtta

SEQ ID NO: 37381 - DNA, 13 bp, Artificial Sequence
  Oligonucleotide for detection of SNP TSC0011644
ttttgatttttta

SEQ ID NO: 37382 - DNA, 13 bp, Artificial Sequence
  Oligonucleotide for detection of SNP TSC0011644
taaaaaatcaaaa

SEQ ID NO: 37383 - DNA, 13 bp, Artificial Sequence
  Oligonucleotide for detection of SNP TSC0011644
ttttgagttttta

SEQ ID NO: 37384 - DNA, 13 bp, Artificial Sequence
  Oligonucleotide for detection of SNP TSC0011644
taaaaactcaaaa

SEQ ID NO: 37385 - DNA, 13 bp, Artificial Sequence
  Oligonucleotide for detection of SNP TSC0011644
taaaaggttaagg

SEQ ID NO: 37386 - DNA, 13 bp, Artificial Sequence
  Oligonucleotide for detection of SNP TSC0011644
ccttaacctttta

SEQ ID NO: 37387 - DNA, 13 bp, Artificial Sequence
  Oligonucleotide for detection of SNP TSC0011644
taaaagtttaagg

SEQ ID NO: 37388 - DNA, 13 bp, Artificial Sequence
  Oligonucleotide for detection of SNP TSC0011644
ccttaaactttta

SEQ ID NO: 37389 - DNA, 13 bp, Artificial Sequence
  Oligonucleotide for detection of SNP TSC0011646
tgtttgtgtatat

SEQ ID NO: 37390 - DNA, 13 bp, Artificial Sequence
  Oligonucleotide for detection of SNP TSC0011646
atatacacaaaca

SEQ ID NO: 37391 - DNA, 13 bp, Artificial Sequence
  Oligonucleotide for detection of SNP TSC0011646
tgtttgcgtatat

SEQ ID NO: 37392 - DNA, 13 bp, Artificial Sequence
  Oligonucleotide for detection of SNP TSC0011646
atatacgcaaaca

SEQ ID NO: 37393 - DNA, 13 bp, Artificial Sequence
  Oligonucleotide for detection of SNP TSC0011646
atgtgtgtaagta

SEQ ID NO: 37394 - DNA, 13 bp, Artificial Sequence
  Oligonucleotide for detection of SNP TSC0011646
tacttacacacat

SEQ ID NO: 37395 - DNA, 13 bp, Artificial Sequence
  Oligonucleotide for detection of SNP TSC0011646
atgtgtataagta

SEQ ID NO: 37396 - DNA, 13 bp, Artificial Sequence
  Oligonucleotide for detection of SNP TSC0011646
tacttatacacat

SEQ ID NO: 37397 - DNA, 13 bp, Artificial Sequence
  Oligonucleotide for detection of SNP TSC0011646
atgtgcgtaagta

SEQ ID NO: 37398 - DNA, 13 bp, Artificial Sequence
  Oligonucleotide for detection of SNP TSC0011646
tacttacgcacat

SEQ ID NO: 37399 - DNA, 13 bp, Artificial Sequence
  Oligonucleotide for detection of SNP TSC0011648
aagtatagttagt

SEQ ID NO: 37400 - DNA, 13 bp, Artificial Sequence
  Oligonucleotide for detection of SNP TSC0011648
actaactatactt

SEQ ID NO: 37401 - DNA, 13 bp, Artificial Sequence
  Oligonucleotide for detection of SNP TSC0011648
aagtattgttagt

SEQ ID NO: 37402 - DNA, 13 bp, Artificial Sequence
  Oligonucleotide for detection of SNP TSC0011648
actaacaatactt

SEQ ID NO: 37403 - DNA, 13 bp, Artificial Sequence
  Oligonucleotide for detection of SNP TSC0011648
attagttgtgttt

SEQ ID NO: 37404 - DNA, 13 bp, Artificial Sequence
  Oligonucleotide for detection of SNP TSC0011648
aaacacaactaat

SEQ ID NO: 37405 - DNA, 13 bp, Artificial Sequence
  Oligonucleotide for detection of SNP TSC0011648
attagtagtgttt

SEQ ID NO: 37406 - DNA, 13 bp, Artificial Sequence
  Oligonucleotide for detection of SNP TSC0011648
aaacactactaat

SEQ ID NO: 37407 - DNA, 13 bp, Artificial Sequence
  Oligonucleotide for detection of SNP TSC0011649
tgttttcgtatat

SEQ ID NO: 37408 - DNA, 13 bp, Artificial Sequence
  Oligonucleotide for detection of SNP TSC0011649
atatacgaaaaca

SEQ ID NO: 37409 - DNA, 13 bp, Artificial Sequence
  Oligonucleotide for detection of SNP TSC0011649
atatatggaaata

SEQ ID NO: 37410 - DNA, 13 bp, Artificial Sequence
  Oligonucleotide for detection of SNP TSC0011649
tatttccatatat

SEQ ID NO: 37411 - DNA, 13 bp, Artificial Sequence
  Oligonucleotide for detection of SNP TSC0011649
atatatagaaata

SEQ ID NO: 37412 - DNA, 13 bp, Artificial Sequence
  Oligonucleotide for detection of SNP TSC0011649
tatttctatatat

SEQ ID NO: 37413 - DNA, 13 bp, Artificial Sequence
  Oligonucleotide for detection of SNP TSC0011649
atatacggaaata

SEQ ID NO: 37414 - DNA, 13 bp, Artificial Sequence
  Oligonucleotide for detection of SNP TSC0011649
tatttccgtatat

SEQ ID NO: 37415 - DNA, 13 bp, Artificial Sequence
  Oligonucleotide for detection of SNP TSC0011650
agattgattaaga

SEQ ID NO: 37416 - DNA, 13 bp, Artificial Sequence
  Oligonucleotide for detection of SNP TSC0011650
tcttaatcaatct

SEQ ID NO: 37417 - DNA, 13 bp, Artificial Sequence
  Oligonucleotide for detection of SNP TSC0011650
agattggttaaga

SEQ ID NO: 37418 - DNA, 13 bp, Artificial Sequence
  Oligonucleotide for detection of SNP TSC0011650
tcttaaccaatct

SEQ ID NO: 37419 - DNA, 13 bp, Artificial Sequence
  Oligonucleotide for detection of SNP TSC0011651
agagagaattttg

SEQ ID NO: 37420 - DNA, 13 bp, Artificial Sequence
  Oligonucleotide for detection of SNP TSC0011651
caaaattctctct

SEQ ID NO: 37421 - DNA, 13 bp, Artificial Sequence
  Oligonucleotide for detection of SNP TSC0011651
agagaggattttg

SEQ ID NO: 37422 - DNA, 13 bp, Artificial Sequence
  Oligonucleotide for detection of SNP TSC0011651
caaaatcctctct

SEQ ID NO: 37423 - DNA, 13 bp, Artificial Sequence
  Oligonucleotide for detection of SNP TSC0011651
agagagaatttcg

SEQ ID NO: 37424 - DNA, 13 bp, Artificial Sequence
  Oligonucleotide for detection of SNP TSC0011651
cgaaattctctct

SEQ ID NO: 37425 - DNA, 13 bp, Artificial Sequence
  Oligonucleotide for detection of SNP TSC0011651
agagaggatttcg

SEQ ID NO: 37426 - DNA, 13 bp, Artificial Sequence
  Oligonucleotide for detection of SNP TSC0011651
cgaaatcctctct

SEQ ID NO: 37427 - DNA, 13 bp, Artificial Sequence
  Oligonucleotide for detection of SNP TSC0011652
attgtaaatgtat

SEQ ID NO: 37428 - DNA, 13 bp, Artificial Sequence
  Oligonucleotide for detection of SNP TSC0011652
atacatttacaat

SEQ ID NO: 37429 - DNA, 13 bp, Artificial Sequence
  Oligonucleotide for detection of SNP TSC0011652
attgtagatgtat

SEQ ID NO: 37430 - DNA, 13 bp, Artificial Sequence
  Oligonucleotide for detection of SNP TSC0011652
atacatctacaat

SEQ ID NO: 37431 - DNA, 13 bp, Artificial Sequence
  Oligonucleotide for detection of SNP TSC0011652
attgtaaacgtat

SEQ ID NO: 37432 - DNA, 13 bp, Artificial Sequence
  Oligonucleotide for detection of SNP TSC0011652
atacgtttacaat

SEQ ID NO: 37433 - DNA, 13 bp, Artificial Sequence
  Oligonucleotide for detection of SNP TSC0011652
attgtagacgtat

SEQ ID NO: 37434 - DNA, 13 bp, Artificial Sequence
  Oligonucleotide for detection of SNP TSC0011652
atacgtctacaat

SEQ ID NO: 37435 - DNA, 13 bp, Artificial Sequence
  Oligonucleotide for detection of SNP TSC0011654
aaaaaaggataag

SEQ ID NO: 37436 - DNA, 13 bp, Artificial Sequence
  Oligonucleotide for detection of SNP TSC0011654
cttatcctttttt

SEQ ID NO: 37437 - DNA, 13 bp, Artificial Sequence
  Oligonucleotide for detection of SNP TSC0011654
aaaaaaagataag

SEQ ID NO: 37438 - DNA, 13 bp, Artificial Sequence
  Oligonucleotide for detection of SNP TSC0011654
cttatcttttttt

SEQ ID NO: 37439 - DNA, 13 bp, Artificial Sequence
  Oligonucleotide for detection of SNP TSC0011655
tgatggtgtttga

SEQ ID NO: 37440 - DNA, 13 bp, Artificial Sequence
  Oligonucleotide for detection of SNP TSC0011655
tcaaacaccatca

SEQ ID NO: 37441 - DNA, 13 bp, Artificial Sequence
  Oligonucleotide for detection of SNP TSC0011655
tgatggcgtttga

SEQ ID NO: 37442 - DNA, 13 bp, Artificial Sequence
  Oligonucleotide for detection of SNP TSC0011655
tcaaacgccatca

SEQ ID NO: 37443 - DNA, 13 bp, Artificial Sequence
  Oligonucleotide for detection of SNP TSC0011655
ttaagtgttatta

SEQ ID NO: 37444 - DNA, 13 bp, Artificial Sequence
  Oligonucleotide for detection of SNP TSC0011655
taataacacttaa

SEQ ID NO: 37445 - DNA, 13 bp, Artificial Sequence
  Oligonucleotide for detection of SNP TSC0011655
ttaagtattatta

SEQ ID NO: 37446 - DNA, 13 bp, Artificial Sequence
  Oligonucleotide for detection of SNP TSC0011655
taataatacttaa

SEQ ID NO: 37447 - DNA, 13 bp, Artificial Sequence
  Oligonucleotide for detection of SNP TSC0011655
ttaagcgttatta

SEQ ID NO: 37448 - DNA, 13 bp, Artificial Sequence
  Oligonucleotide for detection of SNP TSC0011655
taataacgcttaa

SEQ ID NO: 37449 - DNA, 13 bp, Artificial Sequence
  Oligonucleotide for detection of SNP TSC0011656
tattaggtatttg

SEQ ID NO: 37450 - DNA, 13 bp, Artificial Sequence
  Oligonucleotide for detection of SNP TSC0011656
caaatacctaata

SEQ ID NO: 37451 - DNA, 13 bp, Artificial Sequence
  Oligonucleotide for detection of SNP TSC0011656
tattagatatttg

SEQ ID NO: 37452 - DNA, 13 bp, Artificial Sequence
  Oligonucleotide for detection of SNP TSC0011656
caaatatctaata

SEQ ID NO: 37453 - DNA, 13 bp, Artificial Sequence
  Oligonucleotide for detection of SNP TSC0011660
tagatggaggatg

SEQ ID NO: 37454 - DNA, 13 bp, Artificial Sequence
  Oligonucleotide for detection of SNP TSC0011660
catcctccatcta

SEQ ID NO: 37455 - DNA, 13 bp, Artificial Sequence
  Oligonucleotide for detection of SNP TSC0011660
tagatgaaggatg

SEQ ID NO: 37456 - DNA, 13 bp, Artificial Sequence
  Oligonucleotide for detection of SNP TSC0011660
catccttcatcta

SEQ ID NO: 37457 - DNA, 13 bp, Artificial Sequence
  Oligonucleotide for detection of SNP TSC0011661
agtagatggagga

SEQ ID NO: 37458 - DNA, 13 bp, Artificial Sequence
  Oligonucleotide for detection of SNP TSC0011661
tcctccatctact

SEQ ID NO: 37459 - DNA, 13 bp, Artificial Sequence
  Oligonucleotide for detection of SNP TSC0011661
agtagacggagga

SEQ ID NO: 37460 - DNA, 13 bp, Artificial Sequence
  Oligonucleotide for detection of SNP TSC0011661
tcctccgtctact

SEQ ID NO: 37461 - DNA, 13 bp, Artificial Sequence
  Oligonucleotide for detection of SNP TSC0011662
tatataatagtgy

SEQ ID NO: 37462 - DNA, 13 bp, Artificial Sequence
  Oligonucleotide for detection of SNP TSC0011662
rcactattatata

SEQ ID NO: 37463 - DNA, 13 bp, Artificial Sequence
  Oligonucleotide for detection of SNP TSC0011662
tatatagtagtgy

SEQ ID NO: 37464 - DNA, 13 bp, Artificial Sequence
  Oligonucleotide for detection of SNP TSC0011662
rcactactatata

SEQ ID NO: 37465 - DNA, 13 bp, Artificial Sequence
  Oligonucleotide for detection of SNP TSC0011663
tattttttagggt

SEQ ID NO: 37466 - DNA, 13 bp, Artificial Sequence
  Oligonucleotide for detection of SNP TSC0011663
accctaaaaaata

SEQ ID NO: 37467 - DNA, 13 bp, Artificial Sequence
  Oligonucleotide for detection of SNP TSC0011663
tattttgtagggt

SEQ ID NO: 37468 - DNA, 13 bp, Artificial Sequence
  Oligonucleotide for detection of SNP TSC0011663
accctacaaaata

SEQ ID NO: 37469 - DNA, 13 bp, Artificial Sequence
  Oligonucleotide for detection of SNP TSC0011663
tatttcgtagggt

SEQ ID NO: 37470 - DNA, 13 bp, Artificial Sequence
  Oligonucleotide for detection of SNP TSC0011663
accctacgaaata

SEQ ID NO: 37471 - DNA, 13 bp, Artificial Sequence
  Oligonucleotide for detection of SNP TSC0011663
attttggggggtg

SEQ ID NO: 37472 - DNA, 13 bp, Artificial Sequence
  Oligonucleotide for detection of SNP TSC0011663
caccccccaaaat

SEQ ID NO: 37473 - DNA, 13 bp, Artificial Sequence
  Oligonucleotide for detection of SNP TSC0011663
attttgcggggtg

SEQ ID NO: 37474 - DNA, 13 bp, Artificial Sequence
  Oligonucleotide for detection of SNP TSC0011663
caccccgcaaaat

SEQ ID NO: 37475 - DNA, 13 bp, Artificial Sequence
  Oligonucleotide for detection of SNP TSC0011664
ttttatggtttag

SEQ ID NO: 37476 - DNA, 13 bp, Artificial Sequence
  Oligonucleotide for detection of SNP TSC0011664
ctaaaccataaaa

SEQ ID NO: 37477 - DNA, 13 bp, Artificial Sequence
  Oligonucleotide for detection of SNP TSC0011664
ttttatagtttag

SEQ ID NO: 37478 - DNA, 13 bp, Artificial Sequence
  Oligonucleotide for detection of SNP TSC0011664
ctaaactataaaa

SEQ ID NO: 37479 - DNA, 13 bp, Artificial Sequence
  Oligonucleotide for detection of SNP TSC0011666
aaagatatattta

SEQ ID NO: 37480 - DNA, 13 bp, Artificial Sequence
  Oligonucleotide for detection of SNP TSC0011666
taaatatatcttt

SEQ ID NO: 37481 - DNA, 13 bp, Artificial Sequence
  Oligonucleotide for detection of SNP TSC0011667
tagtggatattay

SEQ ID NO: 37482 - DNA, 13 bp, Artificial Sequence
  Oligonucleotide for detection of SNP TSC0011667
rtaatatccacta

SEQ ID NO: 37483 - DNA, 13 bp, Artificial Sequence
  Oligonucleotide for detection of SNP TSC0011667
tagtgggtattay

SEQ ID NO: 37484 - DNA, 13 bp, Artificial Sequence
  Oligonucleotide for detection of SNP TSC0011667
rtaatacccacta

SEQ ID NO: 37485 - DNA, 13 bp, Artificial Sequence
  Oligonucleotide for detection of SNP TSC0011668
gtgtttattgatt

SEQ ID NO: 37486 - DNA, 13 bp, Artificial Sequence
  Oligonucleotide for detection of SNP TSC0011668
aatcaataaacac

SEQ ID NO: 37487 - DNA, 13 bp, Artificial Sequence
  Oligonucleotide for detection of SNP TSC0011668
gtgtttgttgatt

SEQ ID NO: 37488 - DNA, 13 bp, Artificial Sequence
  Oligonucleotide for detection of SNP TSC0011668
aatcaacaaacac

SEQ ID NO: 37489 - DNA, 13 bp, Artificial Sequence
  Oligonucleotide for detection of SNP TSC0011671
atttttgttgtty

SEQ ID NO: 37490 - DNA, 13 bp, Artificial Sequence
  Oligonucleotide for detection of SNP TSC0011671
raacaacaaaaat

SEQ ID NO: 37491 - DNA, 13 bp, Artificial Sequence
  Oligonucleotide for detection of SNP TSC0011671
atttttattgtty

SEQ ID NO: 37492 - DNA, 13 bp, Artificial Sequence
  Oligonucleotide for detection of SNP TSC0011671
raacaataaaaat

SEQ ID NO: 37493 - DNA, 13 bp, Artificial Sequence
  Oligonucleotide for detection of SNP TSC0011673
ttattgtggagtg

SEQ ID NO: 37494 - DNA, 13 bp, Artificial Sequence
  Oligonucleotide for detection of SNP TSC0011673
cactccacaataa

SEQ ID NO: 37495 - DNA, 13 bp, Artificial Sequence
  Oligonucleotide for detection of SNP TSC0011673
ttattgcggagtg

SEQ ID NO: 37496 - DNA, 13 bp, Artificial Sequence
  Oligonucleotide for detection of SNP TSC0011673
cactccgcaataa

SEQ ID NO: 37497 - DNA, 13 bp, Artificial Sequence
  Oligonucleotide for detection of SNP TSC0011673
tattttgtagtgg

SEQ ID NO: 37498 - DNA, 13 bp, Artificial Sequence
  Oligonucleotide for detection of SNP TSC0011673
ccactacaaaata

SEQ ID NO: 37499 - DNA, 13 bp, Artificial Sequence
  Oligonucleotide for detection of SNP TSC0011673
tattttatagtgg

SEQ ID NO: 37500 - DNA, 13 bp, Artificial Sequence
  Oligonucleotide for detection of SNP TSC0011673
ccactataaaata

SEQ ID NO: 37501 - DNA, 13 bp, Artificial Sequence
  Oligonucleotide for detection of SNP TSC0011673
tatttcgtagtgg

SEQ ID NO: 37502 - DNA, 13 bp, Artificial Sequence
  Oligonucleotide for detection of SNP TSC0011673
ccactacgaaata

SEQ ID NO: 37503 - DNA, 13 bp, Artificial Sequence
  Oligonucleotide for detection of SNP TSC0011676
ttttagatttagy

SEQ ID NO: 37504 - DNA, 13 bp, Artificial Sequence
  Oligonucleotide for detection of SNP TSC0011676
rctaaatctaaaa

SEQ ID NO: 37505 - DNA, 13 bp, Artificial Sequence
  Oligonucleotide for detection of SNP TSC0011676
ttttagttttagy

SEQ ID NO: 37506 - DNA, 13 bp, Artificial Sequence
  Oligonucleotide for detection of SNP TSC0011676
rctaaaactaaaa

SEQ ID NO: 37507 - DNA, 13 bp, Artificial Sequence
  Oligonucleotide for detection of SNP TSC0011676
gttaagtttgagg

SEQ ID NO: 37508 - DNA, 13 bp, Artificial Sequence
  Oligonucleotide for detection of SNP TSC0011676
cctcaaacttaac

SEQ ID NO: 37509 - DNA, 13 bp, Artificial Sequence
  Oligonucleotide for detection of SNP TSC0011676
gttaaggttgagg

SEQ ID NO: 37510 - DNA, 13 bp, Artificial Sequence
  Oligonucleotide for detection of SNP TSC0011676
cctcaaccttaac

SEQ ID NO: 37511 - DNA, 13 bp, Artificial Sequence
  Oligonucleotide for detection of SNP TSC0011680
gttttatggaaaa

SEQ ID NO: 37512 - DNA, 13 bp, Artificial Sequence
  Oligonucleotide for detection of SNP TSC0011680
ttttccataaaac

SEQ ID NO: 37513 - DNA, 13 bp, Artificial Sequence
  Oligonucleotide for detection of SNP TSC0011680
gttttacggaaaa

SEQ ID NO: 37514 - DNA, 13 bp, Artificial Sequence
  Oligonucleotide for detection of SNP TSC0011680
ttttccgtaaaac

SEQ ID NO: 37515 - DNA, 13 bp, Artificial Sequence
  Oligonucleotide for detection of SNP TSC0011680
ttttttgtgagay

SEQ ID NO: 37516 - DNA, 13 bp, Artificial Sequence
  Oligonucleotide for detection of SNP TSC0011680
rtctcacaaaaaa

SEQ ID NO: 37517 - DNA, 13 bp, Artificial Sequence
  Oligonucleotide for detection of SNP TSC0011680
ttttttatgagay

SEQ ID NO: 37518 - DNA, 13 bp, Artificial Sequence
  Oligonucleotide for detection of SNP TSC0011680
rtctcataaaaaa

SEQ ID NO: 37519 - DNA, 13 bp, Artificial Sequence
  Oligonucleotide for detection of SNP TSC0011680
tttttcgtgagay

SEQ ID NO: 37520 - DNA, 13 bp, Artificial Sequence
  Oligonucleotide for detection of SNP TSC0011680
rtctcacgaaaaa

SEQ ID NO: 37521 - DNA, 13 bp, Artificial Sequence
  Oligonucleotide for detection of SNP TSC0011681
atatatataagtg

SEQ ID NO: 37522 - DNA, 13 bp, Artificial Sequence
  Oligonucleotide for detection of SNP TSC0011681
cacttatatatat

SEQ ID NO: 37523 - DNA, 13 bp, Artificial Sequence
  Oligonucleotide for detection of SNP TSC0011681
atatatgtaagtg

SEQ ID NO: 37524 - DNA, 13 bp, Artificial Sequence
  Oligonucleotide for detection of SNP TSC0011681
cacttacatatat

SEQ ID NO: 37525 - DNA, 13 bp, Artificial Sequence
  Oligonucleotide for detection of SNP TSC0011685
ttttttaggttta

SEQ ID NO: 37526 - DNA, 13 bp, Artificial Sequence
  Oligonucleotide for detection of SNP TSC0011685
taaacctaaaaaa

SEQ ID NO: 37527 - DNA, 13 bp, Artificial Sequence
  Oligonucleotide for detection of SNP TSC0011685
ttttttgggttta

SEQ ID NO: 37528 - DNA, 13 bp, Artificial Sequence
  Oligonucleotide for detection of SNP TSC0011685
taaacccaaaaaa

SEQ ID NO: 37529 - DNA, 13 bp, Artificial Sequence
  Oligonucleotide for detection of SNP TSC0011686
tggagtgtggtga

SEQ ID NO: 37530 - DNA, 13 bp, Artificial Sequence
  Oligonucleotide for detection of SNP TSC0011686
tcaccacactcca

SEQ ID NO: 37531 - DNA, 13 bp, Artificial Sequence
  Oligonucleotide for detection of SNP TSC0011686
tggagtatggtga

SEQ ID NO: 37532 - DNA, 13 bp, Artificial Sequence
  Oligonucleotide for detection of SNP TSC0011686
tcaccatactcca

SEQ ID NO: 37533 - DNA, 13 bp, Artificial Sequence
  Oligonucleotide for detection of SNP TSC0011687
agttagtagtggt

SEQ ID NO: 37534 - DNA, 13 bp, Artificial Sequence
  Oligonucleotide for detection of SNP TSC0011687
accactactaact

SEQ ID NO: 37535 - DNA, 13 bp, Artificial Sequence
  Oligonucleotide for detection of SNP TSC0011687
agttagaagtggt

SEQ ID NO: 37536 - DNA, 13 bp, Artificial Sequence
  Oligonucleotide for detection of SNP TSC0011687
accacttctaact

SEQ ID NO: 37537 - DNA, 13 bp, Artificial Sequence
  Oligonucleotide for detection of SNP TSC0011688
tggttaattttgt

SEQ ID NO: 37538 - DNA, 13 bp, Artificial Sequence
  Oligonucleotide for detection of SNP TSC0011688
acaaaattaacca

SEQ ID NO: 37539 - DNA, 13 bp, Artificial Sequence
  Oligonucleotide for detection of SNP TSC0011688
tggttatttttgt

SEQ ID NO: 37540 - DNA, 13 bp, Artificial Sequence
  Oligonucleotide for detection of SNP TSC0011688
acaaaaataacca

SEQ ID NO: 37541 - DNA, 13 bp, Artificial Sequence
  Oligonucleotide for detection of SNP TSC0011688
ataaaattagtta

SEQ ID NO: 37542 - DNA, 13 bp, Artificial Sequence
  Oligonucleotide for detection of SNP TSC0011688
taactaattttat

SEQ ID NO: 37543 - DNA, 13 bp, Artificial Sequence
  Oligonucleotide for detection of SNP TSC0011688
ataaaagtagtta

SEQ ID NO: 37544 - DNA, 13 bp, Artificial Sequence
  Oligonucleotide for detection of SNP TSC0011688
taactacttttat

SEQ ID NO: 37545 - DNA, 13 bp, Artificial Sequence
  Oligonucleotide for detection of SNP TSC0011690
gatattgtttggg

SEQ ID NO: 37546 - DNA, 13 bp, Artificial Sequence
  Oligonucleotide for detection of SNP TSC0011690
cccaaacaatatc

SEQ ID NO: 37547 - DNA, 13 bp, Artificial Sequence
  Oligonucleotide for detection of SNP TSC0011690
gatattatttggg

SEQ ID NO: 37548 - DNA, 13 bp, Artificial Sequence
  Oligonucleotide for detection of SNP TSC0011690
cccaaataatatc

SEQ ID NO: 37549 - DNA, 13 bp, Artificial Sequence
  Oligonucleotide for detection of SNP TSC0011691
tagtggatattta

SEQ ID NO: 37550 - DNA, 13 bp, Artificial Sequence
  Oligonucleotide for detection of SNP TSC0011691
taaatatccacta

SEQ ID NO: 37551 - DNA, 13 bp, Artificial Sequence
  Oligonucleotide for detection of SNP TSC0011691
tagtgggtattta

SEQ ID NO: 37552 - DNA, 13 bp, Artificial Sequence
  Oligonucleotide for detection of SNP TSC0011691
taaatacccacta

SEQ ID NO: 37553 - DNA, 13 bp, Artificial Sequence
  Oligonucleotide for detection of SNP TSC0011692
gtgatttgaatay

SEQ ID NO: 37554 - DNA, 13 bp, Artificial Sequence
  Oligonucleotide for detection of SNP TSC0011692
rtattcaaatcac

SEQ ID NO: 37555 - DNA, 13 bp, Artificial Sequence
  Oligonucleotide for detection of SNP TSC0011692
gtgattcgaatay

SEQ ID NO: 37556 - DNA, 13 bp, Artificial Sequence
  Oligonucleotide for detection of SNP TSC0011692
rtattcgaatcac

SEQ ID NO: 37557 - DNA, 13 bp, Artificial Sequence
  Oligonucleotide for detection of SNP TSC0011692
gtgtttgggttay

SEQ ID NO: 37558 - DNA, 13 bp, Artificial Sequence
  Oligonucleotide for detection of SNP TSC0011692
rtaacccaaacac

SEQ ID NO: 37559 - DNA, 13 bp, Artificial Sequence
  Oligonucleotide for detection of SNP TSC0011692
gtgtttaggttay

SEQ ID NO: 37560 - DNA, 13 bp, Artificial Sequence
  Oligonucleotide for detection of SNP TSC0011692
rtaacctaaacac

SEQ ID NO: 37561 - DNA, 13 bp, Artificial Sequence
  Oligonucleotide for detection of SNP TSC0011692
gtgttcgggttay

SEQ ID NO: 37562 - DNA, 13 bp, Artificial Sequence
  Oligonucleotide for detection of SNP TSC0011692
rtaacccgaacac

SEQ ID NO: 37563 - DNA, 13 bp, Artificial Sequence
  Oligonucleotide for detection of SNP TSC0011693
tataaagatgtta

SEQ ID NO: 37564 - DNA, 13 bp, Artificial Sequence
  Oligonucleotide for detection of SNP TSC0011693
taacatctttata

SEQ ID NO: 37565 - DNA, 13 bp, Artificial Sequence
  Oligonucleotide for detection of SNP TSC0011693
tataaatatgtta

SEQ ID NO: 37566 - DNA, 13 bp, Artificial Sequence
  Oligonucleotide for detection of SNP TSC0011693
taacatatttata

SEQ ID NO: 37567 - DNA, 13 bp, Artificial Sequence
  Oligonucleotide for detection of SNP TSC0011693
taatatttttgtg

SEQ ID NO: 37568 - DNA, 13 bp, Artificial Sequence
  Oligonucleotide for detection of SNP TSC0011693
cacaaaaatatta

SEQ ID NO: 37569 - DNA, 13 bp, Artificial Sequence
  Oligonucleotide for detection of SNP TSC0011693
taatatatttgtg

SEQ ID NO: 37570 - DNA, 13 bp, Artificial Sequence
  Oligonucleotide for detection of SNP TSC0011693
cacaaatatatta

SEQ ID NO: 37571 - DNA, 13 bp, Artificial Sequence
  Oligonucleotide for detection of SNP TSC0011694
gaaagaaaattta

SEQ ID NO: 37572 - DNA, 13 bp, Artificial Sequence
  Oligonucleotide for detection of SNP TSC0011694
taaattttctttc

SEQ ID NO: 37573 - DNA, 13 bp, Artificial Sequence
  Oligonucleotide for detection of SNP TSC0011694
gaaagagaattta

SEQ ID NO: 37574 - DNA, 13 bp, Artificial Sequence
  Oligonucleotide for detection of SNP TSC0011694
taaattctctttc

SEQ ID NO: 37575 - DNA, 13 bp, Artificial Sequence
  Oligonucleotide for detection of SNP TSC0011695
tattaagttttta

SEQ ID NO: 37576 - DNA, 13 bp, Artificial Sequence
  Oligonucleotide for detection of SNP TSC0011695
taaaaacttaata

SEQ ID NO: 37577 - DNA, 13 bp, Artificial Sequence
  Oligonucleotide for detection of SNP TSC0011695
tattaaattttta

SEQ ID NO: 37578 - DNA, 13 bp, Artificial Sequence
  Oligonucleotide for detection of SNP TSC0011695
taaaaatttaata

SEQ ID NO: 37579 - DNA, 13 bp, Artificial Sequence
  Oligonucleotide for detection of SNP TSC0011696
ggtagggagaaag

SEQ ID NO: 37580 - DNA, 13 bp, Artificial Sequence
  Oligonucleotide for detection of SNP TSC0011696
ctttctccctacc

SEQ ID NO: 37581 - DNA, 13 bp, Artificial Sequence
  Oligonucleotide for detection of SNP TSC0011696
ggtaggaagaaag

SEQ ID NO: 37582 - DNA, 13 bp, Artificial Sequence
  Oligonucleotide for detection of SNP TSC0011696
ctttcttcctacc

SEQ ID NO: 37583 - DNA, 13 bp, Artificial Sequence
  Oligonucleotide for detection of SNP TSC0011697
tggggtggaggag

SEQ ID NO: 37584 - DNA, 13 bp, Artificial Sequence
  Oligonucleotide for detection of SNP TSC0011697
ctcctccacccca

SEQ ID NO: 37585 - DNA, 13 bp, Artificial Sequence
  Oligonucleotide for detection of SNP TSC0011697
tggggtagaggag

SEQ ID NO: 37586 - DNA, 13 bp, Artificial Sequence
  Oligonucleotide for detection of SNP TSC0011697
ctcctctacccca

SEQ ID NO: 37587 - DNA, 13 bp, Artificial Sequence
  Oligonucleotide for detection of SNP TSC0011697
tggggcggaggag

SEQ ID NO: 37588 - DNA, 13 bp, Artificial Sequence
  Oligonucleotide for detection of SNP TSC0011697
ctcctccgcccca

SEQ ID NO: 37589 - DNA, 13 bp, Artificial Sequence
  Oligonucleotide for detection of SNP TSC0011699
agatttgttttta

SEQ ID NO: 37590 - DNA, 13 bp, Artificial Sequence
  Oligonucleotide for detection of SNP TSC0011699
taaaaacaaatct

SEQ ID NO: 37591 - DNA, 13 bp, Artificial Sequence
  Oligonucleotide for detection of SNP TSC0011699
agattttttttta

SEQ ID NO: 37592 - DNA, 13 bp, Artificial Sequence
  Oligonucleotide for detection of SNP TSC0011699
taaaaaaaaatct

SEQ ID NO: 37593 - DNA, 13 bp, Artificial Sequence
  Oligonucleotide for detection of SNP TSC0011699
tagaaataaattt

SEQ ID NO: 37594 - DNA, 13 bp, Artificial Sequence
  Oligonucleotide for detection of SNP TSC0011699
aaatttatttcta

SEQ ID NO: 37595 - DNA, 13 bp, Artificial Sequence
  Oligonucleotide for detection of SNP TSC0011699
tagaaaaaaattt

SEQ ID NO: 37596 - DNA, 13 bp, Artificial Sequence
  Oligonucleotide for detection of SNP TSC0011699
aaatttttttcta

SEQ ID NO: 37597 - DNA, 13 bp, Artificial Sequence
  Oligonucleotide for detection of SNP TSC0011700
gtttaggtgattt

SEQ ID NO: 37598 - DNA, 13 bp, Artificial Sequence
  Oligonucleotide for detection of SNP TSC0011700
aaatcacctaaac

SEQ ID NO: 37599 - DNA, 13 bp, Artificial Sequence
  Oligonucleotide for detection of SNP TSC0011700
gtttagatgattt

SEQ ID NO: 37600 - DNA, 13 bp, Artificial Sequence
  Oligonucleotide for detection of SNP TSC0011700
aaatcatctaaac

SEQ ID NO: 37601 - DNA, 13 bp, Artificial Sequence
  Oligonucleotide for detection of SNP TSC0011701
gtatattgggtty

SEQ ID NO: 37602 - DNA, 13 bp, Artificial Sequence
  Oligonucleotide for detection of SNP TSC0011701
raacccaatatac

SEQ ID NO: 37603 - DNA, 13 bp, Artificial Sequence
  Oligonucleotide for detection of SNP TSC0011701
gtatatcgggtty

SEQ ID NO: 37604 - DNA, 13 bp, Artificial Sequence
  Oligonucleotide for detection of SNP TSC0011701
raacccgatatac

SEQ ID NO: 37605 - DNA, 13 bp, Artificial Sequence
  Oligonucleotide for detection of SNP TSC0011701
gagtttggtgtgy

SEQ ID NO: 37606 - DNA, 13 bp, Artificial Sequence
  Oligonucleotide for detection of SNP TSC0011701
rcacaccaaactc

SEQ ID NO: 37607 - DNA, 13 bp, Artificial Sequence
  Oligonucleotide for detection of SNP TSC0011701
gagtttagtgtgy

SEQ ID NO: 37608 - DNA, 13 bp, Artificial Sequence
  Oligonucleotide for detection of SNP TSC0011701
rcacactaaactc

SEQ ID NO: 37609 - DNA, 13 bp, Artificial Sequence
  Oligonucleotide for detection of SNP TSC0011701
gagttcggtgtgy

SEQ ID NO: 37610 - DNA, 13 bp, Artificial Sequence
  Oligonucleotide for detection of SNP TSC0011701
rcacaccgaactc

SEQ ID NO: 37611 - DNA, 13 bp, Artificial Sequence
  Oligonucleotide for detection of SNP TSC0011702
ttttttgtttaga

SEQ ID NO: 37612 - DNA, 13 bp, Artificial Sequence
  Oligonucleotide for detection of SNP TSC0011702
tctaaacaaaaaa

SEQ ID NO: 37613 - DNA, 13 bp, Artificial Sequence
  Oligonucleotide for detection of SNP TSC0011702
ttttttatttaga

SEQ ID NO: 37614 - DNA, 13 bp, Artificial Sequence
  Oligonucleotide for detection of SNP TSC0011702
tctaaataaaaaa

SEQ ID NO: 37615 - DNA, 13 bp, Artificial Sequence
  Oligonucleotide for detection of SNP TSC0011703
agggatgaaatat

SEQ ID NO: 37616 - DNA, 13 bp, Artificial Sequence
  Oligonucleotide for detection of SNP TSC0011703
atatttcatccct

SEQ ID NO: 37617 - DNA, 13 bp, Artificial Sequence
  Oligonucleotide for detection of SNP TSC0011703
agggattaaatat

SEQ ID NO: 37618 - DNA, 13 bp, Artificial Sequence
  Oligonucleotide for detection of SNP TSC0011703
atatttaatccct

SEQ ID NO: 37619 - DNA, 13 bp, Artificial Sequence
  Oligonucleotide for detection of SNP TSC0011703
agggacgaaatat

SEQ ID NO: 37620 - DNA, 13 bp, Artificial Sequence
  Oligonucleotide for detection of SNP TSC0011703
atatttcgtccct

SEQ ID NO: 37621 - DNA, 13 bp, Artificial Sequence
  Oligonucleotide for detection of SNP TSC0011703
atgttttgttttt

SEQ ID NO: 37622 - DNA, 13 bp, Artificial Sequence
  Oligonucleotide for detection of SNP TSC0011703
aaaaacaaaacat

SEQ ID NO: 37623 - DNA, 13 bp, Artificial Sequence
  Oligonucleotide for detection of SNP TSC0011703
atgtttagttttt

SEQ ID NO: 37624 - DNA, 13 bp, Artificial Sequence
  Oligonucleotide for detection of SNP TSC0011703
aaaaactaaacat

SEQ ID NO: 37625 - DNA, 13 bp, Artificial Sequence
  Oligonucleotide for detection of SNP TSC0011703
atgtttcgttttt

SEQ ID NO: 37626 - DNA, 13 bp, Artificial Sequence
  Oligonucleotide for detection of SNP TSC0011703
aaaaacgaaacat

SEQ ID NO: 37627 - DNA, 13 bp, Artificial Sequence
  Oligonucleotide for detection of SNP TSC0011704
atttaagtattta

SEQ ID NO: 37628 - DNA, 13 bp, Artificial Sequence
  Oligonucleotide for detection of SNP TSC0011704
taaatacttaaat

SEQ ID NO: 37629 - DNA, 13 bp, Artificial Sequence
  Oligonucleotide for detection of SNP TSC0011704
atttaaatattta

SEQ ID NO: 37630 - DNA, 13 bp, Artificial Sequence
  Oligonucleotide for detection of SNP TSC0011704
taaatatttaaat

SEQ ID NO: 37631 - DNA, 13 bp, Artificial Sequence
  Oligonucleotide for detection of SNP TSC0011711
ttattatttttta

SEQ ID NO: 37632 - DNA, 13 bp, Artificial Sequence
  Oligonucleotide for detection of SNP TSC0011711
taaaaaataataa

SEQ ID NO: 37633 - DNA, 13 bp, Artificial Sequence
  Oligonucleotide for detection of SNP TSC0011711
tgaagggtaatgg

SEQ ID NO: 37634 - DNA, 13 bp, Artificial Sequence
  Oligonucleotide for detection of SNP TSC0011711
ccattacccttca

SEQ ID NO: 37635 - DNA, 13 bp, Artificial Sequence
  Oligonucleotide for detection of SNP TSC0011711
tgaaggttaatgg

SEQ ID NO: 37636 - DNA, 13 bp, Artificial Sequence
  Oligonucleotide for detection of SNP TSC0011711
ccattaaccttca

SEQ ID NO: 37637 - DNA, 13 bp, Artificial Sequence
  Oligonucleotide for detection of SNP TSC0011712
gggataaggaggy

SEQ ID NO: 37638 - DNA, 13 bp, Artificial Sequence
  Oligonucleotide for detection of SNP TSC0011712
rcctccttatccc

SEQ ID NO: 37639 - DNA, 13 bp, Artificial Sequence
  Oligonucleotide for detection of SNP TSC0011712
gggatagggaggy

SEQ ID NO: 37640 - DNA, 13 bp, Artificial Sequence
  Oligonucleotide for detection of SNP TSC0011712
rcctccctatccc

SEQ ID NO: 37641 - DNA, 13 bp, Artificial Sequence
  Oligonucleotide for detection of SNP TSC0011713
gggaatatttgtt

SEQ ID NO: 37642 - DNA, 13 bp, Artificial Sequence
  Oligonucleotide for detection of SNP TSC0011713
aacaaatattccc

SEQ ID NO: 37643 - DNA, 13 bp, Artificial Sequence
  Oligonucleotide for detection of SNP TSC0011713
gggaatgtttgtt

SEQ ID NO: 37644 - DNA, 13 bp, Artificial Sequence
  Oligonucleotide for detection of SNP TSC0011713
aacaaacattccc

SEQ ID NO: 37645 - DNA, 13 bp, Artificial Sequence
  Oligonucleotide for detection of SNP TSC0011713
gggaacgtttgtt

SEQ ID NO: 37646 - DNA, 13 bp, Artificial Sequence
  Oligonucleotide for detection of SNP TSC0011713
aacaaacgttccc

SEQ ID NO: 37647 - DNA, 13 bp, Artificial Sequence
  Oligonucleotide for detection of SNP TSC0011713
agtaaatgtttty

SEQ ID NO: 37648 - DNA, 13 bp, Artificial Sequence
  Oligonucleotide for detection of SNP TSC0011713
raaaacatttact

SEQ ID NO: 37649 - DNA, 13 bp, Artificial Sequence
  Oligonucleotide for detection of SNP TSC0011713
agtaaacgtttty

SEQ ID NO: 37650 - DNA, 13 bp, Artificial Sequence
  Oligonucleotide for detection of SNP TSC0011713
raaaacgtttact

SEQ ID NO: 37651 - DNA, 13 bp, Artificial Sequence
  Oligonucleotide for detection of SNP TSC0011714
agagtggaatggg

SEQ ID NO: 37652 - DNA, 13 bp, Artificial Sequence
  Oligonucleotide for detection of SNP TSC0011714
cccattccactct

SEQ ID NO: 37653 - DNA, 13 bp, Artificial Sequence
  Oligonucleotide for detection of SNP TSC0011714
agagtgaaatggg

SEQ ID NO: 37654 - DNA, 13 bp, Artificial Sequence
  Oligonucleotide for detection of SNP TSC0011714
cccatttcactct

SEQ ID NO: 37655 - DNA, 13 bp, Artificial Sequence
  Oligonucleotide for detection of SNP TSC0011715
atgtggttgttty

SEQ ID NO: 37656 - DNA, 13 bp, Artificial Sequence
  Oligonucleotide for detection of SNP TSC0011715
raaacaaccacat

SEQ ID NO: 37657 - DNA, 13 bp, Artificial Sequence
  Oligonucleotide for detection of SNP TSC0011715
atgtgggtgttty

SEQ ID NO: 37658 - DNA, 13 bp, Artificial Sequence
  Oligonucleotide for detection of SNP TSC0011715
raaacacccacat

SEQ ID NO: 37659 - DNA, 13 bp, Artificial Sequence
  Oligonucleotide for detection of SNP TSC0011715
acgtggttgttty

SEQ ID NO: 37660 - DNA, 13 bp, Artificial Sequence
  Oligonucleotide for detection of SNP TSC0011715
raaacaaccacgt

SEQ ID NO: 37661 - DNA, 13 bp, Artificial Sequence
  Oligonucleotide for detection of SNP TSC0011715
acgtgggtgttty

SEQ ID NO: 37662 - DNA, 13 bp, Artificial Sequence
  Oligonucleotide for detection of SNP TSC0011715
raaacacccacgt

SEQ ID NO: 37663 - DNA, 13 bp, Artificial Sequence
  Oligonucleotide for detection of SNP TSC0011715
gaggtagttatgt

SEQ ID NO: 37664 - DNA, 13 bp, Artificial Sequence
  Oligonucleotide for detection of SNP TSC0011715
acataactacctc

SEQ ID NO: 37665 - DNA, 13 bp, Artificial Sequence
  Oligonucleotide for detection of SNP TSC0011715
gaggtatttatgt

SEQ ID NO: 37666 - DNA, 13 bp, Artificial Sequence
  Oligonucleotide for detection of SNP TSC0011715
acataaatacctc

SEQ ID NO: 37667 - DNA, 13 bp, Artificial Sequence
  Oligonucleotide for detection of SNP TSC0011715
gaggtagttacgt

SEQ ID NO: 37668 - DNA, 13 bp, Artificial Sequence
  Oligonucleotide for detection of SNP TSC0011715
acgtaactacctc

SEQ ID NO: 37669 - DNA, 13 bp, Artificial Sequence
  Oligonucleotide for detection of SNP TSC0011715
gaggtatttacgt

SEQ ID NO: 37670 - DNA, 13 bp, Artificial Sequence
  Oligonucleotide for detection of SNP TSC0011715
acgtaaatacctc

SEQ ID NO: 37671 - DNA, 13 bp, Artificial Sequence
  Oligonucleotide for detection of SNP TSC0011716
gagtaggggttgg

SEQ ID NO: 37672 - DNA, 13 bp, Artificial Sequence
  Oligonucleotide for detection of SNP TSC0011716
ccaacccctactc

SEQ ID NO: 37673 - DNA, 13 bp, Artificial Sequence
  Oligonucleotide for detection of SNP TSC0011716
gagtagaggttgg

SEQ ID NO: 37674 - DNA, 13 bp, Artificial Sequence
  Oligonucleotide for detection of SNP TSC0011716
ccaacctctactc

SEQ ID NO: 37675 - DNA, 13 bp, Artificial Sequence
  Oligonucleotide for detection of SNP TSC0011717
taggtttgtgatg

SEQ ID NO: 37676 - DNA, 13 bp, Artificial Sequence
  Oligonucleotide for detection of SNP TSC0011717
catcacaaaccta

SEQ ID NO: 37677 - DNA, 13 bp, Artificial Sequence
  Oligonucleotide for detection of SNP TSC0011717
taggttcgtgatg

SEQ ID NO: 37678 - DNA, 13 bp, Artificial Sequence
  Oligonucleotide for detection of SNP TSC0011717
catcacgaaccta

SEQ ID NO: 37679 - DNA, 13 bp, Artificial Sequence
  Oligonucleotide for detection of SNP TSC0011717
tattatgggtttg

SEQ ID NO: 37680 - DNA, 13 bp, Artificial Sequence
  Oligonucleotide for detection of SNP TSC0011717
caaacccataata

SEQ ID NO: 37681 - DNA, 13 bp, Artificial Sequence
  Oligonucleotide for detection of SNP TSC0011717
tattataggtttg

SEQ ID NO: 37682 - DNA, 13 bp, Artificial Sequence
  Oligonucleotide for detection of SNP TSC0011717
caaacctataata

SEQ ID NO: 37683 - DNA, 13 bp, Artificial Sequence
  Oligonucleotide for detection of SNP TSC0011717
tattacgggtttg

SEQ ID NO: 37684 - DNA, 13 bp, Artificial Sequence
  Oligonucleotide for detection of SNP TSC0011717
caaacccgtaata

SEQ ID NO: 37685 - DNA, 13 bp, Artificial Sequence
  Oligonucleotide for detection of SNP TSC0011718
aataaataagtaa

SEQ ID NO: 37686 - DNA, 13 bp, Artificial Sequence
  Oligonucleotide for detection of SNP TSC0011718
ttacttatttatt

SEQ ID NO: 37687 - DNA, 13 bp, Artificial Sequence
  Oligonucleotide for detection of SNP TSC0011718
aataaagaagtaa

SEQ ID NO: 37688 - DNA, 13 bp, Artificial Sequence
  Oligonucleotide for detection of SNP TSC0011718
ttacttctttatt

SEQ ID NO: 37689 - DNA, 13 bp, Artificial Sequence
  Oligonucleotide for detection of SNP TSC0011721
tgtaaaatatttt

SEQ ID NO: 37690 - DNA, 13 bp, Artificial Sequence
  Oligonucleotide for detection of SNP TSC0011721
aaaatattttaca

SEQ ID NO: 37691 - DNA, 13 bp, Artificial Sequence
  Oligonucleotide for detection of SNP TSC0011721
tgtaaattatttt

SEQ ID NO: 37692 - DNA, 13 bp, Artificial Sequence
  Oligonucleotide for detection of SNP TSC0011721
aaaataatttaca

SEQ ID NO: 37693 - DNA, 13 bp, Artificial Sequence
  Oligonucleotide for detection of SNP TSC0011721
aagatattttgta

SEQ ID NO: 37694 - DNA, 13 bp, Artificial Sequence
  Oligonucleotide for detection of SNP TSC0011721
tacaaaatatctt

SEQ ID NO: 37695 - DNA, 13 bp, Artificial Sequence
  Oligonucleotide for detection of SNP TSC0011721
aagataatttgta

SEQ ID NO: 37696 - DNA, 13 bp, Artificial Sequence
  Oligonucleotide for detection of SNP TSC0011721
tacaaattatctt

SEQ ID NO: 37697 - DNA, 13 bp, Artificial Sequence
  Oligonucleotide for detection of SNP TSC0011725
tttaggaggttga

SEQ ID NO: 37698 - DNA, 13 bp, Artificial Sequence
  Oligonucleotide for detection of SNP TSC0011725
tcaacctcctaaa

SEQ ID NO: 37699 - DNA, 13 bp, Artificial Sequence
  Oligonucleotide for detection of SNP TSC0011725
tttaggtggttga

SEQ ID NO: 37700 - DNA, 13 bp, Artificial Sequence
  Oligonucleotide for detection of SNP TSC0011725
tcaaccacctaaa

SEQ ID NO: 37701 - DNA, 13 bp, Artificial Sequence
  Oligonucleotide for detection of SNP TSC0011725
ttaattttttggg

SEQ ID NO: 37702 - DNA, 13 bp, Artificial Sequence
  Oligonucleotide for detection of SNP TSC0011725
cccaaaaaattaa

SEQ ID NO: 37703 - DNA, 13 bp, Artificial Sequence
  Oligonucleotide for detection of SNP TSC0011725
ttaattatttggg

SEQ ID NO: 37704 - DNA, 13 bp, Artificial Sequence
  Oligonucleotide for detection of SNP TSC0011725
cccaaataattaa

SEQ ID NO: 37705 - DNA, 13 bp, Artificial Sequence
  Oligonucleotide for detection of SNP TSC0011732
tgtaagtaataga

SEQ ID NO: 37706 - DNA, 13 bp, Artificial Sequence
  Oligonucleotide for detection of SNP TSC0011732
tctattacttaca

SEQ ID NO: 37707 - DNA, 13 bp, Artificial Sequence
  Oligonucleotide for detection of SNP TSC0011732
tgtaaggaataga

SEQ ID NO: 37708 - DNA, 13 bp, Artificial Sequence
  Oligonucleotide for detection of SNP TSC0011732
tctattccttaca

SEQ ID NO: 37709 - DNA, 13 bp, Artificial Sequence
  Oligonucleotide for detection of SNP TSC0011732
tttgttgtttgta

SEQ ID NO: 37710 - DNA, 13 bp, Artificial Sequence
  Oligonucleotide for detection of SNP TSC0011732
tacaaacaacaaa

SEQ ID NO: 37711 - DNA, 13 bp, Artificial Sequence
  Oligonucleotide for detection of SNP TSC0011732
tttgttttttgta

SEQ ID NO: 37712 - DNA, 13 bp, Artificial Sequence
  Oligonucleotide for detection of SNP TSC0011732
tacaaaaaacaaa

SEQ ID NO: 37713 - DNA, 13 bp, Artificial Sequence
  Oligonucleotide for detection of SNP TSC0011733
tatatgagaattt

SEQ ID NO: 37714 - DNA, 13 bp, Artificial Sequence
  Oligonucleotide for detection of SNP TSC0011733
aaattctcatata

SEQ ID NO: 37715 - DNA, 13 bp, Artificial Sequence
  Oligonucleotide for detection of SNP TSC0011733
tatatgggaattt

SEQ ID NO: 37716 - DNA, 13 bp, Artificial Sequence
  Oligonucleotide for detection of SNP TSC0011733
aaattcccatata

SEQ ID NO: 37717 - DNA, 13 bp, Artificial Sequence
  Oligonucleotide for detection of SNP TSC0011734
taaaatgaaaaag

SEQ ID NO: 37718 - DNA, 13 bp, Artificial Sequence
  Oligonucleotide for detection of SNP TSC0011734
ctttttcatttta

SEQ ID NO: 37719 - DNA, 13 bp, Artificial Sequence
  Oligonucleotide for detection of SNP TSC0011734
taaaataaaaaag

SEQ ID NO: 37720 - DNA, 13 bp, Artificial Sequence
  Oligonucleotide for detection of SNP TSC0011734
cttttttatttta

SEQ ID NO: 37721 - DNA, 13 bp, Artificial Sequence
  Oligonucleotide for detection of SNP TSC0011734
taaaacgaaaaag

SEQ ID NO: 37722 - DNA, 13 bp, Artificial Sequence
  Oligonucleotide for detection of SNP TSC0011734
ctttttcgtttta

SEQ ID NO: 37723 - DNA, 13 bp, Artificial Sequence
  Oligonucleotide for detection of SNP TSC0011735
tttatatgtgtgt

SEQ ID NO: 37724 - DNA, 13 bp, Artificial Sequence
  Oligonucleotide for detection of SNP TSC0011735
acacacatataaa

SEQ ID NO: 37725 - DNA, 13 bp, Artificial Sequence
  Oligonucleotide for detection of SNP TSC0011735
tttatacgtgtgt

SEQ ID NO: 37726 - DNA, 13 bp, Artificial Sequence
  Oligonucleotide for detection of SNP TSC0011735
acacacgtataaa

SEQ ID NO: 37727 - DNA, 13 bp, Artificial Sequence
  Oligonucleotide for detection of SNP TSC0011735
tttatatgcgtgt

SEQ ID NO: 37728 - DNA, 13 bp, Artificial Sequence
  Oligonucleotide for detection of SNP TSC0011735
acacgcatataaa

SEQ ID NO: 37729 - DNA, 13 bp, Artificial Sequence
  Oligonucleotide for detection of SNP TSC0011735
tttatacgcgtgt

SEQ ID NO: 37730 - DNA, 13 bp, Artificial Sequence
  Oligonucleotide for detection of SNP TSC0011735
acacgcgtataaa

SEQ ID NO: 37731 - DNA, 13 bp, Artificial Sequence
  Oligonucleotide for detection of SNP TSC0011735
atatgtgtatagg

SEQ ID NO: 37732 - DNA, 13 bp, Artificial Sequence
  Oligonucleotide for detection of SNP TSC0011735
cctatacacatat

SEQ ID NO: 37733 - DNA, 13 bp, Artificial Sequence
  Oligonucleotide for detection of SNP TSC0011735
atatgtatatagg

SEQ ID NO: 37734 - DNA, 13 bp, Artificial Sequence
  Oligonucleotide for detection of SNP TSC0011735
cctatatacatat

SEQ ID NO: 37735 - DNA, 13 bp, Artificial Sequence
  Oligonucleotide for detection of SNP TSC0011735
atacgtgtatagg

SEQ ID NO: 37736 - DNA, 13 bp, Artificial Sequence
  Oligonucleotide for detection of SNP TSC0011735
cctatacacgtat

SEQ ID NO: 37737 - DNA, 13 bp, Artificial Sequence
  Oligonucleotide for detection of SNP TSC0011735
atacgtatatagg

SEQ ID NO: 37738 - DNA, 13 bp, Artificial Sequence
  Oligonucleotide for detection of SNP TSC0011735
cctatatacgtat

SEQ ID NO: 37739 - DNA, 13 bp, Artificial Sequence
  Oligonucleotide for detection of SNP TSC0011735
atatgcgtatagg

SEQ ID NO: 37740 - DNA, 13 bp, Artificial Sequence
  Oligonucleotide for detection of SNP TSC0011735
cctatacgcatat

SEQ ID NO: 37741 - DNA, 13 bp, Artificial Sequence
  Oligonucleotide for detection of SNP TSC0011735
atacgcgtatagg

SEQ ID NO: 37742 - DNA, 13 bp, Artificial Sequence
  Oligonucleotide for detection of SNP TSC0011735
cctatacgcgtat

SEQ ID NO: 37743 - DNA, 13 bp, Artificial Sequence
  Oligonucleotide for detection of SNP TSC0011737
tttgggatagaat

SEQ ID NO: 37744 - DNA, 13 bp, Artificial Sequence
  Oligonucleotide for detection of SNP TSC0011737
attctatcccaaa

SEQ ID NO: 37745 - DNA, 13 bp, Artificial Sequence
  Oligonucleotide for detection of SNP TSC0011737
tttggggtagaat

SEQ ID NO: 37746 - DNA, 13 bp, Artificial Sequence
  Oligonucleotide for detection of SNP TSC0011737
attctaccccaaa

SEQ ID NO: 37747 - DNA, 13 bp, Artificial Sequence
  Oligonucleotide for detection of SNP TSC0011738
gtagttgtttgta

SEQ ID NO: 37748 - DNA, 13 bp, Artificial Sequence
  Oligonucleotide for detection of SNP TSC0011738
tacaaacaactac

SEQ ID NO: 37749 - DNA, 13 bp, Artificial Sequence
  Oligonucleotide for detection of SNP TSC0011738
gtagttatttgta

SEQ ID NO: 37750 - DNA, 13 bp, Artificial Sequence
  Oligonucleotide for detection of SNP TSC0011738
tacaaataactac

SEQ ID NO: 37751 - DNA, 13 bp, Artificial Sequence
  Oligonucleotide for detection of SNP TSC0011739
aaataagtatttt

SEQ ID NO: 37752 - DNA, 13 bp, Artificial Sequence
  Oligonucleotide for detection of SNP TSC0011739
aaaatacttattt

SEQ ID NO: 37753 - DNA, 13 bp, Artificial Sequence
  Oligonucleotide for detection of SNP TSC0011739
aaataaatatttt

SEQ ID NO: 37754 - DNA, 13 bp, Artificial Sequence
  Oligonucleotide for detection of SNP TSC0011739
aaaatatttattt

SEQ ID NO: 37755 - DNA, 13 bp, Artificial Sequence
  Oligonucleotide for detection of SNP TSC0011740
ggagttgggtagy

SEQ ID NO: 37756 - DNA, 13 bp, Artificial Sequence
  Oligonucleotide for detection of SNP TSC0011740
rctacccaactcc

SEQ ID NO: 37757 - DNA, 13 bp, Artificial Sequence
  Oligonucleotide for detection of SNP TSC0011740
ggagtttggtagy

SEQ ID NO: 37758 - DNA, 13 bp, Artificial Sequence
  Oligonucleotide for detection of SNP TSC0011740
rctaccaaactcc

SEQ ID NO: 37759 - DNA, 13 bp, Artificial Sequence
  Oligonucleotide for detection of SNP TSC0011740
ggagtcgggtagy

SEQ ID NO: 37760 - DNA, 13 bp, Artificial Sequence
  Oligonucleotide for detection of SNP TSC0011740
rctacccgactcc

SEQ ID NO: 37761 - DNA, 13 bp, Artificial Sequence
  Oligonucleotide for detection of SNP TSC0011740
gttgtttggttty

SEQ ID NO: 37762 - DNA, 13 bp, Artificial Sequence
  Oligonucleotide for detection of SNP TSC0011740
raaaccaaacaac

SEQ ID NO: 37763 - DNA, 13 bp, Artificial Sequence
  Oligonucleotide for detection of SNP TSC0011740
gttgttaggttty

SEQ ID NO: 37764 - DNA, 13 bp, Artificial Sequence
  Oligonucleotide for detection of SNP TSC0011740
raaacctaacaac

SEQ ID NO: 37765 - DNA, 13 bp, Artificial Sequence
  Oligonucleotide for detection of SNP TSC0011740
gttgttcggttty

SEQ ID NO: 37766 - DNA, 13 bp, Artificial Sequence
  Oligonucleotide for detection of SNP TSC0011740
raaaccgaacaac

SEQ ID NO: 37767 - DNA, 13 bp, Artificial Sequence
  Oligonucleotide for detection of SNP TSC0011741
tttgttattgtta

SEQ ID NO: 37768 - DNA, 13 bp, Artificial Sequence
  Oligonucleotide for detection of SNP TSC0011741
taacaataacaaa

SEQ ID NO: 37769 - DNA, 13 bp, Artificial Sequence
  Oligonucleotide for detection of SNP TSC0011741
tttgttgttgtta

SEQ ID NO: 37770 - DNA, 13 bp, Artificial Sequence
  Oligonucleotide for detection of SNP TSC0011741
taacaacaacaaa

SEQ ID NO: 37771 - DNA, 13 bp, Artificial Sequence
  Oligonucleotide for detection of SNP TSC0011741
tttgtcgttgtta

SEQ ID NO: 37772 - DNA, 13 bp, Artificial Sequence
  Oligonucleotide for detection of SNP TSC0011741
taacaacgacaaa

SEQ ID NO: 37773 - DNA, 13 bp, Artificial Sequence
  Oligonucleotide for detection of SNP TSC0011741
taataatggtaaa

SEQ ID NO: 37774 - DNA, 13 bp, Artificial Sequence
  Oligonucleotide for detection of SNP TSC0011741
tttaccattatta

SEQ ID NO: 37775 - DNA, 13 bp, Artificial Sequence
  Oligonucleotide for detection of SNP TSC0011741
taataacggtaaa

SEQ ID NO: 37776 - DNA, 13 bp, Artificial Sequence
  Oligonucleotide for detection of SNP TSC0011741
tttaccgttatta

SEQ ID NO: 37777 - DNA, 13 bp, Artificial Sequence
  Oligonucleotide for detection of SNP TSC0011742
ttatgtagagagy

SEQ ID NO: 37778 - DNA, 13 bp, Artificial Sequence
  Oligonucleotide for detection of SNP TSC0011742
rctctctacataa

SEQ ID NO: 37779 - DNA, 13 bp, Artificial Sequence
  Oligonucleotide for detection of SNP TSC0011742
ttatgtggagagy

SEQ ID NO: 37780 - DNA, 13 bp, Artificial Sequence
  Oligonucleotide for detection of SNP TSC0011742
rctctccacataa

SEQ ID NO: 37781 - DNA, 13 bp, Artificial Sequence
  Oligonucleotide for detection of SNP TSC0011742
ttatgcggagagy

SEQ ID NO: 37782 - DNA, 13 bp, Artificial Sequence
  Oligonucleotide for detection of SNP TSC0011742
rctctccgcataa

SEQ ID NO: 37783 - DNA, 13 bp, Artificial Sequence
  Oligonucleotide for detection of SNP TSC0011742
gttttttgtataa

SEQ ID NO: 37784 - DNA, 13 bp, Artificial Sequence
  Oligonucleotide for detection of SNP TSC0011742
ttatacaaaaaac

SEQ ID NO: 37785 - DNA, 13 bp, Artificial Sequence
  Oligonucleotide for detection of SNP TSC0011742
gtttttcgtataa

SEQ ID NO: 37786 - DNA, 13 bp, Artificial Sequence
  Oligonucleotide for detection of SNP TSC0011742
ttatacgaaaaac

SEQ ID NO: 37787 - DNA, 13 bp, Artificial Sequence
  Oligonucleotide for detection of SNP TSC0011743
gtaaatgaataaa

SEQ ID NO: 37788 - DNA, 13 bp, Artificial Sequence
  Oligonucleotide for detection of SNP TSC0011743
tttattcatttac

SEQ ID NO: 37789 - DNA, 13 bp, Artificial Sequence
  Oligonucleotide for detection of SNP TSC0011743
gtaaataaataaa

SEQ ID NO: 37790 - DNA, 13 bp, Artificial Sequence
  Oligonucleotide for detection of SNP TSC0011743
tttatttatttac

SEQ ID NO: 37791 - DNA, 13 bp, Artificial Sequence
  Oligonucleotide for detection of SNP TSC0011744
ttttttttagttt

SEQ ID NO: 37792 - DNA, 13 bp, Artificial Sequence
  Oligonucleotide for detection of SNP TSC0011744
aaactaaaaaaaa

SEQ ID NO: 37793 - DNA, 13 bp, Artificial Sequence
  Oligonucleotide for detection of SNP TSC0011744
aggttggagaaga

SEQ ID NO: 37794 - DNA, 13 bp, Artificial Sequence
  Oligonucleotide for detection of SNP TSC0011744
tcttctccaacct

SEQ ID NO: 37795 - DNA, 13 bp, Artificial Sequence
  Oligonucleotide for detection of SNP TSC0011744
aggttgtagaaga

SEQ ID NO: 37796 - DNA, 13 bp, Artificial Sequence
  Oligonucleotide for detection of SNP TSC0011744
tcttctacaacct

SEQ ID NO: 37797 - DNA, 13 bp, Artificial Sequence
  Oligonucleotide for detection of SNP TSC0011745
ttgatggttgtgt

SEQ ID NO: 37798 - DNA, 13 bp, Artificial Sequence
  Oligonucleotide for detection of SNP TSC0011745
acacaaccatcaa

SEQ ID NO: 37799 - DNA, 13 bp, Artificial Sequence
  Oligonucleotide for detection of SNP TSC0011745
ttgatgattgtgt

SEQ ID NO: 37800 - DNA, 13 bp, Artificial Sequence
  Oligonucleotide for detection of SNP TSC0011745
acacaatcatcaa

SEQ ID NO: 37801 - DNA, 13 bp, Artificial Sequence
  Oligonucleotide for detection of SNP TSC0011745
ttgacggttgtgt

SEQ ID NO: 37802 - DNA, 13 bp, Artificial Sequence
  Oligonucleotide for detection of SNP TSC0011745
acacaaccgtcaa

SEQ ID NO: 37803 - DNA, 13 bp, Artificial Sequence
  Oligonucleotide for detection of SNP TSC0011745
ttgacgattgtgt

SEQ ID NO: 37804 - DNA, 13 bp, Artificial Sequence
  Oligonucleotide for detection of SNP TSC0011745
acacaatcgtcaa

SEQ ID NO: 37805 - DNA, 13 bp, Artificial Sequence
  Oligonucleotide for detection of SNP TSC0011745
ttgatggtcgtgt

SEQ ID NO: 37806 - DNA, 13 bp, Artificial Sequence
  Oligonucleotide for detection of SNP TSC0011745
acacgaccatcaa

SEQ ID NO: 37807 - DNA, 13 bp, Artificial Sequence
  Oligonucleotide for detection of SNP TSC0011745
ttgatgatcgtgt

SEQ ID NO: 37808 - DNA, 13 bp, Artificial Sequence
  Oligonucleotide for detection of SNP TSC0011745
acacgatcatcaa

SEQ ID NO: 37809 - DNA, 13 bp, Artificial Sequence
  Oligonucleotide for detection of SNP TSC0011745
ttgacggtcgtgt

SEQ ID NO: 37810 - DNA, 13 bp, Artificial Sequence
  Oligonucleotide for detection of SNP TSC0011745
acacgaccgtcaa

SEQ ID NO: 37811 - DNA, 13 bp, Artificial Sequence
  Oligonucleotide for detection of SNP TSC0011745
ttgacgatcgtgt

SEQ ID NO: 37812 - DNA, 13 bp, Artificial Sequence
  Oligonucleotide for detection of SNP TSC0011745
acacgatcgtcaa

SEQ ID NO: 37813 - DNA, 13 bp, Artificial Sequence
  Oligonucleotide for detection of SNP TSC0011746
atggagtggggty

SEQ ID NO: 37814 - DNA, 13 bp, Artificial Sequence
  Oligonucleotide for detection of SNP TSC0011746
raccccactccat

SEQ ID NO: 37815 - DNA, 13 bp, Artificial Sequence
  Oligonucleotide for detection of SNP TSC0011746
atggagcggggty

SEQ ID NO: 37816 - DNA, 13 bp, Artificial Sequence
  Oligonucleotide for detection of SNP TSC0011746
raccccgctccat

SEQ ID NO: 37817 - DNA, 13 bp, Artificial Sequence
  Oligonucleotide for detection of SNP TSC0011747
tattttatttgga

SEQ ID NO: 37818 - DNA, 13 bp, Artificial Sequence
  Oligonucleotide for detection of SNP TSC0011747
tccaaataaaata

SEQ ID NO: 37819 - DNA, 13 bp, Artificial Sequence
  Oligonucleotide for detection of SNP TSC0011747
tttagatggagtg

SEQ ID NO: 37820 - DNA, 13 bp, Artificial Sequence
  Oligonucleotide for detection of SNP TSC0011747
cactccatctaaa

SEQ ID NO: 37821 - DNA, 13 bp, Artificial Sequence
  Oligonucleotide for detection of SNP TSC0011747
tttagagggagtg

SEQ ID NO: 37822 - DNA, 13 bp, Artificial Sequence
  Oligonucleotide for detection of SNP TSC0011747
cactccctctaaa

SEQ ID NO: 37823 - DNA, 13 bp, Artificial Sequence
  Oligonucleotide for detection of SNP TSC0011748
ttttgaagtttgt

SEQ ID NO: 37824 - DNA, 13 bp, Artificial Sequence
  Oligonucleotide for detection of SNP TSC0011748
acaaacttcaaaa

SEQ ID NO: 37825 - DNA, 13 bp, Artificial Sequence
  Oligonucleotide for detection of SNP TSC0011748
ttttgaggtttgt

SEQ ID NO: 37826 - DNA, 13 bp, Artificial Sequence
  Oligonucleotide for detection of SNP TSC0011748
acaaacctcaaaa

SEQ ID NO: 37827 - DNA, 13 bp, Artificial Sequence
  Oligonucleotide for detection of SNP TSC0011748
tttcgaagtttgt

SEQ ID NO: 37828 - DNA, 13 bp, Artificial Sequence
  Oligonucleotide for detection of SNP TSC0011748
acaaacttcgaaa

SEQ ID NO: 37829 - DNA, 13 bp, Artificial Sequence
  Oligonucleotide for detection of SNP TSC0011748
tttcgaggtttgt

SEQ ID NO: 37830 - DNA, 13 bp, Artificial Sequence
  Oligonucleotide for detection of SNP TSC0011748
acaaacctcgaaa

SEQ ID NO: 37831 - DNA, 13 bp, Artificial Sequence
  Oligonucleotide for detection of SNP TSC0011748
ttttgaagttcgt

SEQ ID NO: 37832 - DNA, 13 bp, Artificial Sequence
  Oligonucleotide for detection of SNP TSC0011748
acgaacttcaaaa

SEQ ID NO: 37833 - DNA, 13 bp, Artificial Sequence
  Oligonucleotide for detection of SNP TSC0011748
ttttgaggttcgt

SEQ ID NO: 37834 - DNA, 13 bp, Artificial Sequence
  Oligonucleotide for detection of SNP TSC0011748
acgaacctcaaaa

SEQ ID NO: 37835 - DNA, 13 bp, Artificial Sequence
  Oligonucleotide for detection of SNP TSC0011748
tttcgaagttcgt

SEQ ID NO: 37836 - DNA, 13 bp, Artificial Sequence
  Oligonucleotide for detection of SNP TSC0011748
acgaacttcgaaa

SEQ ID NO: 37837 - DNA, 13 bp, Artificial Sequence
  Oligonucleotide for detection of SNP TSC0011748
tttcgaggttcgt

SEQ ID NO: 37838 - DNA, 13 bp, Artificial Sequence
  Oligonucleotide for detection of SNP TSC0011748
acgaacctcgaaa

SEQ ID NO: 37839 - DNA, 13 bp, Artificial Sequence
  Oligonucleotide for detection of SNP TSC0011749
tatgaaggggagt

SEQ ID NO: 37840 - DNA, 13 bp, Artificial Sequence
  Oligonucleotide for detection of SNP TSC0011749
actccccttcata

SEQ ID NO: 37841 - DNA, 13 bp, Artificial Sequence
  Oligonucleotide for detection of SNP TSC0011749
tatgaatgggagt

SEQ ID NO: 37842 - DNA, 13 bp, Artificial Sequence
  Oligonucleotide for detection of SNP TSC0011749
actcccattcata

SEQ ID NO: 37843 - DNA, 13 bp, Artificial Sequence
  Oligonucleotide for detection of SNP TSC0011749
atttttttttatg

SEQ ID NO: 37844 - DNA, 13 bp, Artificial Sequence
  Oligonucleotide for detection of SNP TSC0011749
cataaaaaaaaat

SEQ ID NO: 37845 - DNA, 13 bp, Artificial Sequence
  Oligonucleotide for detection of SNP TSC0011749
atttttatttatg

SEQ ID NO: 37846 - DNA, 13 bp, Artificial Sequence
  Oligonucleotide for detection of SNP TSC0011749
cataaataaaaat

SEQ ID NO: 37847 - DNA, 13 bp, Artificial Sequence
  Oligonucleotide for detection of SNP TSC0011750
tataggtgtttay

SEQ ID NO: 37848 - DNA, 13 bp, Artificial Sequence
  Oligonucleotide for detection of SNP TSC0011750
rtaaacacctata

SEQ ID NO: 37849 - DNA, 13 bp, Artificial Sequence
  Oligonucleotide for detection of SNP TSC0011750
tataggcgtttay

SEQ ID NO: 37850 - DNA, 13 bp, Artificial Sequence
  Oligonucleotide for detection of SNP TSC0011750
rtaaacgcctata

SEQ ID NO: 37851 - DNA, 13 bp, Artificial Sequence
  Oligonucleotide for detection of SNP TSC0011751
atattggaagaat

SEQ ID NO: 37852 - DNA, 13 bp, Artificial Sequence
  Oligonucleotide for detection of SNP TSC0011751
attcttccaatat

SEQ ID NO: 37853 - DNA, 13 bp, Artificial Sequence
  Oligonucleotide for detection of SNP TSC0011751
atattgaaagaat

SEQ ID NO: 37854 - DNA, 13 bp, Artificial Sequence
  Oligonucleotide for detection of SNP TSC0011751
attctttcaatat

SEQ ID NO: 37855 - DNA, 13 bp, Artificial Sequence
  Oligonucleotide for detection of SNP TSC0011755
aaaatagggagtg

SEQ ID NO: 37856 - DNA, 13 bp, Artificial Sequence
  Oligonucleotide for detection of SNP TSC0011755
cactccctatttt

SEQ ID NO: 37857 - DNA, 13 bp, Artificial Sequence
  Oligonucleotide for detection of SNP TSC0011755
aaaataaggagtg

SEQ ID NO: 37858 - DNA, 13 bp, Artificial Sequence
  Oligonucleotide for detection of SNP TSC0011755
cactccttatttt

SEQ ID NO: 37859 - DNA, 13 bp, Artificial Sequence
  Oligonucleotide for detection of SNP TSC0011756
tattttatatgta

SEQ ID NO: 37860 - DNA, 13 bp, Artificial Sequence
  Oligonucleotide for detection of SNP TSC0011756
tacatataaaata

SEQ ID NO: 37861 - DNA, 13 bp, Artificial Sequence
  Oligonucleotide for detection of SNP TSC0011756
tattttttatgta

SEQ ID NO: 37862 - DNA, 13 bp, Artificial Sequence
  Oligonucleotide for detection of SNP TSC0011756
tacataaaaaata

SEQ ID NO: 37863 - DNA, 13 bp, Artificial Sequence
  Oligonucleotide for detection of SNP TSC0011756
tatatgtaaaata

SEQ ID NO: 37864 - DNA, 13 bp, Artificial Sequence
  Oligonucleotide for detection of SNP TSC0011756
tattttacatata

SEQ ID NO: 37865 - DNA, 13 bp, Artificial Sequence
  Oligonucleotide for detection of SNP TSC0011756
tatatgaaaaata

SEQ ID NO: 37866 - DNA, 13 bp, Artificial Sequence
  Oligonucleotide for detection of SNP TSC0011756
tatttttcatata

SEQ ID NO: 37867 - DNA, 13 bp, Artificial Sequence
  Oligonucleotide for detection of SNP TSC0011757
attaatatatgtt

SEQ ID NO: 37868 - DNA, 13 bp, Artificial Sequence
  Oligonucleotide for detection of SNP TSC0011757
aacatatattaat

SEQ ID NO: 37869 - DNA, 13 bp, Artificial Sequence
  Oligonucleotide for detection of SNP TSC0011757
attaatttatgtt

SEQ ID NO: 37870 - DNA, 13 bp, Artificial Sequence
  Oligonucleotide for detection of SNP TSC0011757
aacataaattaat

SEQ ID NO: 37871 - DNA, 13 bp, Artificial Sequence
  Oligonucleotide for detection of SNP TSC0011757
attaatatacgtt

SEQ ID NO: 37872 - DNA, 13 bp, Artificial Sequence
  Oligonucleotide for detection of SNP TSC0011757
aacgtatattaat

SEQ ID NO: 37873 - DNA, 13 bp, Artificial Sequence
  Oligonucleotide for detection of SNP TSC0011757
attaatttacgtt

SEQ ID NO: 37874 - DNA, 13 bp, Artificial Sequence
  Oligonucleotide for detection of SNP TSC0011757
aacgtaaattaat

SEQ ID NO: 37875 - DNA, 13 bp, Artificial Sequence
  Oligonucleotide for detection of SNP TSC0011757
aatgtgtattaat

SEQ ID NO: 37876 - DNA, 13 bp, Artificial Sequence
  Oligonucleotide for detection of SNP TSC0011757
attaatacacatt

SEQ ID NO: 37877 - DNA, 13 bp, Artificial Sequence
  Oligonucleotide for detection of SNP TSC0011757
aatgtggattaat

SEQ ID NO: 37878 - DNA, 13 bp, Artificial Sequence
  Oligonucleotide for detection of SNP TSC0011757
attaatccacatt

SEQ ID NO: 37879 - DNA, 13 bp, Artificial Sequence
  Oligonucleotide for detection of SNP TSC0011757
aacgtgtattaat

SEQ ID NO: 37880 - DNA, 13 bp, Artificial Sequence
  Oligonucleotide for detection of SNP TSC0011757
attaatacacgtt

SEQ ID NO: 37881 - DNA, 13 bp, Artificial Sequence
  Oligonucleotide for detection of SNP TSC0011757
aacgtggattaat

SEQ ID NO: 37882 - DNA, 13 bp, Artificial Sequence
  Oligonucleotide for detection of SNP TSC0011757
attaatccacgtt

SEQ ID NO: 37883 - DNA, 13 bp, Artificial Sequence
  Oligonucleotide for detection of SNP TSC0011758
atttagggtttta

SEQ ID NO: 37884 - DNA, 13 bp, Artificial Sequence
  Oligonucleotide for detection of SNP TSC0011758
taaaaccctaaat

SEQ ID NO: 37885 - DNA, 13 bp, Artificial Sequence
  Oligonucleotide for detection of SNP TSC0011758
atttagagtttta

SEQ ID NO: 37886 - DNA, 13 bp, Artificial Sequence
  Oligonucleotide for detection of SNP TSC0011758
taaaactctaaat

SEQ ID NO: 37887 - DNA, 13 bp, Artificial Sequence
  Oligonucleotide for detection of SNP TSC0011763
tttgtaagtttag

SEQ ID NO: 37888 - DNA, 13 bp, Artificial Sequence
  Oligonucleotide for detection of SNP TSC0011763
ctaaacttacaaa

SEQ ID NO: 37889 - DNA, 13 bp, Artificial Sequence
  Oligonucleotide for detection of SNP TSC0011763
tttgtaggtttag

SEQ ID NO: 37890 - DNA, 13 bp, Artificial Sequence
  Oligonucleotide for detection of SNP TSC0011763
ctaaacctacaaa

SEQ ID NO: 37891 - DNA, 13 bp, Artificial Sequence
  Oligonucleotide for detection of SNP TSC0011764
aagttttagaaty

SEQ ID NO: 37892 - DNA, 13 bp, Artificial Sequence
  Oligonucleotide for detection of SNP TSC0011764
rattctaaaactt

SEQ ID NO: 37893 - DNA, 13 bp, Artificial Sequence
  Oligonucleotide for detection of SNP TSC0011764
aagtttgagaaty

SEQ ID NO: 37894 - DNA, 13 bp, Artificial Sequence
  Oligonucleotide for detection of SNP TSC0011764
rattctcaaactt

SEQ ID NO: 37895 - DNA, 13 bp, Artificial Sequence
  Oligonucleotide for detection of SNP TSC0011764
ggttttgaggttt

SEQ ID NO: 37896 - DNA, 13 bp, Artificial Sequence
  Oligonucleotide for detection of SNP TSC0011764
aaacctcaaaacc

SEQ ID NO: 37897 - DNA, 13 bp, Artificial Sequence
  Oligonucleotide for detection of SNP TSC0011764
ggtttttaggttt

SEQ ID NO: 37898 - DNA, 13 bp, Artificial Sequence
  Oligonucleotide for detection of SNP TSC0011764
aaacctaaaaacc

SEQ ID NO: 37899 - DNA, 13 bp, Artificial Sequence
  Oligonucleotide for detection of SNP TSC0011765
tagtagagaataa

SEQ ID NO: 37900 - DNA, 13 bp, Artificial Sequence
  Oligonucleotide for detection of SNP TSC0011765
ttattctctacta

SEQ ID NO: 37901 - DNA, 13 bp, Artificial Sequence
  Oligonucleotide for detection of SNP TSC0011765
tagtagtgaataa

SEQ ID NO: 37902 - DNA, 13 bp, Artificial Sequence
  Oligonucleotide for detection of SNP TSC0011765
ttattcactacta

SEQ ID NO: 37903 - DNA, 13 bp, Artificial Sequence
  Oligonucleotide for detection of SNP TSC0011765
ttatttattattg

SEQ ID NO: 37904 - DNA, 13 bp, Artificial Sequence
  Oligonucleotide for detection of SNP TSC0011765
caataataaataa

SEQ ID NO: 37905 - DNA, 13 bp, Artificial Sequence
  Oligonucleotide for detection of SNP TSC0011770
aaattattgatag

SEQ ID NO: 37906 - DNA, 13 bp, Artificial Sequence
  Oligonucleotide for detection of SNP TSC0011770
ctatcaataattt

SEQ ID NO: 37907 - DNA, 13 bp, Artificial Sequence
  Oligonucleotide for detection of SNP TSC0011770
aaattagtgatag

SEQ ID NO: 37908 - DNA, 13 bp, Artificial Sequence
  Oligonucleotide for detection of SNP TSC0011770
ctatcactaattt

SEQ ID NO: 37909 - DNA, 13 bp, Artificial Sequence
  Oligonucleotide for detection of SNP TSC0011770
ttattagtggttt

SEQ ID NO: 37910 - DNA, 13 bp, Artificial Sequence
  Oligonucleotide for detection of SNP TSC0011770
aaaccactaataa

SEQ ID NO: 37911 - DNA, 13 bp, Artificial Sequence
  Oligonucleotide for detection of SNP TSC0011770
ttattattggttt

SEQ ID NO: 37912 - DNA, 13 bp, Artificial Sequence
  Oligonucleotide for detection of SNP TSC0011770
aaaccaataataa

SEQ ID NO: 37913 - DNA, 13 bp, Artificial Sequence
  Oligonucleotide for detection of SNP TSC0011772
tttatgtgggggt

SEQ ID NO: 37914 - DNA, 13 bp, Artificial Sequence
  Oligonucleotide for detection of SNP TSC0011772
acccccacataaa

SEQ ID NO: 37915 - DNA, 13 bp, Artificial Sequence
  Oligonucleotide for detection of SNP TSC0011772
tttatgcgggggt

SEQ ID NO: 37916 - DNA, 13 bp, Artificial Sequence
  Oligonucleotide for detection of SNP TSC0011772
acccccgcataaa

SEQ ID NO: 37917 - DNA, 13 bp, Artificial Sequence
  Oligonucleotide for detection of SNP TSC0011772
atttttgtatgag

SEQ ID NO: 37918 - DNA, 13 bp, Artificial Sequence
  Oligonucleotide for detection of SNP TSC0011772
ctcatacaaaaat

SEQ ID NO: 37919 - DNA, 13 bp, Artificial Sequence
  Oligonucleotide for detection of SNP TSC0011772
atttttatatgag

SEQ ID NO: 37920 - DNA, 13 bp, Artificial Sequence
  Oligonucleotide for detection of SNP TSC0011772
ctcatataaaaat

SEQ ID NO: 37921 - DNA, 13 bp, Artificial Sequence
  Oligonucleotide for detection of SNP TSC0011772
attttcgtatgag

SEQ ID NO: 37922 - DNA, 13 bp, Artificial Sequence
  Oligonucleotide for detection of SNP TSC0011772
ctcatacgaaaat

SEQ ID NO: 37923 - DNA, 13 bp, Artificial Sequence
  Oligonucleotide for detection of SNP TSC0011777
attataagtaatt

SEQ ID NO: 37924 - DNA, 13 bp, Artificial Sequence
  Oligonucleotide for detection of SNP TSC0011777
aattacttataat

SEQ ID NO: 37925 - DNA, 13 bp, Artificial Sequence
  Oligonucleotide for detection of SNP TSC0011777
attataggtaatt

SEQ ID NO: 37926 - DNA, 13 bp, Artificial Sequence
  Oligonucleotide for detection of SNP TSC0011777
aattacctataat

SEQ ID NO: 37927 - DNA, 13 bp, Artificial Sequence
  Oligonucleotide for detection of SNP TSC0011778
atataaataattt

SEQ ID NO: 37928 - DNA, 13 bp, Artificial Sequence
  Oligonucleotide for detection of SNP TSC0011778
aaattatttatat

SEQ ID NO: 37929 - DNA, 13 bp, Artificial Sequence
  Oligonucleotide for detection of SNP TSC0011778
atataagtaattt

SEQ ID NO: 37930 - DNA, 13 bp, Artificial Sequence
  Oligonucleotide for detection of SNP TSC0011778
aaattacttatat

SEQ ID NO: 37931 - DNA, 13 bp, Artificial Sequence
  Oligonucleotide for detection of SNP TSC0011779
gttaggttttagy

SEQ ID NO: 37932 - DNA, 13 bp, Artificial Sequence
  Oligonucleotide for detection of SNP TSC0011779
rctaaaacctaac

SEQ ID NO: 37933 - DNA, 13 bp, Artificial Sequence
  Oligonucleotide for detection of SNP TSC0011779
gttagggtttagy

SEQ ID NO: 37934 - DNA, 13 bp, Artificial Sequence
  Oligonucleotide for detection of SNP TSC0011779
rctaaaccctaac

SEQ ID NO: 37935 - DNA, 13 bp, Artificial Sequence
  Oligonucleotide for detection of SNP TSC0011779
gttgaggtttggy

SEQ ID NO: 37936 - DNA, 13 bp, Artificial Sequence
  Oligonucleotide for detection of SNP TSC0011779
rccaaacctcaac

SEQ ID NO: 37937 - DNA, 13 bp, Artificial Sequence
  Oligonucleotide for detection of SNP TSC0011779
gttgagttttggy

SEQ ID NO: 37938 - DNA, 13 bp, Artificial Sequence
  Oligonucleotide for detection of SNP TSC0011779
rccaaaactcaac

SEQ ID NO: 37939 - DNA, 13 bp, Artificial Sequence
  Oligonucleotide for detection of SNP TSC0011780
gggagagggagaa

SEQ ID NO: 37940 - DNA, 13 bp, Artificial Sequence
  Oligonucleotide for detection of SNP TSC0011780
ttctccctctccc

SEQ ID NO: 37941 - DNA, 13 bp, Artificial Sequence
  Oligonucleotide for detection of SNP TSC0011780
gggagaaggagaa

SEQ ID NO: 37942 - DNA, 13 bp, Artificial Sequence
  Oligonucleotide for detection of SNP TSC0011780
ttctccttctccc

SEQ ID NO: 37943 - DNA, 13 bp, Artificial Sequence
  Oligonucleotide for detection of SNP TSC0011783
gaaggagagggag

SEQ ID NO: 37944 - DNA, 13 bp, Artificial Sequence
  Oligonucleotide for detection of SNP TSC0011783
ctccctctccttc

SEQ ID NO: 37945 - DNA, 13 bp, Artificial Sequence
  Oligonucleotide for detection of SNP TSC0011783
gaaggaaagggag

SEQ ID NO: 37946 - DNA, 13 bp, Artificial Sequence
  Oligonucleotide for detection of SNP TSC0011783
ctccctttccttc

SEQ ID NO: 37947 - DNA, 13 bp, Artificial Sequence
  Oligonucleotide for detection of SNP TSC0011784
gtttgtaagtgga

SEQ ID NO: 37948 - DNA, 13 bp, Artificial Sequence
  Oligonucleotide for detection of SNP TSC0011784
tccacttacaaac

SEQ ID NO: 37949 - DNA, 13 bp, Artificial Sequence
  Oligonucleotide for detection of SNP TSC0011784
gtttgtgagtgga

SEQ ID NO: 37950 - DNA, 13 bp, Artificial Sequence
  Oligonucleotide for detection of SNP TSC0011784
tccactcacaaac

SEQ ID NO: 37951 - DNA, 13 bp, Artificial Sequence
  Oligonucleotide for detection of SNP TSC0011785
aataagtaaaagg

SEQ ID NO: 37952 - DNA, 13 bp, Artificial Sequence
  Oligonucleotide for detection of SNP TSC0011785
ccttttacttatt

SEQ ID NO: 37953 - DNA, 13 bp, Artificial Sequence
  Oligonucleotide for detection of SNP TSC0011785
aataaggaaaagg

SEQ ID NO: 37954 - DNA, 13 bp, Artificial Sequence
  Oligonucleotide for detection of SNP TSC0011785
ccttttccttatt

SEQ ID NO: 37955 - DNA, 13 bp, Artificial Sequence
  Oligonucleotide for detection of SNP TSC0011786
aatgtgatatttg

SEQ ID NO: 37956 - DNA, 13 bp, Artificial Sequence
  Oligonucleotide for detection of SNP TSC0011786
caaatatcacatt

SEQ ID NO: 37957 - DNA, 13 bp, Artificial Sequence
  Oligonucleotide for detection of SNP TSC0011786
aatgtggtatttg

SEQ ID NO: 37958 - DNA, 13 bp, Artificial Sequence
  Oligonucleotide for detection of SNP TSC0011786
caaataccacatt

SEQ ID NO: 37959 - DNA, 13 bp, Artificial Sequence
  Oligonucleotide for detection of SNP TSC0011787
aagattgatatag

SEQ ID NO: 37960 - DNA, 13 bp, Artificial Sequence
  Oligonucleotide for detection of SNP TSC0011787
ctatatcaatctt

SEQ ID NO: 37961 - DNA, 13 bp, Artificial Sequence
  Oligonucleotide for detection of SNP TSC0011787
aagatttatatag

SEQ ID NO: 37962 - DNA, 13 bp, Artificial Sequence
  Oligonucleotide for detection of SNP TSC0011787
ctatataaatctt

SEQ ID NO: 37963 - DNA, 13 bp, Artificial Sequence
  Oligonucleotide for detection of SNP TSC0011787
ttgtattaatttt

SEQ ID NO: 37964 - DNA, 13 bp, Artificial Sequence
  Oligonucleotide for detection of SNP TSC0011787
aaaattaatacaa

SEQ ID NO: 37965 - DNA, 13 bp, Artificial Sequence
  Oligonucleotide for detection of SNP TSC0011787
ttgtataaatttt

SEQ ID NO: 37966 - DNA, 13 bp, Artificial Sequence
  Oligonucleotide for detection of SNP TSC0011787
aaaatttatacaa

SEQ ID NO: 37967 - DNA, 13 bp, Artificial Sequence
  Oligonucleotide for detection of SNP TSC0011788
ttgtagtgaatag

SEQ ID NO: 37968 - DNA, 13 bp, Artificial Sequence
  Oligonucleotide for detection of SNP TSC0011788
ctattcactacaa

SEQ ID NO: 37969 - DNA, 13 bp, Artificial Sequence
  Oligonucleotide for detection of SNP TSC0011788
ttgtagcgaatag

SEQ ID NO: 37970 - DNA, 13 bp, Artificial Sequence
  Oligonucleotide for detection of SNP TSC0011788
ctattcgctacaa

SEQ ID NO: 37971 - DNA, 13 bp, Artificial Sequence
  Oligonucleotide for detection of SNP TSC0011788
ttgtttgttgtag

SEQ ID NO: 37972 - DNA, 13 bp, Artificial Sequence
  Oligonucleotide for detection of SNP TSC0011788
ctacaacaaacaa

SEQ ID NO: 37973 - DNA, 13 bp, Artificial Sequence
  Oligonucleotide for detection of SNP TSC0011788
ttgttcgttgtag

SEQ ID NO: 37974 - DNA, 13 bp, Artificial Sequence
  Oligonucleotide for detection of SNP TSC0011788
ctacaacgaacaa

SEQ ID NO: 37975 - DNA, 13 bp, Artificial Sequence
  Oligonucleotide for detection of SNP TSC0011789
tgtaatatggtga

SEQ ID NO: 37976 - DNA, 13 bp, Artificial Sequence
  Oligonucleotide for detection of SNP TSC0011789
tcaccatattaca

SEQ ID NO: 37977 - DNA, 13 bp, Artificial Sequence
  Oligonucleotide for detection of SNP TSC0011789
tgtaatgtggtga

SEQ ID NO: 37978 - DNA, 13 bp, Artificial Sequence
  Oligonucleotide for detection of SNP TSC0011789
tcaccacattaca

SEQ ID NO: 37979 - DNA, 13 bp, Artificial Sequence
  Oligonucleotide for detection of SNP TSC0011789
tgtaacgtggtga

SEQ ID NO: 37980 - DNA, 13 bp, Artificial Sequence
  Oligonucleotide for detection of SNP TSC0011789
tcaccacgttaca

SEQ ID NO: 37981 - DNA, 13 bp, Artificial Sequence
  Oligonucleotide for detection of SNP TSC0011789
ttattatgttgta

SEQ ID NO: 37982 - DNA, 13 bp, Artificial Sequence
  Oligonucleotide for detection of SNP TSC0011789
tacaacataataa

SEQ ID NO: 37983 - DNA, 13 bp, Artificial Sequence
  Oligonucleotide for detection of SNP TSC0011789
ttattacgttgta

SEQ ID NO: 37984 - DNA, 13 bp, Artificial Sequence
  Oligonucleotide for detection of SNP TSC0011789
tacaacgtaataa

SEQ ID NO: 37985 - DNA, 13 bp, Artificial Sequence
  Oligonucleotide for detection of SNP TSC0011790
tgatatattgttt

SEQ ID NO: 37986 - DNA, 13 bp, Artificial Sequence
  Oligonucleotide for detection of SNP TSC0011790
aaacaatatatca

SEQ ID NO: 37987 - DNA, 13 bp, Artificial Sequence
  Oligonucleotide for detection of SNP TSC0011790
tgatatgttgttt

SEQ ID NO: 37988 - DNA, 13 bp, Artificial Sequence
  Oligonucleotide for detection of SNP TSC0011790
aaacaacatatca

SEQ ID NO: 37989 - DNA, 13 bp, Artificial Sequence
  Oligonucleotide for detection of SNP TSC0011790
tgatacgttgttt

SEQ ID NO: 37990 - DNA, 13 bp, Artificial Sequence
  Oligonucleotide for detection of SNP TSC0011790
aaacaacgtatca

SEQ ID NO: 37991 - DNA, 13 bp, Artificial Sequence
  Oligonucleotide for detection of SNP TSC0011790
agatagtgtatta

SEQ ID NO: 37992 - DNA, 13 bp, Artificial Sequence
  Oligonucleotide for detection of SNP TSC0011790
taatacactatct

SEQ ID NO: 37993 - DNA, 13 bp, Artificial Sequence
  Oligonucleotide for detection of SNP TSC0011790
agatagcgtatta

SEQ ID NO: 37994 - DNA, 13 bp, Artificial Sequence
  Oligonucleotide for detection of SNP TSC0011790
taatacgctatct

SEQ ID NO: 37995 - DNA, 13 bp, Artificial Sequence
  Oligonucleotide for detection of SNP TSC0011791
ttggatttgttgg

SEQ ID NO: 37996 - DNA, 13 bp, Artificial Sequence
  Oligonucleotide for detection of SNP TSC0011791
ccaacaaatccaa

SEQ ID NO: 37997 - DNA, 13 bp, Artificial Sequence
  Oligonucleotide for detection of SNP TSC0011791
ttggatgtgttgg

SEQ ID NO: 37998 - DNA, 13 bp, Artificial Sequence
  Oligonucleotide for detection of SNP TSC0011791
ccaacacatccaa

SEQ ID NO: 37999 - DNA, 13 bp, Artificial Sequence
  Oligonucleotide for detection of SNP TSC0011791
ttggacgtgttgg

SEQ ID NO: 38000 - DNA, 13 bp, Artificial Sequence
  Oligonucleotide for detection of SNP TSC0011791
ccaacacgtccaa

SEQ ID NO: 38001 - DNA, 13 bp, Artificial Sequence
  Oligonucleotide for detection of SNP TSC0011792
gttttgataatty

SEQ ID NO: 38002 - DNA, 13 bp, Artificial Sequence
  Oligonucleotide for detection of SNP TSC0011792
raattatcaaaac

SEQ ID NO: 38003 - DNA, 13 bp, Artificial Sequence
  Oligonucleotide for detection of SNP TSC0011792
gttttggtaatty

SEQ ID NO: 38004 - DNA, 13 bp, Artificial Sequence
  Oligonucleotide for detection of SNP TSC0011792
raattaccaaaac

SEQ ID NO: 38005 - DNA, 13 bp, Artificial Sequence
  Oligonucleotide for detection of SNP TSC0011793
ttaattatattay

SEQ ID NO: 38006 - DNA, 13 bp, Artificial Sequence
  Oligonucleotide for detection of SNP TSC0011793
rtaatataattaa

SEQ ID NO: 38007 - DNA, 13 bp, Artificial Sequence
  Oligonucleotide for detection of SNP TSC0011793
ttaattgtattay

SEQ ID NO: 38008 - DNA, 13 bp, Artificial Sequence
  Oligonucleotide for detection of SNP TSC0011793
rtaatacaattaa

SEQ ID NO: 38009 - DNA, 13 bp, Artificial Sequence
  Oligonucleotide for detection of SNP TSC0011794
atgagttggttag

SEQ ID NO: 38010 - DNA, 13 bp, Artificial Sequence
  Oligonucleotide for detection of SNP TSC0011794
ctaaccaactcat

SEQ ID NO: 38011 - DNA, 13 bp, Artificial Sequence
  Oligonucleotide for detection of SNP TSC0011794
atgagtcggttag

SEQ ID NO: 38012 - DNA, 13 bp, Artificial Sequence
  Oligonucleotide for detection of SNP TSC0011794
ctaaccgactcat

SEQ ID NO: 38013 - DNA, 13 bp, Artificial Sequence
  Oligonucleotide for detection of SNP TSC0011794
ttggttgatttat

SEQ ID NO: 38014 - DNA, 13 bp, Artificial Sequence
  Oligonucleotide for detection of SNP TSC0011794
ataaatcaaccaa

SEQ ID NO: 38015 - DNA, 13 bp, Artificial Sequence
  Oligonucleotide for detection of SNP TSC0011794
ttggttaatttat

SEQ ID NO: 38016 - DNA, 13 bp, Artificial Sequence
  Oligonucleotide for detection of SNP TSC0011794
ataaattaaccaa

SEQ ID NO: 38017 - DNA, 13 bp, Artificial Sequence
  Oligonucleotide for detection of SNP TSC0011794
ttggtcgatttat

SEQ ID NO: 38018 - DNA, 13 bp, Artificial Sequence
  Oligonucleotide for detection of SNP TSC0011794
ataaatcgaccaa

SEQ ID NO: 38019 - DNA, 13 bp, Artificial Sequence
  Oligonucleotide for detection of SNP TSC0011795
atttttgaagtaa

SEQ ID NO: 38020 - DNA, 13 bp, Artificial Sequence
  Oligonucleotide for detection of SNP TSC0011795
ttacttcaaaaat

SEQ ID NO: 38021 - DNA, 13 bp, Artificial Sequence
  Oligonucleotide for detection of SNP TSC0011795
atttttaaagtaa

SEQ ID NO: 38022 - DNA, 13 bp, Artificial Sequence
  Oligonucleotide for detection of SNP TSC0011795
ttactttaaaaat

SEQ ID NO: 38023 - DNA, 13 bp, Artificial Sequence
  Oligonucleotide for detection of SNP TSC0011797
tatattgtgattt

SEQ ID NO: 38024 - DNA, 13 bp, Artificial Sequence
  Oligonucleotide for detection of SNP TSC0011797
aaatcacaatata

SEQ ID NO: 38025 - DNA, 13 bp, Artificial Sequence
  Oligonucleotide for detection of SNP TSC0011797
tatattttgattt

SEQ ID NO: 38026 - DNA, 13 bp, Artificial Sequence
  Oligonucleotide for detection of SNP TSC0011797
aaatcaaaatata

SEQ ID NO: 38027 - DNA, 13 bp, Artificial Sequence
  Oligonucleotide for detection of SNP TSC0011797
aggttatagtgta

SEQ ID NO: 38028 - DNA, 13 bp, Artificial Sequence
  Oligonucleotide for detection of SNP TSC0011797
tacactataacct

SEQ ID NO: 38029 - DNA, 13 bp, Artificial Sequence
  Oligonucleotide for detection of SNP TSC0011797
aggttaaagtgta

SEQ ID NO: 38030 - DNA, 13 bp, Artificial Sequence
  Oligonucleotide for detection of SNP TSC0011797
tacactttaacct

SEQ ID NO: 38031 - DNA, 13 bp, Artificial Sequence
  Oligonucleotide for detection of SNP TSC0011798
gttataatattta

SEQ ID NO: 38032 - DNA, 13 bp, Artificial Sequence
  Oligonucleotide for detection of SNP TSC0011798
taaatattataac

SEQ ID NO: 38033 - DNA, 13 bp, Artificial Sequence
  Oligonucleotide for detection of SNP TSC0011798
gttatattattta

SEQ ID NO: 38034 - DNA, 13 bp, Artificial Sequence
  Oligonucleotide for detection of SNP TSC0011798
taaataatataac

SEQ ID NO: 38035 - DNA, 13 bp, Artificial Sequence
  Oligonucleotide for detection of SNP TSC0011798
taggtgttataay

SEQ ID NO: 38036 - DNA, 13 bp, Artificial Sequence
  Oligonucleotide for detection of SNP TSC0011798
rttataacaccta

SEQ ID NO: 38037 - DNA, 13 bp, Artificial Sequence
  Oligonucleotide for detection of SNP TSC0011798
taggtggtataay

SEQ ID NO: 38038 - DNA, 13 bp, Artificial Sequence
  Oligonucleotide for detection of SNP TSC0011798
rttataccaccta

SEQ ID NO: 38039 - DNA, 13 bp, Artificial Sequence
  Oligonucleotide for detection of SNP TSC0011802
atatggtgttaay

SEQ ID NO: 38040 - DNA, 13 bp, Artificial Sequence
  Oligonucleotide for detection of SNP TSC0011802
rttaacaccatat

SEQ ID NO: 38041 - DNA, 13 bp, Artificial Sequence
  Oligonucleotide for detection of SNP TSC0011802
atacggtgttaay

SEQ ID NO: 38042 - DNA, 13 bp, Artificial Sequence
  Oligonucleotide for detection of SNP TSC0011802
rttaacaccgtat

SEQ ID NO: 38043 - DNA, 13 bp, Artificial Sequence
  Oligonucleotide for detection of SNP TSC0011802
atatggcgttaay

SEQ ID NO: 38044 - DNA, 13 bp, Artificial Sequence
  Oligonucleotide for detection of SNP TSC0011802
rttaacgccatat

SEQ ID NO: 38045 - DNA, 13 bp, Artificial Sequence
  Oligonucleotide for detection of SNP TSC0011802
atacggcgttaay

SEQ ID NO: 38046 - DNA, 13 bp, Artificial Sequence
  Oligonucleotide for detection of SNP TSC0011802
rttaacgccgtat

SEQ ID NO: 38047 - DNA, 13 bp, Artificial Sequence
  Oligonucleotide for detection of SNP TSC0011802
gttaatattgtgt

SEQ ID NO: 38048 - DNA, 13 bp, Artificial Sequence
  Oligonucleotide for detection of SNP TSC0011802
acacaatattaac

SEQ ID NO: 38049 - DNA, 13 bp, Artificial Sequence
  Oligonucleotide for detection of SNP TSC0011802
gttaatgttgtgt

SEQ ID NO: 38050 - DNA, 13 bp, Artificial Sequence
  Oligonucleotide for detection of SNP TSC0011802
acacaacattaac

SEQ ID NO: 38051 - DNA, 13 bp, Artificial Sequence
  Oligonucleotide for detection of SNP TSC0011802
gttaatatcgtgt

SEQ ID NO: 38052 - DNA, 13 bp, Artificial Sequence
  Oligonucleotide for detection of SNP TSC0011802
acacgatattaac

SEQ ID NO: 38053 - DNA, 13 bp, Artificial Sequence
  Oligonucleotide for detection of SNP TSC0011802
gttaacgttgtgt

SEQ ID NO: 38054 - DNA, 13 bp, Artificial Sequence
  Oligonucleotide for detection of SNP TSC0011802
acacaacgttaac

SEQ ID NO: 38055 - DNA, 13 bp, Artificial Sequence
  Oligonucleotide for detection of SNP TSC0011802
gttaatgtcgtgt

SEQ ID NO: 38056 - DNA, 13 bp, Artificial Sequence
  Oligonucleotide for detection of SNP TSC0011802
acacgacattaac

SEQ ID NO: 38057 - DNA, 13 bp, Artificial Sequence
  Oligonucleotide for detection of SNP TSC0011802
gttaacgtcgtgt

SEQ ID NO: 38058 - DNA, 13 bp, Artificial Sequence
  Oligonucleotide for detection of SNP TSC0011802
acacgacgttaac

SEQ ID NO: 38059 - DNA, 13 bp, Artificial Sequence
  Oligonucleotide for detection of SNP TSC0011803
gagtttatagtag

SEQ ID NO: 38060 - DNA, 13 bp, Artificial Sequence
  Oligonucleotide for detection of SNP TSC0011803
ctactataaactc

SEQ ID NO: 38061 - DNA, 13 bp, Artificial Sequence
  Oligonucleotide for detection of SNP TSC0011803
gagtttgtagtag

SEQ ID NO: 38062 - DNA, 13 bp, Artificial Sequence
  Oligonucleotide for detection of SNP TSC0011803
ctactacaaactc

SEQ ID NO: 38063 - DNA, 13 bp, Artificial Sequence
  Oligonucleotide for detection of SNP TSC0011807
agtgttagggttt

SEQ ID NO: 38064 - DNA, 13 bp, Artificial Sequence
  Oligonucleotide for detection of SNP TSC0011807
aaaccctaacact

SEQ ID NO: 38065 - DNA, 13 bp, Artificial Sequence
  Oligonucleotide for detection of SNP TSC0011807
agtgtttgggttt

SEQ ID NO: 38066 - DNA, 13 bp, Artificial Sequence
  Oligonucleotide for detection of SNP TSC0011807
aaacccaaacact

SEQ ID NO: 38067 - DNA, 13 bp, Artificial Sequence
  Oligonucleotide for detection of SNP TSC0011807
agtgttcgggttt

SEQ ID NO: 38068 - DNA, 13 bp, Artificial Sequence
  Oligonucleotide for detection of SNP TSC0011807
aaacccgaacact

SEQ ID NO: 38069 - DNA, 13 bp, Artificial Sequence
  Oligonucleotide for detection of SNP TSC0011807
agattttggtatt

SEQ ID NO: 38070 - DNA, 13 bp, Artificial Sequence
  Oligonucleotide for detection of SNP TSC0011807
aataccaaaatct

SEQ ID NO: 38071 - DNA, 13 bp, Artificial Sequence
  Oligonucleotide for detection of SNP TSC0011807
agatttgggtatt

SEQ ID NO: 38072 - DNA, 13 bp, Artificial Sequence
  Oligonucleotide for detection of SNP TSC0011807
aatacccaaatct

SEQ ID NO: 38073 - DNA, 13 bp, Artificial Sequence
  Oligonucleotide for detection of SNP TSC0011807
agattcgggtatt

SEQ ID NO: 38074 - DNA, 13 bp, Artificial Sequence
  Oligonucleotide for detection of SNP TSC0011807
aatacccgaatct

SEQ ID NO: 38075 - DNA, 13 bp, Artificial Sequence
  Oligonucleotide for detection of SNP TSC0011809
agggttgttttat

SEQ ID NO: 38076 - DNA, 13 bp, Artificial Sequence
  Oligonucleotide for detection of SNP TSC0011809
ataaaacaaccct

SEQ ID NO: 38077 - DNA, 13 bp, Artificial Sequence
  Oligonucleotide for detection of SNP TSC0011809
agggttattttat

SEQ ID NO: 38078 - DNA, 13 bp, Artificial Sequence
  Oligonucleotide for detection of SNP TSC0011809
ataaaataaccct

SEQ ID NO: 38079 - DNA, 13 bp, Artificial Sequence
  Oligonucleotide for detection of SNP TSC0011810
tattgtattttty

SEQ ID NO: 38080 - DNA, 13 bp, Artificial Sequence
  Oligonucleotide for detection of SNP TSC0011810
raaaaatacaata

SEQ ID NO: 38081 - DNA, 13 bp, Artificial Sequence
  Oligonucleotide for detection of SNP TSC0011810
tattgtgttttty

SEQ ID NO: 38082 - DNA, 13 bp, Artificial Sequence
  Oligonucleotide for detection of SNP TSC0011810
raaaaacacaata

SEQ ID NO: 38083 - DNA, 13 bp, Artificial Sequence
  Oligonucleotide for detection of SNP TSC0011811
ttgaagattaagg

SEQ ID NO: 38084 - DNA, 13 bp, Artificial Sequence
  Oligonucleotide for detection of SNP TSC0011811
ccttaatcttcaa

SEQ ID NO: 38085 - DNA, 13 bp, Artificial Sequence
  Oligonucleotide for detection of SNP TSC0011811
ttgaaggttaagg

SEQ ID NO: 38086 - DNA, 13 bp, Artificial Sequence
  Oligonucleotide for detection of SNP TSC0011811
ccttaaccttcaa

SEQ ID NO: 38087 - DNA, 13 bp, Artificial Sequence
  Oligonucleotide for detection of SNP TSC0011812
aataatataaaty

SEQ ID NO: 38088 - DNA, 13 bp, Artificial Sequence
  Oligonucleotide for detection of SNP TSC0011812
ratttatattatt

SEQ ID NO: 38089 - DNA, 13 bp, Artificial Sequence
  Oligonucleotide for detection of SNP TSC0011812
aataatttaaaty

SEQ ID NO: 38090 - DNA, 13 bp, Artificial Sequence
  Oligonucleotide for detection of SNP TSC0011812
ratttaaattatt

SEQ ID NO: 38091 - DNA, 13 bp, Artificial Sequence
  Oligonucleotide for detection of SNP TSC0011812
ggtttgtattatt

SEQ ID NO: 38092 - DNA, 13 bp, Artificial Sequence
  Oligonucleotide for detection of SNP TSC0011812
aataatacaaacc

SEQ ID NO: 38093 - DNA, 13 bp, Artificial Sequence
  Oligonucleotide for detection of SNP TSC0011812
ggtttggattatt

SEQ ID NO: 38094 - DNA, 13 bp, Artificial Sequence
  Oligonucleotide for detection of SNP TSC0011812
aataatccaaacc

SEQ ID NO: 38095 - DNA, 13 bp, Artificial Sequence
  Oligonucleotide for detection of SNP TSC0011813
gttgttatatagy

SEQ ID NO: 38096 - DNA, 13 bp, Artificial Sequence
  Oligonucleotide for detection of SNP TSC0011813
rctatataacaac

SEQ ID NO: 38097 - DNA, 13 bp, Artificial Sequence
  Oligonucleotide for detection of SNP TSC0011813
gttgttgtatagy

SEQ ID NO: 38098 - DNA, 13 bp, Artificial Sequence
  Oligonucleotide for detection of SNP TSC0011813
rctatacaacaac

SEQ ID NO: 38099 - DNA, 13 bp, Artificial Sequence
  Oligonucleotide for detection of SNP TSC0011814
ttgtttataatgy

SEQ ID NO: 38100 - DNA, 13 bp, Artificial Sequence
  Oligonucleotide for detection of SNP TSC0011814
rcattataaacaa

SEQ ID NO: 38101 - DNA, 13 bp, Artificial Sequence
  Oligonucleotide for detection of SNP TSC0011814
ttgtttgtaatgy

SEQ ID NO: 38102 - DNA, 13 bp, Artificial Sequence
  Oligonucleotide for detection of SNP TSC0011814
rcattacaaacaa

SEQ ID NO: 38103 - DNA, 13 bp, Artificial Sequence
  Oligonucleotide for detection of SNP TSC0011814
ttgtttataacgy

SEQ ID NO: 38104 - DNA, 13 bp, Artificial Sequence
  Oligonucleotide for detection of SNP TSC0011814
rcgttataaacaa

SEQ ID NO: 38105 - DNA, 13 bp, Artificial Sequence
  Oligonucleotide for detection of SNP TSC0011814
ttgtttgtaacgy

SEQ ID NO: 38106 - DNA, 13 bp, Artificial Sequence
  Oligonucleotide for detection of SNP TSC0011814
rcgttacaaacaa

SEQ ID NO: 38107 - DNA, 13 bp, Artificial Sequence
  Oligonucleotide for detection of SNP TSC0011815
ttataatgtaaty

SEQ ID NO: 38108 - DNA, 13 bp, Artificial Sequence
  Oligonucleotide for detection of SNP TSC0011815
rattacattataa

SEQ ID NO: 38109 - DNA, 13 bp, Artificial Sequence
  Oligonucleotide for detection of SNP TSC0011815
ttataaggtaaty

SEQ ID NO: 38110 - DNA, 13 bp, Artificial Sequence
  Oligonucleotide for detection of SNP TSC0011815
rattaccttataa

SEQ ID NO: 38111 - DNA, 13 bp, Artificial Sequence
  Oligonucleotide for detection of SNP TSC0011815
ttataacgtaaty

SEQ ID NO: 38112 - DNA, 13 bp, Artificial Sequence
  Oligonucleotide for detection of SNP TSC0011815
rattacgttataa

SEQ ID NO: 38113 - DNA, 13 bp, Artificial Sequence
  Oligonucleotide for detection of SNP TSC0011815
gattgtgttgtag

SEQ ID NO: 38114 - DNA, 13 bp, Artificial Sequence
  Oligonucleotide for detection of SNP TSC0011815
ctacaacacaatc

SEQ ID NO: 38115 - DNA, 13 bp, Artificial Sequence
  Oligonucleotide for detection of SNP TSC0011815
gattgttttgtag

SEQ ID NO: 38116 - DNA, 13 bp, Artificial Sequence
  Oligonucleotide for detection of SNP TSC0011815
ctacaaaacaatc

SEQ ID NO: 38117 - DNA, 13 bp, Artificial Sequence
  Oligonucleotide for detection of SNP TSC0011815
gattgcgttgtag

SEQ ID NO: 38118 - DNA, 13 bp, Artificial Sequence
  Oligonucleotide for detection of SNP TSC0011815
ctacaacgcaatc

SEQ ID NO: 38119 - DNA, 13 bp, Artificial Sequence
  Oligonucleotide for detection of SNP TSC0011816
ttagatattaatg

SEQ ID NO: 38120 - DNA, 13 bp, Artificial Sequence
  Oligonucleotide for detection of SNP TSC0011816
cattaatatctaa

SEQ ID NO: 38121 - DNA, 13 bp, Artificial Sequence
  Oligonucleotide for detection of SNP TSC0011816
ttagatgttaatg

SEQ ID NO: 38122 - DNA, 13 bp, Artificial Sequence
  Oligonucleotide for detection of SNP TSC0011816
cattaacatctaa

SEQ ID NO: 38123 - DNA, 13 bp, Artificial Sequence
  Oligonucleotide for detection of SNP TSC0011816
ttagacgttaatg

SEQ ID NO: 38124 - DNA, 13 bp, Artificial Sequence
  Oligonucleotide for detection of SNP TSC0011816
cattaacgtctaa

SEQ ID NO: 38125 - DNA, 13 bp, Artificial Sequence
  Oligonucleotide for detection of SNP TSC0011816
tattagtgtttag

SEQ ID NO: 38126 - DNA, 13 bp, Artificial Sequence
  Oligonucleotide for detection of SNP TSC0011816
ctaaacactaata

SEQ ID NO: 38127 - DNA, 13 bp, Artificial Sequence
  Oligonucleotide for detection of SNP TSC0011816
tattagcgtttag

SEQ ID NO: 38128 - DNA, 13 bp, Artificial Sequence
  Oligonucleotide for detection of SNP TSC0011816
ctaaacgctaata

SEQ ID NO: 38129 - DNA, 13 bp, Artificial Sequence
  Oligonucleotide for detection of SNP TSC0011822
aagaaatgaagaa

SEQ ID NO: 38130 - DNA, 13 bp, Artificial Sequence
  Oligonucleotide for detection of SNP TSC0011822
ttcttcatttctt

SEQ ID NO: 38131 - DNA, 13 bp, Artificial Sequence
  Oligonucleotide for detection of SNP TSC0011822
aagaaacgaagaa

SEQ ID NO: 38132 - DNA, 13 bp, Artificial Sequence
  Oligonucleotide for detection of SNP TSC0011822
ttcttcgtttctt

SEQ ID NO: 38133 - DNA, 13 bp, Artificial Sequence
  Oligonucleotide for detection of SNP TSC0011824
ttattttgtttay

SEQ ID NO: 38134 - DNA, 13 bp, Artificial Sequence
  Oligonucleotide for detection of SNP TSC0011824
rtaaacaaaataa

SEQ ID NO: 38135 - DNA, 13 bp, Artificial Sequence
  Oligonucleotide for detection of SNP TSC0011824
ttatttcgtttay

SEQ ID NO: 38136 - DNA, 13 bp, Artificial Sequence
  Oligonucleotide for detection of SNP TSC0011824
rtaaacgaaataa

SEQ ID NO: 38137 - DNA, 13 bp, Artificial Sequence
  Oligonucleotide for detection of SNP TSC0011824
gtgagtgaggtga

SEQ ID NO: 38138 - DNA, 13 bp, Artificial Sequence
  Oligonucleotide for detection of SNP TSC0011824
tcacctcactcac

SEQ ID NO: 38139 - DNA, 13 bp, Artificial Sequence
  Oligonucleotide for detection of SNP TSC0011824
gtgagtaaggtga

SEQ ID NO: 38140 - DNA, 13 bp, Artificial Sequence
  Oligonucleotide for detection of SNP TSC0011824
tcaccttactcac

SEQ ID NO: 38141 - DNA, 13 bp, Artificial Sequence
  Oligonucleotide for detection of SNP TSC0011824
gtgagcgaggtga

SEQ ID NO: 38142 - DNA, 13 bp, Artificial Sequence
  Oligonucleotide for detection of SNP TSC0011824
tcacctcgctcac

SEQ ID NO: 38143 - DNA, 13 bp, Artificial Sequence
  Oligonucleotide for detection of SNP TSC0011825
aagagtagagtty

SEQ ID NO: 38144 - DNA, 13 bp, Artificial Sequence
  Oligonucleotide for detection of SNP TSC0011825
raactctactctt

SEQ ID NO: 38145 - DNA, 13 bp, Artificial Sequence
  Oligonucleotide for detection of SNP TSC0011825
aagagtggagtty

SEQ ID NO: 38146 - DNA, 13 bp, Artificial Sequence
  Oligonucleotide for detection of SNP TSC0011825
raactccactctt

SEQ ID NO: 38147 - DNA, 13 bp, Artificial Sequence
  Oligonucleotide for detection of SNP TSC0011825
aagagcggagtty

SEQ ID NO: 38148 - DNA, 13 bp, Artificial Sequence
  Oligonucleotide for detection of SNP TSC0011825
raactccgctctt

SEQ ID NO: 38149 - DNA, 13 bp, Artificial Sequence
  Oligonucleotide for detection of SNP TSC0011825
gggttttgttttt

SEQ ID NO: 38150 - DNA, 13 bp, Artificial Sequence
  Oligonucleotide for detection of SNP TSC0011825
aaaaacaaaaccc

SEQ ID NO: 38151 - DNA, 13 bp, Artificial Sequence
  Oligonucleotide for detection of SNP TSC0011825
gggtttcgttttt

SEQ ID NO: 38152 - DNA, 13 bp, Artificial Sequence
  Oligonucleotide for detection of SNP TSC0011825
aaaaacgaaaccc

SEQ ID NO: 38153 - DNA, 13 bp, Artificial Sequence
  Oligonucleotide for detection of SNP TSC0011826
tgatggatggaat

SEQ ID NO: 38154 - DNA, 13 bp, Artificial Sequence
  Oligonucleotide for detection of SNP TSC0011826
attccatccatca

SEQ ID NO: 38155 - DNA, 13 bp, Artificial Sequence
  Oligonucleotide for detection of SNP TSC0011826
tgatgggtggaat

SEQ ID NO: 38156 - DNA, 13 bp, Artificial Sequence
  Oligonucleotide for detection of SNP TSC0011826
attccacccatca

SEQ ID NO: 38157 - DNA, 13 bp, Artificial Sequence
  Oligonucleotide for detection of SNP TSC0011826
tgacggatggaat

SEQ ID NO: 38158 - DNA, 13 bp, Artificial Sequence
  Oligonucleotide for detection of SNP TSC0011826
attccatccgtca

SEQ ID NO: 38159 - DNA, 13 bp, Artificial Sequence
  Oligonucleotide for detection of SNP TSC0011826
tgacgggtggaat

SEQ ID NO: 38160 - DNA, 13 bp, Artificial Sequence
  Oligonucleotide for detection of SNP TSC0011826
attccacccgtca

SEQ ID NO: 38161 - DNA, 13 bp, Artificial Sequence
  Oligonucleotide for detection of SNP TSC0011827
ggttggatttgag

SEQ ID NO: 38162 - DNA, 13 bp, Artificial Sequence
  Oligonucleotide for detection of SNP TSC0011827
ctcaaatccaacc

SEQ ID NO: 38163 - DNA, 13 bp, Artificial Sequence
  Oligonucleotide for detection of SNP TSC0011827
ggttggttttgag

SEQ ID NO: 38164 - DNA, 13 bp, Artificial Sequence
  Oligonucleotide for detection of SNP TSC0011827
ctcaaaaccaacc

SEQ ID NO: 38165 - DNA, 13 bp, Artificial Sequence
  Oligonucleotide for detection of SNP TSC0011827
tttagatttaaty

SEQ ID NO: 38166 - DNA, 13 bp, Artificial Sequence
  Oligonucleotide for detection of SNP TSC0011827
rattaaatctaaa

SEQ ID NO: 38167 - DNA, 13 bp, Artificial Sequence
  Oligonucleotide for detection of SNP TSC0011827
tttagaattaaty

SEQ ID NO: 38168 - DNA, 13 bp, Artificial Sequence
  Oligonucleotide for detection of SNP TSC0011827
rattaattctaaa

SEQ ID NO: 38169 - DNA, 13 bp, Artificial Sequence
  Oligonucleotide for detection of SNP TSC0011828
attattatgtaat

SEQ ID NO: 38170 - DNA, 13 bp, Artificial Sequence
  Oligonucleotide for detection of SNP TSC0011828
attacataataat

SEQ ID NO: 38171 - DNA, 13 bp, Artificial Sequence
  Oligonucleotide for detection of SNP TSC0011828
attattgtgtaat

SEQ ID NO: 38172 - DNA, 13 bp, Artificial Sequence
  Oligonucleotide for detection of SNP TSC0011828
attacacaataat

SEQ ID NO: 38173 - DNA, 13 bp, Artificial Sequence
  Oligonucleotide for detection of SNP TSC0011829
ggggtggaaggat

SEQ ID NO: 38174 - DNA, 13 bp, Artificial Sequence
  Oligonucleotide for detection of SNP TSC0011829
atccttccacccc

SEQ ID NO: 38175 - DNA, 13 bp, Artificial Sequence
  Oligonucleotide for detection of SNP TSC0011829
ggggtgtaaggat

SEQ ID NO: 38176 - DNA, 13 bp, Artificial Sequence
  Oligonucleotide for detection of SNP TSC0011829
atccttacacccc

SEQ ID NO: 38177 - DNA, 13 bp, Artificial Sequence
  Oligonucleotide for detection of SNP TSC0011829
atttttttattty

SEQ ID NO: 38178 - DNA, 13 bp, Artificial Sequence
  Oligonucleotide for detection of SNP TSC0011829
raaataaaaaaat

SEQ ID NO: 38179 - DNA, 13 bp, Artificial Sequence
  Oligonucleotide for detection of SNP TSC0011829
atttttatattty

SEQ ID NO: 38180 - DNA, 13 bp, Artificial Sequence
  Oligonucleotide for detection of SNP TSC0011829
raaatataaaaat

SEQ ID NO: 38181 - DNA, 13 bp, Artificial Sequence
  Oligonucleotide for detection of SNP TSC0011830
ttttgtgggagaa

SEQ ID NO: 38182 - DNA, 13 bp, Artificial Sequence
  Oligonucleotide for detection of SNP TSC0011830
ttctcccacaaaa

SEQ ID NO: 38183 - DNA, 13 bp, Artificial Sequence
  Oligonucleotide for detection of SNP TSC0011830
ttttgtaggagaa

SEQ ID NO: 38184 - DNA, 13 bp, Artificial Sequence
  Oligonucleotide for detection of SNP TSC0011830
ttctcctacaaaa

SEQ ID NO: 38185 - DNA, 13 bp, Artificial Sequence
  Oligonucleotide for detection of SNP TSC0011831
agggtaaataaag

SEQ ID NO: 38186 - DNA, 13 bp, Artificial Sequence
  Oligonucleotide for detection of SNP TSC0011831
ctttatttaccct

SEQ ID NO: 38187 - DNA, 13 bp, Artificial Sequence
  Oligonucleotide for detection of SNP TSC0011831
agggtatataaag

SEQ ID NO: 38188 - DNA, 13 bp, Artificial Sequence
  Oligonucleotide for detection of SNP TSC0011831
ctttatataccct

SEQ ID NO: 38189 - DNA, 13 bp, Artificial Sequence
  Oligonucleotide for detection of SNP TSC0011831
ttttatttatttt

SEQ ID NO: 38190 - DNA, 13 bp, Artificial Sequence
  Oligonucleotide for detection of SNP TSC0011831
aaaataaataaaa

SEQ ID NO: 38191 - DNA, 13 bp, Artificial Sequence
  Oligonucleotide for detection of SNP TSC0011832
tttttttgggatt

SEQ ID NO: 38192 - DNA, 13 bp, Artificial Sequence
  Oligonucleotide for detection of SNP TSC0011832
aatcccaaaaaaa

SEQ ID NO: 38193 - DNA, 13 bp, Artificial Sequence
  Oligonucleotide for detection of SNP TSC0011832
ttttttcgggatt

SEQ ID NO: 38194 - DNA, 13 bp, Artificial Sequence
  Oligonucleotide for detection of SNP TSC0011832
aatcccgaaaaaa

SEQ ID NO: 38195 - DNA, 13 bp, Artificial Sequence
  Oligonucleotide for detection of SNP TSC0011832
aattttgaagagg

SEQ ID NO: 38196 - DNA, 13 bp, Artificial Sequence
  Oligonucleotide for detection of SNP TSC0011832
cctcttcaaaatt

SEQ ID NO: 38197 - DNA, 13 bp, Artificial Sequence
  Oligonucleotide for detection of SNP TSC0011832
aattttaaagagg

SEQ ID NO: 38198 - DNA, 13 bp, Artificial Sequence
  Oligonucleotide for detection of SNP TSC0011832
cctctttaaaatt

SEQ ID NO: 38199 - DNA, 13 bp, Artificial Sequence
  Oligonucleotide for detection of SNP TSC0011832
aatttcgaagagg

SEQ ID NO: 38200 - DNA, 13 bp, Artificial Sequence
  Oligonucleotide for detection of SNP TSC0011832
cctcttcgaaatt

SEQ ID NO: 38201 - DNA, 13 bp, Artificial Sequence
  Oligonucleotide for detection of SNP TSC0011833
aatgtttttatay

SEQ ID NO: 38202 - DNA, 13 bp, Artificial Sequence
  Oligonucleotide for detection of SNP TSC0011833
rtataaaaacatt

SEQ ID NO: 38203 - DNA, 13 bp, Artificial Sequence
  Oligonucleotide for detection of SNP TSC0011833
aatgttgttatay

SEQ ID NO: 38204 - DNA, 13 bp, Artificial Sequence
  Oligonucleotide for detection of SNP TSC0011833
rtataacaacatt

SEQ ID NO: 38205 - DNA, 13 bp, Artificial Sequence
  Oligonucleotide for detection of SNP TSC0011833
aatgtcgttatay

SEQ ID NO: 38206 - DNA, 13 bp, Artificial Sequence
  Oligonucleotide for detection of SNP TSC0011833
rtataacgacatt

SEQ ID NO: 38207 - DNA, 13 bp, Artificial Sequence
  Oligonucleotide for detection of SNP TSC0011833
gtgtgagggtatt

SEQ ID NO: 38208 - DNA, 13 bp, Artificial Sequence
  Oligonucleotide for detection of SNP TSC0011833
aataccctcacac

SEQ ID NO: 38209 - DNA, 13 bp, Artificial Sequence
  Oligonucleotide for detection of SNP TSC0011833
gtgtgatggtatt

SEQ ID NO: 38210 - DNA, 13 bp, Artificial Sequence
  Oligonucleotide for detection of SNP TSC0011833
aataccatcacac

SEQ ID NO: 38211 - DNA, 13 bp, Artificial Sequence
  Oligonucleotide for detection of SNP TSC0011833
gtgtgacggtatt

SEQ ID NO: 38212 - DNA, 13 bp, Artificial Sequence
  Oligonucleotide for detection of SNP TSC0011833
aataccgtcacac

SEQ ID NO: 38213 - DNA, 13 bp, Artificial Sequence
  Oligonucleotide for detection of SNP TSC0011834
tttttaaatattt

SEQ ID NO: 38214 - DNA, 13 bp, Artificial Sequence
  Oligonucleotide for detection of SNP TSC0011834
aaatatttaaaaa

SEQ ID NO: 38215 - DNA, 13 bp, Artificial Sequence
  Oligonucleotide for detection of SNP TSC0011834
tttttagatattt

SEQ ID NO: 38216 - DNA, 13 bp, Artificial Sequence
  Oligonucleotide for detection of SNP TSC0011834
aaatatctaaaaa

SEQ ID NO: 38217 - DNA, 13 bp, Artificial Sequence
  Oligonucleotide for detection of SNP TSC0011835
attgttaagtttg

SEQ ID NO: 38218 - DNA, 13 bp, Artificial Sequence
  Oligonucleotide for detection of SNP TSC0011835
caaacttaacaat

SEQ ID NO: 38219 - DNA, 13 bp, Artificial Sequence
  Oligonucleotide for detection of SNP TSC0011835
attgttgagtttg

SEQ ID NO: 38220 - DNA, 13 bp, Artificial Sequence
  Oligonucleotide for detection of SNP TSC0011835
caaactcaacaat

SEQ ID NO: 38221 - DNA, 13 bp, Artificial Sequence
  Oligonucleotide for detection of SNP TSC0011836
aggatagggggga

SEQ ID NO: 38222 - DNA, 13 bp, Artificial Sequence
  Oligonucleotide for detection of SNP TSC0011836
tcccccctatcct

SEQ ID NO: 38223 - DNA, 13 bp, Artificial Sequence
  Oligonucleotide for detection of SNP TSC0011836
aggataaggggga

SEQ ID NO: 38224 - DNA, 13 bp, Artificial Sequence
  Oligonucleotide for detection of SNP TSC0011836
tcccccttatcct

SEQ ID NO: 38225 - DNA, 13 bp, Artificial Sequence
  Oligonucleotide for detection of SNP TSC0011837
gagttgggatatt

SEQ ID NO: 38226 - DNA, 13 bp, Artificial Sequence
  Oligonucleotide for detection of SNP TSC0011837
aatatcccaactc

SEQ ID NO: 38227 - DNA, 13 bp, Artificial Sequence
  Oligonucleotide for detection of SNP TSC0011837
gagttgtgatatt

SEQ ID NO: 38228 - DNA, 13 bp, Artificial Sequence
  Oligonucleotide for detection of SNP TSC0011837
aatatcacaactc

SEQ ID NO: 38229 - DNA, 13 bp, Artificial Sequence
  Oligonucleotide for detection of SNP TSC0011837
agtattttagtty

SEQ ID NO: 38230 - DNA, 13 bp, Artificial Sequence
  Oligonucleotide for detection of SNP TSC0011837
raactaaaatact

SEQ ID NO: 38231 - DNA, 13 bp, Artificial Sequence
  Oligonucleotide for detection of SNP TSC0011837
agtattatagtty

SEQ ID NO: 38232 - DNA, 13 bp, Artificial Sequence
  Oligonucleotide for detection of SNP TSC0011837
raactataatact

SEQ ID NO: 38233 - DNA, 13 bp, Artificial Sequence
  Oligonucleotide for detection of SNP TSC0011838
tttgaggtagggt

SEQ ID NO: 38234 - DNA, 13 bp, Artificial Sequence
  Oligonucleotide for detection of SNP TSC0011838
accctacctcaaa

SEQ ID NO: 38235 - DNA, 13 bp, Artificial Sequence
  Oligonucleotide for detection of SNP TSC0011838
tttgagatagggt

SEQ ID NO: 38236 - DNA, 13 bp, Artificial Sequence
  Oligonucleotide for detection of SNP TSC0011838
accctatctcaaa

SEQ ID NO: 38237 - DNA, 13 bp, Artificial Sequence
  Oligonucleotide for detection of SNP TSC0011840
taggaaatgtatg

SEQ ID NO: 38238 - DNA, 13 bp, Artificial Sequence
  Oligonucleotide for detection of SNP TSC0011840
catacatttccta

SEQ ID NO: 38239 - DNA, 13 bp, Artificial Sequence
  Oligonucleotide for detection of SNP TSC0011840
taggaattgtatg

SEQ ID NO: 38240 - DNA, 13 bp, Artificial Sequence
  Oligonucleotide for detection of SNP TSC0011840
catacaattccta

SEQ ID NO: 38241 - DNA, 13 bp, Artificial Sequence
  Oligonucleotide for detection of SNP TSC0011840
taggaaacgtatg

SEQ ID NO: 38242 - DNA, 13 bp, Artificial Sequence
  Oligonucleotide for detection of SNP TSC0011840
catacgtttccta

SEQ ID NO: 38243 - DNA, 13 bp, Artificial Sequence
  Oligonucleotide for detection of SNP TSC0011840
taggaatcgtatg

SEQ ID NO: 38244 - DNA, 13 bp, Artificial Sequence
  Oligonucleotide for detection of SNP TSC0011840
catacgattccta

SEQ ID NO: 38245 - DNA, 13 bp, Artificial Sequence
  Oligonucleotide for detection of SNP TSC0011840
tatatgttttttg

SEQ ID NO: 38246 - DNA, 13 bp, Artificial Sequence
  Oligonucleotide for detection of SNP TSC0011840
caaaaaacatata

SEQ ID NO: 38247 - DNA, 13 bp, Artificial Sequence
  Oligonucleotide for detection of SNP TSC0011840
tatatggtttttg

SEQ ID NO: 38248 - DNA, 13 bp, Artificial Sequence
  Oligonucleotide for detection of SNP TSC0011840
caaaaaccatata

SEQ ID NO: 38249 - DNA, 13 bp, Artificial Sequence
  Oligonucleotide for detection of SNP TSC0011840
tatacgttttttg

SEQ ID NO: 38250 - DNA, 13 bp, Artificial Sequence
  Oligonucleotide for detection of SNP TSC0011840
caaaaaacgtata

SEQ ID NO: 38251 - DNA, 13 bp, Artificial Sequence
  Oligonucleotide for detection of SNP TSC0011840
tatacggtttttg

SEQ ID NO: 38252 - DNA, 13 bp, Artificial Sequence
  Oligonucleotide for detection of SNP TSC0011840
caaaaaccgtata

SEQ ID NO: 38253 - DNA, 13 bp, Artificial Sequence
  Oligonucleotide for detection of SNP TSC0011841
tagtattgtggtt

SEQ ID NO: 38254 - DNA, 13 bp, Artificial Sequence
  Oligonucleotide for detection of SNP TSC0011841
aaccacaatacta

SEQ ID NO: 38255 - DNA, 13 bp, Artificial Sequence
  Oligonucleotide for detection of SNP TSC0011841
tagtatggtggtt

SEQ ID NO: 38256 - DNA, 13 bp, Artificial Sequence
  Oligonucleotide for detection of SNP TSC0011841
aaccaccatacta

SEQ ID NO: 38257 - DNA, 13 bp, Artificial Sequence
  Oligonucleotide for detection of SNP TSC0011841
tagtatcgtggtt

SEQ ID NO: 38258 - DNA, 13 bp, Artificial Sequence
  Oligonucleotide for detection of SNP TSC0011841
aaccacgatacta

SEQ ID NO: 38259 - DNA, 13 bp, Artificial Sequence
  Oligonucleotide for detection of SNP TSC0011841
tagtacggtggtt

SEQ ID NO: 38260 - DNA, 13 bp, Artificial Sequence
  Oligonucleotide for detection of SNP TSC0011841
aaccaccgtacta

SEQ ID NO: 38261 - DNA, 13 bp, Artificial Sequence
  Oligonucleotide for detection of SNP TSC0011841
agttatggtgttg

SEQ ID NO: 38262 - DNA, 13 bp, Artificial Sequence
  Oligonucleotide for detection of SNP TSC0011841
caacaccataact

SEQ ID NO: 38263 - DNA, 13 bp, Artificial Sequence
  Oligonucleotide for detection of SNP TSC0011841
agttattgtgttg

SEQ ID NO: 38264 - DNA, 13 bp, Artificial Sequence
  Oligonucleotide for detection of SNP TSC0011841
caacacaataact

SEQ ID NO: 38265 - DNA, 13 bp, Artificial Sequence
  Oligonucleotide for detection of SNP TSC0011841
agttacggtgttg

SEQ ID NO: 38266 - DNA, 13 bp, Artificial Sequence
  Oligonucleotide for detection of SNP TSC0011841
caacaccgtaact

SEQ ID NO: 38267 - DNA, 13 bp, Artificial Sequence
  Oligonucleotide for detection of SNP TSC0011841
agttatcgtgttg

SEQ ID NO: 38268 - DNA, 13 bp, Artificial Sequence
  Oligonucleotide for detection of SNP TSC0011841
caacacgataact

SEQ ID NO: 38269 - DNA, 13 bp, Artificial Sequence
  Oligonucleotide for detection of SNP TSC0011842
ggatatattaggg

SEQ ID NO: 38270 - DNA, 13 bp, Artificial Sequence
  Oligonucleotide for detection of SNP TSC0011842
ccctaatatatcc

SEQ ID NO: 38271 - DNA, 13 bp, Artificial Sequence
  Oligonucleotide for detection of SNP TSC0011842
ggatattttaggg

SEQ ID NO: 38272 - DNA, 13 bp, Artificial Sequence
  Oligonucleotide for detection of SNP TSC0011842
ccctaaaatatcc

SEQ ID NO: 38273 - DNA, 13 bp, Artificial Sequence
  Oligonucleotide for detection of SNP TSC0011842
ttttggtgtgtty

SEQ ID NO: 38274 - DNA, 13 bp, Artificial Sequence
  Oligonucleotide for detection of SNP TSC0011842
raacacaccaaaa

SEQ ID NO: 38275 - DNA, 13 bp, Artificial Sequence
  Oligonucleotide for detection of SNP TSC0011842
ttttggggtgtty

SEQ ID NO: 38276 - DNA, 13 bp, Artificial Sequence
  Oligonucleotide for detection of SNP TSC0011842
raacaccccaaaa

SEQ ID NO: 38277 - DNA, 13 bp, Artificial Sequence
  Oligonucleotide for detection of SNP TSC0011843
gggggtagataga

SEQ ID NO: 38278 - DNA, 13 bp, Artificial Sequence
  Oligonucleotide for detection of SNP TSC0011843
tctatctaccccc

SEQ ID NO: 38279 - DNA, 13 bp, Artificial Sequence
  Oligonucleotide for detection of SNP TSC0011843
gggggtggataga

SEQ ID NO: 38280 - DNA, 13 bp, Artificial Sequence
  Oligonucleotide for detection of SNP TSC0011843
tctatccaccccc

SEQ ID NO: 38281 - DNA, 13 bp, Artificial Sequence
  Oligonucleotide for detection of SNP TSC0011843
gggggcggataga

SEQ ID NO: 38282 - DNA, 13 bp, Artificial Sequence
  Oligonucleotide for detection of SNP TSC0011843
tctatccgccccc

SEQ ID NO: 38283 - DNA, 13 bp, Artificial Sequence
  Oligonucleotide for detection of SNP TSC0011844
tggataggttaty

SEQ ID NO: 38284 - DNA, 13 bp, Artificial Sequence
  Oligonucleotide for detection of SNP TSC0011844
rataacctatcca

SEQ ID NO: 38285 - DNA, 13 bp, Artificial Sequence
  Oligonucleotide for detection of SNP TSC0011844
tggataagttaty

SEQ ID NO: 38286 - DNA, 13 bp, Artificial Sequence
  Oligonucleotide for detection of SNP TSC0011844
rataacttatcca

SEQ ID NO: 38287 - DNA, 13 bp, Artificial Sequence
  Oligonucleotide for detection of SNP TSC0011845
taatttatttaty

SEQ ID NO: 38288 - DNA, 13 bp, Artificial Sequence
  Oligonucleotide for detection of SNP TSC0011845
rataaataaatta

SEQ ID NO: 38289 - DNA, 13 bp, Artificial Sequence
  Oligonucleotide for detection of SNP TSC0011845
taatttttttaty

SEQ ID NO: 38290 - DNA, 13 bp, Artificial Sequence
  Oligonucleotide for detection of SNP TSC0011845
rataaaaaaatta

SEQ ID NO: 38291 - DNA, 13 bp, Artificial Sequence
  Oligonucleotide for detection of SNP TSC0011845
ggtggataggtta

SEQ ID NO: 38292 - DNA, 13 bp, Artificial Sequence
  Oligonucleotide for detection of SNP TSC0011845
taacctatccacc

SEQ ID NO: 38293 - DNA, 13 bp, Artificial Sequence
  Oligonucleotide for detection of SNP TSC0011845
ggtggaaaggtta

SEQ ID NO: 38294 - DNA, 13 bp, Artificial Sequence
  Oligonucleotide for detection of SNP TSC0011845
taacctttccacc

SEQ ID NO: 38295 - DNA, 13 bp, Artificial Sequence
  Oligonucleotide for detection of SNP TSC0011848
ggagaaattgagg

SEQ ID NO: 38296 - DNA, 13 bp, Artificial Sequence
  Oligonucleotide for detection of SNP TSC0011848
cctcaatttctcc

SEQ ID NO: 38297 - DNA, 13 bp, Artificial Sequence
  Oligonucleotide for detection of SNP TSC0011848
ggagaagttgagg

SEQ ID NO: 38298 - DNA, 13 bp, Artificial Sequence
  Oligonucleotide for detection of SNP TSC0011848
cctcaacttctcc

SEQ ID NO: 38299 - DNA, 13 bp, Artificial Sequence
  Oligonucleotide for detection of SNP TSC0011849
tttaataagtttt

SEQ ID NO: 38300 - DNA, 13 bp, Artificial Sequence
  Oligonucleotide for detection of SNP TSC0011849
aaaacttattaaa

SEQ ID NO: 38301 - DNA, 13 bp, Artificial Sequence
  Oligonucleotide for detection of SNP TSC0011849
tttaatgagtttt

SEQ ID NO: 38302 - DNA, 13 bp, Artificial Sequence
  Oligonucleotide for detection of SNP TSC0011849
aaaactcattaaa

SEQ ID NO: 38303 - DNA, 13 bp, Artificial Sequence
  Oligonucleotide for detection of SNP TSC0011849
tttaacgagtttt

SEQ ID NO: 38304 - DNA, 13 bp, Artificial Sequence
  Oligonucleotide for detection of SNP TSC0011849
aaaactcgttaaa

SEQ ID NO: 38305 - DNA, 13 bp, Artificial Sequence
  Oligonucleotide for detection of SNP TSC0011849
aaagtttgttaga

SEQ ID NO: 38306 - DNA, 13 bp, Artificial Sequence
  Oligonucleotide for detection of SNP TSC0011849
tctaacaaacttt

SEQ ID NO: 38307 - DNA, 13 bp, Artificial Sequence
  Oligonucleotide for detection of SNP TSC0011849
aaagttcgttaga

SEQ ID NO: 38308 - DNA, 13 bp, Artificial Sequence
  Oligonucleotide for detection of SNP TSC0011849
tctaacgaacttt

SEQ ID NO: 38309 - DNA, 13 bp, Artificial Sequence
  Oligonucleotide for detection of SNP TSC0011850
tttagggatagty

SEQ ID NO: 38310 - DNA, 13 bp, Artificial Sequence
  Oligonucleotide for detection of SNP TSC0011850
ractatccctaaa

SEQ ID NO: 38311 - DNA, 13 bp, Artificial Sequence
  Oligonucleotide for detection of SNP TSC0011850
tttaggtatagty

SEQ ID NO: 38312 - DNA, 13 bp, Artificial Sequence
  Oligonucleotide for detection of SNP TSC0011850
ractatacctaaa

SEQ ID NO: 38313 - DNA, 13 bp, Artificial Sequence
  Oligonucleotide for detection of SNP TSC0011850
ggttatttttgga

SEQ ID NO: 38314 - DNA, 13 bp, Artificial Sequence
  Oligonucleotide for detection of SNP TSC0011850
tccaaaaataacc

SEQ ID NO: 38315 - DNA, 13 bp, Artificial Sequence
  Oligonucleotide for detection of SNP TSC0011850
ggttatatttgga

SEQ ID NO: 38316 - DNA, 13 bp, Artificial Sequence
  Oligonucleotide for detection of SNP TSC0011850
tccaaatataacc

SEQ ID NO: 38317 - DNA, 13 bp, Artificial Sequence
  Oligonucleotide for detection of SNP TSC0011854
taatttagggtgg

SEQ ID NO: 38318 - DNA, 13 bp, Artificial Sequence
  Oligonucleotide for detection of SNP TSC0011854
ccaccctaaatta

SEQ ID NO: 38319 - DNA, 13 bp, Artificial Sequence
  Oligonucleotide for detection of SNP TSC0011854
taatttggggtgg

SEQ ID NO: 38320 - DNA, 13 bp, Artificial Sequence
  Oligonucleotide for detection of SNP TSC0011854
ccaccccaaatta

SEQ ID NO: 38321 - DNA, 13 bp, Artificial Sequence
  Oligonucleotide for detection of SNP TSC0011855
agttatattggtt

SEQ ID NO: 38322 - DNA, 13 bp, Artificial Sequence
  Oligonucleotide for detection of SNP TSC0011855
aaccaatataact

SEQ ID NO: 38323 - DNA, 13 bp, Artificial Sequence
  Oligonucleotide for detection of SNP TSC0011855
agttatgttggtt

SEQ ID NO: 38324 - DNA, 13 bp, Artificial Sequence
  Oligonucleotide for detection of SNP TSC0011855
aaccaacataact

SEQ ID NO: 38325 - DNA, 13 bp, Artificial Sequence
  Oligonucleotide for detection of SNP TSC0011855
agttacgttggtt

SEQ ID NO: 38326 - DNA, 13 bp, Artificial Sequence
  Oligonucleotide for detection of SNP TSC0011855
aaccaacgtaact

SEQ ID NO: 38327 - DNA, 13 bp, Artificial Sequence
  Oligonucleotide for detection of SNP TSC0011855
agttaatgtgatt

SEQ ID NO: 38328 - DNA, 13 bp, Artificial Sequence
  Oligonucleotide for detection of SNP TSC0011855
aatcacattaact

SEQ ID NO: 38329 - DNA, 13 bp, Artificial Sequence
  Oligonucleotide for detection of SNP TSC0011855
agttaacgtgatt

SEQ ID NO: 38330 - DNA, 13 bp, Artificial Sequence
  Oligonucleotide for detection of SNP TSC0011855
aatcacgttaact

SEQ ID NO: 38331 - DNA, 13 bp, Artificial Sequence
  Oligonucleotide for detection of SNP TSC0011856
ataggtatattaa

SEQ ID NO: 38332 - DNA, 13 bp, Artificial Sequence
  Oligonucleotide for detection of SNP TSC0011856
ttaatatacctat

SEQ ID NO: 38333 - DNA, 13 bp, Artificial Sequence
  Oligonucleotide for detection of SNP TSC0011856
ataggtgtattaa

SEQ ID NO: 38334 - DNA, 13 bp, Artificial Sequence
  Oligonucleotide for detection of SNP TSC0011856
ttaatacacctat

SEQ ID NO: 38335 - DNA, 13 bp, Artificial Sequence
  Oligonucleotide for detection of SNP TSC0011859
gatttttgttatt

SEQ ID NO: 38336 - DNA, 13 bp, Artificial Sequence
  Oligonucleotide for detection of SNP TSC0011859
aataacaaaaatc

SEQ ID NO: 38337 - DNA, 13 bp, Artificial Sequence
  Oligonucleotide for detection of SNP TSC0011859
gattttcgttatt

SEQ ID NO: 38338 - DNA, 13 bp, Artificial Sequence
  Oligonucleotide for detection of SNP TSC0011859
aataacgaaaatc

SEQ ID NO: 38339 - DNA, 13 bp, Artificial Sequence
  Oligonucleotide for detection of SNP TSC0011859
agtgatgggggty

SEQ ID NO: 38340 - DNA, 13 bp, Artificial Sequence
  Oligonucleotide for detection of SNP TSC0011859
racccccatcact

SEQ ID NO: 38341 - DNA, 13 bp, Artificial Sequence
  Oligonucleotide for detection of SNP TSC0011859
agtgataggggty

SEQ ID NO: 38342 - DNA, 13 bp, Artificial Sequence
  Oligonucleotide for detection of SNP TSC0011859
racccctatcact

SEQ ID NO: 38343 - DNA, 13 bp, Artificial Sequence
  Oligonucleotide for detection of SNP TSC0011859
agtgacgggggty

SEQ ID NO: 38344 - DNA, 13 bp, Artificial Sequence
  Oligonucleotide for detection of SNP TSC0011859
racccccgtcact

SEQ ID NO: 38345 - DNA, 13 bp, Artificial Sequence
  Oligonucleotide for detection of SNP TSC0011861
gatatagagttag

SEQ ID NO: 38346 - DNA, 13 bp, Artificial Sequence
  Oligonucleotide for detection of SNP TSC0011861
ctaactctatatc

SEQ ID NO: 38347 - DNA, 13 bp, Artificial Sequence
  Oligonucleotide for detection of SNP TSC0011861
gatatatagttag

SEQ ID NO: 38348 - DNA, 13 bp, Artificial Sequence
  Oligonucleotide for detection of SNP TSC0011861
ctaactatatatc

SEQ ID NO: 38349 - DNA, 13 bp, Artificial Sequence
  Oligonucleotide for detection of SNP TSC0011862
gattggtgtatga

SEQ ID NO: 38350 - DNA, 13 bp, Artificial Sequence
  Oligonucleotide for detection of SNP TSC0011862
tcatacaccaatc

SEQ ID NO: 38351 - DNA, 13 bp, Artificial Sequence
  Oligonucleotide for detection of SNP TSC0011862
gattggcgtatga

SEQ ID NO: 38352 - DNA, 13 bp, Artificial Sequence
  Oligonucleotide for detection of SNP TSC0011862
tcatacgccaatc

SEQ ID NO: 38353 - DNA, 13 bp, Artificial Sequence
  Oligonucleotide for detection of SNP TSC0011862
ttatatgttagty

SEQ ID NO: 38354 - DNA, 13 bp, Artificial Sequence
  Oligonucleotide for detection of SNP TSC0011862
ractaacatataa

SEQ ID NO: 38355 - DNA, 13 bp, Artificial Sequence
  Oligonucleotide for detection of SNP TSC0011862
ttatatattagty

SEQ ID NO: 38356 - DNA, 13 bp, Artificial Sequence
  Oligonucleotide for detection of SNP TSC0011862
ractaatatataa

SEQ ID NO: 38357 - DNA, 13 bp, Artificial Sequence
  Oligonucleotide for detection of SNP TSC0011862
ttatacgttagty

SEQ ID NO: 38358 - DNA, 13 bp, Artificial Sequence
  Oligonucleotide for detection of SNP TSC0011862
ractaacgtataa

SEQ ID NO: 38359 - DNA, 13 bp, Artificial Sequence
  Oligonucleotide for detection of SNP TSC0011863
ggagggaagaaat

SEQ ID NO: 38360 - DNA, 13 bp, Artificial Sequence
  Oligonucleotide for detection of SNP TSC0011863
atttcttccctcc

SEQ ID NO: 38361 - DNA, 13 bp, Artificial Sequence
  Oligonucleotide for detection of SNP TSC0011863
ggaggggagaaat

SEQ ID NO: 38362 - DNA, 13 bp, Artificial Sequence
  Oligonucleotide for detection of SNP TSC0011863
atttctcccctcc

SEQ ID NO: 38363 - DNA, 13 bp, Artificial Sequence
  Oligonucleotide for detection of SNP TSC0011864
gatgtgtgtttta

SEQ ID NO: 38364 - DNA, 13 bp, Artificial Sequence
  Oligonucleotide for detection of SNP TSC0011864
taaaacacacatc

SEQ ID NO: 38365 - DNA, 13 bp, Artificial Sequence
  Oligonucleotide for detection of SNP TSC0011864
gacgtgtgtttta

SEQ ID NO: 38366 - DNA, 13 bp, Artificial Sequence
  Oligonucleotide for detection of SNP TSC0011864
taaaacacacgtc

SEQ ID NO: 38367 - DNA, 13 bp, Artificial Sequence
  Oligonucleotide for detection of SNP TSC0011864
gatgcgtgtttta

SEQ ID NO: 38368 - DNA, 13 bp, Artificial Sequence
  Oligonucleotide for detection of SNP TSC0011864
taaaacacgcatc

SEQ ID NO: 38369 - DNA, 13 bp, Artificial Sequence
  Oligonucleotide for detection of SNP TSC0011864
gatgtgcgtttta

SEQ ID NO: 38370 - DNA, 13 bp, Artificial Sequence
  Oligonucleotide for detection of SNP TSC0011864
taaaacgcacatc

SEQ ID NO: 38371 - DNA, 13 bp, Artificial Sequence
  Oligonucleotide for detection of SNP TSC0011864
gacgcgtgtttta

SEQ ID NO: 38372 - DNA, 13 bp, Artificial Sequence
  Oligonucleotide for detection of SNP TSC0011864
taaaacacgcgtc

SEQ ID NO: 38373 - DNA, 13 bp, Artificial Sequence
  Oligonucleotide for detection of SNP TSC0011864
gacgtgcgtttta

SEQ ID NO: 38374 - DNA, 13 bp, Artificial Sequence
  Oligonucleotide for detection of SNP TSC0011864
taaaacgcacgtc

SEQ ID NO: 38375 - DNA, 13 bp, Artificial Sequence
  Oligonucleotide for detection of SNP TSC0011864
gatgcgcgtttta

SEQ ID NO: 38376 - DNA, 13 bp, Artificial Sequence
  Oligonucleotide for detection of SNP TSC0011864
taaaacgcgcatc

SEQ ID NO: 38377 - DNA, 13 bp, Artificial Sequence
  Oligonucleotide for detection of SNP TSC0011864
gacgcgcgtttta

SEQ ID NO: 38378 - DNA, 13 bp, Artificial Sequence
  Oligonucleotide for detection of SNP TSC0011864
taaaacgcgcgtc

SEQ ID NO: 38379 - DNA, 13 bp, Artificial Sequence
  Oligonucleotide for detection of SNP TSC0011864
tgaggtgtgtgty

SEQ ID NO: 38380 - DNA, 13 bp, Artificial Sequence
  Oligonucleotide for detection of SNP TSC0011864
racacacacctca

SEQ ID NO: 38381 - DNA, 13 bp, Artificial Sequence
  Oligonucleotide for detection of SNP TSC0011864
tgaggtatgtgty

SEQ ID NO: 38382 - DNA, 13 bp, Artificial Sequence
  Oligonucleotide for detection of SNP TSC0011864
racacatacctca

SEQ ID NO: 38383 - DNA, 13 bp, Artificial Sequence
  Oligonucleotide for detection of SNP TSC0011864
tgaggcgtgtgty

SEQ ID NO: 38384 - DNA, 13 bp, Artificial Sequence
  Oligonucleotide for detection of SNP TSC0011864
racacacgcctca

SEQ ID NO: 38385 - DNA, 13 bp, Artificial Sequence
  Oligonucleotide for detection of SNP TSC0011864
tgaggtacgtgty

SEQ ID NO: 38386 - DNA, 13 bp, Artificial Sequence
  Oligonucleotide for detection of SNP TSC0011864
racacgtacctca

SEQ ID NO: 38387 - DNA, 13 bp, Artificial Sequence
  Oligonucleotide for detection of SNP TSC0011864
tgaggtgcgtgty

SEQ ID NO: 38388 - DNA, 13 bp, Artificial Sequence
  Oligonucleotide for detection of SNP TSC0011864
racacgcacctca

SEQ ID NO: 38389 - DNA, 13 bp, Artificial Sequence
  Oligonucleotide for detection of SNP TSC0011864
tgaggtatgcgty

SEQ ID NO: 38390 - DNA, 13 bp, Artificial Sequence
  Oligonucleotide for detection of SNP TSC0011864
racgcatacctca

SEQ ID NO: 38391 - DNA, 13 bp, Artificial Sequence
  Oligonucleotide for detection of SNP TSC0011864
tgaggtgtgcgty

SEQ ID NO: 38392 - DNA, 13 bp, Artificial Sequence
  Oligonucleotide for detection of SNP TSC0011864
racgcacacctca

SEQ ID NO: 38393 - DNA, 13 bp, Artificial Sequence
  Oligonucleotide for detection of SNP TSC0011864
tgaggtacgcgty

SEQ ID NO: 38394 - DNA, 13 bp, Artificial Sequence
  Oligonucleotide for detection of SNP TSC0011864
racgcgtacctca

SEQ ID NO: 38395 - DNA, 13 bp, Artificial Sequence
  Oligonucleotide for detection of SNP TSC0011864
tgaggcgcgtgty

SEQ ID NO: 38396 - DNA, 13 bp, Artificial Sequence
  Oligonucleotide for detection of SNP TSC0011864
racacgcgcctca

SEQ ID NO: 38397 - DNA, 13 bp, Artificial Sequence
  Oligonucleotide for detection of SNP TSC0011864
tgaggcgtgcgty

SEQ ID NO: 38398 - DNA, 13 bp, Artificial Sequence
  Oligonucleotide for detection of SNP TSC0011864
racgcacgcctca

SEQ ID NO: 38399 - DNA, 13 bp, Artificial Sequence
  Oligonucleotide for detection of SNP TSC0011864
tgaggtgcgcgty

SEQ ID NO: 38400 - DNA, 13 bp, Artificial Sequence
  Oligonucleotide for detection of SNP TSC0011864
racgcgcacctca

SEQ ID NO: 38401 - DNA, 13 bp, Artificial Sequence
  Oligonucleotide for detection of SNP TSC0011864
tgaggcgcgcgty

SEQ ID NO: 38402 - DNA, 13 bp, Artificial Sequence
  Oligonucleotide for detection of SNP TSC0011864
racgcgcgcctca

SEQ ID NO: 38403 - DNA, 13 bp, Artificial Sequence
  Oligonucleotide for detection of SNP TSC0011865
gaaaagtaaagtt

SEQ ID NO: 38404 - DNA, 13 bp, Artificial Sequence
  Oligonucleotide for detection of SNP TSC0011865
aactttacttttc

SEQ ID NO: 38405 - DNA, 13 bp, Artificial Sequence
  Oligonucleotide for detection of SNP TSC0011865
gaaaaggaaagtt

SEQ ID NO: 38406 - DNA, 13 bp, Artificial Sequence
  Oligonucleotide for detection of SNP TSC0011865
aactttccttttc

SEQ ID NO: 38407 - DNA, 13 bp, Artificial Sequence
  Oligonucleotide for detection of SNP TSC0011867
tatggtattgggy

SEQ ID NO: 38408 - DNA, 13 bp, Artificial Sequence
  Oligonucleotide for detection of SNP TSC0011867
rcccaataccata

SEQ ID NO: 38409 - DNA, 13 bp, Artificial Sequence
  Oligonucleotide for detection of SNP TSC0011867
tatggtgttgggy

SEQ ID NO: 38410 - DNA, 13 bp, Artificial Sequence
  Oligonucleotide for detection of SNP TSC0011867
rcccaacaccata

SEQ ID NO: 38411 - DNA, 13 bp, Artificial Sequence
  Oligonucleotide for detection of SNP TSC0011867
tatggcgttgggy

SEQ ID NO: 38412 - DNA, 13 bp, Artificial Sequence
  Oligonucleotide for detection of SNP TSC0011867
rcccaacgccata

SEQ ID NO: 38413 - DNA, 13 bp, Artificial Sequence
  Oligonucleotide for detection of SNP TSC0011867
gtttagtgttatg

SEQ ID NO: 38414 - DNA, 13 bp, Artificial Sequence
  Oligonucleotide for detection of SNP TSC0011867
cataacactaaac

SEQ ID NO: 38415 - DNA, 13 bp, Artificial Sequence
  Oligonucleotide for detection of SNP TSC0011867
gtttagcgttatg

SEQ ID NO: 38416 - DNA, 13 bp, Artificial Sequence
  Oligonucleotide for detection of SNP TSC0011867
cataacgctaaac

SEQ ID NO: 38417 - DNA, 13 bp, Artificial Sequence
  Oligonucleotide for detection of SNP TSC0011868
gggagtagtggga

SEQ ID NO: 38418 - DNA, 13 bp, Artificial Sequence
  Oligonucleotide for detection of SNP TSC0011868
tcccactactccc

SEQ ID NO: 38419 - DNA, 13 bp, Artificial Sequence
  Oligonucleotide for detection of SNP TSC0011868
gggagtggtggga

SEQ ID NO: 38420 - DNA, 13 bp, Artificial Sequence
  Oligonucleotide for detection of SNP TSC0011868
tcccaccactccc

SEQ ID NO: 38421 - DNA, 13 bp, Artificial Sequence
  Oligonucleotide for detection of SNP TSC0011868
gggagcggtggga

SEQ ID NO: 38422 - DNA, 13 bp, Artificial Sequence
  Oligonucleotide for detection of SNP TSC0011868
tcccaccgctccc

SEQ ID NO: 38423 - DNA, 13 bp, Artificial Sequence
  Oligonucleotide for detection of SNP TSC0011868
ttttattgtttty

SEQ ID NO: 38424 - DNA, 13 bp, Artificial Sequence
  Oligonucleotide for detection of SNP TSC0011868
raaaacaataaaa

SEQ ID NO: 38425 - DNA, 13 bp, Artificial Sequence
  Oligonucleotide for detection of SNP TSC0011868
ttttatcgtttty

SEQ ID NO: 38426 - DNA, 13 bp, Artificial Sequence
  Oligonucleotide for detection of SNP TSC0011868
raaaacgataaaa

SEQ ID NO: 38427 - DNA, 13 bp, Artificial Sequence
  Oligonucleotide for detection of SNP TSC0011869
tgagttaatttga

SEQ ID NO: 38428 - DNA, 13 bp, Artificial Sequence
  Oligonucleotide for detection of SNP TSC0011869
tcaaattaactca

SEQ ID NO: 38429 - DNA, 13 bp, Artificial Sequence
  Oligonucleotide for detection of SNP TSC0011869
tgagttgatttga

SEQ ID NO: 38430 - DNA, 13 bp, Artificial Sequence
  Oligonucleotide for detection of SNP TSC0011869
tcaaatcaactca

SEQ ID NO: 38431 - DNA, 13 bp, Artificial Sequence
  Oligonucleotide for detection of SNP TSC0011870
gagttaatttgaa

SEQ ID NO: 38432 - DNA, 13 bp, Artificial Sequence
  Oligonucleotide for detection of SNP TSC0011870
ttcaaattaactc

SEQ ID NO: 38433 - DNA, 13 bp, Artificial Sequence
  Oligonucleotide for detection of SNP TSC0011870
gagttagtttgaa

SEQ ID NO: 38434 - DNA, 13 bp, Artificial Sequence
  Oligonucleotide for detection of SNP TSC0011870
ttcaaactaactc

SEQ ID NO: 38435 - DNA, 13 bp, Artificial Sequence
  Oligonucleotide for detection of SNP TSC0011871
atgggttggggtt

SEQ ID NO: 38436 - DNA, 13 bp, Artificial Sequence
  Oligonucleotide for detection of SNP TSC0011871
aaccccaacccat

SEQ ID NO: 38437 - DNA, 13 bp, Artificial Sequence
  Oligonucleotide for detection of SNP TSC0011871
acgggttggggtt

SEQ ID NO: 38438 - DNA, 13 bp, Artificial Sequence
  Oligonucleotide for detection of SNP TSC0011871
aaccccaacccgt

SEQ ID NO: 38439 - DNA, 13 bp, Artificial Sequence
  Oligonucleotide for detection of SNP TSC0011871
atgggtcggggtt

SEQ ID NO: 38440 - DNA, 13 bp, Artificial Sequence
  Oligonucleotide for detection of SNP TSC0011871
aaccccgacccat

SEQ ID NO: 38441 - DNA, 13 bp, Artificial Sequence
  Oligonucleotide for detection of SNP TSC0011871
acgggtcggggtt

SEQ ID NO: 38442 - DNA, 13 bp, Artificial Sequence
  Oligonucleotide for detection of SNP TSC0011871
aaccccgacccgt

SEQ ID NO: 38443 - DNA, 13 bp, Artificial Sequence
  Oligonucleotide for detection of SNP TSC0011871
aattttggtttgt

SEQ ID NO: 38444 - DNA, 13 bp, Artificial Sequence
  Oligonucleotide for detection of SNP TSC0011871
acaaaccaaaatt

SEQ ID NO: 38445 - DNA, 13 bp, Artificial Sequence
  Oligonucleotide for detection of SNP TSC0011871
aattttagtttgt

SEQ ID NO: 38446 - DNA, 13 bp, Artificial Sequence
  Oligonucleotide for detection of SNP TSC0011871
acaaactaaaatt

SEQ ID NO: 38447 - DNA, 13 bp, Artificial Sequence
  Oligonucleotide for detection of SNP TSC0011871
aatttcggtttgt

SEQ ID NO: 38448 - DNA, 13 bp, Artificial Sequence
  Oligonucleotide for detection of SNP TSC0011871
acaaaccgaaatt

SEQ ID NO: 38449 - DNA, 13 bp, Artificial Sequence
  Oligonucleotide for detection of SNP TSC0011871
aattttagttcgt

SEQ ID NO: 38450 - DNA, 13 bp, Artificial Sequence
  Oligonucleotide for detection of SNP TSC0011871
acgaactaaaatt

SEQ ID NO: 38451 - DNA, 13 bp, Artificial Sequence
  Oligonucleotide for detection of SNP TSC0011871
aattttggttcgt

SEQ ID NO: 38452 - DNA, 13 bp, Artificial Sequence
  Oligonucleotide for detection of SNP TSC0011871
acgaaccaaaatt

SEQ ID NO: 38453 - DNA, 13 bp, Artificial Sequence
  Oligonucleotide for detection of SNP TSC0011871
aatttcggttcgt

SEQ ID NO: 38454 - DNA, 13 bp, Artificial Sequence
  Oligonucleotide for detection of SNP TSC0011871
acgaaccgaaatt

SEQ ID NO: 38455 - DNA, 13 bp, Artificial Sequence
  Oligonucleotide for detection of SNP TSC0011872
aggttagggattg

SEQ ID NO: 38456 - DNA, 13 bp, Artificial Sequence
  Oligonucleotide for detection of SNP TSC0011872
caatccctaacct

SEQ ID NO: 38457 - DNA, 13 bp, Artificial Sequence
  Oligonucleotide for detection of SNP TSC0011872
aggttaaggattg

SEQ ID NO: 38458 - DNA, 13 bp, Artificial Sequence
  Oligonucleotide for detection of SNP TSC0011872
caatccttaacct

SEQ ID NO: 38459 - DNA, 13 bp, Artificial Sequence
  Oligonucleotide for detection of SNP TSC0011874
ttagatataaaga

SEQ ID NO: 38460 - DNA, 13 bp, Artificial Sequence
  Oligonucleotide for detection of SNP TSC0011874
tctttatatctaa

SEQ ID NO: 38461 - DNA, 13 bp, Artificial Sequence
  Oligonucleotide for detection of SNP TSC0011874
ttagatgtaaaga

SEQ ID NO: 38462 - DNA, 13 bp, Artificial Sequence
  Oligonucleotide for detection of SNP TSC0011874
tctttacatctaa

SEQ ID NO: 38463 - DNA, 13 bp, Artificial Sequence
  Oligonucleotide for detection of SNP TSC0011875
tgtttcgtttttt

SEQ ID NO: 38464 - DNA, 13 bp, Artificial Sequence
  Oligonucleotide for detection of SNP TSC0011875
aaaaaacgaaaca

SEQ ID NO: 38465 - DNA, 13 bp, Artificial Sequence
  Oligonucleotide for detection of SNP TSC0011875
agggaggggaata

SEQ ID NO: 38466 - DNA, 13 bp, Artificial Sequence
  Oligonucleotide for detection of SNP TSC0011875
tattcccctccct

SEQ ID NO: 38467 - DNA, 13 bp, Artificial Sequence
  Oligonucleotide for detection of SNP TSC0011875
agggagtggaata

SEQ ID NO: 38468 - DNA, 13 bp, Artificial Sequence
  Oligonucleotide for detection of SNP TSC0011875
tattccactccct

SEQ ID NO: 38469 - DNA, 13 bp, Artificial Sequence
  Oligonucleotide for detection of SNP TSC0011875
agggagcggaata

SEQ ID NO: 38470 - DNA, 13 bp, Artificial Sequence
  Oligonucleotide for detection of SNP TSC0011875
tattccgctccct

SEQ ID NO: 38471 - DNA, 13 bp, Artificial Sequence
  Oligonucleotide for detection of SNP TSC0011876
tattgtatttagg

SEQ ID NO: 38472 - DNA, 13 bp, Artificial Sequence
  Oligonucleotide for detection of SNP TSC0011876
cctaaatacaata

SEQ ID NO: 38473 - DNA, 13 bp, Artificial Sequence
  Oligonucleotide for detection of SNP TSC0011876
tattgtgtttagg

SEQ ID NO: 38474 - DNA, 13 bp, Artificial Sequence
  Oligonucleotide for detection of SNP TSC0011876
cctaaacacaata

SEQ ID NO: 38475 - DNA, 13 bp, Artificial Sequence
  Oligonucleotide for detection of SNP TSC0011876
tattgcgtttagg

SEQ ID NO: 38476 - DNA, 13 bp, Artificial Sequence
  Oligonucleotide for detection of SNP TSC0011876
cctaaacgcaata

SEQ ID NO: 38477 - DNA, 13 bp, Artificial Sequence
  Oligonucleotide for detection of SNP TSC0011876
tttgagtgtagtg

SEQ ID NO: 38478 - DNA, 13 bp, Artificial Sequence
  Oligonucleotide for detection of SNP TSC0011876
cactacactcaaa

SEQ ID NO: 38479 - DNA, 13 bp, Artificial Sequence
  Oligonucleotide for detection of SNP TSC0011876
tttgagcgtagtg

SEQ ID NO: 38480 - DNA, 13 bp, Artificial Sequence
  Oligonucleotide for detection of SNP TSC0011876
cactacgctcaaa

SEQ ID NO: 38481 - DNA, 13 bp, Artificial Sequence
  Oligonucleotide for detection of SNP TSC0011877
tttttaatgtgtt

SEQ ID NO: 38482 - DNA, 13 bp, Artificial Sequence
  Oligonucleotide for detection of SNP TSC0011877
aacacattaaaaa

SEQ ID NO: 38483 - DNA, 13 bp, Artificial Sequence
  Oligonucleotide for detection of SNP TSC0011877
tttttagtgtgtt

SEQ ID NO: 38484 - DNA, 13 bp, Artificial Sequence
  Oligonucleotide for detection of SNP TSC0011877
aacacactaaaaa

SEQ ID NO: 38485 - DNA, 13 bp, Artificial Sequence
  Oligonucleotide for detection of SNP TSC0011878
attggtagaaaty

SEQ ID NO: 38486 - DNA, 13 bp, Artificial Sequence
  Oligonucleotide for detection of SNP TSC0011878
ratttctaccaat

SEQ ID NO: 38487 - DNA, 13 bp, Artificial Sequence
  Oligonucleotide for detection of SNP TSC0011878
attggttgaaaty

SEQ ID NO: 38488 - DNA, 13 bp, Artificial Sequence
  Oligonucleotide for detection of SNP TSC0011878
ratttcaaccaat

SEQ ID NO: 38489 - DNA, 13 bp, Artificial Sequence
  Oligonucleotide for detection of SNP TSC0011878
attggtcgaaaty

SEQ ID NO: 38490 - DNA, 13 bp, Artificial Sequence
  Oligonucleotide for detection of SNP TSC0011878
ratttcgaccaat

SEQ ID NO: 38491 - DNA, 13 bp, Artificial Sequence
  Oligonucleotide for detection of SNP TSC0011878
ggtttttattaat

SEQ ID NO: 38492 - DNA, 13 bp, Artificial Sequence
  Oligonucleotide for detection of SNP TSC0011878
attaataaaaacc

SEQ ID NO: 38493 - DNA, 13 bp, Artificial Sequence
  Oligonucleotide for detection of SNP TSC0011878
ggttttgattaat

SEQ ID NO: 38494 - DNA, 13 bp, Artificial Sequence
  Oligonucleotide for detection of SNP TSC0011878
attaatcaaaacc

SEQ ID NO: 38495 - DNA, 13 bp, Artificial Sequence
  Oligonucleotide for detection of SNP TSC0011878
ggtttcgattaat

SEQ ID NO: 38496 - DNA, 13 bp, Artificial Sequence
  Oligonucleotide for detection of SNP TSC0011878
attaatcgaaacc

SEQ ID NO: 38497 - DNA, 13 bp, Artificial Sequence
  Oligonucleotide for detection of SNP TSC0011879
gtgtatataatgy

SEQ ID NO: 38498 - DNA, 13 bp, Artificial Sequence
  Oligonucleotide for detection of SNP TSC0011879
rcattatatacac

SEQ ID NO: 38499 - DNA, 13 bp, Artificial Sequence
  Oligonucleotide for detection of SNP TSC0011879
gtgtatttaatgy

SEQ ID NO: 38500 - DNA, 13 bp, Artificial Sequence
  Oligonucleotide for detection of SNP TSC0011879
rcattaaatacac

SEQ ID NO: 38501 - DNA, 13 bp, Artificial Sequence
  Oligonucleotide for detection of SNP TSC0011879
gcgtatataatgy

SEQ ID NO: 38502 - DNA, 13 bp, Artificial Sequence
  Oligonucleotide for detection of SNP TSC0011879
rcattatatacgc

SEQ ID NO: 38503 - DNA, 13 bp, Artificial Sequence
  Oligonucleotide for detection of SNP TSC0011879
gcgtatttaatgy

SEQ ID NO: 38504 - DNA, 13 bp, Artificial Sequence
  Oligonucleotide for detection of SNP TSC0011879
rcattaaatacgc

SEQ ID NO: 38505 - DNA, 13 bp, Artificial Sequence
  Oligonucleotide for detection of SNP TSC0011879
gtattatgtatgy

SEQ ID NO: 38506 - DNA, 13 bp, Artificial Sequence
  Oligonucleotide for detection of SNP TSC0011879
rcatacataatac

SEQ ID NO: 38507 - DNA, 13 bp, Artificial Sequence
  Oligonucleotide for detection of SNP TSC0011879
gtattaagtatgy

SEQ ID NO: 38508 - DNA, 13 bp, Artificial Sequence
  Oligonucleotide for detection of SNP TSC0011879
rcatacttaatac

SEQ ID NO: 38509 - DNA, 13 bp, Artificial Sequence
  Oligonucleotide for detection of SNP TSC0011879
gtattatgtacgy

SEQ ID NO: 38510 - DNA, 13 bp, Artificial Sequence
  Oligonucleotide for detection of SNP TSC0011879
rcgtacataatac

SEQ ID NO: 38511 - DNA, 13 bp, Artificial Sequence
  Oligonucleotide for detection of SNP TSC0011879
gtattaagtacgy

SEQ ID NO: 38512 - DNA, 13 bp, Artificial Sequence
  Oligonucleotide for detection of SNP TSC0011879
rcgtacttaatac

SEQ ID NO: 38513 - DNA, 13 bp, Artificial Sequence
  Oligonucleotide for detection of SNP TSC0011880
tgggagatggaaa

SEQ ID NO: 38514 - DNA, 13 bp, Artificial Sequence
  Oligonucleotide for detection of SNP TSC0011880
tttccatctccca

SEQ ID NO: 38515 - DNA, 13 bp, Artificial Sequence
  Oligonucleotide for detection of SNP TSC0011880
tgggagttggaaa

SEQ ID NO: 38516 - DNA, 13 bp, Artificial Sequence
  Oligonucleotide for detection of SNP TSC0011880
tttccaactccca

SEQ ID NO: 38517 - DNA, 13 bp, Artificial Sequence
  Oligonucleotide for detection of SNP TSC0011880
tgggagacggaaa

SEQ ID NO: 38518 - DNA, 13 bp, Artificial Sequence
  Oligonucleotide for detection of SNP TSC0011880
tttccgtctccca

SEQ ID NO: 38519 - DNA, 13 bp, Artificial Sequence
  Oligonucleotide for detection of SNP TSC0011880
tgggagtcggaaa

SEQ ID NO: 38520 - DNA, 13 bp, Artificial Sequence
  Oligonucleotide for detection of SNP TSC0011880
tttccgactccca

SEQ ID NO: 38521 - DNA, 13 bp, Artificial Sequence
  Oligonucleotide for detection of SNP TSC0011880
ttttcgtttttta

SEQ ID NO: 38522 - DNA, 13 bp, Artificial Sequence
  Oligonucleotide for detection of SNP TSC0011880
taaaaaacgaaaa

SEQ ID NO: 38523 - DNA, 13 bp, Artificial Sequence
  Oligonucleotide for detection of SNP TSC0011880
ttttcgattttta

SEQ ID NO: 38524 - DNA, 13 bp, Artificial Sequence
  Oligonucleotide for detection of SNP TSC0011880
taaaaatcgaaaa

SEQ ID NO: 38525 - DNA, 13 bp, Artificial Sequence
  Oligonucleotide for detection of SNP TSC0011881
ataattttggtgg

SEQ ID NO: 38526 - DNA, 13 bp, Artificial Sequence
  Oligonucleotide for detection of SNP TSC0011881
ccaccaaaattat

SEQ ID NO: 38527 - DNA, 13 bp, Artificial Sequence
  Oligonucleotide for detection of SNP TSC0011881
ataattgtggtgg

SEQ ID NO: 38528 - DNA, 13 bp, Artificial Sequence
  Oligonucleotide for detection of SNP TSC0011881
ccaccacaattat

SEQ ID NO: 38529 - DNA, 13 bp, Artificial Sequence
  Oligonucleotide for detection of SNP TSC0011881
ataatcgtggtgg

SEQ ID NO: 38530 - DNA, 13 bp, Artificial Sequence
  Oligonucleotide for detection of SNP TSC0011881
ccaccacgattat

SEQ ID NO: 38531 - DNA, 13 bp, Artificial Sequence
  Oligonucleotide for detection of SNP TSC0011881
ttattaggattgt

SEQ ID NO: 38532 - DNA, 13 bp, Artificial Sequence
  Oligonucleotide for detection of SNP TSC0011881
acaatcctaataa

SEQ ID NO: 38533 - DNA, 13 bp, Artificial Sequence
  Oligonucleotide for detection of SNP TSC0011881
ttattatgattgt

SEQ ID NO: 38534 - DNA, 13 bp, Artificial Sequence
  Oligonucleotide for detection of SNP TSC0011881
acaatcataataa

SEQ ID NO: 38535 - DNA, 13 bp, Artificial Sequence
  Oligonucleotide for detection of SNP TSC0011881
ttattacgattgt

SEQ ID NO: 38536 - DNA, 13 bp, Artificial Sequence
  Oligonucleotide for detection of SNP TSC0011881
acaatcgtaataa

SEQ ID NO: 38537 - DNA, 13 bp, Artificial Sequence
  Oligonucleotide for detection of SNP TSC0011882
attaagatatgty

SEQ ID NO: 38538 - DNA, 13 bp, Artificial Sequence
  Oligonucleotide for detection of SNP TSC0011882
racatatcttaat

SEQ ID NO: 38539 - DNA, 13 bp, Artificial Sequence
  Oligonucleotide for detection of SNP TSC0011882
attaaggtatgty

SEQ ID NO: 38540 - DNA, 13 bp, Artificial Sequence
  Oligonucleotide for detection of SNP TSC0011882
racataccttaat

SEQ ID NO: 38541 - DNA, 13 bp, Artificial Sequence
  Oligonucleotide for detection of SNP TSC0011885
ggatttaaggtty

SEQ ID NO: 38542 - DNA, 13 bp, Artificial Sequence
  Oligonucleotide for detection of SNP TSC0011885
raaccttaaatcc

SEQ ID NO: 38543 - DNA, 13 bp, Artificial Sequence
  Oligonucleotide for detection of SNP TSC0011885
ggattttaggtty

SEQ ID NO: 38544 - DNA, 13 bp, Artificial Sequence
  Oligonucleotide for detection of SNP TSC0011885
raacctaaaatcc

SEQ ID NO: 38545 - DNA, 13 bp, Artificial Sequence
  Oligonucleotide for detection of SNP TSC0011885
gagttttaagtty

SEQ ID NO: 38546 - DNA, 13 bp, Artificial Sequence
  Oligonucleotide for detection of SNP TSC0011885
raacttaaaactc

SEQ ID NO: 38547 - DNA, 13 bp, Artificial Sequence
  Oligonucleotide for detection of SNP TSC0011885
gagtttaaagtty

SEQ ID NO: 38548 - DNA, 13 bp, Artificial Sequence
  Oligonucleotide for detection of SNP TSC0011885
raactttaaactc

SEQ ID NO: 38549 - DNA, 13 bp, Artificial Sequence
  Oligonucleotide for detection of SNP TSC0011886
tttattgaaattt

SEQ ID NO: 38550 - DNA, 13 bp, Artificial Sequence
  Oligonucleotide for detection of SNP TSC0011886
aaatttcaataaa

SEQ ID NO: 38551 - DNA, 13 bp, Artificial Sequence
  Oligonucleotide for detection of SNP TSC0011886
tttatcgaaattt

SEQ ID NO: 38552 - DNA, 13 bp, Artificial Sequence
  Oligonucleotide for detection of SNP TSC0011886
aaatttcgataaa

SEQ ID NO: 38553 - DNA, 13 bp, Artificial Sequence
  Oligonucleotide for detection of SNP TSC0011886
aagttttgatgga

SEQ ID NO: 38554 - DNA, 13 bp, Artificial Sequence
  Oligonucleotide for detection of SNP TSC0011886
tccatcaaaactt

SEQ ID NO: 38555 - DNA, 13 bp, Artificial Sequence
  Oligonucleotide for detection of SNP TSC0011886
aagtttcgatgga

SEQ ID NO: 38556 - DNA, 13 bp, Artificial Sequence
  Oligonucleotide for detection of SNP TSC0011886
tccatcgaaactt

SEQ ID NO: 38557 - DNA, 13 bp, Artificial Sequence
  Oligonucleotide for detection of SNP TSC0011887
gggtggaggttag

SEQ ID NO: 38558 - DNA, 13 bp, Artificial Sequence
  Oligonucleotide for detection of SNP TSC0011887
ctaacctccaccc

SEQ ID NO: 38559 - DNA, 13 bp, Artificial Sequence
  Oligonucleotide for detection of SNP TSC0011887
gggtgggggttag

SEQ ID NO: 38560 - DNA, 13 bp, Artificial Sequence
  Oligonucleotide for detection of SNP TSC0011887
ctaacccccaccc

SEQ ID NO: 38561 - DNA, 13 bp, Artificial Sequence
  Oligonucleotide for detection of SNP TSC0011889
tatttttaagatt

SEQ ID NO: 38562 - DNA, 13 bp, Artificial Sequence
  Oligonucleotide for detection of SNP TSC0011889
aatcttaaaaata

SEQ ID NO: 38563 - DNA, 13 bp, Artificial Sequence
  Oligonucleotide for detection of SNP TSC0011889
tattttgaagatt

SEQ ID NO: 38564 - DNA, 13 bp, Artificial Sequence
  Oligonucleotide for detection of SNP TSC0011889
aatcttcaaaata

SEQ ID NO: 38565 - DNA, 13 bp, Artificial Sequence
  Oligonucleotide for detection of SNP TSC0011889
tatttcgaagatt

SEQ ID NO: 38566 - DNA, 13 bp, Artificial Sequence
  Oligonucleotide for detection of SNP TSC0011889
aatcttcgaaata

SEQ ID NO: 38567 - DNA, 13 bp, Artificial Sequence
  Oligonucleotide for detection of SNP TSC0011889
aattttgggagta

SEQ ID NO: 38568 - DNA, 13 bp, Artificial Sequence
  Oligonucleotide for detection of SNP TSC0011889
tactcccaaaatt

SEQ ID NO: 38569 - DNA, 13 bp, Artificial Sequence
  Oligonucleotide for detection of SNP TSC0011889
aatttttggagta

SEQ ID NO: 38570 - DNA, 13 bp, Artificial Sequence
  Oligonucleotide for detection of SNP TSC0011889
tactccaaaaatt

SEQ ID NO: 38571 - DNA, 13 bp, Artificial Sequence
  Oligonucleotide for detection of SNP TSC0011889
aattttcggagta

SEQ ID NO: 38572 - DNA, 13 bp, Artificial Sequence
  Oligonucleotide for detection of SNP TSC0011889
tactccgaaaatt

SEQ ID NO: 38573 - DNA, 13 bp, Artificial Sequence
  Oligonucleotide for detection of SNP TSC0011890
tttttatgtagtt

SEQ ID NO: 38574 - DNA, 13 bp, Artificial Sequence
  Oligonucleotide for detection of SNP TSC0011890
aactacataaaaa

SEQ ID NO: 38575 - DNA, 13 bp, Artificial Sequence
  Oligonucleotide for detection of SNP TSC0011890
tttttacgtagtt

SEQ ID NO: 38576 - DNA, 13 bp, Artificial Sequence
  Oligonucleotide for detection of SNP TSC0011890
aactacgtaaaaa

SEQ ID NO: 38577 - DNA, 13 bp, Artificial Sequence
  Oligonucleotide for detection of SNP TSC0011890
aattatgtaaagg

SEQ ID NO: 38578 - DNA, 13 bp, Artificial Sequence
  Oligonucleotide for detection of SNP TSC0011890
cctttacataatt

SEQ ID NO: 38579 - DNA, 13 bp, Artificial Sequence
  Oligonucleotide for detection of SNP TSC0011890
aattatataaagg

SEQ ID NO: 38580 - DNA, 13 bp, Artificial Sequence
  Oligonucleotide for detection of SNP TSC0011890
cctttatataatt

SEQ ID NO: 38581 - DNA, 13 bp, Artificial Sequence
  Oligonucleotide for detection of SNP TSC0011890
aattacgtaaagg

SEQ ID NO: 38582 - DNA, 13 bp, Artificial Sequence
  Oligonucleotide for detection of SNP TSC0011890
cctttacgtaatt

SEQ ID NO: 38583 - DNA, 13 bp, Artificial Sequence
  Oligonucleotide for detection of SNP TSC0011893
gaaagagggaggg

SEQ ID NO: 38584 - DNA, 13 bp, Artificial Sequence
  Oligonucleotide for detection of SNP TSC0011893
ccctccctctttc

SEQ ID NO: 38585 - DNA, 13 bp, Artificial Sequence
  Oligonucleotide for detection of SNP TSC0011893
gaaagaaggaggg

SEQ ID NO: 38586 - DNA, 13 bp, Artificial Sequence
  Oligonucleotide for detection of SNP TSC0011893
ccctccttctttc

SEQ ID NO: 38587 - DNA, 13 bp, Artificial Sequence
  Oligonucleotide for detection of SNP TSC0011894
tggaaagagggag

SEQ ID NO: 38588 - DNA, 13 bp, Artificial Sequence
  Oligonucleotide for detection of SNP TSC0011894
ctccctctttcca

SEQ ID NO: 38589 - DNA, 13 bp, Artificial Sequence
  Oligonucleotide for detection of SNP TSC0011894
tggaaatagggag

SEQ ID NO: 38590 - DNA, 13 bp, Artificial Sequence
  Oligonucleotide for detection of SNP TSC0011894
ctccctatttcca

SEQ ID NO: 38591 - DNA, 13 bp, Artificial Sequence
  Oligonucleotide for detection of SNP TSC0011895
ttttttttatttt

SEQ ID NO: 38592 - DNA, 13 bp, Artificial Sequence
  Oligonucleotide for detection of SNP TSC0011895
aaaataaaaaaaa

SEQ ID NO: 38593 - DNA, 13 bp, Artificial Sequence
  Oligonucleotide for detection of SNP TSC0011895
ttttttgtatttt

SEQ ID NO: 38594 - DNA, 13 bp, Artificial Sequence
  Oligonucleotide for detection of SNP TSC0011895
aaaatacaaaaaa

SEQ ID NO: 38595 - DNA, 13 bp, Artificial Sequence
  Oligonucleotide for detection of SNP TSC0011895
aggatggaaagag

SEQ ID NO: 38596 - DNA, 13 bp, Artificial Sequence
  Oligonucleotide for detection of SNP TSC0011895
ctctttccatcct

SEQ ID NO: 38597 - DNA, 13 bp, Artificial Sequence
  Oligonucleotide for detection of SNP TSC0011895
aggatgtaaagag

SEQ ID NO: 38598 - DNA, 13 bp, Artificial Sequence
  Oligonucleotide for detection of SNP TSC0011895
ctctttacatcct

SEQ ID NO: 38599 - DNA, 13 bp, Artificial Sequence
  Oligonucleotide for detection of SNP TSC0011896
gtgggaagttggg

SEQ ID NO: 38600 - DNA, 13 bp, Artificial Sequence
  Oligonucleotide for detection of SNP TSC0011896
cccaacttcccac

SEQ ID NO: 38601 - DNA, 13 bp, Artificial Sequence
  Oligonucleotide for detection of SNP TSC0011896
gtgggaggttggg

SEQ ID NO: 38602 - DNA, 13 bp, Artificial Sequence
  Oligonucleotide for detection of SNP TSC0011896
cccaacctcccac

SEQ ID NO: 38603 - DNA, 13 bp, Artificial Sequence
  Oligonucleotide for detection of SNP TSC0011897
taaatggatttgy

SEQ ID NO: 38604 - DNA, 13 bp, Artificial Sequence
  Oligonucleotide for detection of SNP TSC0011897
rcaaatccattta

SEQ ID NO: 38605 - DNA, 13 bp, Artificial Sequence
  Oligonucleotide for detection of SNP TSC0011897
taaatgtatttgy

SEQ ID NO: 38606 - DNA, 13 bp, Artificial Sequence
  Oligonucleotide for detection of SNP TSC0011897
rcaaatacattta

SEQ ID NO: 38607 - DNA, 13 bp, Artificial Sequence
  Oligonucleotide for detection of SNP TSC0011897
gtaaatttattta

SEQ ID NO: 38608 - DNA, 13 bp, Artificial Sequence
  Oligonucleotide for detection of SNP TSC0011897
taaataaatttac

SEQ ID NO: 38609 - DNA, 13 bp, Artificial Sequence
  Oligonucleotide for detection of SNP TSC0011897
gtaaatatattta

SEQ ID NO: 38610 - DNA, 13 bp, Artificial Sequence
  Oligonucleotide for detection of SNP TSC0011897
taaatatatttac

SEQ ID NO: 38611 - DNA, 13 bp, Artificial Sequence
  Oligonucleotide for detection of SNP TSC0011898
tttttatgaaatg

SEQ ID NO: 38612 - DNA, 13 bp, Artificial Sequence
  Oligonucleotide for detection of SNP TSC0011898
catttcataaaaa

SEQ ID NO: 38613 - DNA, 13 bp, Artificial Sequence
  Oligonucleotide for detection of SNP TSC0011898
tttttaggaaatg

SEQ ID NO: 38614 - DNA, 13 bp, Artificial Sequence
  Oligonucleotide for detection of SNP TSC0011898
catttcctaaaaa

SEQ ID NO: 38615 - DNA, 13 bp, Artificial Sequence
  Oligonucleotide for detection of SNP TSC0011898
tttttacgaaatg

SEQ ID NO: 38616 - DNA, 13 bp, Artificial Sequence
  Oligonucleotide for detection of SNP TSC0011898
catttcgtaaaaa

SEQ ID NO: 38617 - DNA, 13 bp, Artificial Sequence
  Oligonucleotide for detection of SNP TSC0011898
tattttgtggagg

SEQ ID NO: 38618 - DNA, 13 bp, Artificial Sequence
  Oligonucleotide for detection of SNP TSC0011898
cctccacaaaata

SEQ ID NO: 38619 - DNA, 13 bp, Artificial Sequence
  Oligonucleotide for detection of SNP TSC0011898
tattttttggagg

SEQ ID NO: 38620 - DNA, 13 bp, Artificial Sequence
  Oligonucleotide for detection of SNP TSC0011898
cctccaaaaaata

SEQ ID NO: 38621 - DNA, 13 bp, Artificial Sequence
  Oligonucleotide for detection of SNP TSC0011898
tatttcgtggagg

SEQ ID NO: 38622 - DNA, 13 bp, Artificial Sequence
  Oligonucleotide for detection of SNP TSC0011898
cctccacgaaata

SEQ ID NO: 38623 - DNA, 13 bp, Artificial Sequence
  Oligonucleotide for detection of SNP TSC0011899
ttgggggtgggag

SEQ ID NO: 38624 - DNA, 13 bp, Artificial Sequence
  Oligonucleotide for detection of SNP TSC0011899
ctcccacccccaa

SEQ ID NO: 38625 - DNA, 13 bp, Artificial Sequence
  Oligonucleotide for detection of SNP TSC0011899
ttggggttgggag

SEQ ID NO: 38626 - DNA, 13 bp, Artificial Sequence
  Oligonucleotide for detection of SNP TSC0011899
ctcccaaccccaa

SEQ ID NO: 38627 - DNA, 13 bp, Artificial Sequence
  Oligonucleotide for detection of SNP TSC0011901
tttttaagtagtt

SEQ ID NO: 38628 - DNA, 13 bp, Artificial Sequence
  Oligonucleotide for detection of SNP TSC0011901
aactacttaaaaa

SEQ ID NO: 38629 - DNA, 13 bp, Artificial Sequence
  Oligonucleotide for detection of SNP TSC0011902
aatatggaaggay

SEQ ID NO: 38630 - DNA, 13 bp, Artificial Sequence
  Oligonucleotide for detection of SNP TSC0011902
rtccttccatatt

SEQ ID NO: 38631 - DNA, 13 bp, Artificial Sequence
  Oligonucleotide for detection of SNP TSC0011902
aatatgtaaggay

SEQ ID NO: 38632 - DNA, 13 bp, Artificial Sequence
  Oligonucleotide for detection of SNP TSC0011902
rtccttacatatt

SEQ ID NO: 38633 - DNA, 13 bp, Artificial Sequence
  Oligonucleotide for detection of SNP TSC0011902
gtttttttatgtt

SEQ ID NO: 38634 - DNA, 13 bp, Artificial Sequence
  Oligonucleotide for detection of SNP TSC0011902
aacataaaaaaac

SEQ ID NO: 38635 - DNA, 13 bp, Artificial Sequence
  Oligonucleotide for detection of SNP TSC0011902
gtttttatatgtt

SEQ ID NO: 38636 - DNA, 13 bp, Artificial Sequence
  Oligonucleotide for detection of SNP TSC0011902
aacatataaaaac

SEQ ID NO: 38637 - DNA, 13 bp, Artificial Sequence
  Oligonucleotide for detection of SNP TSC0011904
aggtgggtaggta

SEQ ID NO: 38638 - DNA, 13 bp, Artificial Sequence
  Oligonucleotide for detection of SNP TSC0011904
tacctacccacct

SEQ ID NO: 38639 - DNA, 13 bp, Artificial Sequence
  Oligonucleotide for detection of SNP TSC0011904
aggtggttaggta

SEQ ID NO: 38640 - DNA, 13 bp, Artificial Sequence
  Oligonucleotide for detection of SNP TSC0011904
tacctaaccacct

SEQ ID NO: 38641 - DNA, 13 bp, Artificial Sequence
  Oligonucleotide for detection of SNP TSC0011904
tgtttgtttattt

SEQ ID NO: 38642 - DNA, 13 bp, Artificial Sequence
  Oligonucleotide for detection of SNP TSC0011904
aaataaacaaaca

SEQ ID NO: 38643 - DNA, 13 bp, Artificial Sequence
  Oligonucleotide for detection of SNP TSC0011904
tgtttgattattt

SEQ ID NO: 38644 - DNA, 13 bp, Artificial Sequence
  Oligonucleotide for detection of SNP TSC0011904
aaataatcaaaca

SEQ ID NO: 38645 - DNA, 13 bp, Artificial Sequence
  Oligonucleotide for detection of SNP TSC0011905
agagatatattty

SEQ ID NO: 38646 - DNA, 13 bp, Artificial Sequence
  Oligonucleotide for detection of SNP TSC0011905
raaatatatctct

SEQ ID NO: 38647 - DNA, 13 bp, Artificial Sequence
  Oligonucleotide for detection of SNP TSC0011905
agagatgtattty

SEQ ID NO: 38648 - DNA, 13 bp, Artificial Sequence
  Oligonucleotide for detection of SNP TSC0011905
raaatacatctct

SEQ ID NO: 38649 - DNA, 13 bp, Artificial Sequence
  Oligonucleotide for detection of SNP TSC0011906
aatgttaatttty

SEQ ID NO: 38650 - DNA, 13 bp, Artificial Sequence
  Oligonucleotide for detection of SNP TSC0011906
raaaattaacatt

SEQ ID NO: 38651 - DNA, 13 bp, Artificial Sequence
  Oligonucleotide for detection of SNP TSC0011906
aatgttgatttty

SEQ ID NO: 38652 - DNA, 13 bp, Artificial Sequence
  Oligonucleotide for detection of SNP TSC0011906
raaaatcaacatt

SEQ ID NO: 38653 - DNA, 13 bp, Artificial Sequence
  Oligonucleotide for detection of SNP TSC0011906
aatgtcgatttty

SEQ ID NO: 38654 - DNA, 13 bp, Artificial Sequence
  Oligonucleotide for detection of SNP TSC0011906
raaaatcgacatt

SEQ ID NO: 38655 - DNA, 13 bp, Artificial Sequence
  Oligonucleotide for detection of SNP TSC0011906
ggggattgatatt

SEQ ID NO: 38656 - DNA, 13 bp, Artificial Sequence
  Oligonucleotide for detection of SNP TSC0011906
aatatcaatcccc

SEQ ID NO: 38657 - DNA, 13 bp, Artificial Sequence
  Oligonucleotide for detection of SNP TSC0011906
ggggatcgatatt

SEQ ID NO: 38658 - DNA, 13 bp, Artificial Sequence
  Oligonucleotide for detection of SNP TSC0011906
aatatcgatcccc

SEQ ID NO: 38659 - DNA, 13 bp, Artificial Sequence
  Oligonucleotide for detection of SNP TSC0011907
ttttagttttagg

SEQ ID NO: 38660 - DNA, 13 bp, Artificial Sequence
  Oligonucleotide for detection of SNP TSC0011907
cctaaaactaaaa

SEQ ID NO: 38661 - DNA, 13 bp, Artificial Sequence
  Oligonucleotide for detection of SNP TSC0011907
tttgaagttggga

SEQ ID NO: 38662 - DNA, 13 bp, Artificial Sequence
  Oligonucleotide for detection of SNP TSC0011907
tcccaacttcaaa

SEQ ID NO: 38663 - DNA, 13 bp, Artificial Sequence
  Oligonucleotide for detection of SNP TSC0011908
gtagagataaggg

SEQ ID NO: 38664 - DNA, 13 bp, Artificial Sequence
  Oligonucleotide for detection of SNP TSC0011908
cccttatctctac

SEQ ID NO: 38665 - DNA, 13 bp, Artificial Sequence
  Oligonucleotide for detection of SNP TSC0011908
gtagagttaaggg

SEQ ID NO: 38666 - DNA, 13 bp, Artificial Sequence
  Oligonucleotide for detection of SNP TSC0011908
cccttaactctac

SEQ ID NO: 38667 - DNA, 13 bp, Artificial Sequence
  Oligonucleotide for detection of SNP TSC0011908
tttttgtttttay

SEQ ID NO: 38668 - DNA, 13 bp, Artificial Sequence
  Oligonucleotide for detection of SNP TSC0011908
rtaaaaacaaaaa

SEQ ID NO: 38669 - DNA, 13 bp, Artificial Sequence
  Oligonucleotide for detection of SNP TSC0011908
tttttggttttay

SEQ ID NO: 38670 - DNA, 13 bp, Artificial Sequence
  Oligonucleotide for detection of SNP TSC0011908
rtaaaaccaaaaa

SEQ ID NO: 38671 - DNA, 13 bp, Artificial Sequence
  Oligonucleotide for detection of SNP TSC0011911
tagaagaagttga

SEQ ID NO: 38672 - DNA, 13 bp, Artificial Sequence
  Oligonucleotide for detection of SNP TSC0011911
tcaacttcttcta

SEQ ID NO: 38673 - DNA, 13 bp, Artificial Sequence
  Oligonucleotide for detection of SNP TSC0011911
tagaagtagttga

SEQ ID NO: 38674 - DNA, 13 bp, Artificial Sequence
  Oligonucleotide for detection of SNP TSC0011911
tcaactacttcta

SEQ ID NO: 38675 - DNA, 13 bp, Artificial Sequence
  Oligonucleotide for detection of SNP TSC0011911
tagaagaagtcga

SEQ ID NO: 38676 - DNA, 13 bp, Artificial Sequence
  Oligonucleotide for detection of SNP TSC0011911
tcgacttcttcta

SEQ ID NO: 38677 - DNA, 13 bp, Artificial Sequence
  Oligonucleotide for detection of SNP TSC0011911
tagaagtagtcga

SEQ ID NO: 38678 - DNA, 13 bp, Artificial Sequence
  Oligonucleotide for detection of SNP TSC0011911
tcgactacttcta

SEQ ID NO: 38679 - DNA, 13 bp, Artificial Sequence
  Oligonucleotide for detection of SNP TSC0011911
ttggtttttttta

SEQ ID NO: 38680 - DNA, 13 bp, Artificial Sequence
  Oligonucleotide for detection of SNP TSC0011911
taaaaaaaaccaa

SEQ ID NO: 38681 - DNA, 13 bp, Artificial Sequence
  Oligonucleotide for detection of SNP TSC0011911
ttggttgttttta

SEQ ID NO: 38682 - DNA, 13 bp, Artificial Sequence
  Oligonucleotide for detection of SNP TSC0011911
taaaaacaaccaa

SEQ ID NO: 38683 - DNA, 13 bp, Artificial Sequence
  Oligonucleotide for detection of SNP TSC0011911
tcggtttttttta

SEQ ID NO: 38684 - DNA, 13 bp, Artificial Sequence
  Oligonucleotide for detection of SNP TSC0011911
taaaaaaaaccga

SEQ ID NO: 38685 - DNA, 13 bp, Artificial Sequence
  Oligonucleotide for detection of SNP TSC0011911
tcggttgttttta

SEQ ID NO: 38686 - DNA, 13 bp, Artificial Sequence
  Oligonucleotide for detection of SNP TSC0011911
taaaaacaaccga

SEQ ID NO: 38687 - DNA, 13 bp, Artificial Sequence
  Oligonucleotide for detection of SNP TSC0011912
tagagtatgaaay

SEQ ID NO: 38688 - DNA, 13 bp, Artificial Sequence
  Oligonucleotide for detection of SNP TSC0011912
rtttcatactcta

SEQ ID NO: 38689 - DNA, 13 bp, Artificial Sequence
  Oligonucleotide for detection of SNP TSC0011912
tagagtgtgaaay

SEQ ID NO: 38690 - DNA, 13 bp, Artificial Sequence
  Oligonucleotide for detection of SNP TSC0011912
rtttcacactcta

SEQ ID NO: 38691 - DNA, 13 bp, Artificial Sequence
  Oligonucleotide for detection of SNP TSC0011912
tagagcgtgaaay

SEQ ID NO: 38692 - DNA, 13 bp, Artificial Sequence
  Oligonucleotide for detection of SNP TSC0011912
rtttcacgctcta

SEQ ID NO: 38693 - DNA, 13 bp, Artificial Sequence
  Oligonucleotide for detection of SNP TSC0011912
gttttatgttttg

SEQ ID NO: 38694 - DNA, 13 bp, Artificial Sequence
  Oligonucleotide for detection of SNP TSC0011912
caaaacataaaac

SEQ ID NO: 38695 - DNA, 13 bp, Artificial Sequence
  Oligonucleotide for detection of SNP TSC0011912
gttttacgttttg

SEQ ID NO: 38696 - DNA, 13 bp, Artificial Sequence
  Oligonucleotide for detection of SNP TSC0011912
caaaacgtaaaac

SEQ ID NO: 38697 - DNA, 13 bp, Artificial Sequence
  Oligonucleotide for detection of SNP TSC0011913
tatggtatgtttt

SEQ ID NO: 38698 - DNA, 13 bp, Artificial Sequence
  Oligonucleotide for detection of SNP TSC0011913
aaaacataccata

SEQ ID NO: 38699 - DNA, 13 bp, Artificial Sequence
  Oligonucleotide for detection of SNP TSC0011913
tatggtgtgtttt

SEQ ID NO: 38700 - DNA, 13 bp, Artificial Sequence
  Oligonucleotide for detection of SNP TSC0011913
aaaacacaccata

SEQ ID NO: 38701 - DNA, 13 bp, Artificial Sequence
  Oligonucleotide for detection of SNP TSC0011913
tatggcgtgtttt

SEQ ID NO: 38702 - DNA, 13 bp, Artificial Sequence
  Oligonucleotide for detection of SNP TSC0011913
aaaacacgccata

SEQ ID NO: 38703 - DNA, 13 bp, Artificial Sequence
  Oligonucleotide for detection of SNP TSC0011913
agaatatgttata

SEQ ID NO: 38704 - DNA, 13 bp, Artificial Sequence
  Oligonucleotide for detection of SNP TSC0011913
tataacatattct

SEQ ID NO: 38705 - DNA, 13 bp, Artificial Sequence
  Oligonucleotide for detection of SNP TSC0011913
agaatacgttata

SEQ ID NO: 38706 - DNA, 13 bp, Artificial Sequence
  Oligonucleotide for detection of SNP TSC0011913
tataacgtattct

SEQ ID NO: 38707 - DNA, 13 bp, Artificial Sequence
  Oligonucleotide for detection of SNP TSC0011914
gaatgagtaaatt

SEQ ID NO: 38708 - DNA, 13 bp, Artificial Sequence
  Oligonucleotide for detection of SNP TSC0011914
aatttactcattc

SEQ ID NO: 38709 - DNA, 13 bp, Artificial Sequence
  Oligonucleotide for detection of SNP TSC0011914
gaatgaataaatt

SEQ ID NO: 38710 - DNA, 13 bp, Artificial Sequence
  Oligonucleotide for detection of SNP TSC0011914
aatttattcattc

SEQ ID NO: 38711 - DNA, 13 bp, Artificial Sequence
  Oligonucleotide for detection of SNP TSC0011915
tatagtagagtty

SEQ ID NO: 38712 - DNA, 13 bp, Artificial Sequence
  Oligonucleotide for detection of SNP TSC0011915
raactctactata

SEQ ID NO: 38713 - DNA, 13 bp, Artificial Sequence
  Oligonucleotide for detection of SNP TSC0011915
tatagtggagtty

SEQ ID NO: 38714 - DNA, 13 bp, Artificial Sequence
  Oligonucleotide for detection of SNP TSC0011915
raactccactata

SEQ ID NO: 38715 - DNA, 13 bp, Artificial Sequence
  Oligonucleotide for detection of SNP TSC0011915
tatagcggagtty

SEQ ID NO: 38716 - DNA, 13 bp, Artificial Sequence
  Oligonucleotide for detection of SNP TSC0011915
raactccgctata

SEQ ID NO: 38717 - DNA, 13 bp, Artificial Sequence
  Oligonucleotide for detection of SNP TSC0011915
ggattttgttgta

SEQ ID NO: 38718 - DNA, 13 bp, Artificial Sequence
  Oligonucleotide for detection of SNP TSC0011915
tacaacaaaatcc

SEQ ID NO: 38719 - DNA, 13 bp, Artificial Sequence
  Oligonucleotide for detection of SNP TSC0011915
ggatttcgttgta

SEQ ID NO: 38720 - DNA, 13 bp, Artificial Sequence
  Oligonucleotide for detection of SNP TSC0011915
tacaacgaaatcc

SEQ ID NO: 38721 - DNA, 13 bp, Artificial Sequence
  Oligonucleotide for detection of SNP TSC0011916
aattggaagttat

SEQ ID NO: 38722 - DNA, 13 bp, Artificial Sequence
  Oligonucleotide for detection of SNP TSC0011916
ataacttccaatt

SEQ ID NO: 38723 - DNA, 13 bp, Artificial Sequence
  Oligonucleotide for detection of SNP TSC0011916
aattgggagttat

SEQ ID NO: 38724 - DNA, 13 bp, Artificial Sequence
  Oligonucleotide for detection of SNP TSC0011916
ataactcccaatt

SEQ ID NO: 38725 - DNA, 13 bp, Artificial Sequence
  Oligonucleotide for detection of SNP TSC0011917
ttttatgtagaag

SEQ ID NO: 38726 - DNA, 13 bp, Artificial Sequence
  Oligonucleotide for detection of SNP TSC0011917
cttctacataaaa

SEQ ID NO: 38727 - DNA, 13 bp, Artificial Sequence
  Oligonucleotide for detection of SNP TSC0011917
ttttatatagaag

SEQ ID NO: 38728 - DNA, 13 bp, Artificial Sequence
  Oligonucleotide for detection of SNP TSC0011917
cttctatataaaa

SEQ ID NO: 38729 - DNA, 13 bp, Artificial Sequence
  Oligonucleotide for detection of SNP TSC0011918
tttgtagatattt

SEQ ID NO: 38730 - DNA, 13 bp, Artificial Sequence
  Oligonucleotide for detection of SNP TSC0011918
aaatatctacaaa

SEQ ID NO: 38731 - DNA, 13 bp, Artificial Sequence
  Oligonucleotide for detection of SNP TSC0011918
tttgtatatattt

SEQ ID NO: 38732 - DNA, 13 bp, Artificial Sequence
  Oligonucleotide for detection of SNP TSC0011918
aaatatatacaaa

SEQ ID NO: 38733 - DNA, 13 bp, Artificial Sequence
  Oligonucleotide for detection of SNP TSC0011918
aagtatttataag

SEQ ID NO: 38734 - DNA, 13 bp, Artificial Sequence
  Oligonucleotide for detection of SNP TSC0011918
cttataaatactt

SEQ ID NO: 38735 - DNA, 13 bp, Artificial Sequence
  Oligonucleotide for detection of SNP TSC0011918
aagtatatataag

SEQ ID NO: 38736 - DNA, 13 bp, Artificial Sequence
  Oligonucleotide for detection of SNP TSC0011918
cttatatatactt

SEQ ID NO: 38737 - DNA, 13 bp, Artificial Sequence
  Oligonucleotide for detection of SNP TSC0011919
aggaggatgagat

SEQ ID NO: 38738 - DNA, 13 bp, Artificial Sequence
  Oligonucleotide for detection of SNP TSC0011919
atctcatcctcct

SEQ ID NO: 38739 - DNA, 13 bp, Artificial Sequence
  Oligonucleotide for detection of SNP TSC0011919
aggaggttgagat

SEQ ID NO: 38740 - DNA, 13 bp, Artificial Sequence
  Oligonucleotide for detection of SNP TSC0011919
atctcaacctcct

SEQ ID NO: 38741 - DNA, 13 bp, Artificial Sequence
  Oligonucleotide for detection of SNP TSC0011920
aatatgagtattt

SEQ ID NO: 38742 - DNA, 13 bp, Artificial Sequence
  Oligonucleotide for detection of SNP TSC0011920
aaatactcatatt

SEQ ID NO: 38743 - DNA, 13 bp, Artificial Sequence
  Oligonucleotide for detection of SNP TSC0011920
aatatgtgtattt

SEQ ID NO: 38744 - DNA, 13 bp, Artificial Sequence
  Oligonucleotide for detection of SNP TSC0011920
aaatacacatatt

SEQ ID NO: 38745 - DNA, 13 bp, Artificial Sequence
  Oligonucleotide for detection of SNP TSC0011920
aatacgagtattt

SEQ ID NO: 38746 - DNA, 13 bp, Artificial Sequence
  Oligonucleotide for detection of SNP TSC0011920
aaatactcgtatt

SEQ ID NO: 38747 - DNA, 13 bp, Artificial Sequence
  Oligonucleotide for detection of SNP TSC0011920
aatacgtgtattt

SEQ ID NO: 38748 - DNA, 13 bp, Artificial Sequence
  Oligonucleotide for detection of SNP TSC0011920
aaatacacgtatt

SEQ ID NO: 38749 - DNA, 13 bp, Artificial Sequence
  Oligonucleotide for detection of SNP TSC0011920
agatatttgtgtt

SEQ ID NO: 38750 - DNA, 13 bp, Artificial Sequence
  Oligonucleotide for detection of SNP TSC0011920
aacacaaatatct

SEQ ID NO: 38751 - DNA, 13 bp, Artificial Sequence
  Oligonucleotide for detection of SNP TSC0011920
agatatatgtgtt

SEQ ID NO: 38752 - DNA, 13 bp, Artificial Sequence
  Oligonucleotide for detection of SNP TSC0011920
aacacatatatct

SEQ ID NO: 38753 - DNA, 13 bp, Artificial Sequence
  Oligonucleotide for detection of SNP TSC0011920
agatattcgtgtt

SEQ ID NO: 38754 - DNA, 13 bp, Artificial Sequence
  Oligonucleotide for detection of SNP TSC0011920
aacacgaatatct

SEQ ID NO: 38755 - DNA, 13 bp, Artificial Sequence
  Oligonucleotide for detection of SNP TSC0011920
agatatacgtgtt

SEQ ID NO: 38756 - DNA, 13 bp, Artificial Sequence
  Oligonucleotide for detection of SNP TSC0011920
aacacgtatatct

SEQ ID NO: 38757 - DNA, 13 bp, Artificial Sequence
  Oligonucleotide for detection of SNP TSC0011921
tagagagtagtgy

SEQ ID NO: 38758 - DNA, 13 bp, Artificial Sequence
  Oligonucleotide for detection of SNP TSC0011921
rcactactctcta

SEQ ID NO: 38759 - DNA, 13 bp, Artificial Sequence
  Oligonucleotide for detection of SNP TSC0011921
tagagaatagtgy

SEQ ID NO: 38760 - DNA, 13 bp, Artificial Sequence
  Oligonucleotide for detection of SNP TSC0011921
rcactattctcta

SEQ ID NO: 38761 - DNA, 13 bp, Artificial Sequence
  Oligonucleotide for detection of SNP TSC0011922
tatatggtgtgtg

SEQ ID NO: 38762 - DNA, 13 bp, Artificial Sequence
  Oligonucleotide for detection of SNP TSC0011922
cacacaccatata

SEQ ID NO: 38763 - DNA, 13 bp, Artificial Sequence
  Oligonucleotide for detection of SNP TSC0011922
tatatgatgtgtg

SEQ ID NO: 38764 - DNA, 13 bp, Artificial Sequence
  Oligonucleotide for detection of SNP TSC0011922
cacacatcatata

SEQ ID NO: 38765 - DNA, 13 bp, Artificial Sequence
  Oligonucleotide for detection of SNP TSC0011922
tatacggtgtgtg

SEQ ID NO: 38766 - DNA, 13 bp, Artificial Sequence
  Oligonucleotide for detection of SNP TSC0011922
cacacaccgtata

SEQ ID NO: 38767 - DNA, 13 bp, Artificial Sequence
  Oligonucleotide for detection of SNP TSC0011922
tatacgatgtgtg

SEQ ID NO: 38768 - DNA, 13 bp, Artificial Sequence
  Oligonucleotide for detection of SNP TSC0011922
cacacatcgtata

SEQ ID NO: 38769 - DNA, 13 bp, Artificial Sequence
  Oligonucleotide for detection of SNP TSC0011926
taatgtaaaaaag

SEQ ID NO: 38770 - DNA, 13 bp, Artificial Sequence
  Oligonucleotide for detection of SNP TSC0011926
cttttttacatta

SEQ ID NO: 38771 - DNA, 13 bp, Artificial Sequence
  Oligonucleotide for detection of SNP TSC0011926
taatgttaaaaag

SEQ ID NO: 38772 - DNA, 13 bp, Artificial Sequence
  Oligonucleotide for detection of SNP TSC0011926
ctttttaacatta

SEQ ID NO: 38773 - DNA, 13 bp, Artificial Sequence
  Oligonucleotide for detection of SNP TSC0011926
tttttttatatta

SEQ ID NO: 38774 - DNA, 13 bp, Artificial Sequence
  Oligonucleotide for detection of SNP TSC0011926
taatataaaaaaa

SEQ ID NO: 38775 - DNA, 13 bp, Artificial Sequence
  Oligonucleotide for detection of SNP TSC0011926
ttttttaatatta

SEQ ID NO: 38776 - DNA, 13 bp, Artificial Sequence
  Oligonucleotide for detection of SNP TSC0011926
taatattaaaaaa

SEQ ID NO: 38777 - DNA, 13 bp, Artificial Sequence
  Oligonucleotide for detection of SNP TSC0011927
agaatagttaaga

SEQ ID NO: 38778 - DNA, 13 bp, Artificial Sequence
  Oligonucleotide for detection of SNP TSC0011927
tcttaactattct

SEQ ID NO: 38779 - DNA, 13 bp, Artificial Sequence
  Oligonucleotide for detection of SNP TSC0011927
agaataattaaga

SEQ ID NO: 38780 - DNA, 13 bp, Artificial Sequence
  Oligonucleotide for detection of SNP TSC0011927
tcttaattattct

SEQ ID NO: 38781 - DNA, 13 bp, Artificial Sequence
  Oligonucleotide for detection of SNP TSC0011928
ttttgataatatt

SEQ ID NO: 38782 - DNA, 13 bp, Artificial Sequence
  Oligonucleotide for detection of SNP TSC0011928
aatattatcaaaa

SEQ ID NO: 38783 - DNA, 13 bp, Artificial Sequence
  Oligonucleotide for detection of SNP TSC0011928
ttttgagaatatt

SEQ ID NO: 38784 - DNA, 13 bp, Artificial Sequence
  Oligonucleotide for detection of SNP TSC0011928
aatattctcaaaa

SEQ ID NO: 38785 - DNA, 13 bp, Artificial Sequence
  Oligonucleotide for detection of SNP TSC0011928
aatattgttaaag

SEQ ID NO: 38786 - DNA, 13 bp, Artificial Sequence
  Oligonucleotide for detection of SNP TSC0011928
ctttaacaatatt

SEQ ID NO: 38787 - DNA, 13 bp, Artificial Sequence
  Oligonucleotide for detection of SNP TSC0011928
aatatttttaaag

SEQ ID NO: 38788 - DNA, 13 bp, Artificial Sequence
  Oligonucleotide for detection of SNP TSC0011928
ctttaaaaatatt

SEQ ID NO: 38789 - DNA, 13 bp, Artificial Sequence
  Oligonucleotide for detection of SNP TSC0011932
attgttgtttatt

SEQ ID NO: 38790 - DNA, 13 bp, Artificial Sequence
  Oligonucleotide for detection of SNP TSC0011932
aataaacaacaat

SEQ ID NO: 38791 - DNA, 13 bp, Artificial Sequence
  Oligonucleotide for detection of SNP TSC0011932
attgttatttatt

SEQ ID NO: 38792 - DNA, 13 bp, Artificial Sequence
  Oligonucleotide for detection of SNP TSC0011932
aataaataacaat

SEQ ID NO: 38793 - DNA, 13 bp, Artificial Sequence
  Oligonucleotide for detection of SNP TSC0011934
ttgtgtttatata

SEQ ID NO: 38794 - DNA, 13 bp, Artificial Sequence
  Oligonucleotide for detection of SNP TSC0011934
tatataaacacaa

SEQ ID NO: 38795 - DNA, 13 bp, Artificial Sequence
  Oligonucleotide for detection of SNP TSC0011934
ttgtgtgtatata

SEQ ID NO: 38796 - DNA, 13 bp, Artificial Sequence
  Oligonucleotide for detection of SNP TSC0011934
tatatacacacaa

SEQ ID NO: 38797 - DNA, 13 bp, Artificial Sequence
  Oligonucleotide for detection of SNP TSC0011934
tgtgtggatatag

SEQ ID NO: 38798 - DNA, 13 bp, Artificial Sequence
  Oligonucleotide for detection of SNP TSC0011934
ctatatccacaca

SEQ ID NO: 38799 - DNA, 13 bp, Artificial Sequence
  Oligonucleotide for detection of SNP TSC0011934
tgtgtgtatatag

SEQ ID NO: 38800 - DNA, 13 bp, Artificial Sequence
  Oligonucleotide for detection of SNP TSC0011934
ctatatacacaca

SEQ ID NO: 38801 - DNA, 13 bp, Artificial Sequence
  Oligonucleotide for detection of SNP TSC0011935
aatggggagttty

SEQ ID NO: 38802 - DNA, 13 bp, Artificial Sequence
  Oligonucleotide for detection of SNP TSC0011935
raaactccccatt

SEQ ID NO: 38803 - DNA, 13 bp, Artificial Sequence
  Oligonucleotide for detection of SNP TSC0011935
aatgggaagttty

SEQ ID NO: 38804 - DNA, 13 bp, Artificial Sequence
  Oligonucleotide for detection of SNP TSC0011935
raaacttcccatt

SEQ ID NO: 38805 - DNA, 13 bp, Artificial Sequence
  Oligonucleotide for detection of SNP TSC0011941
tgataaaatagta

SEQ ID NO: 38806 - DNA, 13 bp, Artificial Sequence
  Oligonucleotide for detection of SNP TSC0011941
tactattttatca

SEQ ID NO: 38807 - DNA, 13 bp, Artificial Sequence
  Oligonucleotide for detection of SNP TSC0011941
tgataatatagta

SEQ ID NO: 38808 - DNA, 13 bp, Artificial Sequence
  Oligonucleotide for detection of SNP TSC0011941
tactatattatca

SEQ ID NO: 38809 - DNA, 13 bp, Artificial Sequence
  Oligonucleotide for detection of SNP TSC0011941
tattgttttatta

SEQ ID NO: 38810 - DNA, 13 bp, Artificial Sequence
  Oligonucleotide for detection of SNP TSC0011941
taataaaacaata

SEQ ID NO: 38811 - DNA, 13 bp, Artificial Sequence
  Oligonucleotide for detection of SNP TSC0011941
tattgtgttatta

SEQ ID NO: 38812 - DNA, 13 bp, Artificial Sequence
  Oligonucleotide for detection of SNP TSC0011941
taataacacaata

SEQ ID NO: 38813 - DNA, 13 bp, Artificial Sequence
  Oligonucleotide for detection of SNP TSC0011942
ttttaaatatagt

SEQ ID NO: 38814 - DNA, 13 bp, Artificial Sequence
  Oligonucleotide for detection of SNP TSC0011942
actatatttaaaa

SEQ ID NO: 38815 - DNA, 13 bp, Artificial Sequence
  Oligonucleotide for detection of SNP TSC0011942
ttttaagtatagt

SEQ ID NO: 38816 - DNA, 13 bp, Artificial Sequence
  Oligonucleotide for detection of SNP TSC0011942
actatacttaaaa

SEQ ID NO: 38817 - DNA, 13 bp, Artificial Sequence
  Oligonucleotide for detection of SNP TSC0011944
aaagttattttta

SEQ ID NO: 38818 - DNA, 13 bp, Artificial Sequence
  Oligonucleotide for detection of SNP TSC0011944
taaaaataacttt

SEQ ID NO: 38819 - DNA, 13 bp, Artificial Sequence
  Oligonucleotide for detection of SNP TSC0011944
aaagttgttttta

SEQ ID NO: 38820 - DNA, 13 bp, Artificial Sequence
  Oligonucleotide for detection of SNP TSC0011944
taaaaacaacttt

SEQ ID NO: 38821 - DNA, 13 bp, Artificial Sequence
  Oligonucleotide for detection of SNP TSC0011944
aaagtcgttttta

SEQ ID NO: 38822 - DNA, 13 bp, Artificial Sequence
  Oligonucleotide for detection of SNP TSC0011944
taaaaacgacttt

SEQ ID NO: 38823 - DNA, 13 bp, Artificial Sequence
  Oligonucleotide for detection of SNP TSC0011944
tgaagatggtttt

SEQ ID NO: 38824 - DNA, 13 bp, Artificial Sequence
  Oligonucleotide for detection of SNP TSC0011944
aaaaccatcttca

SEQ ID NO: 38825 - DNA, 13 bp, Artificial Sequence
  Oligonucleotide for detection of SNP TSC0011944
tgaagacggtttt

SEQ ID NO: 38826 - DNA, 13 bp, Artificial Sequence
  Oligonucleotide for detection of SNP TSC0011944
aaaaccgtcttca

SEQ ID NO: 38827 - DNA, 13 bp, Artificial Sequence
  Oligonucleotide for detection of SNP TSC0011949
tattttggggtaa

SEQ ID NO: 38828 - DNA, 13 bp, Artificial Sequence
  Oligonucleotide for detection of SNP TSC0011949
ttaccccaaaata

SEQ ID NO: 38829 - DNA, 13 bp, Artificial Sequence
  Oligonucleotide for detection of SNP TSC0011949
tattttagggtaa

SEQ ID NO: 38830 - DNA, 13 bp, Artificial Sequence
  Oligonucleotide for detection of SNP TSC0011949
ttaccctaaaata

SEQ ID NO: 38831 - DNA, 13 bp, Artificial Sequence
  Oligonucleotide for detection of SNP TSC0011950
gattgtattagta

SEQ ID NO: 38832 - DNA, 13 bp, Artificial Sequence
  Oligonucleotide for detection of SNP TSC0011950
tactaatacaatc

SEQ ID NO: 38833 - DNA, 13 bp, Artificial Sequence
  Oligonucleotide for detection of SNP TSC0011950
gattgtgttagta

SEQ ID NO: 38834 - DNA, 13 bp, Artificial Sequence
  Oligonucleotide for detection of SNP TSC0011950
tactaacacaatc

SEQ ID NO: 38835 - DNA, 13 bp, Artificial Sequence
  Oligonucleotide for detection of SNP TSC0011952
taaaagaaagaay

SEQ ID NO: 38836 - DNA, 13 bp, Artificial Sequence
  Oligonucleotide for detection of SNP TSC0011952
rttctttctttta

SEQ ID NO: 38837 - DNA, 13 bp, Artificial Sequence
  Oligonucleotide for detection of SNP TSC0011952
taaaaggaagaay

SEQ ID NO: 38838 - DNA, 13 bp, Artificial Sequence
  Oligonucleotide for detection of SNP TSC0011952
rttcttcctttta

SEQ ID NO: 38839 - DNA, 13 bp, Artificial Sequence
  Oligonucleotide for detection of SNP TSC0011953
gtttgagatttgt

SEQ ID NO: 38840 - DNA, 13 bp, Artificial Sequence
  Oligonucleotide for detection of SNP TSC0011953
acaaatctcaaac

SEQ ID NO: 38841 - DNA, 13 bp, Artificial Sequence
  Oligonucleotide for detection of SNP TSC0011953
gtttgatatttgt

SEQ ID NO: 38842 - DNA, 13 bp, Artificial Sequence
  Oligonucleotide for detection of SNP TSC0011953
acaaatatcaaac

SEQ ID NO: 38843 - DNA, 13 bp, Artificial Sequence
  Oligonucleotide for detection of SNP TSC0011953
ataaattttaggy

SEQ ID NO: 38844 - DNA, 13 bp, Artificial Sequence
  Oligonucleotide for detection of SNP TSC0011953
rcctaaaatttat

SEQ ID NO: 38845 - DNA, 13 bp, Artificial Sequence
  Oligonucleotide for detection of SNP TSC0011953
ataaatattaggy

SEQ ID NO: 38846 - DNA, 13 bp, Artificial Sequence
  Oligonucleotide for detection of SNP TSC0011953
rcctaatatttat

SEQ ID NO: 38847 - DNA, 13 bp, Artificial Sequence
  Oligonucleotide for detection of SNP TSC0011954
ttttttcgtgttg

SEQ ID NO: 38848 - DNA, 13 bp, Artificial Sequence
  Oligonucleotide for detection of SNP TSC0011954
caacacgaaaaaa

SEQ ID NO: 38849 - DNA, 13 bp, Artificial Sequence
  Oligonucleotide for detection of SNP TSC0011954
taatatggagaaa

SEQ ID NO: 38850 - DNA, 13 bp, Artificial Sequence
  Oligonucleotide for detection of SNP TSC0011954
tttctccatatta

SEQ ID NO: 38851 - DNA, 13 bp, Artificial Sequence
  Oligonucleotide for detection of SNP TSC0011954
taatatagagaaa

SEQ ID NO: 38852 - DNA, 13 bp, Artificial Sequence
  Oligonucleotide for detection of SNP TSC0011954
tttctctatatta

SEQ ID NO: 38853 - DNA, 13 bp, Artificial Sequence
  Oligonucleotide for detection of SNP TSC0011954
taatacggagaaa

SEQ ID NO: 38854 - DNA, 13 bp, Artificial Sequence
  Oligonucleotide for detection of SNP TSC0011954
tttctccgtatta

SEQ ID NO: 38855 - DNA, 13 bp, Artificial Sequence
  Oligonucleotide for detection of SNP TSC0011955
attgttgtaaagg

SEQ ID NO: 38856 - DNA, 13 bp, Artificial Sequence
  Oligonucleotide for detection of SNP TSC0011955
cctttacaacaat

SEQ ID NO: 38857 - DNA, 13 bp, Artificial Sequence
  Oligonucleotide for detection of SNP TSC0011955
attgttataaagg

SEQ ID NO: 38858 - DNA, 13 bp, Artificial Sequence
  Oligonucleotide for detection of SNP TSC0011955
cctttataacaat

SEQ ID NO: 38859 - DNA, 13 bp, Artificial Sequence
  Oligonucleotide for detection of SNP TSC0011956
tattatgttttty

SEQ ID NO: 38860 - DNA, 13 bp, Artificial Sequence
  Oligonucleotide for detection of SNP TSC0011956
raaaaacataata

SEQ ID NO: 38861 - DNA, 13 bp, Artificial Sequence
  Oligonucleotide for detection of SNP TSC0011956
tattacgttttty

SEQ ID NO: 38862 - DNA, 13 bp, Artificial Sequence
  Oligonucleotide for detection of SNP TSC0011956
raaaaacgtaata

SEQ ID NO: 38863 - DNA, 13 bp, Artificial Sequence
  Oligonucleotide for detection of SNP TSC0011956
gaaagatgtgata

SEQ ID NO: 38864 - DNA, 13 bp, Artificial Sequence
  Oligonucleotide for detection of SNP TSC0011956
tatcacatctttc

SEQ ID NO: 38865 - DNA, 13 bp, Artificial Sequence
  Oligonucleotide for detection of SNP TSC0011956
gaaagacgtgata

SEQ ID NO: 38866 - DNA, 13 bp, Artificial Sequence
  Oligonucleotide for detection of SNP TSC0011956
tatcacgtctttc

SEQ ID NO: 38867 - DNA, 13 bp, Artificial Sequence
  Oligonucleotide for detection of SNP TSC0011965
aattttgttaaty

SEQ ID NO: 38868 - DNA, 13 bp, Artificial Sequence
  Oligonucleotide for detection of SNP TSC0011965
rattaacaaaatt

SEQ ID NO: 38869 - DNA, 13 bp, Artificial Sequence
  Oligonucleotide for detection of SNP TSC0011965
aattttattaaty

SEQ ID NO: 38870 - DNA, 13 bp, Artificial Sequence
  Oligonucleotide for detection of SNP TSC0011965
rattaataaaatt

SEQ ID NO: 38871 - DNA, 13 bp, Artificial Sequence
  Oligonucleotide for detection of SNP TSC0011966
ttggtttggaaag

SEQ ID NO: 38872 - DNA, 13 bp, Artificial Sequence
  Oligonucleotide for detection of SNP TSC0011966
ctttccaaaccaa

SEQ ID NO: 38873 - DNA, 13 bp, Artificial Sequence
  Oligonucleotide for detection of SNP TSC0011966
ttggttcggaaag

SEQ ID NO: 38874 - DNA, 13 bp, Artificial Sequence
  Oligonucleotide for detection of SNP TSC0011966
ctttccgaaccaa

SEQ ID NO: 38875 - DNA, 13 bp, Artificial Sequence
  Oligonucleotide for detection of SNP TSC0011966
ttttttgagttaa

SEQ ID NO: 38876 - DNA, 13 bp, Artificial Sequence
  Oligonucleotide for detection of SNP TSC0011966
ttaactcaaaaaa

SEQ ID NO: 38877 - DNA, 13 bp, Artificial Sequence
  Oligonucleotide for detection of SNP TSC0011966
ttttttaagttaa

SEQ ID NO: 38878 - DNA, 13 bp, Artificial Sequence
  Oligonucleotide for detection of SNP TSC0011966
ttaacttaaaaaa

SEQ ID NO: 38879 - DNA, 13 bp, Artificial Sequence
  Oligonucleotide for detection of SNP TSC0011966
tttttcgagttaa

SEQ ID NO: 38880 - DNA, 13 bp, Artificial Sequence
  Oligonucleotide for detection of SNP TSC0011966
ttaactcgaaaaa

SEQ ID NO: 38881 - DNA, 13 bp, Artificial Sequence
  Oligonucleotide for detection of SNP TSC0011967
ggggattgggggg

SEQ ID NO: 38882 - DNA, 13 bp, Artificial Sequence
  Oligonucleotide for detection of SNP TSC0011967
ccccccaatcccc

SEQ ID NO: 38883 - DNA, 13 bp, Artificial Sequence
  Oligonucleotide for detection of SNP TSC0011967
ggggatggggggg

SEQ ID NO: 38884 - DNA, 13 bp, Artificial Sequence
  Oligonucleotide for detection of SNP TSC0011967
cccccccatcccc

SEQ ID NO: 38885 - DNA, 13 bp, Artificial Sequence
  Oligonucleotide for detection of SNP TSC0011968
aggggattggggg

SEQ ID NO: 38886 - DNA, 13 bp, Artificial Sequence
  Oligonucleotide for detection of SNP TSC0011968
cccccaatcccct

SEQ ID NO: 38887 - DNA, 13 bp, Artificial Sequence
  Oligonucleotide for detection of SNP TSC0011968
aggggagtggggg

SEQ ID NO: 38888 - DNA, 13 bp, Artificial Sequence
  Oligonucleotide for detection of SNP TSC0011968
cccccactcccct

SEQ ID NO: 38889 - DNA, 13 bp, Artificial Sequence
  Oligonucleotide for detection of SNP TSC0011969
gtgaatgatttta

SEQ ID NO: 38890 - DNA, 13 bp, Artificial Sequence
  Oligonucleotide for detection of SNP TSC0011969
taaaatcattcac

SEQ ID NO: 38891 - DNA, 13 bp, Artificial Sequence
  Oligonucleotide for detection of SNP TSC0011969
gtgaattatttta

SEQ ID NO: 38892 - DNA, 13 bp, Artificial Sequence
  Oligonucleotide for detection of SNP TSC0011969
taaaataattcac

SEQ ID NO: 38893 - DNA, 13 bp, Artificial Sequence
  Oligonucleotide for detection of SNP TSC0011969
tgaggttatttay

SEQ ID NO: 38894 - DNA, 13 bp, Artificial Sequence
  Oligonucleotide for detection of SNP TSC0011969
rtaaataacctca

SEQ ID NO: 38895 - DNA, 13 bp, Artificial Sequence
  Oligonucleotide for detection of SNP TSC0011969
tgaggtaatttay

SEQ ID NO: 38896 - DNA, 13 bp, Artificial Sequence
  Oligonucleotide for detection of SNP TSC0011969
rtaaattacctca

SEQ ID NO: 38897 - DNA, 13 bp, Artificial Sequence
  Oligonucleotide for detection of SNP TSC0011970
aattggattagtt

SEQ ID NO: 38898 - DNA, 13 bp, Artificial Sequence
  Oligonucleotide for detection of SNP TSC0011970
aactaatccaatt

SEQ ID NO: 38899 - DNA, 13 bp, Artificial Sequence
  Oligonucleotide for detection of SNP TSC0011970
aattgggttagtt

SEQ ID NO: 38900 - DNA, 13 bp, Artificial Sequence
  Oligonucleotide for detection of SNP TSC0011970
aactaacccaatt

SEQ ID NO: 38901 - DNA, 13 bp, Artificial Sequence
  Oligonucleotide for detection of SNP TSC0011971
taatagataatgt

SEQ ID NO: 38902 - DNA, 13 bp, Artificial Sequence
  Oligonucleotide for detection of SNP TSC0011971
acattatctatta

SEQ ID NO: 38903 - DNA, 13 bp, Artificial Sequence
  Oligonucleotide for detection of SNP TSC0011971
taatagttaatgt

SEQ ID NO: 38904 - DNA, 13 bp, Artificial Sequence
  Oligonucleotide for detection of SNP TSC0011971
acattaactatta

SEQ ID NO: 38905 - DNA, 13 bp, Artificial Sequence
  Oligonucleotide for detection of SNP TSC0011971
atattatttattg

SEQ ID NO: 38906 - DNA, 13 bp, Artificial Sequence
  Oligonucleotide for detection of SNP TSC0011971
caataaataatat

SEQ ID NO: 38907 - DNA, 13 bp, Artificial Sequence
  Oligonucleotide for detection of SNP TSC0011971
atattagttattg

SEQ ID NO: 38908 - DNA, 13 bp, Artificial Sequence
  Oligonucleotide for detection of SNP TSC0011971
caataactaatat

SEQ ID NO: 38909 - DNA, 13 bp, Artificial Sequence
  Oligonucleotide for detection of SNP TSC0011976
taggggatgttty

SEQ ID NO: 38910 - DNA, 13 bp, Artificial Sequence
  Oligonucleotide for detection of SNP TSC0011976
raaacatccccta

SEQ ID NO: 38911 - DNA, 13 bp, Artificial Sequence
  Oligonucleotide for detection of SNP TSC0011976
taggggttgttty

SEQ ID NO: 38912 - DNA, 13 bp, Artificial Sequence
  Oligonucleotide for detection of SNP TSC0011976
raaacaaccccta

SEQ ID NO: 38913 - DNA, 13 bp, Artificial Sequence
  Oligonucleotide for detection of SNP TSC0011976
ggggtattttttg

SEQ ID NO: 38914 - DNA, 13 bp, Artificial Sequence
  Oligonucleotide for detection of SNP TSC0011976
caaaaaatacccc

SEQ ID NO: 38915 - DNA, 13 bp, Artificial Sequence
  Oligonucleotide for detection of SNP TSC0011976
ggggtagtttttg

SEQ ID NO: 38916 - DNA, 13 bp, Artificial Sequence
  Oligonucleotide for detection of SNP TSC0011976
caaaaactacccc

SEQ ID NO: 38917 - DNA, 13 bp, Artificial Sequence
  Oligonucleotide for detection of SNP TSC0011980
agtaaagagaaag

SEQ ID NO: 38918 - DNA, 13 bp, Artificial Sequence
  Oligonucleotide for detection of SNP TSC0011980
ctttctctttact

SEQ ID NO: 38919 - DNA, 13 bp, Artificial Sequence
  Oligonucleotide for detection of SNP TSC0011980
agtaaatagaaag

SEQ ID NO: 38920 - DNA, 13 bp, Artificial Sequence
  Oligonucleotide for detection of SNP TSC0011980
ctttctatttact

SEQ ID NO: 38921 - DNA, 13 bp, Artificial Sequence
  Oligonucleotide for detection of SNP TSC0011982
atggtaaagttta

SEQ ID NO: 38922 - DNA, 13 bp, Artificial Sequence
  Oligonucleotide for detection of SNP TSC0011982
taaactttaccat

SEQ ID NO: 38923 - DNA, 13 bp, Artificial Sequence
  Oligonucleotide for detection of SNP TSC0011982
atggtagagttta

SEQ ID NO: 38924 - DNA, 13 bp, Artificial Sequence
  Oligonucleotide for detection of SNP TSC0011982
taaactctaccat

SEQ ID NO: 38925 - DNA, 13 bp, Artificial Sequence
  Oligonucleotide for detection of SNP TSC0011983
tgttttatataay

SEQ ID NO: 38926 - DNA, 13 bp, Artificial Sequence
  Oligonucleotide for detection of SNP TSC0011983
rttatataaaaca

SEQ ID NO: 38927 - DNA, 13 bp, Artificial Sequence
  Oligonucleotide for detection of SNP TSC0011983
tgttttgtataay

SEQ ID NO: 38928 - DNA, 13 bp, Artificial Sequence
  Oligonucleotide for detection of SNP TSC0011983
rttatacaaaaca

SEQ ID NO: 38929 - DNA, 13 bp, Artificial Sequence
  Oligonucleotide for detection of SNP TSC0011984
tttatgattttaa

SEQ ID NO: 38930 - DNA, 13 bp, Artificial Sequence
  Oligonucleotide for detection of SNP TSC0011984
ttaaaatcataaa

SEQ ID NO: 38931 - DNA, 13 bp, Artificial Sequence
  Oligonucleotide for detection of SNP TSC0011984
tttatggttttaa

SEQ ID NO: 38932 - DNA, 13 bp, Artificial Sequence
  Oligonucleotide for detection of SNP TSC0011984
ttaaaaccataaa

SEQ ID NO: 38933 - DNA, 13 bp, Artificial Sequence
  Oligonucleotide for detection of SNP TSC0011985
ttagttgttttta

SEQ ID NO: 38934 - DNA, 13 bp, Artificial Sequence
  Oligonucleotide for detection of SNP TSC0011985
taaaaacaactaa

SEQ ID NO: 38935 - DNA, 13 bp, Artificial Sequence
  Oligonucleotide for detection of SNP TSC0011985
taaaggtaattaa

SEQ ID NO: 38936 - DNA, 13 bp, Artificial Sequence
  Oligonucleotide for detection of SNP TSC0011985
ttaattaccttta

SEQ ID NO: 38937 - DNA, 13 bp, Artificial Sequence
  Oligonucleotide for detection of SNP TSC0011985
taaaggaaattaa

SEQ ID NO: 38938 - DNA, 13 bp, Artificial Sequence
  Oligonucleotide for detection of SNP TSC0011985
ttaatttccttta

SEQ ID NO: 38939 - DNA, 13 bp, Artificial Sequence
  Oligonucleotide for detection of SNP TSC0011986
ttgttttgttttg

SEQ ID NO: 38940 - DNA, 13 bp, Artificial Sequence
  Oligonucleotide for detection of SNP TSC0011986
caaaacaaaacaa

SEQ ID NO: 38941 - DNA, 13 bp, Artificial Sequence
  Oligonucleotide for detection of SNP TSC0011986
ttgtttcgttttg

SEQ ID NO: 38942 - DNA, 13 bp, Artificial Sequence
  Oligonucleotide for detection of SNP TSC0011986
caaaacgaaacaa

SEQ ID NO: 38943 - DNA, 13 bp, Artificial Sequence
  Oligonucleotide for detection of SNP TSC0011986
taagatgaggtag

SEQ ID NO: 38944 - DNA, 13 bp, Artificial Sequence
  Oligonucleotide for detection of SNP TSC0011986
ctacctcatctta

SEQ ID NO: 38945 - DNA, 13 bp, Artificial Sequence
  Oligonucleotide for detection of SNP TSC0011986
taagataaggtag

SEQ ID NO: 38946 - DNA, 13 bp, Artificial Sequence
  Oligonucleotide for detection of SNP TSC0011986
ctaccttatctta

SEQ ID NO: 38947 - DNA, 13 bp, Artificial Sequence
  Oligonucleotide for detection of SNP TSC0011986
taagacgaggtag

SEQ ID NO: 38948 - DNA, 13 bp, Artificial Sequence
  Oligonucleotide for detection of SNP TSC0011986
ctacctcgtctta

SEQ ID NO: 38949 - DNA, 13 bp, Artificial Sequence
  Oligonucleotide for detection of SNP TSC0011987
ttattaatttgta

SEQ ID NO: 38950 - DNA, 13 bp, Artificial Sequence
  Oligonucleotide for detection of SNP TSC0011987
tacaaattaataa

SEQ ID NO: 38951 - DNA, 13 bp, Artificial Sequence
  Oligonucleotide for detection of SNP TSC0011987
ttattattttgta

SEQ ID NO: 38952 - DNA, 13 bp, Artificial Sequence
  Oligonucleotide for detection of SNP TSC0011987
tacaaaataataa

SEQ ID NO: 38953 - DNA, 13 bp, Artificial Sequence
  Oligonucleotide for detection of SNP TSC0011987
tataagttggtaa

SEQ ID NO: 38954 - DNA, 13 bp, Artificial Sequence
  Oligonucleotide for detection of SNP TSC0011987
ttaccaacttata

SEQ ID NO: 38955 - DNA, 13 bp, Artificial Sequence
  Oligonucleotide for detection of SNP TSC0011987
tataaggtggtaa

SEQ ID NO: 38956 - DNA, 13 bp, Artificial Sequence
  Oligonucleotide for detection of SNP TSC0011987
ttaccaccttata

SEQ ID NO: 38957 - DNA, 13 bp, Artificial Sequence
  Oligonucleotide for detection of SNP TSC0011990
atagtagggatgg

SEQ ID NO: 38958 - DNA, 13 bp, Artificial Sequence
  Oligonucleotide for detection of SNP TSC0011990
ccatccctactat

SEQ ID NO: 38959 - DNA, 13 bp, Artificial Sequence
  Oligonucleotide for detection of SNP TSC0011990
atagtatggatgg

SEQ ID NO: 38960 - DNA, 13 bp, Artificial Sequence
  Oligonucleotide for detection of SNP TSC0011990
ccatccatactat

SEQ ID NO: 38961 - DNA, 13 bp, Artificial Sequence
  Oligonucleotide for detection of SNP TSC0011990
ttatttttgttat

SEQ ID NO: 38962 - DNA, 13 bp, Artificial Sequence
  Oligonucleotide for detection of SNP TSC0011990
ataacaaaaataa

SEQ ID NO: 38963 - DNA, 13 bp, Artificial Sequence
  Oligonucleotide for detection of SNP TSC0011990
ttatttatgttat

SEQ ID NO: 38964 - DNA, 13 bp, Artificial Sequence
  Oligonucleotide for detection of SNP TSC0011990
ataacataaataa

SEQ ID NO: 38965 - DNA, 13 bp, Artificial Sequence
  Oligonucleotide for detection of SNP TSC0011991
ggtttggtggtty

SEQ ID NO: 38966 - DNA, 13 bp, Artificial Sequence
  Oligonucleotide for detection of SNP TSC0011991
raaccaccaaacc

SEQ ID NO: 38967 - DNA, 13 bp, Artificial Sequence
  Oligonucleotide for detection of SNP TSC0011991
ggtttgatggtty

SEQ ID NO: 38968 - DNA, 13 bp, Artificial Sequence
  Oligonucleotide for detection of SNP TSC0011991
raaccatcaaacc

SEQ ID NO: 38969 - DNA, 13 bp, Artificial Sequence
  Oligonucleotide for detection of SNP TSC0011992
aatagtttttgty

SEQ ID NO: 38970 - DNA, 13 bp, Artificial Sequence
  Oligonucleotide for detection of SNP TSC0011992
racaaaaactatt

SEQ ID NO: 38971 - DNA, 13 bp, Artificial Sequence
  Oligonucleotide for detection of SNP TSC0011992
aatagtgtttgty

SEQ ID NO: 38972 - DNA, 13 bp, Artificial Sequence
  Oligonucleotide for detection of SNP TSC0011992
racaaacactatt

SEQ ID NO: 38973 - DNA, 13 bp, Artificial Sequence
  Oligonucleotide for detection of SNP TSC0011992
aatagcgtttgty

SEQ ID NO: 38974 - DNA, 13 bp, Artificial Sequence
  Oligonucleotide for detection of SNP TSC0011992
racaaacgctatt

SEQ ID NO: 38975 - DNA, 13 bp, Artificial Sequence
  Oligonucleotide for detection of SNP TSC0011992
ggtaagggttgtt

SEQ ID NO: 38976 - DNA, 13 bp, Artificial Sequence
  Oligonucleotide for detection of SNP TSC0011992
aacaacccttacc

SEQ ID NO: 38977 - DNA, 13 bp, Artificial Sequence
  Oligonucleotide for detection of SNP TSC0011992
ggtaagtgttgtt

SEQ ID NO: 38978 - DNA, 13 bp, Artificial Sequence
  Oligonucleotide for detection of SNP TSC0011992
aacaacacttacc

SEQ ID NO: 38979 - DNA, 13 bp, Artificial Sequence
  Oligonucleotide for detection of SNP TSC0011992
ggtaagcgttgtt

SEQ ID NO: 38980 - DNA, 13 bp, Artificial Sequence
  Oligonucleotide for detection of SNP TSC0011992
aacaacgcttacc

SEQ ID NO: 38981 - DNA, 13 bp, Artificial Sequence
  Oligonucleotide for detection of SNP TSC0011993
attgtggaaagga

SEQ ID NO: 38982 - DNA, 13 bp, Artificial Sequence
  Oligonucleotide for detection of SNP TSC0011993
tcctttccacaat

SEQ ID NO: 38983 - DNA, 13 bp, Artificial Sequence
  Oligonucleotide for detection of SNP TSC0011993
attgtgaaaagga

SEQ ID NO: 38984 - DNA, 13 bp, Artificial Sequence
  Oligonucleotide for detection of SNP TSC0011993
tccttttcacaat

SEQ ID NO: 38985 - DNA, 13 bp, Artificial Sequence
  Oligonucleotide for detection of SNP TSC0011994
gaaatatgttaag

SEQ ID NO: 38986 - DNA, 13 bp, Artificial Sequence
  Oligonucleotide for detection of SNP TSC0011994
cttaacatatttc

SEQ ID NO: 38987 - DNA, 13 bp, Artificial Sequence
  Oligonucleotide for detection of SNP TSC0011994
gaaatacgttaag

SEQ ID NO: 38988 - DNA, 13 bp, Artificial Sequence
  Oligonucleotide for detection of SNP TSC0011994
cttaacgtatttc

SEQ ID NO: 38989 - DNA, 13 bp, Artificial Sequence
  Oligonucleotide for detection of SNP TSC0011994
tttgatgtattty

SEQ ID NO: 38990 - DNA, 13 bp, Artificial Sequence
  Oligonucleotide for detection of SNP TSC0011994
raaatacatcaaa

SEQ ID NO: 38991 - DNA, 13 bp, Artificial Sequence
  Oligonucleotide for detection of SNP TSC0011994
tttgatatattty

SEQ ID NO: 38992 - DNA, 13 bp, Artificial Sequence
  Oligonucleotide for detection of SNP TSC0011994
raaatatatcaaa

SEQ ID NO: 38993 - DNA, 13 bp, Artificial Sequence
  Oligonucleotide for detection of SNP TSC0011994
tttgacgtattty

SEQ ID NO: 38994 - DNA, 13 bp, Artificial Sequence
  Oligonucleotide for detection of SNP TSC0011994
raaatacgtcaaa

SEQ ID NO: 38995 - DNA, 13 bp, Artificial Sequence
  Oligonucleotide for detection of SNP TSC0011995
tatattttttagg

SEQ ID NO: 38996 - DNA, 13 bp, Artificial Sequence
  Oligonucleotide for detection of SNP TSC0011995
cctaaaaaatata

SEQ ID NO: 38997 - DNA, 13 bp, Artificial Sequence
  Oligonucleotide for detection of SNP TSC0011995
tatattgtttagg

SEQ ID NO: 38998 - DNA, 13 bp, Artificial Sequence
  Oligonucleotide for detection of SNP TSC0011995
cctaaacaatata

SEQ ID NO: 38999 - DNA, 13 bp, Artificial Sequence
  Oligonucleotide for detection of SNP TSC0011995
tatatcgtttagg

SEQ ID NO: 39000 - DNA, 13 bp, Artificial Sequence
  Oligonucleotide for detection of SNP TSC0011995
cctaaacgatata

SEQ ID NO: 39001 - DNA, 13 bp, Artificial Sequence
  Oligonucleotide for detection of SNP TSC0011995
tttgaggggtgta

SEQ ID NO: 39002 - DNA, 13 bp, Artificial Sequence
  Oligonucleotide for detection of SNP TSC0011995
tacacccctcaaa

SEQ ID NO: 39003 - DNA, 13 bp, Artificial Sequence
  Oligonucleotide for detection of SNP TSC0011995
tttgagtggtgta

SEQ ID NO: 39004 - DNA, 13 bp, Artificial Sequence
  Oligonucleotide for detection of SNP TSC0011995
tacaccactcaaa

SEQ ID NO: 39005 - DNA, 13 bp, Artificial Sequence
  Oligonucleotide for detection of SNP TSC0011995
tttgagcggtgta

SEQ ID NO: 39006 - DNA, 13 bp, Artificial Sequence
  Oligonucleotide for detection of SNP TSC0011995
tacaccgctcaaa

SEQ ID NO: 39007 - DNA, 13 bp, Artificial Sequence
  Oligonucleotide for detection of SNP TSC0011996
ttattttgtttgg

SEQ ID NO: 39008 - DNA, 13 bp, Artificial Sequence
  Oligonucleotide for detection of SNP TSC0011996
ccaaacaaaataa

SEQ ID NO: 39009 - DNA, 13 bp, Artificial Sequence
  Oligonucleotide for detection of SNP TSC0011996
ttatttcgtttgg

SEQ ID NO: 39010 - DNA, 13 bp, Artificial Sequence
  Oligonucleotide for detection of SNP TSC0011996
ccaaacgaaataa

SEQ ID NO: 39011 - DNA, 13 bp, Artificial Sequence
  Oligonucleotide for detection of SNP TSC0011996
ttattttgttcgg

SEQ ID NO: 39012 - DNA, 13 bp, Artificial Sequence
  Oligonucleotide for detection of SNP TSC0011996
ccgaacaaaataa

SEQ ID NO: 39013 - DNA, 13 bp, Artificial Sequence
  Oligonucleotide for detection of SNP TSC0011996
ttatttcgttcgg

SEQ ID NO: 39014 - DNA, 13 bp, Artificial Sequence
  Oligonucleotide for detection of SNP TSC0011996
ccgaacgaaataa

SEQ ID NO: 39015 - DNA, 13 bp, Artificial Sequence
  Oligonucleotide for detection of SNP TSC0011996
ttgggtgaggtgg

SEQ ID NO: 39016 - DNA, 13 bp, Artificial Sequence
  Oligonucleotide for detection of SNP TSC0011996
ccacctcacccaa

SEQ ID NO: 39017 - DNA, 13 bp, Artificial Sequence
  Oligonucleotide for detection of SNP TSC0011996
ttgggtaaggtgg

SEQ ID NO: 39018 - DNA, 13 bp, Artificial Sequence
  Oligonucleotide for detection of SNP TSC0011996
ccaccttacccaa

SEQ ID NO: 39019 - DNA, 13 bp, Artificial Sequence
  Oligonucleotide for detection of SNP TSC0011996
tcgggtgaggtgg

SEQ ID NO: 39020 - DNA, 13 bp, Artificial Sequence
  Oligonucleotide for detection of SNP TSC0011996
ccacctcacccga

SEQ ID NO: 39021 - DNA, 13 bp, Artificial Sequence
  Oligonucleotide for detection of SNP TSC0011996
tcgggtaaggtgg

SEQ ID NO: 39022 - DNA, 13 bp, Artificial Sequence
  Oligonucleotide for detection of SNP TSC0011996
ccaccttacccga

SEQ ID NO: 39023 - DNA, 13 bp, Artificial Sequence
  Oligonucleotide for detection of SNP TSC0011996
ttgggcgaggtgg

SEQ ID NO: 39024 - DNA, 13 bp, Artificial Sequence
  Oligonucleotide for detection of SNP TSC0011996
ccacctcgcccaa

SEQ ID NO: 39025 - DNA, 13 bp, Artificial Sequence
  Oligonucleotide for detection of SNP TSC0011996
tcgggcgaggtgg

SEQ ID NO: 39026 - DNA, 13 bp, Artificial Sequence
  Oligonucleotide for detection of SNP TSC0011996
ccacctcgcccga

SEQ ID NO: 39027 - DNA, 13 bp, Artificial Sequence
  Oligonucleotide for detection of SNP TSC0011997
tattttgtttggg

SEQ ID NO: 39028 - DNA, 13 bp, Artificial Sequence
  Oligonucleotide for detection of SNP TSC0011997
cccaaacaaaata

SEQ ID NO: 39029 - DNA, 13 bp, Artificial Sequence
  Oligonucleotide for detection of SNP TSC0011997
tattttttttggg

SEQ ID NO: 39030 - DNA, 13 bp, Artificial Sequence
  Oligonucleotide for detection of SNP TSC0011997
cccaaaaaaaata

SEQ ID NO: 39031 - DNA, 13 bp, Artificial Sequence
  Oligonucleotide for detection of SNP TSC0011997
tatttcgtttggg

SEQ ID NO: 39032 - DNA, 13 bp, Artificial Sequence
  Oligonucleotide for detection of SNP TSC0011997
cccaaacgaaata

SEQ ID NO: 39033 - DNA, 13 bp, Artificial Sequence
  Oligonucleotide for detection of SNP TSC0011997
tatttttttcggg

SEQ ID NO: 39034 - DNA, 13 bp, Artificial Sequence
  Oligonucleotide for detection of SNP TSC0011997
cccgaaaaaaata

SEQ ID NO: 39035 - DNA, 13 bp, Artificial Sequence
  Oligonucleotide for detection of SNP TSC0011997
tattttgttcggg

SEQ ID NO: 39036 - DNA, 13 bp, Artificial Sequence
  Oligonucleotide for detection of SNP TSC0011997
cccgaacaaaata

SEQ ID NO: 39037 - DNA, 13 bp, Artificial Sequence
  Oligonucleotide for detection of SNP TSC0011997
tatttcgttcggg

SEQ ID NO: 39038 - DNA, 13 bp, Artificial Sequence
  Oligonucleotide for detection of SNP TSC0011997
cccgaacgaaata

SEQ ID NO: 39039 - DNA, 13 bp, Artificial Sequence
  Oligonucleotide for detection of SNP TSC0011997
tttgggtgaggtg

SEQ ID NO: 39040 - DNA, 13 bp, Artificial Sequence
  Oligonucleotide for detection of SNP TSC0011997
cacctcacccaaa

SEQ ID NO: 39041 - DNA, 13 bp, Artificial Sequence
  Oligonucleotide for detection of SNP TSC0011997
tttgggagaggtg

SEQ ID NO: 39042 - DNA, 13 bp, Artificial Sequence
  Oligonucleotide for detection of SNP TSC0011997
cacctctcccaaa

SEQ ID NO: 39043 - DNA, 13 bp, Artificial Sequence
  Oligonucleotide for detection of SNP TSC0011997
ttcgggtgaggtg

SEQ ID NO: 39044 - DNA, 13 bp, Artificial Sequence
  Oligonucleotide for detection of SNP TSC0011997
cacctcacccgaa

SEQ ID NO: 39045 - DNA, 13 bp, Artificial Sequence
  Oligonucleotide for detection of SNP TSC0011997
ttcgggagaggtg

SEQ ID NO: 39046 - DNA, 13 bp, Artificial Sequence
  Oligonucleotide for detection of SNP TSC0011997
cacctctcccgaa

SEQ ID NO: 39047 - DNA, 13 bp, Artificial Sequence
  Oligonucleotide for detection of SNP TSC0011997
tttgggcgaggtg

SEQ ID NO: 39048 - DNA, 13 bp, Artificial Sequence
  Oligonucleotide for detection of SNP TSC0011997
cacctcgcccaaa

SEQ ID NO: 39049 - DNA, 13 bp, Artificial Sequence
  Oligonucleotide for detection of SNP TSC0011997
ttcgggcgaggtg

SEQ ID NO: 39050 - DNA, 13 bp, Artificial Sequence
  Oligonucleotide for detection of SNP TSC0011997
cacctcgcccgaa

SEQ ID NO: 39051 - DNA, 13 bp, Artificial Sequence
  Oligonucleotide for detection of SNP TSC0012000
tatgtagtttgty

SEQ ID NO: 39052 - DNA, 13 bp, Artificial Sequence
  Oligonucleotide for detection of SNP TSC0012000
racaaactacata

SEQ ID NO: 39053 - DNA, 13 bp, Artificial Sequence
  Oligonucleotide for detection of SNP TSC0012000
tatgtaatttgty

SEQ ID NO: 39054 - DNA, 13 bp, Artificial Sequence
  Oligonucleotide for detection of SNP TSC0012000
racaaattacata

SEQ ID NO: 39055 - DNA, 13 bp, Artificial Sequence
  Oligonucleotide for detection of SNP TSC0012001
gggggtattttta

SEQ ID NO: 39056 - DNA, 13 bp, Artificial Sequence
  Oligonucleotide for detection of SNP TSC0012001
taaaaataccccc

SEQ ID NO: 39057 - DNA, 13 bp, Artificial Sequence
  Oligonucleotide for detection of SNP TSC0012001
gggggtgttttta

SEQ ID NO: 39058 - DNA, 13 bp, Artificial Sequence
  Oligonucleotide for detection of SNP TSC0012001
taaaaacaccccc

SEQ ID NO: 39059 - DNA, 13 bp, Artificial Sequence
  Oligonucleotide for detection of SNP TSC0012001
gggggcgttttta

SEQ ID NO: 39060 - DNA, 13 bp, Artificial Sequence
  Oligonucleotide for detection of SNP TSC0012001
taaaaacgccccc

SEQ ID NO: 39061 - DNA, 13 bp, Artificial Sequence
  Oligonucleotide for detection of SNP TSC0012001
tgaaaatgtttty

SEQ ID NO: 39062 - DNA, 13 bp, Artificial Sequence
  Oligonucleotide for detection of SNP TSC0012001
raaaacattttca

SEQ ID NO: 39063 - DNA, 13 bp, Artificial Sequence
  Oligonucleotide for detection of SNP TSC0012001
tgaaaacgtttty

SEQ ID NO: 39064 - DNA, 13 bp, Artificial Sequence
  Oligonucleotide for detection of SNP TSC0012001
raaaacgttttca

SEQ ID NO: 39065 - DNA, 13 bp, Artificial Sequence
  Oligonucleotide for detection of SNP TSC0012005
ttatgtgggtttg

SEQ ID NO: 39066 - DNA, 13 bp, Artificial Sequence
  Oligonucleotide for detection of SNP TSC0012005
caaacccacataa

SEQ ID NO: 39067 - DNA, 13 bp, Artificial Sequence
  Oligonucleotide for detection of SNP TSC0012005
ttatgtaggtttg

SEQ ID NO: 39068 - DNA, 13 bp, Artificial Sequence
  Oligonucleotide for detection of SNP TSC0012005
caaacctacataa

SEQ ID NO: 39069 - DNA, 13 bp, Artificial Sequence
  Oligonucleotide for detection of SNP TSC0012005
ttacgtgggtttg

SEQ ID NO: 39070 - DNA, 13 bp, Artificial Sequence
  Oligonucleotide for detection of SNP TSC0012005
caaacccacgtaa

SEQ ID NO: 39071 - DNA, 13 bp, Artificial Sequence
  Oligonucleotide for detection of SNP TSC0012005
ttacgtaggtttg

SEQ ID NO: 39072 - DNA, 13 bp, Artificial Sequence
  Oligonucleotide for detection of SNP TSC0012005
caaacctacgtaa

SEQ ID NO: 39073 - DNA, 13 bp, Artificial Sequence
  Oligonucleotide for detection of SNP TSC0012006
gagtatattatty

SEQ ID NO: 39074 - DNA, 13 bp, Artificial Sequence
  Oligonucleotide for detection of SNP TSC0012006
raataatatactc

SEQ ID NO: 39075 - DNA, 13 bp, Artificial Sequence
  Oligonucleotide for detection of SNP TSC0012006
gagtatgttatty

SEQ ID NO: 39076 - DNA, 13 bp, Artificial Sequence
  Oligonucleotide for detection of SNP TSC0012006
raataacatactc

SEQ ID NO: 39077 - DNA, 13 bp, Artificial Sequence
  Oligonucleotide for detection of SNP TSC0012006
gagtacgttatty

SEQ ID NO: 39078 - DNA, 13 bp, Artificial Sequence
  Oligonucleotide for detection of SNP TSC0012006
raataacgtactc

SEQ ID NO: 39079 - DNA, 13 bp, Artificial Sequence
  Oligonucleotide for detection of SNP TSC0012006
ggataatgtgtty

SEQ ID NO: 39080 - DNA, 13 bp, Artificial Sequence
  Oligonucleotide for detection of SNP TSC0012006
raacacattatcc

SEQ ID NO: 39081 - DNA, 13 bp, Artificial Sequence
  Oligonucleotide for detection of SNP TSC0012006
ggataacgtgtty

SEQ ID NO: 39082 - DNA, 13 bp, Artificial Sequence
  Oligonucleotide for detection of SNP TSC0012006
raacacgttatcc

SEQ ID NO: 39083 - DNA, 13 bp, Artificial Sequence
  Oligonucleotide for detection of SNP TSC0012007
ttgtgaatttttg

SEQ ID NO: 39084 - DNA, 13 bp, Artificial Sequence
  Oligonucleotide for detection of SNP TSC0012007
caaaaattcacaa

SEQ ID NO: 39085 - DNA, 13 bp, Artificial Sequence
  Oligonucleotide for detection of SNP TSC0012007
ttgtgagtttttg

SEQ ID NO: 39086 - DNA, 13 bp, Artificial Sequence
  Oligonucleotide for detection of SNP TSC0012007
caaaaactcacaa

SEQ ID NO: 39087 - DNA, 13 bp, Artificial Sequence
  Oligonucleotide for detection of SNP TSC0012010
tttttatgatttt

SEQ ID NO: 39088 - DNA, 13 bp, Artificial Sequence
  Oligonucleotide for detection of SNP TSC0012010
aaaatcataaaaa

SEQ ID NO: 39089 - DNA, 13 bp, Artificial Sequence
  Oligonucleotide for detection of SNP TSC0012010
tttttacgatttt

SEQ ID NO: 39090 - DNA, 13 bp, Artificial Sequence
  Oligonucleotide for detection of SNP TSC0012010
aaaatcgtaaaaa

SEQ ID NO: 39091 - DNA, 13 bp, Artificial Sequence
  Oligonucleotide for detection of SNP TSC0012010
aaaattgtaagga

SEQ ID NO: 39092 - DNA, 13 bp, Artificial Sequence
  Oligonucleotide for detection of SNP TSC0012010
tccttacaatttt

SEQ ID NO: 39093 - DNA, 13 bp, Artificial Sequence
  Oligonucleotide for detection of SNP TSC0012010
aaaattataagga

SEQ ID NO: 39094 - DNA, 13 bp, Artificial Sequence
  Oligonucleotide for detection of SNP TSC0012010
tccttataatttt

SEQ ID NO: 39095 - DNA, 13 bp, Artificial Sequence
  Oligonucleotide for detection of SNP TSC0012010
aaaatcgtaagga

SEQ ID NO: 39096 - DNA, 13 bp, Artificial Sequence
  Oligonucleotide for detection of SNP TSC0012010
tccttacgatttt

SEQ ID NO: 39097 - DNA, 13 bp, Artificial Sequence
  Oligonucleotide for detection of SNP TSC0012011
ggagaaattatat

SEQ ID NO: 39098 - DNA, 13 bp, Artificial Sequence
  Oligonucleotide for detection of SNP TSC0012011
atataatttctcc

SEQ ID NO: 39099 - DNA, 13 bp, Artificial Sequence
  Oligonucleotide for detection of SNP TSC0012011
ggagaagttatat

SEQ ID NO: 39100 - DNA, 13 bp, Artificial Sequence
  Oligonucleotide for detection of SNP TSC0012011
atataacttctcc

SEQ ID NO: 39101 - DNA, 13 bp, Artificial Sequence
  Oligonucleotide for detection of SNP TSC0012012
aaattatgtaatt

SEQ ID NO: 39102 - DNA, 13 bp, Artificial Sequence
  Oligonucleotide for detection of SNP TSC0012012
aattacataattt

SEQ ID NO: 39103 - DNA, 13 bp, Artificial Sequence
  Oligonucleotide for detection of SNP TSC0012012
aaattacgtaatt

SEQ ID NO: 39104 - DNA, 13 bp, Artificial Sequence
  Oligonucleotide for detection of SNP TSC0012012
aattacgtaattt

SEQ ID NO: 39105 - DNA, 13 bp, Artificial Sequence
  Oligonucleotide for detection of SNP TSC0012012
agttgtgtaattt

SEQ ID NO: 39106 - DNA, 13 bp, Artificial Sequence
  Oligonucleotide for detection of SNP TSC0012012
aaattacacaact

SEQ ID NO: 39107 - DNA, 13 bp, Artificial Sequence
  Oligonucleotide for detection of SNP TSC0012012
agttgtataattt

SEQ ID NO: 39108 - DNA, 13 bp, Artificial Sequence
  Oligonucleotide for detection of SNP TSC0012012
aaattatacaact

SEQ ID NO: 39109 - DNA, 13 bp, Artificial Sequence
  Oligonucleotide for detection of SNP TSC0012012
agttgcgtaattt

SEQ ID NO: 39110 - DNA, 13 bp, Artificial Sequence
  Oligonucleotide for detection of SNP TSC0012012
aaattacgcaact

SEQ ID NO: 39111 - DNA, 13 bp, Artificial Sequence
  Oligonucleotide for detection of SNP TSC0012013
ttttatataagtt

SEQ ID NO: 39112 - DNA, 13 bp, Artificial Sequence
  Oligonucleotide for detection of SNP TSC0012013
aacttatataaaa

SEQ ID NO: 39113 - DNA, 13 bp, Artificial Sequence
  Oligonucleotide for detection of SNP TSC0012013
ttttatgtaagtt

SEQ ID NO: 39114 - DNA, 13 bp, Artificial Sequence
  Oligonucleotide for detection of SNP TSC0012013
aacttacataaaa

SEQ ID NO: 39115 - DNA, 13 bp, Artificial Sequence
  Oligonucleotide for detection of SNP TSC0012013
ttttacgtaagtt

SEQ ID NO: 39116 - DNA, 13 bp, Artificial Sequence
  Oligonucleotide for detection of SNP TSC0012013
aacttacgtaaaa

SEQ ID NO: 39117 - DNA, 13 bp, Artificial Sequence
  Oligonucleotide for detection of SNP TSC0012013
agtttatgtggga

SEQ ID NO: 39118 - DNA, 13 bp, Artificial Sequence
  Oligonucleotide for detection of SNP TSC0012013
tcccacataaact

SEQ ID NO: 39119 - DNA, 13 bp, Artificial Sequence
  Oligonucleotide for detection of SNP TSC0012013
agtttacgtggga

SEQ ID NO: 39120 - DNA, 13 bp, Artificial Sequence
  Oligonucleotide for detection of SNP TSC0012013
tcccacgtaaact

SEQ ID NO: 39121 - DNA, 13 bp, Artificial Sequence
  Oligonucleotide for detection of SNP TSC0012014
taagaggggattt

SEQ ID NO: 39122 - DNA, 13 bp, Artificial Sequence
  Oligonucleotide for detection of SNP TSC0012014
aaatcccctctta

SEQ ID NO: 39123 - DNA, 13 bp, Artificial Sequence
  Oligonucleotide for detection of SNP TSC0012014
taagagaggattt

SEQ ID NO: 39124 - DNA, 13 bp, Artificial Sequence
  Oligonucleotide for detection of SNP TSC0012014
aaatcctctctta

SEQ ID NO: 39125 - DNA, 13 bp, Artificial Sequence
  Oligonucleotide for detection of SNP TSC0012017
agttaggttaaay

SEQ ID NO: 39126 - DNA, 13 bp, Artificial Sequence
  Oligonucleotide for detection of SNP TSC0012017
rtttaacctaact

SEQ ID NO: 39127 - DNA, 13 bp, Artificial Sequence
  Oligonucleotide for detection of SNP TSC0012017
agttagattaaay

SEQ ID NO: 39128 - DNA, 13 bp, Artificial Sequence
  Oligonucleotide for detection of SNP TSC0012017
rtttaatctaact

SEQ ID NO: 39129 - DNA, 13 bp, Artificial Sequence
  Oligonucleotide for detection of SNP TSC0012018
gtagataatttga

SEQ ID NO: 39130 - DNA, 13 bp, Artificial Sequence
  Oligonucleotide for detection of SNP TSC0012018
tcaaattatctac

SEQ ID NO: 39131 - DNA, 13 bp, Artificial Sequence
  Oligonucleotide for detection of SNP TSC0012018
gtagatgatttga

SEQ ID NO: 39132 - DNA, 13 bp, Artificial Sequence
  Oligonucleotide for detection of SNP TSC0012018
tcaaatcatctac

SEQ ID NO: 39133 - DNA, 13 bp, Artificial Sequence
  Oligonucleotide for detection of SNP TSC0012018
gtagacgatttga

SEQ ID NO: 39134 - DNA, 13 bp, Artificial Sequence
  Oligonucleotide for detection of SNP TSC0012018
tcaaatcgtctac

SEQ ID NO: 39135 - DNA, 13 bp, Artificial Sequence
  Oligonucleotide for detection of SNP TSC0012018
ttaagttgtttgy

SEQ ID NO: 39136 - DNA, 13 bp, Artificial Sequence
  Oligonucleotide for detection of SNP TSC0012018
rcaaacaacttaa

SEQ ID NO: 39137 - DNA, 13 bp, Artificial Sequence
  Oligonucleotide for detection of SNP TSC0012018
ttaagtcgtttgy

SEQ ID NO: 39138 - DNA, 13 bp, Artificial Sequence
  Oligonucleotide for detection of SNP TSC0012018
rcaaacgacttaa

SEQ ID NO: 39139 - DNA, 13 bp, Artificial Sequence
  Oligonucleotide for detection of SNP TSC0012019
tagataatttgag

SEQ ID NO: 39140 - DNA, 13 bp, Artificial Sequence
  Oligonucleotide for detection of SNP TSC0012019
ctcaaattatcta

SEQ ID NO: 39141 - DNA, 13 bp, Artificial Sequence
  Oligonucleotide for detection of SNP TSC0012019
tagatattttgag

SEQ ID NO: 39142 - DNA, 13 bp, Artificial Sequence
  Oligonucleotide for detection of SNP TSC0012019
ctcaaaatatcta

SEQ ID NO: 39143 - DNA, 13 bp, Artificial Sequence
  Oligonucleotide for detection of SNP TSC0012019
tttaagttgtttg

SEQ ID NO: 39144 - DNA, 13 bp, Artificial Sequence
  Oligonucleotide for detection of SNP TSC0012019
caaacaacttaaa

SEQ ID NO: 39145 - DNA, 13 bp, Artificial Sequence
  Oligonucleotide for detection of SNP TSC0012019
tttaaggtgtttg

SEQ ID NO: 39146 - DNA, 13 bp, Artificial Sequence
  Oligonucleotide for detection of SNP TSC0012019
caaacaccttaaa

SEQ ID NO: 39147 - DNA, 13 bp, Artificial Sequence
  Oligonucleotide for detection of SNP TSC0012020
agtttgggtgatg

SEQ ID NO: 39148 - DNA, 13 bp, Artificial Sequence
  Oligonucleotide for detection of SNP TSC0012020
catcacccaaact

SEQ ID NO: 39149 - DNA, 13 bp, Artificial Sequence
  Oligonucleotide for detection of SNP TSC0012020
agtttgagtgatg

SEQ ID NO: 39150 - DNA, 13 bp, Artificial Sequence
  Oligonucleotide for detection of SNP TSC0012020
catcactcaaact

SEQ ID NO: 39151 - DNA, 13 bp, Artificial Sequence
  Oligonucleotide for detection of SNP TSC0012020
agtttgggcgatg

SEQ ID NO: 39152 - DNA, 13 bp, Artificial Sequence
  Oligonucleotide for detection of SNP TSC0012020
catcgcccaaact

SEQ ID NO: 39153 - DNA, 13 bp, Artificial Sequence
  Oligonucleotide for detection of SNP TSC0012020
agtttgagcgatg

SEQ ID NO: 39154 - DNA, 13 bp, Artificial Sequence
  Oligonucleotide for detection of SNP TSC0012020
catcgctcaaact

SEQ ID NO: 39155 - DNA, 13 bp, Artificial Sequence
  Oligonucleotide for detection of SNP TSC0012020
agtttgggtgacg

SEQ ID NO: 39156 - DNA, 13 bp, Artificial Sequence
  Oligonucleotide for detection of SNP TSC0012020
cgtcacccaaact

SEQ ID NO: 39157 - DNA, 13 bp, Artificial Sequence
  Oligonucleotide for detection of SNP TSC0012020
agtttgagtgacg

SEQ ID NO: 39158 - DNA, 13 bp, Artificial Sequence
  Oligonucleotide for detection of SNP TSC0012020
cgtcactcaaact

SEQ ID NO: 39159 - DNA, 13 bp, Artificial Sequence
  Oligonucleotide for detection of SNP TSC0012020
agtttgggcgacg

SEQ ID NO: 39160 - DNA, 13 bp, Artificial Sequence
  Oligonucleotide for detection of SNP TSC0012020
cgtcgcccaaact

SEQ ID NO: 39161 - DNA, 13 bp, Artificial Sequence
  Oligonucleotide for detection of SNP TSC0012020
agtttgagcgacg

SEQ ID NO: 39162 - DNA, 13 bp, Artificial Sequence
  Oligonucleotide for detection of SNP TSC0012020
cgtcgctcaaact

SEQ ID NO: 39163 - DNA, 13 bp, Artificial Sequence
  Oligonucleotide for detection of SNP TSC0012021
agagataggatay

SEQ ID NO: 39164 - DNA, 13 bp, Artificial Sequence
  Oligonucleotide for detection of SNP TSC0012021
rtatcctatctct

SEQ ID NO: 39165 - DNA, 13 bp, Artificial Sequence
  Oligonucleotide for detection of SNP TSC0012021
agagattggatay

SEQ ID NO: 39166 - DNA, 13 bp, Artificial Sequence
  Oligonucleotide for detection of SNP TSC0012021
rtatccaatctct

SEQ ID NO: 39167 - DNA, 13 bp, Artificial Sequence
  Oligonucleotide for detection of SNP TSC0012021
gtgttttattttt

SEQ ID NO: 39168 - DNA, 13 bp, Artificial Sequence
  Oligonucleotide for detection of SNP TSC0012021
aaaaataaaacac

SEQ ID NO: 39169 - DNA, 13 bp, Artificial Sequence
  Oligonucleotide for detection of SNP TSC0012021
gtgtttaattttt

SEQ ID NO: 39170 - DNA, 13 bp, Artificial Sequence
  Oligonucleotide for detection of SNP TSC0012021
aaaaattaaacac

SEQ ID NO: 39171 - DNA, 13 bp, Artificial Sequence
  Oligonucleotide for detection of SNP TSC0012022
tggttttgaatty

SEQ ID NO: 39172 - DNA, 13 bp, Artificial Sequence
  Oligonucleotide for detection of SNP TSC0012022
raattcaaaacca

SEQ ID NO: 39173 - DNA, 13 bp, Artificial Sequence
  Oligonucleotide for detection of SNP TSC0012022
tggtttcgaatty

SEQ ID NO: 39174 - DNA, 13 bp, Artificial Sequence
  Oligonucleotide for detection of SNP TSC0012022
raattcgaaacca

SEQ ID NO: 39175 - DNA, 13 bp, Artificial Sequence
  Oligonucleotide for detection of SNP TSC0012022
gagtttgagatta

SEQ ID NO: 39176 - DNA, 13 bp, Artificial Sequence
  Oligonucleotide for detection of SNP TSC0012022
taatctcaaactc

SEQ ID NO: 39177 - DNA, 13 bp, Artificial Sequence
  Oligonucleotide for detection of SNP TSC0012022
gagtttaagatta

SEQ ID NO: 39178 - DNA, 13 bp, Artificial Sequence
  Oligonucleotide for detection of SNP TSC0012022
taatcttaaactc

SEQ ID NO: 39179 - DNA, 13 bp, Artificial Sequence
  Oligonucleotide for detection of SNP TSC0012022
gagttcgagatta

SEQ ID NO: 39180 - DNA, 13 bp, Artificial Sequence
  Oligonucleotide for detection of SNP TSC0012022
taatctcgaactc

SEQ ID NO: 39181 - DNA, 13 bp, Artificial Sequence
  Oligonucleotide for detection of SNP TSC0012025
ggttaagttagaa

SEQ ID NO: 39182 - DNA, 13 bp, Artificial Sequence
  Oligonucleotide for detection of SNP TSC0012025
ttctaacttaacc

SEQ ID NO: 39183 - DNA, 13 bp, Artificial Sequence
  Oligonucleotide for detection of SNP TSC0012025
ggttaaattagaa

SEQ ID NO: 39184 - DNA, 13 bp, Artificial Sequence
  Oligonucleotide for detection of SNP TSC0012025
ttctaatttaacc

SEQ ID NO: 39185 - DNA, 13 bp, Artificial Sequence
  Oligonucleotide for detection of SNP TSC0012026
tttaaagattata

SEQ ID NO: 39186 - DNA, 13 bp, Artificial Sequence
  Oligonucleotide for detection of SNP TSC0012026
tataatctttaaa

SEQ ID NO: 39187 - DNA, 13 bp, Artificial Sequence
  Oligonucleotide for detection of SNP TSC0012026
tttaaatattata

SEQ ID NO: 39188 - DNA, 13 bp, Artificial Sequence
  Oligonucleotide for detection of SNP TSC0012026
tataatatttaaa

SEQ ID NO: 39189 - DNA, 13 bp, Artificial Sequence
  Oligonucleotide for detection of SNP TSC0012026
tataatttttgga

SEQ ID NO: 39190 - DNA, 13 bp, Artificial Sequence
  Oligonucleotide for detection of SNP TSC0012026
tccaaaaattata

SEQ ID NO: 39191 - DNA, 13 bp, Artificial Sequence
  Oligonucleotide for detection of SNP TSC0012026
tataatatttgga

SEQ ID NO: 39192 - DNA, 13 bp, Artificial Sequence
  Oligonucleotide for detection of SNP TSC0012026
tccaaatattata

SEQ ID NO: 39193 - DNA, 13 bp, Artificial Sequence
  Oligonucleotide for detection of SNP TSC0012028
agatgtagtggtt

SEQ ID NO: 39194 - DNA, 13 bp, Artificial Sequence
  Oligonucleotide for detection of SNP TSC0012028
aaccactacatct

SEQ ID NO: 39195 - DNA, 13 bp, Artificial Sequence
  Oligonucleotide for detection of SNP TSC0012028
agatgtggtggtt

SEQ ID NO: 39196 - DNA, 13 bp, Artificial Sequence
  Oligonucleotide for detection of SNP TSC0012028
aaccaccacatct

SEQ ID NO: 39197 - DNA, 13 bp, Artificial Sequence
  Oligonucleotide for detection of SNP TSC0012028
agacgtagtggtt

SEQ ID NO: 39198 - DNA, 13 bp, Artificial Sequence
  Oligonucleotide for detection of SNP TSC0012028
aaccactacgtct

SEQ ID NO: 39199 - DNA, 13 bp, Artificial Sequence
  Oligonucleotide for detection of SNP TSC0012028
agacgtggtggtt

SEQ ID NO: 39200 - DNA, 13 bp, Artificial Sequence
  Oligonucleotide for detection of SNP TSC0012028
aaccaccacgtct

SEQ ID NO: 39201 - DNA, 13 bp, Artificial Sequence
  Oligonucleotide for detection of SNP TSC0012028
agatgcggtggtt

SEQ ID NO: 39202 - DNA, 13 bp, Artificial Sequence
  Oligonucleotide for detection of SNP TSC0012028
aaccaccgcatct

SEQ ID NO: 39203 - DNA, 13 bp, Artificial Sequence
  Oligonucleotide for detection of SNP TSC0012028
agacgcggtggtt

SEQ ID NO: 39204 - DNA, 13 bp, Artificial Sequence
  Oligonucleotide for detection of SNP TSC0012028
aaccaccgcgtct

SEQ ID NO: 39205 - DNA, 13 bp, Artificial Sequence
  Oligonucleotide for detection of SNP TSC0012028
agttattgtgttt

SEQ ID NO: 39206 - DNA, 13 bp, Artificial Sequence
  Oligonucleotide for detection of SNP TSC0012028
aaacacaataact

SEQ ID NO: 39207 - DNA, 13 bp, Artificial Sequence
  Oligonucleotide for detection of SNP TSC0012028
agttattgcgttt

SEQ ID NO: 39208 - DNA, 13 bp, Artificial Sequence
  Oligonucleotide for detection of SNP TSC0012028
aaacgcaataact

SEQ ID NO: 39209 - DNA, 13 bp, Artificial Sequence
  Oligonucleotide for detection of SNP TSC0012028
agttatcgtgttt

SEQ ID NO: 39210 - DNA, 13 bp, Artificial Sequence
  Oligonucleotide for detection of SNP TSC0012028
aaacacgataact

SEQ ID NO: 39211 - DNA, 13 bp, Artificial Sequence
  Oligonucleotide for detection of SNP TSC0012028
agttatcgcgttt

SEQ ID NO: 39212 - DNA, 13 bp, Artificial Sequence
  Oligonucleotide for detection of SNP TSC0012028
aaacgcgataact

SEQ ID NO: 39213 - DNA, 13 bp, Artificial Sequence
  Oligonucleotide for detection of SNP TSC0012029
ggtgggtggattt

SEQ ID NO: 39214 - DNA, 13 bp, Artificial Sequence
  Oligonucleotide for detection of SNP TSC0012029
aaatccacccacc

SEQ ID NO: 39215 - DNA, 13 bp, Artificial Sequence
  Oligonucleotide for detection of SNP TSC0012029
ggcgggtggattt

SEQ ID NO: 39216 - DNA, 13 bp, Artificial Sequence
  Oligonucleotide for detection of SNP TSC0012029
aaatccacccgcc

SEQ ID NO: 39217 - DNA, 13 bp, Artificial Sequence
  Oligonucleotide for detection of SNP TSC0012029
ggtgggcggattt

SEQ ID NO: 39218 - DNA, 13 bp, Artificial Sequence
  Oligonucleotide for detection of SNP TSC0012029
aaatccgcccacc

SEQ ID NO: 39219 - DNA, 13 bp, Artificial Sequence
  Oligonucleotide for detection of SNP TSC0012029
ggcgggcggattt

SEQ ID NO: 39220 - DNA, 13 bp, Artificial Sequence
  Oligonucleotide for detection of SNP TSC0012029
aaatccgcccgcc

SEQ ID NO: 39221 - DNA, 13 bp, Artificial Sequence
  Oligonucleotide for detection of SNP TSC0012029
agatttgtttgty

SEQ ID NO: 39222 - DNA, 13 bp, Artificial Sequence
  Oligonucleotide for detection of SNP TSC0012029
racaaacaaatct

SEQ ID NO: 39223 - DNA, 13 bp, Artificial Sequence
  Oligonucleotide for detection of SNP TSC0012029
agatttatttgty

SEQ ID NO: 39224 - DNA, 13 bp, Artificial Sequence
  Oligonucleotide for detection of SNP TSC0012029
racaaataaatct

SEQ ID NO: 39225 - DNA, 13 bp, Artificial Sequence
  Oligonucleotide for detection of SNP TSC0012029
agattcgtttgty

SEQ ID NO: 39226 - DNA, 13 bp, Artificial Sequence
  Oligonucleotide for detection of SNP TSC0012029
racaaacgaatct

SEQ ID NO: 39227 - DNA, 13 bp, Artificial Sequence
  Oligonucleotide for detection of SNP TSC0012029
agatttattcgty

SEQ ID NO: 39228 - DNA, 13 bp, Artificial Sequence
  Oligonucleotide for detection of SNP TSC0012029
racgaataaatct

SEQ ID NO: 39229 - DNA, 13 bp, Artificial Sequence
  Oligonucleotide for detection of SNP TSC0012029
agatttgttcgty

SEQ ID NO: 39230 - DNA, 13 bp, Artificial Sequence
  Oligonucleotide for detection of SNP TSC0012029
racgaacaaatct

SEQ ID NO: 39231 - DNA, 13 bp, Artificial Sequence
  Oligonucleotide for detection of SNP TSC0012029
agattcgttcgty

SEQ ID NO: 39232 - DNA, 13 bp, Artificial Sequence
  Oligonucleotide for detection of SNP TSC0012029
racgaacgaatct

SEQ ID NO: 39233 - DNA, 13 bp, Artificial Sequence
  Oligonucleotide for detection of SNP TSC0012030
ttagttaggtgtg

SEQ ID NO: 39234 - DNA, 13 bp, Artificial Sequence
  Oligonucleotide for detection of SNP TSC0012030
cacacctaactaa

SEQ ID NO: 39235 - DNA, 13 bp, Artificial Sequence
  Oligonucleotide for detection of SNP TSC0012030
ttagttgggtgtg

SEQ ID NO: 39236 - DNA, 13 bp, Artificial Sequence
  Oligonucleotide for detection of SNP TSC0012030
cacacccaactaa

SEQ ID NO: 39237 - DNA, 13 bp, Artificial Sequence
  Oligonucleotide for detection of SNP TSC0012030
ttagttaggcgtg

SEQ ID NO: 39238 - DNA, 13 bp, Artificial Sequence
  Oligonucleotide for detection of SNP TSC0012030
cacgcctaactaa

SEQ ID NO: 39239 - DNA, 13 bp, Artificial Sequence
  Oligonucleotide for detection of SNP TSC0012030
ttagtcgggtgtg

SEQ ID NO: 39240 - DNA, 13 bp, Artificial Sequence
  Oligonucleotide for detection of SNP TSC0012030
cacacccgactaa

SEQ ID NO: 39241 - DNA, 13 bp, Artificial Sequence
  Oligonucleotide for detection of SNP TSC0012030
ttagttaggtgcg

SEQ ID NO: 39242 - DNA, 13 bp, Artificial Sequence
  Oligonucleotide for detection of SNP TSC0012030
cgcacctaactaa

SEQ ID NO: 39243 - DNA, 13 bp, Artificial Sequence
  Oligonucleotide for detection of SNP TSC0012030
ttagttgggcgtg

SEQ ID NO: 39244 - DNA, 13 bp, Artificial Sequence
  Oligonucleotide for detection of SNP TSC0012030
cacgcccaactaa

SEQ ID NO: 39245 - DNA, 13 bp, Artificial Sequence
  Oligonucleotide for detection of SNP TSC0012030
ttagttaggcgcg

SEQ ID NO: 39246 - DNA, 13 bp, Artificial Sequence
  Oligonucleotide for detection of SNP TSC0012030
cgcgcctaactaa

SEQ ID NO: 39247 - DNA, 13 bp, Artificial Sequence
  Oligonucleotide for detection of SNP TSC0012030
ttagttgggtgcg

SEQ ID NO: 39248 - DNA, 13 bp, Artificial Sequence
  Oligonucleotide for detection of SNP TSC0012030
cgcacccaactaa

SEQ ID NO: 39249 - DNA, 13 bp, Artificial Sequence
  Oligonucleotide for detection of SNP TSC0012030
ttagtcgggcgtg

SEQ ID NO: 39250 - DNA, 13 bp, Artificial Sequence
  Oligonucleotide for detection of SNP TSC0012030
cacgcccgactaa

SEQ ID NO: 39251 - DNA, 13 bp, Artificial Sequence
  Oligonucleotide for detection of SNP TSC0012030
ttagtcgggtgcg

SEQ ID NO: 39252 - DNA, 13 bp, Artificial Sequence
  Oligonucleotide for detection of SNP TSC0012030
cgcacccgactaa

SEQ ID NO: 39253 - DNA, 13 bp, Artificial Sequence
  Oligonucleotide for detection of SNP TSC0012030
ttagttgggcgcg

SEQ ID NO: 39254 - DNA, 13 bp, Artificial Sequence
  Oligonucleotide for detection of SNP TSC0012030
cgcgcccaactaa

SEQ ID NO: 39255 - DNA, 13 bp, Artificial Sequence
  Oligonucleotide for detection of SNP TSC0012030
ttagtcgggcgcg

SEQ ID NO: 39256 - DNA, 13 bp, Artificial Sequence
  Oligonucleotide for detection of SNP TSC0012030
cgcgcccgactaa

SEQ ID NO: 39257 - DNA, 13 bp, Artificial Sequence
  Oligonucleotide for detection of SNP TSC0012030
tgtgtttggttaa

SEQ ID NO: 39258 - DNA, 13 bp, Artificial Sequence
  Oligonucleotide for detection of SNP TSC0012030
ttaaccaaacaca

SEQ ID NO: 39259 - DNA, 13 bp, Artificial Sequence
  Oligonucleotide for detection of SNP TSC0012030
cgtgtttggttaa

SEQ ID NO: 39260 - DNA, 13 bp, Artificial Sequence
  Oligonucleotide for detection of SNP TSC0012030
ttaaccaaacacg

SEQ ID NO: 39261 - DNA, 13 bp, Artificial Sequence
  Oligonucleotide for detection of SNP TSC0012030
tgcgtttggttaa

SEQ ID NO: 39262 - DNA, 13 bp, Artificial Sequence
  Oligonucleotide for detection of SNP TSC0012030
ttaaccaaacgca

SEQ ID NO: 39263 - DNA, 13 bp, Artificial Sequence
  Oligonucleotide for detection of SNP TSC0012030
cgcgtttggttaa

SEQ ID NO: 39264 - DNA, 13 bp, Artificial Sequence
  Oligonucleotide for detection of SNP TSC0012030
ttaaccaaacgcg

SEQ ID NO: 39265 - DNA, 13 bp, Artificial Sequence
  Oligonucleotide for detection of SNP TSC0012030
tgtgttcggttaa

SEQ ID NO: 39266 - DNA, 13 bp, Artificial Sequence
  Oligonucleotide for detection of SNP TSC0012030
ttaaccgaacaca

SEQ ID NO: 39267 - DNA, 13 bp, Artificial Sequence
  Oligonucleotide for detection of SNP TSC0012030
cgtgttcggttaa

SEQ ID NO: 39268 - DNA, 13 bp, Artificial Sequence
  Oligonucleotide for detection of SNP TSC0012030
ttaaccgaacacg

SEQ ID NO: 39269 - DNA, 13 bp, Artificial Sequence
  Oligonucleotide for detection of SNP TSC0012030
tgcgttcggttaa

SEQ ID NO: 39270 - DNA, 13 bp, Artificial Sequence
  Oligonucleotide for detection of SNP TSC0012030
ttaaccgaacgca

SEQ ID NO: 39271 - DNA, 13 bp, Artificial Sequence
  Oligonucleotide for detection of SNP TSC0012030
cgcgttcggttaa

SEQ ID NO: 39272 - DNA, 13 bp, Artificial Sequence
  Oligonucleotide for detection of SNP TSC0012030
ttaaccgaacgcg

SEQ ID NO: 39273 - DNA, 13 bp, Artificial Sequence
  Oligonucleotide for detection of SNP TSC0012031
ttggaaaaaagag

SEQ ID NO: 39274 - DNA, 13 bp, Artificial Sequence
  Oligonucleotide for detection of SNP TSC0012031
ctcttttttccaa

SEQ ID NO: 39275 - DNA, 13 bp, Artificial Sequence
  Oligonucleotide for detection of SNP TSC0012031
ttggaagaaagag

SEQ ID NO: 39276 - DNA, 13 bp, Artificial Sequence
  Oligonucleotide for detection of SNP TSC0012031
ctctttcttccaa

SEQ ID NO: 39277 - DNA, 13 bp, Artificial Sequence
  Oligonucleotide for detection of SNP TSC0012032
gtgggaatgataa

SEQ ID NO: 39278 - DNA, 13 bp, Artificial Sequence
  Oligonucleotide for detection of SNP TSC0012032
ttatcattcccac

SEQ ID NO: 39279 - DNA, 13 bp, Artificial Sequence
  Oligonucleotide for detection of SNP TSC0012032
gtgggagtgataa

SEQ ID NO: 39280 - DNA, 13 bp, Artificial Sequence
  Oligonucleotide for detection of SNP TSC0012032
ttatcactcccac

SEQ ID NO: 39281 - DNA, 13 bp, Artificial Sequence
  Oligonucleotide for detection of SNP TSC0012032
gtgggaacgataa

SEQ ID NO: 39282 - DNA, 13 bp, Artificial Sequence
  Oligonucleotide for detection of SNP TSC0012032
ttatcgttcccac

SEQ ID NO: 39283 - DNA, 13 bp, Artificial Sequence
  Oligonucleotide for detection of SNP TSC0012032
gtgggagcgataa

SEQ ID NO: 39284 - DNA, 13 bp, Artificial Sequence
  Oligonucleotide for detection of SNP TSC0012032
ttatcgctcccac

SEQ ID NO: 39285 - DNA, 13 bp, Artificial Sequence
  Oligonucleotide for detection of SNP TSC0012033
tttgttgggaagg

SEQ ID NO: 39286 - DNA, 13 bp, Artificial Sequence
  Oligonucleotide for detection of SNP TSC0012033
ccttcccaacaaa

SEQ ID NO: 39287 - DNA, 13 bp, Artificial Sequence
  Oligonucleotide for detection of SNP TSC0012033
tttgttaggaagg

SEQ ID NO: 39288 - DNA, 13 bp, Artificial Sequence
  Oligonucleotide for detection of SNP TSC0012033
ccttcctaacaaa

SEQ ID NO: 39289 - DNA, 13 bp, Artificial Sequence
  Oligonucleotide for detection of SNP TSC0012034
tttataagtatgt

SEQ ID NO: 39290 - DNA, 13 bp, Artificial Sequence
  Oligonucleotide for detection of SNP TSC0012034
acatacttataaa

SEQ ID NO: 39291 - DNA, 13 bp, Artificial Sequence
  Oligonucleotide for detection of SNP TSC0012034
tttataggtatgt

SEQ ID NO: 39292 - DNA, 13 bp, Artificial Sequence
  Oligonucleotide for detection of SNP TSC0012034
acatacctataaa

SEQ ID NO: 39293 - DNA, 13 bp, Artificial Sequence
  Oligonucleotide for detection of SNP TSC0012038
gttataattttty

SEQ ID NO: 39294 - DNA, 13 bp, Artificial Sequence
  Oligonucleotide for detection of SNP TSC0012038
raaaaattataac

SEQ ID NO: 39295 - DNA, 13 bp, Artificial Sequence
  Oligonucleotide for detection of SNP TSC0012038
gttatagttttty

SEQ ID NO: 39296 - DNA, 13 bp, Artificial Sequence
  Oligonucleotide for detection of SNP TSC0012038
raaaaactataac

SEQ ID NO: 39297 - DNA, 13 bp, Artificial Sequence
  Oligonucleotide for detection of SNP TSC0012040
tttttatgtaagg

SEQ ID NO: 39298 - DNA, 13 bp, Artificial Sequence
  Oligonucleotide for detection of SNP TSC0012040
ccttacataaaaa

SEQ ID NO: 39299 - DNA, 13 bp, Artificial Sequence
  Oligonucleotide for detection of SNP TSC0012040
tttttacgtaagg

SEQ ID NO: 39300 - DNA, 13 bp, Artificial Sequence
  Oligonucleotide for detection of SNP TSC0012040
ccttacgtaaaaa

SEQ ID NO: 39301 - DNA, 13 bp, Artificial Sequence
  Oligonucleotide for detection of SNP TSC0012040
ttttgtgtaagag

SEQ ID NO: 39302 - DNA, 13 bp, Artificial Sequence
  Oligonucleotide for detection of SNP TSC0012040
ctcttacacaaaa

SEQ ID NO: 39303 - DNA, 13 bp, Artificial Sequence
  Oligonucleotide for detection of SNP TSC0012040
ttttgtataagag

SEQ ID NO: 39304 - DNA, 13 bp, Artificial Sequence
  Oligonucleotide for detection of SNP TSC0012040
ctcttatacaaaa

SEQ ID NO: 39305 - DNA, 13 bp, Artificial Sequence
  Oligonucleotide for detection of SNP TSC0012040
ttttgcgtaagag

SEQ ID NO: 39306 - DNA, 13 bp, Artificial Sequence
  Oligonucleotide for detection of SNP TSC0012040
ctcttacgcaaaa

SEQ ID NO: 39307 - DNA, 13 bp, Artificial Sequence
  Oligonucleotide for detection of SNP TSC0012041
ttttttagtattt

SEQ ID NO: 39308 - DNA, 13 bp, Artificial Sequence
  Oligonucleotide for detection of SNP TSC0012041
aaatactaaaaaa

SEQ ID NO: 39309 - DNA, 13 bp, Artificial Sequence
  Oligonucleotide for detection of SNP TSC0012041
tttttttgtattt

SEQ ID NO: 39310 - DNA, 13 bp, Artificial Sequence
  Oligonucleotide for detection of SNP TSC0012041
aaatacaaaaaaa

SEQ ID NO: 39311 - DNA, 13 bp, Artificial Sequence
  Oligonucleotide for detection of SNP TSC0012041
aaatgttgaaaga

SEQ ID NO: 39312 - DNA, 13 bp, Artificial Sequence
  Oligonucleotide for detection of SNP TSC0012041
tctttcaacattt

SEQ ID NO: 39313 - DNA, 13 bp, Artificial Sequence
  Oligonucleotide for detection of SNP TSC0012041
aaatgtagaaaga

SEQ ID NO: 39314 - DNA, 13 bp, Artificial Sequence
  Oligonucleotide for detection of SNP TSC0012041
tctttctacattt

SEQ ID NO: 39315 - DNA, 13 bp, Artificial Sequence
  Oligonucleotide for detection of SNP TSC0012042
tttatgataaatt

SEQ ID NO: 39316 - DNA, 13 bp, Artificial Sequence
  Oligonucleotide for detection of SNP TSC0012042
aatttatcataaa

SEQ ID NO: 39317 - DNA, 13 bp, Artificial Sequence
  Oligonucleotide for detection of SNP TSC0012042
tttatggtaaatt

SEQ ID NO: 39318 - DNA, 13 bp, Artificial Sequence
  Oligonucleotide for detection of SNP TSC0012042
aatttaccataaa

SEQ ID NO: 39319 - DNA, 13 bp, Artificial Sequence
  Oligonucleotide for detection of SNP TSC0012043
taggtgattttta

SEQ ID NO: 39320 - DNA, 13 bp, Artificial Sequence
  Oligonucleotide for detection of SNP TSC0012043
taaaaatcaccta

SEQ ID NO: 39321 - DNA, 13 bp, Artificial Sequence
  Oligonucleotide for detection of SNP TSC0012043
taggtggttttta

SEQ ID NO: 39322 - DNA, 13 bp, Artificial Sequence
  Oligonucleotide for detection of SNP TSC0012043
taaaaaccaccta

SEQ ID NO: 39323 - DNA, 13 bp, Artificial Sequence
  Oligonucleotide for detection of SNP TSC0012044
ttagatgtgggta

SEQ ID NO: 39324 - DNA, 13 bp, Artificial Sequence
  Oligonucleotide for detection of SNP TSC0012044
tacccacatctaa

SEQ ID NO: 39325 - DNA, 13 bp, Artificial Sequence
  Oligonucleotide for detection of SNP TSC0012044
ttagatatgggta

SEQ ID NO: 39326 - DNA, 13 bp, Artificial Sequence
  Oligonucleotide for detection of SNP TSC0012044
tacccatatctaa

SEQ ID NO: 39327 - DNA, 13 bp, Artificial Sequence
  Oligonucleotide for detection of SNP TSC0012045
gttttaatttaag

SEQ ID NO: 39328 - DNA, 13 bp, Artificial Sequence
  Oligonucleotide for detection of SNP TSC0012045
cttaaattaaaac

SEQ ID NO: 39329 - DNA, 13 bp, Artificial Sequence
  Oligonucleotide for detection of SNP TSC0012045
gttttattttaag

SEQ ID NO: 39330 - DNA, 13 bp, Artificial Sequence
  Oligonucleotide for detection of SNP TSC0012045
cttaaaataaaac

SEQ ID NO: 39331 - DNA, 13 bp, Artificial Sequence
  Oligonucleotide for detection of SNP TSC0012045
tttgggttgaaay

SEQ ID NO: 39332 - DNA, 13 bp, Artificial Sequence
  Oligonucleotide for detection of SNP TSC0012045
rtttcaacccaaa

SEQ ID NO: 39333 - DNA, 13 bp, Artificial Sequence
  Oligonucleotide for detection of SNP TSC0012045
tttggggtgaaay

SEQ ID NO: 39334 - DNA, 13 bp, Artificial Sequence
  Oligonucleotide for detection of SNP TSC0012045
rtttcaccccaaa

SEQ ID NO: 39335 - DNA, 13 bp, Artificial Sequence
  Oligonucleotide for detection of SNP TSC0012046
aattttattaggt

SEQ ID NO: 39336 - DNA, 13 bp, Artificial Sequence
  Oligonucleotide for detection of SNP TSC0012046
acctaataaaatt

SEQ ID NO: 39337 - DNA, 13 bp, Artificial Sequence
  Oligonucleotide for detection of SNP TSC0012046
aatttttttaggt

SEQ ID NO: 39338 - DNA, 13 bp, Artificial Sequence
  Oligonucleotide for detection of SNP TSC0012046
acctaaaaaaatt

SEQ ID NO: 39339 - DNA, 13 bp, Artificial Sequence
  Oligonucleotide for detection of SNP TSC0012046
atttggtgaaatt

SEQ ID NO: 39340 - DNA, 13 bp, Artificial Sequence
  Oligonucleotide for detection of SNP TSC0012046
aatttcaccaaat

SEQ ID NO: 39341 - DNA, 13 bp, Artificial Sequence
  Oligonucleotide for detection of SNP TSC0012046
atttggggaaatt

SEQ ID NO: 39342 - DNA, 13 bp, Artificial Sequence
  Oligonucleotide for detection of SNP TSC0012046
aatttccccaaat

SEQ ID NO: 39343 - DNA, 13 bp, Artificial Sequence
  Oligonucleotide for detection of SNP TSC0012047
gaatatatattta

SEQ ID NO: 39344 - DNA, 13 bp, Artificial Sequence
  Oligonucleotide for detection of SNP TSC0012047
taaatatatattc

SEQ ID NO: 39345 - DNA, 13 bp, Artificial Sequence
  Oligonucleotide for detection of SNP TSC0012047
gaatatgtattta

SEQ ID NO: 39346 - DNA, 13 bp, Artificial Sequence
  Oligonucleotide for detection of SNP TSC0012047
taaatacatattc

SEQ ID NO: 39347 - DNA, 13 bp, Artificial Sequence
  Oligonucleotide for detection of SNP TSC0012047
gaatacgtattta

SEQ ID NO: 39348 - DNA, 13 bp, Artificial Sequence
  Oligonucleotide for detection of SNP TSC0012047
taaatacgtattc

SEQ ID NO: 39349 - DNA, 13 bp, Artificial Sequence
  Oligonucleotide for detection of SNP TSC0012047
taaatatgtgtty

SEQ ID NO: 39350 - DNA, 13 bp, Artificial Sequence
  Oligonucleotide for detection of SNP TSC0012047
raacacatattta

SEQ ID NO: 39351 - DNA, 13 bp, Artificial Sequence
  Oligonucleotide for detection of SNP TSC0012047
taaatacgtgtty

SEQ ID NO: 39352 - DNA, 13 bp, Artificial Sequence
  Oligonucleotide for detection of SNP TSC0012047
raacacgtattta

SEQ ID NO: 39353 - DNA, 13 bp, Artificial Sequence
  Oligonucleotide for detection of SNP TSC0012048
atttaaataaatt

SEQ ID NO: 39354 - DNA, 13 bp, Artificial Sequence
  Oligonucleotide for detection of SNP TSC0012048
aatttatttaaat

SEQ ID NO: 39355 - DNA, 13 bp, Artificial Sequence
  Oligonucleotide for detection of SNP TSC0012048
atttaagtaaatt

SEQ ID NO: 39356 - DNA, 13 bp, Artificial Sequence
  Oligonucleotide for detection of SNP TSC0012048
aatttacttaaat

SEQ ID NO: 39357 - DNA, 13 bp, Artificial Sequence
  Oligonucleotide for detection of SNP TSC0012049
gattatgttattt

SEQ ID NO: 39358 - DNA, 13 bp, Artificial Sequence
  Oligonucleotide for detection of SNP TSC0012049
aaataacataatc

SEQ ID NO: 39359 - DNA, 13 bp, Artificial Sequence
  Oligonucleotide for detection of SNP TSC0012049
gattattttattt

SEQ ID NO: 39360 - DNA, 13 bp, Artificial Sequence
  Oligonucleotide for detection of SNP TSC0012049
aaataaaataatc

SEQ ID NO: 39361 - DNA, 13 bp, Artificial Sequence
  Oligonucleotide for detection of SNP TSC0012049
aggtggtatggty

SEQ ID NO: 39362 - DNA, 13 bp, Artificial Sequence
  Oligonucleotide for detection of SNP TSC0012049
raccataccacct

SEQ ID NO: 39363 - DNA, 13 bp, Artificial Sequence
  Oligonucleotide for detection of SNP TSC0012049
aggtggaatggty

SEQ ID NO: 39364 - DNA, 13 bp, Artificial Sequence
  Oligonucleotide for detection of SNP TSC0012049
raccattccacct

SEQ ID NO: 39365 - DNA, 13 bp, Artificial Sequence
  Oligonucleotide for detection of SNP TSC0012050
ttatttattttta

SEQ ID NO: 39366 - DNA, 13 bp, Artificial Sequence
  Oligonucleotide for detection of SNP TSC0012050
taaaaataaataa

SEQ ID NO: 39367 - DNA, 13 bp, Artificial Sequence
  Oligonucleotide for detection of SNP TSC0012050
ttatttgttttta

SEQ ID NO: 39368 - DNA, 13 bp, Artificial Sequence
  Oligonucleotide for detection of SNP TSC0012050
taaaaacaaataa

SEQ ID NO: 39369 - DNA, 13 bp, Artificial Sequence
  Oligonucleotide for detection of SNP TSC0012053
tattgtattttaa

SEQ ID NO: 39370 - DNA, 13 bp, Artificial Sequence
  Oligonucleotide for detection of SNP TSC0012053
ttaaaatacaata

SEQ ID NO: 39371 - DNA, 13 bp, Artificial Sequence
  Oligonucleotide for detection of SNP TSC0012053
tattgtgttttaa

SEQ ID NO: 39372 - DNA, 13 bp, Artificial Sequence
  Oligonucleotide for detection of SNP TSC0012053
ttaaaacacaata

SEQ ID NO: 39373 - DNA, 13 bp, Artificial Sequence
  Oligonucleotide for detection of SNP TSC0012053
tattgcgttttaa

SEQ ID NO: 39374 - DNA, 13 bp, Artificial Sequence
  Oligonucleotide for detection of SNP TSC0012053
ttaaaacgcaata

SEQ ID NO: 39375 - DNA, 13 bp, Artificial Sequence
  Oligonucleotide for detection of SNP TSC0012053
ttggagtgtaatg

SEQ ID NO: 39376 - DNA, 13 bp, Artificial Sequence
  Oligonucleotide for detection of SNP TSC0012053
cattacactccaa

SEQ ID NO: 39377 - DNA, 13 bp, Artificial Sequence
  Oligonucleotide for detection of SNP TSC0012053
ttggagcgtaatg

SEQ ID NO: 39378 - DNA, 13 bp, Artificial Sequence
  Oligonucleotide for detection of SNP TSC0012053
cattacgctccaa

SEQ ID NO: 39379 - DNA, 13 bp, Artificial Sequence
  Oligonucleotide for detection of SNP TSC0012055
tgaatgagattaa

SEQ ID NO: 39380 - DNA, 13 bp, Artificial Sequence
  Oligonucleotide for detection of SNP TSC0012055
ttaatctcattca

SEQ ID NO: 39381 - DNA, 13 bp, Artificial Sequence
  Oligonucleotide for detection of SNP TSC0012055
tgaatgtgattaa

SEQ ID NO: 39382 - DNA, 13 bp, Artificial Sequence
  Oligonucleotide for detection of SNP TSC0012055
ttaatcacattca

SEQ ID NO: 39383 - DNA, 13 bp, Artificial Sequence
  Oligonucleotide for detection of SNP TSC0012055
tgaatgcgattaa

SEQ ID NO: 39384 - DNA, 13 bp, Artificial Sequence
  Oligonucleotide for detection of SNP TSC0012055
ttaatcgcattca

SEQ ID NO: 39385 - DNA, 13 bp, Artificial Sequence
  Oligonucleotide for detection of SNP TSC0012055
ttggttttattta

SEQ ID NO: 39386 - DNA, 13 bp, Artificial Sequence
  Oligonucleotide for detection of SNP TSC0012055
taaataaaaccaa

SEQ ID NO: 39387 - DNA, 13 bp, Artificial Sequence
  Oligonucleotide for detection of SNP TSC0012055
ttggttgtattta

SEQ ID NO: 39388 - DNA, 13 bp, Artificial Sequence
  Oligonucleotide for detection of SNP TSC0012055
taaatacaaccaa

SEQ ID NO: 39389 - DNA, 13 bp, Artificial Sequence
  Oligonucleotide for detection of SNP TSC0012055
ttggtcgtattta

SEQ ID NO: 39390 - DNA, 13 bp, Artificial Sequence
  Oligonucleotide for detection of SNP TSC0012055
taaatacgaccaa

SEQ ID NO: 39391 - DNA, 13 bp, Artificial Sequence
  Oligonucleotide for detection of SNP TSC0012056
taaataattttta

SEQ ID NO: 39392 - DNA, 13 bp, Artificial Sequence
  Oligonucleotide for detection of SNP TSC0012056
taaaaattattta

SEQ ID NO: 39393 - DNA, 13 bp, Artificial Sequence
  Oligonucleotide for detection of SNP TSC0012056
taaatagttttta

SEQ ID NO: 39394 - DNA, 13 bp, Artificial Sequence
  Oligonucleotide for detection of SNP TSC0012056
taaaaactattta

SEQ ID NO: 39395 - DNA, 13 bp, Artificial Sequence
  Oligonucleotide for detection of SNP TSC0012057
gttgggggttatt

SEQ ID NO: 39396 - DNA, 13 bp, Artificial Sequence
  Oligonucleotide for detection of SNP TSC0012057
aataacccccaac

SEQ ID NO: 39397 - DNA, 13 bp, Artificial Sequence
  Oligonucleotide for detection of SNP TSC0012057
gttgggagttatt

SEQ ID NO: 39398 - DNA, 13 bp, Artificial Sequence
  Oligonucleotide for detection of SNP TSC0012057
aataactcccaac

SEQ ID NO: 39399 - DNA, 13 bp, Artificial Sequence
  Oligonucleotide for detection of SNP TSC0012058
ttttttgtttgty

SEQ ID NO: 39400 - DNA, 13 bp, Artificial Sequence
  Oligonucleotide for detection of SNP TSC0012058
racaaacaaaaaa

SEQ ID NO: 39401 - DNA, 13 bp, Artificial Sequence
  Oligonucleotide for detection of SNP TSC0012058
ggtaagtaagaga

SEQ ID NO: 39402 - DNA, 13 bp, Artificial Sequence
  Oligonucleotide for detection of SNP TSC0012058
tctcttacttacc

SEQ ID NO: 39403 - DNA, 13 bp, Artificial Sequence
  Oligonucleotide for detection of SNP TSC0012058
ggtaagaaagaga

SEQ ID NO: 39404 - DNA, 13 bp, Artificial Sequence
  Oligonucleotide for detection of SNP TSC0012058
tctctttcttacc

SEQ ID NO: 39405 - DNA, 13 bp, Artificial Sequence
  Oligonucleotide for detection of SNP TSC0012059
agtaaatgtttgy

SEQ ID NO: 39406 - DNA, 13 bp, Artificial Sequence
  Oligonucleotide for detection of SNP TSC0012059
rcaaacatttact

SEQ ID NO: 39407 - DNA, 13 bp, Artificial Sequence
  Oligonucleotide for detection of SNP TSC0012059
agtaaacgtttgy

SEQ ID NO: 39408 - DNA, 13 bp, Artificial Sequence
  Oligonucleotide for detection of SNP TSC0012059
rcaaacgtttact

SEQ ID NO: 39409 - DNA, 13 bp, Artificial Sequence
  Oligonucleotide for detection of SNP TSC0012059
gtaaatgtttatt

SEQ ID NO: 39410 - DNA, 13 bp, Artificial Sequence
  Oligonucleotide for detection of SNP TSC0012059
aataaacatttac

SEQ ID NO: 39411 - DNA, 13 bp, Artificial Sequence
  Oligonucleotide for detection of SNP TSC0012059
gtaaatatttatt

SEQ ID NO: 39412 - DNA, 13 bp, Artificial Sequence
  Oligonucleotide for detection of SNP TSC0012059
aataaatatttac

SEQ ID NO: 39413 - DNA, 13 bp, Artificial Sequence
  Oligonucleotide for detection of SNP TSC0012059
gtaaacgtttatt

SEQ ID NO: 39414 - DNA, 13 bp, Artificial Sequence
  Oligonucleotide for detection of SNP TSC0012059
aataaacgtttac

SEQ ID NO: 39415 - DNA, 13 bp, Artificial Sequence
  Oligonucleotide for detection of SNP TSC0012060
attttagggtagg

SEQ ID NO: 39416 - DNA, 13 bp, Artificial Sequence
  Oligonucleotide for detection of SNP TSC0012060
cctaccctaaaat

SEQ ID NO: 39417 - DNA, 13 bp, Artificial Sequence
  Oligonucleotide for detection of SNP TSC0012060
attttaaggtagg

SEQ ID NO: 39418 - DNA, 13 bp, Artificial Sequence
  Oligonucleotide for detection of SNP TSC0012060
cctaccttaaaat

SEQ ID NO: 39419 - DNA, 13 bp, Artificial Sequence
  Oligonucleotide for detection of SNP TSC0012062
ttgataagtttgt

SEQ ID NO: 39420 - DNA, 13 bp, Artificial Sequence
  Oligonucleotide for detection of SNP TSC0012062
acaaacttatcaa

SEQ ID NO: 39421 - DNA, 13 bp, Artificial Sequence
  Oligonucleotide for detection of SNP TSC0012062
ttgatatgtttgt

SEQ ID NO: 39422 - DNA, 13 bp, Artificial Sequence
  Oligonucleotide for detection of SNP TSC0012062
acaaacatatcaa

SEQ ID NO: 39423 - DNA, 13 bp, Artificial Sequence
  Oligonucleotide for detection of SNP TSC0012062
ataggtttgttag

SEQ ID NO: 39424 - DNA, 13 bp, Artificial Sequence
  Oligonucleotide for detection of SNP TSC0012062
ctaacaaacctat

SEQ ID NO: 39425 - DNA, 13 bp, Artificial Sequence
  Oligonucleotide for detection of SNP TSC0012062
ataggtatgttag

SEQ ID NO: 39426 - DNA, 13 bp, Artificial Sequence
  Oligonucleotide for detection of SNP TSC0012062
ctaacatacctat

SEQ ID NO: 39427 - DNA, 13 bp, Artificial Sequence
  Oligonucleotide for detection of SNP TSC0012063
ttttttgttttay

SEQ ID NO: 39428 - DNA, 13 bp, Artificial Sequence
  Oligonucleotide for detection of SNP TSC0012063
rtaaaacaaaaaa

SEQ ID NO: 39429 - DNA, 13 bp, Artificial Sequence
  Oligonucleotide for detection of SNP TSC0012065
ttggatattttty

SEQ ID NO: 39430 - DNA, 13 bp, Artificial Sequence
  Oligonucleotide for detection of SNP TSC0012065
raaaaatatccaa

SEQ ID NO: 39431 - DNA, 13 bp, Artificial Sequence
  Oligonucleotide for detection of SNP TSC0012065
ttggatgttttty

SEQ ID NO: 39432 - DNA, 13 bp, Artificial Sequence
  Oligonucleotide for detection of SNP TSC0012065
raaaaacatccaa

SEQ ID NO: 39433 - DNA, 13 bp, Artificial Sequence
  Oligonucleotide for detection of SNP TSC0012065
ttggacgttttty

SEQ ID NO: 39434 - DNA, 13 bp, Artificial Sequence
  Oligonucleotide for detection of SNP TSC0012065
raaaaacgtccaa

SEQ ID NO: 39435 - DNA, 13 bp, Artificial Sequence
  Oligonucleotide for detection of SNP TSC0012065
gaggggtgtttag

SEQ ID NO: 39436 - DNA, 13 bp, Artificial Sequence
  Oligonucleotide for detection of SNP TSC0012065
ctaaacacccctc

SEQ ID NO: 39437 - DNA, 13 bp, Artificial Sequence
  Oligonucleotide for detection of SNP TSC0012065
gaggggcgtttag

SEQ ID NO: 39438 - DNA, 13 bp, Artificial Sequence
  Oligonucleotide for detection of SNP TSC0012065
ctaaacgcccctc

SEQ ID NO: 39439 - DNA, 13 bp, Artificial Sequence
  Oligonucleotide for detection of SNP TSC0012066
tgttttggtatag

SEQ ID NO: 39440 - DNA, 13 bp, Artificial Sequence
  Oligonucleotide for detection of SNP TSC0012066
ctataccaaaaca

SEQ ID NO: 39441 - DNA, 13 bp, Artificial Sequence
  Oligonucleotide for detection of SNP TSC0012066
tgtttttgtatag

SEQ ID NO: 39442 - DNA, 13 bp, Artificial Sequence
  Oligonucleotide for detection of SNP TSC0012066
ctatacaaaaaca

SEQ ID NO: 39443 - DNA, 13 bp, Artificial Sequence
  Oligonucleotide for detection of SNP TSC0012066
ttgtgttaggata

SEQ ID NO: 39444 - DNA, 13 bp, Artificial Sequence
  Oligonucleotide for detection of SNP TSC0012066
tatcctaacacaa

SEQ ID NO: 39445 - DNA, 13 bp, Artificial Sequence
  Oligonucleotide for detection of SNP TSC0012066
ttgtgtaaggata

SEQ ID NO: 39446 - DNA, 13 bp, Artificial Sequence
  Oligonucleotide for detection of SNP TSC0012066
tatccttacacaa

SEQ ID NO: 39447 - DNA, 13 bp, Artificial Sequence
  Oligonucleotide for detection of SNP TSC0012067
gtagatagtttgg

SEQ ID NO: 39448 - DNA, 13 bp, Artificial Sequence
  Oligonucleotide for detection of SNP TSC0012067
ccaaactatctac

SEQ ID NO: 39449 - DNA, 13 bp, Artificial Sequence
  Oligonucleotide for detection of SNP TSC0012067
gtagatggtttgg

SEQ ID NO: 39450 - DNA, 13 bp, Artificial Sequence
  Oligonucleotide for detection of SNP TSC0012067
ccaaaccatctac

SEQ ID NO: 39451 - DNA, 13 bp, Artificial Sequence
  Oligonucleotide for detection of SNP TSC0012069
tttgaaatgatgt

SEQ ID NO: 39452 - DNA, 13 bp, Artificial Sequence
  Oligonucleotide for detection of SNP TSC0012069
acatcatttcaaa

SEQ ID NO: 39453 - DNA, 13 bp, Artificial Sequence
  Oligonucleotide for detection of SNP TSC0012069
tttgaagtgatgt

SEQ ID NO: 39454 - DNA, 13 bp, Artificial Sequence
  Oligonucleotide for detection of SNP TSC0012069
acatcacttcaaa

SEQ ID NO: 39455 - DNA, 13 bp, Artificial Sequence
  Oligonucleotide for detection of SNP TSC0012070
tgattagttggtt

SEQ ID NO: 39456 - DNA, 13 bp, Artificial Sequence
  Oligonucleotide for detection of SNP TSC0012070
aaccaactaatca

SEQ ID NO: 39457 - DNA, 13 bp, Artificial Sequence
  Oligonucleotide for detection of SNP TSC0012070
tgattaattggtt

SEQ ID NO: 39458 - DNA, 13 bp, Artificial Sequence
  Oligonucleotide for detection of SNP TSC0012070
aaccaattaatca

SEQ ID NO: 39459 - DNA, 13 bp, Artificial Sequence
  Oligonucleotide for detection of SNP TSC0012071
aattattgtataa

SEQ ID NO: 39460 - DNA, 13 bp, Artificial Sequence
  Oligonucleotide for detection of SNP TSC0012071
ttatacaataatt

SEQ ID NO: 39461 - DNA, 13 bp, Artificial Sequence
  Oligonucleotide for detection of SNP TSC0012071
aattatcgtataa

SEQ ID NO: 39462 - DNA, 13 bp, Artificial Sequence
  Oligonucleotide for detection of SNP TSC0012071
ttatacgataatt

SEQ ID NO: 39463 - DNA, 13 bp, Artificial Sequence
  Oligonucleotide for detection of SNP TSC0012071
ttgtatgatagtt

SEQ ID NO: 39464 - DNA, 13 bp, Artificial Sequence
  Oligonucleotide for detection of SNP TSC0012071
aactatcatacaa

SEQ ID NO: 39465 - DNA, 13 bp, Artificial Sequence
  Oligonucleotide for detection of SNP TSC0012071
ttgtataatagtt

SEQ ID NO: 39466 - DNA, 13 bp, Artificial Sequence
  Oligonucleotide for detection of SNP TSC0012071
aactattatacaa

SEQ ID NO: 39467 - DNA, 13 bp, Artificial Sequence
  Oligonucleotide for detection of SNP TSC0012071
ttgtacgatagtt

SEQ ID NO: 39468 - DNA, 13 bp, Artificial Sequence
  Oligonucleotide for detection of SNP TSC0012071
aactatcgtacaa

SEQ ID NO: 39469 - DNA, 13 bp, Artificial Sequence
  Oligonucleotide for detection of SNP TSC0012072
attggtatgtaag

SEQ ID NO: 39470 - DNA, 13 bp, Artificial Sequence
  Oligonucleotide for detection of SNP TSC0012072
cttacataccaat

SEQ ID NO: 39471 - DNA, 13 bp, Artificial Sequence
  Oligonucleotide for detection of SNP TSC0012072
attggtgtgtaag

SEQ ID NO: 39472 - DNA, 13 bp, Artificial Sequence
  Oligonucleotide for detection of SNP TSC0012072
cttacacaccaat

SEQ ID NO: 39473 - DNA, 13 bp, Artificial Sequence
  Oligonucleotide for detection of SNP TSC0012072
attggcgtgtaag

SEQ ID NO: 39474 - DNA, 13 bp, Artificial Sequence
  Oligonucleotide for detection of SNP TSC0012072
cttacacgccaat

SEQ ID NO: 39475 - DNA, 13 bp, Artificial Sequence
  Oligonucleotide for detection of SNP TSC0012072
tttatatgttaat

SEQ ID NO: 39476 - DNA, 13 bp, Artificial Sequence
  Oligonucleotide for detection of SNP TSC0012072
attaacatataaa

SEQ ID NO: 39477 - DNA, 13 bp, Artificial Sequence
  Oligonucleotide for detection of SNP TSC0012072
tttatacgttaat

SEQ ID NO: 39478 - DNA, 13 bp, Artificial Sequence
  Oligonucleotide for detection of SNP TSC0012072
attaacgtataaa

SEQ ID NO: 39479 - DNA, 13 bp, Artificial Sequence
  Oligonucleotide for detection of SNP TSC0012073
ttattttgagtga

SEQ ID NO: 39480 - DNA, 13 bp, Artificial Sequence
  Oligonucleotide for detection of SNP TSC0012073
tcactcaaaataa

SEQ ID NO: 39481 - DNA, 13 bp, Artificial Sequence
  Oligonucleotide for detection of SNP TSC0012073
ttatttcgagtga

SEQ ID NO: 39482 - DNA, 13 bp, Artificial Sequence
  Oligonucleotide for detection of SNP TSC0012073
tcactcgaaataa

SEQ ID NO: 39483 - DNA, 13 bp, Artificial Sequence
  Oligonucleotide for detection of SNP TSC0012073
ttatttggaataa

SEQ ID NO: 39484 - DNA, 13 bp, Artificial Sequence
  Oligonucleotide for detection of SNP TSC0012073
ttattccaaataa

SEQ ID NO: 39485 - DNA, 13 bp, Artificial Sequence
  Oligonucleotide for detection of SNP TSC0012073
ttatttagaataa

SEQ ID NO: 39486 - DNA, 13 bp, Artificial Sequence
  Oligonucleotide for detection of SNP TSC0012073
ttattctaaataa

SEQ ID NO: 39487 - DNA, 13 bp, Artificial Sequence
  Oligonucleotide for detection of SNP TSC0012073
ttattcggaataa

SEQ ID NO: 39488 - DNA, 13 bp, Artificial Sequence
  Oligonucleotide for detection of SNP TSC0012073
ttattccgaataa

SEQ ID NO: 39489 - DNA, 13 bp, Artificial Sequence
  Oligonucleotide for detection of SNP TSC0012075
tatttaataatta

SEQ ID NO: 39490 - DNA, 13 bp, Artificial Sequence
  Oligonucleotide for detection of SNP TSC0012075
taattattaaata

SEQ ID NO: 39491 - DNA, 13 bp, Artificial Sequence
  Oligonucleotide for detection of SNP TSC0012075
tatttagtaatta

SEQ ID NO: 39492 - DNA, 13 bp, Artificial Sequence
  Oligonucleotide for detection of SNP TSC0012075
taattactaaata

SEQ ID NO: 39493 - DNA, 13 bp, Artificial Sequence
  Oligonucleotide for detection of SNP TSC0012081
agatggagtgagy

SEQ ID NO: 39494 - DNA, 13 bp, Artificial Sequence
  Oligonucleotide for detection of SNP TSC0012081
rctcactccatct

SEQ ID NO: 39495 - DNA, 13 bp, Artificial Sequence
  Oligonucleotide for detection of SNP TSC0012081
agatggggtgagy

SEQ ID NO: 39496 - DNA, 13 bp, Artificial Sequence
  Oligonucleotide for detection of SNP TSC0012081
rctcaccccatct

SEQ ID NO: 39497 - DNA, 13 bp, Artificial Sequence
  Oligonucleotide for detection of SNP TSC0012082
atatattatgtag

SEQ ID NO: 39498 - DNA, 13 bp, Artificial Sequence
  Oligonucleotide for detection of SNP TSC0012082
ctacataatatat

SEQ ID NO: 39499 - DNA, 13 bp, Artificial Sequence
  Oligonucleotide for detection of SNP TSC0012082
atatatgatgtag

SEQ ID NO: 39500 - DNA, 13 bp, Artificial Sequence
  Oligonucleotide for detection of SNP TSC0012082
ctacatcatatat

SEQ ID NO: 39501 - DNA, 13 bp, Artificial Sequence
  Oligonucleotide for detection of SNP TSC0012082
ttatatgatgtat

SEQ ID NO: 39502 - DNA, 13 bp, Artificial Sequence
  Oligonucleotide for detection of SNP TSC0012082
atacatcatataa

SEQ ID NO: 39503 - DNA, 13 bp, Artificial Sequence
  Oligonucleotide for detection of SNP TSC0012082
ttatattatgtat

SEQ ID NO: 39504 - DNA, 13 bp, Artificial Sequence
  Oligonucleotide for detection of SNP TSC0012082
atacataatataa

SEQ ID NO: 39505 - DNA, 13 bp, Artificial Sequence
  Oligonucleotide for detection of SNP TSC0012083
gataatagaagty

SEQ ID NO: 39506 - DNA, 13 bp, Artificial Sequence
  Oligonucleotide for detection of SNP TSC0012083
racttctattatc

SEQ ID NO: 39507 - DNA, 13 bp, Artificial Sequence
  Oligonucleotide for detection of SNP TSC0012083
gataatggaagty

SEQ ID NO: 39508 - DNA, 13 bp, Artificial Sequence
  Oligonucleotide for detection of SNP TSC0012083
racttccattatc

SEQ ID NO: 39509 - DNA, 13 bp, Artificial Sequence
  Oligonucleotide for detection of SNP TSC0012083
gataacggaagty

SEQ ID NO: 39510 - DNA, 13 bp, Artificial Sequence
  Oligonucleotide for detection of SNP TSC0012083
racttccgttatc

SEQ ID NO: 39511 - DNA, 13 bp, Artificial Sequence
  Oligonucleotide for detection of SNP TSC0012083
ggtttttgttaty

SEQ ID NO: 39512 - DNA, 13 bp, Artificial Sequence
  Oligonucleotide for detection of SNP TSC0012083
rataacaaaaacc

SEQ ID NO: 39513 - DNA, 13 bp, Artificial Sequence
  Oligonucleotide for detection of SNP TSC0012083
ggttttcgttaty

SEQ ID NO: 39514 - DNA, 13 bp, Artificial Sequence
  Oligonucleotide for detection of SNP TSC0012083
rataacgaaaacc

SEQ ID NO: 39515 - DNA, 13 bp, Artificial Sequence
  Oligonucleotide for detection of SNP TSC0012084
aagaaattattaa

SEQ ID NO: 39516 - DNA, 13 bp, Artificial Sequence
  Oligonucleotide for detection of SNP TSC0012084
ttaataatttctt

SEQ ID NO: 39517 - DNA, 13 bp, Artificial Sequence
  Oligonucleotide for detection of SNP TSC0012084
aagaaagtattaa

SEQ ID NO: 39518 - DNA, 13 bp, Artificial Sequence
  Oligonucleotide for detection of SNP TSC0012084
ttaatactttctt

SEQ ID NO: 39519 - DNA, 13 bp, Artificial Sequence
  Oligonucleotide for detection of SNP TSC0012084
ttggtggtttttt

SEQ ID NO: 39520 - DNA, 13 bp, Artificial Sequence
  Oligonucleotide for detection of SNP TSC0012084
aaaaaaccaccaa

SEQ ID NO: 39521 - DNA, 13 bp, Artificial Sequence
  Oligonucleotide for detection of SNP TSC0012084
ttggtgttttttt

SEQ ID NO: 39522 - DNA, 13 bp, Artificial Sequence
  Oligonucleotide for detection of SNP TSC0012084
aaaaaaacaccaa

SEQ ID NO: 39523 - DNA, 13 bp, Artificial Sequence
  Oligonucleotide for detection of SNP TSC0012085
aaatgtagtgatt

SEQ ID NO: 39524 - DNA, 13 bp, Artificial Sequence
  Oligonucleotide for detection of SNP TSC0012085
aatcactacattt

SEQ ID NO: 39525 - DNA, 13 bp, Artificial Sequence
  Oligonucleotide for detection of SNP TSC0012085
aaatgtggtgatt

SEQ ID NO: 39526 - DNA, 13 bp, Artificial Sequence
  Oligonucleotide for detection of SNP TSC0012085
aatcaccacattt

SEQ ID NO: 39527 - DNA, 13 bp, Artificial Sequence
  Oligonucleotide for detection of SNP TSC0012085
aaatgcggtgatt

SEQ ID NO: 39528 - DNA, 13 bp, Artificial Sequence
  Oligonucleotide for detection of SNP TSC0012085
aatcaccgcattt

SEQ ID NO: 39529 - DNA, 13 bp, Artificial Sequence
  Oligonucleotide for detection of SNP TSC0012086
agagtgtggaata

SEQ ID NO: 39530 - DNA, 13 bp, Artificial Sequence
  Oligonucleotide for detection of SNP TSC0012086
tattccacactct

SEQ ID NO: 39531 - DNA, 13 bp, Artificial Sequence
  Oligonucleotide for detection of SNP TSC0012086
agagtggggaata

SEQ ID NO: 39532 - DNA, 13 bp, Artificial Sequence
  Oligonucleotide for detection of SNP TSC0012086
tattccccactct

SEQ ID NO: 39533 - DNA, 13 bp, Artificial Sequence
  Oligonucleotide for detection of SNP TSC0012086
agagtgcggaata

SEQ ID NO: 39534 - DNA, 13 bp, Artificial Sequence
  Oligonucleotide for detection of SNP TSC0012086
tattccgcactct

SEQ ID NO: 39535 - DNA, 13 bp, Artificial Sequence
  Oligonucleotide for detection of SNP TSC0012086
tgttttttatttt

SEQ ID NO: 39536 - DNA, 13 bp, Artificial Sequence
  Oligonucleotide for detection of SNP TSC0012086
aaaataaaaaaca

SEQ ID NO: 39537 - DNA, 13 bp, Artificial Sequence
  Oligonucleotide for detection of SNP TSC0012088
gtaaaagtgtttt

SEQ ID NO: 39538 - DNA, 13 bp, Artificial Sequence
  Oligonucleotide for detection of SNP TSC0012088
aaaacacttttac

SEQ ID NO: 39539 - DNA, 13 bp, Artificial Sequence
  Oligonucleotide for detection of SNP TSC0012088
gtaaaattgtttt

SEQ ID NO: 39540 - DNA, 13 bp, Artificial Sequence
  Oligonucleotide for detection of SNP TSC0012088
aaaacaattttac

SEQ ID NO: 39541 - DNA, 13 bp, Artificial Sequence
  Oligonucleotide for detection of SNP TSC0012088
aaggtatttttay

SEQ ID NO: 39542 - DNA, 13 bp, Artificial Sequence
  Oligonucleotide for detection of SNP TSC0012088
rtaaaaatacctt

SEQ ID NO: 39543 - DNA, 13 bp, Artificial Sequence
  Oligonucleotide for detection of SNP TSC0012088
aaggtaattttay

SEQ ID NO: 39544 - DNA, 13 bp, Artificial Sequence
  Oligonucleotide for detection of SNP TSC0012088
rtaaaattacctt

SEQ ID NO: 39545 - DNA, 13 bp, Artificial Sequence
  Oligonucleotide for detection of SNP TSC0012089
gatgaaagagaat

SEQ ID NO: 39546 - DNA, 13 bp, Artificial Sequence
  Oligonucleotide for detection of SNP TSC0012089
attctctttcatc

SEQ ID NO: 39547 - DNA, 13 bp, Artificial Sequence
  Oligonucleotide for detection of SNP TSC0012089
gatgaaggagaat

SEQ ID NO: 39548 - DNA, 13 bp, Artificial Sequence
  Oligonucleotide for detection of SNP TSC0012089
attctccttcatc

SEQ ID NO: 39549 - DNA, 13 bp, Artificial Sequence
  Oligonucleotide for detection of SNP TSC0012090
ttagttgttgtgg

SEQ ID NO: 39550 - DNA, 13 bp, Artificial Sequence
  Oligonucleotide for detection of SNP TSC0012090
ccacaacaactaa

SEQ ID NO: 39551 - DNA, 13 bp, Artificial Sequence
  Oligonucleotide for detection of SNP TSC0012090
ttagtttttgtgg

SEQ ID NO: 39552 - DNA, 13 bp, Artificial Sequence
  Oligonucleotide for detection of SNP TSC0012090
ccacaaaaactaa

SEQ ID NO: 39553 - DNA, 13 bp, Artificial Sequence
  Oligonucleotide for detection of SNP TSC0012090
ttataataattag

SEQ ID NO: 39554 - DNA, 13 bp, Artificial Sequence
  Oligonucleotide for detection of SNP TSC0012090
ctaattattataa

SEQ ID NO: 39555 - DNA, 13 bp, Artificial Sequence
  Oligonucleotide for detection of SNP TSC0012090
ttataaaaattag

SEQ ID NO: 39556 - DNA, 13 bp, Artificial Sequence
  Oligonucleotide for detection of SNP TSC0012090
ctaatttttataa

SEQ ID NO: 39557 - DNA, 13 bp, Artificial Sequence
  Oligonucleotide for detection of SNP TSC0012091
ttatttgtattat

SEQ ID NO: 39558 - DNA, 13 bp, Artificial Sequence
  Oligonucleotide for detection of SNP TSC0012091
ataatacaaataa

SEQ ID NO: 39559 - DNA, 13 bp, Artificial Sequence
  Oligonucleotide for detection of SNP TSC0012091
ttatttatattat

SEQ ID NO: 39560 - DNA, 13 bp, Artificial Sequence
  Oligonucleotide for detection of SNP TSC0012091
ataatataaataa

SEQ ID NO: 39561 - DNA, 13 bp, Artificial Sequence
  Oligonucleotide for detection of SNP TSC0012092
tagggatgtatta

SEQ ID NO: 39562 - DNA, 13 bp, Artificial Sequence
  Oligonucleotide for detection of SNP TSC0012092
taatacatcccta

SEQ ID NO: 39563 - DNA, 13 bp, Artificial Sequence
  Oligonucleotide for detection of SNP TSC0012092
tagggaggtatta

SEQ ID NO: 39564 - DNA, 13 bp, Artificial Sequence
  Oligonucleotide for detection of SNP TSC0012092
taatacctcccta

SEQ ID NO: 39565 - DNA, 13 bp, Artificial Sequence
  Oligonucleotide for detection of SNP TSC0012092
tagggacgtatta

SEQ ID NO: 39566 - DNA, 13 bp, Artificial Sequence
  Oligonucleotide for detection of SNP TSC0012092
taatacgtcccta

SEQ ID NO: 39567 - DNA, 13 bp, Artificial Sequence
  Oligonucleotide for detection of SNP TSC0012092
taatgtgttttta

SEQ ID NO: 39568 - DNA, 13 bp, Artificial Sequence
  Oligonucleotide for detection of SNP TSC0012092
taaaaacacatta

SEQ ID NO: 39569 - DNA, 13 bp, Artificial Sequence
  Oligonucleotide for detection of SNP TSC0012092
taatgttttttta

SEQ ID NO: 39570 - DNA, 13 bp, Artificial Sequence
  Oligonucleotide for detection of SNP TSC0012092
taaaaaaacatta

SEQ ID NO: 39571 - DNA, 13 bp, Artificial Sequence
  Oligonucleotide for detection of SNP TSC0012092
taatgcgttttta

SEQ ID NO: 39572 - DNA, 13 bp, Artificial Sequence
  Oligonucleotide for detection of SNP TSC0012092
taaaaacgcatta

SEQ ID NO: 39573 - DNA, 13 bp, Artificial Sequence
  Oligonucleotide for detection of SNP TSC0012093
aaaattataaatt

SEQ ID NO: 39574 - DNA, 13 bp, Artificial Sequence
  Oligonucleotide for detection of SNP TSC0012093
aatttataatttt

SEQ ID NO: 39575 - DNA, 13 bp, Artificial Sequence
  Oligonucleotide for detection of SNP TSC0012093
aaaattgtaaatt

SEQ ID NO: 39576 - DNA, 13 bp, Artificial Sequence
  Oligonucleotide for detection of SNP TSC0012093
aatttacaatttt

SEQ ID NO: 39577 - DNA, 13 bp, Artificial Sequence
  Oligonucleotide for detection of SNP TSC0012094
ttaatagtttagg

SEQ ID NO: 39578 - DNA, 13 bp, Artificial Sequence
  Oligonucleotide for detection of SNP TSC0012094
cctaaactattaa

SEQ ID NO: 39579 - DNA, 13 bp, Artificial Sequence
  Oligonucleotide for detection of SNP TSC0012094
ttaataatttagg

SEQ ID NO: 39580 - DNA, 13 bp, Artificial Sequence
  Oligonucleotide for detection of SNP TSC0012094
cctaaattattaa

SEQ ID NO: 39581 - DNA, 13 bp, Artificial Sequence
  Oligonucleotide for detection of SNP TSC0012097
tatttttgatatt

SEQ ID NO: 39582 - DNA, 13 bp, Artificial Sequence
  Oligonucleotide for detection of SNP TSC0012097
aatatcaaaaata

SEQ ID NO: 39583 - DNA, 13 bp, Artificial Sequence
  Oligonucleotide for detection of SNP TSC0012097
tattttcgatatt

SEQ ID NO: 39584 - DNA, 13 bp, Artificial Sequence
  Oligonucleotide for detection of SNP TSC0012097
aatatcgaaaata

SEQ ID NO: 39585 - DNA, 13 bp, Artificial Sequence
  Oligonucleotide for detection of SNP TSC0012097
aatgttggagatg

SEQ ID NO: 39586 - DNA, 13 bp, Artificial Sequence
  Oligonucleotide for detection of SNP TSC0012097
catctccaacatt

SEQ ID NO: 39587 - DNA, 13 bp, Artificial Sequence
  Oligonucleotide for detection of SNP TSC0012097
aatgttagagatg

SEQ ID NO: 39588 - DNA, 13 bp, Artificial Sequence
  Oligonucleotide for detection of SNP TSC0012097
catctctaacatt

SEQ ID NO: 39589 - DNA, 13 bp, Artificial Sequence
  Oligonucleotide for detection of SNP TSC0012097
aatgtcggagatg

SEQ ID NO: 39590 - DNA, 13 bp, Artificial Sequence
  Oligonucleotide for detection of SNP TSC0012097
catctccgacatt

SEQ ID NO: 39591 - DNA, 13 bp, Artificial Sequence
  Oligonucleotide for detection of SNP TSC0012098
tgattaaggttta

SEQ ID NO: 39592 - DNA, 13 bp, Artificial Sequence
  Oligonucleotide for detection of SNP TSC0012098
taaaccttaatca

SEQ ID NO: 39593 - DNA, 13 bp, Artificial Sequence
  Oligonucleotide for detection of SNP TSC0012098
tgattagggttta

SEQ ID NO: 39594 - DNA, 13 bp, Artificial Sequence
  Oligonucleotide for detection of SNP TSC0012098
taaaccctaatca

SEQ ID NO: 39595 - DNA, 13 bp, Artificial Sequence
  Oligonucleotide for detection of SNP TSC0012099
tatttagtaaatg

SEQ ID NO: 39596 - DNA, 13 bp, Artificial Sequence
  Oligonucleotide for detection of SNP TSC0012099
catttactaaata

SEQ ID NO: 39597 - DNA, 13 bp, Artificial Sequence
  Oligonucleotide for detection of SNP TSC0012099
tatttaataaatg

SEQ ID NO: 39598 - DNA, 13 bp, Artificial Sequence
  Oligonucleotide for detection of SNP TSC0012099
catttattaaata

SEQ ID NO: 39599 - DNA, 13 bp, Artificial Sequence
  Oligonucleotide for detection of SNP TSC0012102
taggatgagatag

SEQ ID NO: 39600 - DNA, 13 bp, Artificial Sequence
  Oligonucleotide for detection of SNP TSC0012102
ctatctcatccta

SEQ ID NO: 39601 - DNA, 13 bp, Artificial Sequence
  Oligonucleotide for detection of SNP TSC0012102
taggataagatag

SEQ ID NO: 39602 - DNA, 13 bp, Artificial Sequence
  Oligonucleotide for detection of SNP TSC0012102
ctatcttatccta

SEQ ID NO: 39603 - DNA, 13 bp, Artificial Sequence
  Oligonucleotide for detection of SNP TSC0012105
attgggagtgggt

SEQ ID NO: 39604 - DNA, 13 bp, Artificial Sequence
  Oligonucleotide for detection of SNP TSC0012105
acccactcccaat

SEQ ID NO: 39605 - DNA, 13 bp, Artificial Sequence
  Oligonucleotide for detection of SNP TSC0012105
attgggtgtgggt

SEQ ID NO: 39606 - DNA, 13 bp, Artificial Sequence
  Oligonucleotide for detection of SNP TSC0012105
acccacacccaat

SEQ ID NO: 39607 - DNA, 13 bp, Artificial Sequence
  Oligonucleotide for detection of SNP TSC0012105
attgggcgtgggt

SEQ ID NO: 39608 - DNA, 13 bp, Artificial Sequence
  Oligonucleotide for detection of SNP TSC0012105
acccacgcccaat

SEQ ID NO: 39609 - DNA, 13 bp, Artificial Sequence
  Oligonucleotide for detection of SNP TSC0012105
atttatttttagt

SEQ ID NO: 39610 - DNA, 13 bp, Artificial Sequence
  Oligonucleotide for detection of SNP TSC0012105
actaaaaataaat

SEQ ID NO: 39611 - DNA, 13 bp, Artificial Sequence
  Oligonucleotide for detection of SNP TSC0012105
atttatgtttagt

SEQ ID NO: 39612 - DNA, 13 bp, Artificial Sequence
  Oligonucleotide for detection of SNP TSC0012105
actaaacataaat

SEQ ID NO: 39613 - DNA, 13 bp, Artificial Sequence
  Oligonucleotide for detection of SNP TSC0012105
atttacgtttagt

SEQ ID NO: 39614 - DNA, 13 bp, Artificial Sequence
  Oligonucleotide for detection of SNP TSC0012105
actaaacgtaaat

SEQ ID NO: 39615 - DNA, 13 bp, Artificial Sequence
  Oligonucleotide for detection of SNP TSC0012107
attaaaatgttta

SEQ ID NO: 39616 - DNA, 13 bp, Artificial Sequence
  Oligonucleotide for detection of SNP TSC0012107
taaacattttaat

SEQ ID NO: 39617 - DNA, 13 bp, Artificial Sequence
  Oligonucleotide for detection of SNP TSC0012107
attaaagtgttta

SEQ ID NO: 39618 - DNA, 13 bp, Artificial Sequence
  Oligonucleotide for detection of SNP TSC0012107
taaacactttaat

SEQ ID NO: 39619 - DNA, 13 bp, Artificial Sequence
  Oligonucleotide for detection of SNP TSC0012110
tagatgtgtgtag

SEQ ID NO: 39620 - DNA, 13 bp, Artificial Sequence
  Oligonucleotide for detection of SNP TSC0012110
ctacacacatcta

SEQ ID NO: 39621 - DNA, 13 bp, Artificial Sequence
  Oligonucleotide for detection of SNP TSC0012110
tagatgcgtgtag

SEQ ID NO: 39622 - DNA, 13 bp, Artificial Sequence
  Oligonucleotide for detection of SNP TSC0012110
ctacacgcatcta

SEQ ID NO: 39623 - DNA, 13 bp, Artificial Sequence
  Oligonucleotide for detection of SNP TSC0012110
ttgtatgtattta

SEQ ID NO: 39624 - DNA, 13 bp, Artificial Sequence
  Oligonucleotide for detection of SNP TSC0012110
taaatacatacaa

SEQ ID NO: 39625 - DNA, 13 bp, Artificial Sequence
  Oligonucleotide for detection of SNP TSC0012110
ttgtatatattta

SEQ ID NO: 39626 - DNA, 13 bp, Artificial Sequence
  Oligonucleotide for detection of SNP TSC0012110
taaatatatacaa

SEQ ID NO: 39627 - DNA, 13 bp, Artificial Sequence
  Oligonucleotide for detection of SNP TSC0012110
ttgtacgtattta

SEQ ID NO: 39628 - DNA, 13 bp, Artificial Sequence
  Oligonucleotide for detection of SNP TSC0012110
taaatacgtacaa

SEQ ID NO: 39629 - DNA, 13 bp, Artificial Sequence
  Oligonucleotide for detection of SNP TSC0012113
tgattaattttat

SEQ ID NO: 39630 - DNA, 13 bp, Artificial Sequence
  Oligonucleotide for detection of SNP TSC0012113
ataaaattaatca

SEQ ID NO: 39631 - DNA, 13 bp, Artificial Sequence
  Oligonucleotide for detection of SNP TSC0012113
tgattatttttat

SEQ ID NO: 39632 - DNA, 13 bp, Artificial Sequence
  Oligonucleotide for detection of SNP TSC0012113
ataaaaataatca

SEQ ID NO: 39633 - DNA, 13 bp, Artificial Sequence
  Oligonucleotide for detection of SNP TSC0012113
atggagttggtta

SEQ ID NO: 39634 - DNA, 13 bp, Artificial Sequence
  Oligonucleotide for detection of SNP TSC0012113
taaccaactccat

SEQ ID NO: 39635 - DNA, 13 bp, Artificial Sequence
  Oligonucleotide for detection of SNP TSC0012113
atggagatggtta

SEQ ID NO: 39636 - DNA, 13 bp, Artificial Sequence
  Oligonucleotide for detection of SNP TSC0012113
taaccatctccat

SEQ ID NO: 39637 - DNA, 13 bp, Artificial Sequence
  Oligonucleotide for detection of SNP TSC0012115
agaataataattg

SEQ ID NO: 39638 - DNA, 13 bp, Artificial Sequence
  Oligonucleotide for detection of SNP TSC0012115
caattattattct

SEQ ID NO: 39639 - DNA, 13 bp, Artificial Sequence
  Oligonucleotide for detection of SNP TSC0012115
agaatagtaattg

SEQ ID NO: 39640 - DNA, 13 bp, Artificial Sequence
  Oligonucleotide for detection of SNP TSC0012115
caattactattct

SEQ ID NO: 39641 - DNA, 13 bp, Artificial Sequence
  Oligonucleotide for detection of SNP TSC0012118
taagttgttttta

SEQ ID NO: 39642 - DNA, 13 bp, Artificial Sequence
  Oligonucleotide for detection of SNP TSC0012118
taaaaacaactta

SEQ ID NO: 39643 - DNA, 13 bp, Artificial Sequence
  Oligonucleotide for detection of SNP TSC0012118
taagttattttta

SEQ ID NO: 39644 - DNA, 13 bp, Artificial Sequence
  Oligonucleotide for detection of SNP TSC0012118
taaaaataactta

SEQ ID NO: 39645 - DNA, 13 bp, Artificial Sequence
  Oligonucleotide for detection of SNP TSC0012121
ataggggtgttty

SEQ ID NO: 39646 - DNA, 13 bp, Artificial Sequence
  Oligonucleotide for detection of SNP TSC0012121
raaacacccctat

SEQ ID NO: 39647 - DNA, 13 bp, Artificial Sequence
  Oligonucleotide for detection of SNP TSC0012121
atagggttgttty

SEQ ID NO: 39648 - DNA, 13 bp, Artificial Sequence
  Oligonucleotide for detection of SNP TSC0012121
raaacaaccctat

SEQ ID NO: 39649 - DNA, 13 bp, Artificial Sequence
  Oligonucleotide for detection of SNP TSC0012121
gaaatatttttgt

SEQ ID NO: 39650 - DNA, 13 bp, Artificial Sequence
  Oligonucleotide for detection of SNP TSC0012121
acaaaaatatttc

SEQ ID NO: 39651 - DNA, 13 bp, Artificial Sequence
  Oligonucleotide for detection of SNP TSC0012121
gaaataattttgt

SEQ ID NO: 39652 - DNA, 13 bp, Artificial Sequence
  Oligonucleotide for detection of SNP TSC0012121
acaaaattatttc

SEQ ID NO: 39653 - DNA, 13 bp, Artificial Sequence
  Oligonucleotide for detection of SNP TSC0012123
atttagagaaaay

SEQ ID NO: 39654 - DNA, 13 bp, Artificial Sequence
  Oligonucleotide for detection of SNP TSC0012123
rttttctctaaat

SEQ ID NO: 39655 - DNA, 13 bp, Artificial Sequence
  Oligonucleotide for detection of SNP TSC0012123
atttagggaaaay

SEQ ID NO: 39656 - DNA, 13 bp, Artificial Sequence
  Oligonucleotide for detection of SNP TSC0012123
rttttccctaaat

SEQ ID NO: 39657 - DNA, 13 bp, Artificial Sequence
  Oligonucleotide for detection of SNP TSC0012124
gttaggaaagtty

SEQ ID NO: 39658 - DNA, 13 bp, Artificial Sequence
  Oligonucleotide for detection of SNP TSC0012124
raactttcctaac

SEQ ID NO: 39659 - DNA, 13 bp, Artificial Sequence
  Oligonucleotide for detection of SNP TSC0012124
gttaggtaagtty

SEQ ID NO: 39660 - DNA, 13 bp, Artificial Sequence
  Oligonucleotide for detection of SNP TSC0012124
raacttacctaac

SEQ ID NO: 39661 - DNA, 13 bp, Artificial Sequence
  Oligonucleotide for detection of SNP TSC0012124
gggtttttttggy

SEQ ID NO: 39662 - DNA, 13 bp, Artificial Sequence
  Oligonucleotide for detection of SNP TSC0012124
rccaaaaaaaccc

SEQ ID NO: 39663 - DNA, 13 bp, Artificial Sequence
  Oligonucleotide for detection of SNP TSC0012124
gggtttgtttggy

SEQ ID NO: 39664 - DNA, 13 bp, Artificial Sequence
  Oligonucleotide for detection of SNP TSC0012124
rccaaacaaaccc

SEQ ID NO: 39665 - DNA, 13 bp, Artificial Sequence
  Oligonucleotide for detection of SNP TSC0012125
tggttagaagtgg

SEQ ID NO: 39666 - DNA, 13 bp, Artificial Sequence
  Oligonucleotide for detection of SNP TSC0012125
ccacttctaacca

SEQ ID NO: 39667 - DNA, 13 bp, Artificial Sequence
  Oligonucleotide for detection of SNP TSC0012125
tggttataagtgg

SEQ ID NO: 39668 - DNA, 13 bp, Artificial Sequence
  Oligonucleotide for detection of SNP TSC0012125
ccacttataacca

SEQ ID NO: 39669 - DNA, 13 bp, Artificial Sequence
  Oligonucleotide for detection of SNP TSC0012125
ttatttttgatta

SEQ ID NO: 39670 - DNA, 13 bp, Artificial Sequence
  Oligonucleotide for detection of SNP TSC0012125
taatcaaaaataa

SEQ ID NO: 39671 - DNA, 13 bp, Artificial Sequence
  Oligonucleotide for detection of SNP TSC0012125
ttatttatgatta

SEQ ID NO: 39672 - DNA, 13 bp, Artificial Sequence
  Oligonucleotide for detection of SNP TSC0012125
taatcataaataa

SEQ ID NO: 39673 - DNA, 13 bp, Artificial Sequence
  Oligonucleotide for detection of SNP TSC0012126
tattagatatgga

SEQ ID NO: 39674 - DNA, 13 bp, Artificial Sequence
  Oligonucleotide for detection of SNP TSC0012126
tccatatctaata

SEQ ID NO: 39675 - DNA, 13 bp, Artificial Sequence
  Oligonucleotide for detection of SNP TSC0012126
tattagttatgga

SEQ ID NO: 39676 - DNA, 13 bp, Artificial Sequence
  Oligonucleotide for detection of SNP TSC0012126
tccataactaata

SEQ ID NO: 39677 - DNA, 13 bp, Artificial Sequence
  Oligonucleotide for detection of SNP TSC0012126
tttatgtttggtg

SEQ ID NO: 39678 - DNA, 13 bp, Artificial Sequence
  Oligonucleotide for detection of SNP TSC0012126
caccaaacataaa

SEQ ID NO: 39679 - DNA, 13 bp, Artificial Sequence
  Oligonucleotide for detection of SNP TSC0012126
tttatgattggtg

SEQ ID NO: 39680 - DNA, 13 bp, Artificial Sequence
  Oligonucleotide for detection of SNP TSC0012126
caccaatcataaa

SEQ ID NO: 39681 - DNA, 13 bp, Artificial Sequence
  Oligonucleotide for detection of SNP TSC0012127
taaatagaaattt

SEQ ID NO: 39682 - DNA, 13 bp, Artificial Sequence
  Oligonucleotide for detection of SNP TSC0012127
aaatttctattta

SEQ ID NO: 39683 - DNA, 13 bp, Artificial Sequence
  Oligonucleotide for detection of SNP TSC0012127
taaataaaaattt

SEQ ID NO: 39684 - DNA, 13 bp, Artificial Sequence
  Oligonucleotide for detection of SNP TSC0012127
aaatttttattta

SEQ ID NO: 39685 - DNA, 13 bp, Artificial Sequence
  Oligonucleotide for detection of SNP TSC0012128
ggatttttattay

SEQ ID NO: 39686 - DNA, 13 bp, Artificial Sequence
  Oligonucleotide for detection of SNP TSC0012128
rtaataaaaatcc

SEQ ID NO: 39687 - DNA, 13 bp, Artificial Sequence
  Oligonucleotide for detection of SNP TSC0012128
ggatttgtattay

SEQ ID NO: 39688 - DNA, 13 bp, Artificial Sequence
  Oligonucleotide for detection of SNP TSC0012128
rtaatacaaatcc

SEQ ID NO: 39689 - DNA, 13 bp, Artificial Sequence
  Oligonucleotide for detection of SNP TSC0012128
gtagtagagatty

SEQ ID NO: 39690 - DNA, 13 bp, Artificial Sequence
  Oligonucleotide for detection of SNP TSC0012128
raatctctactac

SEQ ID NO: 39691 - DNA, 13 bp, Artificial Sequence
  Oligonucleotide for detection of SNP TSC0012128
gtagtatagatty

SEQ ID NO: 39692 - DNA, 13 bp, Artificial Sequence
  Oligonucleotide for detection of SNP TSC0012128
raatctatactac

SEQ ID NO: 39693 - DNA, 13 bp, Artificial Sequence
  Oligonucleotide for detection of SNP TSC0012129
aattatataaatt

SEQ ID NO: 39694 - DNA, 13 bp, Artificial Sequence
  Oligonucleotide for detection of SNP TSC0012129
aatttatataatt

SEQ ID NO: 39695 - DNA, 13 bp, Artificial Sequence
  Oligonucleotide for detection of SNP TSC0012129
aattatttaaatt

SEQ ID NO: 39696 - DNA, 13 bp, Artificial Sequence
  Oligonucleotide for detection of SNP TSC0012129
aatttaaataatt

SEQ ID NO: 39697 - DNA, 13 bp, Artificial Sequence
  Oligonucleotide for detection of SNP TSC0012129
aatttatgtagtt

SEQ ID NO: 39698 - DNA, 13 bp, Artificial Sequence
  Oligonucleotide for detection of SNP TSC0012129
aactacataaatt

SEQ ID NO: 39699 - DNA, 13 bp, Artificial Sequence
  Oligonucleotide for detection of SNP TSC0012129
aatttaggtagtt

SEQ ID NO: 39700 - DNA, 13 bp, Artificial Sequence
  Oligonucleotide for detection of SNP TSC0012129
aactacctaaatt

SEQ ID NO: 39701 - DNA, 13 bp, Artificial Sequence
  Oligonucleotide for detection of SNP TSC0012132
gtttgtgtattty

SEQ ID NO: 39702 - DNA, 13 bp, Artificial Sequence
  Oligonucleotide for detection of SNP TSC0012132
raaatacacaaac

SEQ ID NO: 39703 - DNA, 13 bp, Artificial Sequence
  Oligonucleotide for detection of SNP TSC0012132
gtttgtatattty

SEQ ID NO: 39704 - DNA, 13 bp, Artificial Sequence
  Oligonucleotide for detection of SNP TSC0012132
raaatatacaaac

SEQ ID NO: 39705 - DNA, 13 bp, Artificial Sequence
  Oligonucleotide for detection of SNP TSC0012133
tggtgtgttggtt

SEQ ID NO: 39706 - DNA, 13 bp, Artificial Sequence
  Oligonucleotide for detection of SNP TSC0012133
aaccaacacacca

SEQ ID NO: 39707 - DNA, 13 bp, Artificial Sequence
  Oligonucleotide for detection of SNP TSC0012133
tggtgtattggtt

SEQ ID NO: 39708 - DNA, 13 bp, Artificial Sequence
  Oligonucleotide for detection of SNP TSC0012133
aaccaatacacca

SEQ ID NO: 39709 - DNA, 13 bp, Artificial Sequence
  Oligonucleotide for detection of SNP TSC0012133
cggtgtgttggtt

SEQ ID NO: 39710 - DNA, 13 bp, Artificial Sequence
  Oligonucleotide for detection of SNP TSC0012133
aaccaacacaccg

SEQ ID NO: 39711 - DNA, 13 bp, Artificial Sequence
  Oligonucleotide for detection of SNP TSC0012133
cggtgtattggtt

SEQ ID NO: 39712 - DNA, 13 bp, Artificial Sequence
  Oligonucleotide for detection of SNP TSC0012133
aaccaatacaccg

SEQ ID NO: 39713 - DNA, 13 bp, Artificial Sequence
  Oligonucleotide for detection of SNP TSC0012133
tggcgtgttggtt

SEQ ID NO: 39714 - DNA, 13 bp, Artificial Sequence
  Oligonucleotide for detection of SNP TSC0012133
aaccaacacgcca

SEQ ID NO: 39715 - DNA, 13 bp, Artificial Sequence
  Oligonucleotide for detection of SNP TSC0012133
tggcgtattggtt

SEQ ID NO: 39716 - DNA, 13 bp, Artificial Sequence
  Oligonucleotide for detection of SNP TSC0012133
aaccaatacgcca

SEQ ID NO: 39717 - DNA, 13 bp, Artificial Sequence
  Oligonucleotide for detection of SNP TSC0012133
cggcgtgttggtt

SEQ ID NO: 39718 - DNA, 13 bp, Artificial Sequence
  Oligonucleotide for detection of SNP TSC0012133
aaccaacacgccg

SEQ ID NO: 39719 - DNA, 13 bp, Artificial Sequence
  Oligonucleotide for detection of SNP TSC0012133
cggcgtattggtt

SEQ ID NO: 39720 - DNA, 13 bp, Artificial Sequence
  Oligonucleotide for detection of SNP TSC0012133
aaccaatacgccg

SEQ ID NO: 39721 - DNA, 13 bp, Artificial Sequence
  Oligonucleotide for detection of SNP TSC0012134
aaatatagggttg

SEQ ID NO: 39722 - DNA, 13 bp, Artificial Sequence
  Oligonucleotide for detection of SNP TSC0012134
caaccctatattt

SEQ ID NO: 39723 - DNA, 13 bp, Artificial Sequence
  Oligonucleotide for detection of SNP TSC0012134
aaatatggggttg

SEQ ID NO: 39724 - DNA, 13 bp, Artificial Sequence
  Oligonucleotide for detection of SNP TSC0012134
caaccccatattt

SEQ ID NO: 39725 - DNA, 13 bp, Artificial Sequence
  Oligonucleotide for detection of SNP TSC0012134
aaatatagggtcg

SEQ ID NO: 39726 - DNA, 13 bp, Artificial Sequence
  Oligonucleotide for detection of SNP TSC0012134
cgaccctatattt

SEQ ID NO: 39727 - DNA, 13 bp, Artificial Sequence
  Oligonucleotide for detection of SNP TSC0012134
aaatacggggttg

SEQ ID NO: 39728 - DNA, 13 bp, Artificial Sequence
  Oligonucleotide for detection of SNP TSC0012134
caaccccgtattt

SEQ ID NO: 39729 - DNA, 13 bp, Artificial Sequence
  Oligonucleotide for detection of SNP TSC0012134
aaatatggggtcg

SEQ ID NO: 39730 - DNA, 13 bp, Artificial Sequence
  Oligonucleotide for detection of SNP TSC0012134
cgaccccatattt

SEQ ID NO: 39731 - DNA, 13 bp, Artificial Sequence
  Oligonucleotide for detection of SNP TSC0012134
aaatacggggtcg

SEQ ID NO: 39732 - DNA, 13 bp, Artificial Sequence
  Oligonucleotide for detection of SNP TSC0012134
cgaccccgtattt

SEQ ID NO: 39733 - DNA, 13 bp, Artificial Sequence
  Oligonucleotide for detection of SNP TSC0012134
tggttttgtgttt

SEQ ID NO: 39734 - DNA, 13 bp, Artificial Sequence
  Oligonucleotide for detection of SNP TSC0012134
aaacacaaaacca

SEQ ID NO: 39735 - DNA, 13 bp, Artificial Sequence
  Oligonucleotide for detection of SNP TSC0012134
cggttttgtgttt

SEQ ID NO: 39736 - DNA, 13 bp, Artificial Sequence
  Oligonucleotide for detection of SNP TSC0012134
aaacacaaaaccg

SEQ ID NO: 39737 - DNA, 13 bp, Artificial Sequence
  Oligonucleotide for detection of SNP TSC0012134
tggtttcgtgttt

SEQ ID NO: 39738 - DNA, 13 bp, Artificial Sequence
  Oligonucleotide for detection of SNP TSC0012134
aaacacgaaacca

SEQ ID NO: 39739 - DNA, 13 bp, Artificial Sequence
  Oligonucleotide for detection of SNP TSC0012134
cggtttcgtgttt

SEQ ID NO: 39740 - DNA, 13 bp, Artificial Sequence
  Oligonucleotide for detection of SNP TSC0012134
aaacacgaaaccg

SEQ ID NO: 39741 - DNA, 13 bp, Artificial Sequence
  Oligonucleotide for detection of SNP TSC0012138
gaaaaagagtttt

SEQ ID NO: 39742 - DNA, 13 bp, Artificial Sequence
  Oligonucleotide for detection of SNP TSC0012138
aaaactctttttc

SEQ ID NO: 39743 - DNA, 13 bp, Artificial Sequence
  Oligonucleotide for detection of SNP TSC0012138
gaaaaatagtttt

SEQ ID NO: 39744 - DNA, 13 bp, Artificial Sequence
  Oligonucleotide for detection of SNP TSC0012138
aaaactatttttc

SEQ ID NO: 39745 - DNA, 13 bp, Artificial Sequence
  Oligonucleotide for detection of SNP TSC0012138
aaaatttttttty

SEQ ID NO: 39746 - DNA, 13 bp, Artificial Sequence
  Oligonucleotide for detection of SNP TSC0012138
raaaaaaaatttt

SEQ ID NO: 39747 - DNA, 13 bp, Artificial Sequence
  Oligonucleotide for detection of SNP TSC0012138
aaaattattttty

SEQ ID NO: 39748 - DNA, 13 bp, Artificial Sequence
  Oligonucleotide for detection of SNP TSC0012138
raaaaataatttt

SEQ ID NO: 39749 - DNA, 13 bp, Artificial Sequence
  Oligonucleotide for detection of SNP TSC0012139
ggatataaggtaa

SEQ ID NO: 39750 - DNA, 13 bp, Artificial Sequence
  Oligonucleotide for detection of SNP TSC0012139
ttaccttatatcc

SEQ ID NO: 39751 - DNA, 13 bp, Artificial Sequence
  Oligonucleotide for detection of SNP TSC0012139
ggatattaggtaa

SEQ ID NO: 39752 - DNA, 13 bp, Artificial Sequence
  Oligonucleotide for detection of SNP TSC0012139
ttacctaatatcc

SEQ ID NO: 39753 - DNA, 13 bp, Artificial Sequence
  Oligonucleotide for detection of SNP TSC0012139
ttattttgtatty

SEQ ID NO: 39754 - DNA, 13 bp, Artificial Sequence
  Oligonucleotide for detection of SNP TSC0012139
raatacaaaataa

SEQ ID NO: 39755 - DNA, 13 bp, Artificial Sequence
  Oligonucleotide for detection of SNP TSC0012139
ttatttggtatty

SEQ ID NO: 39756 - DNA, 13 bp, Artificial Sequence
  Oligonucleotide for detection of SNP TSC0012139
raataccaaataa

SEQ ID NO: 39757 - DNA, 13 bp, Artificial Sequence
  Oligonucleotide for detection of SNP TSC0012140
aattatgttgtty

SEQ ID NO: 39758 - DNA, 13 bp, Artificial Sequence
  Oligonucleotide for detection of SNP TSC0012140
raacaacataatt

SEQ ID NO: 39759 - DNA, 13 bp, Artificial Sequence
  Oligonucleotide for detection of SNP TSC0012140
aattatattgtty

SEQ ID NO: 39760 - DNA, 13 bp, Artificial Sequence
  Oligonucleotide for detection of SNP TSC0012140
raacaatataatt

SEQ ID NO: 39761 - DNA, 13 bp, Artificial Sequence
  Oligonucleotide for detection of SNP TSC0012142
gaaagaaatggag

SEQ ID NO: 39762 - DNA, 13 bp, Artificial Sequence
  Oligonucleotide for detection of SNP TSC0012142
ctccatttctttc

SEQ ID NO: 39763 - DNA, 13 bp, Artificial Sequence
  Oligonucleotide for detection of SNP TSC0012142
gaaagagatggag

SEQ ID NO: 39764 - DNA, 13 bp, Artificial Sequence
  Oligonucleotide for detection of SNP TSC0012142
ctccatctctttc

SEQ ID NO: 39765 - DNA, 13 bp, Artificial Sequence
  Oligonucleotide for detection of SNP TSC0012142
gaaagaaacggag

SEQ ID NO: 39766 - DNA, 13 bp, Artificial Sequence
  Oligonucleotide for detection of SNP TSC0012142
ctccgtttctttc

SEQ ID NO: 39767 - DNA, 13 bp, Artificial Sequence
  Oligonucleotide for detection of SNP TSC0012142
gaaagagacggag

SEQ ID NO: 39768 - DNA, 13 bp, Artificial Sequence
  Oligonucleotide for detection of SNP TSC0012142
ctccgtctctttc

SEQ ID NO: 39769 - DNA, 13 bp, Artificial Sequence
  Oligonucleotide for detection of SNP TSC0012143
ttattaggtttag

SEQ ID NO: 39770 - DNA, 13 bp, Artificial Sequence
  Oligonucleotide for detection of SNP TSC0012143
ctaaacctaataa

SEQ ID NO: 39771 - DNA, 13 bp, Artificial Sequence
  Oligonucleotide for detection of SNP TSC0012143
ttgggtgtgatgg

SEQ ID NO: 39772 - DNA, 13 bp, Artificial Sequence
  Oligonucleotide for detection of SNP TSC0012143
ccatcacacccaa

SEQ ID NO: 39773 - DNA, 13 bp, Artificial Sequence
  Oligonucleotide for detection of SNP TSC0012143
ttgggtttgatgg

SEQ ID NO: 39774 - DNA, 13 bp, Artificial Sequence
  Oligonucleotide for detection of SNP TSC0012143
ccatcaaacccaa

SEQ ID NO: 39775 - DNA, 13 bp, Artificial Sequence
  Oligonucleotide for detection of SNP TSC0012143
ttgggcgtgatgg

SEQ ID NO: 39776 - DNA, 13 bp, Artificial Sequence
  Oligonucleotide for detection of SNP TSC0012143
ccatcacgcccaa

SEQ ID NO: 39777 - DNA, 13 bp, Artificial Sequence
  Oligonucleotide for detection of SNP TSC0012144
tggggggtttagg

SEQ ID NO: 39778 - DNA, 13 bp, Artificial Sequence
  Oligonucleotide for detection of SNP TSC0012144
cctaaacccccca

SEQ ID NO: 39779 - DNA, 13 bp, Artificial Sequence
  Oligonucleotide for detection of SNP TSC0012144
tgggggttttagg

SEQ ID NO: 39780 - DNA, 13 bp, Artificial Sequence
  Oligonucleotide for detection of SNP TSC0012144
cctaaaaccccca

SEQ ID NO: 39781 - DNA, 13 bp, Artificial Sequence
  Oligonucleotide for detection of SNP TSC0012144
tttaagtttttta

SEQ ID NO: 39782 - DNA, 13 bp, Artificial Sequence
  Oligonucleotide for detection of SNP TSC0012144
taaaaaacttaaa

SEQ ID NO: 39783 - DNA, 13 bp, Artificial Sequence
  Oligonucleotide for detection of SNP TSC0012144
tttaagattttta

SEQ ID NO: 39784 - DNA, 13 bp, Artificial Sequence
  Oligonucleotide for detection of SNP TSC0012144
taaaaatcttaaa

SEQ ID NO: 39785 - DNA, 13 bp, Artificial Sequence
  Oligonucleotide for detection of SNP TSC0012145
cgtgttgtttaty

SEQ ID NO: 39786 - DNA, 13 bp, Artificial Sequence
  Oligonucleotide for detection of SNP TSC0012145
rataaacaacacg

SEQ ID NO: 39787 - DNA, 13 bp, Artificial Sequence
  Oligonucleotide for detection of SNP TSC0012145
cgtgttatttaty

SEQ ID NO: 39788 - DNA, 13 bp, Artificial Sequence
  Oligonucleotide for detection of SNP TSC0012145
rataaataacacg

SEQ ID NO: 39789 - DNA, 13 bp, Artificial Sequence
  Oligonucleotide for detection of SNP TSC0012146
aggatatggtaaa

SEQ ID NO: 39790 - DNA, 13 bp, Artificial Sequence
  Oligonucleotide for detection of SNP TSC0012146
tttaccatatcct

SEQ ID NO: 39791 - DNA, 13 bp, Artificial Sequence
  Oligonucleotide for detection of SNP TSC0012146
aggatagggtaaa

SEQ ID NO: 39792 - DNA, 13 bp, Artificial Sequence
  Oligonucleotide for detection of SNP TSC0012146
tttaccctatcct

SEQ ID NO: 39793 - DNA, 13 bp, Artificial Sequence
  Oligonucleotide for detection of SNP TSC0012146
aggatacggtaaa

SEQ ID NO: 39794 - DNA, 13 bp, Artificial Sequence
  Oligonucleotide for detection of SNP TSC0012146
tttaccgtatcct

SEQ ID NO: 39795 - DNA, 13 bp, Artificial Sequence
  Oligonucleotide for detection of SNP TSC0012146
tttattgtgtttt

SEQ ID NO: 39796 - DNA, 13 bp, Artificial Sequence
  Oligonucleotide for detection of SNP TSC0012146
aaaacacaataaa

SEQ ID NO: 39797 - DNA, 13 bp, Artificial Sequence
  Oligonucleotide for detection of SNP TSC0012146
tttattttgtttt

SEQ ID NO: 39798 - DNA, 13 bp, Artificial Sequence
  Oligonucleotide for detection of SNP TSC0012146
aaaacaaaataaa

SEQ ID NO: 39799 - DNA, 13 bp, Artificial Sequence
  Oligonucleotide for detection of SNP TSC0012146
tttatcgtgtttt

SEQ ID NO: 39800 - DNA, 13 bp, Artificial Sequence
  Oligonucleotide for detection of SNP TSC0012146
aaaacacgataaa

SEQ ID NO: 39801 - DNA, 13 bp, Artificial Sequence
  Oligonucleotide for detection of SNP TSC0012150
gttaatagtttgg

SEQ ID NO: 39802 - DNA, 13 bp, Artificial Sequence
  Oligonucleotide for detection of SNP TSC0012150
ccaaactattaac

SEQ ID NO: 39803 - DNA, 13 bp, Artificial Sequence
  Oligonucleotide for detection of SNP TSC0012150
gttaattgtttgg

SEQ ID NO: 39804 - DNA, 13 bp, Artificial Sequence
  Oligonucleotide for detection of SNP TSC0012150
ccaaacaattaac

SEQ ID NO: 39805 - DNA, 13 bp, Artificial Sequence
  Oligonucleotide for detection of SNP TSC0012150
ttagattgttagy

SEQ ID NO: 39806 - DNA, 13 bp, Artificial Sequence
  Oligonucleotide for detection of SNP TSC0012150
rctaacaatctaa

SEQ ID NO: 39807 - DNA, 13 bp, Artificial Sequence
  Oligonucleotide for detection of SNP TSC0012150
ttagatagttagy

SEQ ID NO: 39808 - DNA, 13 bp, Artificial Sequence
  Oligonucleotide for detection of SNP TSC0012150
rctaactatctaa

SEQ ID NO: 39809 - DNA, 13 bp, Artificial Sequence
  Oligonucleotide for detection of SNP TSC0012152
gagggagatagag

SEQ ID NO: 39810 - DNA, 13 bp, Artificial Sequence
  Oligonucleotide for detection of SNP TSC0012152
ctctatctccctc

SEQ ID NO: 39811 - DNA, 13 bp, Artificial Sequence
  Oligonucleotide for detection of SNP TSC0012152
gagggaaatagag

SEQ ID NO: 39812 - DNA, 13 bp, Artificial Sequence
  Oligonucleotide for detection of SNP TSC0012152
ctctatttccctc

SEQ ID NO: 39813 - DNA, 13 bp, Artificial Sequence
  Oligonucleotide for detection of SNP TSC0012153
taaatagtattta

SEQ ID NO: 39814 - DNA, 13 bp, Artificial Sequence
  Oligonucleotide for detection of SNP TSC0012153
taaatactattta

SEQ ID NO: 39815 - DNA, 13 bp, Artificial Sequence
  Oligonucleotide for detection of SNP TSC0012153
taaataatattta

SEQ ID NO: 39816 - DNA, 13 bp, Artificial Sequence
  Oligonucleotide for detection of SNP TSC0012153
taaatattattta

SEQ ID NO: 39817 - DNA, 13 bp, Artificial Sequence
  Oligonucleotide for detection of SNP TSC0012154
tttattatgtaty

SEQ ID NO: 39818 - DNA, 13 bp, Artificial Sequence
  Oligonucleotide for detection of SNP TSC0012154
ratacataataaa

SEQ ID NO: 39819 - DNA, 13 bp, Artificial Sequence
  Oligonucleotide for detection of SNP TSC0012154
tttattgtgtaty

SEQ ID NO: 39820 - DNA, 13 bp, Artificial Sequence
  Oligonucleotide for detection of SNP TSC0012154
ratacacaataaa

SEQ ID NO: 39821 - DNA, 13 bp, Artificial Sequence
  Oligonucleotide for detection of SNP TSC0012154
tttatcgtgtaty

SEQ ID NO: 39822 - DNA, 13 bp, Artificial Sequence
  Oligonucleotide for detection of SNP TSC0012154
ratacacgataaa

SEQ ID NO: 39823 - DNA, 13 bp, Artificial Sequence
  Oligonucleotide for detection of SNP TSC0012154
ggtatatgatagg

SEQ ID NO: 39824 - DNA, 13 bp, Artificial Sequence
  Oligonucleotide for detection of SNP TSC0012154
cctatcatatacc

SEQ ID NO: 39825 - DNA, 13 bp, Artificial Sequence
  Oligonucleotide for detection of SNP TSC0012154
ggtatacgatagg

SEQ ID NO: 39826 - DNA, 13 bp, Artificial Sequence
  Oligonucleotide for detection of SNP TSC0012154
cctatcgtatacc

SEQ ID NO: 39827 - DNA, 13 bp, Artificial Sequence
  Oligonucleotide for detection of SNP TSC0012155
ggttattgttata

SEQ ID NO: 39828 - DNA, 13 bp, Artificial Sequence
  Oligonucleotide for detection of SNP TSC0012155
tataacaataacc

SEQ ID NO: 39829 - DNA, 13 bp, Artificial Sequence
  Oligonucleotide for detection of SNP TSC0012155
ggttatcgttata

SEQ ID NO: 39830 - DNA, 13 bp, Artificial Sequence
  Oligonucleotide for detection of SNP TSC0012155
tataacgataacc

SEQ ID NO: 39831 - DNA, 13 bp, Artificial Sequence
  Oligonucleotide for detection of SNP TSC0012155
tatggtggtggty

SEQ ID NO: 39832 - DNA, 13 bp, Artificial Sequence
  Oligonucleotide for detection of SNP TSC0012155
raccaccaccata

SEQ ID NO: 39833 - DNA, 13 bp, Artificial Sequence
  Oligonucleotide for detection of SNP TSC0012155
tatggtagtggty

SEQ ID NO: 39834 - DNA, 13 bp, Artificial Sequence
  Oligonucleotide for detection of SNP TSC0012155
raccactaccata

SEQ ID NO: 39835 - DNA, 13 bp, Artificial Sequence
  Oligonucleotide for detection of SNP TSC0012155
tatggcggtggty

SEQ ID NO: 39836 - DNA, 13 bp, Artificial Sequence
  Oligonucleotide for detection of SNP TSC0012155
raccaccgccata

SEQ ID NO: 39837 - DNA, 13 bp, Artificial Sequence
  Oligonucleotide for detection of SNP TSC0012157
tagttgatgtgag

SEQ ID NO: 39838 - DNA, 13 bp, Artificial Sequence
  Oligonucleotide for detection of SNP TSC0012157
ctcacatcaacta

SEQ ID NO: 39839 - DNA, 13 bp, Artificial Sequence
  Oligonucleotide for detection of SNP TSC0012157
tagttggtgtgag

SEQ ID NO: 39840 - DNA, 13 bp, Artificial Sequence
  Oligonucleotide for detection of SNP TSC0012157
ctcacaccaacta

SEQ ID NO: 39841 - DNA, 13 bp, Artificial Sequence
  Oligonucleotide for detection of SNP TSC0012158
atgtttgtttttt

SEQ ID NO: 39842 - DNA, 13 bp, Artificial Sequence
  Oligonucleotide for detection of SNP TSC0012158
aaaaaacaaacat

SEQ ID NO: 39843 - DNA, 13 bp, Artificial Sequence
  Oligonucleotide for detection of SNP TSC0012158
acgtttatttttt

SEQ ID NO: 39844 - DNA, 13 bp, Artificial Sequence
  Oligonucleotide for detection of SNP TSC0012158
aaaaaataaacgt

SEQ ID NO: 39845 - DNA, 13 bp, Artificial Sequence
  Oligonucleotide for detection of SNP TSC0012158
acgtttgtttttt

SEQ ID NO: 39846 - DNA, 13 bp, Artificial Sequence
  Oligonucleotide for detection of SNP TSC0012158
aaaaaacaaacgt

SEQ ID NO: 39847 - DNA, 13 bp, Artificial Sequence
  Oligonucleotide for detection of SNP TSC0012158
atgttcgtttttt

SEQ ID NO: 39848 - DNA, 13 bp, Artificial Sequence
  Oligonucleotide for detection of SNP TSC0012158
aaaaaacgaacat

SEQ ID NO: 39849 - DNA, 13 bp, Artificial Sequence
  Oligonucleotide for detection of SNP TSC0012158
acgttcgtttttt

SEQ ID NO: 39850 - DNA, 13 bp, Artificial Sequence
  Oligonucleotide for detection of SNP TSC0012158
aaaaaacgaacgt

SEQ ID NO: 39851 - DNA, 13 bp, Artificial Sequence
  Oligonucleotide for detection of SNP TSC0012158
aggagatgaatgt

SEQ ID NO: 39852 - DNA, 13 bp, Artificial Sequence
  Oligonucleotide for detection of SNP TSC0012158
acattcatctcct

SEQ ID NO: 39853 - DNA, 13 bp, Artificial Sequence
  Oligonucleotide for detection of SNP TSC0012158
aggagatgaacgt

SEQ ID NO: 39854 - DNA, 13 bp, Artificial Sequence
  Oligonucleotide for detection of SNP TSC0012158
acgttcatctcct

SEQ ID NO: 39855 - DNA, 13 bp, Artificial Sequence
  Oligonucleotide for detection of SNP TSC0012158
aggagacgaatgt

SEQ ID NO: 39856 - DNA, 13 bp, Artificial Sequence
  Oligonucleotide for detection of SNP TSC0012158
acattcgtctcct

SEQ ID NO: 39857 - DNA, 13 bp, Artificial Sequence
  Oligonucleotide for detection of SNP TSC0012158
aggagacgaacgt

SEQ ID NO: 39858 - DNA, 13 bp, Artificial Sequence
  Oligonucleotide for detection of SNP TSC0012158
acgttcgtctcct

SEQ ID NO: 39859 - DNA, 13 bp, Artificial Sequence
  Oligonucleotide for detection of SNP TSC0012161
gtgtgtatatgtg

SEQ ID NO: 39860 - DNA, 13 bp, Artificial Sequence
  Oligonucleotide for detection of SNP TSC0012161
cacatatacacac

SEQ ID NO: 39861 - DNA, 13 bp, Artificial Sequence
  Oligonucleotide for detection of SNP TSC0012161
gtgtgtgtatgtg

SEQ ID NO: 39862 - DNA, 13 bp, Artificial Sequence
  Oligonucleotide for detection of SNP TSC0012161
cacatacacacac

SEQ ID NO: 39863 - DNA, 13 bp, Artificial Sequence
  Oligonucleotide for detection of SNP TSC0012162
ttttattggaatg

SEQ ID NO: 39864 - DNA, 13 bp, Artificial Sequence
  Oligonucleotide for detection of SNP TSC0012162
cattccaataaaa

SEQ ID NO: 39865 - DNA, 13 bp, Artificial Sequence
  Oligonucleotide for detection of SNP TSC0012162
ttttatcggaatg

SEQ ID NO: 39866 - DNA, 13 bp, Artificial Sequence
  Oligonucleotide for detection of SNP TSC0012162
cattccgataaaa

SEQ ID NO: 39867 - DNA, 13 bp, Artificial Sequence
  Oligonucleotide for detection of SNP TSC0012162
tattttggtagaa

SEQ ID NO: 39868 - DNA, 13 bp, Artificial Sequence
  Oligonucleotide for detection of SNP TSC0012162
ttctaccaaaata

SEQ ID NO: 39869 - DNA, 13 bp, Artificial Sequence
  Oligonucleotide for detection of SNP TSC0012162
tattttagtagaa

SEQ ID NO: 39870 - DNA, 13 bp, Artificial Sequence
  Oligonucleotide for detection of SNP TSC0012162
ttctactaaaata

SEQ ID NO: 39871 - DNA, 13 bp, Artificial Sequence
  Oligonucleotide for detection of SNP TSC0012162
tatttcggtagaa

SEQ ID NO: 39872 - DNA, 13 bp, Artificial Sequence
  Oligonucleotide for detection of SNP TSC0012162
ttctaccgaaata

SEQ ID NO: 39873 - DNA, 13 bp, Artificial Sequence
  Oligonucleotide for detection of SNP TSC0012163
ttagggaagtaag

SEQ ID NO: 39874 - DNA, 13 bp, Artificial Sequence
  Oligonucleotide for detection of SNP TSC0012163
cttacttccctaa

SEQ ID NO: 39875 - DNA, 13 bp, Artificial Sequence
  Oligonucleotide for detection of SNP TSC0012163
ttagggtagtaag

SEQ ID NO: 39876 - DNA, 13 bp, Artificial Sequence
  Oligonucleotide for detection of SNP TSC0012163
cttactaccctaa

SEQ ID NO: 39877 - DNA, 13 bp, Artificial Sequence
  Oligonucleotide for detection of SNP TSC0012163
tttgtttttttgg

SEQ ID NO: 39878 - DNA, 13 bp, Artificial Sequence
  Oligonucleotide for detection of SNP TSC0012163
ccaaaaaaacaaa

SEQ ID NO: 39879 - DNA, 13 bp, Artificial Sequence
  Oligonucleotide for detection of SNP TSC0012163
tttgttgttttgg

SEQ ID NO: 39880 - DNA, 13 bp, Artificial Sequence
  Oligonucleotide for detection of SNP TSC0012163
ccaaaacaacaaa

SEQ ID NO: 39881 - DNA, 13 bp, Artificial Sequence
  Oligonucleotide for detection of SNP TSC0012164
tgagggattgagy

SEQ ID NO: 39882 - DNA, 13 bp, Artificial Sequence
  Oligonucleotide for detection of SNP TSC0012164
rctcaatccctca

SEQ ID NO: 39883 - DNA, 13 bp, Artificial Sequence
  Oligonucleotide for detection of SNP TSC0012164
tgaggggttgagy

SEQ ID NO: 39884 - DNA, 13 bp, Artificial Sequence
  Oligonucleotide for detection of SNP TSC0012164
rctcaacccctca

SEQ ID NO: 39885 - DNA, 13 bp, Artificial Sequence
  Oligonucleotide for detection of SNP TSC0012165
taggtatgtttta

SEQ ID NO: 39886 - DNA, 13 bp, Artificial Sequence
  Oligonucleotide for detection of SNP TSC0012165
taaaacataccta

SEQ ID NO: 39887 - DNA, 13 bp, Artificial Sequence
  Oligonucleotide for detection of SNP TSC0012165
taggtacgtttta

SEQ ID NO: 39888 - DNA, 13 bp, Artificial Sequence
  Oligonucleotide for detection of SNP TSC0012165
taaaacgtaccta

SEQ ID NO: 39889 - DNA, 13 bp, Artificial Sequence
  Oligonucleotide for detection of SNP TSC0012165
tgggatgtgtttg

SEQ ID NO: 39890 - DNA, 13 bp, Artificial Sequence
  Oligonucleotide for detection of SNP TSC0012165
caaacacatccca

SEQ ID NO: 39891 - DNA, 13 bp, Artificial Sequence
  Oligonucleotide for detection of SNP TSC0012165
tgggatatgtttg

SEQ ID NO: 39892 - DNA, 13 bp, Artificial Sequence
  Oligonucleotide for detection of SNP TSC0012165
caaacatatccca

SEQ ID NO: 39893 - DNA, 13 bp, Artificial Sequence
  Oligonucleotide for detection of SNP TSC0012165
tgggacgtgtttg

SEQ ID NO: 39894 - DNA, 13 bp, Artificial Sequence
  Oligonucleotide for detection of SNP TSC0012165
caaacacgtccca

SEQ ID NO: 39895 - DNA, 13 bp, Artificial Sequence
  Oligonucleotide for detection of SNP TSC0012166
tgttagtgttttg

SEQ ID NO: 39896 - DNA, 13 bp, Artificial Sequence
  Oligonucleotide for detection of SNP TSC0012166
caaaacactaaca

SEQ ID NO: 39897 - DNA, 13 bp, Artificial Sequence
  Oligonucleotide for detection of SNP TSC0012166
tgttagcgttttg

SEQ ID NO: 39898 - DNA, 13 bp, Artificial Sequence
  Oligonucleotide for detection of SNP TSC0012166
caaaacgctaaca

SEQ ID NO: 39899 - DNA, 13 bp, Artificial Sequence
  Oligonucleotide for detection of SNP TSC0012166
taagatgttggta

SEQ ID NO: 39900 - DNA, 13 bp, Artificial Sequence
  Oligonucleotide for detection of SNP TSC0012166
taccaacatctta

SEQ ID NO: 39901 - DNA, 13 bp, Artificial Sequence
  Oligonucleotide for detection of SNP TSC0012166
taagatattggta

SEQ ID NO: 39902 - DNA, 13 bp, Artificial Sequence
  Oligonucleotide for detection of SNP TSC0012166
taccaatatctta

SEQ ID NO: 39903 - DNA, 13 bp, Artificial Sequence
  Oligonucleotide for detection of SNP TSC0012166
taagacgttggta

SEQ ID NO: 39904 - DNA, 13 bp, Artificial Sequence
  Oligonucleotide for detection of SNP TSC0012166
taccaacgtctta

SEQ ID NO: 39905 - DNA, 13 bp, Artificial Sequence
  Oligonucleotide for detection of SNP TSC0012167
aggagaggggaat

SEQ ID NO: 39906 - DNA, 13 bp, Artificial Sequence
  Oligonucleotide for detection of SNP TSC0012167
attcccctctcct

SEQ ID NO: 39907 - DNA, 13 bp, Artificial Sequence
  Oligonucleotide for detection of SNP TSC0012167
aggagaagggaat

SEQ ID NO: 39908 - DNA, 13 bp, Artificial Sequence
  Oligonucleotide for detection of SNP TSC0012167
attcccttctcct

SEQ ID NO: 39909 - DNA, 13 bp, Artificial Sequence
  Oligonucleotide for detection of SNP TSC0012171
gaatttatttttt

SEQ ID NO: 39910 - DNA, 13 bp, Artificial Sequence
  Oligonucleotide for detection of SNP TSC0012171
aaaaaataaattc

SEQ ID NO: 39911 - DNA, 13 bp, Artificial Sequence
  Oligonucleotide for detection of SNP TSC0012171
gaatttgtttttt

SEQ ID NO: 39912 - DNA, 13 bp, Artificial Sequence
  Oligonucleotide for detection of SNP TSC0012171
aaaaaacaaattc

SEQ ID NO: 39913 - DNA, 13 bp, Artificial Sequence
  Oligonucleotide for detection of SNP TSC0012171
gaattcgtttttt

SEQ ID NO: 39914 - DNA, 13 bp, Artificial Sequence
  Oligonucleotide for detection of SNP TSC0012171
aaaaaacgaattc

SEQ ID NO: 39915 - DNA, 13 bp, Artificial Sequence
  Oligonucleotide for detection of SNP TSC0012171
agaggatggatty

SEQ ID NO: 39916 - DNA, 13 bp, Artificial Sequence
  Oligonucleotide for detection of SNP TSC0012171
raatccatcctct

SEQ ID NO: 39917 - DNA, 13 bp, Artificial Sequence
  Oligonucleotide for detection of SNP TSC0012171
agaggacggatty

SEQ ID NO: 39918 - DNA, 13 bp, Artificial Sequence
  Oligonucleotide for detection of SNP TSC0012171
raatccgtcctct

SEQ ID NO: 39919 - DNA, 13 bp, Artificial Sequence
  Oligonucleotide for detection of SNP TSC0012173
tttataaattggy

SEQ ID NO: 39920 - DNA, 13 bp, Artificial Sequence
  Oligonucleotide for detection of SNP TSC0012173
rccaatttataaa

SEQ ID NO: 39921 - DNA, 13 bp, Artificial Sequence
  Oligonucleotide for detection of SNP TSC0012173
tttatagattggy

SEQ ID NO: 39922 - DNA, 13 bp, Artificial Sequence
  Oligonucleotide for detection of SNP TSC0012173
rccaatctataaa

SEQ ID NO: 39923 - DNA, 13 bp, Artificial Sequence
  Oligonucleotide for detection of SNP TSC0012174
atttggatattat

SEQ ID NO: 39924 - DNA, 13 bp, Artificial Sequence
  Oligonucleotide for detection of SNP TSC0012174
ataatatccaaat

SEQ ID NO: 39925 - DNA, 13 bp, Artificial Sequence
  Oligonucleotide for detection of SNP TSC0012174
atttggttattat

SEQ ID NO: 39926 - DNA, 13 bp, Artificial Sequence
  Oligonucleotide for detection of SNP TSC0012174
ataataaccaaat

SEQ ID NO: 39927 - DNA, 13 bp, Artificial Sequence
  Oligonucleotide for detection of SNP TSC0012174
atgatgtttaggt

SEQ ID NO: 39928 - DNA, 13 bp, Artificial Sequence
  Oligonucleotide for detection of SNP TSC0012174
acctaaacatcat

SEQ ID NO: 39929 - DNA, 13 bp, Artificial Sequence
  Oligonucleotide for detection of SNP TSC0012174
atgatgattaggt

SEQ ID NO: 39930 - DNA, 13 bp, Artificial Sequence
  Oligonucleotide for detection of SNP TSC0012174
acctaatcatcat

SEQ ID NO: 39931 - DNA, 13 bp, Artificial Sequence
  Oligonucleotide for detection of SNP TSC0012175
tttatttgggttt

SEQ ID NO: 39932 - DNA, 13 bp, Artificial Sequence
  Oligonucleotide for detection of SNP TSC0012175
aaacccaaataaa

SEQ ID NO: 39933 - DNA, 13 bp, Artificial Sequence
  Oligonucleotide for detection of SNP TSC0012175
tttattcgggttt

SEQ ID NO: 39934 - DNA, 13 bp, Artificial Sequence
  Oligonucleotide for detection of SNP TSC0012175
aaacccgaataaa

SEQ ID NO: 39935 - DNA, 13 bp, Artificial Sequence
  Oligonucleotide for detection of SNP TSC0012175
aggtttgagtggg

SEQ ID NO: 39936 - DNA, 13 bp, Artificial Sequence
  Oligonucleotide for detection of SNP TSC0012175
cccactcaaacct

SEQ ID NO: 39937 - DNA, 13 bp, Artificial Sequence
  Oligonucleotide for detection of SNP TSC0012175
aggtttaagtggg

SEQ ID NO: 39938 - DNA, 13 bp, Artificial Sequence
  Oligonucleotide for detection of SNP TSC0012175
cccacttaaacct

SEQ ID NO: 39939 - DNA, 13 bp, Artificial Sequence
  Oligonucleotide for detection of SNP TSC0012175
aggttcgagtggg

SEQ ID NO: 39940 - DNA, 13 bp, Artificial Sequence
  Oligonucleotide for detection of SNP TSC0012175
cccactcgaacct

SEQ ID NO: 39941 - DNA, 13 bp, Artificial Sequence
  Oligonucleotide for detection of SNP TSC0012177
ttattttttatty

SEQ ID NO: 39942 - DNA, 13 bp, Artificial Sequence
  Oligonucleotide for detection of SNP TSC0012177
raataaaaaataa

SEQ ID NO: 39943 - DNA, 13 bp, Artificial Sequence
  Oligonucleotide for detection of SNP TSC0012177
ttatttgttatty

SEQ ID NO: 39944 - DNA, 13 bp, Artificial Sequence
  Oligonucleotide for detection of SNP TSC0012177
raataacaaataa

SEQ ID NO: 39945 - DNA, 13 bp, Artificial Sequence
  Oligonucleotide for detection of SNP TSC0012177
ttattcgttatty

SEQ ID NO: 39946 - DNA, 13 bp, Artificial Sequence
  Oligonucleotide for detection of SNP TSC0012177
raataacgaataa

SEQ ID NO: 39947 - DNA, 13 bp, Artificial Sequence
  Oligonucleotide for detection of SNP TSC0012177
gggtgaggggtgg

SEQ ID NO: 39948 - DNA, 13 bp, Artificial Sequence
  Oligonucleotide for detection of SNP TSC0012177
ccacccctcaccc

SEQ ID NO: 39949 - DNA, 13 bp, Artificial Sequence
  Oligonucleotide for detection of SNP TSC0012177
gggtgatgggtgg

SEQ ID NO: 39950 - DNA, 13 bp, Artificial Sequence
  Oligonucleotide for detection of SNP TSC0012177
ccacccatcaccc

SEQ ID NO: 39951 - DNA, 13 bp, Artificial Sequence
  Oligonucleotide for detection of SNP TSC0012177
gggtgacgggtgg

SEQ ID NO: 39952 - DNA, 13 bp, Artificial Sequence
  Oligonucleotide for detection of SNP TSC0012177
ccacccgtcaccc

SEQ ID NO: 39953 - DNA, 13 bp, Artificial Sequence
  Oligonucleotide for detection of SNP TSC0012178
atttattttttay

SEQ ID NO: 39954 - DNA, 13 bp, Artificial Sequence
  Oligonucleotide for detection of SNP TSC0012178
rtaaaaaataaat

SEQ ID NO: 39955 - DNA, 13 bp, Artificial Sequence
  Oligonucleotide for detection of SNP TSC0012178
atttatgttttay

SEQ ID NO: 39956 - DNA, 13 bp, Artificial Sequence
  Oligonucleotide for detection of SNP TSC0012178
rtaaaacataaat

SEQ ID NO: 39957 - DNA, 13 bp, Artificial Sequence
  Oligonucleotide for detection of SNP TSC0012178
gtgggggataggt

SEQ ID NO: 39958 - DNA, 13 bp, Artificial Sequence
  Oligonucleotide for detection of SNP TSC0012178
acctatcccccac

SEQ ID NO: 39959 - DNA, 13 bp, Artificial Sequence
  Oligonucleotide for detection of SNP TSC0012178
gtggggtataggt

SEQ ID NO: 39960 - DNA, 13 bp, Artificial Sequence
  Oligonucleotide for detection of SNP TSC0012178
acctataccccac

SEQ ID NO: 39961 - DNA, 13 bp, Artificial Sequence
  Oligonucleotide for detection of SNP TSC0012179
ttttggatgatgy

SEQ ID NO: 39962 - DNA, 13 bp, Artificial Sequence
  Oligonucleotide for detection of SNP TSC0012179
rcatcatccaaaa

SEQ ID NO: 39963 - DNA, 13 bp, Artificial Sequence
  Oligonucleotide for detection of SNP TSC0012179
ttttgggtgatgy

SEQ ID NO: 39964 - DNA, 13 bp, Artificial Sequence
  Oligonucleotide for detection of SNP TSC0012179
rcatcacccaaaa

SEQ ID NO: 39965 - DNA, 13 bp, Artificial Sequence
  Oligonucleotide for detection of SNP TSC0012179
ttttggacgatgy

SEQ ID NO: 39966 - DNA, 13 bp, Artificial Sequence
  Oligonucleotide for detection of SNP TSC0012179
rcatcgtccaaaa

SEQ ID NO: 39967 - DNA, 13 bp, Artificial Sequence
  Oligonucleotide for detection of SNP TSC0012179
ttttgggcgatgy

SEQ ID NO: 39968 - DNA, 13 bp, Artificial Sequence
  Oligonucleotide for detection of SNP TSC0012179
rcatcgcccaaaa

SEQ ID NO: 39969 - DNA, 13 bp, Artificial Sequence
  Oligonucleotide for detection of SNP TSC0012180
tttggttggaggy

SEQ ID NO: 39970 - DNA, 13 bp, Artificial Sequence
  Oligonucleotide for detection of SNP TSC0012180
rcctccaaccaaa

SEQ ID NO: 39971 - DNA, 13 bp, Artificial Sequence
  Oligonucleotide for detection of SNP TSC0012180
tttggtcggaggy

SEQ ID NO: 39972 - DNA, 13 bp, Artificial Sequence
  Oligonucleotide for detection of SNP TSC0012180
rcctccgaccaaa

SEQ ID NO: 39973 - DNA, 13 bp, Artificial Sequence
  Oligonucleotide for detection of SNP TSC0012180
gtttttggttagg

SEQ ID NO: 39974 - DNA, 13 bp, Artificial Sequence
  Oligonucleotide for detection of SNP TSC0012180
cctaaccaaaaac

SEQ ID NO: 39975 - DNA, 13 bp, Artificial Sequence
  Oligonucleotide for detection of SNP TSC0012180
gtttttagttagg

SEQ ID NO: 39976 - DNA, 13 bp, Artificial Sequence
  Oligonucleotide for detection of SNP TSC0012180
cctaactaaaaac

SEQ ID NO: 39977 - DNA, 13 bp, Artificial Sequence
  Oligonucleotide for detection of SNP TSC0012180
gttttcggttagg

SEQ ID NO: 39978 - DNA, 13 bp, Artificial Sequence
  Oligonucleotide for detection of SNP TSC0012180
cctaaccgaaaac

SEQ ID NO: 39979 - DNA, 13 bp, Artificial Sequence
  Oligonucleotide for detection of SNP TSC0012181
aaaggagagagag

SEQ ID NO: 39980 - DNA, 13 bp, Artificial Sequence
  Oligonucleotide for detection of SNP TSC0012181
ctctctctccttt

SEQ ID NO: 39981 - DNA, 13 bp, Artificial Sequence
  Oligonucleotide for detection of SNP TSC0012181
aaaggatagagag

SEQ ID NO: 39982 - DNA, 13 bp, Artificial Sequence
  Oligonucleotide for detection of SNP TSC0012181
ctctctatccttt

SEQ ID NO: 39983 - DNA, 13 bp, Artificial Sequence
  Oligonucleotide for detection of SNP TSC0012182
ggaataatatatt

SEQ ID NO: 39984 - DNA, 13 bp, Artificial Sequence
  Oligonucleotide for detection of SNP TSC0012182
aatatattattcc

SEQ ID NO: 39985 - DNA, 13 bp, Artificial Sequence
  Oligonucleotide for detection of SNP TSC0012182
ggaatagtatatt

SEQ ID NO: 39986 - DNA, 13 bp, Artificial Sequence
  Oligonucleotide for detection of SNP TSC0012182
aatatactattcc

SEQ ID NO: 39987 - DNA, 13 bp, Artificial Sequence
  Oligonucleotide for detection of SNP TSC0012183
ttttaggttttga

SEQ ID NO: 39988 - DNA, 13 bp, Artificial Sequence
  Oligonucleotide for detection of SNP TSC0012183
tcaaaacctaaaa

SEQ ID NO: 39989 - DNA, 13 bp, Artificial Sequence
  Oligonucleotide for detection of SNP TSC0012183
ttttagattttga

SEQ ID NO: 39990 - DNA, 13 bp, Artificial Sequence
  Oligonucleotide for detection of SNP TSC0012183
tcaaaatctaaaa

SEQ ID NO: 39991 - DNA, 13 bp, Artificial Sequence
  Oligonucleotide for detection of SNP TSC0012184
ttttaaagtttty

SEQ ID NO: 39992 - DNA, 13 bp, Artificial Sequence
  Oligonucleotide for detection of SNP TSC0012184
raaaactttaaaa

SEQ ID NO: 39993 - DNA, 13 bp, Artificial Sequence
  Oligonucleotide for detection of SNP TSC0012184
gaagattttagaa

SEQ ID NO: 39994 - DNA, 13 bp, Artificial Sequence
  Oligonucleotide for detection of SNP TSC0012184
ttctaaaatcttc

SEQ ID NO: 39995 - DNA, 13 bp, Artificial Sequence
  Oligonucleotide for detection of SNP TSC0012184
gaagatgttagaa

SEQ ID NO: 39996 - DNA, 13 bp, Artificial Sequence
  Oligonucleotide for detection of SNP TSC0012184
ttctaacatcttc

SEQ ID NO: 39997 - DNA, 13 bp, Artificial Sequence
  Oligonucleotide for detection of SNP TSC0012184
gaagacgttagaa

SEQ ID NO: 39998 - DNA, 13 bp, Artificial Sequence
  Oligonucleotide for detection of SNP TSC0012184
ttctaacgtcttc

SEQ ID NO: 39999 - DNA, 13 bp, Artificial Sequence
  Oligonucleotide for detection of SNP TSC0012185
ttgtaaatgttgg

SEQ ID NO: 40000 - DNA, 13 bp, Artificial Sequence
  Oligonucleotide for detection of SNP TSC0012185
ccaacatttacaa

SEQ ID NO: 40001 - DNA, 13 bp, Artificial Sequence
  Oligonucleotide for detection of SNP TSC0012185
ttgtaagtgttgg

SEQ ID NO: 40002 - DNA, 13 bp, Artificial Sequence
  Oligonucleotide for detection of SNP TSC0012185
ccaacacttacaa

SEQ ID NO: 40003 - DNA, 13 bp, Artificial Sequence
  Oligonucleotide for detection of SNP TSC0012186
tattttttgttgg

SEQ ID NO: 40004 - DNA, 13 bp, Artificial Sequence
  Oligonucleotide for detection of SNP TSC0012186
ccaacaaaaaata

SEQ ID NO: 40005 - DNA, 13 bp, Artificial Sequence
  Oligonucleotide for detection of SNP TSC0012186
tattttgtgttgg

SEQ ID NO: 40006 - DNA, 13 bp, Artificial Sequence
  Oligonucleotide for detection of SNP TSC0012186
ccaacacaaaata

SEQ ID NO: 40007 - DNA, 13 bp, Artificial Sequence
  Oligonucleotide for detection of SNP TSC0012186
tattttttgtcgg

SEQ ID NO: 40008 - DNA, 13 bp, Artificial Sequence
  Oligonucleotide for detection of SNP TSC0012186
ccgacaaaaaata

SEQ ID NO: 40009 - DNA, 13 bp, Artificial Sequence
  Oligonucleotide for detection of SNP TSC0012186
tatttcgtgttgg

SEQ ID NO: 40010 - DNA, 13 bp, Artificial Sequence
  Oligonucleotide for detection of SNP TSC0012186
ccaacacgaaata

SEQ ID NO: 40011 - DNA, 13 bp, Artificial Sequence
  Oligonucleotide for detection of SNP TSC0012186
tattttgtgtcgg

SEQ ID NO: 40012 - DNA, 13 bp, Artificial Sequence
  Oligonucleotide for detection of SNP TSC0012186
ccgacacaaaata

SEQ ID NO: 40013 - DNA, 13 bp, Artificial Sequence
  Oligonucleotide for detection of SNP TSC0012186
tatttcgtgtcgg

SEQ ID NO: 40014 - DNA, 13 bp, Artificial Sequence
  Oligonucleotide for detection of SNP TSC0012186
ccgacacgaaata

SEQ ID NO: 40015 - DNA, 13 bp, Artificial Sequence
  Oligonucleotide for detection of SNP TSC0012186
ttgataggggatg

SEQ ID NO: 40016 - DNA, 13 bp, Artificial Sequence
  Oligonucleotide for detection of SNP TSC0012186
catcccctatcaa

SEQ ID NO: 40017 - DNA, 13 bp, Artificial Sequence
  Oligonucleotide for detection of SNP TSC0012186
ttgatatgggatg

SEQ ID NO: 40018 - DNA, 13 bp, Artificial Sequence
  Oligonucleotide for detection of SNP TSC0012186
catcccatatcaa

SEQ ID NO: 40019 - DNA, 13 bp, Artificial Sequence
  Oligonucleotide for detection of SNP TSC0012186
tcgataggggatg

SEQ ID NO: 40020 - DNA, 13 bp, Artificial Sequence
  Oligonucleotide for detection of SNP TSC0012186
catcccctatcga

SEQ ID NO: 40021 - DNA, 13 bp, Artificial Sequence
  Oligonucleotide for detection of SNP TSC0012186
tcgatatgggatg

SEQ ID NO: 40022 - DNA, 13 bp, Artificial Sequence
  Oligonucleotide for detection of SNP TSC0012186
catcccatatcga

SEQ ID NO: 40023 - DNA, 13 bp, Artificial Sequence
  Oligonucleotide for detection of SNP TSC0012186
ttgatacgggatg

SEQ ID NO: 40024 - DNA, 13 bp, Artificial Sequence
  Oligonucleotide for detection of SNP TSC0012186
catcccgtatcaa

SEQ ID NO: 40025 - DNA, 13 bp, Artificial Sequence
  Oligonucleotide for detection of SNP TSC0012186
tcgatacgggatg

SEQ ID NO: 40026 - DNA, 13 bp, Artificial Sequence
  Oligonucleotide for detection of SNP TSC0012186
catcccgtatcga

SEQ ID NO: 40027 - DNA, 13 bp, Artificial Sequence
  Oligonucleotide for detection of SNP TSC0012187
gtgtgtatgtgta

SEQ ID NO: 40028 - DNA, 13 bp, Artificial Sequence
  Oligonucleotide for detection of SNP TSC0012187
tacacatacacac

SEQ ID NO: 40029 - DNA, 13 bp, Artificial Sequence
  Oligonucleotide for detection of SNP TSC0012187
gtgtgtttgtgta

SEQ ID NO: 40030 - DNA, 13 bp, Artificial Sequence
  Oligonucleotide for detection of SNP TSC0012187
tacacaaacacac

SEQ ID NO: 40031 - DNA, 13 bp, Artificial Sequence
  Oligonucleotide for detection of SNP TSC0012187
tatataagtatay

SEQ ID NO: 40032 - DNA, 13 bp, Artificial Sequence
  Oligonucleotide for detection of SNP TSC0012187
rtatacttatata

SEQ ID NO: 40033 - DNA, 13 bp, Artificial Sequence
  Oligonucleotide for detection of SNP TSC0012188
atggaatttgtta

SEQ ID NO: 40034 - DNA, 13 bp, Artificial Sequence
  Oligonucleotide for detection of SNP TSC0012188
taacaaattccat

SEQ ID NO: 40035 - DNA, 13 bp, Artificial Sequence
  Oligonucleotide for detection of SNP TSC0012188
atggaagttgtta

SEQ ID NO: 40036 - DNA, 13 bp, Artificial Sequence
  Oligonucleotide for detection of SNP TSC0012188
taacaacttccat

SEQ ID NO: 40037 - DNA, 13 bp, Artificial Sequence
  Oligonucleotide for detection of SNP TSC0012188
taataagttttat

SEQ ID NO: 40038 - DNA, 13 bp, Artificial Sequence
  Oligonucleotide for detection of SNP TSC0012188
ataaaacttatta

SEQ ID NO: 40039 - DNA, 13 bp, Artificial Sequence
  Oligonucleotide for detection of SNP TSC0012188
taataatttttat

SEQ ID NO: 40040 - DNA, 13 bp, Artificial Sequence
  Oligonucleotide for detection of SNP TSC0012188
ataaaaattatta

SEQ ID NO: 40041 - DNA, 13 bp, Artificial Sequence
  Oligonucleotide for detection of SNP TSC0012191
atattattgtgta

SEQ ID NO: 40042 - DNA, 13 bp, Artificial Sequence
  Oligonucleotide for detection of SNP TSC0012191
tacacaataatat

SEQ ID NO: 40043 - DNA, 13 bp, Artificial Sequence
  Oligonucleotide for detection of SNP TSC0012191
atattagtgtgta

SEQ ID NO: 40044 - DNA, 13 bp, Artificial Sequence
  Oligonucleotide for detection of SNP TSC0012191
tacacactaatat

SEQ ID NO: 40045 - DNA, 13 bp, Artificial Sequence
  Oligonucleotide for detection of SNP TSC0012191
tatatagtaatgt

SEQ ID NO: 40046 - DNA, 13 bp, Artificial Sequence
  Oligonucleotide for detection of SNP TSC0012191
acattactatata

SEQ ID NO: 40047 - DNA, 13 bp, Artificial Sequence
  Oligonucleotide for detection of SNP TSC0012191
tatatattaatgt

SEQ ID NO: 40048 - DNA, 13 bp, Artificial Sequence
  Oligonucleotide for detection of SNP TSC0012191
acattaatatata

SEQ ID NO: 40049 - DNA, 13 bp, Artificial Sequence
  Oligonucleotide for detection of SNP TSC0012192
tgggggttttttt

SEQ ID NO: 40050 - DNA, 13 bp, Artificial Sequence
  Oligonucleotide for detection of SNP TSC0012192
aaaaaaaccccca

SEQ ID NO: 40051 - DNA, 13 bp, Artificial Sequence
  Oligonucleotide for detection of SNP TSC0012192
tggggggtttttt

SEQ ID NO: 40052 - DNA, 13 bp, Artificial Sequence
  Oligonucleotide for detection of SNP TSC0012192
aaaaaacccccca

SEQ ID NO: 40053 - DNA, 13 bp, Artificial Sequence
  Oligonucleotide for detection of SNP TSC0012192
aaaaaagttttta

SEQ ID NO: 40054 - DNA, 13 bp, Artificial Sequence
  Oligonucleotide for detection of SNP TSC0012192
taaaaactttttt

SEQ ID NO: 40055 - DNA, 13 bp, Artificial Sequence
  Oligonucleotide for detection of SNP TSC0012192
aaaaaatttttta

SEQ ID NO: 40056 - DNA, 13 bp, Artificial Sequence
  Oligonucleotide for detection of SNP TSC0012192
taaaaaatttttt

SEQ ID NO: 40057 - DNA, 13 bp, Artificial Sequence
  Oligonucleotide for detection of SNP TSC0012193
agagttaggtggg

SEQ ID NO: 40058 - DNA, 13 bp, Artificial Sequence
  Oligonucleotide for detection of SNP TSC0012193
cccacctaactct

SEQ ID NO: 40059 - DNA, 13 bp, Artificial Sequence
  Oligonucleotide for detection of SNP TSC0012193
agagttgggtggg

SEQ ID NO: 40060 - DNA, 13 bp, Artificial Sequence
  Oligonucleotide for detection of SNP TSC0012193
cccacccaactct

SEQ ID NO: 40061 - DNA, 13 bp, Artificial Sequence
  Oligonucleotide for detection of SNP TSC0012193
agagtcgggtggg

SEQ ID NO: 40062 - DNA, 13 bp, Artificial Sequence
  Oligonucleotide for detection of SNP TSC0012193
cccacccgactct

SEQ ID NO: 40063 - DNA, 13 bp, Artificial Sequence
  Oligonucleotide for detection of SNP TSC0012194
aggttagttgata

SEQ ID NO: 40064 - DNA, 13 bp, Artificial Sequence
  Oligonucleotide for detection of SNP TSC0012194
tatcaactaacct

SEQ ID NO: 40065 - DNA, 13 bp, Artificial Sequence
  Oligonucleotide for detection of SNP TSC0012194
aggttaattgata

SEQ ID NO: 40066 - DNA, 13 bp, Artificial Sequence
  Oligonucleotide for detection of SNP TSC0012194
tatcaattaacct

SEQ ID NO: 40067 - DNA, 13 bp, Artificial Sequence
  Oligonucleotide for detection of SNP TSC0012195
ggaataaaagttt

SEQ ID NO: 40068 - DNA, 13 bp, Artificial Sequence
  Oligonucleotide for detection of SNP TSC0012195
aaacttttattcc

SEQ ID NO: 40069 - DNA, 13 bp, Artificial Sequence
  Oligonucleotide for detection of SNP TSC0012195
ggaatagaagttt

SEQ ID NO: 40070 - DNA, 13 bp, Artificial Sequence
  Oligonucleotide for detection of SNP TSC0012195
aaacttctattcc

SEQ ID NO: 40071 - DNA, 13 bp, Artificial Sequence
  Oligonucleotide for detection of SNP TSC0012196
ttaggtattttta

SEQ ID NO: 40072 - DNA, 13 bp, Artificial Sequence
  Oligonucleotide for detection of SNP TSC0012196
taaaaatacctaa

SEQ ID NO: 40073 - DNA, 13 bp, Artificial Sequence
  Oligonucleotide for detection of SNP TSC0012196
ttaggtgttttta

SEQ ID NO: 40074 - DNA, 13 bp, Artificial Sequence
  Oligonucleotide for detection of SNP TSC0012196
taaaaacacctaa

SEQ ID NO: 40075 - DNA, 13 bp, Artificial Sequence
  Oligonucleotide for detection of SNP TSC0012196
ttaggcgttttta

SEQ ID NO: 40076 - DNA, 13 bp, Artificial Sequence
  Oligonucleotide for detection of SNP TSC0012196
taaaaacgcctaa

SEQ ID NO: 40077 - DNA, 13 bp, Artificial Sequence
  Oligonucleotide for detection of SNP TSC0012196
taaaaatgtttaa

SEQ ID NO: 40078 - DNA, 13 bp, Artificial Sequence
  Oligonucleotide for detection of SNP TSC0012196
ttaaacattttta

SEQ ID NO: 40079 - DNA, 13 bp, Artificial Sequence
  Oligonucleotide for detection of SNP TSC0012198
gttttgattttay

SEQ ID NO: 40080 - DNA, 13 bp, Artificial Sequence
  Oligonucleotide for detection of SNP TSC0012198
rtaaaatcaaaac

SEQ ID NO: 40081 - DNA, 13 bp, Artificial Sequence
  Oligonucleotide for detection of SNP TSC0012198
gttttgtttttay

SEQ ID NO: 40082 - DNA, 13 bp, Artificial Sequence
  Oligonucleotide for detection of SNP TSC0012198
rtaaaaacaaaac

SEQ ID NO: 40083 - DNA, 13 bp, Artificial Sequence
  Oligonucleotide for detection of SNP TSC0012198
gtggggttaggay

SEQ ID NO: 40084 - DNA, 13 bp, Artificial Sequence
  Oligonucleotide for detection of SNP TSC0012198
rtcctaaccccac

SEQ ID NO: 40085 - DNA, 13 bp, Artificial Sequence
  Oligonucleotide for detection of SNP TSC0012198
gtggggataggay

SEQ ID NO: 40086 - DNA, 13 bp, Artificial Sequence
  Oligonucleotide for detection of SNP TSC0012198
rtcctatccccac

SEQ ID NO: 40087 - DNA, 13 bp, Artificial Sequence
  Oligonucleotide for detection of SNP TSC0012199
aaagttagggttt

SEQ ID NO: 40088 - DNA, 13 bp, Artificial Sequence
  Oligonucleotide for detection of SNP TSC0012199
aaaccctaacttt

SEQ ID NO: 40089 - DNA, 13 bp, Artificial Sequence
  Oligonucleotide for detection of SNP TSC0012199
aaagttggggttt

SEQ ID NO: 40090 - DNA, 13 bp, Artificial Sequence
  Oligonucleotide for detection of SNP TSC0012199
aaaccccaacttt

SEQ ID NO: 40091 - DNA, 13 bp, Artificial Sequence
  Oligonucleotide for detection of SNP TSC0012199
aaagtcggggttt

SEQ ID NO: 40092 - DNA, 13 bp, Artificial Sequence
  Oligonucleotide for detection of SNP TSC0012199
aaaccccgacttt

SEQ ID NO: 40093 - DNA, 13 bp, Artificial Sequence
  Oligonucleotide for detection of SNP TSC0012199
aagttttggtttt

SEQ ID NO: 40094 - DNA, 13 bp, Artificial Sequence
  Oligonucleotide for detection of SNP TSC0012199
aaaaccaaaactt

SEQ ID NO: 40095 - DNA, 13 bp, Artificial Sequence
  Oligonucleotide for detection of SNP TSC0012199
aagtttcggtttt

SEQ ID NO: 40096 - DNA, 13 bp, Artificial Sequence
  Oligonucleotide for detection of SNP TSC0012199
aaaaccgaaactt

SEQ ID NO: 40097 - DNA, 13 bp, Artificial Sequence
  Oligonucleotide for detection of SNP TSC0012200
ttgtaggtttttt

SEQ ID NO: 40098 - DNA, 13 bp, Artificial Sequence
  Oligonucleotide for detection of SNP TSC0012200
aaaaaacctacaa

SEQ ID NO: 40099 - DNA, 13 bp, Artificial Sequence
  Oligonucleotide for detection of SNP TSC0012200
ttgtagatttttt

SEQ ID NO: 40100 - DNA, 13 bp, Artificial Sequence
  Oligonucleotide for detection of SNP TSC0012200
aaaaaatctacaa

SEQ ID NO: 40101 - DNA, 13 bp, Artificial Sequence
  Oligonucleotide for detection of SNP TSC0012200
tcgtaggtttttt

SEQ ID NO: 40102 - DNA, 13 bp, Artificial Sequence
  Oligonucleotide for detection of SNP TSC0012200
aaaaaacctacga

SEQ ID NO: 40103 - DNA, 13 bp, Artificial Sequence
  Oligonucleotide for detection of SNP TSC0012200
tcgtagatttttt

SEQ ID NO: 40104 - DNA, 13 bp, Artificial Sequence
  Oligonucleotide for detection of SNP TSC0012200
aaaaaatctacga

SEQ ID NO: 40105 - DNA, 13 bp, Artificial Sequence
  Oligonucleotide for detection of SNP TSC0012201
ggagtgaatgtaa

SEQ ID NO: 40106 - DNA, 13 bp, Artificial Sequence
  Oligonucleotide for detection of SNP TSC0012201
ttacattcactcc

SEQ ID NO: 40107 - DNA, 13 bp, Artificial Sequence
  Oligonucleotide for detection of SNP TSC0012201
ggagtggatgtaa

SEQ ID NO: 40108 - DNA, 13 bp, Artificial Sequence
  Oligonucleotide for detection of SNP TSC0012201
ttacatccactcc

SEQ ID NO: 40109 - DNA, 13 bp, Artificial Sequence
  Oligonucleotide for detection of SNP TSC0012201
ggagtgaacgtaa

SEQ ID NO: 40110 - DNA, 13 bp, Artificial Sequence
  Oligonucleotide for detection of SNP TSC0012201
ttacgttcactcc

SEQ ID NO: 40111 - DNA, 13 bp, Artificial Sequence
  Oligonucleotide for detection of SNP TSC0012201
ggagtggacgtaa

SEQ ID NO: 40112 - DNA, 13 bp, Artificial Sequence
  Oligonucleotide for detection of SNP TSC0012201
ttacgtccactcc

SEQ ID NO: 40113 - DNA, 13 bp, Artificial Sequence
  Oligonucleotide for detection of SNP TSC0012202
taaaagggaaaga

SEQ ID NO: 40114 - DNA, 13 bp, Artificial Sequence
  Oligonucleotide for detection of SNP TSC0012202
tctttccctttta

SEQ ID NO: 40115 - DNA, 13 bp, Artificial Sequence
  Oligonucleotide for detection of SNP TSC0012202
taaaagagaaaga

SEQ ID NO: 40116 - DNA, 13 bp, Artificial Sequence
  Oligonucleotide for detection of SNP TSC0012202
tctttctctttta

SEQ ID NO: 40117 - DNA, 13 bp, Artificial Sequence
  Oligonucleotide for detection of SNP TSC0012204
tgtattagttgag

SEQ ID NO: 40118 - DNA, 13 bp, Artificial Sequence
  Oligonucleotide for detection of SNP TSC0012204
ctcaactaataca

SEQ ID NO: 40119 - DNA, 13 bp, Artificial Sequence
  Oligonucleotide for detection of SNP TSC0012204
tgtattggttgag

SEQ ID NO: 40120 - DNA, 13 bp, Artificial Sequence
  Oligonucleotide for detection of SNP TSC0012204
ctcaaccaataca

SEQ ID NO: 40121 - DNA, 13 bp, Artificial Sequence
  Oligonucleotide for detection of SNP TSC0012204
tgtatcggttgag

SEQ ID NO: 40122 - DNA, 13 bp, Artificial Sequence
  Oligonucleotide for detection of SNP TSC0012204
ctcaaccgataca

SEQ ID NO: 40123 - DNA, 13 bp, Artificial Sequence
  Oligonucleotide for detection of SNP TSC0012204
tttagttggtgta

SEQ ID NO: 40124 - DNA, 13 bp, Artificial Sequence
  Oligonucleotide for detection of SNP TSC0012204
tacaccaactaaa

SEQ ID NO: 40125 - DNA, 13 bp, Artificial Sequence
  Oligonucleotide for detection of SNP TSC0012204
tttagtcggtgta

SEQ ID NO: 40126 - DNA, 13 bp, Artificial Sequence
  Oligonucleotide for detection of SNP TSC0012204
tacaccgactaaa

SEQ ID NO: 40127 - DNA, 13 bp, Artificial Sequence
  Oligonucleotide for detection of SNP TSC0012205
tttgaatgggagy

SEQ ID NO: 40128 - DNA, 13 bp, Artificial Sequence
  Oligonucleotide for detection of SNP TSC0012205
rctcccattcaaa

SEQ ID NO: 40129 - DNA, 13 bp, Artificial Sequence
  Oligonucleotide for detection of SNP TSC0012205
ttcgaatgggagy

SEQ ID NO: 40130 - DNA, 13 bp, Artificial Sequence
  Oligonucleotide for detection of SNP TSC0012205
rctcccattcgaa

SEQ ID NO: 40131 - DNA, 13 bp, Artificial Sequence
  Oligonucleotide for detection of SNP TSC0012205
tttgaacgggagy

SEQ ID NO: 40132 - DNA, 13 bp, Artificial Sequence
  Oligonucleotide for detection of SNP TSC0012205
rctcccgttcaaa

SEQ ID NO: 40133 - DNA, 13 bp, Artificial Sequence
  Oligonucleotide for detection of SNP TSC0012205
ttcgaacgggagy

SEQ ID NO: 40134 - DNA, 13 bp, Artificial Sequence
  Oligonucleotide for detection of SNP TSC0012205
rctcccgttcgaa

SEQ ID NO: 40135 - DNA, 13 bp, Artificial Sequence
  Oligonucleotide for detection of SNP TSC0012205
gtttttgtttggg

SEQ ID NO: 40136 - DNA, 13 bp, Artificial Sequence
  Oligonucleotide for detection of SNP TSC0012205
cccaaacaaaaac

SEQ ID NO: 40137 - DNA, 13 bp, Artificial Sequence
  Oligonucleotide for detection of SNP TSC0012205
gtttttatttggg

SEQ ID NO: 40138 - DNA, 13 bp, Artificial Sequence
  Oligonucleotide for detection of SNP TSC0012205
cccaaataaaaac

SEQ ID NO: 40139 - DNA, 13 bp, Artificial Sequence
  Oligonucleotide for detection of SNP TSC0012205
gttttcgtttggg

SEQ ID NO: 40140 - DNA, 13 bp, Artificial Sequence
  Oligonucleotide for detection of SNP TSC0012205
cccaaacgaaaac

SEQ ID NO: 40141 - DNA, 13 bp, Artificial Sequence
  Oligonucleotide for detection of SNP TSC0012205
gtttttattcggg

SEQ ID NO: 40142 - DNA, 13 bp, Artificial Sequence
  Oligonucleotide for detection of SNP TSC0012205
cccgaataaaaac

SEQ ID NO: 40143 - DNA, 13 bp, Artificial Sequence
  Oligonucleotide for detection of SNP TSC0012205
gtttttgttcggg

SEQ ID NO: 40144 - DNA, 13 bp, Artificial Sequence
  Oligonucleotide for detection of SNP TSC0012205
cccgaacaaaaac

SEQ ID NO: 40145 - DNA, 13 bp, Artificial Sequence
  Oligonucleotide for detection of SNP TSC0012205
gttttcgttcggg

SEQ ID NO: 40146 - DNA, 13 bp, Artificial Sequence
  Oligonucleotide for detection of SNP TSC0012205
cccgaacgaaaac

SEQ ID NO: 40147 - DNA, 13 bp, Artificial Sequence
  Oligonucleotide for detection of SNP TSC0012206
gagattgtgtgtt

SEQ ID NO: 40148 - DNA, 13 bp, Artificial Sequence
  Oligonucleotide for detection of SNP TSC0012206
aacacacaatctc

SEQ ID NO: 40149 - DNA, 13 bp, Artificial Sequence
  Oligonucleotide for detection of SNP TSC0012206
gagattatgtgtt

SEQ ID NO: 40150 - DNA, 13 bp, Artificial Sequence
  Oligonucleotide for detection of SNP TSC0012206
aacacataatctc

SEQ ID NO: 40151 - DNA, 13 bp, Artificial Sequence
  Oligonucleotide for detection of SNP TSC0012207
tttgtgatttttt

SEQ ID NO: 40152 - DNA, 13 bp, Artificial Sequence
  Oligonucleotide for detection of SNP TSC0012207
aaaaaatcacaaa

SEQ ID NO: 40153 - DNA, 13 bp, Artificial Sequence
  Oligonucleotide for detection of SNP TSC0012207
tttgtggtttttt

SEQ ID NO: 40154 - DNA, 13 bp, Artificial Sequence
  Oligonucleotide for detection of SNP TSC0012207
aaaaaaccacaaa

SEQ ID NO: 40155 - DNA, 13 bp, Artificial Sequence
  Oligonucleotide for detection of SNP TSC0012208
tatagtagggtaa

SEQ ID NO: 40156 - DNA, 13 bp, Artificial Sequence
  Oligonucleotide for detection of SNP TSC0012208
ttaccctactata

SEQ ID NO: 40157 - DNA, 13 bp, Artificial Sequence
  Oligonucleotide for detection of SNP TSC0012208
tatagtggggtaa

SEQ ID NO: 40158 - DNA, 13 bp, Artificial Sequence
  Oligonucleotide for detection of SNP TSC0012208
ttaccccactata

SEQ ID NO: 40159 - DNA, 13 bp, Artificial Sequence
  Oligonucleotide for detection of SNP TSC0012209
ttgaaagttaaga

SEQ ID NO: 40160 - DNA, 13 bp, Artificial Sequence
  Oligonucleotide for detection of SNP TSC0012209
tcttaactttcaa

SEQ ID NO: 40161 - DNA, 13 bp, Artificial Sequence
  Oligonucleotide for detection of SNP TSC0012209
ttgaaatttaaga

SEQ ID NO: 40162 - DNA, 13 bp, Artificial Sequence
  Oligonucleotide for detection of SNP TSC0012209
tcttaaatttcaa

SEQ ID NO: 40163 - DNA, 13 bp, Artificial Sequence
  Oligonucleotide for detection of SNP TSC0012209
ttttagtttttaa

SEQ ID NO: 40164 - DNA, 13 bp, Artificial Sequence
  Oligonucleotide for detection of SNP TSC0012209
ttaaaaactaaaa

SEQ ID NO: 40165 - DNA, 13 bp, Artificial Sequence
  Oligonucleotide for detection of SNP TSC0012209
ttttagattttaa

SEQ ID NO: 40166 - DNA, 13 bp, Artificial Sequence
  Oligonucleotide for detection of SNP TSC0012209
ttaaaatctaaaa

SEQ ID NO: 40167 - DNA, 13 bp, Artificial Sequence
  Oligonucleotide for detection of SNP TSC0012210
atttaggaatata

SEQ ID NO: 40168 - DNA, 13 bp, Artificial Sequence
  Oligonucleotide for detection of SNP TSC0012210
tatattcctaaat

SEQ ID NO: 40169 - DNA, 13 bp, Artificial Sequence
  Oligonucleotide for detection of SNP TSC0012210
atttagaaatata

SEQ ID NO: 40170 - DNA, 13 bp, Artificial Sequence
  Oligonucleotide for detection of SNP TSC0012210
tatatttctaaat

SEQ ID NO: 40171 - DNA, 13 bp, Artificial Sequence
  Oligonucleotide for detection of SNP TSC0012211
ttgttagtaatty

SEQ ID NO: 40172 - DNA, 13 bp, Artificial Sequence
  Oligonucleotide for detection of SNP TSC0012211
raattactaacaa

SEQ ID NO: 40173 - DNA, 13 bp, Artificial Sequence
  Oligonucleotide for detection of SNP TSC0012211
ttgttaataatty

SEQ ID NO: 40174 - DNA, 13 bp, Artificial Sequence
  Oligonucleotide for detection of SNP TSC0012211
raattattaacaa

SEQ ID NO: 40175 - DNA, 13 bp, Artificial Sequence
  Oligonucleotide for detection of SNP TSC0012212
tatatggtttatt

SEQ ID NO: 40176 - DNA, 13 bp, Artificial Sequence
  Oligonucleotide for detection of SNP TSC0012212
aataaaccatata

SEQ ID NO: 40177 - DNA, 13 bp, Artificial Sequence
  Oligonucleotide for detection of SNP TSC0012212
tatatgttttatt

SEQ ID NO: 40178 - DNA, 13 bp, Artificial Sequence
  Oligonucleotide for detection of SNP TSC0012212
aataaaacatata

SEQ ID NO: 40179 - DNA, 13 bp, Artificial Sequence
  Oligonucleotide for detection of SNP TSC0012212
aatgaattatatg

SEQ ID NO: 40180 - DNA, 13 bp, Artificial Sequence
  Oligonucleotide for detection of SNP TSC0012212
catataattcatt

SEQ ID NO: 40181 - DNA, 13 bp, Artificial Sequence
  Oligonucleotide for detection of SNP TSC0012212
aatgaaatatatg

SEQ ID NO: 40182 - DNA, 13 bp, Artificial Sequence
  Oligonucleotide for detection of SNP TSC0012212
catatatttcatt

SEQ ID NO: 40183 - DNA, 13 bp, Artificial Sequence
  Oligonucleotide for detection of SNP TSC0012213
ggaggtatgtagg

SEQ ID NO: 40184 - DNA, 13 bp, Artificial Sequence
  Oligonucleotide for detection of SNP TSC0012213
cctacatacctcc

SEQ ID NO: 40185 - DNA, 13 bp, Artificial Sequence
  Oligonucleotide for detection of SNP TSC0012213
ggaggtgtgtagg

SEQ ID NO: 40186 - DNA, 13 bp, Artificial Sequence
  Oligonucleotide for detection of SNP TSC0012213
cctacacacctcc

SEQ ID NO: 40187 - DNA, 13 bp, Artificial Sequence
  Oligonucleotide for detection of SNP TSC0012213
ggaggcgtgtagg

SEQ ID NO: 40188 - DNA, 13 bp, Artificial Sequence
  Oligonucleotide for detection of SNP TSC0012213
cctacacgcctcc

SEQ ID NO: 40189 - DNA, 13 bp, Artificial Sequence
  Oligonucleotide for detection of SNP TSC0012213
tttgtatgtttty

SEQ ID NO: 40190 - DNA, 13 bp, Artificial Sequence
  Oligonucleotide for detection of SNP TSC0012213
raaaacatacaaa

SEQ ID NO: 40191 - DNA, 13 bp, Artificial Sequence
  Oligonucleotide for detection of SNP TSC0012213
tttgtacgtttty

SEQ ID NO: 40192 - DNA, 13 bp, Artificial Sequence
  Oligonucleotide for detection of SNP TSC0012213
raaaacgtacaaa

SEQ ID NO: 40193 - DNA, 13 bp, Artificial Sequence
  Oligonucleotide for detection of SNP TSC0012218
gttagatgtggta

SEQ ID NO: 40194 - DNA, 13 bp, Artificial Sequence
  Oligonucleotide for detection of SNP TSC0012218
taccacatctaac

SEQ ID NO: 40195 - DNA, 13 bp, Artificial Sequence
  Oligonucleotide for detection of SNP TSC0012218
gttagacgtggta

SEQ ID NO: 40196 - DNA, 13 bp, Artificial Sequence
  Oligonucleotide for detection of SNP TSC0012218
taccacgtctaac

SEQ ID NO: 40197 - DNA, 13 bp, Artificial Sequence
  Oligonucleotide for detection of SNP TSC0012219
tatagttgttgtt

SEQ ID NO: 40198 - DNA, 13 bp, Artificial Sequence
  Oligonucleotide for detection of SNP TSC0012219
aacaacaactata

SEQ ID NO: 40199 - DNA, 13 bp, Artificial Sequence
  Oligonucleotide for detection of SNP TSC0012219
tatagtcgttgtt

SEQ ID NO: 40200 - DNA, 13 bp, Artificial Sequence
  Oligonucleotide for detection of SNP TSC0012219
aacaacgactata

SEQ ID NO: 40201 - DNA, 13 bp, Artificial Sequence
  Oligonucleotide for detection of SNP TSC0012219
agtagtgattata

SEQ ID NO: 40202 - DNA, 13 bp, Artificial Sequence
  Oligonucleotide for detection of SNP TSC0012219
tataatcactact

SEQ ID NO: 40203 - DNA, 13 bp, Artificial Sequence
  Oligonucleotide for detection of SNP TSC0012219
agtagtaattata

SEQ ID NO: 40204 - DNA, 13 bp, Artificial Sequence
  Oligonucleotide for detection of SNP TSC0012219
tataattactact

SEQ ID NO: 40205 - DNA, 13 bp, Artificial Sequence
  Oligonucleotide for detection of SNP TSC0012219
agtagcgattata

SEQ ID NO: 40206 - DNA, 13 bp, Artificial Sequence
  Oligonucleotide for detection of SNP TSC0012219
tataatcgctact

SEQ ID NO: 40207 - DNA, 13 bp, Artificial Sequence
  Oligonucleotide for detection of SNP TSC0012220
aagttaggattag

SEQ ID NO: 40208 - DNA, 13 bp, Artificial Sequence
  Oligonucleotide for detection of SNP TSC0012220
ctaatcctaactt

SEQ ID NO: 40209 - DNA, 13 bp, Artificial Sequence
  Oligonucleotide for detection of SNP TSC0012220
aagttaagattag

SEQ ID NO: 40210 - DNA, 13 bp, Artificial Sequence
  Oligonucleotide for detection of SNP TSC0012220
ctaatcttaactt

SEQ ID NO: 40211 - DNA, 13 bp, Artificial Sequence
  Oligonucleotide for detection of SNP TSC0012221
ttttggtgggtgg

SEQ ID NO: 40212 - DNA, 13 bp, Artificial Sequence
  Oligonucleotide for detection of SNP TSC0012221
ccacccaccaaaa

SEQ ID NO: 40213 - DNA, 13 bp, Artificial Sequence
  Oligonucleotide for detection of SNP TSC0012221
ttttggcgggtgg

SEQ ID NO: 40214 - DNA, 13 bp, Artificial Sequence
  Oligonucleotide for detection of SNP TSC0012221
ccacccgccaaaa

SEQ ID NO: 40215 - DNA, 13 bp, Artificial Sequence
  Oligonucleotide for detection of SNP TSC0012221
ttttggtgggcgg

SEQ ID NO: 40216 - DNA, 13 bp, Artificial Sequence
  Oligonucleotide for detection of SNP TSC0012221
ccgcccaccaaaa

SEQ ID NO: 40217 - DNA, 13 bp, Artificial Sequence
  Oligonucleotide for detection of SNP TSC0012221
ttttggcgggcgg

SEQ ID NO: 40218 - DNA, 13 bp, Artificial Sequence
  Oligonucleotide for detection of SNP TSC0012221
ccgcccgccaaaa

SEQ ID NO: 40219 - DNA, 13 bp, Artificial Sequence
  Oligonucleotide for detection of SNP TSC0012221
ttgtttgttagag

SEQ ID NO: 40220 - DNA, 13 bp, Artificial Sequence
  Oligonucleotide for detection of SNP TSC0012221
ctctaacaaacaa

SEQ ID NO: 40221 - DNA, 13 bp, Artificial Sequence
  Oligonucleotide for detection of SNP TSC0012221
ttgtttattagag

SEQ ID NO: 40222 - DNA, 13 bp, Artificial Sequence
  Oligonucleotide for detection of SNP TSC0012221
ctctaataaacaa

SEQ ID NO: 40223 - DNA, 13 bp, Artificial Sequence
  Oligonucleotide for detection of SNP TSC0012221
tcgtttgttagag

SEQ ID NO: 40224 - DNA, 13 bp, Artificial Sequence
  Oligonucleotide for detection of SNP TSC0012221
ctctaacaaacga

SEQ ID NO: 40225 - DNA, 13 bp, Artificial Sequence
  Oligonucleotide for detection of SNP TSC0012221
tcgtttattagag

SEQ ID NO: 40226 - DNA, 13 bp, Artificial Sequence
  Oligonucleotide for detection of SNP TSC0012221
ctctaataaacga

SEQ ID NO: 40227 - DNA, 13 bp, Artificial Sequence
  Oligonucleotide for detection of SNP TSC0012221
ttgttcgttagag

SEQ ID NO: 40228 - DNA, 13 bp, Artificial Sequence
  Oligonucleotide for detection of SNP TSC0012221
ctctaacgaacaa

SEQ ID NO: 40229 - DNA, 13 bp, Artificial Sequence
  Oligonucleotide for detection of SNP TSC0012221
tcgttcgttagag

SEQ ID NO: 40230 - DNA, 13 bp, Artificial Sequence
  Oligonucleotide for detection of SNP TSC0012221
ctctaacgaacga

SEQ ID NO: 40231 - DNA, 13 bp, Artificial Sequence
  Oligonucleotide for detection of SNP TSC0012222
ttttttatagagy

SEQ ID NO: 40232 - DNA, 13 bp, Artificial Sequence
  Oligonucleotide for detection of SNP TSC0012222
rctctataaaaaa

SEQ ID NO: 40233 - DNA, 13 bp, Artificial Sequence
  Oligonucleotide for detection of SNP TSC0012222
ttttttttagagy

SEQ ID NO: 40234 - DNA, 13 bp, Artificial Sequence
  Oligonucleotide for detection of SNP TSC0012222
rctctaaaaaaaa

SEQ ID NO: 40235 - DNA, 13 bp, Artificial Sequence
  Oligonucleotide for detection of SNP TSC0012222
gttttgtggggaa

SEQ ID NO: 40236 - DNA, 13 bp, Artificial Sequence
  Oligonucleotide for detection of SNP TSC0012222
ttccccacaaaac

SEQ ID NO: 40237 - DNA, 13 bp, Artificial Sequence
  Oligonucleotide for detection of SNP TSC0012222
gttttgaggggaa

SEQ ID NO: 40238 - DNA, 13 bp, Artificial Sequence
  Oligonucleotide for detection of SNP TSC0012222
ttcccctcaaaac

SEQ ID NO: 40239 - DNA, 13 bp, Artificial Sequence
  Oligonucleotide for detection of SNP TSC0012224
aggttttggtaaa

SEQ ID NO: 40240 - DNA, 13 bp, Artificial Sequence
  Oligonucleotide for detection of SNP TSC0012224
tttaccaaaacct

SEQ ID NO: 40241 - DNA, 13 bp, Artificial Sequence
  Oligonucleotide for detection of SNP TSC0012224
aggtttcggtaaa

SEQ ID NO: 40242 - DNA, 13 bp, Artificial Sequence
  Oligonucleotide for detection of SNP TSC0012224
tttaccgaaacct

SEQ ID NO: 40243 - DNA, 13 bp, Artificial Sequence
  Oligonucleotide for detection of SNP TSC0012224
tttgttggagttt

SEQ ID NO: 40244 - DNA, 13 bp, Artificial Sequence
  Oligonucleotide for detection of SNP TSC0012224
aaactccaacaaa

SEQ ID NO: 40245 - DNA, 13 bp, Artificial Sequence
  Oligonucleotide for detection of SNP TSC0012224
tttgttagagttt

SEQ ID NO: 40246 - DNA, 13 bp, Artificial Sequence
  Oligonucleotide for detection of SNP TSC0012224
aaactctaacaaa

SEQ ID NO: 40247 - DNA, 13 bp, Artificial Sequence
  Oligonucleotide for detection of SNP TSC0012224
tttgtcggagttt

SEQ ID NO: 40248 - DNA, 13 bp, Artificial Sequence
  Oligonucleotide for detection of SNP TSC0012224
aaactccgacaaa

SEQ ID NO: 40249 - DNA, 13 bp, Artificial Sequence
  Oligonucleotide for detection of SNP TSC0012225
taaaaaaaaagay

SEQ ID NO: 40250 - DNA, 13 bp, Artificial Sequence
  Oligonucleotide for detection of SNP TSC0012225
rtcttttttttta

SEQ ID NO: 40251 - DNA, 13 bp, Artificial Sequence
  Oligonucleotide for detection of SNP TSC0012225
taaaaataaagay

SEQ ID NO: 40252 - DNA, 13 bp, Artificial Sequence
  Oligonucleotide for detection of SNP TSC0012225
rtctttattttta

SEQ ID NO: 40253 - DNA, 13 bp, Artificial Sequence
  Oligonucleotide for detection of SNP TSC0012226
ggggtaattgtta

SEQ ID NO: 40254 - DNA, 13 bp, Artificial Sequence
  Oligonucleotide for detection of SNP TSC0012226
taacaattacccc

SEQ ID NO: 40255 - DNA, 13 bp, Artificial Sequence
  Oligonucleotide for detection of SNP TSC0012226
ggggtatttgtta

SEQ ID NO: 40256 - DNA, 13 bp, Artificial Sequence
  Oligonucleotide for detection of SNP TSC0012226
taacaaatacccc

SEQ ID NO: 40257 - DNA, 13 bp, Artificial Sequence
  Oligonucleotide for detection of SNP TSC0012226
tggtagttgttty

SEQ ID NO: 40258 - DNA, 13 bp, Artificial Sequence
  Oligonucleotide for detection of SNP TSC0012226
raaacaactacca

SEQ ID NO: 40259 - DNA, 13 bp, Artificial Sequence
  Oligonucleotide for detection of SNP TSC0012226
tggtagatgttty

SEQ ID NO: 40260 - DNA, 13 bp, Artificial Sequence
  Oligonucleotide for detection of SNP TSC0012226
raaacatctacca

SEQ ID NO: 40261 - DNA, 13 bp, Artificial Sequence
  Oligonucleotide for detection of SNP TSC0012230
ttttttatttagt

SEQ ID NO: 40262 - DNA, 13 bp, Artificial Sequence
  Oligonucleotide for detection of SNP TSC0012230
actaaataaaaaa

SEQ ID NO: 40263 - DNA, 13 bp, Artificial Sequence
  Oligonucleotide for detection of SNP TSC0012230
ttttttgtttagt

SEQ ID NO: 40264 - DNA, 13 bp, Artificial Sequence
  Oligonucleotide for detection of SNP TSC0012230
actaaacaaaaaa

SEQ ID NO: 40265 - DNA, 13 bp, Artificial Sequence
  Oligonucleotide for detection of SNP TSC0012231
tgttagtgataag

SEQ ID NO: 40266 - DNA, 13 bp, Artificial Sequence
  Oligonucleotide for detection of SNP TSC0012231
cttatcactaaca

SEQ ID NO: 40267 - DNA, 13 bp, Artificial Sequence
  Oligonucleotide for detection of SNP TSC0012231
tgttagcgataag

SEQ ID NO: 40268 - DNA, 13 bp, Artificial Sequence
  Oligonucleotide for detection of SNP TSC0012231
cttatcgctaaca

SEQ ID NO: 40269 - DNA, 13 bp, Artificial Sequence
  Oligonucleotide for detection of SNP TSC0012232
gtagagattttat

SEQ ID NO: 40270 - DNA, 13 bp, Artificial Sequence
  Oligonucleotide for detection of SNP TSC0012232
ataaaatctctac

SEQ ID NO: 40271 - DNA, 13 bp, Artificial Sequence
  Oligonucleotide for detection of SNP TSC0012232
gtagagtttttat

SEQ ID NO: 40272 - DNA, 13 bp, Artificial Sequence
  Oligonucleotide for detection of SNP TSC0012232
ataaaaactctac

SEQ ID NO: 40273 - DNA, 13 bp, Artificial Sequence
  Oligonucleotide for detection of SNP TSC0012232
atgaggtttttgy

SEQ ID NO: 40274 - DNA, 13 bp, Artificial Sequence
  Oligonucleotide for detection of SNP TSC0012232
rcaaaaacctcat

SEQ ID NO: 40275 - DNA, 13 bp, Artificial Sequence
  Oligonucleotide for detection of SNP TSC0012232
atgagggttttgy

SEQ ID NO: 40276 - DNA, 13 bp, Artificial Sequence
  Oligonucleotide for detection of SNP TSC0012232
rcaaaaccctcat

SEQ ID NO: 40277 - DNA, 13 bp, Artificial Sequence
  Oligonucleotide for detection of SNP TSC0012233
attgatgtgttta

SEQ ID NO: 40278 - DNA, 13 bp, Artificial Sequence
  Oligonucleotide for detection of SNP TSC0012233
taaacacatcaat

SEQ ID NO: 40279 - DNA, 13 bp, Artificial Sequence
  Oligonucleotide for detection of SNP TSC0012233
attgatttgttta

SEQ ID NO: 40280 - DNA, 13 bp, Artificial Sequence
  Oligonucleotide for detection of SNP TSC0012233
taaacaaatcaat

SEQ ID NO: 40281 - DNA, 13 bp, Artificial Sequence
  Oligonucleotide for detection of SNP TSC0012233
attgacgtgttta

SEQ ID NO: 40282 - DNA, 13 bp, Artificial Sequence
  Oligonucleotide for detection of SNP TSC0012233
taaacacgtcaat

SEQ ID NO: 40283 - DNA, 13 bp, Artificial Sequence
  Oligonucleotide for detection of SNP TSC0012233
taagtatgttagt

SEQ ID NO: 40284 - DNA, 13 bp, Artificial Sequence
  Oligonucleotide for detection of SNP TSC0012233
actaacatactta

SEQ ID NO: 40285 - DNA, 13 bp, Artificial Sequence
  Oligonucleotide for detection of SNP TSC0012233
taagtaagttagt

SEQ ID NO: 40286 - DNA, 13 bp, Artificial Sequence
  Oligonucleotide for detection of SNP TSC0012233
actaacttactta

SEQ ID NO: 40287 - DNA, 13 bp, Artificial Sequence
  Oligonucleotide for detection of SNP TSC0012233
taagtacgttagt

SEQ ID NO: 40288 - DNA, 13 bp, Artificial Sequence
  Oligonucleotide for detection of SNP TSC0012233
actaacgtactta

SEQ ID NO: 40289 - DNA, 13 bp, Artificial Sequence
  Oligonucleotide for detection of SNP TSC0012235
ttttagaatggga

SEQ ID NO: 40290 - DNA, 13 bp, Artificial Sequence
  Oligonucleotide for detection of SNP TSC0012235
tcccattctaaaa

SEQ ID NO: 40291 - DNA, 13 bp, Artificial Sequence
  Oligonucleotide for detection of SNP TSC0012235
ttttaggatggga

SEQ ID NO: 40292 - DNA, 13 bp, Artificial Sequence
  Oligonucleotide for detection of SNP TSC0012235
tcccatcctaaaa

SEQ ID NO: 40293 - DNA, 13 bp, Artificial Sequence
  Oligonucleotide for detection of SNP TSC0012236
gaggtatgaggat

SEQ ID NO: 40294 - DNA, 13 bp, Artificial Sequence
  Oligonucleotide for detection of SNP TSC0012236
atcctcatacctc

SEQ ID NO: 40295 - DNA, 13 bp, Artificial Sequence
  Oligonucleotide for detection of SNP TSC0012236
gaggtacgaggat

SEQ ID NO: 40296 - DNA, 13 bp, Artificial Sequence
  Oligonucleotide for detection of SNP TSC0012236
atcctcgtacctc

SEQ ID NO: 40297 - DNA, 13 bp, Artificial Sequence
  Oligonucleotide for detection of SNP TSC0012236
atttttgtgttty

SEQ ID NO: 40298 - DNA, 13 bp, Artificial Sequence
  Oligonucleotide for detection of SNP TSC0012236
raaacacaaaaat

SEQ ID NO: 40299 - DNA, 13 bp, Artificial Sequence
  Oligonucleotide for detection of SNP TSC0012236
atttttatgttty

SEQ ID NO: 40300 - DNA, 13 bp, Artificial Sequence
  Oligonucleotide for detection of SNP TSC0012236
raaacataaaaat

SEQ ID NO: 40301 - DNA, 13 bp, Artificial Sequence
  Oligonucleotide for detection of SNP TSC0012236
attttcgtgttty

SEQ ID NO: 40302 - DNA, 13 bp, Artificial Sequence
  Oligonucleotide for detection of SNP TSC0012236
raaacacgaaaat

SEQ ID NO: 40303 - DNA, 13 bp, Artificial Sequence
  Oligonucleotide for detection of SNP TSC0012237
gttataattaaaa

SEQ ID NO: 40304 - DNA, 13 bp, Artificial Sequence
  Oligonucleotide for detection of SNP TSC0012237
ttttaattataac

SEQ ID NO: 40305 - DNA, 13 bp, Artificial Sequence
  Oligonucleotide for detection of SNP TSC0012237
gttatagttaaaa

SEQ ID NO: 40306 - DNA, 13 bp, Artificial Sequence
  Oligonucleotide for detection of SNP TSC0012237
ttttaactataac

SEQ ID NO: 40307 - DNA, 13 bp, Artificial Sequence
  Oligonucleotide for detection of SNP TSC0012238
agaattatttgaa

SEQ ID NO: 40308 - DNA, 13 bp, Artificial Sequence
  Oligonucleotide for detection of SNP TSC0012238
ttcaaataattct

SEQ ID NO: 40309 - DNA, 13 bp, Artificial Sequence
  Oligonucleotide for detection of SNP TSC0012239
tagtttatgagag

SEQ ID NO: 40310 - DNA, 13 bp, Artificial Sequence
  Oligonucleotide for detection of SNP TSC0012239
ctctcataaacta

SEQ ID NO: 40311 - DNA, 13 bp, Artificial Sequence
  Oligonucleotide for detection of SNP TSC0012239
tagtttgtgagag

SEQ ID NO: 40312 - DNA, 13 bp, Artificial Sequence
  Oligonucleotide for detection of SNP TSC0012239
ctctcacaaacta

SEQ ID NO: 40313 - DNA, 13 bp, Artificial Sequence
  Oligonucleotide for detection of SNP TSC0012239
tagttcgtgagag

SEQ ID NO: 40314 - DNA, 13 bp, Artificial Sequence
  Oligonucleotide for detection of SNP TSC0012239
ctctcacgaacta

SEQ ID NO: 40315 - DNA, 13 bp, Artificial Sequence
  Oligonucleotide for detection of SNP TSC0012239
tttttatggattg

SEQ ID NO: 40316 - DNA, 13 bp, Artificial Sequence
  Oligonucleotide for detection of SNP TSC0012239
caatccataaaaa

SEQ ID NO: 40317 - DNA, 13 bp, Artificial Sequence
  Oligonucleotide for detection of SNP TSC0012239
tttttacggattg

SEQ ID NO: 40318 - DNA, 13 bp, Artificial Sequence
  Oligonucleotide for detection of SNP TSC0012239
caatccgtaaaaa

SEQ ID NO: 40319 - DNA, 13 bp, Artificial Sequence
  Oligonucleotide for detection of SNP TSC0012240
aaatttatagata

SEQ ID NO: 40320 - DNA, 13 bp, Artificial Sequence
  Oligonucleotide for detection of SNP TSC0012240
tatctataaattt

SEQ ID NO: 40321 - DNA, 13 bp, Artificial Sequence
  Oligonucleotide for detection of SNP TSC0012240
aaatttgtagata

SEQ ID NO: 40322 - DNA, 13 bp, Artificial Sequence
  Oligonucleotide for detection of SNP TSC0012240
tatctacaaattt

SEQ ID NO: 40323 - DNA, 13 bp, Artificial Sequence
  Oligonucleotide for detection of SNP TSC0012240
aaattcgtagata

SEQ ID NO: 40324 - DNA, 13 bp, Artificial Sequence
  Oligonucleotide for detection of SNP TSC0012240
tatctacgaattt

SEQ ID NO: 40325 - DNA, 13 bp, Artificial Sequence
  Oligonucleotide for detection of SNP TSC0012240
tatttatggattt

SEQ ID NO: 40326 - DNA, 13 bp, Artificial Sequence
  Oligonucleotide for detection of SNP TSC0012240
aaatccataaata

SEQ ID NO: 40327 - DNA, 13 bp, Artificial Sequence
  Oligonucleotide for detection of SNP TSC0012240
tatttacggattt

SEQ ID NO: 40328 - DNA, 13 bp, Artificial Sequence
  Oligonucleotide for detection of SNP TSC0012240
aaatccgtaaata

SEQ ID NO: 40329 - DNA, 13 bp, Artificial Sequence
  Oligonucleotide for detection of SNP TSC0012241
gtttatattagaa

SEQ ID NO: 40330 - DNA, 13 bp, Artificial Sequence
  Oligonucleotide for detection of SNP TSC0012241
ttctaatataaac

SEQ ID NO: 40331 - DNA, 13 bp, Artificial Sequence
  Oligonucleotide for detection of SNP TSC0012241
gtttatgttagaa

SEQ ID NO: 40332 - DNA, 13 bp, Artificial Sequence
  Oligonucleotide for detection of SNP TSC0012241
ttctaacataaac

SEQ ID NO: 40333 - DNA, 13 bp, Artificial Sequence
  Oligonucleotide for detection of SNP TSC0012244
taggaggattatt

SEQ ID NO: 40334 - DNA, 13 bp, Artificial Sequence
  Oligonucleotide for detection of SNP TSC0012244
aataatcctccta

SEQ ID NO: 40335 - DNA, 13 bp, Artificial Sequence
  Oligonucleotide for detection of SNP TSC0012244
taggagtattatt

SEQ ID NO: 40336 - DNA, 13 bp, Artificial Sequence
  Oligonucleotide for detection of SNP TSC0012244
aataatactccta

SEQ ID NO: 40337 - DNA, 13 bp, Artificial Sequence
  Oligonucleotide for detection of SNP TSC0012244
agtgatttttttg

SEQ ID NO: 40338 - DNA, 13 bp, Artificial Sequence
  Oligonucleotide for detection of SNP TSC0012244
caaaaaaatcact

SEQ ID NO: 40339 - DNA, 13 bp, Artificial Sequence
  Oligonucleotide for detection of SNP TSC0012244
agtgatatttttg

SEQ ID NO: 40340 - DNA, 13 bp, Artificial Sequence
  Oligonucleotide for detection of SNP TSC0012244
caaaaatatcact

SEQ ID NO: 40341 - DNA, 13 bp, Artificial Sequence
  Oligonucleotide for detection of SNP TSC0012245
atgtagattagta

SEQ ID NO: 40342 - DNA, 13 bp, Artificial Sequence
  Oligonucleotide for detection of SNP TSC0012245
tactaatctacat

SEQ ID NO: 40343 - DNA, 13 bp, Artificial Sequence
  Oligonucleotide for detection of SNP TSC0012245
atgtagtttagta

SEQ ID NO: 40344 - DNA, 13 bp, Artificial Sequence
  Oligonucleotide for detection of SNP TSC0012245
tactaaactacat

SEQ ID NO: 40345 - DNA, 13 bp, Artificial Sequence
  Oligonucleotide for detection of SNP TSC0012245
acgtagattagta

SEQ ID NO: 40346 - DNA, 13 bp, Artificial Sequence
  Oligonucleotide for detection of SNP TSC0012245
tactaatctacgt

SEQ ID NO: 40347 - DNA, 13 bp, Artificial Sequence
  Oligonucleotide for detection of SNP TSC0012245
acgtagtttagta

SEQ ID NO: 40348 - DNA, 13 bp, Artificial Sequence
  Oligonucleotide for detection of SNP TSC0012245
tactaaactacgt

SEQ ID NO: 40349 - DNA, 13 bp, Artificial Sequence
  Oligonucleotide for detection of SNP TSC0012245
tattaatttatgt

SEQ ID NO: 40350 - DNA, 13 bp, Artificial Sequence
  Oligonucleotide for detection of SNP TSC0012245
acataaattaata

SEQ ID NO: 40351 - DNA, 13 bp, Artificial Sequence
  Oligonucleotide for detection of SNP TSC0012245
tattaagttatgt

SEQ ID NO: 40352 - DNA, 13 bp, Artificial Sequence
  Oligonucleotide for detection of SNP TSC0012245
acataacttaata

SEQ ID NO: 40353 - DNA, 13 bp, Artificial Sequence
  Oligonucleotide for detection of SNP TSC0012245
tattaatttacgt

SEQ ID NO: 40354 - DNA, 13 bp, Artificial Sequence
  Oligonucleotide for detection of SNP TSC0012245
acgtaaattaata

SEQ ID NO: 40355 - DNA, 13 bp, Artificial Sequence
  Oligonucleotide for detection of SNP TSC0012245
tattaagttacgt

SEQ ID NO: 40356 - DNA, 13 bp, Artificial Sequence
  Oligonucleotide for detection of SNP TSC0012245
acgtaacttaata

SEQ ID NO: 40357 - DNA, 13 bp, Artificial Sequence
  Oligonucleotide for detection of SNP TSC0012248
taatgttgtagga

SEQ ID NO: 40358 - DNA, 13 bp, Artificial Sequence
  Oligonucleotide for detection of SNP TSC0012248
tcctacaacatta

SEQ ID NO: 40359 - DNA, 13 bp, Artificial Sequence
  Oligonucleotide for detection of SNP TSC0012248
taatgtcgtagga

SEQ ID NO: 40360 - DNA, 13 bp, Artificial Sequence
  Oligonucleotide for detection of SNP TSC0012248
tcctacgacatta

SEQ ID NO: 40361 - DNA, 13 bp, Artificial Sequence
  Oligonucleotide for detection of SNP TSC0012248
ttttatggtatta

SEQ ID NO: 40362 - DNA, 13 bp, Artificial Sequence
  Oligonucleotide for detection of SNP TSC0012248
taataccataaaa

SEQ ID NO: 40363 - DNA, 13 bp, Artificial Sequence
  Oligonucleotide for detection of SNP TSC0012248
ttttatagtatta

SEQ ID NO: 40364 - DNA, 13 bp, Artificial Sequence
  Oligonucleotide for detection of SNP TSC0012248
taatactataaaa

SEQ ID NO: 40365 - DNA, 13 bp, Artificial Sequence
  Oligonucleotide for detection of SNP TSC0012248
ttttacggtatta

SEQ ID NO: 40366 - DNA, 13 bp, Artificial Sequence
  Oligonucleotide for detection of SNP TSC0012248
taataccgtaaaa

SEQ ID NO: 40367 - DNA, 13 bp, Artificial Sequence
  Oligonucleotide for detection of SNP TSC0012249
gttgtttgagata

SEQ ID NO: 40368 - DNA, 13 bp, Artificial Sequence
  Oligonucleotide for detection of SNP TSC0012249
tatctcaaacaac

SEQ ID NO: 40369 - DNA, 13 bp, Artificial Sequence
  Oligonucleotide for detection of SNP TSC0012249
gttgttcgagata

SEQ ID NO: 40370 - DNA, 13 bp, Artificial Sequence
  Oligonucleotide for detection of SNP TSC0012249
tatctcgaacaac

SEQ ID NO: 40371 - DNA, 13 bp, Artificial Sequence
  Oligonucleotide for detection of SNP TSC0012249
tgttttgggtagy

SEQ ID NO: 40372 - DNA, 13 bp, Artificial Sequence
  Oligonucleotide for detection of SNP TSC0012249
rctacccaaaaca

SEQ ID NO: 40373 - DNA, 13 bp, Artificial Sequence
  Oligonucleotide for detection of SNP TSC0012249
tgttttaggtagy

SEQ ID NO: 40374 - DNA, 13 bp, Artificial Sequence
  Oligonucleotide for detection of SNP TSC0012249
rctacctaaaaca

SEQ ID NO: 40375 - DNA, 13 bp, Artificial Sequence
  Oligonucleotide for detection of SNP TSC0012249
tgtttcgggtagy

SEQ ID NO: 40376 - DNA, 13 bp, Artificial Sequence
  Oligonucleotide for detection of SNP TSC0012249
rctacccgaaaca

SEQ ID NO: 40377 - DNA, 13 bp, Artificial Sequence
  Oligonucleotide for detection of SNP TSC0012250
atatagatttata

SEQ ID NO: 40378 - DNA, 13 bp, Artificial Sequence
  Oligonucleotide for detection of SNP TSC0012250
tataaatctatat

SEQ ID NO: 40379 - DNA, 13 bp, Artificial Sequence
  Oligonucleotide for detection of SNP TSC0012250
atataggtttata

SEQ ID NO: 40380 - DNA, 13 bp, Artificial Sequence
  Oligonucleotide for detection of SNP TSC0012250
tataaacctatat

SEQ ID NO: 40381 - DNA, 13 bp, Artificial Sequence
  Oligonucleotide for detection of SNP TSC0012251
taatgtatttttt

SEQ ID NO: 40382 - DNA, 13 bp, Artificial Sequence
  Oligonucleotide for detection of SNP TSC0012251
aaaaaatacatta

SEQ ID NO: 40383 - DNA, 13 bp, Artificial Sequence
  Oligonucleotide for detection of SNP TSC0012251
taatgtgtttttt

SEQ ID NO: 40384 - DNA, 13 bp, Artificial Sequence
  Oligonucleotide for detection of SNP TSC0012251
aaaaaacacatta

SEQ ID NO: 40385 - DNA, 13 bp, Artificial Sequence
  Oligonucleotide for detection of SNP TSC0012251
taatgcgtttttt

SEQ ID NO: 40386 - DNA, 13 bp, Artificial Sequence
  Oligonucleotide for detection of SNP TSC0012251
aaaaaacgcatta

SEQ ID NO: 40387 - DNA, 13 bp, Artificial Sequence
  Oligonucleotide for detection of SNP TSC0012251
agaaagtgtatta

SEQ ID NO: 40388 - DNA, 13 bp, Artificial Sequence
  Oligonucleotide for detection of SNP TSC0012251
taatacactttct

SEQ ID NO: 40389 - DNA, 13 bp, Artificial Sequence
  Oligonucleotide for detection of SNP TSC0012251
agaaagcgtatta

SEQ ID NO: 40390 - DNA, 13 bp, Artificial Sequence
  Oligonucleotide for detection of SNP TSC0012251
taatacgctttct

SEQ ID NO: 40391 - DNA, 13 bp, Artificial Sequence
  Oligonucleotide for detection of SNP TSC0012253
atttttagaaagt

SEQ ID NO: 40392 - DNA, 13 bp, Artificial Sequence
  Oligonucleotide for detection of SNP TSC0012253
actttctaaaaat

SEQ ID NO: 40393 - DNA, 13 bp, Artificial Sequence
  Oligonucleotide for detection of SNP TSC0012253
atttttggaaagt

SEQ ID NO: 40394 - DNA, 13 bp, Artificial Sequence
  Oligonucleotide for detection of SNP TSC0012253
actttccaaaaat

SEQ ID NO: 40395 - DNA, 13 bp, Artificial Sequence
  Oligonucleotide for detection of SNP TSC0012253
attttcggaaagt

SEQ ID NO: 40396 - DNA, 13 bp, Artificial Sequence
  Oligonucleotide for detection of SNP TSC0012253
actttccgaaaat

SEQ ID NO: 40397 - DNA, 13 bp, Artificial Sequence
  Oligonucleotide for detection of SNP TSC0012253
attttttgagggt

SEQ ID NO: 40398 - DNA, 13 bp, Artificial Sequence
  Oligonucleotide for detection of SNP TSC0012253
accctcaaaaaat

SEQ ID NO: 40399 - DNA, 13 bp, Artificial Sequence
  Oligonucleotide for detection of SNP TSC0012253
atttttcgagggt

SEQ ID NO: 40400 - DNA, 13 bp, Artificial Sequence
  Oligonucleotide for detection of SNP TSC0012253
accctcgaaaaat

SEQ ID NO: 40401 - DNA, 13 bp, Artificial Sequence
  Oligonucleotide for detection of SNP TSC0012254
taatttagttgat

SEQ ID NO: 40402 - DNA, 13 bp, Artificial Sequence
  Oligonucleotide for detection of SNP TSC0012254
atcaactaaatta

SEQ ID NO: 40403 - DNA, 13 bp, Artificial Sequence
  Oligonucleotide for detection of SNP TSC0012254
taatttggttgat

SEQ ID NO: 40404 - DNA, 13 bp, Artificial Sequence
  Oligonucleotide for detection of SNP TSC0012254
atcaaccaaatta

SEQ ID NO: 40405 - DNA, 13 bp, Artificial Sequence
  Oligonucleotide for detection of SNP TSC0012254
taattcggttgat

SEQ ID NO: 40406 - DNA, 13 bp, Artificial Sequence
  Oligonucleotide for detection of SNP TSC0012254
atcaaccgaatta

SEQ ID NO: 40407 - DNA, 13 bp, Artificial Sequence
  Oligonucleotide for detection of SNP TSC0012254
attaattgaattg

SEQ ID NO: 40408 - DNA, 13 bp, Artificial Sequence
  Oligonucleotide for detection of SNP TSC0012254
caattcaattaat

SEQ ID NO: 40409 - DNA, 13 bp, Artificial Sequence
  Oligonucleotide for detection of SNP TSC0012254
attaatcgaattg

SEQ ID NO: 40410 - DNA, 13 bp, Artificial Sequence
  Oligonucleotide for detection of SNP TSC0012254
caattcgattaat

SEQ ID NO: 40411 - DNA, 13 bp, Artificial Sequence
  Oligonucleotide for detection of SNP TSC0012255
ggtatgagagggt

SEQ ID NO: 40412 - DNA, 13 bp, Artificial Sequence
  Oligonucleotide for detection of SNP TSC0012255
accctctcatacc

SEQ ID NO: 40413 - DNA, 13 bp, Artificial Sequence
  Oligonucleotide for detection of SNP TSC0012255
ggtatgggagggt

SEQ ID NO: 40414 - DNA, 13 bp, Artificial Sequence
  Oligonucleotide for detection of SNP TSC0012255
accctcccatacc

SEQ ID NO: 40415 - DNA, 13 bp, Artificial Sequence
  Oligonucleotide for detection of SNP TSC0012255
ggtacgagagggt

SEQ ID NO: 40416 - DNA, 13 bp, Artificial Sequence
  Oligonucleotide for detection of SNP TSC0012255
accctctcgtacc

SEQ ID NO: 40417 - DNA, 13 bp, Artificial Sequence
  Oligonucleotide for detection of SNP TSC0012255
ggtacgggagggt

SEQ ID NO: 40418 - DNA, 13 bp, Artificial Sequence
  Oligonucleotide for detection of SNP TSC0012255
accctcccgtacc

SEQ ID NO: 40419 - DNA, 13 bp, Artificial Sequence
  Oligonucleotide for detection of SNP TSC0012260
aaggataggttag

SEQ ID NO: 40420 - DNA, 13 bp, Artificial Sequence
  Oligonucleotide for detection of SNP TSC0012260
ctaacctatcctt

SEQ ID NO: 40421 - DNA, 13 bp, Artificial Sequence
  Oligonucleotide for detection of SNP TSC0012260
aaggattggttag

SEQ ID NO: 40422 - DNA, 13 bp, Artificial Sequence
  Oligonucleotide for detection of SNP TSC0012260
ctaaccaatcctt

SEQ ID NO: 40423 - DNA, 13 bp, Artificial Sequence
  Oligonucleotide for detection of SNP TSC0012260
ttaatttattttt

SEQ ID NO: 40424 - DNA, 13 bp, Artificial Sequence
  Oligonucleotide for detection of SNP TSC0012260
aaaaataaattaa

SEQ ID NO: 40425 - DNA, 13 bp, Artificial Sequence
  Oligonucleotide for detection of SNP TSC0012260
ttaattaattttt

SEQ ID NO: 40426 - DNA, 13 bp, Artificial Sequence
  Oligonucleotide for detection of SNP TSC0012260
aaaaattaattaa

SEQ ID NO: 40427 - DNA, 13 bp, Artificial Sequence
  Oligonucleotide for detection of SNP TSC0012261
ttttgtgggatag

SEQ ID NO: 40428 - DNA, 13 bp, Artificial Sequence
  Oligonucleotide for detection of SNP TSC0012261
ctatcccacaaaa

SEQ ID NO: 40429 - DNA, 13 bp, Artificial Sequence
  Oligonucleotide for detection of SNP TSC0012261
ttttgtaggatag

SEQ ID NO: 40430 - DNA, 13 bp, Artificial Sequence
  Oligonucleotide for detection of SNP TSC0012261
ctatcctacaaaa

SEQ ID NO: 40431 - DNA, 13 bp, Artificial Sequence
  Oligonucleotide for detection of SNP TSC0012264
tgtttaggttgga

SEQ ID NO: 40432 - DNA, 13 bp, Artificial Sequence
  Oligonucleotide for detection of SNP TSC0012264
tccaacctaaaca

SEQ ID NO: 40433 - DNA, 13 bp, Artificial Sequence
  Oligonucleotide for detection of SNP TSC0012264
tgtttatgttgga

SEQ ID NO: 40434 - DNA, 13 bp, Artificial Sequence
  Oligonucleotide for detection of SNP TSC0012264
tccaacataaaca

SEQ ID NO: 40435 - DNA, 13 bp, Artificial Sequence
  Oligonucleotide for detection of SNP TSC0012264
tttagtttgggta

SEQ ID NO: 40436 - DNA, 13 bp, Artificial Sequence
  Oligonucleotide for detection of SNP TSC0012264
tacccaaactaaa

SEQ ID NO: 40437 - DNA, 13 bp, Artificial Sequence
  Oligonucleotide for detection of SNP TSC0012264
tttagtatgggta

SEQ ID NO: 40438 - DNA, 13 bp, Artificial Sequence
  Oligonucleotide for detection of SNP TSC0012264
tacccatactaaa

SEQ ID NO: 40439 - DNA, 13 bp, Artificial Sequence
  Oligonucleotide for detection of SNP TSC0012265
tttttaggtttaa

SEQ ID NO: 40440 - DNA, 13 bp, Artificial Sequence
  Oligonucleotide for detection of SNP TSC0012265
ttaaacctaaaaa

SEQ ID NO: 40441 - DNA, 13 bp, Artificial Sequence
  Oligonucleotide for detection of SNP TSC0012265
tttttatgtttaa

SEQ ID NO: 40442 - DNA, 13 bp, Artificial Sequence
  Oligonucleotide for detection of SNP TSC0012265
ttaaacataaaaa

SEQ ID NO: 40443 - DNA, 13 bp, Artificial Sequence
  Oligonucleotide for detection of SNP TSC0012265
ttgaatatgggag

SEQ ID NO: 40444 - DNA, 13 bp, Artificial Sequence
  Oligonucleotide for detection of SNP TSC0012265
ctcccatattcaa

SEQ ID NO: 40445 - DNA, 13 bp, Artificial Sequence
  Oligonucleotide for detection of SNP TSC0012266
agttggtgggaag

SEQ ID NO: 40446 - DNA, 13 bp, Artificial Sequence
  Oligonucleotide for detection of SNP TSC0012266
cttcccaccaact

SEQ ID NO: 40447 - DNA, 13 bp, Artificial Sequence
  Oligonucleotide for detection of SNP TSC0012266
agttggcgggaag

SEQ ID NO: 40448 - DNA, 13 bp, Artificial Sequence
  Oligonucleotide for detection of SNP TSC0012266
cttcccgccaact

SEQ ID NO: 40449 - DNA, 13 bp, Artificial Sequence
  Oligonucleotide for detection of SNP TSC0012266
ttttttgttaatt

SEQ ID NO: 40450 - DNA, 13 bp, Artificial Sequence
  Oligonucleotide for detection of SNP TSC0012266
aattaacaaaaaa

SEQ ID NO: 40451 - DNA, 13 bp, Artificial Sequence
  Oligonucleotide for detection of SNP TSC0012266
ttttttattaatt

SEQ ID NO: 40452 - DNA, 13 bp, Artificial Sequence
  Oligonucleotide for detection of SNP TSC0012266
aattaataaaaaa

SEQ ID NO: 40453 - DNA, 13 bp, Artificial Sequence
  Oligonucleotide for detection of SNP TSC0012266
tttttcgttaatt

SEQ ID NO: 40454 - DNA, 13 bp, Artificial Sequence
  Oligonucleotide for detection of SNP TSC0012266
aattaacgaaaaa

SEQ ID NO: 40455 - DNA, 13 bp, Artificial Sequence
  Oligonucleotide for detection of SNP TSC0012267
tatttttggtgat

SEQ ID NO: 40456 - DNA, 13 bp, Artificial Sequence
  Oligonucleotide for detection of SNP TSC0012267
atcaccaaaaata

SEQ ID NO: 40457 - DNA, 13 bp, Artificial Sequence
  Oligonucleotide for detection of SNP TSC0012267
tattttcggtgat

SEQ ID NO: 40458 - DNA, 13 bp, Artificial Sequence
  Oligonucleotide for detection of SNP TSC0012267
atcaccgaaaata

SEQ ID NO: 40459 - DNA, 13 bp, Artificial Sequence
  Oligonucleotide for detection of SNP TSC0012267
attattgggaata

SEQ ID NO: 40460 - DNA, 13 bp, Artificial Sequence
  Oligonucleotide for detection of SNP TSC0012267
tattcccaataat

SEQ ID NO: 40461 - DNA, 13 bp, Artificial Sequence
  Oligonucleotide for detection of SNP TSC0012267
attattaggaata

SEQ ID NO: 40462 - DNA, 13 bp, Artificial Sequence
  Oligonucleotide for detection of SNP TSC0012267
tattcctaataat

SEQ ID NO: 40463 - DNA, 13 bp, Artificial Sequence
  Oligonucleotide for detection of SNP TSC0012267
attatcgggaata

SEQ ID NO: 40464 - DNA, 13 bp, Artificial Sequence
  Oligonucleotide for detection of SNP TSC0012267
tattcccgataat

SEQ ID NO: 40465 - DNA, 13 bp, Artificial Sequence
  Oligonucleotide for detection of SNP TSC0012268
tttagtatggtta

SEQ ID NO: 40466 - DNA, 13 bp, Artificial Sequence
  Oligonucleotide for detection of SNP TSC0012268
taaccatactaaa

SEQ ID NO: 40467 - DNA, 13 bp, Artificial Sequence
  Oligonucleotide for detection of SNP TSC0012268
tttagtgtggtta

SEQ ID NO: 40468 - DNA, 13 bp, Artificial Sequence
  Oligonucleotide for detection of SNP TSC0012268
taaccacactaaa

SEQ ID NO: 40469 - DNA, 13 bp, Artificial Sequence
  Oligonucleotide for detection of SNP TSC0012268
tttagcgtggtta

SEQ ID NO: 40470 - DNA, 13 bp, Artificial Sequence
  Oligonucleotide for detection of SNP TSC0012268
taaccacgctaaa

SEQ ID NO: 40471 - DNA, 13 bp, Artificial Sequence
  Oligonucleotide for detection of SNP TSC0012268
tggttatgttggg

SEQ ID NO: 40472 - DNA, 13 bp, Artificial Sequence
  Oligonucleotide for detection of SNP TSC0012268
cccaacataacca

SEQ ID NO: 40473 - DNA, 13 bp, Artificial Sequence
  Oligonucleotide for detection of SNP TSC0012268
tggttacgttggg

SEQ ID NO: 40474 - DNA, 13 bp, Artificial Sequence
  Oligonucleotide for detection of SNP TSC0012268
cccaacgtaacca

SEQ ID NO: 40475 - DNA, 13 bp, Artificial Sequence
  Oligonucleotide for detection of SNP TSC0012269
gtgtttattttgy

SEQ ID NO: 40476 - DNA, 13 bp, Artificial Sequence
  Oligonucleotide for detection of SNP TSC0012269
rcaaaataaacac

SEQ ID NO: 40477 - DNA, 13 bp, Artificial Sequence
  Oligonucleotide for detection of SNP TSC0012269
gtgtttgttttgy

SEQ ID NO: 40478 - DNA, 13 bp, Artificial Sequence
  Oligonucleotide for detection of SNP TSC0012269
rcaaaacaaacac

SEQ ID NO: 40479 - DNA, 13 bp, Artificial Sequence
  Oligonucleotide for detection of SNP TSC0012269
gtgtttatttcgy

SEQ ID NO: 40480 - DNA, 13 bp, Artificial Sequence
  Oligonucleotide for detection of SNP TSC0012269
rcgaaataaacac

SEQ ID NO: 40481 - DNA, 13 bp, Artificial Sequence
  Oligonucleotide for detection of SNP TSC0012269
gtgtttgtttcgy

SEQ ID NO: 40482 - DNA, 13 bp, Artificial Sequence
  Oligonucleotide for detection of SNP TSC0012269
rcgaaacaaacac

SEQ ID NO: 40483 - DNA, 13 bp, Artificial Sequence
  Oligonucleotide for detection of SNP TSC0012271
tttggtgattttt

SEQ ID NO: 40484 - DNA, 13 bp, Artificial Sequence
  Oligonucleotide for detection of SNP TSC0012271
aaaaatcaccaaa

SEQ ID NO: 40485 - DNA, 13 bp, Artificial Sequence
  Oligonucleotide for detection of SNP TSC0012271
tttggtaattttt

SEQ ID NO: 40486 - DNA, 13 bp, Artificial Sequence
  Oligonucleotide for detection of SNP TSC0012271
aaaaattaccaaa

SEQ ID NO: 40487 - DNA, 13 bp, Artificial Sequence
  Oligonucleotide for detection of SNP TSC0012272
gggttatattgtg

SEQ ID NO: 40488 - DNA, 13 bp, Artificial Sequence
  Oligonucleotide for detection of SNP TSC0012272
cacaatataaccc

SEQ ID NO: 40489 - DNA, 13 bp, Artificial Sequence
  Oligonucleotide for detection of SNP TSC0012272
gggttagattgtg

SEQ ID NO: 40490 - DNA, 13 bp, Artificial Sequence
  Oligonucleotide for detection of SNP TSC0012272
cacaatctaaccc

SEQ ID NO: 40491 - DNA, 13 bp, Artificial Sequence
  Oligonucleotide for detection of SNP TSC0012272
gggttatatcgtg

SEQ ID NO: 40492 - DNA, 13 bp, Artificial Sequence
  Oligonucleotide for detection of SNP TSC0012272
cacgatataaccc

SEQ ID NO: 40493 - DNA, 13 bp, Artificial Sequence
  Oligonucleotide for detection of SNP TSC0012272
gggttagatcgtg

SEQ ID NO: 40494 - DNA, 13 bp, Artificial Sequence
  Oligonucleotide for detection of SNP TSC0012272
cacgatctaaccc

SEQ ID NO: 40495 - DNA, 13 bp, Artificial Sequence
  Oligonucleotide for detection of SNP TSC0012272
tatgatgtggtty

SEQ ID NO: 40496 - DNA, 13 bp, Artificial Sequence
  Oligonucleotide for detection of SNP TSC0012272
raaccacatcata

SEQ ID NO: 40497 - DNA, 13 bp, Artificial Sequence
  Oligonucleotide for detection of SNP TSC0012272
tatgatttggtty

SEQ ID NO: 40498 - DNA, 13 bp, Artificial Sequence
  Oligonucleotide for detection of SNP TSC0012272
raaccaaatcata

SEQ ID NO: 40499 - DNA, 13 bp, Artificial Sequence
  Oligonucleotide for detection of SNP TSC0012272
tacgatgtggtty

SEQ ID NO: 40500 - DNA, 13 bp, Artificial Sequence
  Oligonucleotide for detection of SNP TSC0012272
raaccacatcgta

SEQ ID NO: 40501 - DNA, 13 bp, Artificial Sequence
  Oligonucleotide for detection of SNP TSC0012272
tacgatttggtty

SEQ ID NO: 40502 - DNA, 13 bp, Artificial Sequence
  Oligonucleotide for detection of SNP TSC0012272
raaccaaatcgta

SEQ ID NO: 40503 - DNA, 13 bp, Artificial Sequence
  Oligonucleotide for detection of SNP TSC0012275
tttgaaatggggy

SEQ ID NO: 40504 - DNA, 13 bp, Artificial Sequence
  Oligonucleotide for detection of SNP TSC0012275
rccccatttcaaa

SEQ ID NO: 40505 - DNA, 13 bp, Artificial Sequence
  Oligonucleotide for detection of SNP TSC0012275
tttgaagtggggy

SEQ ID NO: 40506 - DNA, 13 bp, Artificial Sequence
  Oligonucleotide for detection of SNP TSC0012275
rccccacttcaaa

SEQ ID NO: 40507 - DNA, 13 bp, Artificial Sequence
  Oligonucleotide for detection of SNP TSC0012276
gtaaggtgtttty

SEQ ID NO: 40508 - DNA, 13 bp, Artificial Sequence
  Oligonucleotide for detection of SNP TSC0012276
raaaacaccttac

SEQ ID NO: 40509 - DNA, 13 bp, Artificial Sequence
  Oligonucleotide for detection of SNP TSC0012276
gtaaggcgtttty

SEQ ID NO: 40510 - DNA, 13 bp, Artificial Sequence
  Oligonucleotide for detection of SNP TSC0012276
raaaacgccttac

SEQ ID NO: 40511 - DNA, 13 bp, Artificial Sequence
  Oligonucleotide for detection of SNP TSC0012276
ggagatgttttgy

SEQ ID NO: 40512 - DNA, 13 bp, Artificial Sequence
  Oligonucleotide for detection of SNP TSC0012276
rcaaaacatctcc

SEQ ID NO: 40513 - DNA, 13 bp, Artificial Sequence
  Oligonucleotide for detection of SNP TSC0012276
ggagatattttgy

SEQ ID NO: 40514 - DNA, 13 bp, Artificial Sequence
  Oligonucleotide for detection of SNP TSC0012276
rcaaaatatctcc

SEQ ID NO: 40515 - DNA, 13 bp, Artificial Sequence
  Oligonucleotide for detection of SNP TSC0012276
ggagacgttttgy

SEQ ID NO: 40516 - DNA, 13 bp, Artificial Sequence
  Oligonucleotide for detection of SNP TSC0012276
rcaaaacgtctcc

SEQ ID NO: 40517 - DNA, 13 bp, Artificial Sequence
  Oligonucleotide for detection of SNP TSC0012277
gagattgtgggty

SEQ ID NO: 40518 - DNA, 13 bp, Artificial Sequence
  Oligonucleotide for detection of SNP TSC0012277
racccacaatctc

SEQ ID NO: 40519 - DNA, 13 bp, Artificial Sequence
  Oligonucleotide for detection of SNP TSC0012277
gagattttgggty

SEQ ID NO: 40520 - DNA, 13 bp, Artificial Sequence
  Oligonucleotide for detection of SNP TSC0012277
racccaaaatctc

SEQ ID NO: 40521 - DNA, 13 bp, Artificial Sequence
  Oligonucleotide for detection of SNP TSC0012277
gagatcgtgggty

SEQ ID NO: 40522 - DNA, 13 bp, Artificial Sequence
  Oligonucleotide for detection of SNP TSC0012277
racccacgatctc

SEQ ID NO: 40523 - DNA, 13 bp, Artificial Sequence
  Oligonucleotide for detection of SNP TSC0012277
gatttatggttty

SEQ ID NO: 40524 - DNA, 13 bp, Artificial Sequence
  Oligonucleotide for detection of SNP TSC0012277
raaaccataaatc

SEQ ID NO: 40525 - DNA, 13 bp, Artificial Sequence
  Oligonucleotide for detection of SNP TSC0012277
gatttaaggttty

SEQ ID NO: 40526 - DNA, 13 bp, Artificial Sequence
  Oligonucleotide for detection of SNP TSC0012277
raaaccttaaatc

SEQ ID NO: 40527 - DNA, 13 bp, Artificial Sequence
  Oligonucleotide for detection of SNP TSC0012277
gatttacggttty

SEQ ID NO: 40528 - DNA, 13 bp, Artificial Sequence
  Oligonucleotide for detection of SNP TSC0012277
raaaccgtaaatc

SEQ ID NO: 40529 - DNA, 13 bp, Artificial Sequence
  Oligonucleotide for detection of SNP TSC0012278
tgtattaaatata

SEQ ID NO: 40530 - DNA, 13 bp, Artificial Sequence
  Oligonucleotide for detection of SNP TSC0012278
tatatttaataca

SEQ ID NO: 40531 - DNA, 13 bp, Artificial Sequence
  Oligonucleotide for detection of SNP TSC0012278
tgtattgaatata

SEQ ID NO: 40532 - DNA, 13 bp, Artificial Sequence
  Oligonucleotide for detection of SNP TSC0012278
tatattcaataca

SEQ ID NO: 40533 - DNA, 13 bp, Artificial Sequence
  Oligonucleotide for detection of SNP TSC0012278
tgtatcgaatata

SEQ ID NO: 40534 - DNA, 13 bp, Artificial Sequence
  Oligonucleotide for detection of SNP TSC0012278
tatattcgataca

SEQ ID NO: 40535 - DNA, 13 bp, Artificial Sequence
  Oligonucleotide for detection of SNP TSC0012278
tatatttgatgta

SEQ ID NO: 40536 - DNA, 13 bp, Artificial Sequence
  Oligonucleotide for detection of SNP TSC0012278
tacatcaaatata

SEQ ID NO: 40537 - DNA, 13 bp, Artificial Sequence
  Oligonucleotide for detection of SNP TSC0012278
tatattcgatgta

SEQ ID NO: 40538 - DNA, 13 bp, Artificial Sequence
  Oligonucleotide for detection of SNP TSC0012278
tacatcgaatata

SEQ ID NO: 40539 - DNA, 13 bp, Artificial Sequence
  Oligonucleotide for detection of SNP TSC0012279
gggtggatgaatt

SEQ ID NO: 40540 - DNA, 13 bp, Artificial Sequence
  Oligonucleotide for detection of SNP TSC0012279
aattcatccaccc

SEQ ID NO: 40541 - DNA, 13 bp, Artificial Sequence
  Oligonucleotide for detection of SNP TSC0012279
gggtgggtgaatt

SEQ ID NO: 40542 - DNA, 13 bp, Artificial Sequence
  Oligonucleotide for detection of SNP TSC0012279
aattcacccaccc

SEQ ID NO: 40543 - DNA, 13 bp, Artificial Sequence
  Oligonucleotide for detection of SNP TSC0012280
tggtgggaggaga

SEQ ID NO: 40544 - DNA, 13 bp, Artificial Sequence
  Oligonucleotide for detection of SNP TSC0012280
tctcctcccacca

SEQ ID NO: 40545 - DNA, 13 bp, Artificial Sequence
  Oligonucleotide for detection of SNP TSC0012280
tggtggtaggaga

SEQ ID NO: 40546 - DNA, 13 bp, Artificial Sequence
  Oligonucleotide for detection of SNP TSC0012280
tctcctaccacca

SEQ ID NO: 40547 - DNA, 13 bp, Artificial Sequence
  Oligonucleotide for detection of SNP TSC0012281
ttttttagaaaat

SEQ ID NO: 40548 - DNA, 13 bp, Artificial Sequence
  Oligonucleotide for detection of SNP TSC0012281
attttctaaaaaa

SEQ ID NO: 40549 - DNA, 13 bp, Artificial Sequence
  Oligonucleotide for detection of SNP TSC0012282
ttattagtttgaa

SEQ ID NO: 40550 - DNA, 13 bp, Artificial Sequence
  Oligonucleotide for detection of SNP TSC0012282
ttcaaactaataa

SEQ ID NO: 40551 - DNA, 13 bp, Artificial Sequence
  Oligonucleotide for detection of SNP TSC0012282
ttattaatttgaa

SEQ ID NO: 40552 - DNA, 13 bp, Artificial Sequence
  Oligonucleotide for detection of SNP TSC0012282
ttcaaattaataa

SEQ ID NO: 40553 - DNA, 13 bp, Artificial Sequence
  Oligonucleotide for detection of SNP TSC0012283
gtatatattttay

SEQ ID NO: 40554 - DNA, 13 bp, Artificial Sequence
  Oligonucleotide for detection of SNP TSC0012283
rtaaaatatatac

SEQ ID NO: 40555 - DNA, 13 bp, Artificial Sequence
  Oligonucleotide for detection of SNP TSC0012283
gtatattttttay

SEQ ID NO: 40556 - DNA, 13 bp, Artificial Sequence
  Oligonucleotide for detection of SNP TSC0012283
rtaaaaaatatac

SEQ ID NO: 40557 - DNA, 13 bp, Artificial Sequence
  Oligonucleotide for detection of SNP TSC0012283
gtgaagtgtgtay

SEQ ID NO: 40558 - DNA, 13 bp, Artificial Sequence
  Oligonucleotide for detection of SNP TSC0012283
rtacacacttcac

SEQ ID NO: 40559 - DNA, 13 bp, Artificial Sequence
  Oligonucleotide for detection of SNP TSC0012283
gtgaagagtgtay

SEQ ID NO: 40560 - DNA, 13 bp, Artificial Sequence
  Oligonucleotide for detection of SNP TSC0012283
rtacactcttcac

SEQ ID NO: 40561 - DNA, 13 bp, Artificial Sequence
  Oligonucleotide for detection of SNP TSC0012286
aatattattatgt

SEQ ID NO: 40562 - DNA, 13 bp, Artificial Sequence
  Oligonucleotide for detection of SNP TSC0012286
acataataatatt

SEQ ID NO: 40563 - DNA, 13 bp, Artificial Sequence
  Oligonucleotide for detection of SNP TSC0012286
aatattgttatgt

SEQ ID NO: 40564 - DNA, 13 bp, Artificial Sequence
  Oligonucleotide for detection of SNP TSC0012286
acataacaatatt

SEQ ID NO: 40565 - DNA, 13 bp, Artificial Sequence
  Oligonucleotide for detection of SNP TSC0012286
aatatcgttatgt

SEQ ID NO: 40566 - DNA, 13 bp, Artificial Sequence
  Oligonucleotide for detection of SNP TSC0012286
acataacgatatt

SEQ ID NO: 40567 - DNA, 13 bp, Artificial Sequence
  Oligonucleotide for detection of SNP TSC0012286
atatgatggtatt

SEQ ID NO: 40568 - DNA, 13 bp, Artificial Sequence
  Oligonucleotide for detection of SNP TSC0012286
aataccatcatat

SEQ ID NO: 40569 - DNA, 13 bp, Artificial Sequence
  Oligonucleotide for detection of SNP TSC0012286
atatgacggtatt

SEQ ID NO: 40570 - DNA, 13 bp, Artificial Sequence
  Oligonucleotide for detection of SNP TSC0012286
aataccgtcatat

SEQ ID NO: 40571 - DNA, 13 bp, Artificial Sequence
  Oligonucleotide for detection of SNP TSC0012288
tataatgttattt

SEQ ID NO: 40572 - DNA, 13 bp, Artificial Sequence
  Oligonucleotide for detection of SNP TSC0012288
aaataacattata

SEQ ID NO: 40573 - DNA, 13 bp, Artificial Sequence
  Oligonucleotide for detection of SNP TSC0012288
tataatattattt

SEQ ID NO: 40574 - DNA, 13 bp, Artificial Sequence
  Oligonucleotide for detection of SNP TSC0012288
aaataatattata

SEQ ID NO: 40575 - DNA, 13 bp, Artificial Sequence
  Oligonucleotide for detection of SNP TSC0012289
tttgttaattttt

SEQ ID NO: 40576 - DNA, 13 bp, Artificial Sequence
  Oligonucleotide for detection of SNP TSC0012289
aaaaattaacaaa

SEQ ID NO: 40577 - DNA, 13 bp, Artificial Sequence
  Oligonucleotide for detection of SNP TSC0012289
tttgtttattttt

SEQ ID NO: 40578 - DNA, 13 bp, Artificial Sequence
  Oligonucleotide for detection of SNP TSC0012289
aaaaataaacaaa

SEQ ID NO: 40579 - DNA, 13 bp, Artificial Sequence
  Oligonucleotide for detection of SNP TSC0012289
aaagattaatagg

SEQ ID NO: 40580 - DNA, 13 bp, Artificial Sequence
  Oligonucleotide for detection of SNP TSC0012289
cctattaatcttt

SEQ ID NO: 40581 - DNA, 13 bp, Artificial Sequence
  Oligonucleotide for detection of SNP TSC0012289
aaagatgaatagg

SEQ ID NO: 40582 - DNA, 13 bp, Artificial Sequence
  Oligonucleotide for detection of SNP TSC0012289
cctattcatcttt

SEQ ID NO: 40583 - DNA, 13 bp, Artificial Sequence
  Oligonucleotide for detection of SNP TSC0012290
gtaaatgaatgta

SEQ ID NO: 40584 - DNA, 13 bp, Artificial Sequence
  Oligonucleotide for detection of SNP TSC0012290
tacattcatttac

SEQ ID NO: 40585 - DNA, 13 bp, Artificial Sequence
  Oligonucleotide for detection of SNP TSC0012290
gtaaataaatgta

SEQ ID NO: 40586 - DNA, 13 bp, Artificial Sequence
  Oligonucleotide for detection of SNP TSC0012290
tacatttatttac

SEQ ID NO: 40587 - DNA, 13 bp, Artificial Sequence
  Oligonucleotide for detection of SNP TSC0012291
gttttgtggtttg

SEQ ID NO: 40588 - DNA, 13 bp, Artificial Sequence
  Oligonucleotide for detection of SNP TSC0012291
caaaccacaaaac

SEQ ID NO: 40589 - DNA, 13 bp, Artificial Sequence
  Oligonucleotide for detection of SNP TSC0012291
gttttgcggtttg

SEQ ID NO: 40590 - DNA, 13 bp, Artificial Sequence
  Oligonucleotide for detection of SNP TSC0012291
caaaccgcaaaac

SEQ ID NO: 40591 - DNA, 13 bp, Artificial Sequence
  Oligonucleotide for detection of SNP TSC0012291
taggttgtaagay

SEQ ID NO: 40592 - DNA, 13 bp, Artificial Sequence
  Oligonucleotide for detection of SNP TSC0012291
rtcttacaaccta

SEQ ID NO: 40593 - DNA, 13 bp, Artificial Sequence
  Oligonucleotide for detection of SNP TSC0012291
taggttataagay

SEQ ID NO: 40594 - DNA, 13 bp, Artificial Sequence
  Oligonucleotide for detection of SNP TSC0012291
rtcttataaccta

SEQ ID NO: 40595 - DNA, 13 bp, Artificial Sequence
  Oligonucleotide for detection of SNP TSC0012291
taggtcgtaagay

SEQ ID NO: 40596 - DNA, 13 bp, Artificial Sequence
  Oligonucleotide for detection of SNP TSC0012291
rtcttacgaccta

SEQ ID NO: 40597 - DNA, 13 bp, Artificial Sequence
  Oligonucleotide for detection of SNP TSC0012292
ttagttaatttty

SEQ ID NO: 40598 - DNA, 13 bp, Artificial Sequence
  Oligonucleotide for detection of SNP TSC0012292
raaaattaactaa

SEQ ID NO: 40599 - DNA, 13 bp, Artificial Sequence
  Oligonucleotide for detection of SNP TSC0012292
ttagttgatttty

SEQ ID NO: 40600 - DNA, 13 bp, Artificial Sequence
  Oligonucleotide for detection of SNP TSC0012292
raaaatcaactaa

SEQ ID NO: 40601 - DNA, 13 bp, Artificial Sequence
  Oligonucleotide for detection of SNP TSC0012294
attgttatagatt

SEQ ID NO: 40602 - DNA, 13 bp, Artificial Sequence
  Oligonucleotide for detection of SNP TSC0012294
aatctataacaat

SEQ ID NO: 40603 - DNA, 13 bp, Artificial Sequence
  Oligonucleotide for detection of SNP TSC0012294
attgttgtagatt

SEQ ID NO: 40604 - DNA, 13 bp, Artificial Sequence
  Oligonucleotide for detection of SNP TSC0012294
aatctacaacaat

SEQ ID NO: 40605 - DNA, 13 bp, Artificial Sequence
  Oligonucleotide for detection of SNP TSC0012294
attgtcgtagatt

SEQ ID NO: 40606 - DNA, 13 bp, Artificial Sequence
  Oligonucleotide for detection of SNP TSC0012294
aatctacgacaat

SEQ ID NO: 40607 - DNA, 13 bp, Artificial Sequence
  Oligonucleotide for detection of SNP TSC0012294
agtttatggtaat

SEQ ID NO: 40608 - DNA, 13 bp, Artificial Sequence
  Oligonucleotide for detection of SNP TSC0012294
attaccataaact

SEQ ID NO: 40609 - DNA, 13 bp, Artificial Sequence
  Oligonucleotide for detection of SNP TSC0012294
agtttacggtaat

SEQ ID NO: 40610 - DNA, 13 bp, Artificial Sequence
  Oligonucleotide for detection of SNP TSC0012294
attaccgtaaact

SEQ ID NO: 40611 - DNA, 13 bp, Artificial Sequence
  Oligonucleotide for detection of SNP TSC0012295
tggattatatttt

SEQ ID NO: 40612 - DNA, 13 bp, Artificial Sequence
  Oligonucleotide for detection of SNP TSC0012295
aaaatataatcca

SEQ ID NO: 40613 - DNA, 13 bp, Artificial Sequence
  Oligonucleotide for detection of SNP TSC0012295
tggattgtatttt

SEQ ID NO: 40614 - DNA, 13 bp, Artificial Sequence
  Oligonucleotide for detection of SNP TSC0012295
aaaatacaatcca

SEQ ID NO: 40615 - DNA, 13 bp, Artificial Sequence
  Oligonucleotide for detection of SNP TSC0012296
ttgtaaatttagy

SEQ ID NO: 40616 - DNA, 13 bp, Artificial Sequence
  Oligonucleotide for detection of SNP TSC0012296
rctaaatttacaa

SEQ ID NO: 40617 - DNA, 13 bp, Artificial Sequence
  Oligonucleotide for detection of SNP TSC0012296
ttgtaattttagy

SEQ ID NO: 40618 - DNA, 13 bp, Artificial Sequence
  Oligonucleotide for detection of SNP TSC0012296
rctaaaattacaa

SEQ ID NO: 40619 - DNA, 13 bp, Artificial Sequence
  Oligonucleotide for detection of SNP TSC0012296
gttgggtttatag

SEQ ID NO: 40620 - DNA, 13 bp, Artificial Sequence
  Oligonucleotide for detection of SNP TSC0012296
ctataaacccaac

SEQ ID NO: 40621 - DNA, 13 bp, Artificial Sequence
  Oligonucleotide for detection of SNP TSC0012296
gttgggattatag

SEQ ID NO: 40622 - DNA, 13 bp, Artificial Sequence
  Oligonucleotide for detection of SNP TSC0012296
ctataatcccaac

SEQ ID NO: 40623 - DNA, 13 bp, Artificial Sequence
  Oligonucleotide for detection of SNP TSC0012297
attagtagtttty

SEQ ID NO: 40624 - DNA, 13 bp, Artificial Sequence
  Oligonucleotide for detection of SNP TSC0012297
raaaactactaat

SEQ ID NO: 40625 - DNA, 13 bp, Artificial Sequence
  Oligonucleotide for detection of SNP TSC0012297
attagttgtttty

SEQ ID NO: 40626 - DNA, 13 bp, Artificial Sequence
  Oligonucleotide for detection of SNP TSC0012297
raaaacaactaat

SEQ ID NO: 40627 - DNA, 13 bp, Artificial Sequence
  Oligonucleotide for detection of SNP TSC0012297
attagtcgtttty

SEQ ID NO: 40628 - DNA, 13 bp, Artificial Sequence
  Oligonucleotide for detection of SNP TSC0012297
raaaacgactaat

SEQ ID NO: 40629 - DNA, 13 bp, Artificial Sequence
  Oligonucleotide for detection of SNP TSC0012297
ggaggttattggt

SEQ ID NO: 40630 - DNA, 13 bp, Artificial Sequence
  Oligonucleotide for detection of SNP TSC0012297
accaataacctcc

SEQ ID NO: 40631 - DNA, 13 bp, Artificial Sequence
  Oligonucleotide for detection of SNP TSC0012297
ggaggtgattggt

SEQ ID NO: 40632 - DNA, 13 bp, Artificial Sequence
  Oligonucleotide for detection of SNP TSC0012297
accaatcacctcc

SEQ ID NO: 40633 - DNA, 13 bp, Artificial Sequence
  Oligonucleotide for detection of SNP TSC0012297
ggaggcgattggt

SEQ ID NO: 40634 - DNA, 13 bp, Artificial Sequence
  Oligonucleotide for detection of SNP TSC0012297
accaatcgcctcc

SEQ ID NO: 40635 - DNA, 13 bp, Artificial Sequence
  Oligonucleotide for detection of SNP TSC0012298
agttatatattta

SEQ ID NO: 40636 - DNA, 13 bp, Artificial Sequence
  Oligonucleotide for detection of SNP TSC0012298
taaatatataact

SEQ ID NO: 40637 - DNA, 13 bp, Artificial Sequence
  Oligonucleotide for detection of SNP TSC0012298
agttatgtattta

SEQ ID NO: 40638 - DNA, 13 bp, Artificial Sequence
  Oligonucleotide for detection of SNP TSC0012298
taaatacataact

SEQ ID NO: 40639 - DNA, 13 bp, Artificial Sequence
  Oligonucleotide for detection of SNP TSC0012298
agttacgtattta

SEQ ID NO: 40640 - DNA, 13 bp, Artificial Sequence
  Oligonucleotide for detection of SNP TSC0012298
taaatacgtaact

SEQ ID NO: 40641 - DNA, 13 bp, Artificial Sequence
  Oligonucleotide for detection of SNP TSC0012298
tgaatatgtagtt

SEQ ID NO: 40642 - DNA, 13 bp, Artificial Sequence
  Oligonucleotide for detection of SNP TSC0012298
aactacatattca

SEQ ID NO: 40643 - DNA, 13 bp, Artificial Sequence
  Oligonucleotide for detection of SNP TSC0012298
tgaatacgtagtt

SEQ ID NO: 40644 - DNA, 13 bp, Artificial Sequence
  Oligonucleotide for detection of SNP TSC0012298
aactacgtattca

SEQ ID NO: 40645 - DNA, 13 bp, Artificial Sequence
  Oligonucleotide for detection of SNP TSC0012299
tattagaaaaatt

SEQ ID NO: 40646 - DNA, 13 bp, Artificial Sequence
  Oligonucleotide for detection of SNP TSC0012299
aatttttctaata

SEQ ID NO: 40647 - DNA, 13 bp, Artificial Sequence
  Oligonucleotide for detection of SNP TSC0012299
tattaggaaaatt

SEQ ID NO: 40648 - DNA, 13 bp, Artificial Sequence
  Oligonucleotide for detection of SNP TSC0012299
aattttcctaata

SEQ ID NO: 40649 - DNA, 13 bp, Artificial Sequence
  Oligonucleotide for detection of SNP TSC0012300
tatatttgattag

SEQ ID NO: 40650 - DNA, 13 bp, Artificial Sequence
  Oligonucleotide for detection of SNP TSC0012300
ctaatcaaatata

SEQ ID NO: 40651 - DNA, 13 bp, Artificial Sequence
  Oligonucleotide for detection of SNP TSC0012300
tatattcgattag

SEQ ID NO: 40652 - DNA, 13 bp, Artificial Sequence
  Oligonucleotide for detection of SNP TSC0012300
ctaatcgaatata

SEQ ID NO: 40653 - DNA, 13 bp, Artificial Sequence
  Oligonucleotide for detection of SNP TSC0012300
ttggttgagtgtg

SEQ ID NO: 40654 - DNA, 13 bp, Artificial Sequence
  Oligonucleotide for detection of SNP TSC0012300
cacactcaaccaa

SEQ ID NO: 40655 - DNA, 13 bp, Artificial Sequence
  Oligonucleotide for detection of SNP TSC0012300
ttggttaagtgtg

SEQ ID NO: 40656 - DNA, 13 bp, Artificial Sequence
  Oligonucleotide for detection of SNP TSC0012300
cacacttaaccaa

SEQ ID NO: 40657 - DNA, 13 bp, Artificial Sequence
  Oligonucleotide for detection of SNP TSC0012300
ttggtcgagtgtg

SEQ ID NO: 40658 - DNA, 13 bp, Artificial Sequence
  Oligonucleotide for detection of SNP TSC0012300
cacactcgaccaa

SEQ ID NO: 40659 - DNA, 13 bp, Artificial Sequence
  Oligonucleotide for detection of SNP TSC0012301
ttgtttaatgatt

SEQ ID NO: 40660 - DNA, 13 bp, Artificial Sequence
  Oligonucleotide for detection of SNP TSC0012301
aatcattaaacaa

SEQ ID NO: 40661 - DNA, 13 bp, Artificial Sequence
  Oligonucleotide for detection of SNP TSC0012301
ttgttttatgatt

SEQ ID NO: 40662 - DNA, 13 bp, Artificial Sequence
  Oligonucleotide for detection of SNP TSC0012301
aatcataaaacaa

SEQ ID NO: 40663 - DNA, 13 bp, Artificial Sequence
  Oligonucleotide for detection of SNP TSC0012301
aattattaagtag

SEQ ID NO: 40664 - DNA, 13 bp, Artificial Sequence
  Oligonucleotide for detection of SNP TSC0012301
ctacttaataatt

SEQ ID NO: 40665 - DNA, 13 bp, Artificial Sequence
  Oligonucleotide for detection of SNP TSC0012301
aattatgaagtag

SEQ ID NO: 40666 - DNA, 13 bp, Artificial Sequence
  Oligonucleotide for detection of SNP TSC0012301
ctacttcataatt

SEQ ID NO: 40667 - DNA, 13 bp, Artificial Sequence
  Oligonucleotide for detection of SNP TSC0012302
aaatatgtttgta

SEQ ID NO: 40668 - DNA, 13 bp, Artificial Sequence
  Oligonucleotide for detection of SNP TSC0012302
tacaaacatattt

SEQ ID NO: 40669 - DNA, 13 bp, Artificial Sequence
  Oligonucleotide for detection of SNP TSC0012302
aaatatttttgta

SEQ ID NO: 40670 - DNA, 13 bp, Artificial Sequence
  Oligonucleotide for detection of SNP TSC0012302
tacaaaaatattt

SEQ ID NO: 40671 - DNA, 13 bp, Artificial Sequence
  Oligonucleotide for detection of SNP TSC0012302
tgtaagtatgttt

SEQ ID NO: 40672 - DNA, 13 bp, Artificial Sequence
  Oligonucleotide for detection of SNP TSC0012302
aaacatacttaca

SEQ ID NO: 40673 - DNA, 13 bp, Artificial Sequence
  Oligonucleotide for detection of SNP TSC0012302
tgtaagaatgttt

SEQ ID NO: 40674 - DNA, 13 bp, Artificial Sequence
  Oligonucleotide for detection of SNP TSC0012302
aaacattcttaca

SEQ ID NO: 40675 - DNA, 13 bp, Artificial Sequence
  Oligonucleotide for detection of SNP TSC0012303
gacggggttttay

SEQ ID NO: 40676 - DNA, 13 bp, Artificial Sequence
  Oligonucleotide for detection of SNP TSC0012303
rtaaaaccccgtc

SEQ ID NO: 40677 - DNA, 13 bp, Artificial Sequence
  Oligonucleotide for detection of SNP TSC0012303
gacgggattttay

SEQ ID NO: 40678 - DNA, 13 bp, Artificial Sequence
  Oligonucleotide for detection of SNP TSC0012303
rtaaaatcccgtc

SEQ ID NO: 40679 - DNA, 13 bp, Artificial Sequence
  Oligonucleotide for detection of SNP TSC0012304
gaagaaaattttt

SEQ ID NO: 40680 - DNA, 13 bp, Artificial Sequence
  Oligonucleotide for detection of SNP TSC0012304
aaaaattttcttc

SEQ ID NO: 40681 - DNA, 13 bp, Artificial Sequence
  Oligonucleotide for detection of SNP TSC0012304
gaagaagattttt

SEQ ID NO: 40682 - DNA, 13 bp, Artificial Sequence
  Oligonucleotide for detection of SNP TSC0012304
aaaaatcttcttc

SEQ ID NO: 40683 - DNA, 13 bp, Artificial Sequence
  Oligonucleotide for detection of SNP TSC0012305
aagttaatttatt

SEQ ID NO: 40684 - DNA, 13 bp, Artificial Sequence
  Oligonucleotide for detection of SNP TSC0012305
aataaattaactt

SEQ ID NO: 40685 - DNA, 13 bp, Artificial Sequence
  Oligonucleotide for detection of SNP TSC0012305
aagttagtttatt

SEQ ID NO: 40686 - DNA, 13 bp, Artificial Sequence
  Oligonucleotide for detection of SNP TSC0012305
aataaactaactt

SEQ ID NO: 40687 - DNA, 13 bp, Artificial Sequence
  Oligonucleotide for detection of SNP TSC0012307
aaataaatttaaa

SEQ ID NO: 40688 - DNA, 13 bp, Artificial Sequence
  Oligonucleotide for detection of SNP TSC0012307
tttaaatttattt

SEQ ID NO: 40689 - DNA, 13 bp, Artificial Sequence
  Oligonucleotide for detection of SNP TSC0012307
aaataagtttaaa

SEQ ID NO: 40690 - DNA, 13 bp, Artificial Sequence
  Oligonucleotide for detection of SNP TSC0012307
tttaaacttattt

SEQ ID NO: 40691 - DNA, 13 bp, Artificial Sequence
  Oligonucleotide for detection of SNP TSC0012309
taaaggaagattg

SEQ ID NO: 40692 - DNA, 13 bp, Artificial Sequence
  Oligonucleotide for detection of SNP TSC0012309
caatcttccttta

SEQ ID NO: 40693 - DNA, 13 bp, Artificial Sequence
  Oligonucleotide for detection of SNP TSC0012309
taaaggtagattg

SEQ ID NO: 40694 - DNA, 13 bp, Artificial Sequence
  Oligonucleotide for detection of SNP TSC0012309
caatctaccttta

SEQ ID NO: 40695 - DNA, 13 bp, Artificial Sequence
  Oligonucleotide for detection of SNP TSC0012309
taattttttttta

SEQ ID NO: 40696 - DNA, 13 bp, Artificial Sequence
  Oligonucleotide for detection of SNP TSC0012309
taaaaaaaaatta

SEQ ID NO: 40697 - DNA, 13 bp, Artificial Sequence
  Oligonucleotide for detection of SNP TSC0012310
gtgattggatttt

SEQ ID NO: 40698 - DNA, 13 bp, Artificial Sequence
  Oligonucleotide for detection of SNP TSC0012310
aaaatccaatcac

SEQ ID NO: 40699 - DNA, 13 bp, Artificial Sequence
  Oligonucleotide for detection of SNP TSC0012310
gtgatttgatttt

SEQ ID NO: 40700 - DNA, 13 bp, Artificial Sequence
  Oligonucleotide for detection of SNP TSC0012310
aaaatcaaatcac

SEQ ID NO: 40701 - DNA, 13 bp, Artificial Sequence
  Oligonucleotide for detection of SNP TSC0012310
gtgatcggatttt

SEQ ID NO: 40702 - DNA, 13 bp, Artificial Sequence
  Oligonucleotide for detection of SNP TSC0012310
aaaatccgatcac

SEQ ID NO: 40703 - DNA, 13 bp, Artificial Sequence
  Oligonucleotide for detection of SNP TSC0012310
aaagtttggttay

SEQ ID NO: 40704 - DNA, 13 bp, Artificial Sequence
  Oligonucleotide for detection of SNP TSC0012310
rtaaccaaacttt

SEQ ID NO: 40705 - DNA, 13 bp, Artificial Sequence
  Oligonucleotide for detection of SNP TSC0012310
aaagttaggttay

SEQ ID NO: 40706 - DNA, 13 bp, Artificial Sequence
  Oligonucleotide for detection of SNP TSC0012310
rtaacctaacttt

SEQ ID NO: 40707 - DNA, 13 bp, Artificial Sequence
  Oligonucleotide for detection of SNP TSC0012310
aaagttcggttay

SEQ ID NO: 40708 - DNA, 13 bp, Artificial Sequence
  Oligonucleotide for detection of SNP TSC0012310
rtaaccgaacttt

SEQ ID NO: 40709 - DNA, 13 bp, Artificial Sequence
  Oligonucleotide for detection of SNP TSC0012315
gtttaaggggaag

SEQ ID NO: 40710 - DNA, 13 bp, Artificial Sequence
  Oligonucleotide for detection of SNP TSC0012315
cttccccttaaac

SEQ ID NO: 40711 - DNA, 13 bp, Artificial Sequence
  Oligonucleotide for detection of SNP TSC0012315
gtttaaagggaag

SEQ ID NO: 40712 - DNA, 13 bp, Artificial Sequence
  Oligonucleotide for detection of SNP TSC0012315
cttccctttaaac

SEQ ID NO: 40713 - DNA, 13 bp, Artificial Sequence
  Oligonucleotide for detection of SNP TSC0012316
agtaatatgttga

SEQ ID NO: 40714 - DNA, 13 bp, Artificial Sequence
  Oligonucleotide for detection of SNP TSC0012316
tcaacatattact

SEQ ID NO: 40715 - DNA, 13 bp, Artificial Sequence
  Oligonucleotide for detection of SNP TSC0012316
agtaatttgttga

SEQ ID NO: 40716 - DNA, 13 bp, Artificial Sequence
  Oligonucleotide for detection of SNP TSC0012316
tcaacaaattact

SEQ ID NO: 40717 - DNA, 13 bp, Artificial Sequence
  Oligonucleotide for detection of SNP TSC0012316
agtaatatgtcga

SEQ ID NO: 40718 - DNA, 13 bp, Artificial Sequence
  Oligonucleotide for detection of SNP TSC0012316
tcgacatattact

SEQ ID NO: 40719 - DNA, 13 bp, Artificial Sequence
  Oligonucleotide for detection of SNP TSC0012316
agtaatttgtcga

SEQ ID NO: 40720 - DNA, 13 bp, Artificial Sequence
  Oligonucleotide for detection of SNP TSC0012316
tcgacaaattact

SEQ ID NO: 40721 - DNA, 13 bp, Artificial Sequence
  Oligonucleotide for detection of SNP TSC0012316
ttgatatgttatt

SEQ ID NO: 40722 - DNA, 13 bp, Artificial Sequence
  Oligonucleotide for detection of SNP TSC0012316
aataacatatcaa

SEQ ID NO: 40723 - DNA, 13 bp, Artificial Sequence
  Oligonucleotide for detection of SNP TSC0012316
ttgataagttatt

SEQ ID NO: 40724 - DNA, 13 bp, Artificial Sequence
  Oligonucleotide for detection of SNP TSC0012316
aataacttatcaa

SEQ ID NO: 40725 - DNA, 13 bp, Artificial Sequence
  Oligonucleotide for detection of SNP TSC0012316
tcgatatgttatt

SEQ ID NO: 40726 - DNA, 13 bp, Artificial Sequence
  Oligonucleotide for detection of SNP TSC0012316
aataacatatcga

SEQ ID NO: 40727 - DNA, 13 bp, Artificial Sequence
  Oligonucleotide for detection of SNP TSC0012316
tcgataagttatt

SEQ ID NO: 40728 - DNA, 13 bp, Artificial Sequence
  Oligonucleotide for detection of SNP TSC0012316
aataacttatcga

SEQ ID NO: 40729 - DNA, 13 bp, Artificial Sequence
  Oligonucleotide for detection of SNP TSC0012317
gttttggtgaatt

SEQ ID NO: 40730 - DNA, 13 bp, Artificial Sequence
  Oligonucleotide for detection of SNP TSC0012317
aattcaccaaaac

SEQ ID NO: 40731 - DNA, 13 bp, Artificial Sequence
  Oligonucleotide for detection of SNP TSC0012317
gttttgatgaatt

SEQ ID NO: 40732 - DNA, 13 bp, Artificial Sequence
  Oligonucleotide for detection of SNP TSC0012317
aattcatcaaaac

SEQ ID NO: 40733 - DNA, 13 bp, Artificial Sequence
  Oligonucleotide for detection of SNP TSC0012318
ttttatagttgtt

SEQ ID NO: 40734 - DNA, 13 bp, Artificial Sequence
  Oligonucleotide for detection of SNP TSC0012318
aacaactataaaa

SEQ ID NO: 40735 - DNA, 13 bp, Artificial Sequence
  Oligonucleotide for detection of SNP TSC0012318
ttttatggttgtt

SEQ ID NO: 40736 - DNA, 13 bp, Artificial Sequence
  Oligonucleotide for detection of SNP TSC0012318
aacaaccataaaa

SEQ ID NO: 40737 - DNA, 13 bp, Artificial Sequence
  Oligonucleotide for detection of SNP TSC0012318
ttttacggttgtt

SEQ ID NO: 40738 - DNA, 13 bp, Artificial Sequence
  Oligonucleotide for detection of SNP TSC0012318
aacaaccgtaaaa

SEQ ID NO: 40739 - DNA, 13 bp, Artificial Sequence
  Oligonucleotide for detection of SNP TSC0012318
aataattgtggag

SEQ ID NO: 40740 - DNA, 13 bp, Artificial Sequence
  Oligonucleotide for detection of SNP TSC0012318
ctccacaattatt

SEQ ID NO: 40741 - DNA, 13 bp, Artificial Sequence
  Oligonucleotide for detection of SNP TSC0012318
aataatcgtggag

SEQ ID NO: 40742 - DNA, 13 bp, Artificial Sequence
  Oligonucleotide for detection of SNP TSC0012318
ctccacgattatt

SEQ ID NO: 40743 - DNA, 13 bp, Artificial Sequence
  Oligonucleotide for detection of SNP TSC0012319
atgtttattgtgy

SEQ ID NO: 40744 - DNA, 13 bp, Artificial Sequence
  Oligonucleotide for detection of SNP TSC0012319
rcacaataaacat

SEQ ID NO: 40745 - DNA, 13 bp, Artificial Sequence
  Oligonucleotide for detection of SNP TSC0012319
atgtttgttgtgy

SEQ ID NO: 40746 - DNA, 13 bp, Artificial Sequence
  Oligonucleotide for detection of SNP TSC0012319
rcacaacaaacat

SEQ ID NO: 40747 - DNA, 13 bp, Artificial Sequence
  Oligonucleotide for detection of SNP TSC0012319
atgttcgttgtgy

SEQ ID NO: 40748 - DNA, 13 bp, Artificial Sequence
  Oligonucleotide for detection of SNP TSC0012319
rcacaacgaacat

SEQ ID NO: 40749 - DNA, 13 bp, Artificial Sequence
  Oligonucleotide for detection of SNP TSC0012319
gtatagtgggtat

SEQ ID NO: 40750 - DNA, 13 bp, Artificial Sequence
  Oligonucleotide for detection of SNP TSC0012319
atacccactatac

SEQ ID NO: 40751 - DNA, 13 bp, Artificial Sequence
  Oligonucleotide for detection of SNP TSC0012319
gtatagcgggtat

SEQ ID NO: 40752 - DNA, 13 bp, Artificial Sequence
  Oligonucleotide for detection of SNP TSC0012319
atacccgctatac

SEQ ID NO: 40753 - DNA, 13 bp, Artificial Sequence
  Oligonucleotide for detection of SNP TSC0012320
gagatggattata

SEQ ID NO: 40754 - DNA, 13 bp, Artificial Sequence
  Oligonucleotide for detection of SNP TSC0012320
tataatccatctc

SEQ ID NO: 40755 - DNA, 13 bp, Artificial Sequence
  Oligonucleotide for detection of SNP TSC0012320
gagatgaattata

SEQ ID NO: 40756 - DNA, 13 bp, Artificial Sequence
  Oligonucleotide for detection of SNP TSC0012320
tataattcatctc

SEQ ID NO: 40757 - DNA, 13 bp, Artificial Sequence
  Oligonucleotide for detection of SNP TSC0012321
gaataggtattty

SEQ ID NO: 40758 - DNA, 13 bp, Artificial Sequence
  Oligonucleotide for detection of SNP TSC0012321
raaatacctattc

SEQ ID NO: 40759 - DNA, 13 bp, Artificial Sequence
  Oligonucleotide for detection of SNP TSC0012321
gaatagatattty

SEQ ID NO: 40760 - DNA, 13 bp, Artificial Sequence
  Oligonucleotide for detection of SNP TSC0012321
raaatatctattc

SEQ ID NO: 40761 - DNA, 13 bp, Artificial Sequence
  Oligonucleotide for detection of SNP TSC0012323
tgagtatgtggag

SEQ ID NO: 40762 - DNA, 13 bp, Artificial Sequence
  Oligonucleotide for detection of SNP TSC0012323
ctccacatactca

SEQ ID NO: 40763 - DNA, 13 bp, Artificial Sequence
  Oligonucleotide for detection of SNP TSC0012323
tgagtaggtggag

SEQ ID NO: 40764 - DNA, 13 bp, Artificial Sequence
  Oligonucleotide for detection of SNP TSC0012323
ctccacctactca

SEQ ID NO: 40765 - DNA, 13 bp, Artificial Sequence
  Oligonucleotide for detection of SNP TSC0012323
tgagtacgtggag

SEQ ID NO: 40766 - DNA, 13 bp, Artificial Sequence
  Oligonucleotide for detection of SNP TSC0012323
ctccacgtactca

SEQ ID NO: 40767 - DNA, 13 bp, Artificial Sequence
  Oligonucleotide for detection of SNP TSC0012323
ttttatttgttta

SEQ ID NO: 40768 - DNA, 13 bp, Artificial Sequence
  Oligonucleotide for detection of SNP TSC0012323
taaacaaataaaa

SEQ ID NO: 40769 - DNA, 13 bp, Artificial Sequence
  Oligonucleotide for detection of SNP TSC0012324
tattgtgttagty

SEQ ID NO: 40770 - DNA, 13 bp, Artificial Sequence
  Oligonucleotide for detection of SNP TSC0012324
ractaacacaata

SEQ ID NO: 40771 - DNA, 13 bp, Artificial Sequence
  Oligonucleotide for detection of SNP TSC0012324
tattgtattagty

SEQ ID NO: 40772 - DNA, 13 bp, Artificial Sequence
  Oligonucleotide for detection of SNP TSC0012324
ractaatacaata

SEQ ID NO: 40773 - DNA, 13 bp, Artificial Sequence
  Oligonucleotide for detection of SNP TSC0012324
tatcgtgttagty

SEQ ID NO: 40774 - DNA, 13 bp, Artificial Sequence
  Oligonucleotide for detection of SNP TSC0012324
ractaacacgata

SEQ ID NO: 40775 - DNA, 13 bp, Artificial Sequence
  Oligonucleotide for detection of SNP TSC0012324
tatcgtattagty

SEQ ID NO: 40776 - DNA, 13 bp, Artificial Sequence
  Oligonucleotide for detection of SNP TSC0012324
ractaatacgata

SEQ ID NO: 40777 - DNA, 13 bp, Artificial Sequence
  Oligonucleotide for detection of SNP TSC0012325
aaggggataagag

SEQ ID NO: 40778 - DNA, 13 bp, Artificial Sequence
  Oligonucleotide for detection of SNP TSC0012325
ctcttatcccctt

SEQ ID NO: 40779 - DNA, 13 bp, Artificial Sequence
  Oligonucleotide for detection of SNP TSC0012325
aagggggtaagag

SEQ ID NO: 40780 - DNA, 13 bp, Artificial Sequence
  Oligonucleotide for detection of SNP TSC0012325
ctcttaccccctt

SEQ ID NO: 40781 - DNA, 13 bp, Artificial Sequence
  Oligonucleotide for detection of SNP TSC0012326
attgtgatgatay

SEQ ID NO: 40782 - DNA, 13 bp, Artificial Sequence
  Oligonucleotide for detection of SNP TSC0012326
rtatcatcacaat

SEQ ID NO: 40783 - DNA, 13 bp, Artificial Sequence
  Oligonucleotide for detection of SNP TSC0012326
attgtggtgatay

SEQ ID NO: 40784 - DNA, 13 bp, Artificial Sequence
  Oligonucleotide for detection of SNP TSC0012326
rtatcaccacaat

SEQ ID NO: 40785 - DNA, 13 bp, Artificial Sequence
  Oligonucleotide for detection of SNP TSC0012331
gtatagggattag

SEQ ID NO: 40786 - DNA, 13 bp, Artificial Sequence
  Oligonucleotide for detection of SNP TSC0012331
ctaatccctatac

SEQ ID NO: 40787 - DNA, 13 bp, Artificial Sequence
  Oligonucleotide for detection of SNP TSC0012331
gtatagagattag

SEQ ID NO: 40788 - DNA, 13 bp, Artificial Sequence
  Oligonucleotide for detection of SNP TSC0012331
ctaatctctatac

SEQ ID NO: 40789 - DNA, 13 bp, Artificial Sequence
  Oligonucleotide for detection of SNP TSC0012333
attataggttttg

SEQ ID NO: 40790 - DNA, 13 bp, Artificial Sequence
  Oligonucleotide for detection of SNP TSC0012333
caaaacctataat

SEQ ID NO: 40791 - DNA, 13 bp, Artificial Sequence
  Oligonucleotide for detection of SNP TSC0012333
taggatgtatgat

SEQ ID NO: 40792 - DNA, 13 bp, Artificial Sequence
  Oligonucleotide for detection of SNP TSC0012333
atcatacatccta

SEQ ID NO: 40793 - DNA, 13 bp, Artificial Sequence
  Oligonucleotide for detection of SNP TSC0012333
taggatttatgat

SEQ ID NO: 40794 - DNA, 13 bp, Artificial Sequence
  Oligonucleotide for detection of SNP TSC0012333
atcataaatccta

SEQ ID NO: 40795 - DNA, 13 bp, Artificial Sequence
  Oligonucleotide for detection of SNP TSC0012333
taggacgtatgat

SEQ ID NO: 40796 - DNA, 13 bp, Artificial Sequence
  Oligonucleotide for detection of SNP TSC0012333
atcatacgtccta

SEQ ID NO: 40797 - DNA, 13 bp, Artificial Sequence
  Oligonucleotide for detection of SNP TSC0012334
tttgttgttatty

SEQ ID NO: 40798 - DNA, 13 bp, Artificial Sequence
  Oligonucleotide for detection of SNP TSC0012334
raataacaacaaa

SEQ ID NO: 40799 - DNA, 13 bp, Artificial Sequence
  Oligonucleotide for detection of SNP TSC0012334
tttgttattatty

SEQ ID NO: 40800 - DNA, 13 bp, Artificial Sequence
  Oligonucleotide for detection of SNP TSC0012334
raataataacaaa

SEQ ID NO: 40801 - DNA, 13 bp, Artificial Sequence
  Oligonucleotide for detection of SNP TSC0012336
agatttgtatatt

SEQ ID NO: 40802 - DNA, 13 bp, Artificial Sequence
  Oligonucleotide for detection of SNP TSC0012336
aatatacaaatct

SEQ ID NO: 40803 - DNA, 13 bp, Artificial Sequence
  Oligonucleotide for detection of SNP TSC0012336
agatttatatatt

SEQ ID NO: 40804 - DNA, 13 bp, Artificial Sequence
  Oligonucleotide for detection of SNP TSC0012336
aatatataaatct

SEQ ID NO: 40805 - DNA, 13 bp, Artificial Sequence
  Oligonucleotide for detection of SNP TSC0012337
tttggagggagaa

SEQ ID NO: 40806 - DNA, 13 bp, Artificial Sequence
  Oligonucleotide for detection of SNP TSC0012337
ttctccctccaaa

SEQ ID NO: 40807 - DNA, 13 bp, Artificial Sequence
  Oligonucleotide for detection of SNP TSC0012337
tttggaaggagaa

SEQ ID NO: 40808 - DNA, 13 bp, Artificial Sequence
  Oligonucleotide for detection of SNP TSC0012337
ttctccttccaaa

SEQ ID NO: 40809 - DNA, 13 bp, Artificial Sequence
  Oligonucleotide for detection of SNP TSC0012339
gaggggaaaaaaa

SEQ ID NO: 40810 - DNA, 13 bp, Artificial Sequence
  Oligonucleotide for detection of SNP TSC0012339
tttttttcccctc

SEQ ID NO: 40811 - DNA, 13 bp, Artificial Sequence
  Oligonucleotide for detection of SNP TSC0012339
gagggggaaaaaa

SEQ ID NO: 40812 - DNA, 13 bp, Artificial Sequence
  Oligonucleotide for detection of SNP TSC0012339
ttttttccccctc

SEQ ID NO: 40813 - DNA, 13 bp, Artificial Sequence
  Oligonucleotide for detection of SNP TSC0012340
attgttgagttta

SEQ ID NO: 40814 - DNA, 13 bp, Artificial Sequence
  Oligonucleotide for detection of SNP TSC0012340
taaactcaacaat

SEQ ID NO: 40815 - DNA, 13 bp, Artificial Sequence
  Oligonucleotide for detection of SNP TSC0012340
attgttaagttta

SEQ ID NO: 40816 - DNA, 13 bp, Artificial Sequence
  Oligonucleotide for detection of SNP TSC0012340
taaacttaacaat

SEQ ID NO: 40817 - DNA, 13 bp, Artificial Sequence
  Oligonucleotide for detection of SNP TSC0012341
tttagtagtgtty

SEQ ID NO: 40818 - DNA, 13 bp, Artificial Sequence
  Oligonucleotide for detection of SNP TSC0012341
raacactactaaa

SEQ ID NO: 40819 - DNA, 13 bp, Artificial Sequence
  Oligonucleotide for detection of SNP TSC0012341
tttagtggtgtty

SEQ ID NO: 40820 - DNA, 13 bp, Artificial Sequence
  Oligonucleotide for detection of SNP TSC0012341
raacaccactaaa

SEQ ID NO: 40821 - DNA, 13 bp, Artificial Sequence
  Oligonucleotide for detection of SNP TSC0012341
tttagcggtgtty

SEQ ID NO: 40822 - DNA, 13 bp, Artificial Sequence
  Oligonucleotide for detection of SNP TSC0012341
raacaccgctaaa

SEQ ID NO: 40823 - DNA, 13 bp, Artificial Sequence
  Oligonucleotide for detection of SNP TSC0012341
ggatattgttgag

SEQ ID NO: 40824 - DNA, 13 bp, Artificial Sequence
  Oligonucleotide for detection of SNP TSC0012341
ctcaacaatatcc

SEQ ID NO: 40825 - DNA, 13 bp, Artificial Sequence
  Oligonucleotide for detection of SNP TSC0012341
ggatatcgttgag

SEQ ID NO: 40826 - DNA, 13 bp, Artificial Sequence
  Oligonucleotide for detection of SNP TSC0012341
ctcaacgatatcc

SEQ ID NO: 40827 - DNA, 13 bp, Artificial Sequence
  Oligonucleotide for detection of SNP TSC0012342
tgggtgtgttttt

SEQ ID NO: 40828 - DNA, 13 bp, Artificial Sequence
  Oligonucleotide for detection of SNP TSC0012342
aaaaacacaccca

SEQ ID NO: 40829 - DNA, 13 bp, Artificial Sequence
  Oligonucleotide for detection of SNP TSC0012342
cgggtgtgttttt

SEQ ID NO: 40830 - DNA, 13 bp, Artificial Sequence
  Oligonucleotide for detection of SNP TSC0012342
aaaaacacacccg

SEQ ID NO: 40831 - DNA, 13 bp, Artificial Sequence
  Oligonucleotide for detection of SNP TSC0012342
tgggcgtgttttt

SEQ ID NO: 40832 - DNA, 13 bp, Artificial Sequence
  Oligonucleotide for detection of SNP TSC0012342
aaaaacacgccca

SEQ ID NO: 40833 - DNA, 13 bp, Artificial Sequence
  Oligonucleotide for detection of SNP TSC0012342
tgggtgcgttttt

SEQ ID NO: 40834 - DNA, 13 bp, Artificial Sequence
  Oligonucleotide for detection of SNP TSC0012342
aaaaacgcaccca

SEQ ID NO: 40835 - DNA, 13 bp, Artificial Sequence
  Oligonucleotide for detection of SNP TSC0012342
cgggcgtgttttt

SEQ ID NO: 40836 - DNA, 13 bp, Artificial Sequence
  Oligonucleotide for detection of SNP TSC0012342
aaaaacacgcccg

SEQ ID NO: 40837 - DNA, 13 bp, Artificial Sequence
  Oligonucleotide for detection of SNP TSC0012342
cgggtgcgttttt

SEQ ID NO: 40838 - DNA, 13 bp, Artificial Sequence
  Oligonucleotide for detection of SNP TSC0012342
aaaaacgcacccg

SEQ ID NO: 40839 - DNA, 13 bp, Artificial Sequence
  Oligonucleotide for detection of SNP TSC0012342
tgggcgcgttttt

SEQ ID NO: 40840 - DNA, 13 bp, Artificial Sequence
  Oligonucleotide for detection of SNP TSC0012342
aaaaacgcgccca

SEQ ID NO: 40841 - DNA, 13 bp, Artificial Sequence
  Oligonucleotide for detection of SNP TSC0012342
cgggcgcgttttt

SEQ ID NO: 40842 - DNA, 13 bp, Artificial Sequence
  Oligonucleotide for detection of SNP TSC0012342
aaaaacgcgcccg

SEQ ID NO: 40843 - DNA, 13 bp, Artificial Sequence
  Oligonucleotide for detection of SNP TSC0012342
aggagtgtgtttg

SEQ ID NO: 40844 - DNA, 13 bp, Artificial Sequence
  Oligonucleotide for detection of SNP TSC0012342
caaacacactcct

SEQ ID NO: 40845 - DNA, 13 bp, Artificial Sequence
  Oligonucleotide for detection of SNP TSC0012342
aggagtatgtttg

SEQ ID NO: 40846 - DNA, 13 bp, Artificial Sequence
  Oligonucleotide for detection of SNP TSC0012342
caaacatactcct

SEQ ID NO: 40847 - DNA, 13 bp, Artificial Sequence
  Oligonucleotide for detection of SNP TSC0012342
aggagcgtgtttg

SEQ ID NO: 40848 - DNA, 13 bp, Artificial Sequence
  Oligonucleotide for detection of SNP TSC0012342
caaacacgctcct

SEQ ID NO: 40849 - DNA, 13 bp, Artificial Sequence
  Oligonucleotide for detection of SNP TSC0012342
aggagtacgtttg

SEQ ID NO: 40850 - DNA, 13 bp, Artificial Sequence
  Oligonucleotide for detection of SNP TSC0012342
caaacgtactcct

SEQ ID NO: 40851 - DNA, 13 bp, Artificial Sequence
  Oligonucleotide for detection of SNP TSC0012342
aggagtgcgtttg

SEQ ID NO: 40852 - DNA, 13 bp, Artificial Sequence
  Oligonucleotide for detection of SNP TSC0012342
caaacgcactcct

SEQ ID NO: 40853 - DNA, 13 bp, Artificial Sequence
  Oligonucleotide for detection of SNP TSC0012342
aggagtatgttcg

SEQ ID NO: 40854 - DNA, 13 bp, Artificial Sequence
  Oligonucleotide for detection of SNP TSC0012342
cgaacatactcct

SEQ ID NO: 40855 - DNA, 13 bp, Artificial Sequence
  Oligonucleotide for detection of SNP TSC0012342
aggagtgtgttcg

SEQ ID NO: 40856 - DNA, 13 bp, Artificial Sequence
  Oligonucleotide for detection of SNP TSC0012342
cgaacacactcct

SEQ ID NO: 40857 - DNA, 13 bp, Artificial Sequence
  Oligonucleotide for detection of SNP TSC0012342
aggagtacgttcg

SEQ ID NO: 40858 - DNA, 13 bp, Artificial Sequence
  Oligonucleotide for detection of SNP TSC0012342
cgaacgtactcct

SEQ ID NO: 40859 - DNA, 13 bp, Artificial Sequence
  Oligonucleotide for detection of SNP TSC0012342
aggagcgcgtttg

SEQ ID NO: 40860 - DNA, 13 bp, Artificial Sequence
  Oligonucleotide for detection of SNP TSC0012342
caaacgcgctcct

SEQ ID NO: 40861 - DNA, 13 bp, Artificial Sequence
  Oligonucleotide for detection of SNP TSC0012342
aggagcgtgttcg

SEQ ID NO: 40862 - DNA, 13 bp, Artificial Sequence
  Oligonucleotide for detection of SNP TSC0012342
cgaacacgctcct

SEQ ID NO: 40863 - DNA, 13 bp, Artificial Sequence
  Oligonucleotide for detection of SNP TSC0012342
aggagtgcgttcg

SEQ ID NO: 40864 - DNA, 13 bp, Artificial Sequence
  Oligonucleotide for detection of SNP TSC0012342
cgaacgcactcct

SEQ ID NO: 40865 - DNA, 13 bp, Artificial Sequence
  Oligonucleotide for detection of SNP TSC0012342
aggagcgcgttcg

SEQ ID NO: 40866 - DNA, 13 bp, Artificial Sequence
  Oligonucleotide for detection of SNP TSC0012342
cgaacgcgctcct

SEQ ID NO: 40867 - DNA, 13 bp, Artificial Sequence
  Oligonucleotide for detection of SNP TSC0012345
tttggtgtatttg

SEQ ID NO: 40868 - DNA, 13 bp, Artificial Sequence
  Oligonucleotide for detection of SNP TSC0012345
caaatacaccaaa

SEQ ID NO: 40869 - DNA, 13 bp, Artificial Sequence
  Oligonucleotide for detection of SNP TSC0012345
tttggtatatttg

SEQ ID NO: 40870 - DNA, 13 bp, Artificial Sequence
  Oligonucleotide for detection of SNP TSC0012345
caaatataccaaa

SEQ ID NO: 40871 - DNA, 13 bp, Artificial Sequence
  Oligonucleotide for detection of SNP TSC0012347
aatgttgtttaga

SEQ ID NO: 40872 - DNA, 13 bp, Artificial Sequence
  Oligonucleotide for detection of SNP TSC0012347
tctaaacaacatt

SEQ ID NO: 40873 - DNA, 13 bp, Artificial Sequence
  Oligonucleotide for detection of SNP TSC0012347
aatgttatttaga

SEQ ID NO: 40874 - DNA, 13 bp, Artificial Sequence
  Oligonucleotide for detection of SNP TSC0012347
tctaaataacatt

SEQ ID NO: 40875 - DNA, 13 bp, Artificial Sequence
  Oligonucleotide for detection of SNP TSC0012350
ttgtgtatagtta

SEQ ID NO: 40876 - DNA, 13 bp, Artificial Sequence
  Oligonucleotide for detection of SNP TSC0012350
taactatacacaa

SEQ ID NO: 40877 - DNA, 13 bp, Artificial Sequence
  Oligonucleotide for detection of SNP TSC0012350
ttgtgtgtagtta

SEQ ID NO: 40878 - DNA, 13 bp, Artificial Sequence
  Oligonucleotide for detection of SNP TSC0012350
taactacacacaa

SEQ ID NO: 40879 - DNA, 13 bp, Artificial Sequence
  Oligonucleotide for detection of SNP TSC0012350
ttgcgtatagtta

SEQ ID NO: 40880 - DNA, 13 bp, Artificial Sequence
  Oligonucleotide for detection of SNP TSC0012350
taactatacgcaa

SEQ ID NO: 40881 - DNA, 13 bp, Artificial Sequence
  Oligonucleotide for detection of SNP TSC0012350
ttgcgtgtagtta

SEQ ID NO: 40882 - DNA, 13 bp, Artificial Sequence
  Oligonucleotide for detection of SNP TSC0012350
taactacacgcaa

SEQ ID NO: 40883 - DNA, 13 bp, Artificial Sequence
  Oligonucleotide for detection of SNP TSC0012350
ttgtgcgtagtta

SEQ ID NO: 40884 - DNA, 13 bp, Artificial Sequence
  Oligonucleotide for detection of SNP TSC0012350
taactacgcacaa

SEQ ID NO: 40885 - DNA, 13 bp, Artificial Sequence
  Oligonucleotide for detection of SNP TSC0012350
ttgcgcgtagtta

SEQ ID NO: 40886 - DNA, 13 bp, Artificial Sequence
  Oligonucleotide for detection of SNP TSC0012350
taactacgcgcaa

SEQ ID NO: 40887 - DNA, 13 bp, Artificial Sequence
  Oligonucleotide for detection of SNP TSC0012350
tggttgtgtgtag

SEQ ID NO: 40888 - DNA, 13 bp, Artificial Sequence
  Oligonucleotide for detection of SNP TSC0012350
ctacacacaacca

SEQ ID NO: 40889 - DNA, 13 bp, Artificial Sequence
  Oligonucleotide for detection of SNP TSC0012350
tggttgtgcgtag

SEQ ID NO: 40890 - DNA, 13 bp, Artificial Sequence
  Oligonucleotide for detection of SNP TSC0012350
ctacgcacaacca

SEQ ID NO: 40891 - DNA, 13 bp, Artificial Sequence
  Oligonucleotide for detection of SNP TSC0012350
tggttgcgtgtag

SEQ ID NO: 40892 - DNA, 13 bp, Artificial Sequence
  Oligonucleotide for detection of SNP TSC0012350
ctacacgcaacca

SEQ ID NO: 40893 - DNA, 13 bp, Artificial Sequence
  Oligonucleotide for detection of SNP TSC0012350
tggttgcgcgtag

SEQ ID NO: 40894 - DNA, 13 bp, Artificial Sequence
  Oligonucleotide for detection of SNP TSC0012350
ctacgcgcaacca

SEQ ID NO: 40895 - DNA, 13 bp, Artificial Sequence
  Oligonucleotide for detection of SNP TSC0012351
tgtagaggggtty

SEQ ID NO: 40896 - DNA, 13 bp, Artificial Sequence
  Oligonucleotide for detection of SNP TSC0012351
raacccctctaca

SEQ ID NO: 40897 - DNA, 13 bp, Artificial Sequence
  Oligonucleotide for detection of SNP TSC0012351
tgtagatgggtty

SEQ ID NO: 40898 - DNA, 13 bp, Artificial Sequence
  Oligonucleotide for detection of SNP TSC0012351
raacccatctaca

SEQ ID NO: 40899 - DNA, 13 bp, Artificial Sequence
  Oligonucleotide for detection of SNP TSC0012351
gaatttttttgta

SEQ ID NO: 40900 - DNA, 13 bp, Artificial Sequence
  Oligonucleotide for detection of SNP TSC0012351
tacaaaaaaattc

SEQ ID NO: 40901 - DNA, 13 bp, Artificial Sequence
  Oligonucleotide for detection of SNP TSC0012351
gaatttatttgta

SEQ ID NO: 40902 - DNA, 13 bp, Artificial Sequence
  Oligonucleotide for detection of SNP TSC0012351
tacaaataaattc

SEQ ID NO: 40903 - DNA, 13 bp, Artificial Sequence
  Oligonucleotide for detection of SNP TSC0012352
gagattaagatta

SEQ ID NO: 40904 - DNA, 13 bp, Artificial Sequence
  Oligonucleotide for detection of SNP TSC0012352
taatcttaatctc

SEQ ID NO: 40905 - DNA, 13 bp, Artificial Sequence
  Oligonucleotide for detection of SNP TSC0012352
gagattgagatta

SEQ ID NO: 40906 - DNA, 13 bp, Artificial Sequence
  Oligonucleotide for detection of SNP TSC0012352
taatctcaatctc

SEQ ID NO: 40907 - DNA, 13 bp, Artificial Sequence
  Oligonucleotide for detection of SNP TSC0012352
gagatcgagatta

SEQ ID NO: 40908 - DNA, 13 bp, Artificial Sequence
  Oligonucleotide for detection of SNP TSC0012352
taatctcgatctc

SEQ ID NO: 40909 - DNA, 13 bp, Artificial Sequence
  Oligonucleotide for detection of SNP TSC0012352
tggttttgattty

SEQ ID NO: 40910 - DNA, 13 bp, Artificial Sequence
  Oligonucleotide for detection of SNP TSC0012352
raaatcaaaacca

SEQ ID NO: 40911 - DNA, 13 bp, Artificial Sequence
  Oligonucleotide for detection of SNP TSC0012352
tggtttcgattty

SEQ ID NO: 40912 - DNA, 13 bp, Artificial Sequence
  Oligonucleotide for detection of SNP TSC0012352
raaatcgaaacca

SEQ ID NO: 40913 - DNA, 13 bp, Artificial Sequence
  Oligonucleotide for detection of SNP TSC0012353
atagatggattta

SEQ ID NO: 40914 - DNA, 13 bp, Artificial Sequence
  Oligonucleotide for detection of SNP TSC0012353
taaatccatctat

SEQ ID NO: 40915 - DNA, 13 bp, Artificial Sequence
  Oligonucleotide for detection of SNP TSC0012353
atagattgattta

SEQ ID NO: 40916 - DNA, 13 bp, Artificial Sequence
  Oligonucleotide for detection of SNP TSC0012353
taaatcaatctat

SEQ ID NO: 40917 - DNA, 13 bp, Artificial Sequence
  Oligonucleotide for detection of SNP TSC0012353
taagtttatttat

SEQ ID NO: 40918 - DNA, 13 bp, Artificial Sequence
  Oligonucleotide for detection of SNP TSC0012353
ataaataaactta

SEQ ID NO: 40919 - DNA, 13 bp, Artificial Sequence
  Oligonucleotide for detection of SNP TSC0012353
taagttaatttat

SEQ ID NO: 40920 - DNA, 13 bp, Artificial Sequence
  Oligonucleotide for detection of SNP TSC0012353
ataaattaactta

SEQ ID NO: 40921 - DNA, 13 bp, Artificial Sequence
  Oligonucleotide for detection of SNP TSC0012354
ttcgttattatgy

SEQ ID NO: 40922 - DNA, 13 bp, Artificial Sequence
  Oligonucleotide for detection of SNP TSC0012354
rcataataacgaa

SEQ ID NO: 40923 - DNA, 13 bp, Artificial Sequence
  Oligonucleotide for detection of SNP TSC0012354
ttcgttgttatgy

SEQ ID NO: 40924 - DNA, 13 bp, Artificial Sequence
  Oligonucleotide for detection of SNP TSC0012354
rcataacaacgaa

SEQ ID NO: 40925 - DNA, 13 bp, Artificial Sequence
  Oligonucleotide for detection of SNP TSC0012354
ttcgtcgttatgy

SEQ ID NO: 40926 - DNA, 13 bp, Artificial Sequence
  Oligonucleotide for detection of SNP TSC0012354
rcataacgacgaa

SEQ ID NO: 40927 - DNA, 13 bp, Artificial Sequence
  Oligonucleotide for detection of SNP TSC0012354
gtatggtggtggg

SEQ ID NO: 40928 - DNA, 13 bp, Artificial Sequence
  Oligonucleotide for detection of SNP TSC0012354
cccaccaccatac

SEQ ID NO: 40929 - DNA, 13 bp, Artificial Sequence
  Oligonucleotide for detection of SNP TSC0012354
gtatggtggcggg

SEQ ID NO: 40930 - DNA, 13 bp, Artificial Sequence
  Oligonucleotide for detection of SNP TSC0012354
cccgccaccatac

SEQ ID NO: 40931 - DNA, 13 bp, Artificial Sequence
  Oligonucleotide for detection of SNP TSC0012354
gtatggcggtggg

SEQ ID NO: 40932 - DNA, 13 bp, Artificial Sequence
  Oligonucleotide for detection of SNP TSC0012354
cccaccgccatac

SEQ ID NO: 40933 - DNA, 13 bp, Artificial Sequence
  Oligonucleotide for detection of SNP TSC0012354
gtatggcggcggg

SEQ ID NO: 40934 - DNA, 13 bp, Artificial Sequence
  Oligonucleotide for detection of SNP TSC0012354
cccgccgccatac

SEQ ID NO: 40935 - DNA, 13 bp, Artificial Sequence
  Oligonucleotide for detection of SNP TSC0012356
aatataatattgg

SEQ ID NO: 40936 - DNA, 13 bp, Artificial Sequence
  Oligonucleotide for detection of SNP TSC0012356
ccaatattatatt

SEQ ID NO: 40937 - DNA, 13 bp, Artificial Sequence
  Oligonucleotide for detection of SNP TSC0012356
aatatagtattgg

SEQ ID NO: 40938 - DNA, 13 bp, Artificial Sequence
  Oligonucleotide for detection of SNP TSC0012356
ccaatactatatt

SEQ ID NO: 40939 - DNA, 13 bp, Artificial Sequence
  Oligonucleotide for detection of SNP TSC0012359
gggtttaaagaga

SEQ ID NO: 40940 - DNA, 13 bp, Artificial Sequence
  Oligonucleotide for detection of SNP TSC0012359
tctctttaaaccc

SEQ ID NO: 40941 - DNA, 13 bp, Artificial Sequence
  Oligonucleotide for detection of SNP TSC0012359
gggtttgaagaga

SEQ ID NO: 40942 - DNA, 13 bp, Artificial Sequence
  Oligonucleotide for detection of SNP TSC0012359
tctcttcaaaccc

SEQ ID NO: 40943 - DNA, 13 bp, Artificial Sequence
  Oligonucleotide for detection of SNP TSC0012359
gggttcgaagaga

SEQ ID NO: 40944 - DNA, 13 bp, Artificial Sequence
  Oligonucleotide for detection of SNP TSC0012359
tctcttcgaaccc

SEQ ID NO: 40945 - DNA, 13 bp, Artificial Sequence
  Oligonucleotide for detection of SNP TSC0012359
tttttttgaatty

SEQ ID NO: 40946 - DNA, 13 bp, Artificial Sequence
  Oligonucleotide for detection of SNP TSC0012359
raattcaaaaaaa

SEQ ID NO: 40947 - DNA, 13 bp, Artificial Sequence
  Oligonucleotide for detection of SNP TSC0012359
ttttttcgaatty

SEQ ID NO: 40948 - DNA, 13 bp, Artificial Sequence
  Oligonucleotide for detection of SNP TSC0012359
raattcgaaaaaa

SEQ ID NO: 40949 - DNA, 13 bp, Artificial Sequence
  Oligonucleotide for detection of SNP TSC0012360
ttattaaagtgtt

SEQ ID NO: 40950 - DNA, 13 bp, Artificial Sequence
  Oligonucleotide for detection of SNP TSC0012360
aacactttaataa

SEQ ID NO: 40951 - DNA, 13 bp, Artificial Sequence
  Oligonucleotide for detection of SNP TSC0012360
ttattatagtgtt

SEQ ID NO: 40952 - DNA, 13 bp, Artificial Sequence
  Oligonucleotide for detection of SNP TSC0012360
aacactataataa

SEQ ID NO: 40953 - DNA, 13 bp, Artificial Sequence
  Oligonucleotide for detection of SNP TSC0012360
aatattttaatga

SEQ ID NO: 40954 - DNA, 13 bp, Artificial Sequence
  Oligonucleotide for detection of SNP TSC0012360
tcattaaaatatt

SEQ ID NO: 40955 - DNA, 13 bp, Artificial Sequence
  Oligonucleotide for detection of SNP TSC0012360
aatattgtaatga

SEQ ID NO: 40956 - DNA, 13 bp, Artificial Sequence
  Oligonucleotide for detection of SNP TSC0012360
tcattacaatatt

SEQ ID NO: 40957 - DNA, 13 bp, Artificial Sequence
  Oligonucleotide for detection of SNP TSC0012362
atttgagaaatat

SEQ ID NO: 40958 - DNA, 13 bp, Artificial Sequence
  Oligonucleotide for detection of SNP TSC0012362
atatttctcaaat

SEQ ID NO: 40959 - DNA, 13 bp, Artificial Sequence
  Oligonucleotide for detection of SNP TSC0012362
atttgaaaaatat

SEQ ID NO: 40960 - DNA, 13 bp, Artificial Sequence
  Oligonucleotide for detection of SNP TSC0012362
atatttttcaaat

SEQ ID NO: 40961 - DNA, 13 bp, Artificial Sequence
  Oligonucleotide for detection of SNP TSC0012363
tggtttgtttgty

SEQ ID NO: 40962 - DNA, 13 bp, Artificial Sequence
  Oligonucleotide for detection of SNP TSC0012363
racaaacaaacca

SEQ ID NO: 40963 - DNA, 13 bp, Artificial Sequence
  Oligonucleotide for detection of SNP TSC0012363
tggtttatttgty

SEQ ID NO: 40964 - DNA, 13 bp, Artificial Sequence
  Oligonucleotide for detection of SNP TSC0012363
racaaataaacca

SEQ ID NO: 40965 - DNA, 13 bp, Artificial Sequence
  Oligonucleotide for detection of SNP TSC0012363
cggtttgtttgty

SEQ ID NO: 40966 - DNA, 13 bp, Artificial Sequence
  Oligonucleotide for detection of SNP TSC0012363
racaaacaaaccg

SEQ ID NO: 40967 - DNA, 13 bp, Artificial Sequence
  Oligonucleotide for detection of SNP TSC0012363
cggtttatttgty

SEQ ID NO: 40968 - DNA, 13 bp, Artificial Sequence
  Oligonucleotide for detection of SNP TSC0012363
racaaataaaccg

SEQ ID NO: 40969 - DNA, 13 bp, Artificial Sequence
  Oligonucleotide for detection of SNP TSC0012364
gttttggttttgy

SEQ ID NO: 40970 - DNA, 13 bp, Artificial Sequence
  Oligonucleotide for detection of SNP TSC0012364
rcaaaaccaaaac

SEQ ID NO: 40971 - DNA, 13 bp, Artificial Sequence
  Oligonucleotide for detection of SNP TSC0012364
gttttgtttttgy

SEQ ID NO: 40972 - DNA, 13 bp, Artificial Sequence
  Oligonucleotide for detection of SNP TSC0012364
rcaaaaacaaaac

SEQ ID NO: 40973 - DNA, 13 bp, Artificial Sequence
  Oligonucleotide for detection of SNP TSC0012364
gtaaggttagggy

SEQ ID NO: 40974 - DNA, 13 bp, Artificial Sequence
  Oligonucleotide for detection of SNP TSC0012364
rccctaaccttac

SEQ ID NO: 40975 - DNA, 13 bp, Artificial Sequence
  Oligonucleotide for detection of SNP TSC0012364
gtaaggatagggy

SEQ ID NO: 40976 - DNA, 13 bp, Artificial Sequence
  Oligonucleotide for detection of SNP TSC0012364
rccctatccttac

SEQ ID NO: 40977 - DNA, 13 bp, Artificial Sequence
  Oligonucleotide for detection of SNP TSC0012365
tttatatgaatta

SEQ ID NO: 40978 - DNA, 13 bp, Artificial Sequence
  Oligonucleotide for detection of SNP TSC0012365
taattcatataaa

SEQ ID NO: 40979 - DNA, 13 bp, Artificial Sequence
  Oligonucleotide for detection of SNP TSC0012365
tttatacgaatta

SEQ ID NO: 40980 - DNA, 13 bp, Artificial Sequence
  Oligonucleotide for detection of SNP TSC0012365
taattcgtataaa

SEQ ID NO: 40981 - DNA, 13 bp, Artificial Sequence
  Oligonucleotide for detection of SNP TSC0012365
tgatttgtatgga

SEQ ID NO: 40982 - DNA, 13 bp, Artificial Sequence
  Oligonucleotide for detection of SNP TSC0012365
tccatacaaatca

SEQ ID NO: 40983 - DNA, 13 bp, Artificial Sequence
  Oligonucleotide for detection of SNP TSC0012365
tgatttatatgga

SEQ ID NO: 40984 - DNA, 13 bp, Artificial Sequence
  Oligonucleotide for detection of SNP TSC0012365
tccatataaatca

SEQ ID NO: 40985 - DNA, 13 bp, Artificial Sequence
  Oligonucleotide for detection of SNP TSC0012365
tgattcgtatgga

SEQ ID NO: 40986 - DNA, 13 bp, Artificial Sequence
  Oligonucleotide for detection of SNP TSC0012365
tccatacgaatca

SEQ ID NO: 40987 - DNA, 13 bp, Artificial Sequence
  Oligonucleotide for detection of SNP TSC0012366
tggaatatttagg

SEQ ID NO: 40988 - DNA, 13 bp, Artificial Sequence
  Oligonucleotide for detection of SNP TSC0012366
cctaaatattcca

SEQ ID NO: 40989 - DNA, 13 bp, Artificial Sequence
  Oligonucleotide for detection of SNP TSC0012366
tggaatgtttagg

SEQ ID NO: 40990 - DNA, 13 bp, Artificial Sequence
  Oligonucleotide for detection of SNP TSC0012366
cctaaacattcca

SEQ ID NO: 40991 - DNA, 13 bp, Artificial Sequence
  Oligonucleotide for detection of SNP TSC0012366
tggaacgtttagg

SEQ ID NO: 40992 - DNA, 13 bp, Artificial Sequence
  Oligonucleotide for detection of SNP TSC0012366
cctaaacgttcca

SEQ ID NO: 40993 - DNA, 13 bp, Artificial Sequence
  Oligonucleotide for detection of SNP TSC0012366
tttgagtgtttta

SEQ ID NO: 40994 - DNA, 13 bp, Artificial Sequence
  Oligonucleotide for detection of SNP TSC0012366
taaaacactcaaa

SEQ ID NO: 40995 - DNA, 13 bp, Artificial Sequence
  Oligonucleotide for detection of SNP TSC0012366
tttgagcgtttta

SEQ ID NO: 40996 - DNA, 13 bp, Artificial Sequence
  Oligonucleotide for detection of SNP TSC0012366
taaaacgctcaaa

SEQ ID NO: 40997 - DNA, 13 bp, Artificial Sequence
  Oligonucleotide for detection of SNP TSC0012370
ggtttagttggaa

SEQ ID NO: 40998 - DNA, 13 bp, Artificial Sequence
  Oligonucleotide for detection of SNP TSC0012370
ttccaactaaacc

SEQ ID NO: 40999 - DNA, 13 bp, Artificial Sequence
  Oligonucleotide for detection of SNP TSC0012370
ggtttatttggaa

SEQ ID NO: 41000 - DNA, 13 bp, Artificial Sequence
  Oligonucleotide for detection of SNP TSC0012370
ttccaaataaacc

SEQ ID NO: 41001 - DNA, 13 bp, Artificial Sequence
  Oligonucleotide for detection of SNP TSC0012370
ttttaattaaaty

SEQ ID NO: 41002 - DNA, 13 bp, Artificial Sequence
  Oligonucleotide for detection of SNP TSC0012370
ratttaattaaaa

SEQ ID NO: 41003 - DNA, 13 bp, Artificial Sequence
  Oligonucleotide for detection of SNP TSC0012370
ttttaaataaaty

SEQ ID NO: 41004 - DNA, 13 bp, Artificial Sequence
  Oligonucleotide for detection of SNP TSC0012370
ratttatttaaaa

SEQ ID NO: 41005 - DNA, 13 bp, Artificial Sequence
  Oligonucleotide for detection of SNP TSC0012374
agttttatattgg

SEQ ID NO: 41006 - DNA, 13 bp, Artificial Sequence
  Oligonucleotide for detection of SNP TSC0012374
ccaatataaaact

SEQ ID NO: 41007 - DNA, 13 bp, Artificial Sequence
  Oligonucleotide for detection of SNP TSC0012374
agttttgtattgg

SEQ ID NO: 41008 - DNA, 13 bp, Artificial Sequence
  Oligonucleotide for detection of SNP TSC0012374
ccaatacaaaact

SEQ ID NO: 41009 - DNA, 13 bp, Artificial Sequence
  Oligonucleotide for detection of SNP TSC0012374
agttttatatcgg

SEQ ID NO: 41010 - DNA, 13 bp, Artificial Sequence
  Oligonucleotide for detection of SNP TSC0012374
ccgatataaaact

SEQ ID NO: 41011 - DNA, 13 bp, Artificial Sequence
  Oligonucleotide for detection of SNP TSC0012374
agttttgtatcgg

SEQ ID NO: 41012 - DNA, 13 bp, Artificial Sequence
  Oligonucleotide for detection of SNP TSC0012374
ccgatacaaaact

SEQ ID NO: 41013 - DNA, 13 bp, Artificial Sequence
  Oligonucleotide for detection of SNP TSC0012376
aaaaaaaatattg

SEQ ID NO: 41014 - DNA, 13 bp, Artificial Sequence
  Oligonucleotide for detection of SNP TSC0012376
caatatttttttt

SEQ ID NO: 41015 - DNA, 13 bp, Artificial Sequence
  Oligonucleotide for detection of SNP TSC0012376
aaaaaatatattg

SEQ ID NO: 41016 - DNA, 13 bp, Artificial Sequence
  Oligonucleotide for detection of SNP TSC0012376
caatatatttttt

SEQ ID NO: 41017 - DNA, 13 bp, Artificial Sequence
  Oligonucleotide for detection of SNP TSC0012376
taatgtttttttt

SEQ ID NO: 41018 - DNA, 13 bp, Artificial Sequence
  Oligonucleotide for detection of SNP TSC0012376
aaaaaaaacatta

SEQ ID NO: 41019 - DNA, 13 bp, Artificial Sequence
  Oligonucleotide for detection of SNP TSC0012377
ggtattgaagtta

SEQ ID NO: 41020 - DNA, 13 bp, Artificial Sequence
  Oligonucleotide for detection of SNP TSC0012377
taacttcaatacc

SEQ ID NO: 41021 - DNA, 13 bp, Artificial Sequence
  Oligonucleotide for detection of SNP TSC0012377
ggtattaaagtta

SEQ ID NO: 41022 - DNA, 13 bp, Artificial Sequence
  Oligonucleotide for detection of SNP TSC0012377
taactttaatacc

SEQ ID NO: 41023 - DNA, 13 bp, Artificial Sequence
  Oligonucleotide for detection of SNP TSC0012378
ttggattgaatty

SEQ ID NO: 41024 - DNA, 13 bp, Artificial Sequence
  Oligonucleotide for detection of SNP TSC0012378
raattcaatccaa

SEQ ID NO: 41025 - DNA, 13 bp, Artificial Sequence
  Oligonucleotide for detection of SNP TSC0012378
ttggatggaatty

SEQ ID NO: 41026 - DNA, 13 bp, Artificial Sequence
  Oligonucleotide for detection of SNP TSC0012378
raattccatccaa

SEQ ID NO: 41027 - DNA, 13 bp, Artificial Sequence
  Oligonucleotide for detection of SNP TSC0012378
ttggatcgaatty

SEQ ID NO: 41028 - DNA, 13 bp, Artificial Sequence
  Oligonucleotide for detection of SNP TSC0012378
raattcgatccaa

SEQ ID NO: 41029 - DNA, 13 bp, Artificial Sequence
  Oligonucleotide for detection of SNP TSC0012378
ttggacggaatty

SEQ ID NO: 41030 - DNA, 13 bp, Artificial Sequence
  Oligonucleotide for detection of SNP TSC0012378
raattccgtccaa

SEQ ID NO: 41031 - DNA, 13 bp, Artificial Sequence
  Oligonucleotide for detection of SNP TSC0012378
gggtttggtttag

SEQ ID NO: 41032 - DNA, 13 bp, Artificial Sequence
  Oligonucleotide for detection of SNP TSC0012378
ctaaaccaaaccc

SEQ ID NO: 41033 - DNA, 13 bp, Artificial Sequence
  Oligonucleotide for detection of SNP TSC0012378
gggttttgtttag

SEQ ID NO: 41034 - DNA, 13 bp, Artificial Sequence
  Oligonucleotide for detection of SNP TSC0012378
ctaaacaaaaccc

SEQ ID NO: 41035 - DNA, 13 bp, Artificial Sequence
  Oligonucleotide for detection of SNP TSC0012378
gggttcggtttag

SEQ ID NO: 41036 - DNA, 13 bp, Artificial Sequence
  Oligonucleotide for detection of SNP TSC0012378
ctaaaccgaaccc

SEQ ID NO: 41037 - DNA, 13 bp, Artificial Sequence
  Oligonucleotide for detection of SNP TSC0012378
gggtttcgtttag

SEQ ID NO: 41038 - DNA, 13 bp, Artificial Sequence
  Oligonucleotide for detection of SNP TSC0012378
ctaaacgaaaccc

SEQ ID NO: 41039 - DNA, 13 bp, Artificial Sequence
  Oligonucleotide for detection of SNP TSC0012379
aattttaaatttt

SEQ ID NO: 41040 - DNA, 13 bp, Artificial Sequence
  Oligonucleotide for detection of SNP TSC0012379
aaaatttaaaatt

SEQ ID NO: 41041 - DNA, 13 bp, Artificial Sequence
  Oligonucleotide for detection of SNP TSC0012379
aatttttaatttt

SEQ ID NO: 41042 - DNA, 13 bp, Artificial Sequence
  Oligonucleotide for detection of SNP TSC0012379
aaaattaaaaatt

SEQ ID NO: 41043 - DNA, 13 bp, Artificial Sequence
  Oligonucleotide for detection of SNP TSC0012379
agagtttaaagtt

SEQ ID NO: 41044 - DNA, 13 bp, Artificial Sequence
  Oligonucleotide for detection of SNP TSC0012379
aactttaaactct

SEQ ID NO: 41045 - DNA, 13 bp, Artificial Sequence
  Oligonucleotide for detection of SNP TSC0012379
agagttgaaagtt

SEQ ID NO: 41046 - DNA, 13 bp, Artificial Sequence
  Oligonucleotide for detection of SNP TSC0012379
aactttcaactct

SEQ ID NO: 41047 - DNA, 13 bp, Artificial Sequence
  Oligonucleotide for detection of SNP TSC0012380
tagaggagaaagg

SEQ ID NO: 41048 - DNA, 13 bp, Artificial Sequence
  Oligonucleotide for detection of SNP TSC0012380
cctttctcctcta

SEQ ID NO: 41049 - DNA, 13 bp, Artificial Sequence
  Oligonucleotide for detection of SNP TSC0012380
tagaggggaaagg

SEQ ID NO: 41050 - DNA, 13 bp, Artificial Sequence
  Oligonucleotide for detection of SNP TSC0012380
cctttcccctcta

SEQ ID NO: 41051 - DNA, 13 bp, Artificial Sequence
  Oligonucleotide for detection of SNP TSC0012381
agtattgatgttg

SEQ ID NO: 41052 - DNA, 13 bp, Artificial Sequence
  Oligonucleotide for detection of SNP TSC0012381
caacatcaatact

SEQ ID NO: 41053 - DNA, 13 bp, Artificial Sequence
  Oligonucleotide for detection of SNP TSC0012381
agtatttatgttg

SEQ ID NO: 41054 - DNA, 13 bp, Artificial Sequence
  Oligonucleotide for detection of SNP TSC0012381
caacataaatact

SEQ ID NO: 41055 - DNA, 13 bp, Artificial Sequence
  Oligonucleotide for detection of SNP TSC0012381
agtatcgatgttg

SEQ ID NO: 41056 - DNA, 13 bp, Artificial Sequence
  Oligonucleotide for detection of SNP TSC0012381
caacatcgatact

SEQ ID NO: 41057 - DNA, 13 bp, Artificial Sequence
  Oligonucleotide for detection of SNP TSC0012381
tagtattggtgtt

SEQ ID NO: 41058 - DNA, 13 bp, Artificial Sequence
  Oligonucleotide for detection of SNP TSC0012381
aacaccaatacta

SEQ ID NO: 41059 - DNA, 13 bp, Artificial Sequence
  Oligonucleotide for detection of SNP TSC0012381
tagtataggtgtt

SEQ ID NO: 41060 - DNA, 13 bp, Artificial Sequence
  Oligonucleotide for detection of SNP TSC0012381
aacacctatacta

SEQ ID NO: 41061 - DNA, 13 bp, Artificial Sequence
  Oligonucleotide for detection of SNP TSC0012381
tagtatcggtgtt

SEQ ID NO: 41062 - DNA, 13 bp, Artificial Sequence
  Oligonucleotide for detection of SNP TSC0012381
aacaccgatacta

SEQ ID NO: 41063 - DNA, 13 bp, Artificial Sequence
  Oligonucleotide for detection of SNP TSC0012382
attaaaggttata

SEQ ID NO: 41064 - DNA, 13 bp, Artificial Sequence
  Oligonucleotide for detection of SNP TSC0012382
tataacctttaat

SEQ ID NO: 41065 - DNA, 13 bp, Artificial Sequence
  Oligonucleotide for detection of SNP TSC0012382
attaaatgttata

SEQ ID NO: 41066 - DNA, 13 bp, Artificial Sequence
  Oligonucleotide for detection of SNP TSC0012382
tataacatttaat

SEQ ID NO: 41067 - DNA, 13 bp, Artificial Sequence
  Oligonucleotide for detection of SNP TSC0012382
tataatttttaat

SEQ ID NO: 41068 - DNA, 13 bp, Artificial Sequence
  Oligonucleotide for detection of SNP TSC0012382
attaaaaattata

SEQ ID NO: 41069 - DNA, 13 bp, Artificial Sequence
  Oligonucleotide for detection of SNP TSC0012382
tataatatttaat

SEQ ID NO: 41070 - DNA, 13 bp, Artificial Sequence
  Oligonucleotide for detection of SNP TSC0012382
attaaatattata

SEQ ID NO: 41071 - DNA, 13 bp, Artificial Sequence
  Oligonucleotide for detection of SNP TSC0012383
tgttgggtgaatg

SEQ ID NO: 41072 - DNA, 13 bp, Artificial Sequence
  Oligonucleotide for detection of SNP TSC0012383
cattcacccaaca

SEQ ID NO: 41073 - DNA, 13 bp, Artificial Sequence
  Oligonucleotide for detection of SNP TSC0012383
tgttggttgaatg

SEQ ID NO: 41074 - DNA, 13 bp, Artificial Sequence
  Oligonucleotide for detection of SNP TSC0012383
cattcaaccaaca

SEQ ID NO: 41075 - DNA, 13 bp, Artificial Sequence
  Oligonucleotide for detection of SNP TSC0012383
tatttatttagta

SEQ ID NO: 41076 - DNA, 13 bp, Artificial Sequence
  Oligonucleotide for detection of SNP TSC0012383
tactaaataaata

SEQ ID NO: 41077 - DNA, 13 bp, Artificial Sequence
  Oligonucleotide for detection of SNP TSC0012383
tatttaattagta

SEQ ID NO: 41078 - DNA, 13 bp, Artificial Sequence
  Oligonucleotide for detection of SNP TSC0012383
tactaattaaata

SEQ ID NO: 41079 - DNA, 13 bp, Artificial Sequence
  Oligonucleotide for detection of SNP TSC0012384
agtgttttttgat

SEQ ID NO: 41080 - DNA, 13 bp, Artificial Sequence
  Oligonucleotide for detection of SNP TSC0012384
atcaaaaaacact

SEQ ID NO: 41081 - DNA, 13 bp, Artificial Sequence
  Oligonucleotide for detection of SNP TSC0012384
agtgttgtttgat

SEQ ID NO: 41082 - DNA, 13 bp, Artificial Sequence
  Oligonucleotide for detection of SNP TSC0012384
atcaaacaacact

SEQ ID NO: 41083 - DNA, 13 bp, Artificial Sequence
  Oligonucleotide for detection of SNP TSC0012384
agcgttttttgat

SEQ ID NO: 41084 - DNA, 13 bp, Artificial Sequence
  Oligonucleotide for detection of SNP TSC0012384
atcaaaaaacgct

SEQ ID NO: 41085 - DNA, 13 bp, Artificial Sequence
  Oligonucleotide for detection of SNP TSC0012384
agcgttgtttgat

SEQ ID NO: 41086 - DNA, 13 bp, Artificial Sequence
  Oligonucleotide for detection of SNP TSC0012384
atcaaacaacgct

SEQ ID NO: 41087 - DNA, 13 bp, Artificial Sequence
  Oligonucleotide for detection of SNP TSC0012384
attaaggaatgtt

SEQ ID NO: 41088 - DNA, 13 bp, Artificial Sequence
  Oligonucleotide for detection of SNP TSC0012384
aacattccttaat

SEQ ID NO: 41089 - DNA, 13 bp, Artificial Sequence
  Oligonucleotide for detection of SNP TSC0012384
attaagtaatgtt

SEQ ID NO: 41090 - DNA, 13 bp, Artificial Sequence
  Oligonucleotide for detection of SNP TSC0012384
aacattacttaat

SEQ ID NO: 41091 - DNA, 13 bp, Artificial Sequence
  Oligonucleotide for detection of SNP TSC0012384
attaaggaacgtt

SEQ ID NO: 41092 - DNA, 13 bp, Artificial Sequence
  Oligonucleotide for detection of SNP TSC0012384
aacgttccttaat

SEQ ID NO: 41093 - DNA, 13 bp, Artificial Sequence
  Oligonucleotide for detection of SNP TSC0012384
attaagtaacgtt

SEQ ID NO: 41094 - DNA, 13 bp, Artificial Sequence
  Oligonucleotide for detection of SNP TSC0012384
aacgttacttaat

SEQ ID NO: 41095 - DNA, 13 bp, Artificial Sequence
  Oligonucleotide for detection of SNP TSC0012385
taaatatgatgay

SEQ ID NO: 41096 - DNA, 13 bp, Artificial Sequence
  Oligonucleotide for detection of SNP TSC0012385
rtcatcatattta

SEQ ID NO: 41097 - DNA, 13 bp, Artificial Sequence
  Oligonucleotide for detection of SNP TSC0012385
taaatacgatgay

SEQ ID NO: 41098 - DNA, 13 bp, Artificial Sequence
  Oligonucleotide for detection of SNP TSC0012385
rtcatcgtattta

SEQ ID NO: 41099 - DNA, 13 bp, Artificial Sequence
  Oligonucleotide for detection of SNP TSC0012385
gttattgtatttg

SEQ ID NO: 41100 - DNA, 13 bp, Artificial Sequence
  Oligonucleotide for detection of SNP TSC0012385
caaatacaataac

SEQ ID NO: 41101 - DNA, 13 bp, Artificial Sequence
  Oligonucleotide for detection of SNP TSC0012385
gttattatatttg

SEQ ID NO: 41102 - DNA, 13 bp, Artificial Sequence
  Oligonucleotide for detection of SNP TSC0012385
caaatataataac

SEQ ID NO: 41103 - DNA, 13 bp, Artificial Sequence
  Oligonucleotide for detection of SNP TSC0012385
gttatcgtatttg

SEQ ID NO: 41104 - DNA, 13 bp, Artificial Sequence
  Oligonucleotide for detection of SNP TSC0012385
caaatacgataac

SEQ ID NO: 41105 - DNA, 13 bp, Artificial Sequence
  Oligonucleotide for detection of SNP TSC0012386
ttggttaggtgta

SEQ ID NO: 41106 - DNA, 13 bp, Artificial Sequence
  Oligonucleotide for detection of SNP TSC0012386
tacacctaaccaa

SEQ ID NO: 41107 - DNA, 13 bp, Artificial Sequence
  Oligonucleotide for detection of SNP TSC0012386
ttggttgggtgta

SEQ ID NO: 41108 - DNA, 13 bp, Artificial Sequence
  Oligonucleotide for detection of SNP TSC0012386
tacacccaaccaa

SEQ ID NO: 41109 - DNA, 13 bp, Artificial Sequence
  Oligonucleotide for detection of SNP TSC0012386
ttggtcgggtgta

SEQ ID NO: 41110 - DNA, 13 bp, Artificial Sequence
  Oligonucleotide for detection of SNP TSC0012386
tacacccgaccaa

SEQ ID NO: 41111 - DNA, 13 bp, Artificial Sequence
  Oligonucleotide for detection of SNP TSC0012386
tgtatttggttaa

SEQ ID NO: 41112 - DNA, 13 bp, Artificial Sequence
  Oligonucleotide for detection of SNP TSC0012386
ttaaccaaataca

SEQ ID NO: 41113 - DNA, 13 bp, Artificial Sequence
  Oligonucleotide for detection of SNP TSC0012386
tgtattcggttaa

SEQ ID NO: 41114 - DNA, 13 bp, Artificial Sequence
  Oligonucleotide for detection of SNP TSC0012386
ttaaccgaataca

SEQ ID NO: 41115 - DNA, 13 bp, Artificial Sequence
  Oligonucleotide for detection of SNP TSC0012387
atatagatggaat

SEQ ID NO: 41116 - DNA, 13 bp, Artificial Sequence
  Oligonucleotide for detection of SNP TSC0012387
attccatctatat

SEQ ID NO: 41117 - DNA, 13 bp, Artificial Sequence
  Oligonucleotide for detection of SNP TSC0012387
atataggtggaat

SEQ ID NO: 41118 - DNA, 13 bp, Artificial Sequence
  Oligonucleotide for detection of SNP TSC0012387
attccacctatat

SEQ ID NO: 41119 - DNA, 13 bp, Artificial Sequence
  Oligonucleotide for detection of SNP TSC0012388
agttgaatattay

SEQ ID NO: 41120 - DNA, 13 bp, Artificial Sequence
  Oligonucleotide for detection of SNP TSC0012388
rtaatattcaact

SEQ ID NO: 41121 - DNA, 13 bp, Artificial Sequence
  Oligonucleotide for detection of SNP TSC0012388
agttgattattay

SEQ ID NO: 41122 - DNA, 13 bp, Artificial Sequence
  Oligonucleotide for detection of SNP TSC0012388
rtaataatcaact

SEQ ID NO: 41123 - DNA, 13 bp, Artificial Sequence
  Oligonucleotide for detection of SNP TSC0012388
gtgatatttagtt

SEQ ID NO: 41124 - DNA, 13 bp, Artificial Sequence
  Oligonucleotide for detection of SNP TSC0012388
aactaaatatcac

SEQ ID NO: 41125 - DNA, 13 bp, Artificial Sequence
  Oligonucleotide for detection of SNP TSC0012388
gtgatagttagtt

SEQ ID NO: 41126 - DNA, 13 bp, Artificial Sequence
  Oligonucleotide for detection of SNP TSC0012388
aactaactatcac

SEQ ID NO: 41127 - DNA, 13 bp, Artificial Sequence
  Oligonucleotide for detection of SNP TSC0012391
tttggaaggttag

SEQ ID NO: 41128 - DNA, 13 bp, Artificial Sequence
  Oligonucleotide for detection of SNP TSC0012391
ctaaccttccaaa

SEQ ID NO: 41129 - DNA, 13 bp, Artificial Sequence
  Oligonucleotide for detection of SNP TSC0012391
tttggagggttag

SEQ ID NO: 41130 - DNA, 13 bp, Artificial Sequence
  Oligonucleotide for detection of SNP TSC0012391
ctaaccctccaaa

SEQ ID NO: 41131 - DNA, 13 bp, Artificial Sequence
  Oligonucleotide for detection of SNP TSC0012391
ttcggaaggttag

SEQ ID NO: 41132 - DNA, 13 bp, Artificial Sequence
  Oligonucleotide for detection of SNP TSC0012391
ctaaccttccgaa

SEQ ID NO: 41133 - DNA, 13 bp, Artificial Sequence
  Oligonucleotide for detection of SNP TSC0012391
ttcggagggttag

SEQ ID NO: 41134 - DNA, 13 bp, Artificial Sequence
  Oligonucleotide for detection of SNP TSC0012391
ctaaccctccgaa

SEQ ID NO: 41135 - DNA, 13 bp, Artificial Sequence
  Oligonucleotide for detection of SNP TSC0012392
ggtttttgtgtag

SEQ ID NO: 41136 - DNA, 13 bp, Artificial Sequence
  Oligonucleotide for detection of SNP TSC0012392
ctacacaaaaacc

SEQ ID NO: 41137 - DNA, 13 bp, Artificial Sequence
  Oligonucleotide for detection of SNP TSC0012392
ggttttcgtgtag

SEQ ID NO: 41138 - DNA, 13 bp, Artificial Sequence
  Oligonucleotide for detection of SNP TSC0012392
ctacacgaaaacc

SEQ ID NO: 41139 - DNA, 13 bp, Artificial Sequence
  Oligonucleotide for detection of SNP TSC0012392
ggtttttgcgtag

SEQ ID NO: 41140 - DNA, 13 bp, Artificial Sequence
  Oligonucleotide for detection of SNP TSC0012392
ctacgcaaaaacc

SEQ ID NO: 41141 - DNA, 13 bp, Artificial Sequence
  Oligonucleotide for detection of SNP TSC0012392
ggttttcgcgtag

SEQ ID NO: 41142 - DNA, 13 bp, Artificial Sequence
  Oligonucleotide for detection of SNP TSC0012392
ctacgcgaaaacc

SEQ ID NO: 41143 - DNA, 13 bp, Artificial Sequence
  Oligonucleotide for detection of SNP TSC0012392
ttatgtggagaty

SEQ ID NO: 41144 - DNA, 13 bp, Artificial Sequence
  Oligonucleotide for detection of SNP TSC0012392
ratctccacataa

SEQ ID NO: 41145 - DNA, 13 bp, Artificial Sequence
  Oligonucleotide for detection of SNP TSC0012392
ttatgtagagaty

SEQ ID NO: 41146 - DNA, 13 bp, Artificial Sequence
  Oligonucleotide for detection of SNP TSC0012392
ratctctacataa

SEQ ID NO: 41147 - DNA, 13 bp, Artificial Sequence
  Oligonucleotide for detection of SNP TSC0012392
ttacgtggagaty

SEQ ID NO: 41148 - DNA, 13 bp, Artificial Sequence
  Oligonucleotide for detection of SNP TSC0012392
ratctccacgtaa

SEQ ID NO: 41149 - DNA, 13 bp, Artificial Sequence
  Oligonucleotide for detection of SNP TSC0012392
ttacgtagagaty

SEQ ID NO: 41150 - DNA, 13 bp, Artificial Sequence
  Oligonucleotide for detection of SNP TSC0012392
ratctctacgtaa

SEQ ID NO: 41151 - DNA, 13 bp, Artificial Sequence
  Oligonucleotide for detection of SNP TSC0012392
ttatgcggagaty

SEQ ID NO: 41152 - DNA, 13 bp, Artificial Sequence
  Oligonucleotide for detection of SNP TSC0012392
ratctccgcataa

SEQ ID NO: 41153 - DNA, 13 bp, Artificial Sequence
  Oligonucleotide for detection of SNP TSC0012392
ttacgcggagaty

SEQ ID NO: 41154 - DNA, 13 bp, Artificial Sequence
  Oligonucleotide for detection of SNP TSC0012392
ratctccgcgtaa

SEQ ID NO: 41155 - DNA, 13 bp, Artificial Sequence
  Oligonucleotide for detection of SNP TSC0012393
gttttttgtggtt

SEQ ID NO: 41156 - DNA, 13 bp, Artificial Sequence
  Oligonucleotide for detection of SNP TSC0012393
aaccacaaaaaac

SEQ ID NO: 41157 - DNA, 13 bp, Artificial Sequence
  Oligonucleotide for detection of SNP TSC0012393
gtttttcgtggtt

SEQ ID NO: 41158 - DNA, 13 bp, Artificial Sequence
  Oligonucleotide for detection of SNP TSC0012393
aaccacgaaaaac

SEQ ID NO: 41159 - DNA, 13 bp, Artificial Sequence
  Oligonucleotide for detection of SNP TSC0012393
agttatggagggy

SEQ ID NO: 41160 - DNA, 13 bp, Artificial Sequence
  Oligonucleotide for detection of SNP TSC0012393
rccctccataact

SEQ ID NO: 41161 - DNA, 13 bp, Artificial Sequence
  Oligonucleotide for detection of SNP TSC0012393
agttatagagggy

SEQ ID NO: 41162 - DNA, 13 bp, Artificial Sequence
  Oligonucleotide for detection of SNP TSC0012393
rccctctataact

SEQ ID NO: 41163 - DNA, 13 bp, Artificial Sequence
  Oligonucleotide for detection of SNP TSC0012393
agttacggagggy

SEQ ID NO: 41164 - DNA, 13 bp, Artificial Sequence
  Oligonucleotide for detection of SNP TSC0012393
rccctccgtaact

SEQ ID NO: 41165 - DNA, 13 bp, Artificial Sequence
  Oligonucleotide for detection of SNP TSC0012394
ttattaatatttt

SEQ ID NO: 41166 - DNA, 13 bp, Artificial Sequence
  Oligonucleotide for detection of SNP TSC0012394
aaaatattaataa

SEQ ID NO: 41167 - DNA, 13 bp, Artificial Sequence
  Oligonucleotide for detection of SNP TSC0012394
ttattagtatttt

SEQ ID NO: 41168 - DNA, 13 bp, Artificial Sequence
  Oligonucleotide for detection of SNP TSC0012394
aaaatactaataa

SEQ ID NO: 41169 - DNA, 13 bp, Artificial Sequence
  Oligonucleotide for detection of SNP TSC0012396
ttttttatgtaaa

SEQ ID NO: 41170 - DNA, 13 bp, Artificial Sequence
  Oligonucleotide for detection of SNP TSC0012396
tttacataaaaaa

SEQ ID NO: 41171 - DNA, 13 bp, Artificial Sequence
  Oligonucleotide for detection of SNP TSC0012396
ttttttgtgtaaa

SEQ ID NO: 41172 - DNA, 13 bp, Artificial Sequence
  Oligonucleotide for detection of SNP TSC0012396
tttacacaaaaaa

SEQ ID NO: 41173 - DNA, 13 bp, Artificial Sequence
  Oligonucleotide for detection of SNP TSC0012396
tttttcgtgtaaa

SEQ ID NO: 41174 - DNA, 13 bp, Artificial Sequence
  Oligonucleotide for detection of SNP TSC0012396
tttacacgaaaaa

SEQ ID NO: 41175 - DNA, 13 bp, Artificial Sequence
  Oligonucleotide for detection of SNP TSC0012396
tttatatggaaag

SEQ ID NO: 41176 - DNA, 13 bp, Artificial Sequence
  Oligonucleotide for detection of SNP TSC0012396
ctttccatataaa

SEQ ID NO: 41177 - DNA, 13 bp, Artificial Sequence
  Oligonucleotide for detection of SNP TSC0012396
tttatacggaaag

SEQ ID NO: 41178 - DNA, 13 bp, Artificial Sequence
  Oligonucleotide for detection of SNP TSC0012396
ctttccgtataaa

SEQ ID NO: 41179 - DNA, 13 bp, Artificial Sequence
  Oligonucleotide for detection of SNP TSC0012397
ttttagaaatgaa

SEQ ID NO: 41180 - DNA, 13 bp, Artificial Sequence
  Oligonucleotide for detection of SNP TSC0012397
ttcatttctaaaa

SEQ ID NO: 41181 - DNA, 13 bp, Artificial Sequence
  Oligonucleotide for detection of SNP TSC0012397
ttttagtaatgaa

SEQ ID NO: 41182 - DNA, 13 bp, Artificial Sequence
  Oligonucleotide for detection of SNP TSC0012397
ttcattactaaaa

SEQ ID NO: 41183 - DNA, 13 bp, Artificial Sequence
  Oligonucleotide for detection of SNP TSC0012397
tttatttttagaa

SEQ ID NO: 41184 - DNA, 13 bp, Artificial Sequence
  Oligonucleotide for detection of SNP TSC0012397
ttctaaaaataaa

SEQ ID NO: 41185 - DNA, 13 bp, Artificial Sequence
  Oligonucleotide for detection of SNP TSC0012397
tttattgttagaa

SEQ ID NO: 41186 - DNA, 13 bp, Artificial Sequence
  Oligonucleotide for detection of SNP TSC0012397
ttctaacaataaa

SEQ ID NO: 41187 - DNA, 13 bp, Artificial Sequence
  Oligonucleotide for detection of SNP TSC0012398
tgttataatttga

SEQ ID NO: 41188 - DNA, 13 bp, Artificial Sequence
  Oligonucleotide for detection of SNP TSC0012398
tcaaattataaca

SEQ ID NO: 41189 - DNA, 13 bp, Artificial Sequence
  Oligonucleotide for detection of SNP TSC0012398
tgttatgatttga

SEQ ID NO: 41190 - DNA, 13 bp, Artificial Sequence
  Oligonucleotide for detection of SNP TSC0012398
tcaaatcataaca

SEQ ID NO: 41191 - DNA, 13 bp, Artificial Sequence
  Oligonucleotide for detection of SNP TSC0012399
ataagtatttgtg

SEQ ID NO: 41192 - DNA, 13 bp, Artificial Sequence
  Oligonucleotide for detection of SNP TSC0012399
cacaaatacttat

SEQ ID NO: 41193 - DNA, 13 bp, Artificial Sequence
  Oligonucleotide for detection of SNP TSC0012399
ataagtgtttgtg

SEQ ID NO: 41194 - DNA, 13 bp, Artificial Sequence
  Oligonucleotide for detection of SNP TSC0012399
cacaaacacttat

SEQ ID NO: 41195 - DNA, 13 bp, Artificial Sequence
  Oligonucleotide for detection of SNP TSC0012399
ataagcgtttgtg

SEQ ID NO: 41196 - DNA, 13 bp, Artificial Sequence
  Oligonucleotide for detection of SNP TSC0012399
cacaaacgcttat

SEQ ID NO: 41197 - DNA, 13 bp, Artificial Sequence
  Oligonucleotide for detection of SNP TSC0012399
tatagatgtttgt

SEQ ID NO: 41198 - DNA, 13 bp, Artificial Sequence
  Oligonucleotide for detection of SNP TSC0012399
acaaacatctata

SEQ ID NO: 41199 - DNA, 13 bp, Artificial Sequence
  Oligonucleotide for detection of SNP TSC0012399
tatagacgtttgt

SEQ ID NO: 41200 - DNA, 13 bp, Artificial Sequence
  Oligonucleotide for detection of SNP TSC0012399
acaaacgtctata

SEQ ID NO: 41201 - DNA, 13 bp, Artificial Sequence
  Oligonucleotide for detection of SNP TSC0012400
gattacgaggtta

SEQ ID NO: 41202 - DNA, 13 bp, Artificial Sequence
  Oligonucleotide for detection of SNP TSC0012400
taacctcgtaatc

SEQ ID NO: 41203 - DNA, 13 bp, Artificial Sequence
  Oligonucleotide for detection of SNP TSC0012400
tgattttgtgaty

SEQ ID NO: 41204 - DNA, 13 bp, Artificial Sequence
  Oligonucleotide for detection of SNP TSC0012400
ratcacaaaatca

SEQ ID NO: 41205 - DNA, 13 bp, Artificial Sequence
  Oligonucleotide for detection of SNP TSC0012400
tgatttcgtgaty

SEQ ID NO: 41206 - DNA, 13 bp, Artificial Sequence
  Oligonucleotide for detection of SNP TSC0012400
ratcacgaaatca

SEQ ID NO: 41207 - DNA, 13 bp, Artificial Sequence
  Oligonucleotide for detection of SNP TSC0012401
ttagagatttaty

SEQ ID NO: 41208 - DNA, 13 bp, Artificial Sequence
  Oligonucleotide for detection of SNP TSC0012401
rataaatctctaa

SEQ ID NO: 41209 - DNA, 13 bp, Artificial Sequence
  Oligonucleotide for detection of SNP TSC0012401
ttagaggtttaty

SEQ ID NO: 41210 - DNA, 13 bp, Artificial Sequence
  Oligonucleotide for detection of SNP TSC0012401
rataaacctctaa

SEQ ID NO: 41211 - DNA, 13 bp, Artificial Sequence
  Oligonucleotide for detection of SNP TSC0012403
aattttttagaga

SEQ ID NO: 41212 - DNA, 13 bp, Artificial Sequence
  Oligonucleotide for detection of SNP TSC0012403
tctctaaaaaatt

SEQ ID NO: 41213 - DNA, 13 bp, Artificial Sequence
  Oligonucleotide for detection of SNP TSC0012403
aattttgtagaga

SEQ ID NO: 41214 - DNA, 13 bp, Artificial Sequence
  Oligonucleotide for detection of SNP TSC0012403
tctctacaaaatt

SEQ ID NO: 41215 - DNA, 13 bp, Artificial Sequence
  Oligonucleotide for detection of SNP TSC0012403
aatttcgtagaga

SEQ ID NO: 41216 - DNA, 13 bp, Artificial Sequence
  Oligonucleotide for detection of SNP TSC0012403
tctctacgaaatt

SEQ ID NO: 41217 - DNA, 13 bp, Artificial Sequence
  Oligonucleotide for detection of SNP TSC0012403
tttttggggagtt

SEQ ID NO: 41218 - DNA, 13 bp, Artificial Sequence
  Oligonucleotide for detection of SNP TSC0012403
aactccccaaaaa

SEQ ID NO: 41219 - DNA, 13 bp, Artificial Sequence
  Oligonucleotide for detection of SNP TSC0012403
tttttgtggagtt

SEQ ID NO: 41220 - DNA, 13 bp, Artificial Sequence
  Oligonucleotide for detection of SNP TSC0012403
aactccacaaaaa

SEQ ID NO: 41221 - DNA, 13 bp, Artificial Sequence
  Oligonucleotide for detection of SNP TSC0012403
tttttgcggagtt

SEQ ID NO: 41222 - DNA, 13 bp, Artificial Sequence
  Oligonucleotide for detection of SNP TSC0012403
aactccgcaaaaa

SEQ ID NO: 41223 - DNA, 13 bp, Artificial Sequence
  Oligonucleotide for detection of SNP TSC0012404
gtttataatttta

SEQ ID NO: 41224 - DNA, 13 bp, Artificial Sequence
  Oligonucleotide for detection of SNP TSC0012404
taaaattataaac

SEQ ID NO: 41225 - DNA, 13 bp, Artificial Sequence
  Oligonucleotide for detection of SNP TSC0012404
gtttatgatttta

SEQ ID NO: 41226 - DNA, 13 bp, Artificial Sequence
  Oligonucleotide for detection of SNP TSC0012404
taaaatcataaac

SEQ ID NO: 41227 - DNA, 13 bp, Artificial Sequence
  Oligonucleotide for detection of SNP TSC0012405
aatttaagtaaga

SEQ ID NO: 41228 - DNA, 13 bp, Artificial Sequence
  Oligonucleotide for detection of SNP TSC0012405
tcttacttaaatt

SEQ ID NO: 41229 - DNA, 13 bp, Artificial Sequence
  Oligonucleotide for detection of SNP TSC0012405
aatttaggtaaga

SEQ ID NO: 41230 - DNA, 13 bp, Artificial Sequence
  Oligonucleotide for detection of SNP TSC0012405
tcttacctaaatt

SEQ ID NO: 41231 - DNA, 13 bp, Artificial Sequence
  Oligonucleotide for detection of SNP TSC0012406
atttttgtgggat

SEQ ID NO: 41232 - DNA, 13 bp, Artificial Sequence
  Oligonucleotide for detection of SNP TSC0012406
atcccacaaaaat

SEQ ID NO: 41233 - DNA, 13 bp, Artificial Sequence
  Oligonucleotide for detection of SNP TSC0012406
atttttatgggat

SEQ ID NO: 41234 - DNA, 13 bp, Artificial Sequence
  Oligonucleotide for detection of SNP TSC0012406
atcccataaaaat

SEQ ID NO: 41235 - DNA, 13 bp, Artificial Sequence
  Oligonucleotide for detection of SNP TSC0012407
tttatagttgtty

SEQ ID NO: 41236 - DNA, 13 bp, Artificial Sequence
  Oligonucleotide for detection of SNP TSC0012407
raacaactataaa

SEQ ID NO: 41237 - DNA, 13 bp, Artificial Sequence
  Oligonucleotide for detection of SNP TSC0012407
tttatatttgtty

SEQ ID NO: 41238 - DNA, 13 bp, Artificial Sequence
  Oligonucleotide for detection of SNP TSC0012407
raacaaatataaa

SEQ ID NO: 41239 - DNA, 13 bp, Artificial Sequence
  Oligonucleotide for detection of SNP TSC0012407
gaataattgtaaa

SEQ ID NO: 41240 - DNA, 13 bp, Artificial Sequence
  Oligonucleotide for detection of SNP TSC0012407
tttacaattattc

SEQ ID NO: 41241 - DNA, 13 bp, Artificial Sequence
  Oligonucleotide for detection of SNP TSC0012407
gaataaatgtaaa

SEQ ID NO: 41242 - DNA, 13 bp, Artificial Sequence
  Oligonucleotide for detection of SNP TSC0012407
tttacatttattc

SEQ ID NO: 41243 - DNA, 13 bp, Artificial Sequence
  Oligonucleotide for detection of SNP TSC0012408
agatttattattg

SEQ ID NO: 41244 - DNA, 13 bp, Artificial Sequence
  Oligonucleotide for detection of SNP TSC0012408
caataataaatct

SEQ ID NO: 41245 - DNA, 13 bp, Artificial Sequence
  Oligonucleotide for detection of SNP TSC0012408
agatttgttattg

SEQ ID NO: 41246 - DNA, 13 bp, Artificial Sequence
  Oligonucleotide for detection of SNP TSC0012408
caataacaaatct

SEQ ID NO: 41247 - DNA, 13 bp, Artificial Sequence
  Oligonucleotide for detection of SNP TSC0012408
agatttattatcg

SEQ ID NO: 41248 - DNA, 13 bp, Artificial Sequence
  Oligonucleotide for detection of SNP TSC0012408
cgataataaatct

SEQ ID NO: 41249 - DNA, 13 bp, Artificial Sequence
  Oligonucleotide for detection of SNP TSC0012408
agattcgttattg

SEQ ID NO: 41250 - DNA, 13 bp, Artificial Sequence
  Oligonucleotide for detection of SNP TSC0012408
caataacgaatct

SEQ ID NO: 41251 - DNA, 13 bp, Artificial Sequence
  Oligonucleotide for detection of SNP TSC0012408
agatttgttatcg

SEQ ID NO: 41252 - DNA, 13 bp, Artificial Sequence
  Oligonucleotide for detection of SNP TSC0012408
cgataacaaatct

SEQ ID NO: 41253 - DNA, 13 bp, Artificial Sequence
  Oligonucleotide for detection of SNP TSC0012408
agattcgttatcg

SEQ ID NO: 41254 - DNA, 13 bp, Artificial Sequence
  Oligonucleotide for detection of SNP TSC0012408
cgataacgaatct

SEQ ID NO: 41255 - DNA, 13 bp, Artificial Sequence
  Oligonucleotide for detection of SNP TSC0012408
tgatggtgggttt

SEQ ID NO: 41256 - DNA, 13 bp, Artificial Sequence
  Oligonucleotide for detection of SNP TSC0012408
aaacccaccatca

SEQ ID NO: 41257 - DNA, 13 bp, Artificial Sequence
  Oligonucleotide for detection of SNP TSC0012408
cgatggtgggttt

SEQ ID NO: 41258 - DNA, 13 bp, Artificial Sequence
  Oligonucleotide for detection of SNP TSC0012408
aaacccaccatcg

SEQ ID NO: 41259 - DNA, 13 bp, Artificial Sequence
  Oligonucleotide for detection of SNP TSC0012408
tgatggcgggttt

SEQ ID NO: 41260 - DNA, 13 bp, Artificial Sequence
  Oligonucleotide for detection of SNP TSC0012408
aaacccgccatca

SEQ ID NO: 41261 - DNA, 13 bp, Artificial Sequence
  Oligonucleotide for detection of SNP TSC0012408
cgatggcgggttt

SEQ ID NO: 41262 - DNA, 13 bp, Artificial Sequence
  Oligonucleotide for detection of SNP TSC0012408
aaacccgccatcg

SEQ ID NO: 41263 - DNA, 13 bp, Artificial Sequence
  Oligonucleotide for detection of SNP TSC0012409
tagaaaattttay

SEQ ID NO: 41264 - DNA, 13 bp, Artificial Sequence
  Oligonucleotide for detection of SNP TSC0012409
rtaaaattttcta

SEQ ID NO: 41265 - DNA, 13 bp, Artificial Sequence
  Oligonucleotide for detection of SNP TSC0012409
tagaaagttttay

SEQ ID NO: 41266 - DNA, 13 bp, Artificial Sequence
  Oligonucleotide for detection of SNP TSC0012409
rtaaaactttcta

SEQ ID NO: 41267 - DNA, 13 bp, Artificial Sequence
  Oligonucleotide for detection of SNP TSC0012410
ataggtatttgty

SEQ ID NO: 41268 - DNA, 13 bp, Artificial Sequence
  Oligonucleotide for detection of SNP TSC0012410
racaaatacctat

SEQ ID NO: 41269 - DNA, 13 bp, Artificial Sequence
  Oligonucleotide for detection of SNP TSC0012410
ataggtgtttgty

SEQ ID NO: 41270 - DNA, 13 bp, Artificial Sequence
  Oligonucleotide for detection of SNP TSC0012410
racaaacacctat

SEQ ID NO: 41271 - DNA, 13 bp, Artificial Sequence
  Oligonucleotide for detection of SNP TSC0012410
ataggtattcgty

SEQ ID NO: 41272 - DNA, 13 bp, Artificial Sequence
  Oligonucleotide for detection of SNP TSC0012410
racgaatacctat

SEQ ID NO: 41273 - DNA, 13 bp, Artificial Sequence
  Oligonucleotide for detection of SNP TSC0012410
ataggcgtttgty

SEQ ID NO: 41274 - DNA, 13 bp, Artificial Sequence
  Oligonucleotide for detection of SNP TSC0012410
racaaacgcctat

SEQ ID NO: 41275 - DNA, 13 bp, Artificial Sequence
  Oligonucleotide for detection of SNP TSC0012410
ataggtgttcgty

SEQ ID NO: 41276 - DNA, 13 bp, Artificial Sequence
  Oligonucleotide for detection of SNP TSC0012410
racgaacacctat

SEQ ID NO: 41277 - DNA, 13 bp, Artificial Sequence
  Oligonucleotide for detection of SNP TSC0012410
ataggcgttcgty

SEQ ID NO: 41278 - DNA, 13 bp, Artificial Sequence
  Oligonucleotide for detection of SNP TSC0012410
racgaacgcctat

SEQ ID NO: 41279 - DNA, 13 bp, Artificial Sequence
  Oligonucleotide for detection of SNP TSC0012410
ggtgggtgtttgt

SEQ ID NO: 41280 - DNA, 13 bp, Artificial Sequence
  Oligonucleotide for detection of SNP TSC0012410
acaaacacccacc

SEQ ID NO: 41281 - DNA, 13 bp, Artificial Sequence
  Oligonucleotide for detection of SNP TSC0012410
ggcgggtgtttgt

SEQ ID NO: 41282 - DNA, 13 bp, Artificial Sequence
  Oligonucleotide for detection of SNP TSC0012410
acaaacacccgcc

SEQ ID NO: 41283 - DNA, 13 bp, Artificial Sequence
  Oligonucleotide for detection of SNP TSC0012410
ggtgggcgtttgt

SEQ ID NO: 41284 - DNA, 13 bp, Artificial Sequence
  Oligonucleotide for detection of SNP TSC0012410
acaaacgcccacc

SEQ ID NO: 41285 - DNA, 13 bp, Artificial Sequence
  Oligonucleotide for detection of SNP TSC0012410
ggcgggcgtttgt

SEQ ID NO: 41286 - DNA, 13 bp, Artificial Sequence
  Oligonucleotide for detection of SNP TSC0012410
acaaacgcccgcc

SEQ ID NO: 41287 - DNA, 13 bp, Artificial Sequence
  Oligonucleotide for detection of SNP TSC0012411
tgttagttaggat

SEQ ID NO: 41288 - DNA, 13 bp, Artificial Sequence
  Oligonucleotide for detection of SNP TSC0012411
atcctaactaaca

SEQ ID NO: 41289 - DNA, 13 bp, Artificial Sequence
  Oligonucleotide for detection of SNP TSC0012411
tgttaggtaggat

SEQ ID NO: 41290 - DNA, 13 bp, Artificial Sequence
  Oligonucleotide for detection of SNP TSC0012411
atcctacctaaca

SEQ ID NO: 41291 - DNA, 13 bp, Artificial Sequence
  Oligonucleotide for detection of SNP TSC0012411
attttggttaata

SEQ ID NO: 41292 - DNA, 13 bp, Artificial Sequence
  Oligonucleotide for detection of SNP TSC0012411
tattaaccaaaat

SEQ ID NO: 41293 - DNA, 13 bp, Artificial Sequence
  Oligonucleotide for detection of SNP TSC0012411
attttgtttaata

SEQ ID NO: 41294 - DNA, 13 bp, Artificial Sequence
  Oligonucleotide for detection of SNP TSC0012411
tattaaacaaaat

SEQ ID NO: 41295 - DNA, 13 bp, Artificial Sequence
  Oligonucleotide for detection of SNP TSC0012412
tttatagagtata

SEQ ID NO: 41296 - DNA, 13 bp, Artificial Sequence
  Oligonucleotide for detection of SNP TSC0012412
tatactctataaa

SEQ ID NO: 41297 - DNA, 13 bp, Artificial Sequence
  Oligonucleotide for detection of SNP TSC0012412
tttatatagtata

SEQ ID NO: 41298 - DNA, 13 bp, Artificial Sequence
  Oligonucleotide for detection of SNP TSC0012412
tatactatataaa

SEQ ID NO: 41299 - DNA, 13 bp, Artificial Sequence
  Oligonucleotide for detection of SNP TSC0012412
tatattttgtaag

SEQ ID NO: 41300 - DNA, 13 bp, Artificial Sequence
  Oligonucleotide for detection of SNP TSC0012412
cttacaaaatata

SEQ ID NO: 41301 - DNA, 13 bp, Artificial Sequence
  Oligonucleotide for detection of SNP TSC0012412
tatattatgtaag

SEQ ID NO: 41302 - DNA, 13 bp, Artificial Sequence
  Oligonucleotide for detection of SNP TSC0012412
cttacataatata

SEQ ID NO: 41303 - DNA, 13 bp, Artificial Sequence
  Oligonucleotide for detection of SNP TSC0012413
ttgttttttttgt

SEQ ID NO: 41304 - DNA, 13 bp, Artificial Sequence
  Oligonucleotide for detection of SNP TSC0012413
acaaaaaaaacaa

SEQ ID NO: 41305 - DNA, 13 bp, Artificial Sequence
  Oligonucleotide for detection of SNP TSC0012413
tcgttttttttgt

SEQ ID NO: 41306 - DNA, 13 bp, Artificial Sequence
  Oligonucleotide for detection of SNP TSC0012413
acaaaaaaaacga

SEQ ID NO: 41307 - DNA, 13 bp, Artificial Sequence
  Oligonucleotide for detection of SNP TSC0012413
ataaggtaggtga

SEQ ID NO: 41308 - DNA, 13 bp, Artificial Sequence
  Oligonucleotide for detection of SNP TSC0012413
tcacctaccttat

SEQ ID NO: 41309 - DNA, 13 bp, Artificial Sequence
  Oligonucleotide for detection of SNP TSC0012413
ataaggaaggtga

SEQ ID NO: 41310 - DNA, 13 bp, Artificial Sequence
  Oligonucleotide for detection of SNP TSC0012413
tcaccttccttat

SEQ ID NO: 41311 - DNA, 13 bp, Artificial Sequence
  Oligonucleotide for detection of SNP TSC0012413
ataaggtaggcga

SEQ ID NO: 41312 - DNA, 13 bp, Artificial Sequence
  Oligonucleotide for detection of SNP TSC0012413
tcgcctaccttat

SEQ ID NO: 41313 - DNA, 13 bp, Artificial Sequence
  Oligonucleotide for detection of SNP TSC0012413
ataaggaaggcga

SEQ ID NO: 41314 - DNA, 13 bp, Artificial Sequence
  Oligonucleotide for detection of SNP TSC0012413
tcgccttccttat

SEQ ID NO: 41315 - DNA, 13 bp, Artificial Sequence
  Oligonucleotide for detection of SNP TSC0012414
aggagagtatgag

SEQ ID NO: 41316 - DNA, 13 bp, Artificial Sequence
  Oligonucleotide for detection of SNP TSC0012414
ctcatactctcct

SEQ ID NO: 41317 - DNA, 13 bp, Artificial Sequence
  Oligonucleotide for detection of SNP TSC0012414
aggagaatatgag

SEQ ID NO: 41318 - DNA, 13 bp, Artificial Sequence
  Oligonucleotide for detection of SNP TSC0012414
ctcatattctcct

SEQ ID NO: 41319 - DNA, 13 bp, Artificial Sequence
  Oligonucleotide for detection of SNP TSC0012415
tatataatataat

SEQ ID NO: 41320 - DNA, 13 bp, Artificial Sequence
  Oligonucleotide for detection of SNP TSC0012415
attatattatata

SEQ ID NO: 41321 - DNA, 13 bp, Artificial Sequence
  Oligonucleotide for detection of SNP TSC0012415
tatatattataat

SEQ ID NO: 41322 - DNA, 13 bp, Artificial Sequence
  Oligonucleotide for detection of SNP TSC0012415
attataatatata

SEQ ID NO: 41323 - DNA, 13 bp, Artificial Sequence
  Oligonucleotide for detection of SNP TSC0012416
gtaagtgggaaty

SEQ ID NO: 41324 - DNA, 13 bp, Artificial Sequence
  Oligonucleotide for detection of SNP TSC0012416
rattcccacttac

SEQ ID NO: 41325 - DNA, 13 bp, Artificial Sequence
  Oligonucleotide for detection of SNP TSC0012416
gtaagtaggaaty

SEQ ID NO: 41326 - DNA, 13 bp, Artificial Sequence
  Oligonucleotide for detection of SNP TSC0012416
rattcctacttac

SEQ ID NO: 41327 - DNA, 13 bp, Artificial Sequence
  Oligonucleotide for detection of SNP TSC0012417
aaataaagaatat

SEQ ID NO: 41328 - DNA, 13 bp, Artificial Sequence
  Oligonucleotide for detection of SNP TSC0012417
atattctttattt

SEQ ID NO: 41329 - DNA, 13 bp, Artificial Sequence
  Oligonucleotide for detection of SNP TSC0012417
aaataaggaatat

SEQ ID NO: 41330 - DNA, 13 bp, Artificial Sequence
  Oligonucleotide for detection of SNP TSC0012417
atattccttattt

SEQ ID NO: 41331 - DNA, 13 bp, Artificial Sequence
  Oligonucleotide for detection of SNP TSC0012418
aagattatgagty

SEQ ID NO: 41332 - DNA, 13 bp, Artificial Sequence
  Oligonucleotide for detection of SNP TSC0012418
ractcataatctt

SEQ ID NO: 41333 - DNA, 13 bp, Artificial Sequence
  Oligonucleotide for detection of SNP TSC0012418
aagattgtgagty

SEQ ID NO: 41334 - DNA, 13 bp, Artificial Sequence
  Oligonucleotide for detection of SNP TSC0012418
ractcacaatctt

SEQ ID NO: 41335 - DNA, 13 bp, Artificial Sequence
  Oligonucleotide for detection of SNP TSC0012418
aagatcgtgagty

SEQ ID NO: 41336 - DNA, 13 bp, Artificial Sequence
  Oligonucleotide for detection of SNP TSC0012418
ractcacgatctt

SEQ ID NO: 41337 - DNA, 13 bp, Artificial Sequence
  Oligonucleotide for detection of SNP TSC0012418
ggtttatgatttt

SEQ ID NO: 41338 - DNA, 13 bp, Artificial Sequence
  Oligonucleotide for detection of SNP TSC0012418
aaaatcataaacc

SEQ ID NO: 41339 - DNA, 13 bp, Artificial Sequence
  Oligonucleotide for detection of SNP TSC0012418
ggtttacgatttt

SEQ ID NO: 41340 - DNA, 13 bp, Artificial Sequence
  Oligonucleotide for detection of SNP TSC0012418
aaaatcgtaaacc

SEQ ID NO: 41341 - DNA, 13 bp, Artificial Sequence
  Oligonucleotide for detection of SNP TSC0012422
ttgtagtgttttt

SEQ ID NO: 41342 - DNA, 13 bp, Artificial Sequence
  Oligonucleotide for detection of SNP TSC0012422
aaaaacactacaa

SEQ ID NO: 41343 - DNA, 13 bp, Artificial Sequence
  Oligonucleotide for detection of SNP TSC0012422
ttgtagcgttttt

SEQ ID NO: 41344 - DNA, 13 bp, Artificial Sequence
  Oligonucleotide for detection of SNP TSC0012422
aaaaacgctacaa

SEQ ID NO: 41345 - DNA, 13 bp, Artificial Sequence
  Oligonucleotide for detection of SNP TSC0012422
aaaggtgttgtag

SEQ ID NO: 41346 - DNA, 13 bp, Artificial Sequence
  Oligonucleotide for detection of SNP TSC0012422
ctacaacaccttt

SEQ ID NO: 41347 - DNA, 13 bp, Artificial Sequence
  Oligonucleotide for detection of SNP TSC0012422
aaaggtattgtag

SEQ ID NO: 41348 - DNA, 13 bp, Artificial Sequence
  Oligonucleotide for detection of SNP TSC0012422
ctacaataccttt

SEQ ID NO: 41349 - DNA, 13 bp, Artificial Sequence
  Oligonucleotide for detection of SNP TSC0012422
aaaggcgttgtag

SEQ ID NO: 41350 - DNA, 13 bp, Artificial Sequence
  Oligonucleotide for detection of SNP TSC0012422
ctacaacgccttt

SEQ ID NO: 41351 - DNA, 13 bp, Artificial Sequence
  Oligonucleotide for detection of SNP TSC0012423
tttgtaagatatt

SEQ ID NO: 41352 - DNA, 13 bp, Artificial Sequence
  Oligonucleotide for detection of SNP TSC0012423
aatatcttacaaa

SEQ ID NO: 41353 - DNA, 13 bp, Artificial Sequence
  Oligonucleotide for detection of SNP TSC0012423
tttgtaggatatt

SEQ ID NO: 41354 - DNA, 13 bp, Artificial Sequence
  Oligonucleotide for detection of SNP TSC0012423
aatatcctacaaa

SEQ ID NO: 41355 - DNA, 13 bp, Artificial Sequence
  Oligonucleotide for detection of SNP TSC0012424
gtatggtgggtgg

SEQ ID NO: 41356 - DNA, 13 bp, Artificial Sequence
  Oligonucleotide for detection of SNP TSC0012424
ccacccaccatac

SEQ ID NO: 41357 - DNA, 13 bp, Artificial Sequence
  Oligonucleotide for detection of SNP TSC0012424
gtatggggggtgg

SEQ ID NO: 41358 - DNA, 13 bp, Artificial Sequence
  Oligonucleotide for detection of SNP TSC0012424
ccaccccccatac

SEQ ID NO: 41359 - DNA, 13 bp, Artificial Sequence
  Oligonucleotide for detection of SNP TSC0012424
gtatggcgggtgg

SEQ ID NO: 41360 - DNA, 13 bp, Artificial Sequence
  Oligonucleotide for detection of SNP TSC0012424
ccacccgccatac

SEQ ID NO: 41361 - DNA, 13 bp, Artificial Sequence
  Oligonucleotide for detection of SNP TSC0012424
ttatttgttatgy

SEQ ID NO: 41362 - DNA, 13 bp, Artificial Sequence
  Oligonucleotide for detection of SNP TSC0012424
rcataacaaataa

SEQ ID NO: 41363 - DNA, 13 bp, Artificial Sequence
  Oligonucleotide for detection of SNP TSC0012424
ttattttttatgy

SEQ ID NO: 41364 - DNA, 13 bp, Artificial Sequence
  Oligonucleotide for detection of SNP TSC0012424
rcataaaaaataa

SEQ ID NO: 41365 - DNA, 13 bp, Artificial Sequence
  Oligonucleotide for detection of SNP TSC0012424
ttattcgttatgy

SEQ ID NO: 41366 - DNA, 13 bp, Artificial Sequence
  Oligonucleotide for detection of SNP TSC0012424
rcataacgaataa

SEQ ID NO: 41367 - DNA, 13 bp, Artificial Sequence
  Oligonucleotide for detection of SNP TSC0012427
gttatagaatttt

SEQ ID NO: 41368 - DNA, 13 bp, Artificial Sequence
  Oligonucleotide for detection of SNP TSC0012427
aaaattctataac

SEQ ID NO: 41369 - DNA, 13 bp, Artificial Sequence
  Oligonucleotide for detection of SNP TSC0012427
gttatataatttt

SEQ ID NO: 41370 - DNA, 13 bp, Artificial Sequence
  Oligonucleotide for detection of SNP TSC0012427
aaaattatataac

SEQ ID NO: 41371 - DNA, 13 bp, Artificial Sequence
  Oligonucleotide for detection of SNP TSC0012427
aaaattttatggy

SEQ ID NO: 41372 - DNA, 13 bp, Artificial Sequence
  Oligonucleotide for detection of SNP TSC0012427
rccataaaatttt

SEQ ID NO: 41373 - DNA, 13 bp, Artificial Sequence
  Oligonucleotide for detection of SNP TSC0012427
aaaattatatggy

SEQ ID NO: 41374 - DNA, 13 bp, Artificial Sequence
  Oligonucleotide for detection of SNP TSC0012427
rccatataatttt

SEQ ID NO: 41375 - DNA, 13 bp, Artificial Sequence
  Oligonucleotide for detection of SNP TSC0012429
attatagtaatga

SEQ ID NO: 41376 - DNA, 13 bp, Artificial Sequence
  Oligonucleotide for detection of SNP TSC0012429
tcattactataat

SEQ ID NO: 41377 - DNA, 13 bp, Artificial Sequence
  Oligonucleotide for detection of SNP TSC0012429
attataataatga

SEQ ID NO: 41378 - DNA, 13 bp, Artificial Sequence
  Oligonucleotide for detection of SNP TSC0012429
tcattattataat

SEQ ID NO: 41379 - DNA, 13 bp, Artificial Sequence
  Oligonucleotide for detection of SNP TSC0012430
gtgaggggaggaa

SEQ ID NO: 41380 - DNA, 13 bp, Artificial Sequence
  Oligonucleotide for detection of SNP TSC0012430
ttcctcccctcac

SEQ ID NO: 41381 - DNA, 13 bp, Artificial Sequence
  Oligonucleotide for detection of SNP TSC0012430
gtgaggagaggaa

SEQ ID NO: 41382 - DNA, 13 bp, Artificial Sequence
  Oligonucleotide for detection of SNP TSC0012430
ttcctctcctcac

SEQ ID NO: 41383 - DNA, 13 bp, Artificial Sequence
  Oligonucleotide for detection of SNP TSC0012431
ggtttttgaagaa

SEQ ID NO: 41384 - DNA, 13 bp, Artificial Sequence
  Oligonucleotide for detection of SNP TSC0012431
ttcttcaaaaacc

SEQ ID NO: 41385 - DNA, 13 bp, Artificial Sequence
  Oligonucleotide for detection of SNP TSC0012431
ggttttcgaagaa

SEQ ID NO: 41386 - DNA, 13 bp, Artificial Sequence
  Oligonucleotide for detection of SNP TSC0012431
ttcttcgaaaacc

SEQ ID NO: 41387 - DNA, 13 bp, Artificial Sequence
  Oligonucleotide for detection of SNP TSC0012431
ttttttgggagty

SEQ ID NO: 41388 - DNA, 13 bp, Artificial Sequence
  Oligonucleotide for detection of SNP TSC0012431
ractcccaaaaaa

SEQ ID NO: 41389 - DNA, 13 bp, Artificial Sequence
  Oligonucleotide for detection of SNP TSC0012431
ttttttaggagty

SEQ ID NO: 41390 - DNA, 13 bp, Artificial Sequence
  Oligonucleotide for detection of SNP TSC0012431
ractcctaaaaaa

SEQ ID NO: 41391 - DNA, 13 bp, Artificial Sequence
  Oligonucleotide for detection of SNP TSC0012431
tttttcgggagty

SEQ ID NO: 41392 - DNA, 13 bp, Artificial Sequence
  Oligonucleotide for detection of SNP TSC0012431
ractcccgaaaaa

SEQ ID NO: 41393 - DNA, 13 bp, Artificial Sequence
  Oligonucleotide for detection of SNP TSC0012436
gggtgtatattta

SEQ ID NO: 41394 - DNA, 13 bp, Artificial Sequence
  Oligonucleotide for detection of SNP TSC0012436
taaatatacaccc

SEQ ID NO: 41395 - DNA, 13 bp, Artificial Sequence
  Oligonucleotide for detection of SNP TSC0012436
gggtgtgtattta

SEQ ID NO: 41396 - DNA, 13 bp, Artificial Sequence
  Oligonucleotide for detection of SNP TSC0012436
taaatacacaccc

SEQ ID NO: 41397 - DNA, 13 bp, Artificial Sequence
  Oligonucleotide for detection of SNP TSC0012436
gggtgcgtattta

SEQ ID NO: 41398 - DNA, 13 bp, Artificial Sequence
  Oligonucleotide for detection of SNP TSC0012436
taaatacgcaccc

SEQ ID NO: 41399 - DNA, 13 bp, Artificial Sequence
  Oligonucleotide for detection of SNP TSC0012436
tgagtatgtatty

SEQ ID NO: 41400 - DNA, 13 bp, Artificial Sequence
  Oligonucleotide for detection of SNP TSC0012436
raatacatactca

SEQ ID NO: 41401 - DNA, 13 bp, Artificial Sequence
  Oligonucleotide for detection of SNP TSC0012436
tgagtacgtatty

SEQ ID NO: 41402 - DNA, 13 bp, Artificial Sequence
  Oligonucleotide for detection of SNP TSC0012436
raatacgtactca

SEQ ID NO: 41403 - DNA, 13 bp, Artificial Sequence
  Oligonucleotide for detection of SNP TSC0012437
atttattggaaga

SEQ ID NO: 41404 - DNA, 13 bp, Artificial Sequence
  Oligonucleotide for detection of SNP TSC0012437
tcttccaataaat

SEQ ID NO: 41405 - DNA, 13 bp, Artificial Sequence
  Oligonucleotide for detection of SNP TSC0012437
atttatcggaaga

SEQ ID NO: 41406 - DNA, 13 bp, Artificial Sequence
  Oligonucleotide for detection of SNP TSC0012437
tcttccgataaat

SEQ ID NO: 41407 - DNA, 13 bp, Artificial Sequence
  Oligonucleotide for detection of SNP TSC0012437
ttttttgatagat

SEQ ID NO: 41408 - DNA, 13 bp, Artificial Sequence
  Oligonucleotide for detection of SNP TSC0012437
atctatcaaaaaa

SEQ ID NO: 41409 - DNA, 13 bp, Artificial Sequence
  Oligonucleotide for detection of SNP TSC0012437
ttttttaatagat

SEQ ID NO: 41410 - DNA, 13 bp, Artificial Sequence
  Oligonucleotide for detection of SNP TSC0012437
atctattaaaaaa

SEQ ID NO: 41411 - DNA, 13 bp, Artificial Sequence
  Oligonucleotide for detection of SNP TSC0012437
tttttcgatagat

SEQ ID NO: 41412 - DNA, 13 bp, Artificial Sequence
  Oligonucleotide for detection of SNP TSC0012437
atctatcgaaaaa

SEQ ID NO: 41413 - DNA, 13 bp, Artificial Sequence
  Oligonucleotide for detection of SNP TSC0012438
ttataggtgtttg

SEQ ID NO: 41414 - DNA, 13 bp, Artificial Sequence
  Oligonucleotide for detection of SNP TSC0012438
caaacacctataa

SEQ ID NO: 41415 - DNA, 13 bp, Artificial Sequence
  Oligonucleotide for detection of SNP TSC0012438
ttatagatgtttg

SEQ ID NO: 41416 - DNA, 13 bp, Artificial Sequence
  Oligonucleotide for detection of SNP TSC0012438
caaacatctataa

SEQ ID NO: 41417 - DNA, 13 bp, Artificial Sequence
  Oligonucleotide for detection of SNP TSC0012439
tttatatgtatag

SEQ ID NO: 41418 - DNA, 13 bp, Artificial Sequence
  Oligonucleotide for detection of SNP TSC0012439
ctatacatataaa

SEQ ID NO: 41419 - DNA, 13 bp, Artificial Sequence
  Oligonucleotide for detection of SNP TSC0012439
tttatacgtatag

SEQ ID NO: 41420 - DNA, 13 bp, Artificial Sequence
  Oligonucleotide for detection of SNP TSC0012439
ctatacgtataaa

SEQ ID NO: 41421 - DNA, 13 bp, Artificial Sequence
  Oligonucleotide for detection of SNP TSC0012439
ttgtgtgtgtagg

SEQ ID NO: 41422 - DNA, 13 bp, Artificial Sequence
  Oligonucleotide for detection of SNP TSC0012439
cctacacacacaa

SEQ ID NO: 41423 - DNA, 13 bp, Artificial Sequence
  Oligonucleotide for detection of SNP TSC0012439
ttgtgtatgtagg

SEQ ID NO: 41424 - DNA, 13 bp, Artificial Sequence
  Oligonucleotide for detection of SNP TSC0012439
cctacatacacaa

SEQ ID NO: 41425 - DNA, 13 bp, Artificial Sequence
  Oligonucleotide for detection of SNP TSC0012439
ttgtgcgtgtagg

SEQ ID NO: 41426 - DNA, 13 bp, Artificial Sequence
  Oligonucleotide for detection of SNP TSC0012439
cctacacgcacaa

SEQ ID NO: 41427 - DNA, 13 bp, Artificial Sequence
  Oligonucleotide for detection of SNP TSC0012440
atataggggtgat

SEQ ID NO: 41428 - DNA, 13 bp, Artificial Sequence
  Oligonucleotide for detection of SNP TSC0012440
atcacccctatat

SEQ ID NO: 41429 - DNA, 13 bp, Artificial Sequence
  Oligonucleotide for detection of SNP TSC0012440
atatagaggtgat

SEQ ID NO: 41430 - DNA, 13 bp, Artificial Sequence
  Oligonucleotide for detection of SNP TSC0012440
atcacctctatat

SEQ ID NO: 41431 - DNA, 13 bp, Artificial Sequence
  Oligonucleotide for detection of SNP TSC0012441
gaaatgattatgy

SEQ ID NO: 41432 - DNA, 13 bp, Artificial Sequence
  Oligonucleotide for detection of SNP TSC0012441
rcataatcatttc

SEQ ID NO: 41433 - DNA, 13 bp, Artificial Sequence
  Oligonucleotide for detection of SNP TSC0012441
gaaatggttatgy

SEQ ID NO: 41434 - DNA, 13 bp, Artificial Sequence
  Oligonucleotide for detection of SNP TSC0012441
rcataaccatttc

SEQ ID NO: 41435 - DNA, 13 bp, Artificial Sequence
  Oligonucleotide for detection of SNP TSC0012444
atgattattgaaa

SEQ ID NO: 41436 - DNA, 13 bp, Artificial Sequence
  Oligonucleotide for detection of SNP TSC0012444
tttcaataatcat

SEQ ID NO: 41437 - DNA, 13 bp, Artificial Sequence
  Oligonucleotide for detection of SNP TSC0012444
atgattgttgaaa

SEQ ID NO: 41438 - DNA, 13 bp, Artificial Sequence
  Oligonucleotide for detection of SNP TSC0012444
tttcaacaatcat

SEQ ID NO: 41439 - DNA, 13 bp, Artificial Sequence
  Oligonucleotide for detection of SNP TSC0012444
atgatcgttgaaa

SEQ ID NO: 41440 - DNA, 13 bp, Artificial Sequence
  Oligonucleotide for detection of SNP TSC0012444
tttcaacgatcat

SEQ ID NO: 41441 - DNA, 13 bp, Artificial Sequence
  Oligonucleotide for detection of SNP TSC0012444
ttttagtggttat

SEQ ID NO: 41442 - DNA, 13 bp, Artificial Sequence
  Oligonucleotide for detection of SNP TSC0012444
ataaccactaaaa

SEQ ID NO: 41443 - DNA, 13 bp, Artificial Sequence
  Oligonucleotide for detection of SNP TSC0012444
ttttagcggttat

SEQ ID NO: 41444 - DNA, 13 bp, Artificial Sequence
  Oligonucleotide for detection of SNP TSC0012444
ataaccgctaaaa

SEQ ID NO: 41445 - DNA, 13 bp, Artificial Sequence
  Oligonucleotide for detection of SNP TSC0012448
ttgtaaagtttay

SEQ ID NO: 41446 - DNA, 13 bp, Artificial Sequence
  Oligonucleotide for detection of SNP TSC0012448
rtaaactttacaa

SEQ ID NO: 41447 - DNA, 13 bp, Artificial Sequence
  Oligonucleotide for detection of SNP TSC0012448
ttgtaaggtttay

SEQ ID NO: 41448 - DNA, 13 bp, Artificial Sequence
  Oligonucleotide for detection of SNP TSC0012448
rtaaaccttacaa

SEQ ID NO: 41449 - DNA, 13 bp, Artificial Sequence
  Oligonucleotide for detection of SNP TSC0012450
attgaaattttta

SEQ ID NO: 41450 - DNA, 13 bp, Artificial Sequence
  Oligonucleotide for detection of SNP TSC0012450
taaaaatttcaat

SEQ ID NO: 41451 - DNA, 13 bp, Artificial Sequence
  Oligonucleotide for detection of SNP TSC0012450
attgaatttttta

SEQ ID NO: 41452 - DNA, 13 bp, Artificial Sequence
  Oligonucleotide for detection of SNP TSC0012450
taaaaaattcaat

SEQ ID NO: 41453 - DNA, 13 bp, Artificial Sequence
  Oligonucleotide for detection of SNP TSC0012450
tgaaaattttaat

SEQ ID NO: 41454 - DNA, 13 bp, Artificial Sequence
  Oligonucleotide for detection of SNP TSC0012450
attaaaattttca

SEQ ID NO: 41455 - DNA, 13 bp, Artificial Sequence
  Oligonucleotide for detection of SNP TSC0012450
tgaaaaatttaat

SEQ ID NO: 41456 - DNA, 13 bp, Artificial Sequence
  Oligonucleotide for detection of SNP TSC0012450
attaaatttttca

SEQ ID NO: 41457 - DNA, 13 bp, Artificial Sequence
  Oligonucleotide for detection of SNP TSC0012451
tatataattttat

SEQ ID NO: 41458 - DNA, 13 bp, Artificial Sequence
  Oligonucleotide for detection of SNP TSC0012451
ataaaattatata

SEQ ID NO: 41459 - DNA, 13 bp, Artificial Sequence
  Oligonucleotide for detection of SNP TSC0012451
tatatatttttat

SEQ ID NO: 41460 - DNA, 13 bp, Artificial Sequence
  Oligonucleotide for detection of SNP TSC0012451
ataaaaatatata

SEQ ID NO: 41461 - DNA, 13 bp, Artificial Sequence
  Oligonucleotide for detection of SNP TSC0012451
atagaattatata

SEQ ID NO: 41462 - DNA, 13 bp, Artificial Sequence
  Oligonucleotide for detection of SNP TSC0012451
tatataattctat

SEQ ID NO: 41463 - DNA, 13 bp, Artificial Sequence
  Oligonucleotide for detection of SNP TSC0012451
atagaagtatata

SEQ ID NO: 41464 - DNA, 13 bp, Artificial Sequence
  Oligonucleotide for detection of SNP TSC0012451
tatatacttctat

SEQ ID NO: 41465 - DNA, 13 bp, Artificial Sequence
  Oligonucleotide for detection of SNP TSC0012452
tattaagaattta

SEQ ID NO: 41466 - DNA, 13 bp, Artificial Sequence
  Oligonucleotide for detection of SNP TSC0012452
taaattcttaata

SEQ ID NO: 41467 - DNA, 13 bp, Artificial Sequence
  Oligonucleotide for detection of SNP TSC0012452
tattaataattta

SEQ ID NO: 41468 - DNA, 13 bp, Artificial Sequence
  Oligonucleotide for detection of SNP TSC0012452
taaattattaata

SEQ ID NO: 41469 - DNA, 13 bp, Artificial Sequence
  Oligonucleotide for detection of SNP TSC0012452
tggatttttaatg

SEQ ID NO: 41470 - DNA, 13 bp, Artificial Sequence
  Oligonucleotide for detection of SNP TSC0012452
cattaaaaatcca

SEQ ID NO: 41471 - DNA, 13 bp, Artificial Sequence
  Oligonucleotide for detection of SNP TSC0012452
tggattattaatg

SEQ ID NO: 41472 - DNA, 13 bp, Artificial Sequence
  Oligonucleotide for detection of SNP TSC0012452
cattaataatcca

SEQ ID NO: 41473 - DNA, 13 bp, Artificial Sequence
  Oligonucleotide for detection of SNP TSC0012455
ttttagaagaggy

SEQ ID NO: 41474 - DNA, 13 bp, Artificial Sequence
  Oligonucleotide for detection of SNP TSC0012455
rcctcttctaaaa

SEQ ID NO: 41475 - DNA, 13 bp, Artificial Sequence
  Oligonucleotide for detection of SNP TSC0012455
ttttaggagaggy

SEQ ID NO: 41476 - DNA, 13 bp, Artificial Sequence
  Oligonucleotide for detection of SNP TSC0012455
rcctctcctaaaa

SEQ ID NO: 41477 - DNA, 13 bp, Artificial Sequence
  Oligonucleotide for detection of SNP TSC0012456
ttttaagttttta

SEQ ID NO: 41478 - DNA, 13 bp, Artificial Sequence
  Oligonucleotide for detection of SNP TSC0012456
taaaaacttaaaa

SEQ ID NO: 41479 - DNA, 13 bp, Artificial Sequence
  Oligonucleotide for detection of SNP TSC0012456
ttttaaattttta

SEQ ID NO: 41480 - DNA, 13 bp, Artificial Sequence
  Oligonucleotide for detection of SNP TSC0012456
taaaaatttaaaa

SEQ ID NO: 41481 - DNA, 13 bp, Artificial Sequence
  Oligonucleotide for detection of SNP TSC0012460
attattattatta

SEQ ID NO: 41482 - DNA, 13 bp, Artificial Sequence
  Oligonucleotide for detection of SNP TSC0012460
taataataataat

SEQ ID NO: 41483 - DNA, 13 bp, Artificial Sequence
  Oligonucleotide for detection of SNP TSC0012460
attattgttatta

SEQ ID NO: 41484 - DNA, 13 bp, Artificial Sequence
  Oligonucleotide for detection of SNP TSC0012460
taataacaataat

SEQ ID NO: 41485 - DNA, 13 bp, Artificial Sequence
  Oligonucleotide for detection of SNP TSC0012460
attatcgttatta

SEQ ID NO: 41486 - DNA, 13 bp, Artificial Sequence
  Oligonucleotide for detection of SNP TSC0012460
taataacgataat

SEQ ID NO: 41487 - DNA, 13 bp, Artificial Sequence
  Oligonucleotide for detection of SNP TSC0012460
taatggtggtgat

SEQ ID NO: 41488 - DNA, 13 bp, Artificial Sequence
  Oligonucleotide for detection of SNP TSC0012460
atcaccaccatta

SEQ ID NO: 41489 - DNA, 13 bp, Artificial Sequence
  Oligonucleotide for detection of SNP TSC0012460
taatggcggtgat

SEQ ID NO: 41490 - DNA, 13 bp, Artificial Sequence
  Oligonucleotide for detection of SNP TSC0012460
atcaccgccatta

SEQ ID NO: 41491 - DNA, 13 bp, Artificial Sequence
  Oligonucleotide for detection of SNP TSC0012461
gtttataattatg

SEQ ID NO: 41492 - DNA, 13 bp, Artificial Sequence
  Oligonucleotide for detection of SNP TSC0012461
cataattataaac

SEQ ID NO: 41493 - DNA, 13 bp, Artificial Sequence
  Oligonucleotide for detection of SNP TSC0012461
gtttatgattatg

SEQ ID NO: 41494 - DNA, 13 bp, Artificial Sequence
  Oligonucleotide for detection of SNP TSC0012461
cataatcataaac

SEQ ID NO: 41495 - DNA, 13 bp, Artificial Sequence
  Oligonucleotide for detection of SNP TSC0012462
atgtgtgtgtatg

SEQ ID NO: 41496 - DNA, 13 bp, Artificial Sequence
  Oligonucleotide for detection of SNP TSC0012462
catacacacacat

SEQ ID NO: 41497 - DNA, 13 bp, Artificial Sequence
  Oligonucleotide for detection of SNP TSC0012462
atgtgtttgtatg

SEQ ID NO: 41498 - DNA, 13 bp, Artificial Sequence
  Oligonucleotide for detection of SNP TSC0012462
catacaaacacat

SEQ ID NO: 41499 - DNA, 13 bp, Artificial Sequence
  Oligonucleotide for detection of SNP TSC0012462
acgtgtgtgtatg

SEQ ID NO: 41500 - DNA, 13 bp, Artificial Sequence
  Oligonucleotide for detection of SNP TSC0012462
catacacacacgt

SEQ ID NO: 41501 - DNA, 13 bp, Artificial Sequence
  Oligonucleotide for detection of SNP TSC0012462
acgtgtttgtatg

SEQ ID NO: 41502 - DNA, 13 bp, Artificial Sequence
  Oligonucleotide for detection of SNP TSC0012462
catacaaacacgt

SEQ ID NO: 41503 - DNA, 13 bp, Artificial Sequence
  Oligonucleotide for detection of SNP TSC0012462
atgtgtgtgtacg

SEQ ID NO: 41504 - DNA, 13 bp, Artificial Sequence
  Oligonucleotide for detection of SNP TSC0012462
cgtacacacacat

SEQ ID NO: 41505 - DNA, 13 bp, Artificial Sequence
  Oligonucleotide for detection of SNP TSC0012462
atgtgtttgtacg

SEQ ID NO: 41506 - DNA, 13 bp, Artificial Sequence
  Oligonucleotide for detection of SNP TSC0012462
cgtacaaacacat

SEQ ID NO: 41507 - DNA, 13 bp, Artificial Sequence
  Oligonucleotide for detection of SNP TSC0012462
acgtgtgtgtacg

SEQ ID NO: 41508 - DNA, 13 bp, Artificial Sequence
  Oligonucleotide for detection of SNP TSC0012462
cgtacacacacgt

SEQ ID NO: 41509 - DNA, 13 bp, Artificial Sequence
  Oligonucleotide for detection of SNP TSC0012462
acgtgtttgtacg

SEQ ID NO: 41510 - DNA, 13 bp, Artificial Sequence
  Oligonucleotide for detection of SNP TSC0012462
cgtacaaacacgt

SEQ ID NO: 41511 - DNA, 13 bp, Artificial Sequence
  Oligonucleotide for detection of SNP TSC0012462
tgtatatatatgt

SEQ ID NO: 41512 - DNA, 13 bp, Artificial Sequence
  Oligonucleotide for detection of SNP TSC0012462
acatatatataca

SEQ ID NO: 41513 - DNA, 13 bp, Artificial Sequence
  Oligonucleotide for detection of SNP TSC0012462
tgtataaatatgt

SEQ ID NO: 41514 - DNA, 13 bp, Artificial Sequence
  Oligonucleotide for detection of SNP TSC0012462
acatatttataca

SEQ ID NO: 41515 - DNA, 13 bp, Artificial Sequence
  Oligonucleotide for detection of SNP TSC0012462
cgtatatatatgt

SEQ ID NO: 41516 - DNA, 13 bp, Artificial Sequence
  Oligonucleotide for detection of SNP TSC0012462
acatatatatacg

SEQ ID NO: 41517 - DNA, 13 bp, Artificial Sequence
  Oligonucleotide for detection of SNP TSC0012462
cgtataaatatgt

SEQ ID NO: 41518 - DNA, 13 bp, Artificial Sequence
  Oligonucleotide for detection of SNP TSC0012462
acatatttatacg

SEQ ID NO: 41519 - DNA, 13 bp, Artificial Sequence
  Oligonucleotide for detection of SNP TSC0012462
tgtatatatacgt

SEQ ID NO: 41520 - DNA, 13 bp, Artificial Sequence
  Oligonucleotide for detection of SNP TSC0012462
acgtatatataca

SEQ ID NO: 41521 - DNA, 13 bp, Artificial Sequence
  Oligonucleotide for detection of SNP TSC0012462
tgtataaatacgt

SEQ ID NO: 41522 - DNA, 13 bp, Artificial Sequence
  Oligonucleotide for detection of SNP TSC0012462
acgtatttataca

SEQ ID NO: 41523 - DNA, 13 bp, Artificial Sequence
  Oligonucleotide for detection of SNP TSC0012462
cgtatatatacgt

SEQ ID NO: 41524 - DNA, 13 bp, Artificial Sequence
  Oligonucleotide for detection of SNP TSC0012462
acgtatatatacg

SEQ ID NO: 41525 - DNA, 13 bp, Artificial Sequence
  Oligonucleotide for detection of SNP TSC0012462
cgtataaatacgt

SEQ ID NO: 41526 - DNA, 13 bp, Artificial Sequence
  Oligonucleotide for detection of SNP TSC0012462
acgtatttatacg

SEQ ID NO: 41527 - DNA, 13 bp, Artificial Sequence
  Oligonucleotide for detection of SNP TSC0012463
ttggtgtgtttta

SEQ ID NO: 41528 - DNA, 13 bp, Artificial Sequence
  Oligonucleotide for detection of SNP TSC0012463
taaaacacaccaa

SEQ ID NO: 41529 - DNA, 13 bp, Artificial Sequence
  Oligonucleotide for detection of SNP TSC0012463
ttggtgcgtttta

SEQ ID NO: 41530 - DNA, 13 bp, Artificial Sequence
  Oligonucleotide for detection of SNP TSC0012463
taaaacgcaccaa

SEQ ID NO: 41531 - DNA, 13 bp, Artificial Sequence
  Oligonucleotide for detection of SNP TSC0012463
taaaatgtattaa

SEQ ID NO: 41532 - DNA, 13 bp, Artificial Sequence
  Oligonucleotide for detection of SNP TSC0012463
ttaatacatttta

SEQ ID NO: 41533 - DNA, 13 bp, Artificial Sequence
  Oligonucleotide for detection of SNP TSC0012463
taaaatatattaa

SEQ ID NO: 41534 - DNA, 13 bp, Artificial Sequence
  Oligonucleotide for detection of SNP TSC0012463
ttaatatatttta

SEQ ID NO: 41535 - DNA, 13 bp, Artificial Sequence
  Oligonucleotide for detection of SNP TSC0012464
aaagaagagaaaa

SEQ ID NO: 41536 - DNA, 13 bp, Artificial Sequence
  Oligonucleotide for detection of SNP TSC0012464
ttttctcttcttt

SEQ ID NO: 41537 - DNA, 13 bp, Artificial Sequence
  Oligonucleotide for detection of SNP TSC0012464
aaagaaaagaaaa

SEQ ID NO: 41538 - DNA, 13 bp, Artificial Sequence
  Oligonucleotide for detection of SNP TSC0012464
ttttcttttcttt

SEQ ID NO: 41539 - DNA, 13 bp, Artificial Sequence
  Oligonucleotide for detection of SNP TSC0012465
atttttaaattat

SEQ ID NO: 41540 - DNA, 13 bp, Artificial Sequence
  Oligonucleotide for detection of SNP TSC0012465
ataatttaaaaat

SEQ ID NO: 41541 - DNA, 13 bp, Artificial Sequence
  Oligonucleotide for detection of SNP TSC0012465
atttttgaattat

SEQ ID NO: 41542 - DNA, 13 bp, Artificial Sequence
  Oligonucleotide for detection of SNP TSC0012465
ataattcaaaaat

SEQ ID NO: 41543 - DNA, 13 bp, Artificial Sequence
  Oligonucleotide for detection of SNP TSC0012468
tgtaatggtaaat

SEQ ID NO: 41544 - DNA, 13 bp, Artificial Sequence
  Oligonucleotide for detection of SNP TSC0012468
atttaccattaca

SEQ ID NO: 41545 - DNA, 13 bp, Artificial Sequence
  Oligonucleotide for detection of SNP TSC0012468
tgtaattgtaaat

SEQ ID NO: 41546 - DNA, 13 bp, Artificial Sequence
  Oligonucleotide for detection of SNP TSC0012468
atttacaattaca

SEQ ID NO: 41547 - DNA, 13 bp, Artificial Sequence
  Oligonucleotide for detection of SNP TSC0012468
atttgttattata

SEQ ID NO: 41548 - DNA, 13 bp, Artificial Sequence
  Oligonucleotide for detection of SNP TSC0012468
tataataacaaat

SEQ ID NO: 41549 - DNA, 13 bp, Artificial Sequence
  Oligonucleotide for detection of SNP TSC0012468
atttgtaattata

SEQ ID NO: 41550 - DNA, 13 bp, Artificial Sequence
  Oligonucleotide for detection of SNP TSC0012468
tataattacaaat

SEQ ID NO: 41551 - DNA, 13 bp, Artificial Sequence
  Oligonucleotide for detection of SNP TSC0012469
tttttagtttaay

SEQ ID NO: 41552 - DNA, 13 bp, Artificial Sequence
  Oligonucleotide for detection of SNP TSC0012469
rttaaactaaaaa

SEQ ID NO: 41553 - DNA, 13 bp, Artificial Sequence
  Oligonucleotide for detection of SNP TSC0012469
tttttaatttaay

SEQ ID NO: 41554 - DNA, 13 bp, Artificial Sequence
  Oligonucleotide for detection of SNP TSC0012469
rttaaattaaaaa

SEQ ID NO: 41555 - DNA, 13 bp, Artificial Sequence
  Oligonucleotide for detection of SNP TSC0012470
ttatatgatatty

SEQ ID NO: 41556 - DNA, 13 bp, Artificial Sequence
  Oligonucleotide for detection of SNP TSC0012470
raatatcatataa

SEQ ID NO: 41557 - DNA, 13 bp, Artificial Sequence
  Oligonucleotide for detection of SNP TSC0012470
ttatattatatty

SEQ ID NO: 41558 - DNA, 13 bp, Artificial Sequence
  Oligonucleotide for detection of SNP TSC0012470
raatataatataa

SEQ ID NO: 41559 - DNA, 13 bp, Artificial Sequence
  Oligonucleotide for detection of SNP TSC0012470
gaatgttatgtga

SEQ ID NO: 41560 - DNA, 13 bp, Artificial Sequence
  Oligonucleotide for detection of SNP TSC0012470
tcacataacattc

SEQ ID NO: 41561 - DNA, 13 bp, Artificial Sequence
  Oligonucleotide for detection of SNP TSC0012470
gaatgtaatgtga

SEQ ID NO: 41562 - DNA, 13 bp, Artificial Sequence
  Oligonucleotide for detection of SNP TSC0012470
tcacattacattc

SEQ ID NO: 41563 - DNA, 13 bp, Artificial Sequence
  Oligonucleotide for detection of SNP TSC0012474
tgtgttgtgtaat

SEQ ID NO: 41564 - DNA, 13 bp, Artificial Sequence
  Oligonucleotide for detection of SNP TSC0012474
attacacaacaca

SEQ ID NO: 41565 - DNA, 13 bp, Artificial Sequence
  Oligonucleotide for detection of SNP TSC0012474
tgtgttatgtaat

SEQ ID NO: 41566 - DNA, 13 bp, Artificial Sequence
  Oligonucleotide for detection of SNP TSC0012474
attacataacaca

SEQ ID NO: 41567 - DNA, 13 bp, Artificial Sequence
  Oligonucleotide for detection of SNP TSC0012474
cgtgttgtgtaat

SEQ ID NO: 41568 - DNA, 13 bp, Artificial Sequence
  Oligonucleotide for detection of SNP TSC0012474
attacacaacacg

SEQ ID NO: 41569 - DNA, 13 bp, Artificial Sequence
  Oligonucleotide for detection of SNP TSC0012474
cgtgttatgtaat

SEQ ID NO: 41570 - DNA, 13 bp, Artificial Sequence
  Oligonucleotide for detection of SNP TSC0012474
attacataacacg

SEQ ID NO: 41571 - DNA, 13 bp, Artificial Sequence
  Oligonucleotide for detection of SNP TSC0012475
tttatcgtttttt

SEQ ID NO: 41572 - DNA, 13 bp, Artificial Sequence
  Oligonucleotide for detection of SNP TSC0012475
aaaaaacgataaa

SEQ ID NO: 41573 - DNA, 13 bp, Artificial Sequence
  Oligonucleotide for detection of SNP TSC0012475
aaagaatggtgaa

SEQ ID NO: 41574 - DNA, 13 bp, Artificial Sequence
  Oligonucleotide for detection of SNP TSC0012475
ttcaccattcttt

SEQ ID NO: 41575 - DNA, 13 bp, Artificial Sequence
  Oligonucleotide for detection of SNP TSC0012475
aaagaacggtgaa

SEQ ID NO: 41576 - DNA, 13 bp, Artificial Sequence
  Oligonucleotide for detection of SNP TSC0012475
ttcaccgttcttt

SEQ ID NO: 41577 - DNA, 13 bp, Artificial Sequence
  Oligonucleotide for detection of SNP TSC0012479
tttttagttttag

SEQ ID NO: 41578 - DNA, 13 bp, Artificial Sequence
  Oligonucleotide for detection of SNP TSC0012479
ctaaaactaaaaa

SEQ ID NO: 41579 - DNA, 13 bp, Artificial Sequence
  Oligonucleotide for detection of SNP TSC0012480
aaatagggtttta

SEQ ID NO: 41580 - DNA, 13 bp, Artificial Sequence
  Oligonucleotide for detection of SNP TSC0012480
taaaaccctattt

SEQ ID NO: 41581 - DNA, 13 bp, Artificial Sequence
  Oligonucleotide for detection of SNP TSC0012480
aaatagtgtttta

SEQ ID NO: 41582 - DNA, 13 bp, Artificial Sequence
  Oligonucleotide for detection of SNP TSC0012480
taaaacactattt

SEQ ID NO: 41583 - DNA, 13 bp, Artificial Sequence
  Oligonucleotide for detection of SNP TSC0012480
taagattttattt

SEQ ID NO: 41584 - DNA, 13 bp, Artificial Sequence
  Oligonucleotide for detection of SNP TSC0012480
aaataaaatctta

SEQ ID NO: 41585 - DNA, 13 bp, Artificial Sequence
  Oligonucleotide for detection of SNP TSC0012480
taagatattattt

SEQ ID NO: 41586 - DNA, 13 bp, Artificial Sequence
  Oligonucleotide for detection of SNP TSC0012480
aaataatatctta

SEQ ID NO: 41587 - DNA, 13 bp, Artificial Sequence
  Oligonucleotide for detection of SNP TSC0012483
ataagtatgagaa

SEQ ID NO: 41588 - DNA, 13 bp, Artificial Sequence
  Oligonucleotide for detection of SNP TSC0012483
ttctcatacttat

SEQ ID NO: 41589 - DNA, 13 bp, Artificial Sequence
  Oligonucleotide for detection of SNP TSC0012483
ataagtgtgagaa

SEQ ID NO: 41590 - DNA, 13 bp, Artificial Sequence
  Oligonucleotide for detection of SNP TSC0012483
ttctcacacttat

SEQ ID NO: 41591 - DNA, 13 bp, Artificial Sequence
  Oligonucleotide for detection of SNP TSC0012484
gtaggttaggagy

SEQ ID NO: 41592 - DNA, 13 bp, Artificial Sequence
  Oligonucleotide for detection of SNP TSC0012484
rctcctaacctac

SEQ ID NO: 41593 - DNA, 13 bp, Artificial Sequence
  Oligonucleotide for detection of SNP TSC0012484
gtaggtgaggagy

SEQ ID NO: 41594 - DNA, 13 bp, Artificial Sequence
  Oligonucleotide for detection of SNP TSC0012484
rctcctcacctac

SEQ ID NO: 41595 - DNA, 13 bp, Artificial Sequence
  Oligonucleotide for detection of SNP TSC0012484
gtaggcgaggagy

SEQ ID NO: 41596 - DNA, 13 bp, Artificial Sequence
  Oligonucleotide for detection of SNP TSC0012484
rctcctcgcctac

SEQ ID NO: 41597 - DNA, 13 bp, Artificial Sequence
  Oligonucleotide for detection of SNP TSC0012484
gtttttggtttgy

SEQ ID NO: 41598 - DNA, 13 bp, Artificial Sequence
  Oligonucleotide for detection of SNP TSC0012484
rcaaaccaaaaac

SEQ ID NO: 41599 - DNA, 13 bp, Artificial Sequence
  Oligonucleotide for detection of SNP TSC0012484
gttttttgtttgy

SEQ ID NO: 41600 - DNA, 13 bp, Artificial Sequence
  Oligonucleotide for detection of SNP TSC0012484
rcaaacaaaaaac

SEQ ID NO: 41601 - DNA, 13 bp, Artificial Sequence
  Oligonucleotide for detection of SNP TSC0012484
gtttttcgtttgy

SEQ ID NO: 41602 - DNA, 13 bp, Artificial Sequence
  Oligonucleotide for detection of SNP TSC0012484
rcaaacgaaaaac

SEQ ID NO: 41603 - DNA, 13 bp, Artificial Sequence
  Oligonucleotide for detection of SNP TSC0012485
agttgtaattaty

SEQ ID NO: 41604 - DNA, 13 bp, Artificial Sequence
  Oligonucleotide for detection of SNP TSC0012485
rataattacaact

SEQ ID NO: 41605 - DNA, 13 bp, Artificial Sequence
  Oligonucleotide for detection of SNP TSC0012485
agttgttattaty

SEQ ID NO: 41606 - DNA, 13 bp, Artificial Sequence
  Oligonucleotide for detection of SNP TSC0012485
rataataacaact

SEQ ID NO: 41607 - DNA, 13 bp, Artificial Sequence
  Oligonucleotide for detection of SNP TSC0012485
ggtgattataatt

SEQ ID NO: 41608 - DNA, 13 bp, Artificial Sequence
  Oligonucleotide for detection of SNP TSC0012485
aattataatcacc

SEQ ID NO: 41609 - DNA, 13 bp, Artificial Sequence
  Oligonucleotide for detection of SNP TSC0012485
ggtgatgataatt

SEQ ID NO: 41610 - DNA, 13 bp, Artificial Sequence
  Oligonucleotide for detection of SNP TSC0012485
aattatcatcacc

SEQ ID NO: 41611 - DNA, 13 bp, Artificial Sequence
  Oligonucleotide for detection of SNP TSC0012486
gattggagatttt

SEQ ID NO: 41612 - DNA, 13 bp, Artificial Sequence
  Oligonucleotide for detection of SNP TSC0012486
aaaatctccaatc

SEQ ID NO: 41613 - DNA, 13 bp, Artificial Sequence
  Oligonucleotide for detection of SNP TSC0012486
gattggggatttt

SEQ ID NO: 41614 - DNA, 13 bp, Artificial Sequence
  Oligonucleotide for detection of SNP TSC0012486
aaaatccccaatc

SEQ ID NO: 41615 - DNA, 13 bp, Artificial Sequence
  Oligonucleotide for detection of SNP TSC0012487
ggttatagagagg

SEQ ID NO: 41616 - DNA, 13 bp, Artificial Sequence
  Oligonucleotide for detection of SNP TSC0012487
cctctctataacc

SEQ ID NO: 41617 - DNA, 13 bp, Artificial Sequence
  Oligonucleotide for detection of SNP TSC0012487
ggttatggagagg

SEQ ID NO: 41618 - DNA, 13 bp, Artificial Sequence
  Oligonucleotide for detection of SNP TSC0012487
cctctccataacc

SEQ ID NO: 41619 - DNA, 13 bp, Artificial Sequence
  Oligonucleotide for detection of SNP TSC0012488
taaggagtaatat

SEQ ID NO: 41620 - DNA, 13 bp, Artificial Sequence
  Oligonucleotide for detection of SNP TSC0012488
atattactcctta

SEQ ID NO: 41621 - DNA, 13 bp, Artificial Sequence
  Oligonucleotide for detection of SNP TSC0012488
taaggaataatat

SEQ ID NO: 41622 - DNA, 13 bp, Artificial Sequence
  Oligonucleotide for detection of SNP TSC0012488
atattattcctta

SEQ ID NO: 41623 - DNA, 13 bp, Artificial Sequence
  Oligonucleotide for detection of SNP TSC0012489
aaataaattaaat

SEQ ID NO: 41624 - DNA, 13 bp, Artificial Sequence
  Oligonucleotide for detection of SNP TSC0012489
atttaatttattt

SEQ ID NO: 41625 - DNA, 13 bp, Artificial Sequence
  Oligonucleotide for detection of SNP TSC0012489
aaataatttaaat

SEQ ID NO: 41626 - DNA, 13 bp, Artificial Sequence
  Oligonucleotide for detection of SNP TSC0012489
atttaaattattt

SEQ ID NO: 41627 - DNA, 13 bp, Artificial Sequence
  Oligonucleotide for detection of SNP TSC0012489
atttgatttgttt

SEQ ID NO: 41628 - DNA, 13 bp, Artificial Sequence
  Oligonucleotide for detection of SNP TSC0012489
aaacaaatcaaat

SEQ ID NO: 41629 - DNA, 13 bp, Artificial Sequence
  Oligonucleotide for detection of SNP TSC0012489
atttgaattgttt

SEQ ID NO: 41630 - DNA, 13 bp, Artificial Sequence
  Oligonucleotide for detection of SNP TSC0012489
aaacaattcaaat

SEQ ID NO: 41631 - DNA, 13 bp, Artificial Sequence
  Oligonucleotide for detection of SNP TSC0012490
atagtaaagggag

SEQ ID NO: 41632 - DNA, 13 bp, Artificial Sequence
  Oligonucleotide for detection of SNP TSC0012490
ctccctttactat

SEQ ID NO: 41633 - DNA, 13 bp, Artificial Sequence
  Oligonucleotide for detection of SNP TSC0012490
atagtagagggag

SEQ ID NO: 41634 - DNA, 13 bp, Artificial Sequence
  Oligonucleotide for detection of SNP TSC0012490
ctccctctactat

SEQ ID NO: 41635 - DNA, 13 bp, Artificial Sequence
  Oligonucleotide for detection of SNP TSC0012493
taatattgtgaaa

SEQ ID NO: 41636 - DNA, 13 bp, Artificial Sequence
  Oligonucleotide for detection of SNP TSC0012493
tttcacaatatta

SEQ ID NO: 41637 - DNA, 13 bp, Artificial Sequence
  Oligonucleotide for detection of SNP TSC0012493
taatatcgtgaaa

SEQ ID NO: 41638 - DNA, 13 bp, Artificial Sequence
  Oligonucleotide for detection of SNP TSC0012493
tttcacgatatta

SEQ ID NO: 41639 - DNA, 13 bp, Artificial Sequence
  Oligonucleotide for detection of SNP TSC0012494
agtagaggtttaa

SEQ ID NO: 41640 - DNA, 13 bp, Artificial Sequence
  Oligonucleotide for detection of SNP TSC0012494
ttaaacctctact

SEQ ID NO: 41641 - DNA, 13 bp, Artificial Sequence
  Oligonucleotide for detection of SNP TSC0012494
agtagaagtttaa

SEQ ID NO: 41642 - DNA, 13 bp, Artificial Sequence
  Oligonucleotide for detection of SNP TSC0012494
ttaaacttctact

SEQ ID NO: 41643 - DNA, 13 bp, Artificial Sequence
  Oligonucleotide for detection of SNP TSC0012495
ggaagagagagga

SEQ ID NO: 41644 - DNA, 13 bp, Artificial Sequence
  Oligonucleotide for detection of SNP TSC0012495
tcctctctcttcc

SEQ ID NO: 41645 - DNA, 13 bp, Artificial Sequence
  Oligonucleotide for detection of SNP TSC0012495
ggaagaaagagga

SEQ ID NO: 41646 - DNA, 13 bp, Artificial Sequence
  Oligonucleotide for detection of SNP TSC0012495
tcctctttcttcc

SEQ ID NO: 41647 - DNA, 13 bp, Artificial Sequence
  Oligonucleotide for detection of SNP TSC0012503
tatttaaaatttt

SEQ ID NO: 41648 - DNA, 13 bp, Artificial Sequence
  Oligonucleotide for detection of SNP TSC0012503
aaaattttaaata

SEQ ID NO: 41649 - DNA, 13 bp, Artificial Sequence
  Oligonucleotide for detection of SNP TSC0012503
tatttataatttt

SEQ ID NO: 41650 - DNA, 13 bp, Artificial Sequence
  Oligonucleotide for detection of SNP TSC0012503
aaaattataaata

SEQ ID NO: 41651 - DNA, 13 bp, Artificial Sequence
  Oligonucleotide for detection of SNP TSC0012503
aagattttagatg

SEQ ID NO: 41652 - DNA, 13 bp, Artificial Sequence
  Oligonucleotide for detection of SNP TSC0012503
catctaaaatctt

SEQ ID NO: 41653 - DNA, 13 bp, Artificial Sequence
  Oligonucleotide for detection of SNP TSC0012503
aagattgtagatg

SEQ ID NO: 41654 - DNA, 13 bp, Artificial Sequence
  Oligonucleotide for detection of SNP TSC0012503
catctacaatctt

SEQ ID NO: 41655 - DNA, 13 bp, Artificial Sequence
  Oligonucleotide for detection of SNP TSC0012504
ttgtattgtttta

SEQ ID NO: 41656 - DNA, 13 bp, Artificial Sequence
  Oligonucleotide for detection of SNP TSC0012504
taaaacaatacaa

SEQ ID NO: 41657 - DNA, 13 bp, Artificial Sequence
  Oligonucleotide for detection of SNP TSC0012504
ttgtatggtttta

SEQ ID NO: 41658 - DNA, 13 bp, Artificial Sequence
  Oligonucleotide for detection of SNP TSC0012504
taaaaccatacaa

SEQ ID NO: 41659 - DNA, 13 bp, Artificial Sequence
  Oligonucleotide for detection of SNP TSC0012504
tcgtattgtttta

SEQ ID NO: 41660 - DNA, 13 bp, Artificial Sequence
  Oligonucleotide for detection of SNP TSC0012504
taaaacaatacga

SEQ ID NO: 41661 - DNA, 13 bp, Artificial Sequence
  Oligonucleotide for detection of SNP TSC0012504
tcgtatggtttta

SEQ ID NO: 41662 - DNA, 13 bp, Artificial Sequence
  Oligonucleotide for detection of SNP TSC0012504
taaaaccatacga

SEQ ID NO: 41663 - DNA, 13 bp, Artificial Sequence
  Oligonucleotide for detection of SNP TSC0012504
tagggtaatgtgg

SEQ ID NO: 41664 - DNA, 13 bp, Artificial Sequence
  Oligonucleotide for detection of SNP TSC0012504
ccacattacccta

SEQ ID NO: 41665 - DNA, 13 bp, Artificial Sequence
  Oligonucleotide for detection of SNP TSC0012504
tagggttatgtgg

SEQ ID NO: 41666 - DNA, 13 bp, Artificial Sequence
  Oligonucleotide for detection of SNP TSC0012504
ccacataacccta

SEQ ID NO: 41667 - DNA, 13 bp, Artificial Sequence
  Oligonucleotide for detection of SNP TSC0012504
tagggtaatgcgg

SEQ ID NO: 41668 - DNA, 13 bp, Artificial Sequence
  Oligonucleotide for detection of SNP TSC0012504
ccgcattacccta

SEQ ID NO: 41669 - DNA, 13 bp, Artificial Sequence
  Oligonucleotide for detection of SNP TSC0012504
tagggttatgcgg

SEQ ID NO: 41670 - DNA, 13 bp, Artificial Sequence
  Oligonucleotide for detection of SNP TSC0012504
ccgcataacccta

SEQ ID NO: 41671 - DNA, 13 bp, Artificial Sequence
  Oligonucleotide for detection of SNP TSC0012505
gtttatgtttgtg

SEQ ID NO: 41672 - DNA, 13 bp, Artificial Sequence
  Oligonucleotide for detection of SNP TSC0012505
cacaaacataaac

SEQ ID NO: 41673 - DNA, 13 bp, Artificial Sequence
  Oligonucleotide for detection of SNP TSC0012505
gtttatttttgtg

SEQ ID NO: 41674 - DNA, 13 bp, Artificial Sequence
  Oligonucleotide for detection of SNP TSC0012505
cacaaaaataaac

SEQ ID NO: 41675 - DNA, 13 bp, Artificial Sequence
  Oligonucleotide for detection of SNP TSC0012505
gtttacgtttgtg

SEQ ID NO: 41676 - DNA, 13 bp, Artificial Sequence
  Oligonucleotide for detection of SNP TSC0012505
cacaaacgtaaac

SEQ ID NO: 41677 - DNA, 13 bp, Artificial Sequence
  Oligonucleotide for detection of SNP TSC0012505
tataggtgtgagy

SEQ ID NO: 41678 - DNA, 13 bp, Artificial Sequence
  Oligonucleotide for detection of SNP TSC0012505
rctcacacctata

SEQ ID NO: 41679 - DNA, 13 bp, Artificial Sequence
  Oligonucleotide for detection of SNP TSC0012505
tataggagtgagy

SEQ ID NO: 41680 - DNA, 13 bp, Artificial Sequence
  Oligonucleotide for detection of SNP TSC0012505
rctcactcctata

SEQ ID NO: 41681 - DNA, 13 bp, Artificial Sequence
  Oligonucleotide for detection of SNP TSC0012505
tataggcgtgagy

SEQ ID NO: 41682 - DNA, 13 bp, Artificial Sequence
  Oligonucleotide for detection of SNP TSC0012505
rctcacgcctata

SEQ ID NO: 41683 - DNA, 13 bp, Artificial Sequence
  Oligonucleotide for detection of SNP TSC0012506
tttagtaatttag

SEQ ID NO: 41684 - DNA, 13 bp, Artificial Sequence
  Oligonucleotide for detection of SNP TSC0012506
ctaaattactaaa

SEQ ID NO: 41685 - DNA, 13 bp, Artificial Sequence
  Oligonucleotide for detection of SNP TSC0012506
tttagttatttag

SEQ ID NO: 41686 - DNA, 13 bp, Artificial Sequence
  Oligonucleotide for detection of SNP TSC0012506
ctaaataactaaa

SEQ ID NO: 41687 - DNA, 13 bp, Artificial Sequence
  Oligonucleotide for detection of SNP TSC0012506
ttgagttgttggg

SEQ ID NO: 41688 - DNA, 13 bp, Artificial Sequence
  Oligonucleotide for detection of SNP TSC0012506
cccaacaactcaa

SEQ ID NO: 41689 - DNA, 13 bp, Artificial Sequence
  Oligonucleotide for detection of SNP TSC0012506
ttgagtagttggg

SEQ ID NO: 41690 - DNA, 13 bp, Artificial Sequence
  Oligonucleotide for detection of SNP TSC0012506
cccaactactcaa

SEQ ID NO: 41691 - DNA, 13 bp, Artificial Sequence
  Oligonucleotide for detection of SNP TSC0012507
tattttttttagg

SEQ ID NO: 41692 - DNA, 13 bp, Artificial Sequence
  Oligonucleotide for detection of SNP TSC0012507
cctaaaaaaaata

SEQ ID NO: 41693 - DNA, 13 bp, Artificial Sequence
  Oligonucleotide for detection of SNP TSC0012507
tattttgtttagg

SEQ ID NO: 41694 - DNA, 13 bp, Artificial Sequence
  Oligonucleotide for detection of SNP TSC0012507
cctaaacaaaata

SEQ ID NO: 41695 - DNA, 13 bp, Artificial Sequence
  Oligonucleotide for detection of SNP TSC0012507
tttggagagagta

SEQ ID NO: 41696 - DNA, 13 bp, Artificial Sequence
  Oligonucleotide for detection of SNP TSC0012507
tactctctccaaa

SEQ ID NO: 41697 - DNA, 13 bp, Artificial Sequence
  Oligonucleotide for detection of SNP TSC0012507
tttggatagagta

SEQ ID NO: 41698 - DNA, 13 bp, Artificial Sequence
  Oligonucleotide for detection of SNP TSC0012507
tactctatccaaa

SEQ ID NO: 41699 - DNA, 13 bp, Artificial Sequence
  Oligonucleotide for detection of SNP TSC0012509
atggtggaaaaga

SEQ ID NO: 41700 - DNA, 13 bp, Artificial Sequence
  Oligonucleotide for detection of SNP TSC0012509
tcttttccaccat

SEQ ID NO: 41701 - DNA, 13 bp, Artificial Sequence
  Oligonucleotide for detection of SNP TSC0012509
atggtgtaaaaga

SEQ ID NO: 41702 - DNA, 13 bp, Artificial Sequence
  Oligonucleotide for detection of SNP TSC0012509
tcttttacaccat

SEQ ID NO: 41703 - DNA, 13 bp, Artificial Sequence
  Oligonucleotide for detection of SNP TSC0012509
ttttttttattat

SEQ ID NO: 41704 - DNA, 13 bp, Artificial Sequence
  Oligonucleotide for detection of SNP TSC0012509
ataataaaaaaaa

SEQ ID NO: 41705 - DNA, 13 bp, Artificial Sequence
  Oligonucleotide for detection of SNP TSC0012509
ttttttatattat

SEQ ID NO: 41706 - DNA, 13 bp, Artificial Sequence
  Oligonucleotide for detection of SNP TSC0012509
ataatataaaaaa

SEQ ID NO: 41707 - DNA, 13 bp, Artificial Sequence
  Oligonucleotide for detection of SNP TSC0012510
gtattagatagga

SEQ ID NO: 41708 - DNA, 13 bp, Artificial Sequence
  Oligonucleotide for detection of SNP TSC0012510
tcctatctaatac

SEQ ID NO: 41709 - DNA, 13 bp, Artificial Sequence
  Oligonucleotide for detection of SNP TSC0012510
gtattatatagga

SEQ ID NO: 41710 - DNA, 13 bp, Artificial Sequence
  Oligonucleotide for detection of SNP TSC0012510
tcctatataatac

SEQ ID NO: 41711 - DNA, 13 bp, Artificial Sequence
  Oligonucleotide for detection of SNP TSC0012510
ttttgtttggtay

SEQ ID NO: 41712 - DNA, 13 bp, Artificial Sequence
  Oligonucleotide for detection of SNP TSC0012510
rtaccaaacaaaa

SEQ ID NO: 41713 - DNA, 13 bp, Artificial Sequence
  Oligonucleotide for detection of SNP TSC0012510
ttttgtatggtay

SEQ ID NO: 41714 - DNA, 13 bp, Artificial Sequence
  Oligonucleotide for detection of SNP TSC0012510
rtaccatacaaaa

SEQ ID NO: 41715 - DNA, 13 bp, Artificial Sequence
  Oligonucleotide for detection of SNP TSC0012511
ttatttattttag

SEQ ID NO: 41716 - DNA, 13 bp, Artificial Sequence
  Oligonucleotide for detection of SNP TSC0012511
ctaaaataaataa

SEQ ID NO: 41717 - DNA, 13 bp, Artificial Sequence
  Oligonucleotide for detection of SNP TSC0012511
ttgaaataaataa

SEQ ID NO: 41718 - DNA, 13 bp, Artificial Sequence
  Oligonucleotide for detection of SNP TSC0012511
ttatttatttcaa

SEQ ID NO: 41719 - DNA, 13 bp, Artificial Sequence
  Oligonucleotide for detection of SNP TSC0012511
ttgaaagaaataa

SEQ ID NO: 41720 - DNA, 13 bp, Artificial Sequence
  Oligonucleotide for detection of SNP TSC0012511
ttatttctttcaa

SEQ ID NO: 41721 - DNA, 13 bp, Artificial Sequence
  Oligonucleotide for detection of SNP TSC0012512
gtgttagttaatt

SEQ ID NO: 41722 - DNA, 13 bp, Artificial Sequence
  Oligonucleotide for detection of SNP TSC0012512
aattaactaacac

SEQ ID NO: 41723 - DNA, 13 bp, Artificial Sequence
  Oligonucleotide for detection of SNP TSC0012512
gtgttaattaatt

SEQ ID NO: 41724 - DNA, 13 bp, Artificial Sequence
  Oligonucleotide for detection of SNP TSC0012512
aattaattaacac

SEQ ID NO: 41725 - DNA, 13 bp, Artificial Sequence
  Oligonucleotide for detection of SNP TSC0012513
gggtagtgtttty

SEQ ID NO: 41726 - DNA, 13 bp, Artificial Sequence
  Oligonucleotide for detection of SNP TSC0012513
raaaacactaccc

SEQ ID NO: 41727 - DNA, 13 bp, Artificial Sequence
  Oligonucleotide for detection of SNP TSC0012513
gggtagcgtttty

SEQ ID NO: 41728 - DNA, 13 bp, Artificial Sequence
  Oligonucleotide for detection of SNP TSC0012513
raaaacgctaccc

SEQ ID NO: 41729 - DNA, 13 bp, Artificial Sequence
  Oligonucleotide for detection of SNP TSC0012513
gggagtgttatty

SEQ ID NO: 41730 - DNA, 13 bp, Artificial Sequence
  Oligonucleotide for detection of SNP TSC0012513
raataacactccc

SEQ ID NO: 41731 - DNA, 13 bp, Artificial Sequence
  Oligonucleotide for detection of SNP TSC0012513
gggagtattatty

SEQ ID NO: 41732 - DNA, 13 bp, Artificial Sequence
  Oligonucleotide for detection of SNP TSC0012513
raataatactccc

SEQ ID NO: 41733 - DNA, 13 bp, Artificial Sequence
  Oligonucleotide for detection of SNP TSC0012513
gggagcgttatty

SEQ ID NO: 41734 - DNA, 13 bp, Artificial Sequence
  Oligonucleotide for detection of SNP TSC0012513
raataacgctccc

SEQ ID NO: 41735 - DNA, 13 bp, Artificial Sequence
  Oligonucleotide for detection of SNP TSC0012514
gtgaaaatttgty

SEQ ID NO: 41736 - DNA, 13 bp, Artificial Sequence
  Oligonucleotide for detection of SNP TSC0012514
racaaattttcac

SEQ ID NO: 41737 - DNA, 13 bp, Artificial Sequence
  Oligonucleotide for detection of SNP TSC0012514
gtgaaattttgty

SEQ ID NO: 41738 - DNA, 13 bp, Artificial Sequence
  Oligonucleotide for detection of SNP TSC0012514
racaaaatttcac

SEQ ID NO: 41739 - DNA, 13 bp, Artificial Sequence
  Oligonucleotide for detection of SNP TSC0012514
gtgaaaattcgty

SEQ ID NO: 41740 - DNA, 13 bp, Artificial Sequence
  Oligonucleotide for detection of SNP TSC0012514
racgaattttcac

SEQ ID NO: 41741 - DNA, 13 bp, Artificial Sequence
  Oligonucleotide for detection of SNP TSC0012514
gtgaaatttcgty

SEQ ID NO: 41742 - DNA, 13 bp, Artificial Sequence
  Oligonucleotide for detection of SNP TSC0012514
racgaaatttcac

SEQ ID NO: 41743 - DNA, 13 bp, Artificial Sequence
  Oligonucleotide for detection of SNP TSC0012514
gatgggtttttay

SEQ ID NO: 41744 - DNA, 13 bp, Artificial Sequence
  Oligonucleotide for detection of SNP TSC0012514
rtaaaaacccatc

SEQ ID NO: 41745 - DNA, 13 bp, Artificial Sequence
  Oligonucleotide for detection of SNP TSC0012514
gacgggtttttay

SEQ ID NO: 41746 - DNA, 13 bp, Artificial Sequence
  Oligonucleotide for detection of SNP TSC0012514
rtaaaaacccgtc

SEQ ID NO: 41747 - DNA, 13 bp, Artificial Sequence
  Oligonucleotide for detection of SNP TSC0012515
gatgttagtttta

SEQ ID NO: 41748 - DNA, 13 bp, Artificial Sequence
  Oligonucleotide for detection of SNP TSC0012515
taaaactaacatc

SEQ ID NO: 41749 - DNA, 13 bp, Artificial Sequence
  Oligonucleotide for detection of SNP TSC0012515
gatgtttgtttta

SEQ ID NO: 41750 - DNA, 13 bp, Artificial Sequence
  Oligonucleotide for detection of SNP TSC0012515
taaaacaaacatc

SEQ ID NO: 41751 - DNA, 13 bp, Artificial Sequence
  Oligonucleotide for detection of SNP TSC0012515
gacgttagtttta

SEQ ID NO: 41752 - DNA, 13 bp, Artificial Sequence
  Oligonucleotide for detection of SNP TSC0012515
taaaactaacgtc

SEQ ID NO: 41753 - DNA, 13 bp, Artificial Sequence
  Oligonucleotide for detection of SNP TSC0012515
gacgtttgtttta

SEQ ID NO: 41754 - DNA, 13 bp, Artificial Sequence
  Oligonucleotide for detection of SNP TSC0012515
taaaacaaacgtc

SEQ ID NO: 41755 - DNA, 13 bp, Artificial Sequence
  Oligonucleotide for detection of SNP TSC0012515
taaggttaatgty

SEQ ID NO: 41756 - DNA, 13 bp, Artificial Sequence
  Oligonucleotide for detection of SNP TSC0012515
racattaacctta

SEQ ID NO: 41757 - DNA, 13 bp, Artificial Sequence
  Oligonucleotide for detection of SNP TSC0012515
taaggtaaatgty

SEQ ID NO: 41758 - DNA, 13 bp, Artificial Sequence
  Oligonucleotide for detection of SNP TSC0012515
racatttacctta

SEQ ID NO: 41759 - DNA, 13 bp, Artificial Sequence
  Oligonucleotide for detection of SNP TSC0012515
taaggttaacgty

SEQ ID NO: 41760 - DNA, 13 bp, Artificial Sequence
  Oligonucleotide for detection of SNP TSC0012515
racgttaacctta

SEQ ID NO: 41761 - DNA, 13 bp, Artificial Sequence
  Oligonucleotide for detection of SNP TSC0012515
taaggtaaacgty

SEQ ID NO: 41762 - DNA, 13 bp, Artificial Sequence
  Oligonucleotide for detection of SNP TSC0012515
racgtttacctta

SEQ ID NO: 41763 - DNA, 13 bp, Artificial Sequence
  Oligonucleotide for detection of SNP TSC0012518
tatgttatttatt

SEQ ID NO: 41764 - DNA, 13 bp, Artificial Sequence
  Oligonucleotide for detection of SNP TSC0012518
aataaataacata

SEQ ID NO: 41765 - DNA, 13 bp, Artificial Sequence
  Oligonucleotide for detection of SNP TSC0012518
tatgttgtttatt

SEQ ID NO: 41766 - DNA, 13 bp, Artificial Sequence
  Oligonucleotide for detection of SNP TSC0012518
aataaacaacata

SEQ ID NO: 41767 - DNA, 13 bp, Artificial Sequence
  Oligonucleotide for detection of SNP TSC0012518
tatgtcgtttatt

SEQ ID NO: 41768 - DNA, 13 bp, Artificial Sequence
  Oligonucleotide for detection of SNP TSC0012518
aataaacgacata

SEQ ID NO: 41769 - DNA, 13 bp, Artificial Sequence
  Oligonucleotide for detection of SNP TSC0012518
aataggtgatatg

SEQ ID NO: 41770 - DNA, 13 bp, Artificial Sequence
  Oligonucleotide for detection of SNP TSC0012518
catatcacctatt

SEQ ID NO: 41771 - DNA, 13 bp, Artificial Sequence
  Oligonucleotide for detection of SNP TSC0012518
aataggcgatatg

SEQ ID NO: 41772 - DNA, 13 bp, Artificial Sequence
  Oligonucleotide for detection of SNP TSC0012518
catatcgcctatt

SEQ ID NO: 41773 - DNA, 13 bp, Artificial Sequence
  Oligonucleotide for detection of SNP TSC0012523
ttagttataattg

SEQ ID NO: 41774 - DNA, 13 bp, Artificial Sequence
  Oligonucleotide for detection of SNP TSC0012523
caattataactaa

SEQ ID NO: 41775 - DNA, 13 bp, Artificial Sequence
  Oligonucleotide for detection of SNP TSC0012523
ttagttttaattg

SEQ ID NO: 41776 - DNA, 13 bp, Artificial Sequence
  Oligonucleotide for detection of SNP TSC0012523
caattaaaactaa

SEQ ID NO: 41777 - DNA, 13 bp, Artificial Sequence
  Oligonucleotide for detection of SNP TSC0012523
tagttatagttaa

SEQ ID NO: 41778 - DNA, 13 bp, Artificial Sequence
  Oligonucleotide for detection of SNP TSC0012523
ttaactataacta

SEQ ID NO: 41779 - DNA, 13 bp, Artificial Sequence
  Oligonucleotide for detection of SNP TSC0012523
tagttagagttaa

SEQ ID NO: 41780 - DNA, 13 bp, Artificial Sequence
  Oligonucleotide for detection of SNP TSC0012523
ttaactctaacta

SEQ ID NO: 41781 - DNA, 13 bp, Artificial Sequence
  Oligonucleotide for detection of SNP TSC0012524
atatttgtaatty

SEQ ID NO: 41782 - DNA, 13 bp, Artificial Sequence
  Oligonucleotide for detection of SNP TSC0012524
raattacaaatat

SEQ ID NO: 41783 - DNA, 13 bp, Artificial Sequence
  Oligonucleotide for detection of SNP TSC0012524
atatttataatty

SEQ ID NO: 41784 - DNA, 13 bp, Artificial Sequence
  Oligonucleotide for detection of SNP TSC0012524
raattataaatat

SEQ ID NO: 41785 - DNA, 13 bp, Artificial Sequence
  Oligonucleotide for detection of SNP TSC0012525
tgagagttaagga

SEQ ID NO: 41786 - DNA, 13 bp, Artificial Sequence
  Oligonucleotide for detection of SNP TSC0012525
tccttaactctca

SEQ ID NO: 41787 - DNA, 13 bp, Artificial Sequence
  Oligonucleotide for detection of SNP TSC0012525
tgagaggtaagga

SEQ ID NO: 41788 - DNA, 13 bp, Artificial Sequence
  Oligonucleotide for detection of SNP TSC0012525
tccttacctctca

SEQ ID NO: 41789 - DNA, 13 bp, Artificial Sequence
  Oligonucleotide for detection of SNP TSC0012525
tttttggttttta

SEQ ID NO: 41790 - DNA, 13 bp, Artificial Sequence
  Oligonucleotide for detection of SNP TSC0012525
taaaaaccaaaaa

SEQ ID NO: 41791 - DNA, 13 bp, Artificial Sequence
  Oligonucleotide for detection of SNP TSC0012526
tttatttggagay

SEQ ID NO: 41792 - DNA, 13 bp, Artificial Sequence
  Oligonucleotide for detection of SNP TSC0012526
rtctccaaataaa

SEQ ID NO: 41793 - DNA, 13 bp, Artificial Sequence
  Oligonucleotide for detection of SNP TSC0012526
tttattcggagay

SEQ ID NO: 41794 - DNA, 13 bp, Artificial Sequence
  Oligonucleotide for detection of SNP TSC0012526
rtctccgaataaa

SEQ ID NO: 41795 - DNA, 13 bp, Artificial Sequence
  Oligonucleotide for detection of SNP TSC0012526
gtttttgagtaga

SEQ ID NO: 41796 - DNA, 13 bp, Artificial Sequence
  Oligonucleotide for detection of SNP TSC0012526
tctactcaaaaac

SEQ ID NO: 41797 - DNA, 13 bp, Artificial Sequence
  Oligonucleotide for detection of SNP TSC0012526
gtttttaagtaga

SEQ ID NO: 41798 - DNA, 13 bp, Artificial Sequence
  Oligonucleotide for detection of SNP TSC0012526
tctacttaaaaac

SEQ ID NO: 41799 - DNA, 13 bp, Artificial Sequence
  Oligonucleotide for detection of SNP TSC0012526
gttttcgagtaga

SEQ ID NO: 41800 - DNA, 13 bp, Artificial Sequence
  Oligonucleotide for detection of SNP TSC0012526
tctactcgaaaac

SEQ ID NO: 41801 - DNA, 13 bp, Artificial Sequence
  Oligonucleotide for detection of SNP TSC0012527
aaagtggttttty

SEQ ID NO: 41802 - DNA, 13 bp, Artificial Sequence
  Oligonucleotide for detection of SNP TSC0012527
raaaaaccacttt

SEQ ID NO: 41803 - DNA, 13 bp, Artificial Sequence
  Oligonucleotide for detection of SNP TSC0012528
taagtagtttttg

SEQ ID NO: 41804 - DNA, 13 bp, Artificial Sequence
  Oligonucleotide for detection of SNP TSC0012528
caaaaactactta

SEQ ID NO: 41805 - DNA, 13 bp, Artificial Sequence
  Oligonucleotide for detection of SNP TSC0012528
taagtaatttttg

SEQ ID NO: 41806 - DNA, 13 bp, Artificial Sequence
  Oligonucleotide for detection of SNP TSC0012528
caaaaattactta

SEQ ID NO: 41807 - DNA, 13 bp, Artificial Sequence
  Oligonucleotide for detection of SNP TSC0012530
gaagaggaattag

SEQ ID NO: 41808 - DNA, 13 bp, Artificial Sequence
  Oligonucleotide for detection of SNP TSC0012530
ctaattcctcttc

SEQ ID NO: 41809 - DNA, 13 bp, Artificial Sequence
  Oligonucleotide for detection of SNP TSC0012530
gaagagaaattag

SEQ ID NO: 41810 - DNA, 13 bp, Artificial Sequence
  Oligonucleotide for detection of SNP TSC0012530
ctaatttctcttc

SEQ ID NO: 41811 - DNA, 13 bp, Artificial Sequence
  Oligonucleotide for detection of SNP TSC0012532
tttagcgtagtta

SEQ ID NO: 41812 - DNA, 13 bp, Artificial Sequence
  Oligonucleotide for detection of SNP TSC0012532
taactacgctaaa

SEQ ID NO: 41813 - DNA, 13 bp, Artificial Sequence
  Oligonucleotide for detection of SNP TSC0012532
tgattgtgttgag

SEQ ID NO: 41814 - DNA, 13 bp, Artificial Sequence
  Oligonucleotide for detection of SNP TSC0012532
ctcaacacaatca

SEQ ID NO: 41815 - DNA, 13 bp, Artificial Sequence
  Oligonucleotide for detection of SNP TSC0012532
tgattgcgttgag

SEQ ID NO: 41816 - DNA, 13 bp, Artificial Sequence
  Oligonucleotide for detection of SNP TSC0012532
ctcaacgcaatca

SEQ ID NO: 41817 - DNA, 13 bp, Artificial Sequence
  Oligonucleotide for detection of SNP TSC0012533
tggaaaatgatgy

SEQ ID NO: 41818 - DNA, 13 bp, Artificial Sequence
  Oligonucleotide for detection of SNP TSC0012533
rcatcattttcca

SEQ ID NO: 41819 - DNA, 13 bp, Artificial Sequence
  Oligonucleotide for detection of SNP TSC0012533
tggaaagtgatgy

SEQ ID NO: 41820 - DNA, 13 bp, Artificial Sequence
  Oligonucleotide for detection of SNP TSC0012533
rcatcactttcca

SEQ ID NO: 41821 - DNA, 13 bp, Artificial Sequence
  Oligonucleotide for detection of SNP TSC0012538
ttttgagggaggt

SEQ ID NO: 41822 - DNA, 13 bp, Artificial Sequence
  Oligonucleotide for detection of SNP TSC0012538
acctccctcaaaa

SEQ ID NO: 41823 - DNA, 13 bp, Artificial Sequence
  Oligonucleotide for detection of SNP TSC0012538
ttttgaaggaggt

SEQ ID NO: 41824 - DNA, 13 bp, Artificial Sequence
  Oligonucleotide for detection of SNP TSC0012538
acctccttcaaaa

SEQ ID NO: 41825 - DNA, 13 bp, Artificial Sequence
  Oligonucleotide for detection of SNP TSC0012540
taagaggagaatt

SEQ ID NO: 41826 - DNA, 13 bp, Artificial Sequence
  Oligonucleotide for detection of SNP TSC0012540
aattctcctctta

SEQ ID NO: 41827 - DNA, 13 bp, Artificial Sequence
  Oligonucleotide for detection of SNP TSC0012540
taagagaagaatt

SEQ ID NO: 41828 - DNA, 13 bp, Artificial Sequence
  Oligonucleotide for detection of SNP TSC0012540
aattcttctctta

SEQ ID NO: 41829 - DNA, 13 bp, Artificial Sequence
  Oligonucleotide for detection of SNP TSC0012541
tttttcgtttaga

SEQ ID NO: 41830 - DNA, 13 bp, Artificial Sequence
  Oligonucleotide for detection of SNP TSC0012541
tctaaacgaaaaa

SEQ ID NO: 41831 - DNA, 13 bp, Artificial Sequence
  Oligonucleotide for detection of SNP TSC0012541
tttggatgaaaaa

SEQ ID NO: 41832 - DNA, 13 bp, Artificial Sequence
  Oligonucleotide for detection of SNP TSC0012541
tttttcatccaaa

SEQ ID NO: 41833 - DNA, 13 bp, Artificial Sequence
  Oligonucleotide for detection of SNP TSC0012541
tttggacgaaaaa

SEQ ID NO: 41834 - DNA, 13 bp, Artificial Sequence
  Oligonucleotide for detection of SNP TSC0012541
tttttcgtccaaa

SEQ ID NO: 41835 - DNA, 13 bp, Artificial Sequence
  Oligonucleotide for detection of SNP TSC0012542
ttgtgggaagttg

SEQ ID NO: 41836 - DNA, 13 bp, Artificial Sequence
  Oligonucleotide for detection of SNP TSC0012542
caacttcccacaa

SEQ ID NO: 41837 - DNA, 13 bp, Artificial Sequence
  Oligonucleotide for detection of SNP TSC0012542
ttgtggaaagttg

SEQ ID NO: 41838 - DNA, 13 bp, Artificial Sequence
  Oligonucleotide for detection of SNP TSC0012542
caactttccacaa

SEQ ID NO: 41839 - DNA, 13 bp, Artificial Sequence
  Oligonucleotide for detection of SNP TSC0012546
aaaaaaaaaggtg

SEQ ID NO: 41840 - DNA, 13 bp, Artificial Sequence
  Oligonucleotide for detection of SNP TSC0012546
caccttttttttt

SEQ ID NO: 41841 - DNA, 13 bp, Artificial Sequence
  Oligonucleotide for detection of SNP TSC0012546
aaaaaagaaggtg

SEQ ID NO: 41842 - DNA, 13 bp, Artificial Sequence
  Oligonucleotide for detection of SNP TSC0012546
caccttctttttt

SEQ ID NO: 41843 - DNA, 13 bp, Artificial Sequence
  Oligonucleotide for detection of SNP TSC0012547
ttagaatgtatty

SEQ ID NO: 41844 - DNA, 13 bp, Artificial Sequence
  Oligonucleotide for detection of SNP TSC0012547
raatacattctaa

SEQ ID NO: 41845 - DNA, 13 bp, Artificial Sequence
  Oligonucleotide for detection of SNP TSC0012547
ttagaacgtatty

SEQ ID NO: 41846 - DNA, 13 bp, Artificial Sequence
  Oligonucleotide for detection of SNP TSC0012547
raatacgttctaa

SEQ ID NO: 41847 - DNA, 13 bp, Artificial Sequence
  Oligonucleotide for detection of SNP TSC0012547
ggatatgttttgg

SEQ ID NO: 41848 - DNA, 13 bp, Artificial Sequence
  Oligonucleotide for detection of SNP TSC0012547
ccaaaacatatcc

SEQ ID NO: 41849 - DNA, 13 bp, Artificial Sequence
  Oligonucleotide for detection of SNP TSC0012547
ggatatattttgg

SEQ ID NO: 41850 - DNA, 13 bp, Artificial Sequence
  Oligonucleotide for detection of SNP TSC0012547
ccaaaatatatcc

SEQ ID NO: 41851 - DNA, 13 bp, Artificial Sequence
  Oligonucleotide for detection of SNP TSC0012547
ggatacgttttgg

SEQ ID NO: 41852 - DNA, 13 bp, Artificial Sequence
  Oligonucleotide for detection of SNP TSC0012547
ccaaaacgtatcc

SEQ ID NO: 41853 - DNA, 13 bp, Artificial Sequence
  Oligonucleotide for detection of SNP TSC0012549
tttttaagtttaa

SEQ ID NO: 41854 - DNA, 13 bp, Artificial Sequence
  Oligonucleotide for detection of SNP TSC0012549
ttaaacttaaaaa

SEQ ID NO: 41855 - DNA, 13 bp, Artificial Sequence
  Oligonucleotide for detection of SNP TSC0012549
ttgggtttagaga

SEQ ID NO: 41856 - DNA, 13 bp, Artificial Sequence
  Oligonucleotide for detection of SNP TSC0012549
tctctaaacccaa

SEQ ID NO: 41857 - DNA, 13 bp, Artificial Sequence
  Oligonucleotide for detection of SNP TSC0012549
ttgggtatagaga

SEQ ID NO: 41858 - DNA, 13 bp, Artificial Sequence
  Oligonucleotide for detection of SNP TSC0012549
tctctatacccaa

SEQ ID NO: 41859 - DNA, 13 bp, Artificial Sequence
  Oligonucleotide for detection of SNP TSC0012550
tttttgtgtattg

SEQ ID NO: 41860 - DNA, 13 bp, Artificial Sequence
  Oligonucleotide for detection of SNP TSC0012550
caatacacaaaaa

SEQ ID NO: 41861 - DNA, 13 bp, Artificial Sequence
  Oligonucleotide for detection of SNP TSC0012550
tttttgggtattg

SEQ ID NO: 41862 - DNA, 13 bp, Artificial Sequence
  Oligonucleotide for detection of SNP TSC0012550
caatacccaaaaa

SEQ ID NO: 41863 - DNA, 13 bp, Artificial Sequence
  Oligonucleotide for detection of SNP TSC0012550
tttttgcgtattg

SEQ ID NO: 41864 - DNA, 13 bp, Artificial Sequence
  Oligonucleotide for detection of SNP TSC0012550
caatacgcaaaaa

SEQ ID NO: 41865 - DNA, 13 bp, Artificial Sequence
  Oligonucleotide for detection of SNP TSC0012550
tagtatgtagaaa

SEQ ID NO: 41866 - DNA, 13 bp, Artificial Sequence
  Oligonucleotide for detection of SNP TSC0012550
tttctacatacta

SEQ ID NO: 41867 - DNA, 13 bp, Artificial Sequence
  Oligonucleotide for detection of SNP TSC0012550
tagtatttagaaa

SEQ ID NO: 41868 - DNA, 13 bp, Artificial Sequence
  Oligonucleotide for detection of SNP TSC0012550
tttctaaatacta

SEQ ID NO: 41869 - DNA, 13 bp, Artificial Sequence
  Oligonucleotide for detection of SNP TSC0012550
tagtacgtagaaa

SEQ ID NO: 41870 - DNA, 13 bp, Artificial Sequence
  Oligonucleotide for detection of SNP TSC0012550
tttctacgtacta

SEQ ID NO: 41871 - DNA, 13 bp, Artificial Sequence
  Oligonucleotide for detection of SNP TSC0012551
ttttttgaaaaat

SEQ ID NO: 41872 - DNA, 13 bp, Artificial Sequence
  Oligonucleotide for detection of SNP TSC0012551
atttttcaaaaaa

SEQ ID NO: 41873 - DNA, 13 bp, Artificial Sequence
  Oligonucleotide for detection of SNP TSC0012551
attttttaagaga

SEQ ID NO: 41874 - DNA, 13 bp, Artificial Sequence
  Oligonucleotide for detection of SNP TSC0012551
tctcttaaaaaat

SEQ ID NO: 41875 - DNA, 13 bp, Artificial Sequence
  Oligonucleotide for detection of SNP TSC0012551
atttttaaagaga

SEQ ID NO: 41876 - DNA, 13 bp, Artificial Sequence
  Oligonucleotide for detection of SNP TSC0012551
tctctttaaaaat

SEQ ID NO: 41877 - DNA, 13 bp, Artificial Sequence
  Oligonucleotide for detection of SNP TSC0012552
taagtttttttta

SEQ ID NO: 41878 - DNA, 13 bp, Artificial Sequence
  Oligonucleotide for detection of SNP TSC0012552
taaaaaaaactta

SEQ ID NO: 41879 - DNA, 13 bp, Artificial Sequence
  Oligonucleotide for detection of SNP TSC0012552
tgaggataatttg

SEQ ID NO: 41880 - DNA, 13 bp, Artificial Sequence
  Oligonucleotide for detection of SNP TSC0012552
caaattatcctca

SEQ ID NO: 41881 - DNA, 13 bp, Artificial Sequence
  Oligonucleotide for detection of SNP TSC0012552
tgaggagaatttg

SEQ ID NO: 41882 - DNA, 13 bp, Artificial Sequence
  Oligonucleotide for detection of SNP TSC0012552
caaattctcctca

SEQ ID NO: 41883 - DNA, 13 bp, Artificial Sequence
  Oligonucleotide for detection of SNP TSC0012554
gattttaatttat

SEQ ID NO: 41884 - DNA, 13 bp, Artificial Sequence
  Oligonucleotide for detection of SNP TSC0012554
ataaattaaaatc

SEQ ID NO: 41885 - DNA, 13 bp, Artificial Sequence
  Oligonucleotide for detection of SNP TSC0012554
gatttttatttat

SEQ ID NO: 41886 - DNA, 13 bp, Artificial Sequence
  Oligonucleotide for detection of SNP TSC0012554
ataaataaaaatc

SEQ ID NO: 41887 - DNA, 13 bp, Artificial Sequence
  Oligonucleotide for detection of SNP TSC0012554
ataaattaagaty

SEQ ID NO: 41888 - DNA, 13 bp, Artificial Sequence
  Oligonucleotide for detection of SNP TSC0012554
ratcttaatttat

SEQ ID NO: 41889 - DNA, 13 bp, Artificial Sequence
  Oligonucleotide for detection of SNP TSC0012554
ataaatgaagaty

SEQ ID NO: 41890 - DNA, 13 bp, Artificial Sequence
  Oligonucleotide for detection of SNP TSC0012554
ratcttcatttat

SEQ ID NO: 41891 - DNA, 13 bp, Artificial Sequence
  Oligonucleotide for detection of SNP TSC0012555
gggaggtggtggy

SEQ ID NO: 41892 - DNA, 13 bp, Artificial Sequence
  Oligonucleotide for detection of SNP TSC0012555
rccaccacctccc

SEQ ID NO: 41893 - DNA, 13 bp, Artificial Sequence
  Oligonucleotide for detection of SNP TSC0012555
gggaggcggtggy

SEQ ID NO: 41894 - DNA, 13 bp, Artificial Sequence
  Oligonucleotide for detection of SNP TSC0012555
rccaccgcctccc

SEQ ID NO: 41895 - DNA, 13 bp, Artificial Sequence
  Oligonucleotide for detection of SNP TSC0012555
gggaggtggcggy

SEQ ID NO: 41896 - DNA, 13 bp, Artificial Sequence
  Oligonucleotide for detection of SNP TSC0012555
rccgccacctccc

SEQ ID NO: 41897 - DNA, 13 bp, Artificial Sequence
  Oligonucleotide for detection of SNP TSC0012555
gggaggcggcggy

SEQ ID NO: 41898 - DNA, 13 bp, Artificial Sequence
  Oligonucleotide for detection of SNP TSC0012555
rccgccgcctccc

SEQ ID NO: 41899 - DNA, 13 bp, Artificial Sequence
  Oligonucleotide for detection of SNP TSC0012555
gtcgttgttttty

SEQ ID NO: 41900 - DNA, 13 bp, Artificial Sequence
  Oligonucleotide for detection of SNP TSC0012555
raaaaacaacgac

SEQ ID NO: 41901 - DNA, 13 bp, Artificial Sequence
  Oligonucleotide for detection of SNP TSC0012555
gtcgttattttty

SEQ ID NO: 41902 - DNA, 13 bp, Artificial Sequence
  Oligonucleotide for detection of SNP TSC0012555
raaaaataacgac

SEQ ID NO: 41903 - DNA, 13 bp, Artificial Sequence
  Oligonucleotide for detection of SNP TSC0012555
gtcgtcgttttty

SEQ ID NO: 41904 - DNA, 13 bp, Artificial Sequence
  Oligonucleotide for detection of SNP TSC0012555
raaaaacgacgac

SEQ ID NO: 41905 - DNA, 13 bp, Artificial Sequence
  Oligonucleotide for detection of SNP TSC0012556
tagagtaagattg

SEQ ID NO: 41906 - DNA, 13 bp, Artificial Sequence
  Oligonucleotide for detection of SNP TSC0012556
caatcttactcta

SEQ ID NO: 41907 - DNA, 13 bp, Artificial Sequence
  Oligonucleotide for detection of SNP TSC0012556
tagagtgagattg

SEQ ID NO: 41908 - DNA, 13 bp, Artificial Sequence
  Oligonucleotide for detection of SNP TSC0012556
caatctcactcta

SEQ ID NO: 41909 - DNA, 13 bp, Artificial Sequence
  Oligonucleotide for detection of SNP TSC0012556
tagagcgagattg

SEQ ID NO: 41910 - DNA, 13 bp, Artificial Sequence
  Oligonucleotide for detection of SNP TSC0012556
caatctcgctcta

SEQ ID NO: 41911 - DNA, 13 bp, Artificial Sequence
  Oligonucleotide for detection of SNP TSC0012556
tagttttgttttg

SEQ ID NO: 41912 - DNA, 13 bp, Artificial Sequence
  Oligonucleotide for detection of SNP TSC0012556
caaaacaaaacta

SEQ ID NO: 41913 - DNA, 13 bp, Artificial Sequence
  Oligonucleotide for detection of SNP TSC0012556
tagtttcgttttg

SEQ ID NO: 41914 - DNA, 13 bp, Artificial Sequence
  Oligonucleotide for detection of SNP TSC0012556
caaaacgaaacta

SEQ ID NO: 41915 - DNA, 13 bp, Artificial Sequence
  Oligonucleotide for detection of SNP TSC0012557
gatagtatgatgg

SEQ ID NO: 41916 - DNA, 13 bp, Artificial Sequence
  Oligonucleotide for detection of SNP TSC0012557
ccatcatactatc

SEQ ID NO: 41917 - DNA, 13 bp, Artificial Sequence
  Oligonucleotide for detection of SNP TSC0012557
gatagtgtgatgg

SEQ ID NO: 41918 - DNA, 13 bp, Artificial Sequence
  Oligonucleotide for detection of SNP TSC0012557
ccatcacactatc

SEQ ID NO: 41919 - DNA, 13 bp, Artificial Sequence
  Oligonucleotide for detection of SNP TSC0012558
agaaataggggay

SEQ ID NO: 41920 - DNA, 13 bp, Artificial Sequence
  Oligonucleotide for detection of SNP TSC0012558
rtcccctatttct

SEQ ID NO: 41921 - DNA, 13 bp, Artificial Sequence
  Oligonucleotide for detection of SNP TSC0012558
agaaatgggggay

SEQ ID NO: 41922 - DNA, 13 bp, Artificial Sequence
  Oligonucleotide for detection of SNP TSC0012558
rtcccccatttct

SEQ ID NO: 41923 - DNA, 13 bp, Artificial Sequence
  Oligonucleotide for detection of SNP TSC0012558
agaaacgggggay

SEQ ID NO: 41924 - DNA, 13 bp, Artificial Sequence
  Oligonucleotide for detection of SNP TSC0012558
rtcccccgtttct

SEQ ID NO: 41925 - DNA, 13 bp, Artificial Sequence
  Oligonucleotide for detection of SNP TSC0012558
gtttttcgttttt

SEQ ID NO: 41926 - DNA, 13 bp, Artificial Sequence
  Oligonucleotide for detection of SNP TSC0012558
aaaaacgaaaaac

SEQ ID NO: 41927 - DNA, 13 bp, Artificial Sequence
  Oligonucleotide for detection of SNP TSC0012559
tttaaagtaataa

SEQ ID NO: 41928 - DNA, 13 bp, Artificial Sequence
  Oligonucleotide for detection of SNP TSC0012559
ttattactttaaa

SEQ ID NO: 41929 - DNA, 13 bp, Artificial Sequence
  Oligonucleotide for detection of SNP TSC0012559
tttaaaataataa

SEQ ID NO: 41930 - DNA, 13 bp, Artificial Sequence
  Oligonucleotide for detection of SNP TSC0012559
ttattattttaaa

SEQ ID NO: 41931 - DNA, 13 bp, Artificial Sequence
  Oligonucleotide for detection of SNP TSC0012560
ttatttgtggtga

SEQ ID NO: 41932 - DNA, 13 bp, Artificial Sequence
  Oligonucleotide for detection of SNP TSC0012560
tcaccacaaataa

SEQ ID NO: 41933 - DNA, 13 bp, Artificial Sequence
  Oligonucleotide for detection of SNP TSC0012560
ttatttatggtga

SEQ ID NO: 41934 - DNA, 13 bp, Artificial Sequence
  Oligonucleotide for detection of SNP TSC0012560
tcaccataaataa

SEQ ID NO: 41935 - DNA, 13 bp, Artificial Sequence
  Oligonucleotide for detection of SNP TSC0012562
gtgattttttgaa

SEQ ID NO: 41936 - DNA, 13 bp, Artificial Sequence
  Oligonucleotide for detection of SNP TSC0012562
ttcaaaaaatcac

SEQ ID NO: 41937 - DNA, 13 bp, Artificial Sequence
  Oligonucleotide for detection of SNP TSC0012562
gtgattgtttgaa

SEQ ID NO: 41938 - DNA, 13 bp, Artificial Sequence
  Oligonucleotide for detection of SNP TSC0012562
ttcaaacaatcac

SEQ ID NO: 41939 - DNA, 13 bp, Artificial Sequence
  Oligonucleotide for detection of SNP TSC0012562
gcgattttttgaa

SEQ ID NO: 41940 - DNA, 13 bp, Artificial Sequence
  Oligonucleotide for detection of SNP TSC0012562
ttcaaaaaatcgc

SEQ ID NO: 41941 - DNA, 13 bp, Artificial Sequence
  Oligonucleotide for detection of SNP TSC0012562
gcgattgtttgaa

SEQ ID NO: 41942 - DNA, 13 bp, Artificial Sequence
  Oligonucleotide for detection of SNP TSC0012562
ttcaaacaatcgc

SEQ ID NO: 41943 - DNA, 13 bp, Artificial Sequence
  Oligonucleotide for detection of SNP TSC0012562
gtgatttttcgaa

SEQ ID NO: 41944 - DNA, 13 bp, Artificial Sequence
  Oligonucleotide for detection of SNP TSC0012562
ttcgaaaaatcac

SEQ ID NO: 41945 - DNA, 13 bp, Artificial Sequence
  Oligonucleotide for detection of SNP TSC0012562
gtgatcgtttgaa

SEQ ID NO: 41946 - DNA, 13 bp, Artificial Sequence
  Oligonucleotide for detection of SNP TSC0012562
ttcaaacgatcac

SEQ ID NO: 41947 - DNA, 13 bp, Artificial Sequence
  Oligonucleotide for detection of SNP TSC0012562
gcgatttttcgaa

SEQ ID NO: 41948 - DNA, 13 bp, Artificial Sequence
  Oligonucleotide for detection of SNP TSC0012562
ttcgaaaaatcgc

SEQ ID NO: 41949 - DNA, 13 bp, Artificial Sequence
  Oligonucleotide for detection of SNP TSC0012562
gtgattgttcgaa

SEQ ID NO: 41950 - DNA, 13 bp, Artificial Sequence
  Oligonucleotide for detection of SNP TSC0012562
ttcgaacaatcac

SEQ ID NO: 41951 - DNA, 13 bp, Artificial Sequence
  Oligonucleotide for detection of SNP TSC0012562
gcgatcgtttgaa

SEQ ID NO: 41952 - DNA, 13 bp, Artificial Sequence
  Oligonucleotide for detection of SNP TSC0012562
ttcaaacgatcgc

SEQ ID NO: 41953 - DNA, 13 bp, Artificial Sequence
  Oligonucleotide for detection of SNP TSC0012562
gcgattgttcgaa

SEQ ID NO: 41954 - DNA, 13 bp, Artificial Sequence
  Oligonucleotide for detection of SNP TSC0012562
ttcgaacaatcgc

SEQ ID NO: 41955 - DNA, 13 bp, Artificial Sequence
  Oligonucleotide for detection of SNP TSC0012562
gtgatcgttcgaa

SEQ ID NO: 41956 - DNA, 13 bp, Artificial Sequence
  Oligonucleotide for detection of SNP TSC0012562
ttcgaacgatcac

SEQ ID NO: 41957 - DNA, 13 bp, Artificial Sequence
  Oligonucleotide for detection of SNP TSC0012562
gcgatcgttcgaa

SEQ ID NO: 41958 - DNA, 13 bp, Artificial Sequence
  Oligonucleotide for detection of SNP TSC0012562
ttcgaacgatcgc

SEQ ID NO: 41959 - DNA, 13 bp, Artificial Sequence
  Oligonucleotide for detection of SNP TSC0012562
tttggaggattgy

SEQ ID NO: 41960 - DNA, 13 bp, Artificial Sequence
  Oligonucleotide for detection of SNP TSC0012562
rcaatcctccaaa

SEQ ID NO: 41961 - DNA, 13 bp, Artificial Sequence
  Oligonucleotide for detection of SNP TSC0012562
tttggatgattgy

SEQ ID NO: 41962 - DNA, 13 bp, Artificial Sequence
  Oligonucleotide for detection of SNP TSC0012562
rcaatcatccaaa

SEQ ID NO: 41963 - DNA, 13 bp, Artificial Sequence
  Oligonucleotide for detection of SNP TSC0012562
ttcggaggattgy

SEQ ID NO: 41964 - DNA, 13 bp, Artificial Sequence
  Oligonucleotide for detection of SNP TSC0012562
rcaatcctccgaa

SEQ ID NO: 41965 - DNA, 13 bp, Artificial Sequence
  Oligonucleotide for detection of SNP TSC0012562
ttcggatgattgy

SEQ ID NO: 41966 - DNA, 13 bp, Artificial Sequence
  Oligonucleotide for detection of SNP TSC0012562
rcaatcatccgaa

SEQ ID NO: 41967 - DNA, 13 bp, Artificial Sequence
  Oligonucleotide for detection of SNP TSC0012562
tttggaggatcgy

SEQ ID NO: 41968 - DNA, 13 bp, Artificial Sequence
  Oligonucleotide for detection of SNP TSC0012562
rcgatcctccaaa

SEQ ID NO: 41969 - DNA, 13 bp, Artificial Sequence
  Oligonucleotide for detection of SNP TSC0012562
tttggacgattgy

SEQ ID NO: 41970 - DNA, 13 bp, Artificial Sequence
  Oligonucleotide for detection of SNP TSC0012562
rcaatcgtccaaa

SEQ ID NO: 41971 - DNA, 13 bp, Artificial Sequence
  Oligonucleotide for detection of SNP TSC0012562
ttcggaggatcgy

SEQ ID NO: 41972 - DNA, 13 bp, Artificial Sequence
  Oligonucleotide for detection of SNP TSC0012562
rcgatcctccgaa

SEQ ID NO: 41973 - DNA, 13 bp, Artificial Sequence
  Oligonucleotide for detection of SNP TSC0012562
tttggatgatcgy

SEQ ID NO: 41974 - DNA, 13 bp, Artificial Sequence
  Oligonucleotide for detection of SNP TSC0012562
rcgatcatccaaa

SEQ ID NO: 41975 - DNA, 13 bp, Artificial Sequence
  Oligonucleotide for detection of SNP TSC0012562
ttcggacgattgy

SEQ ID NO: 41976 - DNA, 13 bp, Artificial Sequence
  Oligonucleotide for detection of SNP TSC0012562
rcaatcgtccgaa

SEQ ID NO: 41977 - DNA, 13 bp, Artificial Sequence
  Oligonucleotide for detection of SNP TSC0012562
ttcggatgatcgy

SEQ ID NO: 41978 - DNA, 13 bp, Artificial Sequence
  Oligonucleotide for detection of SNP TSC0012562
rcgatcatccgaa

SEQ ID NO: 41979 - DNA, 13 bp, Artificial Sequence
  Oligonucleotide for detection of SNP TSC0012562
tttggacgatcgy

SEQ ID NO: 41980 - DNA, 13 bp, Artificial Sequence
  Oligonucleotide for detection of SNP TSC0012562
rcgatcgtccaaa

SEQ ID NO: 41981 - DNA, 13 bp, Artificial Sequence
  Oligonucleotide for detection of SNP TSC0012562
ttcggacgatcgy

SEQ ID NO: 41982 - DNA, 13 bp, Artificial Sequence
  Oligonucleotide for detection of SNP TSC0012562
rcgatcgtccgaa

SEQ ID NO: 41983 - DNA, 13 bp, Artificial Sequence
  Oligonucleotide for detection of SNP TSC0012565
tggtgtagttata

SEQ ID NO: 41984 - DNA, 13 bp, Artificial Sequence
  Oligonucleotide for detection of SNP TSC0012565
tataactacacca

SEQ ID NO: 41985 - DNA, 13 bp, Artificial Sequence
  Oligonucleotide for detection of SNP TSC0012565
tggtgtggttata

SEQ ID NO: 41986 - DNA, 13 bp, Artificial Sequence
  Oligonucleotide for detection of SNP TSC0012565
tataaccacacca

SEQ ID NO: 41987 - DNA, 13 bp, Artificial Sequence
  Oligonucleotide for detection of SNP TSC0012565
tggtgcggttata

SEQ ID NO: 41988 - DNA, 13 bp, Artificial Sequence
  Oligonucleotide for detection of SNP TSC0012565
tataaccgcacca

SEQ ID NO: 41989 - DNA, 13 bp, Artificial Sequence
  Oligonucleotide for detection of SNP TSC0012565
tgtagttgtatta

SEQ ID NO: 41990 - DNA, 13 bp, Artificial Sequence
  Oligonucleotide for detection of SNP TSC0012565
taatacaactaca

SEQ ID NO: 41991 - DNA, 13 bp, Artificial Sequence
  Oligonucleotide for detection of SNP TSC0012565
tgtagtcgtatta

SEQ ID NO: 41992 - DNA, 13 bp, Artificial Sequence
  Oligonucleotide for detection of SNP TSC0012565
taatacgactaca

SEQ ID NO: 41993 - DNA, 13 bp, Artificial Sequence
  Oligonucleotide for detection of SNP TSC0012566
gttttgattagaa

SEQ ID NO: 41994 - DNA, 13 bp, Artificial Sequence
  Oligonucleotide for detection of SNP TSC0012566
ttctaatcaaaac

SEQ ID NO: 41995 - DNA, 13 bp, Artificial Sequence
  Oligonucleotide for detection of SNP TSC0012566
gttttggttagaa

SEQ ID NO: 41996 - DNA, 13 bp, Artificial Sequence
  Oligonucleotide for detection of SNP TSC0012566
ttctaaccaaaac

SEQ ID NO: 41997 - DNA, 13 bp, Artificial Sequence
  Oligonucleotide for detection of SNP TSC0012566
gtttcgattagaa

SEQ ID NO: 41998 - DNA, 13 bp, Artificial Sequence
  Oligonucleotide for detection of SNP TSC0012566
ttctaatcgaaac

SEQ ID NO: 41999 - DNA, 13 bp, Artificial Sequence
  Oligonucleotide for detection of SNP TSC0012566
gtttcggttagaa

SEQ ID NO: 42000 - DNA, 13 bp, Artificial Sequence
  Oligonucleotide for detection of SNP TSC0012566
ttctaaccgaaac

SEQ ID NO: 42001 - DNA, 13 bp, Artificial Sequence
  Oligonucleotide for detection of SNP TSC0012567
gttgagtgattgt

SEQ ID NO: 42002 - DNA, 13 bp, Artificial Sequence
  Oligonucleotide for detection of SNP TSC0012567
acaatcactcaac

SEQ ID NO: 42003 - DNA, 13 bp, Artificial Sequence
  Oligonucleotide for detection of SNP TSC0012567
gttgagcgattgt

SEQ ID NO: 42004 - DNA, 13 bp, Artificial Sequence
  Oligonucleotide for detection of SNP TSC0012567
acaatcgctcaac

SEQ ID NO: 42005 - DNA, 13 bp, Artificial Sequence
  Oligonucleotide for detection of SNP TSC0012567
gttgagtgatcgt

SEQ ID NO: 42006 - DNA, 13 bp, Artificial Sequence
  Oligonucleotide for detection of SNP TSC0012567
acgatcactcaac

SEQ ID NO: 42007 - DNA, 13 bp, Artificial Sequence
  Oligonucleotide for detection of SNP TSC0012567
gttgagcgatcgt

SEQ ID NO: 42008 - DNA, 13 bp, Artificial Sequence
  Oligonucleotide for detection of SNP TSC0012567
acgatcgctcaac

SEQ ID NO: 42009 - DNA, 13 bp, Artificial Sequence
  Oligonucleotide for detection of SNP TSC0012567
atgattgtttagy

SEQ ID NO: 42010 - DNA, 13 bp, Artificial Sequence
  Oligonucleotide for detection of SNP TSC0012567
rctaaacaatcat

SEQ ID NO: 42011 - DNA, 13 bp, Artificial Sequence
  Oligonucleotide for detection of SNP TSC0012567
atgattatttagy

SEQ ID NO: 42012 - DNA, 13 bp, Artificial Sequence
  Oligonucleotide for detection of SNP TSC0012567
rctaaataatcat

SEQ ID NO: 42013 - DNA, 13 bp, Artificial Sequence
  Oligonucleotide for detection of SNP TSC0012567
acgattgtttagy

SEQ ID NO: 42014 - DNA, 13 bp, Artificial Sequence
  Oligonucleotide for detection of SNP TSC0012567
rctaaacaatcgt

SEQ ID NO: 42015 - DNA, 13 bp, Artificial Sequence
  Oligonucleotide for detection of SNP TSC0012567
acgattatttagy

SEQ ID NO: 42016 - DNA, 13 bp, Artificial Sequence
  Oligonucleotide for detection of SNP TSC0012567
rctaaataatcgt

SEQ ID NO: 42017 - DNA, 13 bp, Artificial Sequence
  Oligonucleotide for detection of SNP TSC0012567
atgatcgtttagy

SEQ ID NO: 42018 - DNA, 13 bp, Artificial Sequence
  Oligonucleotide for detection of SNP TSC0012567
rctaaacgatcat

SEQ ID NO: 42019 - DNA, 13 bp, Artificial Sequence
  Oligonucleotide for detection of SNP TSC0012567
acgatcgtttagy

SEQ ID NO: 42020 - DNA, 13 bp, Artificial Sequence
  Oligonucleotide for detection of SNP TSC0012567
rctaaacgatcgt

SEQ ID NO: 42021 - DNA, 13 bp, Artificial Sequence
  Oligonucleotide for detection of SNP TSC0012568
agagtagatatgy

SEQ ID NO: 42022 - DNA, 13 bp, Artificial Sequence
  Oligonucleotide for detection of SNP TSC0012568
rcatatctactct

SEQ ID NO: 42023 - DNA, 13 bp, Artificial Sequence
  Oligonucleotide for detection of SNP TSC0012568
agagtaaatatgy

SEQ ID NO: 42024 - DNA, 13 bp, Artificial Sequence
  Oligonucleotide for detection of SNP TSC0012568
rcatatttactct

SEQ ID NO: 42025 - DNA, 13 bp, Artificial Sequence
  Oligonucleotide for detection of SNP TSC0012570
ttattatgtttay

SEQ ID NO: 42026 - DNA, 13 bp, Artificial Sequence
  Oligonucleotide for detection of SNP TSC0012570
rtaaacataataa

SEQ ID NO: 42027 - DNA, 13 bp, Artificial Sequence
  Oligonucleotide for detection of SNP TSC0012570
ttattacgtttay

SEQ ID NO: 42028 - DNA, 13 bp, Artificial Sequence
  Oligonucleotide for detection of SNP TSC0012570
rtaaacgtaataa

SEQ ID NO: 42029 - DNA, 13 bp, Artificial Sequence
  Oligonucleotide for detection of SNP TSC0012570
gtgggtgtggtgg

SEQ ID NO: 42030 - DNA, 13 bp, Artificial Sequence
  Oligonucleotide for detection of SNP TSC0012570
ccaccacacccac

SEQ ID NO: 42031 - DNA, 13 bp, Artificial Sequence
  Oligonucleotide for detection of SNP TSC0012570
gtgggcgtggtgg

SEQ ID NO: 42032 - DNA, 13 bp, Artificial Sequence
  Oligonucleotide for detection of SNP TSC0012570
ccaccacgcccac

SEQ ID NO: 42033 - DNA, 13 bp, Artificial Sequence
  Oligonucleotide for detection of SNP TSC0012571
tttgtttggttta

SEQ ID NO: 42034 - DNA, 13 bp, Artificial Sequence
  Oligonucleotide for detection of SNP TSC0012571
taaaccaaacaaa

SEQ ID NO: 42035 - DNA, 13 bp, Artificial Sequence
  Oligonucleotide for detection of SNP TSC0012571
tttgttgggttta

SEQ ID NO: 42036 - DNA, 13 bp, Artificial Sequence
  Oligonucleotide for detection of SNP TSC0012571
taaacccaacaaa

SEQ ID NO: 42037 - DNA, 13 bp, Artificial Sequence
  Oligonucleotide for detection of SNP TSC0012571
ttcgtttggttta

SEQ ID NO: 42038 - DNA, 13 bp, Artificial Sequence
  Oligonucleotide for detection of SNP TSC0012571
taaaccaaacgaa

SEQ ID NO: 42039 - DNA, 13 bp, Artificial Sequence
  Oligonucleotide for detection of SNP TSC0012571
ttcgttgggttta

SEQ ID NO: 42040 - DNA, 13 bp, Artificial Sequence
  Oligonucleotide for detection of SNP TSC0012571
taaacccaacgaa

SEQ ID NO: 42041 - DNA, 13 bp, Artificial Sequence
  Oligonucleotide for detection of SNP TSC0012571
tttgttcggttta

SEQ ID NO: 42042 - DNA, 13 bp, Artificial Sequence
  Oligonucleotide for detection of SNP TSC0012571
taaaccgaacaaa

SEQ ID NO: 42043 - DNA, 13 bp, Artificial Sequence
  Oligonucleotide for detection of SNP TSC0012571
tttgtcgggttta

SEQ ID NO: 42044 - DNA, 13 bp, Artificial Sequence
  Oligonucleotide for detection of SNP TSC0012571
taaacccgacaaa

SEQ ID NO: 42045 - DNA, 13 bp, Artificial Sequence
  Oligonucleotide for detection of SNP TSC0012571
ttcgttcggttta

SEQ ID NO: 42046 - DNA, 13 bp, Artificial Sequence
  Oligonucleotide for detection of SNP TSC0012571
taaaccgaacgaa

SEQ ID NO: 42047 - DNA, 13 bp, Artificial Sequence
  Oligonucleotide for detection of SNP TSC0012571
ttcgtcgggttta

SEQ ID NO: 42048 - DNA, 13 bp, Artificial Sequence
  Oligonucleotide for detection of SNP TSC0012571
taaacccgacgaa

SEQ ID NO: 42049 - DNA, 13 bp, Artificial Sequence
  Oligonucleotide for detection of SNP TSC0012571
tgggttgggtgga

SEQ ID NO: 42050 - DNA, 13 bp, Artificial Sequence
  Oligonucleotide for detection of SNP TSC0012571
tccacccaaccca

SEQ ID NO: 42051 - DNA, 13 bp, Artificial Sequence
  Oligonucleotide for detection of SNP TSC0012571
tgggtttggtgga

SEQ ID NO: 42052 - DNA, 13 bp, Artificial Sequence
  Oligonucleotide for detection of SNP TSC0012571
tccaccaaaccca

SEQ ID NO: 42053 - DNA, 13 bp, Artificial Sequence
  Oligonucleotide for detection of SNP TSC0012571
tgggtcgggtgga

SEQ ID NO: 42054 - DNA, 13 bp, Artificial Sequence
  Oligonucleotide for detection of SNP TSC0012571
tccacccgaccca

SEQ ID NO: 42055 - DNA, 13 bp, Artificial Sequence
  Oligonucleotide for detection of SNP TSC0012571
tgggttcggtgga

SEQ ID NO: 42056 - DNA, 13 bp, Artificial Sequence
  Oligonucleotide for detection of SNP TSC0012571
tccaccgaaccca

SEQ ID NO: 42057 - DNA, 13 bp, Artificial Sequence
  Oligonucleotide for detection of SNP TSC0012571
tgggttgggcgga

SEQ ID NO: 42058 - DNA, 13 bp, Artificial Sequence
  Oligonucleotide for detection of SNP TSC0012571
tccgcccaaccca

SEQ ID NO: 42059 - DNA, 13 bp, Artificial Sequence
  Oligonucleotide for detection of SNP TSC0012571
tgggtttggcgga

SEQ ID NO: 42060 - DNA, 13 bp, Artificial Sequence
  Oligonucleotide for detection of SNP TSC0012571
tccgccaaaccca

SEQ ID NO: 42061 - DNA, 13 bp, Artificial Sequence
  Oligonucleotide for detection of SNP TSC0012571
tgggtcgggcgga

SEQ ID NO: 42062 - DNA, 13 bp, Artificial Sequence
  Oligonucleotide for detection of SNP TSC0012571
tccgcccgaccca

SEQ ID NO: 42063 - DNA, 13 bp, Artificial Sequence
  Oligonucleotide for detection of SNP TSC0012571
tgggttcggcgga

SEQ ID NO: 42064 - DNA, 13 bp, Artificial Sequence
  Oligonucleotide for detection of SNP TSC0012571
tccgccgaaccca

SEQ ID NO: 42065 - DNA, 13 bp, Artificial Sequence
  Oligonucleotide for detection of SNP TSC0012572
ttatttgaggata

SEQ ID NO: 42066 - DNA, 13 bp, Artificial Sequence
  Oligonucleotide for detection of SNP TSC0012572
tatcctcaaataa

SEQ ID NO: 42067 - DNA, 13 bp, Artificial Sequence
  Oligonucleotide for detection of SNP TSC0012572
ttatttaaggata

SEQ ID NO: 42068 - DNA, 13 bp, Artificial Sequence
  Oligonucleotide for detection of SNP TSC0012572
tatccttaaataa

SEQ ID NO: 42069 - DNA, 13 bp, Artificial Sequence
  Oligonucleotide for detection of SNP TSC0012573
gtatttatgaaag

SEQ ID NO: 42070 - DNA, 13 bp, Artificial Sequence
  Oligonucleotide for detection of SNP TSC0012573
ctttcataaatac

SEQ ID NO: 42071 - DNA, 13 bp, Artificial Sequence
  Oligonucleotide for detection of SNP TSC0012573
gtatttgtgaaag

SEQ ID NO: 42072 - DNA, 13 bp, Artificial Sequence
  Oligonucleotide for detection of SNP TSC0012573
ctttcacaaatac

SEQ ID NO: 42073 - DNA, 13 bp, Artificial Sequence
  Oligonucleotide for detection of SNP TSC0012574
aagtttagggatg

SEQ ID NO: 42074 - DNA, 13 bp, Artificial Sequence
  Oligonucleotide for detection of SNP TSC0012574
catccctaaactt

SEQ ID NO: 42075 - DNA, 13 bp, Artificial Sequence
  Oligonucleotide for detection of SNP TSC0012574
aagtttggggatg

SEQ ID NO: 42076 - DNA, 13 bp, Artificial Sequence
  Oligonucleotide for detection of SNP TSC0012574
catccccaaactt

SEQ ID NO: 42077 - DNA, 13 bp, Artificial Sequence
  Oligonucleotide for detection of SNP TSC0012577
ttagtatgtagat

SEQ ID NO: 42078 - DNA, 13 bp, Artificial Sequence
  Oligonucleotide for detection of SNP TSC0012577
atctacatactaa

SEQ ID NO: 42079 - DNA, 13 bp, Artificial Sequence
  Oligonucleotide for detection of SNP TSC0012577
ttagtacgtagat

SEQ ID NO: 42080 - DNA, 13 bp, Artificial Sequence
  Oligonucleotide for detection of SNP TSC0012577
atctacgtactaa

SEQ ID NO: 42081 - DNA, 13 bp, Artificial Sequence
  Oligonucleotide for detection of SNP TSC0012577
atttatgtgttaa

SEQ ID NO: 42082 - DNA, 13 bp, Artificial Sequence
  Oligonucleotide for detection of SNP TSC0012577
ttaacacataaat

SEQ ID NO: 42083 - DNA, 13 bp, Artificial Sequence
  Oligonucleotide for detection of SNP TSC0012577
atttatatgttaa

SEQ ID NO: 42084 - DNA, 13 bp, Artificial Sequence
  Oligonucleotide for detection of SNP TSC0012577
ttaacatataaat

SEQ ID NO: 42085 - DNA, 13 bp, Artificial Sequence
  Oligonucleotide for detection of SNP TSC0012577
atttacgtgttaa

SEQ ID NO: 42086 - DNA, 13 bp, Artificial Sequence
  Oligonucleotide for detection of SNP TSC0012577
ttaacacgtaaat

SEQ ID NO: 42087 - DNA, 13 bp, Artificial Sequence
  Oligonucleotide for detection of SNP TSC0012578
gaagaagatattt

SEQ ID NO: 42088 - DNA, 13 bp, Artificial Sequence
  Oligonucleotide for detection of SNP TSC0012578
aaatatcttcttc

SEQ ID NO: 42089 - DNA, 13 bp, Artificial Sequence
  Oligonucleotide for detection of SNP TSC0012578
gaagaaaatattt

SEQ ID NO: 42090 - DNA, 13 bp, Artificial Sequence
  Oligonucleotide for detection of SNP TSC0012578
aaatattttcttc

SEQ ID NO: 42091 - DNA, 13 bp, Artificial Sequence
  Oligonucleotide for detection of SNP TSC0012579
gttagtagtgaag

SEQ ID NO: 42092 - DNA, 13 bp, Artificial Sequence
  Oligonucleotide for detection of SNP TSC0012579
cttcactactaac

SEQ ID NO: 42093 - DNA, 13 bp, Artificial Sequence
  Oligonucleotide for detection of SNP TSC0012579
gttagtggtgaag

SEQ ID NO: 42094 - DNA, 13 bp, Artificial Sequence
  Oligonucleotide for detection of SNP TSC0012579
cttcaccactaac

SEQ ID NO: 42095 - DNA, 13 bp, Artificial Sequence
  Oligonucleotide for detection of SNP TSC0012579
gttagcggtgaag

SEQ ID NO: 42096 - DNA, 13 bp, Artificial Sequence
  Oligonucleotide for detection of SNP TSC0012579
cttcaccgctaac

SEQ ID NO: 42097 - DNA, 13 bp, Artificial Sequence
  Oligonucleotide for detection of SNP TSC0012579
ttttattgttgay

SEQ ID NO: 42098 - DNA, 13 bp, Artificial Sequence
  Oligonucleotide for detection of SNP TSC0012579
rtcaacaataaaa

SEQ ID NO: 42099 - DNA, 13 bp, Artificial Sequence
  Oligonucleotide for detection of SNP TSC0012579
ttttatcgttgay

SEQ ID NO: 42100 - DNA, 13 bp, Artificial Sequence
  Oligonucleotide for detection of SNP TSC0012579
rtcaacgataaaa

SEQ ID NO: 42101 - DNA, 13 bp, Artificial Sequence
  Oligonucleotide for detection of SNP TSC0012580
ggtattatttttg

SEQ ID NO: 42102 - DNA, 13 bp, Artificial Sequence
  Oligonucleotide for detection of SNP TSC0012580
caaaaataatacc

SEQ ID NO: 42103 - DNA, 13 bp, Artificial Sequence
  Oligonucleotide for detection of SNP TSC0012580
ggtattgtttttg

SEQ ID NO: 42104 - DNA, 13 bp, Artificial Sequence
  Oligonucleotide for detection of SNP TSC0012580
caaaaacaatacc

SEQ ID NO: 42105 - DNA, 13 bp, Artificial Sequence
  Oligonucleotide for detection of SNP TSC0012582
aattaaagttgga

SEQ ID NO: 42106 - DNA, 13 bp, Artificial Sequence
  Oligonucleotide for detection of SNP TSC0012582
tccaactttaatt

SEQ ID NO: 42107 - DNA, 13 bp, Artificial Sequence
  Oligonucleotide for detection of SNP TSC0012582
aattaaggttgga

SEQ ID NO: 42108 - DNA, 13 bp, Artificial Sequence
  Oligonucleotide for detection of SNP TSC0012582
tccaaccttaatt

SEQ ID NO: 42109 - DNA, 13 bp, Artificial Sequence
  Oligonucleotide for detection of SNP TSC0012585
ttaagaatagttt

SEQ ID NO: 42110 - DNA, 13 bp, Artificial Sequence
  Oligonucleotide for detection of SNP TSC0012585
aaactattcttaa

SEQ ID NO: 42111 - DNA, 13 bp, Artificial Sequence
  Oligonucleotide for detection of SNP TSC0012585
ttaagattagttt

SEQ ID NO: 42112 - DNA, 13 bp, Artificial Sequence
  Oligonucleotide for detection of SNP TSC0012585
aaactaatcttaa

SEQ ID NO: 42113 - DNA, 13 bp, Artificial Sequence
  Oligonucleotide for detection of SNP TSC0012585
aggttgtttttaa

SEQ ID NO: 42114 - DNA, 13 bp, Artificial Sequence
  Oligonucleotide for detection of SNP TSC0012585
ttaaaaacaacct

SEQ ID NO: 42115 - DNA, 13 bp, Artificial Sequence
  Oligonucleotide for detection of SNP TSC0012585
aggttggttttaa

SEQ ID NO: 42116 - DNA, 13 bp, Artificial Sequence
  Oligonucleotide for detection of SNP TSC0012585
ttaaaaccaacct

SEQ ID NO: 42117 - DNA, 13 bp, Artificial Sequence
  Oligonucleotide for detection of SNP TSC0012586
aatattaaaaaaa

SEQ ID NO: 42118 - DNA, 13 bp, Artificial Sequence
  Oligonucleotide for detection of SNP TSC0012586
tttttttaatatt

SEQ ID NO: 42119 - DNA, 13 bp, Artificial Sequence
  Oligonucleotide for detection of SNP TSC0012586
aatatttaaaaaa

SEQ ID NO: 42120 - DNA, 13 bp, Artificial Sequence
  Oligonucleotide for detection of SNP TSC0012586
ttttttaaatatt

SEQ ID NO: 42121 - DNA, 13 bp, Artificial Sequence
  Oligonucleotide for detection of SNP TSC0012587
tgtagtgagttgy

SEQ ID NO: 42122 - DNA, 13 bp, Artificial Sequence
  Oligonucleotide for detection of SNP TSC0012587
rcaactcactaca

SEQ ID NO: 42123 - DNA, 13 bp, Artificial Sequence
  Oligonucleotide for detection of SNP TSC0012587
tgtagtaagttgy

SEQ ID NO: 42124 - DNA, 13 bp, Artificial Sequence
  Oligonucleotide for detection of SNP TSC0012587
rcaacttactaca

SEQ ID NO: 42125 - DNA, 13 bp, Artificial Sequence
  Oligonucleotide for detection of SNP TSC0012588
tatgttattagag

SEQ ID NO: 42126 - DNA, 13 bp, Artificial Sequence
  Oligonucleotide for detection of SNP TSC0012588
ctctaataacata

SEQ ID NO: 42127 - DNA, 13 bp, Artificial Sequence
  Oligonucleotide for detection of SNP TSC0012588
tatgttgttagag

SEQ ID NO: 42128 - DNA, 13 bp, Artificial Sequence
  Oligonucleotide for detection of SNP TSC0012588
ctctaacaacata

SEQ ID NO: 42129 - DNA, 13 bp, Artificial Sequence
  Oligonucleotide for detection of SNP TSC0012592
ggtttggtgttty

SEQ ID NO: 42130 - DNA, 13 bp, Artificial Sequence
  Oligonucleotide for detection of SNP TSC0012592
raaacaccaaacc

SEQ ID NO: 42131 - DNA, 13 bp, Artificial Sequence
  Oligonucleotide for detection of SNP TSC0012592
ggtttgatgttty

SEQ ID NO: 42132 - DNA, 13 bp, Artificial Sequence
  Oligonucleotide for detection of SNP TSC0012592
raaacatcaaacc

SEQ ID NO: 42133 - DNA, 13 bp, Artificial Sequence
  Oligonucleotide for detection of SNP TSC0012593
ttgttatatatty

SEQ ID NO: 42134 - DNA, 13 bp, Artificial Sequence
  Oligonucleotide for detection of SNP TSC0012593
raatatataacaa

SEQ ID NO: 42135 - DNA, 13 bp, Artificial Sequence
  Oligonucleotide for detection of SNP TSC0012593
ttgttagatatty

SEQ ID NO: 42136 - DNA, 13 bp, Artificial Sequence
  Oligonucleotide for detection of SNP TSC0012593
raatatctaacaa

SEQ ID NO: 42137 - DNA, 13 bp, Artificial Sequence
  Oligonucleotide for detection of SNP TSC0012593
gggtatgtggtag

SEQ ID NO: 42138 - DNA, 13 bp, Artificial Sequence
  Oligonucleotide for detection of SNP TSC0012593
ctaccacataccc

SEQ ID NO: 42139 - DNA, 13 bp, Artificial Sequence
  Oligonucleotide for detection of SNP TSC0012593
gggtatttggtag

SEQ ID NO: 42140 - DNA, 13 bp, Artificial Sequence
  Oligonucleotide for detection of SNP TSC0012593
ctaccaaataccc

SEQ ID NO: 42141 - DNA, 13 bp, Artificial Sequence
  Oligonucleotide for detection of SNP TSC0012594
ttttattgttaag

SEQ ID NO: 42142 - DNA, 13 bp, Artificial Sequence
  Oligonucleotide for detection of SNP TSC0012594
cttaacaataaaa

SEQ ID NO: 42143 - DNA, 13 bp, Artificial Sequence
  Oligonucleotide for detection of SNP TSC0012594
ttttatggttaag

SEQ ID NO: 42144 - DNA, 13 bp, Artificial Sequence
  Oligonucleotide for detection of SNP TSC0012594
cttaaccataaaa

SEQ ID NO: 42145 - DNA, 13 bp, Artificial Sequence
  Oligonucleotide for detection of SNP TSC0012594
ttttatcgttaag

SEQ ID NO: 42146 - DNA, 13 bp, Artificial Sequence
  Oligonucleotide for detection of SNP TSC0012594
cttaacgataaaa

SEQ ID NO: 42147 - DNA, 13 bp, Artificial Sequence
  Oligonucleotide for detection of SNP TSC0012594
tttgatgataaaa

SEQ ID NO: 42148 - DNA, 13 bp, Artificial Sequence
  Oligonucleotide for detection of SNP TSC0012594
ttttatcatcaaa

SEQ ID NO: 42149 - DNA, 13 bp, Artificial Sequence
  Oligonucleotide for detection of SNP TSC0012594
tttgattataaaa

SEQ ID NO: 42150 - DNA, 13 bp, Artificial Sequence
  Oligonucleotide for detection of SNP TSC0012594
ttttataatcaaa

SEQ ID NO: 42151 - DNA, 13 bp, Artificial Sequence
  Oligonucleotide for detection of SNP TSC0012594
tttgacgataaaa

SEQ ID NO: 42152 - DNA, 13 bp, Artificial Sequence
  Oligonucleotide for detection of SNP TSC0012594
ttttatcgtcaaa

SEQ ID NO: 42153 - DNA, 13 bp, Artificial Sequence
  Oligonucleotide for detection of SNP TSC0012596
atatttagggtta

SEQ ID NO: 42154 - DNA, 13 bp, Artificial Sequence
  Oligonucleotide for detection of SNP TSC0012596
taaccctaaatat

SEQ ID NO: 42155 - DNA, 13 bp, Artificial Sequence
  Oligonucleotide for detection of SNP TSC0012596
atatttggggtta

SEQ ID NO: 42156 - DNA, 13 bp, Artificial Sequence
  Oligonucleotide for detection of SNP TSC0012596
taaccccaaatat

SEQ ID NO: 42157 - DNA, 13 bp, Artificial Sequence
  Oligonucleotide for detection of SNP TSC0012597
tgttgtttgatgy

SEQ ID NO: 42158 - DNA, 13 bp, Artificial Sequence
  Oligonucleotide for detection of SNP TSC0012597
rcatcaaacaaca

SEQ ID NO: 42159 - DNA, 13 bp, Artificial Sequence
  Oligonucleotide for detection of SNP TSC0012597
tgttgtgtgatgy

SEQ ID NO: 42160 - DNA, 13 bp, Artificial Sequence
  Oligonucleotide for detection of SNP TSC0012597
rcatcacacaaca

SEQ ID NO: 42161 - DNA, 13 bp, Artificial Sequence
  Oligonucleotide for detection of SNP TSC0012597
tgttgcgtgatgy

SEQ ID NO: 42162 - DNA, 13 bp, Artificial Sequence
  Oligonucleotide for detection of SNP TSC0012597
rcatcacgcaaca

SEQ ID NO: 42163 - DNA, 13 bp, Artificial Sequence
  Oligonucleotide for detection of SNP TSC0012597
gtattaggtagta

SEQ ID NO: 42164 - DNA, 13 bp, Artificial Sequence
  Oligonucleotide for detection of SNP TSC0012597
tactacctaatac

SEQ ID NO: 42165 - DNA, 13 bp, Artificial Sequence
  Oligonucleotide for detection of SNP TSC0012597
gtattatgtagta

SEQ ID NO: 42166 - DNA, 13 bp, Artificial Sequence
  Oligonucleotide for detection of SNP TSC0012597
tactacataatac

SEQ ID NO: 42167 - DNA, 13 bp, Artificial Sequence
  Oligonucleotide for detection of SNP TSC0012597
gtattacgtagta

SEQ ID NO: 42168 - DNA, 13 bp, Artificial Sequence
  Oligonucleotide for detection of SNP TSC0012597
tactacgtaatac

SEQ ID NO: 42169 - DNA, 13 bp, Artificial Sequence
  Oligonucleotide for detection of SNP TSC0012598
gggggaagaattt

SEQ ID NO: 42170 - DNA, 13 bp, Artificial Sequence
  Oligonucleotide for detection of SNP TSC0012598
aaattcttccccc

SEQ ID NO: 42171 - DNA, 13 bp, Artificial Sequence
  Oligonucleotide for detection of SNP TSC0012598
gggggaggaattt

SEQ ID NO: 42172 - DNA, 13 bp, Artificial Sequence
  Oligonucleotide for detection of SNP TSC0012598
aaattcctccccc

SEQ ID NO: 42173 - DNA, 13 bp, Artificial Sequence
  Oligonucleotide for detection of SNP TSC0012600
gtaattgttgtta

SEQ ID NO: 42174 - DNA, 13 bp, Artificial Sequence
  Oligonucleotide for detection of SNP TSC0012600
taacaacaattac

SEQ ID NO: 42175 - DNA, 13 bp, Artificial Sequence
  Oligonucleotide for detection of SNP TSC0012600
gtaatttttgtta

SEQ ID NO: 42176 - DNA, 13 bp, Artificial Sequence
  Oligonucleotide for detection of SNP TSC0012600
taacaaaaattac

SEQ ID NO: 42177 - DNA, 13 bp, Artificial Sequence
  Oligonucleotide for detection of SNP TSC0012600
taatagtaattgy

SEQ ID NO: 42178 - DNA, 13 bp, Artificial Sequence
  Oligonucleotide for detection of SNP TSC0012600
rcaattactatta

SEQ ID NO: 42179 - DNA, 13 bp, Artificial Sequence
  Oligonucleotide for detection of SNP TSC0012600
taatagaaattgy

SEQ ID NO: 42180 - DNA, 13 bp, Artificial Sequence
  Oligonucleotide for detection of SNP TSC0012600
rcaatttctatta

SEQ ID NO: 42181 - DNA, 13 bp, Artificial Sequence
  Oligonucleotide for detection of SNP TSC0012601
tttgggattgttt

SEQ ID NO: 42182 - DNA, 13 bp, Artificial Sequence
  Oligonucleotide for detection of SNP TSC0012601
aaacaatcccaaa

SEQ ID NO: 42183 - DNA, 13 bp, Artificial Sequence
  Oligonucleotide for detection of SNP TSC0012601
tttggggttgttt

SEQ ID NO: 42184 - DNA, 13 bp, Artificial Sequence
  Oligonucleotide for detection of SNP TSC0012601
aaacaaccccaaa

SEQ ID NO: 42185 - DNA, 13 bp, Artificial Sequence
  Oligonucleotide for detection of SNP TSC0012602
agatttagagaty

SEQ ID NO: 42186 - DNA, 13 bp, Artificial Sequence
  Oligonucleotide for detection of SNP TSC0012602
ratctctaaatct

SEQ ID NO: 42187 - DNA, 13 bp, Artificial Sequence
  Oligonucleotide for detection of SNP TSC0012602
agatttggagaty

SEQ ID NO: 42188 - DNA, 13 bp, Artificial Sequence
  Oligonucleotide for detection of SNP TSC0012602
ratctccaaatct

SEQ ID NO: 42189 - DNA, 13 bp, Artificial Sequence
  Oligonucleotide for detection of SNP TSC0012602
agattcggagaty

SEQ ID NO: 42190 - DNA, 13 bp, Artificial Sequence
  Oligonucleotide for detection of SNP TSC0012602
ratctccgaatct

SEQ ID NO: 42191 - DNA, 13 bp, Artificial Sequence
  Oligonucleotide for detection of SNP TSC0012602
gatttttgaattt

SEQ ID NO: 42192 - DNA, 13 bp, Artificial Sequence
  Oligonucleotide for detection of SNP TSC0012602
aaattcaaaaatc

SEQ ID NO: 42193 - DNA, 13 bp, Artificial Sequence
  Oligonucleotide for detection of SNP TSC0012602
gattttcgaattt

SEQ ID NO: 42194 - DNA, 13 bp, Artificial Sequence
  Oligonucleotide for detection of SNP TSC0012602
aaattcgaaaatc

SEQ ID NO: 42195 - DNA, 13 bp, Artificial Sequence
  Oligonucleotide for detection of SNP TSC0012603
ttagagattaggg

SEQ ID NO: 42196 - DNA, 13 bp, Artificial Sequence
  Oligonucleotide for detection of SNP TSC0012603
ccctaatctctaa

SEQ ID NO: 42197 - DNA, 13 bp, Artificial Sequence
  Oligonucleotide for detection of SNP TSC0012603
ttagaggttaggg

SEQ ID NO: 42198 - DNA, 13 bp, Artificial Sequence
  Oligonucleotide for detection of SNP TSC0012603
ccctaacctctaa

SEQ ID NO: 42199 - DNA, 13 bp, Artificial Sequence
  Oligonucleotide for detection of SNP TSC0012604
gagattaggggat

SEQ ID NO: 42200 - DNA, 13 bp, Artificial Sequence
  Oligonucleotide for detection of SNP TSC0012604
atcccctaatctc

SEQ ID NO: 42201 - DNA, 13 bp, Artificial Sequence
  Oligonucleotide for detection of SNP TSC0012604
gagattgggggat

SEQ ID NO: 42202 - DNA, 13 bp, Artificial Sequence
  Oligonucleotide for detection of SNP TSC0012604
atcccccaatctc

SEQ ID NO: 42203 - DNA, 13 bp, Artificial Sequence
  Oligonucleotide for detection of SNP TSC0012604
gagatcgggggat

SEQ ID NO: 42204 - DNA, 13 bp, Artificial Sequence
  Oligonucleotide for detection of SNP TSC0012604
atcccccgatctc

SEQ ID NO: 42205 - DNA, 13 bp, Artificial Sequence
  Oligonucleotide for detection of SNP TSC0012604
attttttgattty

SEQ ID NO: 42206 - DNA, 13 bp, Artificial Sequence
  Oligonucleotide for detection of SNP TSC0012604
raaatcaaaaaat

SEQ ID NO: 42207 - DNA, 13 bp, Artificial Sequence
  Oligonucleotide for detection of SNP TSC0012604
atttttcgattty

SEQ ID NO: 42208 - DNA, 13 bp, Artificial Sequence
  Oligonucleotide for detection of SNP TSC0012604
raaatcgaaaaat

SEQ ID NO: 42209 - DNA, 13 bp, Artificial Sequence
  Oligonucleotide for detection of SNP TSC0012605
tgtgtatgtgttg

SEQ ID NO: 42210 - DNA, 13 bp, Artificial Sequence
  Oligonucleotide for detection of SNP TSC0012605
caacacatacaca

SEQ ID NO: 42211 - DNA, 13 bp, Artificial Sequence
  Oligonucleotide for detection of SNP TSC0012605
tgtgtacgtgttg

SEQ ID NO: 42212 - DNA, 13 bp, Artificial Sequence
  Oligonucleotide for detection of SNP TSC0012605
caacacgtacaca

SEQ ID NO: 42213 - DNA, 13 bp, Artificial Sequence
  Oligonucleotide for detection of SNP TSC0012605
taatatgtgtata

SEQ ID NO: 42214 - DNA, 13 bp, Artificial Sequence
  Oligonucleotide for detection of SNP TSC0012605
tatacacatatta

SEQ ID NO: 42215 - DNA, 13 bp, Artificial Sequence
  Oligonucleotide for detection of SNP TSC0012605
taatatatgtata

SEQ ID NO: 42216 - DNA, 13 bp, Artificial Sequence
  Oligonucleotide for detection of SNP TSC0012605
tatacatatatta

SEQ ID NO: 42217 - DNA, 13 bp, Artificial Sequence
  Oligonucleotide for detection of SNP TSC0012605
taatacgtgtata

SEQ ID NO: 42218 - DNA, 13 bp, Artificial Sequence
  Oligonucleotide for detection of SNP TSC0012605
tatacacgtatta

SEQ ID NO: 42219 - DNA, 13 bp, Artificial Sequence
  Oligonucleotide for detection of SNP TSC0012606
ttatttaaaaaaa

SEQ ID NO: 42220 - DNA, 13 bp, Artificial Sequence
  Oligonucleotide for detection of SNP TSC0012606
tttttttaaataa

SEQ ID NO: 42221 - DNA, 13 bp, Artificial Sequence
  Oligonucleotide for detection of SNP TSC0012606
ttattttaaaaaa

SEQ ID NO: 42222 - DNA, 13 bp, Artificial Sequence
  Oligonucleotide for detection of SNP TSC0012606
ttttttaaaataa

SEQ ID NO: 42223 - DNA, 13 bp, Artificial Sequence
  Oligonucleotide for detection of SNP TSC0012606
tttttttaagtgg

SEQ ID NO: 42224 - DNA, 13 bp, Artificial Sequence
  Oligonucleotide for detection of SNP TSC0012606
ccacttaaaaaaa

SEQ ID NO: 42225 - DNA, 13 bp, Artificial Sequence
  Oligonucleotide for detection of SNP TSC0012606
ttttttaaagtgg

SEQ ID NO: 42226 - DNA, 13 bp, Artificial Sequence
  Oligonucleotide for detection of SNP TSC0012606
ccactttaaaaaa

SEQ ID NO: 42227 - DNA, 13 bp, Artificial Sequence
  Oligonucleotide for detection of SNP TSC0012607
agtggtgagtata

SEQ ID NO: 42228 - DNA, 13 bp, Artificial Sequence
  Oligonucleotide for detection of SNP TSC0012607
tatactcaccact

SEQ ID NO: 42229 - DNA, 13 bp, Artificial Sequence
  Oligonucleotide for detection of SNP TSC0012607
agtggttagtata

SEQ ID NO: 42230 - DNA, 13 bp, Artificial Sequence
  Oligonucleotide for detection of SNP TSC0012607
tatactaaccact

SEQ ID NO: 42231 - DNA, 13 bp, Artificial Sequence
  Oligonucleotide for detection of SNP TSC0012607
agtggcgagtata

SEQ ID NO: 42232 - DNA, 13 bp, Artificial Sequence
  Oligonucleotide for detection of SNP TSC0012607
tatactcgccact

SEQ ID NO: 42233 - DNA, 13 bp, Artificial Sequence
  Oligonucleotide for detection of SNP TSC0012607
tgtatttgttatt

SEQ ID NO: 42234 - DNA, 13 bp, Artificial Sequence
  Oligonucleotide for detection of SNP TSC0012607
aataacaaataca

SEQ ID NO: 42235 - DNA, 13 bp, Artificial Sequence
  Oligonucleotide for detection of SNP TSC0012607
tgtattagttatt

SEQ ID NO: 42236 - DNA, 13 bp, Artificial Sequence
  Oligonucleotide for detection of SNP TSC0012607
aataactaataca

SEQ ID NO: 42237 - DNA, 13 bp, Artificial Sequence
  Oligonucleotide for detection of SNP TSC0012607
tgtattcgttatt

SEQ ID NO: 42238 - DNA, 13 bp, Artificial Sequence
  Oligonucleotide for detection of SNP TSC0012607
aataacgaataca

SEQ ID NO: 42239 - DNA, 13 bp, Artificial Sequence
  Oligonucleotide for detection of SNP TSC0012608
ttaagtatgagay

SEQ ID NO: 42240 - DNA, 13 bp, Artificial Sequence
  Oligonucleotide for detection of SNP TSC0012608
rtctcatacttaa

SEQ ID NO: 42241 - DNA, 13 bp, Artificial Sequence
  Oligonucleotide for detection of SNP TSC0012608
ttaagtgtgagay

SEQ ID NO: 42242 - DNA, 13 bp, Artificial Sequence
  Oligonucleotide for detection of SNP TSC0012608
rtctcacacttaa

SEQ ID NO: 42243 - DNA, 13 bp, Artificial Sequence
  Oligonucleotide for detection of SNP TSC0012608
ttaagcgtgagay

SEQ ID NO: 42244 - DNA, 13 bp, Artificial Sequence
  Oligonucleotide for detection of SNP TSC0012608
rtctcacgcttaa

SEQ ID NO: 42245 - DNA, 13 bp, Artificial Sequence
  Oligonucleotide for detection of SNP TSC0012608
gttttatgtttga

SEQ ID NO: 42246 - DNA, 13 bp, Artificial Sequence
  Oligonucleotide for detection of SNP TSC0012608
tcaaacataaaac

SEQ ID NO: 42247 - DNA, 13 bp, Artificial Sequence
  Oligonucleotide for detection of SNP TSC0012608
gttttacgtttga

SEQ ID NO: 42248 - DNA, 13 bp, Artificial Sequence
  Oligonucleotide for detection of SNP TSC0012608
tcaaacgtaaaac

SEQ ID NO: 42249 - DNA, 13 bp, Artificial Sequence
  Oligonucleotide for detection of SNP TSC0012609
tttattatttaga

SEQ ID NO: 42250 - DNA, 13 bp, Artificial Sequence
  Oligonucleotide for detection of SNP TSC0012609
tctaaataataaa

SEQ ID NO: 42251 - DNA, 13 bp, Artificial Sequence
  Oligonucleotide for detection of SNP TSC0012609
tttattgtttaga

SEQ ID NO: 42252 - DNA, 13 bp, Artificial Sequence
  Oligonucleotide for detection of SNP TSC0012609
tctaaacaataaa

SEQ ID NO: 42253 - DNA, 13 bp, Artificial Sequence
  Oligonucleotide for detection of SNP TSC0012610
tttagtaggggta

SEQ ID NO: 42254 - DNA, 13 bp, Artificial Sequence
  Oligonucleotide for detection of SNP TSC0012610
tacccctactaaa

SEQ ID NO: 42255 - DNA, 13 bp, Artificial Sequence
  Oligonucleotide for detection of SNP TSC0012610
tttagttggggta

SEQ ID NO: 42256 - DNA, 13 bp, Artificial Sequence
  Oligonucleotide for detection of SNP TSC0012610
taccccaactaaa

SEQ ID NO: 42257 - DNA, 13 bp, Artificial Sequence
  Oligonucleotide for detection of SNP TSC0012610
tatttttgttgag

SEQ ID NO: 42258 - DNA, 13 bp, Artificial Sequence
  Oligonucleotide for detection of SNP TSC0012610
ctcaacaaaaata

SEQ ID NO: 42259 - DNA, 13 bp, Artificial Sequence
  Oligonucleotide for detection of SNP TSC0012610
tattttagttgag

SEQ ID NO: 42260 - DNA, 13 bp, Artificial Sequence
  Oligonucleotide for detection of SNP TSC0012610
ctcaactaaaata

SEQ ID NO: 42261 - DNA, 13 bp, Artificial Sequence
  Oligonucleotide for detection of SNP TSC0012612
ttttttagtaaat

SEQ ID NO: 42262 - DNA, 13 bp, Artificial Sequence
  Oligonucleotide for detection of SNP TSC0012612
atttactaaaaaa

SEQ ID NO: 42263 - DNA, 13 bp, Artificial Sequence
  Oligonucleotide for detection of SNP TSC0012612
ttttttggtaaat

SEQ ID NO: 42264 - DNA, 13 bp, Artificial Sequence
  Oligonucleotide for detection of SNP TSC0012612
atttaccaaaaaa

SEQ ID NO: 42265 - DNA, 13 bp, Artificial Sequence
  Oligonucleotide for detection of SNP TSC0012612
tttttcggtaaat

SEQ ID NO: 42266 - DNA, 13 bp, Artificial Sequence
  Oligonucleotide for detection of SNP TSC0012612
atttaccgaaaaa

SEQ ID NO: 42267 - DNA, 13 bp, Artificial Sequence
  Oligonucleotide for detection of SNP TSC0012612
atttattggagag

SEQ ID NO: 42268 - DNA, 13 bp, Artificial Sequence
  Oligonucleotide for detection of SNP TSC0012612
ctctccaataaat

SEQ ID NO: 42269 - DNA, 13 bp, Artificial Sequence
  Oligonucleotide for detection of SNP TSC0012612
atttatcggagag

SEQ ID NO: 42270 - DNA, 13 bp, Artificial Sequence
  Oligonucleotide for detection of SNP TSC0012612
ctctccgataaat

SEQ ID NO: 42271 - DNA, 13 bp, Artificial Sequence
  Oligonucleotide for detection of SNP TSC0012615
gttttaataattt

SEQ ID NO: 42272 - DNA, 13 bp, Artificial Sequence
  Oligonucleotide for detection of SNP TSC0012615
aaattattaaaac

SEQ ID NO: 42273 - DNA, 13 bp, Artificial Sequence
  Oligonucleotide for detection of SNP TSC0012615
gttttagtaattt

SEQ ID NO: 42274 - DNA, 13 bp, Artificial Sequence
  Oligonucleotide for detection of SNP TSC0012615
aaattactaaaac

SEQ ID NO: 42275 - DNA, 13 bp, Artificial Sequence
  Oligonucleotide for detection of SNP TSC0012616
aaattagttaggt

SEQ ID NO: 42276 - DNA, 13 bp, Artificial Sequence
  Oligonucleotide for detection of SNP TSC0012616
acctaactaattt

SEQ ID NO: 42277 - DNA, 13 bp, Artificial Sequence
  Oligonucleotide for detection of SNP TSC0012616
aaattaattaggt

SEQ ID NO: 42278 - DNA, 13 bp, Artificial Sequence
  Oligonucleotide for detection of SNP TSC0012616
acctaattaattt

SEQ ID NO: 42279 - DNA, 13 bp, Artificial Sequence
  Oligonucleotide for detection of SNP TSC0012617
aaaaggagatttt

SEQ ID NO: 42280 - DNA, 13 bp, Artificial Sequence
  Oligonucleotide for detection of SNP TSC0012617
aaaatctcctttt

SEQ ID NO: 42281 - DNA, 13 bp, Artificial Sequence
  Oligonucleotide for detection of SNP TSC0012617
aaaaggggatttt

SEQ ID NO: 42282 - DNA, 13 bp, Artificial Sequence
  Oligonucleotide for detection of SNP TSC0012617
aaaatcccctttt

SEQ ID NO: 42283 - DNA, 13 bp, Artificial Sequence
  Oligonucleotide for detection of SNP TSC0012618
tttaaagaattty

SEQ ID NO: 42284 - DNA, 13 bp, Artificial Sequence
  Oligonucleotide for detection of SNP TSC0012618
raaattctttaaa

SEQ ID NO: 42285 - DNA, 13 bp, Artificial Sequence
  Oligonucleotide for detection of SNP TSC0012618
tttaaaaaattty

SEQ ID NO: 42286 - DNA, 13 bp, Artificial Sequence
  Oligonucleotide for detection of SNP TSC0012618
raaattttttaaa

SEQ ID NO: 42287 - DNA, 13 bp, Artificial Sequence
  Oligonucleotide for detection of SNP TSC0012619
tttgtataggttg

SEQ ID NO: 42288 - DNA, 13 bp, Artificial Sequence
  Oligonucleotide for detection of SNP TSC0012619
caacctatacaaa

SEQ ID NO: 42289 - DNA, 13 bp, Artificial Sequence
  Oligonucleotide for detection of SNP TSC0012619
tttgtagaggttg

SEQ ID NO: 42290 - DNA, 13 bp, Artificial Sequence
  Oligonucleotide for detection of SNP TSC0012619
caacctctacaaa

SEQ ID NO: 42291 - DNA, 13 bp, Artificial Sequence
  Oligonucleotide for detection of SNP TSC0012619
tagtttgtgtaga

SEQ ID NO: 42292 - DNA, 13 bp, Artificial Sequence
  Oligonucleotide for detection of SNP TSC0012619
tctacacaaacta

SEQ ID NO: 42293 - DNA, 13 bp, Artificial Sequence
  Oligonucleotide for detection of SNP TSC0012619
tagtttttgtaga

SEQ ID NO: 42294 - DNA, 13 bp, Artificial Sequence
  Oligonucleotide for detection of SNP TSC0012619
tctacaaaaacta

SEQ ID NO: 42295 - DNA, 13 bp, Artificial Sequence
  Oligonucleotide for detection of SNP TSC0012622
aaaaagtttattt

SEQ ID NO: 42296 - DNA, 13 bp, Artificial Sequence
  Oligonucleotide for detection of SNP TSC0012622
aaataaacttttt

SEQ ID NO: 42297 - DNA, 13 bp, Artificial Sequence
  Oligonucleotide for detection of SNP TSC0012622
agatgattttttt

SEQ ID NO: 42298 - DNA, 13 bp, Artificial Sequence
  Oligonucleotide for detection of SNP TSC0012622
aaaaaaatcatct

SEQ ID NO: 42299 - DNA, 13 bp, Artificial Sequence
  Oligonucleotide for detection of SNP TSC0012622
agatgaatttttt

SEQ ID NO: 42300 - DNA, 13 bp, Artificial Sequence
  Oligonucleotide for detection of SNP TSC0012622
aaaaaattcatct

SEQ ID NO: 42301 - DNA, 13 bp, Artificial Sequence
  Oligonucleotide for detection of SNP TSC0012624
agattgggtgtag

SEQ ID NO: 42302 - DNA, 13 bp, Artificial Sequence
  Oligonucleotide for detection of SNP TSC0012624
ctacacccaatct

SEQ ID NO: 42303 - DNA, 13 bp, Artificial Sequence
  Oligonucleotide for detection of SNP TSC0012624
agattgtgtgtag

SEQ ID NO: 42304 - DNA, 13 bp, Artificial Sequence
  Oligonucleotide for detection of SNP TSC0012624
ctacacacaatct

SEQ ID NO: 42305 - DNA, 13 bp, Artificial Sequence
  Oligonucleotide for detection of SNP TSC0012624
ttatatttagttt

SEQ ID NO: 42306 - DNA, 13 bp, Artificial Sequence
  Oligonucleotide for detection of SNP TSC0012624
aaactaaatataa

SEQ ID NO: 42307 - DNA, 13 bp, Artificial Sequence
  Oligonucleotide for detection of SNP TSC0012624
ttatatatagttt

SEQ ID NO: 42308 - DNA, 13 bp, Artificial Sequence
  Oligonucleotide for detection of SNP TSC0012624
aaactatatataa

SEQ ID NO: 42309 - DNA, 13 bp, Artificial Sequence
  Oligonucleotide for detection of SNP TSC0012626
ttaaggggtttat

SEQ ID NO: 42310 - DNA, 13 bp, Artificial Sequence
  Oligonucleotide for detection of SNP TSC0012626
ataaaccccttaa

SEQ ID NO: 42311 - DNA, 13 bp, Artificial Sequence
  Oligonucleotide for detection of SNP TSC0012626
ttaaggagtttat

SEQ ID NO: 42312 - DNA, 13 bp, Artificial Sequence
  Oligonucleotide for detection of SNP TSC0012626
ataaactccttaa

SEQ ID NO: 42313 - DNA, 13 bp, Artificial Sequence
  Oligonucleotide for detection of SNP TSC0012627
gaagtgatggaga

SEQ ID NO: 42314 - DNA, 13 bp, Artificial Sequence
  Oligonucleotide for detection of SNP TSC0012627
tctccatcacttc

SEQ ID NO: 42315 - DNA, 13 bp, Artificial Sequence
  Oligonucleotide for detection of SNP TSC0012627
gaagtggtggaga

SEQ ID NO: 42316 - DNA, 13 bp, Artificial Sequence
  Oligonucleotide for detection of SNP TSC0012627
tctccaccacttc

SEQ ID NO: 42317 - DNA, 13 bp, Artificial Sequence
  Oligonucleotide for detection of SNP TSC0012627
gaagcgatggaga

SEQ ID NO: 42318 - DNA, 13 bp, Artificial Sequence
  Oligonucleotide for detection of SNP TSC0012627
tctccatcgcttc

SEQ ID NO: 42319 - DNA, 13 bp, Artificial Sequence
  Oligonucleotide for detection of SNP TSC0012627
gaagcggtggaga

SEQ ID NO: 42320 - DNA, 13 bp, Artificial Sequence
  Oligonucleotide for detection of SNP TSC0012627
tctccaccgcttc

SEQ ID NO: 42321 - DNA, 13 bp, Artificial Sequence
  Oligonucleotide for detection of SNP TSC0012628
agttttatgttty

SEQ ID NO: 42322 - DNA, 13 bp, Artificial Sequence
  Oligonucleotide for detection of SNP TSC0012628
raaacataaaact

SEQ ID NO: 42323 - DNA, 13 bp, Artificial Sequence
  Oligonucleotide for detection of SNP TSC0012628
agttttgtgttty

SEQ ID NO: 42324 - DNA, 13 bp, Artificial Sequence
  Oligonucleotide for detection of SNP TSC0012628
raaacacaaaact

SEQ ID NO: 42325 - DNA, 13 bp, Artificial Sequence
  Oligonucleotide for detection of SNP TSC0012629
tgtagtatagttt

SEQ ID NO: 42326 - DNA, 13 bp, Artificial Sequence
  Oligonucleotide for detection of SNP TSC0012629
aaactatactaca

SEQ ID NO: 42327 - DNA, 13 bp, Artificial Sequence
  Oligonucleotide for detection of SNP TSC0012629
tgtagtgtagttt

SEQ ID NO: 42328 - DNA, 13 bp, Artificial Sequence
  Oligonucleotide for detection of SNP TSC0012629
aaactacactaca

SEQ ID NO: 42329 - DNA, 13 bp, Artificial Sequence
  Oligonucleotide for detection of SNP TSC0012632
ttgtttaagaatt

SEQ ID NO: 42330 - DNA, 13 bp, Artificial Sequence
  Oligonucleotide for detection of SNP TSC0012632
aattcttaaacaa

SEQ ID NO: 42331 - DNA, 13 bp, Artificial Sequence
  Oligonucleotide for detection of SNP TSC0012632
ttgtttgagaatt

SEQ ID NO: 42332 - DNA, 13 bp, Artificial Sequence
  Oligonucleotide for detection of SNP TSC0012632
aattctcaaacaa

SEQ ID NO: 42333 - DNA, 13 bp, Artificial Sequence
  Oligonucleotide for detection of SNP TSC0012634
ttttataaaatat

SEQ ID NO: 42334 - DNA, 13 bp, Artificial Sequence
  Oligonucleotide for detection of SNP TSC0012634
atattttataaaa

SEQ ID NO: 42335 - DNA, 13 bp, Artificial Sequence
  Oligonucleotide for detection of SNP TSC0012634
ttttatgaaatat

SEQ ID NO: 42336 - DNA, 13 bp, Artificial Sequence
  Oligonucleotide for detection of SNP TSC0012634
atatttcataaaa

SEQ ID NO: 42337 - DNA, 13 bp, Artificial Sequence
  Oligonucleotide for detection of SNP TSC0012635
tttaatgagttty

SEQ ID NO: 42338 - DNA, 13 bp, Artificial Sequence
  Oligonucleotide for detection of SNP TSC0012635
raaactcattaaa

SEQ ID NO: 42339 - DNA, 13 bp, Artificial Sequence
  Oligonucleotide for detection of SNP TSC0012635
tttaattagttty

SEQ ID NO: 42340 - DNA, 13 bp, Artificial Sequence
  Oligonucleotide for detection of SNP TSC0012635
raaactaattaaa

SEQ ID NO: 42341 - DNA, 13 bp, Artificial Sequence
  Oligonucleotide for detection of SNP TSC0012635
tttaacgagttty

SEQ ID NO: 42342 - DNA, 13 bp, Artificial Sequence
  Oligonucleotide for detection of SNP TSC0012635
raaactcgttaaa

SEQ ID NO: 42343 - DNA, 13 bp, Artificial Sequence
  Oligonucleotide for detection of SNP TSC0012635
gaggtttgttaaa

SEQ ID NO: 42344 - DNA, 13 bp, Artificial Sequence
  Oligonucleotide for detection of SNP TSC0012635
tttaacaaacctc

SEQ ID NO: 42345 - DNA, 13 bp, Artificial Sequence
  Oligonucleotide for detection of SNP TSC0012635
gaggttagttaaa

SEQ ID NO: 42346 - DNA, 13 bp, Artificial Sequence
  Oligonucleotide for detection of SNP TSC0012635
tttaactaacctc

SEQ ID NO: 42347 - DNA, 13 bp, Artificial Sequence
  Oligonucleotide for detection of SNP TSC0012635
gaggttcgttaaa

SEQ ID NO: 42348 - DNA, 13 bp, Artificial Sequence
  Oligonucleotide for detection of SNP TSC0012635
tttaacgaacctc

SEQ ID NO: 42349 - DNA, 13 bp, Artificial Sequence
  Oligonucleotide for detection of SNP TSC0012636
gtattaatgtata

SEQ ID NO: 42350 - DNA, 13 bp, Artificial Sequence
  Oligonucleotide for detection of SNP TSC0012636
tatacattaatac

SEQ ID NO: 42351 - DNA, 13 bp, Artificial Sequence
  Oligonucleotide for detection of SNP TSC0012636
gtattagtgtata

SEQ ID NO: 42352 - DNA, 13 bp, Artificial Sequence
  Oligonucleotide for detection of SNP TSC0012636
tatacactaatac

SEQ ID NO: 42353 - DNA, 13 bp, Artificial Sequence
  Oligonucleotide for detection of SNP TSC0012637
atgagaggaattt

SEQ ID NO: 42354 - DNA, 13 bp, Artificial Sequence
  Oligonucleotide for detection of SNP TSC0012637
aaattcctctcat

SEQ ID NO: 42355 - DNA, 13 bp, Artificial Sequence
  Oligonucleotide for detection of SNP TSC0012637
atgagaagaattt

SEQ ID NO: 42356 - DNA, 13 bp, Artificial Sequence
  Oligonucleotide for detection of SNP TSC0012637
aaattcttctcat

SEQ ID NO: 42357 - DNA, 13 bp, Artificial Sequence
  Oligonucleotide for detection of SNP TSC0012638
gtatttagggttt

SEQ ID NO: 42358 - DNA, 13 bp, Artificial Sequence
  Oligonucleotide for detection of SNP TSC0012638
aaaccctaaatac

SEQ ID NO: 42359 - DNA, 13 bp, Artificial Sequence
  Oligonucleotide for detection of SNP TSC0012639
aaaaagttattgy

SEQ ID NO: 42360 - DNA, 13 bp, Artificial Sequence
  Oligonucleotide for detection of SNP TSC0012639
rcaataacttttt

SEQ ID NO: 42361 - DNA, 13 bp, Artificial Sequence
  Oligonucleotide for detection of SNP TSC0012639
gtagtattttttt

SEQ ID NO: 42362 - DNA, 13 bp, Artificial Sequence
  Oligonucleotide for detection of SNP TSC0012639
aaaaaaatactac

SEQ ID NO: 42363 - DNA, 13 bp, Artificial Sequence
  Oligonucleotide for detection of SNP TSC0012640
attttttgttaaa

SEQ ID NO: 42364 - DNA, 13 bp, Artificial Sequence
  Oligonucleotide for detection of SNP TSC0012640
tttaacaaaaaat

SEQ ID NO: 42365 - DNA, 13 bp, Artificial Sequence
  Oligonucleotide for detection of SNP TSC0012640
atttttcgttaaa

SEQ ID NO: 42366 - DNA, 13 bp, Artificial Sequence
  Oligonucleotide for detection of SNP TSC0012640
tttaacgaaaaat

SEQ ID NO: 42367 - DNA, 13 bp, Artificial Sequence
  Oligonucleotide for detection of SNP TSC0012640
tttgatgagaagt

SEQ ID NO: 42368 - DNA, 13 bp, Artificial Sequence
  Oligonucleotide for detection of SNP TSC0012640
acttctcatcaaa

SEQ ID NO: 42369 - DNA, 13 bp, Artificial Sequence
  Oligonucleotide for detection of SNP TSC0012640
tttgataagaagt

SEQ ID NO: 42370 - DNA, 13 bp, Artificial Sequence
  Oligonucleotide for detection of SNP TSC0012640
acttcttatcaaa

SEQ ID NO: 42371 - DNA, 13 bp, Artificial Sequence
  Oligonucleotide for detection of SNP TSC0012640
tttgacgagaagt

SEQ ID NO: 42372 - DNA, 13 bp, Artificial Sequence
  Oligonucleotide for detection of SNP TSC0012640
acttctcgtcaaa

SEQ ID NO: 42373 - DNA, 13 bp, Artificial Sequence
  Oligonucleotide for detection of SNP TSC0012642
aattatgaagtaa

SEQ ID NO: 42374 - DNA, 13 bp, Artificial Sequence
  Oligonucleotide for detection of SNP TSC0012642
ttacttcataatt

SEQ ID NO: 42375 - DNA, 13 bp, Artificial Sequence
  Oligonucleotide for detection of SNP TSC0012642
aattataaagtaa

SEQ ID NO: 42376 - DNA, 13 bp, Artificial Sequence
  Oligonucleotide for detection of SNP TSC0012642
ttactttataatt

SEQ ID NO: 42377 - DNA, 13 bp, Artificial Sequence
  Oligonucleotide for detection of SNP TSC0012643
tgggaggagagay

SEQ ID NO: 42378 - DNA, 13 bp, Artificial Sequence
  Oligonucleotide for detection of SNP TSC0012643
rtctctcctccca

SEQ ID NO: 42379 - DNA, 13 bp, Artificial Sequence
  Oligonucleotide for detection of SNP TSC0012643
tgggagaagagay

SEQ ID NO: 42380 - DNA, 13 bp, Artificial Sequence
  Oligonucleotide for detection of SNP TSC0012643
rtctcttctccca

SEQ ID NO: 42381 - DNA, 13 bp, Artificial Sequence
  Oligonucleotide for detection of SNP TSC0012644
ggtatttttggga

SEQ ID NO: 42382 - DNA, 13 bp, Artificial Sequence
  Oligonucleotide for detection of SNP TSC0012644
tcccaaaaatacc

SEQ ID NO: 42383 - DNA, 13 bp, Artificial Sequence
  Oligonucleotide for detection of SNP TSC0012644
ggtattgttggga

SEQ ID NO: 42384 - DNA, 13 bp, Artificial Sequence
  Oligonucleotide for detection of SNP TSC0012644
tcccaacaatacc

SEQ ID NO: 42385 - DNA, 13 bp, Artificial Sequence
  Oligonucleotide for detection of SNP TSC0012644
ttttaagagtaty

SEQ ID NO: 42386 - DNA, 13 bp, Artificial Sequence
  Oligonucleotide for detection of SNP TSC0012644
ratactcttaaaa

SEQ ID NO: 42387 - DNA, 13 bp, Artificial Sequence
  Oligonucleotide for detection of SNP TSC0012644
ttttaatagtaty

SEQ ID NO: 42388 - DNA, 13 bp, Artificial Sequence
  Oligonucleotide for detection of SNP TSC0012644
ratactattaaaa

SEQ ID NO: 42389 - DNA, 13 bp, Artificial Sequence
  Oligonucleotide for detection of SNP TSC0012645
aggtgtattatta

SEQ ID NO: 42390 - DNA, 13 bp, Artificial Sequence
  Oligonucleotide for detection of SNP TSC0012645
taataatacacct

SEQ ID NO: 42391 - DNA, 13 bp, Artificial Sequence
  Oligonucleotide for detection of SNP TSC0012645
aggtgttttatta

SEQ ID NO: 42392 - DNA, 13 bp, Artificial Sequence
  Oligonucleotide for detection of SNP TSC0012645
taataaaacacct

SEQ ID NO: 42393 - DNA, 13 bp, Artificial Sequence
  Oligonucleotide for detection of SNP TSC0012645
tgatagtatattt

SEQ ID NO: 42394 - DNA, 13 bp, Artificial Sequence
  Oligonucleotide for detection of SNP TSC0012645
aaatatactatca

SEQ ID NO: 42395 - DNA, 13 bp, Artificial Sequence
  Oligonucleotide for detection of SNP TSC0012645
tgataggatattt

SEQ ID NO: 42396 - DNA, 13 bp, Artificial Sequence
  Oligonucleotide for detection of SNP TSC0012645
aaatatcctatca

SEQ ID NO: 42397 - DNA, 13 bp, Artificial Sequence
  Oligonucleotide for detection of SNP TSC0012646
ggaaaggatggaa

SEQ ID NO: 42398 - DNA, 13 bp, Artificial Sequence
  Oligonucleotide for detection of SNP TSC0012646
ttccatcctttcc

SEQ ID NO: 42399 - DNA, 13 bp, Artificial Sequence
  Oligonucleotide for detection of SNP TSC0012646
ggaaagaatggaa

SEQ ID NO: 42400 - DNA, 13 bp, Artificial Sequence
  Oligonucleotide for detection of SNP TSC0012646
ttccattctttcc

SEQ ID NO: 42401 - DNA, 13 bp, Artificial Sequence
  Oligonucleotide for detection of SNP TSC0012648
ataatgaagagta

SEQ ID NO: 42402 - DNA, 13 bp, Artificial Sequence
  Oligonucleotide for detection of SNP TSC0012648
tactcttcattat

SEQ ID NO: 42403 - DNA, 13 bp, Artificial Sequence
  Oligonucleotide for detection of SNP TSC0012648
ataatgtagagta

SEQ ID NO: 42404 - DNA, 13 bp, Artificial Sequence
  Oligonucleotide for detection of SNP TSC0012648
tactctacattat

SEQ ID NO: 42405 - DNA, 13 bp, Artificial Sequence
  Oligonucleotide for detection of SNP TSC0012648
tattttttattgt

SEQ ID NO: 42406 - DNA, 13 bp, Artificial Sequence
  Oligonucleotide for detection of SNP TSC0012648
acaataaaaaata

SEQ ID NO: 42407 - DNA, 13 bp, Artificial Sequence
  Oligonucleotide for detection of SNP TSC0012648
tattttatattgt

SEQ ID NO: 42408 - DNA, 13 bp, Artificial Sequence
  Oligonucleotide for detection of SNP TSC0012648
acaatataaaata

SEQ ID NO: 42409 - DNA, 13 bp, Artificial Sequence
  Oligonucleotide for detection of SNP TSC0012649
attgattagaaag

SEQ ID NO: 42410 - DNA, 13 bp, Artificial Sequence
  Oligonucleotide for detection of SNP TSC0012649
ctttctaatcaat

SEQ ID NO: 42411 - DNA, 13 bp, Artificial Sequence
  Oligonucleotide for detection of SNP TSC0012649
attgatgagaaag

SEQ ID NO: 42412 - DNA, 13 bp, Artificial Sequence
  Oligonucleotide for detection of SNP TSC0012649
ctttctcatcaat

SEQ ID NO: 42413 - DNA, 13 bp, Artificial Sequence
  Oligonucleotide for detection of SNP TSC0012649
ttttttgattagt

SEQ ID NO: 42414 - DNA, 13 bp, Artificial Sequence
  Oligonucleotide for detection of SNP TSC0012649
actaatcaaaaaa

SEQ ID NO: 42415 - DNA, 13 bp, Artificial Sequence
  Oligonucleotide for detection of SNP TSC0012649
tttttttattagt

SEQ ID NO: 42416 - DNA, 13 bp, Artificial Sequence
  Oligonucleotide for detection of SNP TSC0012649
actaataaaaaaa

SEQ ID NO: 42417 - DNA, 13 bp, Artificial Sequence
  Oligonucleotide for detection of SNP TSC0012651
ttagaaaatatty

SEQ ID NO: 42418 - DNA, 13 bp, Artificial Sequence
  Oligonucleotide for detection of SNP TSC0012651
raatattttctaa

SEQ ID NO: 42419 - DNA, 13 bp, Artificial Sequence
  Oligonucleotide for detection of SNP TSC0012651
ttagaatatatty

SEQ ID NO: 42420 - DNA, 13 bp, Artificial Sequence
  Oligonucleotide for detection of SNP TSC0012651
raatatattctaa

SEQ ID NO: 42421 - DNA, 13 bp, Artificial Sequence
  Oligonucleotide for detection of SNP TSC0012651
gagtattttttga

SEQ ID NO: 42422 - DNA, 13 bp, Artificial Sequence
  Oligonucleotide for detection of SNP TSC0012651
tcaaaaaatactc

SEQ ID NO: 42423 - DNA, 13 bp, Artificial Sequence
  Oligonucleotide for detection of SNP TSC0012651
gagtatattttga

SEQ ID NO: 42424 - DNA, 13 bp, Artificial Sequence
  Oligonucleotide for detection of SNP TSC0012651
tcaaaatatactc

SEQ ID NO: 42425 - DNA, 13 bp, Artificial Sequence
  Oligonucleotide for detection of SNP TSC0012652
atgtggtatttgg

SEQ ID NO: 42426 - DNA, 13 bp, Artificial Sequence
  Oligonucleotide for detection of SNP TSC0012652
ccaaataccacat

SEQ ID NO: 42427 - DNA, 13 bp, Artificial Sequence
  Oligonucleotide for detection of SNP TSC0012652
atgtgggatttgg

SEQ ID NO: 42428 - DNA, 13 bp, Artificial Sequence
  Oligonucleotide for detection of SNP TSC0012652
ccaaatcccacat

SEQ ID NO: 42429 - DNA, 13 bp, Artificial Sequence
  Oligonucleotide for detection of SNP TSC0012652
ttaaatgttatat

SEQ ID NO: 42430 - DNA, 13 bp, Artificial Sequence
  Oligonucleotide for detection of SNP TSC0012652
atataacatttaa

SEQ ID NO: 42431 - DNA, 13 bp, Artificial Sequence
  Oligonucleotide for detection of SNP TSC0012652
ttaaattttatat

SEQ ID NO: 42432 - DNA, 13 bp, Artificial Sequence
  Oligonucleotide for detection of SNP TSC0012652
atataaaatttaa

SEQ ID NO: 42433 - DNA, 13 bp, Artificial Sequence
  Oligonucleotide for detection of SNP TSC0012653
tgaattttgtggg

SEQ ID NO: 42434 - DNA, 13 bp, Artificial Sequence
  Oligonucleotide for detection of SNP TSC0012653
cccacaaaattca

SEQ ID NO: 42435 - DNA, 13 bp, Artificial Sequence
  Oligonucleotide for detection of SNP TSC0012653
tgaattgtgtggg

SEQ ID NO: 42436 - DNA, 13 bp, Artificial Sequence
  Oligonucleotide for detection of SNP TSC0012653
cccacacaattca

SEQ ID NO: 42437 - DNA, 13 bp, Artificial Sequence
  Oligonucleotide for detection of SNP TSC0012653
tttatagagttta

SEQ ID NO: 42438 - DNA, 13 bp, Artificial Sequence
  Oligonucleotide for detection of SNP TSC0012653
taaactctataaa

SEQ ID NO: 42439 - DNA, 13 bp, Artificial Sequence
  Oligonucleotide for detection of SNP TSC0012653
tttatatagttta

SEQ ID NO: 42440 - DNA, 13 bp, Artificial Sequence
  Oligonucleotide for detection of SNP TSC0012653
taaactatataaa

SEQ ID NO: 42441 - DNA, 13 bp, Artificial Sequence
  Oligonucleotide for detection of SNP TSC0012654
aagaaataaagat

SEQ ID NO: 42442 - DNA, 13 bp, Artificial Sequence
  Oligonucleotide for detection of SNP TSC0012654
atctttatttctt

SEQ ID NO: 42443 - DNA, 13 bp, Artificial Sequence
  Oligonucleotide for detection of SNP TSC0012654
aagaaagaaagat

SEQ ID NO: 42444 - DNA, 13 bp, Artificial Sequence
  Oligonucleotide for detection of SNP TSC0012654
atctttctttctt

SEQ ID NO: 42445 - DNA, 13 bp, Artificial Sequence
  Oligonucleotide for detection of SNP TSC0012655
tggggtaggggtt

SEQ ID NO: 42446 - DNA, 13 bp, Artificial Sequence
  Oligonucleotide for detection of SNP TSC0012655
aacccctacccca

SEQ ID NO: 42447 - DNA, 13 bp, Artificial Sequence
  Oligonucleotide for detection of SNP TSC0012655
tggggtgggggtt

SEQ ID NO: 42448 - DNA, 13 bp, Artificial Sequence
  Oligonucleotide for detection of SNP TSC0012655
aacccccacccca

SEQ ID NO: 42449 - DNA, 13 bp, Artificial Sequence
  Oligonucleotide for detection of SNP TSC0012659
gattgagatatag

SEQ ID NO: 42450 - DNA, 13 bp, Artificial Sequence
  Oligonucleotide for detection of SNP TSC0012659
ctatatctcaatc

SEQ ID NO: 42451 - DNA, 13 bp, Artificial Sequence
  Oligonucleotide for detection of SNP TSC0012659
gattgaaatatag

SEQ ID NO: 42452 - DNA, 13 bp, Artificial Sequence
  Oligonucleotide for detection of SNP TSC0012659
ctatatttcaatc

SEQ ID NO: 42453 - DNA, 13 bp, Artificial Sequence
  Oligonucleotide for detection of SNP TSC0012660
ttttggattttta

SEQ ID NO: 42454 - DNA, 13 bp, Artificial Sequence
  Oligonucleotide for detection of SNP TSC0012660
taaaaatccaaaa

SEQ ID NO: 42455 - DNA, 13 bp, Artificial Sequence
  Oligonucleotide for detection of SNP TSC0012660
ttttggtttttta

SEQ ID NO: 42456 - DNA, 13 bp, Artificial Sequence
  Oligonucleotide for detection of SNP TSC0012660
taaaaaaccaaaa

SEQ ID NO: 42457 - DNA, 13 bp, Artificial Sequence
  Oligonucleotide for detection of SNP TSC0012660
tttcggattttta

SEQ ID NO: 42458 - DNA, 13 bp, Artificial Sequence
  Oligonucleotide for detection of SNP TSC0012660
taaaaatccgaaa

SEQ ID NO: 42459 - DNA, 13 bp, Artificial Sequence
  Oligonucleotide for detection of SNP TSC0012660
tttcggtttttta

SEQ ID NO: 42460 - DNA, 13 bp, Artificial Sequence
  Oligonucleotide for detection of SNP TSC0012660
taaaaaaccgaaa

SEQ ID NO: 42461 - DNA, 13 bp, Artificial Sequence
  Oligonucleotide for detection of SNP TSC0012660
tgggagtttgagg

SEQ ID NO: 42462 - DNA, 13 bp, Artificial Sequence
  Oligonucleotide for detection of SNP TSC0012660
cctcaaactccca

SEQ ID NO: 42463 - DNA, 13 bp, Artificial Sequence
  Oligonucleotide for detection of SNP TSC0012660
tgggaggttgagg

SEQ ID NO: 42464 - DNA, 13 bp, Artificial Sequence
  Oligonucleotide for detection of SNP TSC0012660
cctcaacctccca

SEQ ID NO: 42465 - DNA, 13 bp, Artificial Sequence
  Oligonucleotide for detection of SNP TSC0012660
tgggagttcgagg

SEQ ID NO: 42466 - DNA, 13 bp, Artificial Sequence
  Oligonucleotide for detection of SNP TSC0012660
cctcgaactccca

SEQ ID NO: 42467 - DNA, 13 bp, Artificial Sequence
  Oligonucleotide for detection of SNP TSC0012660
tgggaggtcgagg

SEQ ID NO: 42468 - DNA, 13 bp, Artificial Sequence
  Oligonucleotide for detection of SNP TSC0012660
cctcgacctccca

SEQ ID NO: 42469 - DNA, 13 bp, Artificial Sequence
  Oligonucleotide for detection of SNP TSC0012661
ttgagatggggty

SEQ ID NO: 42470 - DNA, 13 bp, Artificial Sequence
  Oligonucleotide for detection of SNP TSC0012661
raccccatctcaa

SEQ ID NO: 42471 - DNA, 13 bp, Artificial Sequence
  Oligonucleotide for detection of SNP TSC0012661
ttgagagggggty

SEQ ID NO: 42472 - DNA, 13 bp, Artificial Sequence
  Oligonucleotide for detection of SNP TSC0012661
raccccctctcaa

SEQ ID NO: 42473 - DNA, 13 bp, Artificial Sequence
  Oligonucleotide for detection of SNP TSC0012662
taggtaggtattt

SEQ ID NO: 42474 - DNA, 13 bp, Artificial Sequence
  Oligonucleotide for detection of SNP TSC0012662
aaatacctaccta

SEQ ID NO: 42475 - DNA, 13 bp, Artificial Sequence
  Oligonucleotide for detection of SNP TSC0012662
taggtatgtattt

SEQ ID NO: 42476 - DNA, 13 bp, Artificial Sequence
  Oligonucleotide for detection of SNP TSC0012662
aaatacataccta

SEQ ID NO: 42477 - DNA, 13 bp, Artificial Sequence
  Oligonucleotide for detection of SNP TSC0012662
agatgtttatttg

SEQ ID NO: 42478 - DNA, 13 bp, Artificial Sequence
  Oligonucleotide for detection of SNP TSC0012662
caaataaacatct

SEQ ID NO: 42479 - DNA, 13 bp, Artificial Sequence
  Oligonucleotide for detection of SNP TSC0012662
agatgtatatttg

SEQ ID NO: 42480 - DNA, 13 bp, Artificial Sequence
  Oligonucleotide for detection of SNP TSC0012662
caaatatacatct

SEQ ID NO: 42481 - DNA, 13 bp, Artificial Sequence
  Oligonucleotide for detection of SNP TSC0012663
ttgttttttttay

SEQ ID NO: 42482 - DNA, 13 bp, Artificial Sequence
  Oligonucleotide for detection of SNP TSC0012663
rtaaaaaaaacaa

SEQ ID NO: 42483 - DNA, 13 bp, Artificial Sequence
  Oligonucleotide for detection of SNP TSC0012663
ttgtttgttttay

SEQ ID NO: 42484 - DNA, 13 bp, Artificial Sequence
  Oligonucleotide for detection of SNP TSC0012663
rtaaaacaaacaa

SEQ ID NO: 42485 - DNA, 13 bp, Artificial Sequence
  Oligonucleotide for detection of SNP TSC0012663
gtaagagaggtag

SEQ ID NO: 42486 - DNA, 13 bp, Artificial Sequence
  Oligonucleotide for detection of SNP TSC0012663
ctacctctcttac

SEQ ID NO: 42487 - DNA, 13 bp, Artificial Sequence
  Oligonucleotide for detection of SNP TSC0012663
gtaagataggtag

SEQ ID NO: 42488 - DNA, 13 bp, Artificial Sequence
  Oligonucleotide for detection of SNP TSC0012663
ctacctatcttac

SEQ ID NO: 42489 - DNA, 13 bp, Artificial Sequence
  Oligonucleotide for detection of SNP TSC0012664
atgtataataaaa

SEQ ID NO: 42490 - DNA, 13 bp, Artificial Sequence
  Oligonucleotide for detection of SNP TSC0012664
ttttattatacat

SEQ ID NO: 42491 - DNA, 13 bp, Artificial Sequence
  Oligonucleotide for detection of SNP TSC0012664
atgtatgataaaa

SEQ ID NO: 42492 - DNA, 13 bp, Artificial Sequence
  Oligonucleotide for detection of SNP TSC0012664
ttttatcatacat

SEQ ID NO: 42493 - DNA, 13 bp, Artificial Sequence
  Oligonucleotide for detection of SNP TSC0012664
atgtacgataaaa

SEQ ID NO: 42494 - DNA, 13 bp, Artificial Sequence
  Oligonucleotide for detection of SNP TSC0012664
ttttatcgtacat

SEQ ID NO: 42495 - DNA, 13 bp, Artificial Sequence
  Oligonucleotide for detection of SNP TSC0012664
ttttattgtatat

SEQ ID NO: 42496 - DNA, 13 bp, Artificial Sequence
  Oligonucleotide for detection of SNP TSC0012664
atatacaataaaa

SEQ ID NO: 42497 - DNA, 13 bp, Artificial Sequence
  Oligonucleotide for detection of SNP TSC0012664
ttttatcgtatat

SEQ ID NO: 42498 - DNA, 13 bp, Artificial Sequence
  Oligonucleotide for detection of SNP TSC0012664
atatacgataaaa

SEQ ID NO: 42499 - DNA, 13 bp, Artificial Sequence
  Oligonucleotide for detection of SNP TSC0012665
tagagttagatty

SEQ ID NO: 42500 - DNA, 13 bp, Artificial Sequence
  Oligonucleotide for detection of SNP TSC0012665
raatctaactcta

SEQ ID NO: 42501 - DNA, 13 bp, Artificial Sequence
  Oligonucleotide for detection of SNP TSC0012665
gagtttggttttg

SEQ ID NO: 42502 - DNA, 13 bp, Artificial Sequence
  Oligonucleotide for detection of SNP TSC0012665
caaaaccaaactc

SEQ ID NO: 42503 - DNA, 13 bp, Artificial Sequence
  Oligonucleotide for detection of SNP TSC0012668
ggtagggttttgg

SEQ ID NO: 42504 - DNA, 13 bp, Artificial Sequence
  Oligonucleotide for detection of SNP TSC0012668
ccaaaaccctacc

SEQ ID NO: 42505 - DNA, 13 bp, Artificial Sequence
  Oligonucleotide for detection of SNP TSC0012668
ggtaggattttgg

SEQ ID NO: 42506 - DNA, 13 bp, Artificial Sequence
  Oligonucleotide for detection of SNP TSC0012668
ccaaaatcctacc

SEQ ID NO: 42507 - DNA, 13 bp, Artificial Sequence
  Oligonucleotide for detection of SNP TSC0012669
aagtgagttttty

SEQ ID NO: 42508 - DNA, 13 bp, Artificial Sequence
  Oligonucleotide for detection of SNP TSC0012669
raaaaactcactt

SEQ ID NO: 42509 - DNA, 13 bp, Artificial Sequence
  Oligonucleotide for detection of SNP TSC0012670
gttagaataatga

SEQ ID NO: 42510 - DNA, 13 bp, Artificial Sequence
  Oligonucleotide for detection of SNP TSC0012670
tcattattctaac

SEQ ID NO: 42511 - DNA, 13 bp, Artificial Sequence
  Oligonucleotide for detection of SNP TSC0012670
gttagagtaatga

SEQ ID NO: 42512 - DNA, 13 bp, Artificial Sequence
  Oligonucleotide for detection of SNP TSC0012670
tcattactctaac

SEQ ID NO: 42513 - DNA, 13 bp, Artificial Sequence
  Oligonucleotide for detection of SNP TSC0012671
aatatttttaaga

SEQ ID NO: 42514 - DNA, 13 bp, Artificial Sequence
  Oligonucleotide for detection of SNP TSC0012671
tcttaaaaatatt

SEQ ID NO: 42515 - DNA, 13 bp, Artificial Sequence
  Oligonucleotide for detection of SNP TSC0012671
aatattgttaaga

SEQ ID NO: 42516 - DNA, 13 bp, Artificial Sequence
  Oligonucleotide for detection of SNP TSC0012671
tcttaacaatatt

SEQ ID NO: 42517 - DNA, 13 bp, Artificial Sequence
  Oligonucleotide for detection of SNP TSC0012671
ttttgagaatgtt

SEQ ID NO: 42518 - DNA, 13 bp, Artificial Sequence
  Oligonucleotide for detection of SNP TSC0012671
aacattctcaaaa

SEQ ID NO: 42519 - DNA, 13 bp, Artificial Sequence
  Oligonucleotide for detection of SNP TSC0012671
ttttgataatgtt

SEQ ID NO: 42520 - DNA, 13 bp, Artificial Sequence
  Oligonucleotide for detection of SNP TSC0012671
aacattatcaaaa

SEQ ID NO: 42521 - DNA, 13 bp, Artificial Sequence
  Oligonucleotide for detection of SNP TSC0012672
ttgttatgggggt

SEQ ID NO: 42522 - DNA, 13 bp, Artificial Sequence
  Oligonucleotide for detection of SNP TSC0012672
acccccataacaa

SEQ ID NO: 42523 - DNA, 13 bp, Artificial Sequence
  Oligonucleotide for detection of SNP TSC0012672
ttgttacgggggt

SEQ ID NO: 42524 - DNA, 13 bp, Artificial Sequence
  Oligonucleotide for detection of SNP TSC0012672
acccccgtaacaa

SEQ ID NO: 42525 - DNA, 13 bp, Artificial Sequence
  Oligonucleotide for detection of SNP TSC0012672
atttttgtagtag

SEQ ID NO: 42526 - DNA, 13 bp, Artificial Sequence
  Oligonucleotide for detection of SNP TSC0012672
ctactacaaaaat

SEQ ID NO: 42527 - DNA, 13 bp, Artificial Sequence
  Oligonucleotide for detection of SNP TSC0012672
atttttatagtag

SEQ ID NO: 42528 - DNA, 13 bp, Artificial Sequence
  Oligonucleotide for detection of SNP TSC0012672
ctactataaaaat

SEQ ID NO: 42529 - DNA, 13 bp, Artificial Sequence
  Oligonucleotide for detection of SNP TSC0012672
attttcgtagtag

SEQ ID NO: 42530 - DNA, 13 bp, Artificial Sequence
  Oligonucleotide for detection of SNP TSC0012672
ctactacgaaaat

SEQ ID NO: 42531 - DNA, 13 bp, Artificial Sequence
  Oligonucleotide for detection of SNP TSC0012673
ttttataatattg

SEQ ID NO: 42532 - DNA, 13 bp, Artificial Sequence
  Oligonucleotide for detection of SNP TSC0012673
caatattataaaa

SEQ ID NO: 42533 - DNA, 13 bp, Artificial Sequence
  Oligonucleotide for detection of SNP TSC0012673
ttttatgatattg

SEQ ID NO: 42534 - DNA, 13 bp, Artificial Sequence
  Oligonucleotide for detection of SNP TSC0012673
caatatcataaaa

SEQ ID NO: 42535 - DNA, 13 bp, Artificial Sequence
  Oligonucleotide for detection of SNP TSC0012674
aatttaattgttt

SEQ ID NO: 42536 - DNA, 13 bp, Artificial Sequence
  Oligonucleotide for detection of SNP TSC0012674
aaacaattaaatt

SEQ ID NO: 42537 - DNA, 13 bp, Artificial Sequence
  Oligonucleotide for detection of SNP TSC0012674
aatttagttgttt

SEQ ID NO: 42538 - DNA, 13 bp, Artificial Sequence
  Oligonucleotide for detection of SNP TSC0012674
aaacaactaaatt

SEQ ID NO: 42539 - DNA, 13 bp, Artificial Sequence
  Oligonucleotide for detection of SNP TSC0012677
ggggaggggagag

SEQ ID NO: 42540 - DNA, 13 bp, Artificial Sequence
  Oligonucleotide for detection of SNP TSC0012677
ctctcccctcccc

SEQ ID NO: 42541 - DNA, 13 bp, Artificial Sequence
  Oligonucleotide for detection of SNP TSC0012677
ggggagaggagag

SEQ ID NO: 42542 - DNA, 13 bp, Artificial Sequence
  Oligonucleotide for detection of SNP TSC0012677
ctctcctctcccc

SEQ ID NO: 42543 - DNA, 13 bp, Artificial Sequence
  Oligonucleotide for detection of SNP TSC0012678
ttttttgtggtty

SEQ ID NO: 42544 - DNA, 13 bp, Artificial Sequence
  Oligonucleotide for detection of SNP TSC0012678
raaccacaaaaaa

SEQ ID NO: 42545 - DNA, 13 bp, Artificial Sequence
  Oligonucleotide for detection of SNP TSC0012678
ttttttttggtty

SEQ ID NO: 42546 - DNA, 13 bp, Artificial Sequence
  Oligonucleotide for detection of SNP TSC0012678
raaccaaaaaaaa

SEQ ID NO: 42547 - DNA, 13 bp, Artificial Sequence
  Oligonucleotide for detection of SNP TSC0012678
tttttcgtggtty

SEQ ID NO: 42548 - DNA, 13 bp, Artificial Sequence
  Oligonucleotide for detection of SNP TSC0012678
raaccacgaaaaa

SEQ ID NO: 42549 - DNA, 13 bp, Artificial Sequence
  Oligonucleotide for detection of SNP TSC0012678
tttttttcggtty

SEQ ID NO: 42550 - DNA, 13 bp, Artificial Sequence
  Oligonucleotide for detection of SNP TSC0012678
raaccgaaaaaaa

SEQ ID NO: 42551 - DNA, 13 bp, Artificial Sequence
  Oligonucleotide for detection of SNP TSC0012678
ttttttgcggtty

SEQ ID NO: 42552 - DNA, 13 bp, Artificial Sequence
  Oligonucleotide for detection of SNP TSC0012678
raaccgcaaaaaa

SEQ ID NO: 42553 - DNA, 13 bp, Artificial Sequence
  Oligonucleotide for detection of SNP TSC0012678
tttttcgcggtty

SEQ ID NO: 42554 - DNA, 13 bp, Artificial Sequence
  Oligonucleotide for detection of SNP TSC0012678
raaccgcgaaaaa

SEQ ID NO: 42555 - DNA, 13 bp, Artificial Sequence
  Oligonucleotide for detection of SNP TSC0012678
gagttgtggggag

SEQ ID NO: 42556 - DNA, 13 bp, Artificial Sequence
  Oligonucleotide for detection of SNP TSC0012678
ctccccacaactc

SEQ ID NO: 42557 - DNA, 13 bp, Artificial Sequence
  Oligonucleotide for detection of SNP TSC0012678
gagttgaggggag

SEQ ID NO: 42558 - DNA, 13 bp, Artificial Sequence
  Oligonucleotide for detection of SNP TSC0012678
ctcccctcaactc

SEQ ID NO: 42559 - DNA, 13 bp, Artificial Sequence
  Oligonucleotide for detection of SNP TSC0012678
gagtcgtggggag

SEQ ID NO: 42560 - DNA, 13 bp, Artificial Sequence
  Oligonucleotide for detection of SNP TSC0012678
ctccccacgactc

SEQ ID NO: 42561 - DNA, 13 bp, Artificial Sequence
  Oligonucleotide for detection of SNP TSC0012678
gagtcgaggggag

SEQ ID NO: 42562 - DNA, 13 bp, Artificial Sequence
  Oligonucleotide for detection of SNP TSC0012678
ctcccctcgactc

SEQ ID NO: 42563 - DNA, 13 bp, Artificial Sequence
  Oligonucleotide for detection of SNP TSC0012678
gagttgcggggag

SEQ ID NO: 42564 - DNA, 13 bp, Artificial Sequence
  Oligonucleotide for detection of SNP TSC0012678
ctccccgcaactc

SEQ ID NO: 42565 - DNA, 13 bp, Artificial Sequence
  Oligonucleotide for detection of SNP TSC0012678
gagtcgcggggag

SEQ ID NO: 42566 - DNA, 13 bp, Artificial Sequence
  Oligonucleotide for detection of SNP TSC0012678
ctccccgcgactc

SEQ ID NO: 42567 - DNA, 13 bp, Artificial Sequence
  Oligonucleotide for detection of SNP TSC0012679
tttttggttttty

SEQ ID NO: 42568 - DNA, 13 bp, Artificial Sequence
  Oligonucleotide for detection of SNP TSC0012679
raaaaaccaaaaa

SEQ ID NO: 42569 - DNA, 13 bp, Artificial Sequence
  Oligonucleotide for detection of SNP TSC0012682
ttatttaattttt

SEQ ID NO: 42570 - DNA, 13 bp, Artificial Sequence
  Oligonucleotide for detection of SNP TSC0012682
aaaaattaaataa

SEQ ID NO: 42571 - DNA, 13 bp, Artificial Sequence
  Oligonucleotide for detection of SNP TSC0012684
tttgaaatttttt

SEQ ID NO: 42572 - DNA, 13 bp, Artificial Sequence
  Oligonucleotide for detection of SNP TSC0012684
aaaaaatttcaaa

SEQ ID NO: 42573 - DNA, 13 bp, Artificial Sequence
  Oligonucleotide for detection of SNP TSC0012684
tttgaagtttttt

SEQ ID NO: 42574 - DNA, 13 bp, Artificial Sequence
  Oligonucleotide for detection of SNP TSC0012684
aaaaaacttcaaa

SEQ ID NO: 42575 - DNA, 13 bp, Artificial Sequence
  Oligonucleotide for detection of SNP TSC0012685
gatggggaagtty

SEQ ID NO: 42576 - DNA, 13 bp, Artificial Sequence
  Oligonucleotide for detection of SNP TSC0012685
raacttccccatc

SEQ ID NO: 42577 - DNA, 13 bp, Artificial Sequence
  Oligonucleotide for detection of SNP TSC0012685
gatgggaaagtty

SEQ ID NO: 42578 - DNA, 13 bp, Artificial Sequence
  Oligonucleotide for detection of SNP TSC0012685
raactttcccatc

SEQ ID NO: 42579 - DNA, 13 bp, Artificial Sequence
  Oligonucleotide for detection of SNP TSC0012690
tagggaagtttta

SEQ ID NO: 42580 - DNA, 13 bp, Artificial Sequence
  Oligonucleotide for detection of SNP TSC0012690
taaaacttcccta

SEQ ID NO: 42581 - DNA, 13 bp, Artificial Sequence
  Oligonucleotide for detection of SNP TSC0012690
tagggaggtttta

SEQ ID NO: 42582 - DNA, 13 bp, Artificial Sequence
  Oligonucleotide for detection of SNP TSC0012690
taaaacctcccta

SEQ ID NO: 42583 - DNA, 13 bp, Artificial Sequence
  Oligonucleotide for detection of SNP TSC0012691
tatatttgggaay

SEQ ID NO: 42584 - DNA, 13 bp, Artificial Sequence
  Oligonucleotide for detection of SNP TSC0012691
rttcccaaatata

SEQ ID NO: 42585 - DNA, 13 bp, Artificial Sequence
  Oligonucleotide for detection of SNP TSC0012691
tatattcgggaay

SEQ ID NO: 42586 - DNA, 13 bp, Artificial Sequence
  Oligonucleotide for detection of SNP TSC0012691
rttcccgaatata

SEQ ID NO: 42587 - DNA, 13 bp, Artificial Sequence
  Oligonucleotide for detection of SNP TSC0012691
gtttttgaatgta

SEQ ID NO: 42588 - DNA, 13 bp, Artificial Sequence
  Oligonucleotide for detection of SNP TSC0012691
tacattcaaaaac

SEQ ID NO: 42589 - DNA, 13 bp, Artificial Sequence
  Oligonucleotide for detection of SNP TSC0012691
gtttttaaatgta

SEQ ID NO: 42590 - DNA, 13 bp, Artificial Sequence
  Oligonucleotide for detection of SNP TSC0012691
tacatttaaaaac

SEQ ID NO: 42591 - DNA, 13 bp, Artificial Sequence
  Oligonucleotide for detection of SNP TSC0012691
gttttcgaatgta

SEQ ID NO: 42592 - DNA, 13 bp, Artificial Sequence
  Oligonucleotide for detection of SNP TSC0012691
tacattcgaaaac

SEQ ID NO: 42593 - DNA, 13 bp, Artificial Sequence
  Oligonucleotide for detection of SNP TSC0012692
agatagtgtaaag

SEQ ID NO: 42594 - DNA, 13 bp, Artificial Sequence
  Oligonucleotide for detection of SNP TSC0012692
ctttacactatct

SEQ ID NO: 42595 - DNA, 13 bp, Artificial Sequence
  Oligonucleotide for detection of SNP TSC0012692
agatagcgtaaag

SEQ ID NO: 42596 - DNA, 13 bp, Artificial Sequence
  Oligonucleotide for detection of SNP TSC0012692
ctttacgctatct

SEQ ID NO: 42597 - DNA, 13 bp, Artificial Sequence
  Oligonucleotide for detection of SNP TSC0012692
ttttatgttgttt

SEQ ID NO: 42598 - DNA, 13 bp, Artificial Sequence
  Oligonucleotide for detection of SNP TSC0012692
aaacaacataaaa

SEQ ID NO: 42599 - DNA, 13 bp, Artificial Sequence
  Oligonucleotide for detection of SNP TSC0012692
ttttatattgttt

SEQ ID NO: 42600 - DNA, 13 bp, Artificial Sequence
  Oligonucleotide for detection of SNP TSC0012692
aaacaatataaaa

SEQ ID NO: 42601 - DNA, 13 bp, Artificial Sequence
  Oligonucleotide for detection of SNP TSC0012692
ttttacgttgttt

SEQ ID NO: 42602 - DNA, 13 bp, Artificial Sequence
  Oligonucleotide for detection of SNP TSC0012692
aaacaacgtaaaa

SEQ ID NO: 42603 - DNA, 13 bp, Artificial Sequence
  Oligonucleotide for detection of SNP TSC0012693
ttgtttgttatta

SEQ ID NO: 42604 - DNA, 13 bp, Artificial Sequence
  Oligonucleotide for detection of SNP TSC0012693
taataacaaacaa

SEQ ID NO: 42605 - DNA, 13 bp, Artificial Sequence
  Oligonucleotide for detection of SNP TSC0012693
ttgtttattatta

SEQ ID NO: 42606 - DNA, 13 bp, Artificial Sequence
  Oligonucleotide for detection of SNP TSC0012693
taataataaacaa

SEQ ID NO: 42607 - DNA, 13 bp, Artificial Sequence
  Oligonucleotide for detection of SNP TSC0012693
tcgtttgttatta

SEQ ID NO: 42608 - DNA, 13 bp, Artificial Sequence
  Oligonucleotide for detection of SNP TSC0012693
taataacaaacga

SEQ ID NO: 42609 - DNA, 13 bp, Artificial Sequence
  Oligonucleotide for detection of SNP TSC0012693
tcgtttattatta

SEQ ID NO: 42610 - DNA, 13 bp, Artificial Sequence
  Oligonucleotide for detection of SNP TSC0012693
taataataaacga

SEQ ID NO: 42611 - DNA, 13 bp, Artificial Sequence
  Oligonucleotide for detection of SNP TSC0012694
aaaaaagataaaa

SEQ ID NO: 42612 - DNA, 13 bp, Artificial Sequence
  Oligonucleotide for detection of SNP TSC0012694
ttttatctttttt

SEQ ID NO: 42613 - DNA, 13 bp, Artificial Sequence
  Oligonucleotide for detection of SNP TSC0012694
ttttgtttttttt

SEQ ID NO: 42614 - DNA, 13 bp, Artificial Sequence
  Oligonucleotide for detection of SNP TSC0012694
aaaaaaaacaaaa

SEQ ID NO: 42615 - DNA, 13 bp, Artificial Sequence
  Oligonucleotide for detection of SNP TSC0012694
ttttgtatttttt

SEQ ID NO: 42616 - DNA, 13 bp, Artificial Sequence
  Oligonucleotide for detection of SNP TSC0012694
aaaaaatacaaaa

SEQ ID NO: 42617 - DNA, 13 bp, Artificial Sequence
  Oligonucleotide for detection of SNP TSC0012695
gttggagtgtaga

SEQ ID NO: 42618 - DNA, 13 bp, Artificial Sequence
  Oligonucleotide for detection of SNP TSC0012695
tctacactccaac

SEQ ID NO: 42619 - DNA, 13 bp, Artificial Sequence
  Oligonucleotide for detection of SNP TSC0012695
gttggaatgtaga

SEQ ID NO: 42620 - DNA, 13 bp, Artificial Sequence
  Oligonucleotide for detection of SNP TSC0012695
tctacattccaac

SEQ ID NO: 42621 - DNA, 13 bp, Artificial Sequence
  Oligonucleotide for detection of SNP TSC0012696
gagtttaatgtgy

SEQ ID NO: 42622 - DNA, 13 bp, Artificial Sequence
  Oligonucleotide for detection of SNP TSC0012696
rcacattaaactc

SEQ ID NO: 42623 - DNA, 13 bp, Artificial Sequence
  Oligonucleotide for detection of SNP TSC0012696
gagtttgatgtgy

SEQ ID NO: 42624 - DNA, 13 bp, Artificial Sequence
  Oligonucleotide for detection of SNP TSC0012696
rcacatcaaactc

SEQ ID NO: 42625 - DNA, 13 bp, Artificial Sequence
  Oligonucleotide for detection of SNP TSC0012696
gagttcgatgtgy

SEQ ID NO: 42626 - DNA, 13 bp, Artificial Sequence
  Oligonucleotide for detection of SNP TSC0012696
rcacatcgaactc

SEQ ID NO: 42627 - DNA, 13 bp, Artificial Sequence
  Oligonucleotide for detection of SNP TSC0012696
gtatattggatty

SEQ ID NO: 42628 - DNA, 13 bp, Artificial Sequence
  Oligonucleotide for detection of SNP TSC0012696
raatccaatatac

SEQ ID NO: 42629 - DNA, 13 bp, Artificial Sequence
  Oligonucleotide for detection of SNP TSC0012696
gtatatcggatty

SEQ ID NO: 42630 - DNA, 13 bp, Artificial Sequence
  Oligonucleotide for detection of SNP TSC0012696
raatccgatatac

SEQ ID NO: 42631 - DNA, 13 bp, Artificial Sequence
  Oligonucleotide for detection of SNP TSC0012697
tatattaagtata

SEQ ID NO: 42632 - DNA, 13 bp, Artificial Sequence
  Oligonucleotide for detection of SNP TSC0012697
tatacttaatata

SEQ ID NO: 42633 - DNA, 13 bp, Artificial Sequence
  Oligonucleotide for detection of SNP TSC0012697
tatattgagtata

SEQ ID NO: 42634 - DNA, 13 bp, Artificial Sequence
  Oligonucleotide for detection of SNP TSC0012697
tatactcaatata

SEQ ID NO: 42635 - DNA, 13 bp, Artificial Sequence
  Oligonucleotide for detection of SNP TSC0012702
ttagttaaggtta

SEQ ID NO: 42636 - DNA, 13 bp, Artificial Sequence
  Oligonucleotide for detection of SNP TSC0012702
taaccttaactaa

SEQ ID NO: 42637 - DNA, 13 bp, Artificial Sequence
  Oligonucleotide for detection of SNP TSC0012702
ttagttgaggtta

SEQ ID NO: 42638 - DNA, 13 bp, Artificial Sequence
  Oligonucleotide for detection of SNP TSC0012702
taacctcaactaa

SEQ ID NO: 42639 - DNA, 13 bp, Artificial Sequence
  Oligonucleotide for detection of SNP TSC0012702
ttagtcgaggtta

SEQ ID NO: 42640 - DNA, 13 bp, Artificial Sequence
  Oligonucleotide for detection of SNP TSC0012702
taacctcgactaa

SEQ ID NO: 42641 - DNA, 13 bp, Artificial Sequence
  Oligonucleotide for detection of SNP TSC0012702
tgattttgattga

SEQ ID NO: 42642 - DNA, 13 bp, Artificial Sequence
  Oligonucleotide for detection of SNP TSC0012702
tcaatcaaaatca

SEQ ID NO: 42643 - DNA, 13 bp, Artificial Sequence
  Oligonucleotide for detection of SNP TSC0012702
tgatttcgattga

SEQ ID NO: 42644 - DNA, 13 bp, Artificial Sequence
  Oligonucleotide for detection of SNP TSC0012702
tcaatcgaaatca

SEQ ID NO: 42645 - DNA, 13 bp, Artificial Sequence
  Oligonucleotide for detection of SNP TSC0012703
tttgttagggtag

SEQ ID NO: 42646 - DNA, 13 bp, Artificial Sequence
  Oligonucleotide for detection of SNP TSC0012703
ctaccctaacaaa

SEQ ID NO: 42647 - DNA, 13 bp, Artificial Sequence
  Oligonucleotide for detection of SNP TSC0012703
tttgttggggtag

SEQ ID NO: 42648 - DNA, 13 bp, Artificial Sequence
  Oligonucleotide for detection of SNP TSC0012703
ctaccccaacaaa

SEQ ID NO: 42649 - DNA, 13 bp, Artificial Sequence
  Oligonucleotide for detection of SNP TSC0012703
tttgtcggggtag

SEQ ID NO: 42650 - DNA, 13 bp, Artificial Sequence
  Oligonucleotide for detection of SNP TSC0012703
ctaccccgacaaa

SEQ ID NO: 42651 - DNA, 13 bp, Artificial Sequence
  Oligonucleotide for detection of SNP TSC0012703
ttgttttggtagg

SEQ ID NO: 42652 - DNA, 13 bp, Artificial Sequence
  Oligonucleotide for detection of SNP TSC0012703
cctaccaaaacaa

SEQ ID NO: 42653 - DNA, 13 bp, Artificial Sequence
  Oligonucleotide for detection of SNP TSC0012703
ttgtttcggtagg

SEQ ID NO: 42654 - DNA, 13 bp, Artificial Sequence
  Oligonucleotide for detection of SNP TSC0012703
cctaccgaaacaa

SEQ ID NO: 42655 - DNA, 13 bp, Artificial Sequence
  Oligonucleotide for detection of SNP TSC0012705
gtggtgtgtgttt

SEQ ID NO: 42656 - DNA, 13 bp, Artificial Sequence
  Oligonucleotide for detection of SNP TSC0012705
aaacacacaccac

SEQ ID NO: 42657 - DNA, 13 bp, Artificial Sequence
  Oligonucleotide for detection of SNP TSC0012705
gtggcgtgtgttt

SEQ ID NO: 42658 - DNA, 13 bp, Artificial Sequence
  Oligonucleotide for detection of SNP TSC0012705
aaacacacgccac

SEQ ID NO: 42659 - DNA, 13 bp, Artificial Sequence
  Oligonucleotide for detection of SNP TSC0012705
gtggtgcgtgttt

SEQ ID NO: 42660 - DNA, 13 bp, Artificial Sequence
  Oligonucleotide for detection of SNP TSC0012705
aaacacgcaccac

SEQ ID NO: 42661 - DNA, 13 bp, Artificial Sequence
  Oligonucleotide for detection of SNP TSC0012705
gtggcgcgtgttt

SEQ ID NO: 42662 - DNA, 13 bp, Artificial Sequence
  Oligonucleotide for detection of SNP TSC0012705
aaacacgcgccac

SEQ ID NO: 42663 - DNA, 13 bp, Artificial Sequence
  Oligonucleotide for detection of SNP TSC0012705
aggtatgtgttay

SEQ ID NO: 42664 - DNA, 13 bp, Artificial Sequence
  Oligonucleotide for detection of SNP TSC0012705
rtaacacatacct

SEQ ID NO: 42665 - DNA, 13 bp, Artificial Sequence
  Oligonucleotide for detection of SNP TSC0012705
aggtatatgttay

SEQ ID NO: 42666 - DNA, 13 bp, Artificial Sequence
  Oligonucleotide for detection of SNP TSC0012705
rtaacatatacct

SEQ ID NO: 42667 - DNA, 13 bp, Artificial Sequence
  Oligonucleotide for detection of SNP TSC0012705
aggtacgtgttay

SEQ ID NO: 42668 - DNA, 13 bp, Artificial Sequence
  Oligonucleotide for detection of SNP TSC0012705
rtaacacgtacct

SEQ ID NO: 42669 - DNA, 13 bp, Artificial Sequence
  Oligonucleotide for detection of SNP TSC0012705
aggtatacgttay

SEQ ID NO: 42670 - DNA, 13 bp, Artificial Sequence
  Oligonucleotide for detection of SNP TSC0012705
rtaacgtatacct

SEQ ID NO: 42671 - DNA, 13 bp, Artificial Sequence
  Oligonucleotide for detection of SNP TSC0012705
aggtatgcgttay

SEQ ID NO: 42672 - DNA, 13 bp, Artificial Sequence
  Oligonucleotide for detection of SNP TSC0012705
rtaacgcatacct

SEQ ID NO: 42673 - DNA, 13 bp, Artificial Sequence
  Oligonucleotide for detection of SNP TSC0012705
aggtacgcgttay

SEQ ID NO: 42674 - DNA, 13 bp, Artificial Sequence
  Oligonucleotide for detection of SNP TSC0012705
rtaacgcgtacct

SEQ ID NO: 42675 - DNA, 13 bp, Artificial Sequence
  Oligonucleotide for detection of SNP TSC0012707
taattatgggttt

SEQ ID NO: 42676 - DNA, 13 bp, Artificial Sequence
  Oligonucleotide for detection of SNP TSC0012707
aaacccataatta

SEQ ID NO: 42677 - DNA, 13 bp, Artificial Sequence
  Oligonucleotide for detection of SNP TSC0012707
taattaggggttt

SEQ ID NO: 42678 - DNA, 13 bp, Artificial Sequence
  Oligonucleotide for detection of SNP TSC0012707
aaacccctaatta

SEQ ID NO: 42679 - DNA, 13 bp, Artificial Sequence
  Oligonucleotide for detection of SNP TSC0012707
taattacgggttt

SEQ ID NO: 42680 - DNA, 13 bp, Artificial Sequence
  Oligonucleotide for detection of SNP TSC0012707
aaacccgtaatta

SEQ ID NO: 42681 - DNA, 13 bp, Artificial Sequence
  Oligonucleotide for detection of SNP TSC0012707
aggtttgtaattg

SEQ ID NO: 42682 - DNA, 13 bp, Artificial Sequence
  Oligonucleotide for detection of SNP TSC0012707
caattacaaacct

SEQ ID NO: 42683 - DNA, 13 bp, Artificial Sequence
  Oligonucleotide for detection of SNP TSC0012707
aggtttttaattg

SEQ ID NO: 42684 - DNA, 13 bp, Artificial Sequence
  Oligonucleotide for detection of SNP TSC0012707
caattaaaaacct

SEQ ID NO: 42685 - DNA, 13 bp, Artificial Sequence
  Oligonucleotide for detection of SNP TSC0012707
aggttcgtaattg

SEQ ID NO: 42686 - DNA, 13 bp, Artificial Sequence
  Oligonucleotide for detection of SNP TSC0012707
caattacgaacct

SEQ ID NO: 42687 - DNA, 13 bp, Artificial Sequence
  Oligonucleotide for detection of SNP TSC0012708
gttttagtagaga

SEQ ID NO: 42688 - DNA, 13 bp, Artificial Sequence
  Oligonucleotide for detection of SNP TSC0012708
tctctactaaaac

SEQ ID NO: 42689 - DNA, 13 bp, Artificial Sequence
  Oligonucleotide for detection of SNP TSC0012708
gttttaatagaga

SEQ ID NO: 42690 - DNA, 13 bp, Artificial Sequence
  Oligonucleotide for detection of SNP TSC0012708
tctctattaaaac

SEQ ID NO: 42691 - DNA, 13 bp, Artificial Sequence
  Oligonucleotide for detection of SNP TSC0012709
atttttgtggtta

SEQ ID NO: 42692 - DNA, 13 bp, Artificial Sequence
  Oligonucleotide for detection of SNP TSC0012709
taaccacaaaaat

SEQ ID NO: 42693 - DNA, 13 bp, Artificial Sequence
  Oligonucleotide for detection of SNP TSC0012709
atttttatggtta

SEQ ID NO: 42694 - DNA, 13 bp, Artificial Sequence
  Oligonucleotide for detection of SNP TSC0012709
taaccataaaaat

SEQ ID NO: 42695 - DNA, 13 bp, Artificial Sequence
  Oligonucleotide for detection of SNP TSC0012709
atttttgcggtta

SEQ ID NO: 42696 - DNA, 13 bp, Artificial Sequence
  Oligonucleotide for detection of SNP TSC0012709
taaccgcaaaaat

SEQ ID NO: 42697 - DNA, 13 bp, Artificial Sequence
  Oligonucleotide for detection of SNP TSC0012709
atttttacggtta

SEQ ID NO: 42698 - DNA, 13 bp, Artificial Sequence
  Oligonucleotide for detection of SNP TSC0012709
taaccgtaaaaat

SEQ ID NO: 42699 - DNA, 13 bp, Artificial Sequence
  Oligonucleotide for detection of SNP TSC0012710
ttttatattgtgg

SEQ ID NO: 42700 - DNA, 13 bp, Artificial Sequence
  Oligonucleotide for detection of SNP TSC0012710
ccacaatataaaa

SEQ ID NO: 42701 - DNA, 13 bp, Artificial Sequence
  Oligonucleotide for detection of SNP TSC0012710
ttttatgttgtgg

SEQ ID NO: 42702 - DNA, 13 bp, Artificial Sequence
  Oligonucleotide for detection of SNP TSC0012710
ccacaacataaaa

SEQ ID NO: 42703 - DNA, 13 bp, Artificial Sequence
  Oligonucleotide for detection of SNP TSC0012710
ttttacgttgtgg

SEQ ID NO: 42704 - DNA, 13 bp, Artificial Sequence
  Oligonucleotide for detection of SNP TSC0012710
ccacaacgtaaaa

SEQ ID NO: 42705 - DNA, 13 bp, Artificial Sequence
  Oligonucleotide for detection of SNP TSC0012710
ttatagtgtaaag

SEQ ID NO: 42706 - DNA, 13 bp, Artificial Sequence
  Oligonucleotide for detection of SNP TSC0012710
ctttacactataa

SEQ ID NO: 42707 - DNA, 13 bp, Artificial Sequence
  Oligonucleotide for detection of SNP TSC0012710
ttatagcgtaaag

SEQ ID NO: 42708 - DNA, 13 bp, Artificial Sequence
  Oligonucleotide for detection of SNP TSC0012710
ctttacgctataa

SEQ ID NO: 42709 - DNA, 13 bp, Artificial Sequence
  Oligonucleotide for detection of SNP TSC0012711
aaaaatgtgtatt

SEQ ID NO: 42710 - DNA, 13 bp, Artificial Sequence
  Oligonucleotide for detection of SNP TSC0012711
aatacacattttt

SEQ ID NO: 42711 - DNA, 13 bp, Artificial Sequence
  Oligonucleotide for detection of SNP TSC0012711
aatatatattttt

SEQ ID NO: 42712 - DNA, 13 bp, Artificial Sequence
  Oligonucleotide for detection of SNP TSC0012711
aaaaatatatatt

SEQ ID NO: 42713 - DNA, 13 bp, Artificial Sequence
  Oligonucleotide for detection of SNP TSC0012711
aatataaattttt

SEQ ID NO: 42714 - DNA, 13 bp, Artificial Sequence
  Oligonucleotide for detection of SNP TSC0012711
aaaaatttatatt

SEQ ID NO: 42715 - DNA, 13 bp, Artificial Sequence
  Oligonucleotide for detection of SNP TSC0012712
atttggatttttt

SEQ ID NO: 42716 - DNA, 13 bp, Artificial Sequence
  Oligonucleotide for detection of SNP TSC0012712
aaaaaatccaaat

SEQ ID NO: 42717 - DNA, 13 bp, Artificial Sequence
  Oligonucleotide for detection of SNP TSC0012712
atttggttttttt

SEQ ID NO: 42718 - DNA, 13 bp, Artificial Sequence
  Oligonucleotide for detection of SNP TSC0012712
aaaaaaaccaaat

SEQ ID NO: 42719 - DNA, 13 bp, Artificial Sequence
  Oligonucleotide for detection of SNP TSC0012712
aaggaatttaaat

SEQ ID NO: 42720 - DNA, 13 bp, Artificial Sequence
  Oligonucleotide for detection of SNP TSC0012712
atttaaattcctt

SEQ ID NO: 42721 - DNA, 13 bp, Artificial Sequence
  Oligonucleotide for detection of SNP TSC0012712
aaggaaattaaat

SEQ ID NO: 42722 - DNA, 13 bp, Artificial Sequence
  Oligonucleotide for detection of SNP TSC0012712
atttaatttcctt

SEQ ID NO: 42723 - DNA, 13 bp, Artificial Sequence
  Oligonucleotide for detection of SNP TSC0012715
ttaggtgggagtg

SEQ ID NO: 42724 - DNA, 13 bp, Artificial Sequence
  Oligonucleotide for detection of SNP TSC0012715
cactcccacctaa

SEQ ID NO: 42725 - DNA, 13 bp, Artificial Sequence
  Oligonucleotide for detection of SNP TSC0012715
ttaggttggagtg

SEQ ID NO: 42726 - DNA, 13 bp, Artificial Sequence
  Oligonucleotide for detection of SNP TSC0012715
cactccaacctaa

SEQ ID NO: 42727 - DNA, 13 bp, Artificial Sequence
  Oligonucleotide for detection of SNP TSC0012715
ttaggcgggagtg

SEQ ID NO: 42728 - DNA, 13 bp, Artificial Sequence
  Oligonucleotide for detection of SNP TSC0012715
cactcccgcctaa

SEQ ID NO: 42729 - DNA, 13 bp, Artificial Sequence
  Oligonucleotide for detection of SNP TSC0012716
gttatgaagaggg

SEQ ID NO: 42730 - DNA, 13 bp, Artificial Sequence
  Oligonucleotide for detection of SNP TSC0012716
ccctcttcataac

SEQ ID NO: 42731 - DNA, 13 bp, Artificial Sequence
  Oligonucleotide for detection of SNP TSC0012716
gttatggagaggg

SEQ ID NO: 42732 - DNA, 13 bp, Artificial Sequence
  Oligonucleotide for detection of SNP TSC0012716
ccctctccataac

SEQ ID NO: 42733 - DNA, 13 bp, Artificial Sequence
  Oligonucleotide for detection of SNP TSC0012717
gtagtgttgtagt

SEQ ID NO: 42734 - DNA, 13 bp, Artificial Sequence
  Oligonucleotide for detection of SNP TSC0012717
actacaacactac

SEQ ID NO: 42735 - DNA, 13 bp, Artificial Sequence
  Oligonucleotide for detection of SNP TSC0012717
gtagtggtgtagt

SEQ ID NO: 42736 - DNA, 13 bp, Artificial Sequence
  Oligonucleotide for detection of SNP TSC0012717
actacaccactac

SEQ ID NO: 42737 - DNA, 13 bp, Artificial Sequence
  Oligonucleotide for detection of SNP TSC0012717
gtagcgttgtagt

SEQ ID NO: 42738 - DNA, 13 bp, Artificial Sequence
  Oligonucleotide for detection of SNP TSC0012717
actacaacgctac

SEQ ID NO: 42739 - DNA, 13 bp, Artificial Sequence
  Oligonucleotide for detection of SNP TSC0012717
gtagcggtgtagt

SEQ ID NO: 42740 - DNA, 13 bp, Artificial Sequence
  Oligonucleotide for detection of SNP TSC0012717
actacaccgctac

SEQ ID NO: 42741 - DNA, 13 bp, Artificial Sequence
  Oligonucleotide for detection of SNP TSC0012717
attgtagtgttgy

SEQ ID NO: 42742 - DNA, 13 bp, Artificial Sequence
  Oligonucleotide for detection of SNP TSC0012717
rcaacactacaat

SEQ ID NO: 42743 - DNA, 13 bp, Artificial Sequence
  Oligonucleotide for detection of SNP TSC0012717
attgtattgttgy

SEQ ID NO: 42744 - DNA, 13 bp, Artificial Sequence
  Oligonucleotide for detection of SNP TSC0012717
rcaacaatacaat

SEQ ID NO: 42745 - DNA, 13 bp, Artificial Sequence
  Oligonucleotide for detection of SNP TSC0012717
attgtagcgttgy

SEQ ID NO: 42746 - DNA, 13 bp, Artificial Sequence
  Oligonucleotide for detection of SNP TSC0012717
rcaacgctacaat

SEQ ID NO: 42747 - DNA, 13 bp, Artificial Sequence
  Oligonucleotide for detection of SNP TSC0012717
attgtatcgttgy

SEQ ID NO: 42748 - DNA, 13 bp, Artificial Sequence
  Oligonucleotide for detection of SNP TSC0012717
rcaacgatacaat

SEQ ID NO: 42749 - DNA, 13 bp, Artificial Sequence
  Oligonucleotide for detection of SNP TSC0012718
agagttgagtata

SEQ ID NO: 42750 - DNA, 13 bp, Artificial Sequence
  Oligonucleotide for detection of SNP TSC0012718
tatactcaactct

SEQ ID NO: 42751 - DNA, 13 bp, Artificial Sequence
  Oligonucleotide for detection of SNP TSC0012718
agagttaagtata

SEQ ID NO: 42752 - DNA, 13 bp, Artificial Sequence
  Oligonucleotide for detection of SNP TSC0012718
tatacttaactct

SEQ ID NO: 42753 - DNA, 13 bp, Artificial Sequence
  Oligonucleotide for detection of SNP TSC0012722
gataagaggaaga

SEQ ID NO: 42754 - DNA, 13 bp, Artificial Sequence
  Oligonucleotide for detection of SNP TSC0012722
tcttcctcttatc

SEQ ID NO: 42755 - DNA, 13 bp, Artificial Sequence
  Oligonucleotide for detection of SNP TSC0012722
gataaggggaaga

SEQ ID NO: 42756 - DNA, 13 bp, Artificial Sequence
  Oligonucleotide for detection of SNP TSC0012722
tcttccccttatc

SEQ ID NO: 42757 - DNA, 13 bp, Artificial Sequence
  Oligonucleotide for detection of SNP TSC0012726
ggatgtagagagt

SEQ ID NO: 42758 - DNA, 13 bp, Artificial Sequence
  Oligonucleotide for detection of SNP TSC0012726
actctctacatcc

SEQ ID NO: 42759 - DNA, 13 bp, Artificial Sequence
  Oligonucleotide for detection of SNP TSC0012726
ggatgttgagagt

SEQ ID NO: 42760 - DNA, 13 bp, Artificial Sequence
  Oligonucleotide for detection of SNP TSC0012726
actctcaacatcc

SEQ ID NO: 42761 - DNA, 13 bp, Artificial Sequence
  Oligonucleotide for detection of SNP TSC0012726
ggatgtcgagagt

SEQ ID NO: 42762 - DNA, 13 bp, Artificial Sequence
  Oligonucleotide for detection of SNP TSC0012726
actctcgacatcc

SEQ ID NO: 42763 - DNA, 13 bp, Artificial Sequence
  Oligonucleotide for detection of SNP TSC0012726
attttttgtatty

SEQ ID NO: 42764 - DNA, 13 bp, Artificial Sequence
  Oligonucleotide for detection of SNP TSC0012726
raatacaaaaaat

SEQ ID NO: 42765 - DNA, 13 bp, Artificial Sequence
  Oligonucleotide for detection of SNP TSC0012726
atttttggtatty

SEQ ID NO: 42766 - DNA, 13 bp, Artificial Sequence
  Oligonucleotide for detection of SNP TSC0012726
raataccaaaaat

SEQ ID NO: 42767 - DNA, 13 bp, Artificial Sequence
  Oligonucleotide for detection of SNP TSC0012726
attttcggtatty

SEQ ID NO: 42768 - DNA, 13 bp, Artificial Sequence
  Oligonucleotide for detection of SNP TSC0012726
raataccgaaaat

SEQ ID NO: 42769 - DNA, 13 bp, Artificial Sequence
  Oligonucleotide for detection of SNP TSC0012727
tgtggtaattggy

SEQ ID NO: 42770 - DNA, 13 bp, Artificial Sequence
  Oligonucleotide for detection of SNP TSC0012727
rccaattaccaca

SEQ ID NO: 42771 - DNA, 13 bp, Artificial Sequence
  Oligonucleotide for detection of SNP TSC0012727
tgtggtgattggy

SEQ ID NO: 42772 - DNA, 13 bp, Artificial Sequence
  Oligonucleotide for detection of SNP TSC0012727
rccaatcaccaca

SEQ ID NO: 42773 - DNA, 13 bp, Artificial Sequence
  Oligonucleotide for detection of SNP TSC0012728
agtttatgagaag

SEQ ID NO: 42774 - DNA, 13 bp, Artificial Sequence
  Oligonucleotide for detection of SNP TSC0012728
cttctcataaact

SEQ ID NO: 42775 - DNA, 13 bp, Artificial Sequence
  Oligonucleotide for detection of SNP TSC0012728
agtttacgagaag

SEQ ID NO: 42776 - DNA, 13 bp, Artificial Sequence
  Oligonucleotide for detection of SNP TSC0012728
cttctcgtaaact

SEQ ID NO: 42777 - DNA, 13 bp, Artificial Sequence
  Oligonucleotide for detection of SNP TSC0012728
ttttttgtaagtt

SEQ ID NO: 42778 - DNA, 13 bp, Artificial Sequence
  Oligonucleotide for detection of SNP TSC0012728
aacttacaaaaaa

SEQ ID NO: 42779 - DNA, 13 bp, Artificial Sequence
  Oligonucleotide for detection of SNP TSC0012728
ttttttataagtt

SEQ ID NO: 42780 - DNA, 13 bp, Artificial Sequence
  Oligonucleotide for detection of SNP TSC0012728
aacttataaaaaa

SEQ ID NO: 42781 - DNA, 13 bp, Artificial Sequence
  Oligonucleotide for detection of SNP TSC0012728
tttttcgtaagtt

SEQ ID NO: 42782 - DNA, 13 bp, Artificial Sequence
  Oligonucleotide for detection of SNP TSC0012728
aacttacgaaaaa

SEQ ID NO: 42783 - DNA, 13 bp, Artificial Sequence
  Oligonucleotide for detection of SNP TSC0012729
ttattagagatgy

SEQ ID NO: 42784 - DNA, 13 bp, Artificial Sequence
  Oligonucleotide for detection of SNP TSC0012729
rcatctctaataa

SEQ ID NO: 42785 - DNA, 13 bp, Artificial Sequence
  Oligonucleotide for detection of SNP TSC0012729
ttattaaagatgy

SEQ ID NO: 42786 - DNA, 13 bp, Artificial Sequence
  Oligonucleotide for detection of SNP TSC0012729
rcatctttaataa

SEQ ID NO: 42787 - DNA, 13 bp, Artificial Sequence
  Oligonucleotide for detection of SNP TSC0012730
aatgtaaggtaga

SEQ ID NO: 42788 - DNA, 13 bp, Artificial Sequence
  Oligonucleotide for detection of SNP TSC0012730
tctaccttacatt

SEQ ID NO: 42789 - DNA, 13 bp, Artificial Sequence
  Oligonucleotide for detection of SNP TSC0012730
aatgtagggtaga

SEQ ID NO: 42790 - DNA, 13 bp, Artificial Sequence
  Oligonucleotide for detection of SNP TSC0012730
tctaccctacatt

SEQ ID NO: 42791 - DNA, 13 bp, Artificial Sequence
  Oligonucleotide for detection of SNP TSC0012732
ttgtaaagaattt

SEQ ID NO: 42792 - DNA, 13 bp, Artificial Sequence
  Oligonucleotide for detection of SNP TSC0012732
aaattctttacaa

SEQ ID NO: 42793 - DNA, 13 bp, Artificial Sequence
  Oligonucleotide for detection of SNP TSC0012732
ttgtaaggaattt

SEQ ID NO: 42794 - DNA, 13 bp, Artificial Sequence
  Oligonucleotide for detection of SNP TSC0012732
aaattccttacaa

SEQ ID NO: 42795 - DNA, 13 bp, Artificial Sequence
  Oligonucleotide for detection of SNP TSC0012733
atgtatatagtay

SEQ ID NO: 42796 - DNA, 13 bp, Artificial Sequence
  Oligonucleotide for detection of SNP TSC0012733
rtactatatacat

SEQ ID NO: 42797 - DNA, 13 bp, Artificial Sequence
  Oligonucleotide for detection of SNP TSC0012733
atgtatgtagtay

SEQ ID NO: 42798 - DNA, 13 bp, Artificial Sequence
  Oligonucleotide for detection of SNP TSC0012733
rtactacatacat

SEQ ID NO: 42799 - DNA, 13 bp, Artificial Sequence
  Oligonucleotide for detection of SNP TSC0012733
atgtacgtagtay

SEQ ID NO: 42800 - DNA, 13 bp, Artificial Sequence
  Oligonucleotide for detection of SNP TSC0012733
rtactacgtacat

SEQ ID NO: 42801 - DNA, 13 bp, Artificial Sequence
  Oligonucleotide for detection of SNP TSC0012733
gtgttatgtgtat

SEQ ID NO: 42802 - DNA, 13 bp, Artificial Sequence
  Oligonucleotide for detection of SNP TSC0012733
atacacataacac

SEQ ID NO: 42803 - DNA, 13 bp, Artificial Sequence
  Oligonucleotide for detection of SNP TSC0012733
gtgttacgtgtat

SEQ ID NO: 42804 - DNA, 13 bp, Artificial Sequence
  Oligonucleotide for detection of SNP TSC0012733
atacacgtaacac

SEQ ID NO: 42805 - DNA, 13 bp, Artificial Sequence
  Oligonucleotide for detection of SNP TSC0012734
atttgggggtagy

SEQ ID NO: 42806 - DNA, 13 bp, Artificial Sequence
  Oligonucleotide for detection of SNP TSC0012734
rctacccccaaat

SEQ ID NO: 42807 - DNA, 13 bp, Artificial Sequence
  Oligonucleotide for detection of SNP TSC0012734
atttggtggtagy

SEQ ID NO: 42808 - DNA, 13 bp, Artificial Sequence
  Oligonucleotide for detection of SNP TSC0012734
rctaccaccaaat

SEQ ID NO: 42809 - DNA, 13 bp, Artificial Sequence
  Oligonucleotide for detection of SNP TSC0012734
gttgtttttaggt

SEQ ID NO: 42810 - DNA, 13 bp, Artificial Sequence
  Oligonucleotide for detection of SNP TSC0012734
acctaaaaacaac

SEQ ID NO: 42811 - DNA, 13 bp, Artificial Sequence
  Oligonucleotide for detection of SNP TSC0012734
gttgttattaggt

SEQ ID NO: 42812 - DNA, 13 bp, Artificial Sequence
  Oligonucleotide for detection of SNP TSC0012734
acctaataacaac

SEQ ID NO: 42813 - DNA, 13 bp, Artificial Sequence
  Oligonucleotide for detection of SNP TSC0012736
atttataagtgta

SEQ ID NO: 42814 - DNA, 13 bp, Artificial Sequence
  Oligonucleotide for detection of SNP TSC0012736
tacacttataaat

SEQ ID NO: 42815 - DNA, 13 bp, Artificial Sequence
  Oligonucleotide for detection of SNP TSC0012736
atttatgagtgta

SEQ ID NO: 42816 - DNA, 13 bp, Artificial Sequence
  Oligonucleotide for detection of SNP TSC0012736
tacactcataaat

SEQ ID NO: 42817 - DNA, 13 bp, Artificial Sequence
  Oligonucleotide for detection of SNP TSC0012736
atttacgagtgta

SEQ ID NO: 42818 - DNA, 13 bp, Artificial Sequence
  Oligonucleotide for detection of SNP TSC0012736
tacactcgtaaat

SEQ ID NO: 42819 - DNA, 13 bp, Artificial Sequence
  Oligonucleotide for detection of SNP TSC0012736
tgtatttgtgaat

SEQ ID NO: 42820 - DNA, 13 bp, Artificial Sequence
  Oligonucleotide for detection of SNP TSC0012736
attcacaaataca

SEQ ID NO: 42821 - DNA, 13 bp, Artificial Sequence
  Oligonucleotide for detection of SNP TSC0012736
tgtattcgtgaat

SEQ ID NO: 42822 - DNA, 13 bp, Artificial Sequence
  Oligonucleotide for detection of SNP TSC0012736
attcacgaataca

SEQ ID NO: 42823 - DNA, 13 bp, Artificial Sequence
  Oligonucleotide for detection of SNP TSC0012737
ggagtttaagaty

SEQ ID NO: 42824 - DNA, 13 bp, Artificial Sequence
  Oligonucleotide for detection of SNP TSC0012737
ratcttaaactcc

SEQ ID NO: 42825 - DNA, 13 bp, Artificial Sequence
  Oligonucleotide for detection of SNP TSC0012737
ggagttgaagaty

SEQ ID NO: 42826 - DNA, 13 bp, Artificial Sequence
  Oligonucleotide for detection of SNP TSC0012737
ratcttcaactcc

SEQ ID NO: 42827 - DNA, 13 bp, Artificial Sequence
  Oligonucleotide for detection of SNP TSC0012738
taatttgtgggty

SEQ ID NO: 42828 - DNA, 13 bp, Artificial Sequence
  Oligonucleotide for detection of SNP TSC0012738
racccacaaatta

SEQ ID NO: 42829 - DNA, 13 bp, Artificial Sequence
  Oligonucleotide for detection of SNP TSC0012738
taatttatgggty

SEQ ID NO: 42830 - DNA, 13 bp, Artificial Sequence
  Oligonucleotide for detection of SNP TSC0012738
racccataaatta

SEQ ID NO: 42831 - DNA, 13 bp, Artificial Sequence
  Oligonucleotide for detection of SNP TSC0012738
taattcgtgggty

SEQ ID NO: 42832 - DNA, 13 bp, Artificial Sequence
  Oligonucleotide for detection of SNP TSC0012738
racccacgaatta

SEQ ID NO: 42833 - DNA, 13 bp, Artificial Sequence
  Oligonucleotide for detection of SNP TSC0012738
taatttacgggty

SEQ ID NO: 42834 - DNA, 13 bp, Artificial Sequence
  Oligonucleotide for detection of SNP TSC0012738
racccgtaaatta

SEQ ID NO: 42835 - DNA, 13 bp, Artificial Sequence
  Oligonucleotide for detection of SNP TSC0012738
taatttgcgggty

SEQ ID NO: 42836 - DNA, 13 bp, Artificial Sequence
  Oligonucleotide for detection of SNP TSC0012738
racccgcaaatta

SEQ ID NO: 42837 - DNA, 13 bp, Artificial Sequence
  Oligonucleotide for detection of SNP TSC0012738
taattcgcgggty

SEQ ID NO: 42838 - DNA, 13 bp, Artificial Sequence
  Oligonucleotide for detection of SNP TSC0012738
racccgcgaatta

SEQ ID NO: 42839 - DNA, 13 bp, Artificial Sequence
  Oligonucleotide for detection of SNP TSC0012738
gatttgtgagtta

SEQ ID NO: 42840 - DNA, 13 bp, Artificial Sequence
  Oligonucleotide for detection of SNP TSC0012738
taactcacaaatc

SEQ ID NO: 42841 - DNA, 13 bp, Artificial Sequence
  Oligonucleotide for detection of SNP TSC0012738
gattcgtgagtta

SEQ ID NO: 42842 - DNA, 13 bp, Artificial Sequence
  Oligonucleotide for detection of SNP TSC0012738
taactcacgaatc

SEQ ID NO: 42843 - DNA, 13 bp, Artificial Sequence
  Oligonucleotide for detection of SNP TSC0012738
gatttgcgagtta

SEQ ID NO: 42844 - DNA, 13 bp, Artificial Sequence
  Oligonucleotide for detection of SNP TSC0012738
taactcgcaaatc

SEQ ID NO: 42845 - DNA, 13 bp, Artificial Sequence
  Oligonucleotide for detection of SNP TSC0012738
gattcgcgagtta

SEQ ID NO: 42846 - DNA, 13 bp, Artificial Sequence
  Oligonucleotide for detection of SNP TSC0012738
taactcgcgaatc

SEQ ID NO: 42847 - DNA, 13 bp, Artificial Sequence
  Oligonucleotide for detection of SNP TSC0012739
tgggttatgaggy

SEQ ID NO: 42848 - DNA, 13 bp, Artificial Sequence
  Oligonucleotide for detection of SNP TSC0012739
rcctcataaccca

SEQ ID NO: 42849 - DNA, 13 bp, Artificial Sequence
  Oligonucleotide for detection of SNP TSC0012739
tgggttttgaggy

SEQ ID NO: 42850 - DNA, 13 bp, Artificial Sequence
  Oligonucleotide for detection of SNP TSC0012739
rcctcaaaaccca

SEQ ID NO: 42851 - DNA, 13 bp, Artificial Sequence
  Oligonucleotide for detection of SNP TSC0012739
cgggttatgaggy

SEQ ID NO: 42852 - DNA, 13 bp, Artificial Sequence
  Oligonucleotide for detection of SNP TSC0012739
rcctcataacccg

SEQ ID NO: 42853 - DNA, 13 bp, Artificial Sequence
  Oligonucleotide for detection of SNP TSC0012739
cgggttttgaggy

SEQ ID NO: 42854 - DNA, 13 bp, Artificial Sequence
  Oligonucleotide for detection of SNP TSC0012739
rcctcaaaacccg

SEQ ID NO: 42855 - DNA, 13 bp, Artificial Sequence
  Oligonucleotide for detection of SNP TSC0012739
gttttatgatttg

SEQ ID NO: 42856 - DNA, 13 bp, Artificial Sequence
  Oligonucleotide for detection of SNP TSC0012739
caaatcataaaac

SEQ ID NO: 42857 - DNA, 13 bp, Artificial Sequence
  Oligonucleotide for detection of SNP TSC0012739
gttttaagatttg

SEQ ID NO: 42858 - DNA, 13 bp, Artificial Sequence
  Oligonucleotide for detection of SNP TSC0012739
caaatcttaaaac

SEQ ID NO: 42859 - DNA, 13 bp, Artificial Sequence
  Oligonucleotide for detection of SNP TSC0012739
gttttatgattcg

SEQ ID NO: 42860 - DNA, 13 bp, Artificial Sequence
  Oligonucleotide for detection of SNP TSC0012739
cgaatcataaaac

SEQ ID NO: 42861 - DNA, 13 bp, Artificial Sequence
  Oligonucleotide for detection of SNP TSC0012739
gttttaagattcg

SEQ ID NO: 42862 - DNA, 13 bp, Artificial Sequence
  Oligonucleotide for detection of SNP TSC0012739
cgaatcttaaaac

SEQ ID NO: 42863 - DNA, 13 bp, Artificial Sequence
  Oligonucleotide for detection of SNP TSC0012740
agaaagtgtgtgg

SEQ ID NO: 42864 - DNA, 13 bp, Artificial Sequence
  Oligonucleotide for detection of SNP TSC0012740
ccacacactttct

SEQ ID NO: 42865 - DNA, 13 bp, Artificial Sequence
  Oligonucleotide for detection of SNP TSC0012740
agaaagcgtgtgg

SEQ ID NO: 42866 - DNA, 13 bp, Artificial Sequence
  Oligonucleotide for detection of SNP TSC0012740
ccacacgctttct

SEQ ID NO: 42867 - DNA, 13 bp, Artificial Sequence
  Oligonucleotide for detection of SNP TSC0012740
agaaagtgcgtgg

SEQ ID NO: 42868 - DNA, 13 bp, Artificial Sequence
  Oligonucleotide for detection of SNP TSC0012740
ccacgcactttct

SEQ ID NO: 42869 - DNA, 13 bp, Artificial Sequence
  Oligonucleotide for detection of SNP TSC0012740
agaaagtgtgcgg

SEQ ID NO: 42870 - DNA, 13 bp, Artificial Sequence
  Oligonucleotide for detection of SNP TSC0012740
ccgcacactttct

SEQ ID NO: 42871 - DNA, 13 bp, Artificial Sequence
  Oligonucleotide for detection of SNP TSC0012740
agaaagtgcgcgg

SEQ ID NO: 42872 - DNA, 13 bp, Artificial Sequence
  Oligonucleotide for detection of SNP TSC0012740
ccgcgcactttct

SEQ ID NO: 42873 - DNA, 13 bp, Artificial Sequence
  Oligonucleotide for detection of SNP TSC0012740
agaaagcgcgtgg

SEQ ID NO: 42874 - DNA, 13 bp, Artificial Sequence
  Oligonucleotide for detection of SNP TSC0012740
ccacgcgctttct

SEQ ID NO: 42875 - DNA, 13 bp, Artificial Sequence
  Oligonucleotide for detection of SNP TSC0012740
agaaagcgtgcgg

SEQ ID NO: 42876 - DNA, 13 bp, Artificial Sequence
  Oligonucleotide for detection of SNP TSC0012740
ccgcacgctttct

SEQ ID NO: 42877 - DNA, 13 bp, Artificial Sequence
  Oligonucleotide for detection of SNP TSC0012740
agaaagcgcgcgg

SEQ ID NO: 42878 - DNA, 13 bp, Artificial Sequence
  Oligonucleotide for detection of SNP TSC0012740
ccgcgcgctttct

SEQ ID NO: 42879 - DNA, 13 bp, Artificial Sequence
  Oligonucleotide for detection of SNP TSC0012740
ttgtgtgtttttt

SEQ ID NO: 42880 - DNA, 13 bp, Artificial Sequence
  Oligonucleotide for detection of SNP TSC0012740
aaaaaacacacaa

SEQ ID NO: 42881 - DNA, 13 bp, Artificial Sequence
  Oligonucleotide for detection of SNP TSC0012740
ttgtgtatttttt

SEQ ID NO: 42882 - DNA, 13 bp, Artificial Sequence
  Oligonucleotide for detection of SNP TSC0012740
aaaaaatacacaa

SEQ ID NO: 42883 - DNA, 13 bp, Artificial Sequence
  Oligonucleotide for detection of SNP TSC0012740
tcgtgtgtttttt

SEQ ID NO: 42884 - DNA, 13 bp, Artificial Sequence
  Oligonucleotide for detection of SNP TSC0012740
aaaaaacacacga

SEQ ID NO: 42885 - DNA, 13 bp, Artificial Sequence
  Oligonucleotide for detection of SNP TSC0012740
tcgtgtatttttt

SEQ ID NO: 42886 - DNA, 13 bp, Artificial Sequence
  Oligonucleotide for detection of SNP TSC0012740
aaaaaatacacga

SEQ ID NO: 42887 - DNA, 13 bp, Artificial Sequence
  Oligonucleotide for detection of SNP TSC0012740
ttgcgtgtttttt

SEQ ID NO: 42888 - DNA, 13 bp, Artificial Sequence
  Oligonucleotide for detection of SNP TSC0012740
aaaaaacacgcaa

SEQ ID NO: 42889 - DNA, 13 bp, Artificial Sequence
  Oligonucleotide for detection of SNP TSC0012740
ttgcgtatttttt

SEQ ID NO: 42890 - DNA, 13 bp, Artificial Sequence
  Oligonucleotide for detection of SNP TSC0012740
aaaaaatacgcaa

SEQ ID NO: 42891 - DNA, 13 bp, Artificial Sequence
  Oligonucleotide for detection of SNP TSC0012740
ttgtgcgtttttt

SEQ ID NO: 42892 - DNA, 13 bp, Artificial Sequence
  Oligonucleotide for detection of SNP TSC0012740
aaaaaacgcacaa

SEQ ID NO: 42893 - DNA, 13 bp, Artificial Sequence
  Oligonucleotide for detection of SNP TSC0012740
tcgcgtatttttt

SEQ ID NO: 42894 - DNA, 13 bp, Artificial Sequence
  Oligonucleotide for detection of SNP TSC0012740
aaaaaatacgcga

SEQ ID NO: 42895 - DNA, 13 bp, Artificial Sequence
  Oligonucleotide for detection of SNP TSC0012740
tcgcgtgtttttt

SEQ ID NO: 42896 - DNA, 13 bp, Artificial Sequence
  Oligonucleotide for detection of SNP TSC0012740
aaaaaacacgcga

SEQ ID NO: 42897 - DNA, 13 bp, Artificial Sequence
  Oligonucleotide for detection of SNP TSC0012740
tcgtgcgtttttt

SEQ ID NO: 42898 - DNA, 13 bp, Artificial Sequence
  Oligonucleotide for detection of SNP TSC0012740
aaaaaacgcacga

SEQ ID NO: 42899 - DNA, 13 bp, Artificial Sequence
  Oligonucleotide for detection of SNP TSC0012740
ttgcgcgtttttt

SEQ ID NO: 42900 - DNA, 13 bp, Artificial Sequence
  Oligonucleotide for detection of SNP TSC0012740
aaaaaacgcgcaa

SEQ ID NO: 42901 - DNA, 13 bp, Artificial Sequence
  Oligonucleotide for detection of SNP TSC0012740
tcgcgcgtttttt

SEQ ID NO: 42902 - DNA, 13 bp, Artificial Sequence
  Oligonucleotide for detection of SNP TSC0012740
aaaaaacgcgcga

SEQ ID NO: 42903 - DNA, 13 bp, Artificial Sequence
  Oligonucleotide for detection of SNP TSC0012741
aaaagtgtattgy

SEQ ID NO: 42904 - DNA, 13 bp, Artificial Sequence
  Oligonucleotide for detection of SNP TSC0012741
rcaatacactttt

SEQ ID NO: 42905 - DNA, 13 bp, Artificial Sequence
  Oligonucleotide for detection of SNP TSC0012741
aaaagtttattgy

SEQ ID NO: 42906 - DNA, 13 bp, Artificial Sequence
  Oligonucleotide for detection of SNP TSC0012741
rcaataaactttt

SEQ ID NO: 42907 - DNA, 13 bp, Artificial Sequence
  Oligonucleotide for detection of SNP TSC0012741
gtagtatattttt

SEQ ID NO: 42908 - DNA, 13 bp, Artificial Sequence
  Oligonucleotide for detection of SNP TSC0012741
aaaaatatactac

SEQ ID NO: 42909 - DNA, 13 bp, Artificial Sequence
  Oligonucleotide for detection of SNP TSC0012741
gtagtaaattttt

SEQ ID NO: 42910 - DNA, 13 bp, Artificial Sequence
  Oligonucleotide for detection of SNP TSC0012741
aaaaatttactac

SEQ ID NO: 42911 - DNA, 13 bp, Artificial Sequence
  Oligonucleotide for detection of SNP TSC0012744
ttttatgaaaaaa

SEQ ID NO: 42912 - DNA, 13 bp, Artificial Sequence
  Oligonucleotide for detection of SNP TSC0012744
ttttttcataaaa

SEQ ID NO: 42913 - DNA, 13 bp, Artificial Sequence
  Oligonucleotide for detection of SNP TSC0012744
ttttattaaaaaa

SEQ ID NO: 42914 - DNA, 13 bp, Artificial Sequence
  Oligonucleotide for detection of SNP TSC0012744
ttttttaataaaa

SEQ ID NO: 42915 - DNA, 13 bp, Artificial Sequence
  Oligonucleotide for detection of SNP TSC0012744
tttttttatagag

SEQ ID NO: 42916 - DNA, 13 bp, Artificial Sequence
  Oligonucleotide for detection of SNP TSC0012744
ctctataaaaaaa

SEQ ID NO: 42917 - DNA, 13 bp, Artificial Sequence
  Oligonucleotide for detection of SNP TSC0012744
ttttttaatagag

SEQ ID NO: 42918 - DNA, 13 bp, Artificial Sequence
  Oligonucleotide for detection of SNP TSC0012744
ctctattaaaaaa

SEQ ID NO: 42919 - DNA, 13 bp, Artificial Sequence
  Oligonucleotide for detection of SNP TSC0012745
aggaagtgttttt

SEQ ID NO: 42920 - DNA, 13 bp, Artificial Sequence
  Oligonucleotide for detection of SNP TSC0012745
aaaaacacttcct

SEQ ID NO: 42921 - DNA, 13 bp, Artificial Sequence
  Oligonucleotide for detection of SNP TSC0012745
aggaagggttttt

SEQ ID NO: 42922 - DNA, 13 bp, Artificial Sequence
  Oligonucleotide for detection of SNP TSC0012745
aaaaacccttcct

SEQ ID NO: 42923 - DNA, 13 bp, Artificial Sequence
  Oligonucleotide for detection of SNP TSC0012745
aggaagcgttttt

SEQ ID NO: 42924 - DNA, 13 bp, Artificial Sequence
  Oligonucleotide for detection of SNP TSC0012745
aaaaacgcttcct

SEQ ID NO: 42925 - DNA, 13 bp, Artificial Sequence
  Oligonucleotide for detection of SNP TSC0012745
aagagtgtttttt

SEQ ID NO: 42926 - DNA, 13 bp, Artificial Sequence
  Oligonucleotide for detection of SNP TSC0012745
aaaaaacactctt

SEQ ID NO: 42927 - DNA, 13 bp, Artificial Sequence
  Oligonucleotide for detection of SNP TSC0012745
aagagtttttttt

SEQ ID NO: 42928 - DNA, 13 bp, Artificial Sequence
  Oligonucleotide for detection of SNP TSC0012745
aaaaaaaactctt

SEQ ID NO: 42929 - DNA, 13 bp, Artificial Sequence
  Oligonucleotide for detection of SNP TSC0012745
aagagcgtttttt

SEQ ID NO: 42930 - DNA, 13 bp, Artificial Sequence
  Oligonucleotide for detection of SNP TSC0012745
aaaaaacgctctt

SEQ ID NO: 42931 - DNA, 13 bp, Artificial Sequence
  Oligonucleotide for detection of SNP TSC0012747
ggaatagtgttty

SEQ ID NO: 42932 - DNA, 13 bp, Artificial Sequence
  Oligonucleotide for detection of SNP TSC0012747
raaacactattcc

SEQ ID NO: 42933 - DNA, 13 bp, Artificial Sequence
  Oligonucleotide for detection of SNP TSC0012747
ggaataatgttty

SEQ ID NO: 42934 - DNA, 13 bp, Artificial Sequence
  Oligonucleotide for detection of SNP TSC0012747
raaacattattcc

SEQ ID NO: 42935 - DNA, 13 bp, Artificial Sequence
  Oligonucleotide for detection of SNP TSC0012749
aatagaatagata

SEQ ID NO: 42936 - DNA, 13 bp, Artificial Sequence
  Oligonucleotide for detection of SNP TSC0012749
tatctattctatt

SEQ ID NO: 42937 - DNA, 13 bp, Artificial Sequence
  Oligonucleotide for detection of SNP TSC0012749
aatagagtagata

SEQ ID NO: 42938 - DNA, 13 bp, Artificial Sequence
  Oligonucleotide for detection of SNP TSC0012749
tatctactctatt

SEQ ID NO: 42939 - DNA, 13 bp, Artificial Sequence
  Oligonucleotide for detection of SNP TSC0012750
gggtttgtttatt

SEQ ID NO: 42940 - DNA, 13 bp, Artificial Sequence
  Oligonucleotide for detection of SNP TSC0012750
aataaacaaaccc

SEQ ID NO: 42941 - DNA, 13 bp, Artificial Sequence
  Oligonucleotide for detection of SNP TSC0012750
gggtttatttatt

SEQ ID NO: 42942 - DNA, 13 bp, Artificial Sequence
  Oligonucleotide for detection of SNP TSC0012750
aataaataaaccc

SEQ ID NO: 42943 - DNA, 13 bp, Artificial Sequence
  Oligonucleotide for detection of SNP TSC0012753
tgtttttgtgtga

SEQ ID NO: 42944 - DNA, 13 bp, Artificial Sequence
  Oligonucleotide for detection of SNP TSC0012753
tcacacaaaaaca

SEQ ID NO: 42945 - DNA, 13 bp, Artificial Sequence
  Oligonucleotide for detection of SNP TSC0012753
tgttttcgtgtga

SEQ ID NO: 42946 - DNA, 13 bp, Artificial Sequence
  Oligonucleotide for detection of SNP TSC0012753
tcacacgaaaaca

SEQ ID NO: 42947 - DNA, 13 bp, Artificial Sequence
  Oligonucleotide for detection of SNP TSC0012753
ttatatggaagta

SEQ ID NO: 42948 - DNA, 13 bp, Artificial Sequence
  Oligonucleotide for detection of SNP TSC0012753
tacttccatataa

SEQ ID NO: 42949 - DNA, 13 bp, Artificial Sequence
  Oligonucleotide for detection of SNP TSC0012753
ttatatagaagta

SEQ ID NO: 42950 - DNA, 13 bp, Artificial Sequence
  Oligonucleotide for detection of SNP TSC0012753
tacttctatataa

SEQ ID NO: 42951 - DNA, 13 bp, Artificial Sequence
  Oligonucleotide for detection of SNP TSC0012753
ttatacggaagta

SEQ ID NO: 42952 - DNA, 13 bp, Artificial Sequence
  Oligonucleotide for detection of SNP TSC0012753
tacttccgtataa

SEQ ID NO: 42953 - DNA, 13 bp, Artificial Sequence
  Oligonucleotide for detection of SNP TSC0012754
gtaattggtgatg

SEQ ID NO: 42954 - DNA, 13 bp, Artificial Sequence
  Oligonucleotide for detection of SNP TSC0012754
catcaccaattac

SEQ ID NO: 42955 - DNA, 13 bp, Artificial Sequence
  Oligonucleotide for detection of SNP TSC0012754
gtaatttgtgatg

SEQ ID NO: 42956 - DNA, 13 bp, Artificial Sequence
  Oligonucleotide for detection of SNP TSC0012754
catcacaaattac

SEQ ID NO: 42957 - DNA, 13 bp, Artificial Sequence
  Oligonucleotide for detection of SNP TSC0012754
gtaatcggtgatg

SEQ ID NO: 42958 - DNA, 13 bp, Artificial Sequence
  Oligonucleotide for detection of SNP TSC0012754
catcaccgattac

SEQ ID NO: 42959 - DNA, 13 bp, Artificial Sequence
  Oligonucleotide for detection of SNP TSC0012754
tattattggttgy

SEQ ID NO: 42960 - DNA, 13 bp, Artificial Sequence
  Oligonucleotide for detection of SNP TSC0012754
rcaaccaataata

SEQ ID NO: 42961 - DNA, 13 bp, Artificial Sequence
  Oligonucleotide for detection of SNP TSC0012754
tattataggttgy

SEQ ID NO: 42962 - DNA, 13 bp, Artificial Sequence
  Oligonucleotide for detection of SNP TSC0012754
rcaacctataata

SEQ ID NO: 42963 - DNA, 13 bp, Artificial Sequence
  Oligonucleotide for detection of SNP TSC0012754
tattatcggttgy

SEQ ID NO: 42964 - DNA, 13 bp, Artificial Sequence
  Oligonucleotide for detection of SNP TSC0012754
rcaaccgataata

SEQ ID NO: 42965 - DNA, 13 bp, Artificial Sequence
  Oligonucleotide for detection of SNP TSC0012755
tagattagtagtg

SEQ ID NO: 42966 - DNA, 13 bp, Artificial Sequence
  Oligonucleotide for detection of SNP TSC0012755
cactactaatcta

SEQ ID NO: 42967 - DNA, 13 bp, Artificial Sequence
  Oligonucleotide for detection of SNP TSC0012755
tagatttgtagtg

SEQ ID NO: 42968 - DNA, 13 bp, Artificial Sequence
  Oligonucleotide for detection of SNP TSC0012755
cactacaaatcta

SEQ ID NO: 42969 - DNA, 13 bp, Artificial Sequence
  Oligonucleotide for detection of SNP TSC0012755
tagattcgtagtg

SEQ ID NO: 42970 - DNA, 13 bp, Artificial Sequence
  Oligonucleotide for detection of SNP TSC0012755
cactacgaatcta

SEQ ID NO: 42971 - DNA, 13 bp, Artificial Sequence
  Oligonucleotide for detection of SNP TSC0012755
tattgttaattta

SEQ ID NO: 42972 - DNA, 13 bp, Artificial Sequence
  Oligonucleotide for detection of SNP TSC0012755
taaattaacaata

SEQ ID NO: 42973 - DNA, 13 bp, Artificial Sequence
  Oligonucleotide for detection of SNP TSC0012755
tattgtgaattta

SEQ ID NO: 42974 - DNA, 13 bp, Artificial Sequence
  Oligonucleotide for detection of SNP TSC0012755
taaattcacaata

SEQ ID NO: 42975 - DNA, 13 bp, Artificial Sequence
  Oligonucleotide for detection of SNP TSC0012755
tattgcgaattta

SEQ ID NO: 42976 - DNA, 13 bp, Artificial Sequence
  Oligonucleotide for detection of SNP TSC0012755
taaattcgcaata

SEQ ID NO: 42977 - DNA, 13 bp, Artificial Sequence
  Oligonucleotide for detection of SNP TSC0012756
ttttgagggagty

SEQ ID NO: 42978 - DNA, 13 bp, Artificial Sequence
  Oligonucleotide for detection of SNP TSC0012756
ractccctcaaaa

SEQ ID NO: 42979 - DNA, 13 bp, Artificial Sequence
  Oligonucleotide for detection of SNP TSC0012756
ttttgatggagty

SEQ ID NO: 42980 - DNA, 13 bp, Artificial Sequence
  Oligonucleotide for detection of SNP TSC0012756
ractccatcaaaa

SEQ ID NO: 42981 - DNA, 13 bp, Artificial Sequence
  Oligonucleotide for detection of SNP TSC0012756
gatttttttaaga

SEQ ID NO: 42982 - DNA, 13 bp, Artificial Sequence
  Oligonucleotide for detection of SNP TSC0012756
tcttaaaaaaatc

SEQ ID NO: 42983 - DNA, 13 bp, Artificial Sequence
  Oligonucleotide for detection of SNP TSC0012756
gattttattaaga

SEQ ID NO: 42984 - DNA, 13 bp, Artificial Sequence
  Oligonucleotide for detection of SNP TSC0012756
tcttaataaaatc

SEQ ID NO: 42985 - DNA, 13 bp, Artificial Sequence
  Oligonucleotide for detection of SNP TSC0012757
tgagagtgtaggg

SEQ ID NO: 42986 - DNA, 13 bp, Artificial Sequence
  Oligonucleotide for detection of SNP TSC0012757
ccctacactctca

SEQ ID NO: 42987 - DNA, 13 bp, Artificial Sequence
  Oligonucleotide for detection of SNP TSC0012757
tgagagcgtaggg

SEQ ID NO: 42988 - DNA, 13 bp, Artificial Sequence
  Oligonucleotide for detection of SNP TSC0012757
ccctacgctctca

SEQ ID NO: 42989 - DNA, 13 bp, Artificial Sequence
  Oligonucleotide for detection of SNP TSC0012758
tttaaatgttgty

SEQ ID NO: 42990 - DNA, 13 bp, Artificial Sequence
  Oligonucleotide for detection of SNP TSC0012758
racaacatttaaa

SEQ ID NO: 42991 - DNA, 13 bp, Artificial Sequence
  Oligonucleotide for detection of SNP TSC0012758
tttaaacgttgty

SEQ ID NO: 42992 - DNA, 13 bp, Artificial Sequence
  Oligonucleotide for detection of SNP TSC0012758
racaacgtttaaa

SEQ ID NO: 42993 - DNA, 13 bp, Artificial Sequence
  Oligonucleotide for detection of SNP TSC0012758
ggtaatgtttgaa

SEQ ID NO: 42994 - DNA, 13 bp, Artificial Sequence
  Oligonucleotide for detection of SNP TSC0012758
ttcaaacattacc

SEQ ID NO: 42995 - DNA, 13 bp, Artificial Sequence
  Oligonucleotide for detection of SNP TSC0012758
ggtaatatttgaa

SEQ ID NO: 42996 - DNA, 13 bp, Artificial Sequence
  Oligonucleotide for detection of SNP TSC0012758
ttcaaatattacc

SEQ ID NO: 42997 - DNA, 13 bp, Artificial Sequence
  Oligonucleotide for detection of SNP TSC0012758
ggtaacgtttgaa

SEQ ID NO: 42998 - DNA, 13 bp, Artificial Sequence
  Oligonucleotide for detection of SNP TSC0012758
ttcaaacgttacc

SEQ ID NO: 42999 - DNA, 13 bp, Artificial Sequence
  Oligonucleotide for detection of SNP TSC0012760
atgaagtaattat

SEQ ID NO: 43000 - DNA, 13 bp, Artificial Sequence
  Oligonucleotide for detection of SNP TSC0012760
ataattacttcat

SEQ ID NO: 43001 - DNA, 13 bp, Artificial Sequence
  Oligonucleotide for detection of SNP TSC0012760
atgaagaaattat

SEQ ID NO: 43002 - DNA, 13 bp, Artificial Sequence
  Oligonucleotide for detection of SNP TSC0012760
ataatttcttcat

SEQ ID NO: 43003 - DNA, 13 bp, Artificial Sequence
  Oligonucleotide for detection of SNP TSC0012763
ggattagtattgy

SEQ ID NO: 43004 - DNA, 13 bp, Artificial Sequence
  Oligonucleotide for detection of SNP TSC0012763
rcaatactaatcc

SEQ ID NO: 43005 - DNA, 13 bp, Artificial Sequence
  Oligonucleotide for detection of SNP TSC0012763
ggattaatattgy

SEQ ID NO: 43006 - DNA, 13 bp, Artificial Sequence
  Oligonucleotide for detection of SNP TSC0012763
rcaatattaatcc

SEQ ID NO: 43007 - DNA, 13 bp, Artificial Sequence
  Oligonucleotide for detection of SNP TSC0012765
atatatagtttgt

SEQ ID NO: 43008 - DNA, 13 bp, Artificial Sequence
  Oligonucleotide for detection of SNP TSC0012765
acaaactatatat

SEQ ID NO: 43009 - DNA, 13 bp, Artificial Sequence
  Oligonucleotide for detection of SNP TSC0012765
atatattgtttgt

SEQ ID NO: 43010 - DNA, 13 bp, Artificial Sequence
  Oligonucleotide for detection of SNP TSC0012765
acaaacaatatat

SEQ ID NO: 43011 - DNA, 13 bp, Artificial Sequence
  Oligonucleotide for detection of SNP TSC0012765
ataagttgtgtgt

SEQ ID NO: 43012 - DNA, 13 bp, Artificial Sequence
  Oligonucleotide for detection of SNP TSC0012765
acacacaacttat

SEQ ID NO: 43013 - DNA, 13 bp, Artificial Sequence
  Oligonucleotide for detection of SNP TSC0012765
ataagtagtgtgt

SEQ ID NO: 43014 - DNA, 13 bp, Artificial Sequence
  Oligonucleotide for detection of SNP TSC0012765
acacactacttat

SEQ ID NO: 43015 - DNA, 13 bp, Artificial Sequence
  Oligonucleotide for detection of SNP TSC0012766
ttagatggaaatg

SEQ ID NO: 43016 - DNA, 13 bp, Artificial Sequence
  Oligonucleotide for detection of SNP TSC0012766
catttccatctaa

SEQ ID NO: 43017 - DNA, 13 bp, Artificial Sequence
  Oligonucleotide for detection of SNP TSC0012766
ttagatagaaatg

SEQ ID NO: 43018 - DNA, 13 bp, Artificial Sequence
  Oligonucleotide for detection of SNP TSC0012766
catttctatctaa

SEQ ID NO: 43019 - DNA, 13 bp, Artificial Sequence
  Oligonucleotide for detection of SNP TSC0012766
ttagacggaaatg

SEQ ID NO: 43020 - DNA, 13 bp, Artificial Sequence
  Oligonucleotide for detection of SNP TSC0012766
catttccgtctaa

SEQ ID NO: 43021 - DNA, 13 bp, Artificial Sequence
  Oligonucleotide for detection of SNP TSC0012768
aataaagtaaaga

SEQ ID NO: 43022 - DNA, 13 bp, Artificial Sequence
  Oligonucleotide for detection of SNP TSC0012768
tctttactttatt

SEQ ID NO: 43023 - DNA, 13 bp, Artificial Sequence
  Oligonucleotide for detection of SNP TSC0012768
aataaaataaaga

SEQ ID NO: 43024 - DNA, 13 bp, Artificial Sequence
  Oligonucleotide for detection of SNP TSC0012768
tctttattttatt

SEQ ID NO: 43025 - DNA, 13 bp, Artificial Sequence
  Oligonucleotide for detection of SNP TSC0012769
aaaattatgaaaa

SEQ ID NO: 43026 - DNA, 13 bp, Artificial Sequence
  Oligonucleotide for detection of SNP TSC0012769
ttttcataatttt

SEQ ID NO: 43027 - DNA, 13 bp, Artificial Sequence
  Oligonucleotide for detection of SNP TSC0012769
aaaattgtgaaaa

SEQ ID NO: 43028 - DNA, 13 bp, Artificial Sequence
  Oligonucleotide for detection of SNP TSC0012769
ttttcacaatttt

SEQ ID NO: 43029 - DNA, 13 bp, Artificial Sequence
  Oligonucleotide for detection of SNP TSC0012776
tgatgtagttaat

SEQ ID NO: 43030 - DNA, 13 bp, Artificial Sequence
  Oligonucleotide for detection of SNP TSC0012776
attaactacatca

SEQ ID NO: 43031 - DNA, 13 bp, Artificial Sequence
  Oligonucleotide for detection of SNP TSC0012776
tgatgttgttaat

SEQ ID NO: 43032 - DNA, 13 bp, Artificial Sequence
  Oligonucleotide for detection of SNP TSC0012776
attaacaacatca

SEQ ID NO: 43033 - DNA, 13 bp, Artificial Sequence
  Oligonucleotide for detection of SNP TSC0012776
tgatgtcgttaat

SEQ ID NO: 43034 - DNA, 13 bp, Artificial Sequence
  Oligonucleotide for detection of SNP TSC0012776
attaacgacatca

SEQ ID NO: 43035 - DNA, 13 bp, Artificial Sequence
  Oligonucleotide for detection of SNP TSC0012776
attaattgtatta

SEQ ID NO: 43036 - DNA, 13 bp, Artificial Sequence
  Oligonucleotide for detection of SNP TSC0012776
taatacaattaat

SEQ ID NO: 43037 - DNA, 13 bp, Artificial Sequence
  Oligonucleotide for detection of SNP TSC0012776
attaatggtatta

SEQ ID NO: 43038 - DNA, 13 bp, Artificial Sequence
  Oligonucleotide for detection of SNP TSC0012776
taataccattaat

SEQ ID NO: 43039 - DNA, 13 bp, Artificial Sequence
  Oligonucleotide for detection of SNP TSC0012776
attaacggtatta

SEQ ID NO: 43040 - DNA, 13 bp, Artificial Sequence
  Oligonucleotide for detection of SNP TSC0012776
taataccgttaat

SEQ ID NO: 43041 - DNA, 13 bp, Artificial Sequence
  Oligonucleotide for detection of SNP TSC0012777
tttgtagtatatg

SEQ ID NO: 43042 - DNA, 13 bp, Artificial Sequence
  Oligonucleotide for detection of SNP TSC0012777
catatactacaaa

SEQ ID NO: 43043 - DNA, 13 bp, Artificial Sequence
  Oligonucleotide for detection of SNP TSC0012777
tttgtaatatatg

SEQ ID NO: 43044 - DNA, 13 bp, Artificial Sequence
  Oligonucleotide for detection of SNP TSC0012777
catatattacaaa

SEQ ID NO: 43045 - DNA, 13 bp, Artificial Sequence
  Oligonucleotide for detection of SNP TSC0012777
ttcgtagtatatg

SEQ ID NO: 43046 - DNA, 13 bp, Artificial Sequence
  Oligonucleotide for detection of SNP TSC0012777
catatactacgaa

SEQ ID NO: 43047 - DNA, 13 bp, Artificial Sequence
  Oligonucleotide for detection of SNP TSC0012777
ttcgtaatatatg

SEQ ID NO: 43048 - DNA, 13 bp, Artificial Sequence
  Oligonucleotide for detection of SNP TSC0012777
catatattacgaa

SEQ ID NO: 43049 - DNA, 13 bp, Artificial Sequence
  Oligonucleotide for detection of SNP TSC0012778
tttgtattgaagt

SEQ ID NO: 43050 - DNA, 13 bp, Artificial Sequence
  Oligonucleotide for detection of SNP TSC0012778
acttcaatacaaa

SEQ ID NO: 43051 - DNA, 13 bp, Artificial Sequence
  Oligonucleotide for detection of SNP TSC0012778
tttgtagtgaagt

SEQ ID NO: 43052 - DNA, 13 bp, Artificial Sequence
  Oligonucleotide for detection of SNP TSC0012778
acttcactacaaa

SEQ ID NO: 43053 - DNA, 13 bp, Artificial Sequence
  Oligonucleotide for detection of SNP TSC0012778
attttagtgtaaa

SEQ ID NO: 43054 - DNA, 13 bp, Artificial Sequence
  Oligonucleotide for detection of SNP TSC0012778
tttacactaaaat

SEQ ID NO: 43055 - DNA, 13 bp, Artificial Sequence
  Oligonucleotide for detection of SNP TSC0012778
attttattgtaaa

SEQ ID NO: 43056 - DNA, 13 bp, Artificial Sequence
  Oligonucleotide for detection of SNP TSC0012778
tttacaataaaat

SEQ ID NO: 43057 - DNA, 13 bp, Artificial Sequence
  Oligonucleotide for detection of SNP TSC0012779
ttggtttttttaa

SEQ ID NO: 43058 - DNA, 13 bp, Artificial Sequence
  Oligonucleotide for detection of SNP TSC0012779
ttaaaaaaaccaa

SEQ ID NO: 43059 - DNA, 13 bp, Artificial Sequence
  Oligonucleotide for detection of SNP TSC0012779
ttggttgttttaa

SEQ ID NO: 43060 - DNA, 13 bp, Artificial Sequence
  Oligonucleotide for detection of SNP TSC0012779
ttaaaacaaccaa

SEQ ID NO: 43061 - DNA, 13 bp, Artificial Sequence
  Oligonucleotide for detection of SNP TSC0012779
ttaggagagttag

SEQ ID NO: 43062 - DNA, 13 bp, Artificial Sequence
  Oligonucleotide for detection of SNP TSC0012779
ctaactctcctaa

SEQ ID NO: 43063 - DNA, 13 bp, Artificial Sequence
  Oligonucleotide for detection of SNP TSC0012779
ttaggatagttag

SEQ ID NO: 43064 - DNA, 13 bp, Artificial Sequence
  Oligonucleotide for detection of SNP TSC0012779
ctaactatcctaa

SEQ ID NO: 43065 - DNA, 13 bp, Artificial Sequence
  Oligonucleotide for detection of SNP TSC0012780
tttgggaatttta

SEQ ID NO: 43066 - DNA, 13 bp, Artificial Sequence
  Oligonucleotide for detection of SNP TSC0012780
taaaattcccaaa

SEQ ID NO: 43067 - DNA, 13 bp, Artificial Sequence
  Oligonucleotide for detection of SNP TSC0012780
tttggggatttta

SEQ ID NO: 43068 - DNA, 13 bp, Artificial Sequence
  Oligonucleotide for detection of SNP TSC0012780
taaaatccccaaa

SEQ ID NO: 43069 - DNA, 13 bp, Artificial Sequence
  Oligonucleotide for detection of SNP TSC0012782
gaaaaaattgttg

SEQ ID NO: 43070 - DNA, 13 bp, Artificial Sequence
  Oligonucleotide for detection of SNP TSC0012782
caacaattttttc

SEQ ID NO: 43071 - DNA, 13 bp, Artificial Sequence
  Oligonucleotide for detection of SNP TSC0012782
gaaaaagttgttg

SEQ ID NO: 43072 - DNA, 13 bp, Artificial Sequence
  Oligonucleotide for detection of SNP TSC0012782
caacaactttttc

SEQ ID NO: 43073 - DNA, 13 bp, Artificial Sequence
  Oligonucleotide for detection of SNP TSC0012782
gaaaaaatcgttg

SEQ ID NO: 43074 - DNA, 13 bp, Artificial Sequence
  Oligonucleotide for detection of SNP TSC0012782
caacgattttttc

SEQ ID NO: 43075 - DNA, 13 bp, Artificial Sequence
  Oligonucleotide for detection of SNP TSC0012782
gaaaaagtcgttg

SEQ ID NO: 43076 - DNA, 13 bp, Artificial Sequence
  Oligonucleotide for detection of SNP TSC0012782
caacgactttttc

SEQ ID NO: 43077 - DNA, 13 bp, Artificial Sequence
  Oligonucleotide for detection of SNP TSC0012783
gtgtgtgtatatt

SEQ ID NO: 43078 - DNA, 13 bp, Artificial Sequence
  Oligonucleotide for detection of SNP TSC0012783
aatatacacacac

SEQ ID NO: 43079 - DNA, 13 bp, Artificial Sequence
  Oligonucleotide for detection of SNP TSC0012783
gtgtgtatatatt

SEQ ID NO: 43080 - DNA, 13 bp, Artificial Sequence
  Oligonucleotide for detection of SNP TSC0012783
aatatatacacac

SEQ ID NO: 43081 - DNA, 13 bp, Artificial Sequence
  Oligonucleotide for detection of SNP TSC0012784
gtgtgtgtgtata

SEQ ID NO: 43082 - DNA, 13 bp, Artificial Sequence
  Oligonucleotide for detection of SNP TSC0012784
tatacacacacac

SEQ ID NO: 43083 - DNA, 13 bp, Artificial Sequence
  Oligonucleotide for detection of SNP TSC0012784
gtgtgtatgtata

SEQ ID NO: 43084 - DNA, 13 bp, Artificial Sequence
  Oligonucleotide for detection of SNP TSC0012784
tatacatacacac

SEQ ID NO: 43085 - DNA, 13 bp, Artificial Sequence
  Oligonucleotide for detection of SNP TSC0012785
agagagtaaggga

SEQ ID NO: 43086 - DNA, 13 bp, Artificial Sequence
  Oligonucleotide for detection of SNP TSC0012785
tcccttactctct

SEQ ID NO: 43087 - DNA, 13 bp, Artificial Sequence
  Oligonucleotide for detection of SNP TSC0012785
agagaggaaggga

SEQ ID NO: 43088 - DNA, 13 bp, Artificial Sequence
  Oligonucleotide for detection of SNP TSC0012785
tcccttcctctct

SEQ ID NO: 43089 - DNA, 13 bp, Artificial Sequence
  Oligonucleotide for detection of SNP TSC0012786
aaaagttaaaaaa

SEQ ID NO: 43090 - DNA, 13 bp, Artificial Sequence
  Oligonucleotide for detection of SNP TSC0012786
ttttttaactttt

SEQ ID NO: 43091 - DNA, 13 bp, Artificial Sequence
  Oligonucleotide for detection of SNP TSC0012786
aaaagtaaaaaaa

SEQ ID NO: 43092 - DNA, 13 bp, Artificial Sequence
  Oligonucleotide for detection of SNP TSC0012786
tttttttactttt

SEQ ID NO: 43093 - DNA, 13 bp, Artificial Sequence
  Oligonucleotide for detection of SNP TSC0012787
aagagagagagag

SEQ ID NO: 43094 - DNA, 13 bp, Artificial Sequence
  Oligonucleotide for detection of SNP TSC0012787
ctctctctctctt

SEQ ID NO: 43095 - DNA, 13 bp, Artificial Sequence
  Oligonucleotide for detection of SNP TSC0012787
aagagatagagag

SEQ ID NO: 43096 - DNA, 13 bp, Artificial Sequence
  Oligonucleotide for detection of SNP TSC0012787
ctctctatctctt

SEQ ID NO: 43097 - DNA, 13 bp, Artificial Sequence
  Oligonucleotide for detection of SNP TSC0012788
aatttagtagaag

SEQ ID NO: 43098 - DNA, 13 bp, Artificial Sequence
  Oligonucleotide for detection of SNP TSC0012788
cttctactaaatt

SEQ ID NO: 43099 - DNA, 13 bp, Artificial Sequence
  Oligonucleotide for detection of SNP TSC0012788
aatttaatagaag

SEQ ID NO: 43100 - DNA, 13 bp, Artificial Sequence
  Oligonucleotide for detection of SNP TSC0012788
cttctattaaatt

SEQ ID NO: 43101 - DNA, 13 bp, Artificial Sequence
  Oligonucleotide for detection of SNP TSC0012789
gttgttgttttgg

SEQ ID NO: 43102 - DNA, 13 bp, Artificial Sequence
  Oligonucleotide for detection of SNP TSC0012789
ccaaaacaacaac

SEQ ID NO: 43103 - DNA, 13 bp, Artificial Sequence
  Oligonucleotide for detection of SNP TSC0012789
gtcgttattttgg

SEQ ID NO: 43104 - DNA, 13 bp, Artificial Sequence
  Oligonucleotide for detection of SNP TSC0012789
ccaaaataacgac

SEQ ID NO: 43105 - DNA, 13 bp, Artificial Sequence
  Oligonucleotide for detection of SNP TSC0012789
gtcgttgttttgg

SEQ ID NO: 43106 - DNA, 13 bp, Artificial Sequence
  Oligonucleotide for detection of SNP TSC0012789
ccaaaacaacgac

SEQ ID NO: 43107 - DNA, 13 bp, Artificial Sequence
  Oligonucleotide for detection of SNP TSC0012789
gttgttatttcgg

SEQ ID NO: 43108 - DNA, 13 bp, Artificial Sequence
  Oligonucleotide for detection of SNP TSC0012789
ccgaaataacaac

SEQ ID NO: 43109 - DNA, 13 bp, Artificial Sequence
  Oligonucleotide for detection of SNP TSC0012789
gttgtcgttttgg

SEQ ID NO: 43110 - DNA, 13 bp, Artificial Sequence
  Oligonucleotide for detection of SNP TSC0012789
ccaaaacgacaac

SEQ ID NO: 43111 - DNA, 13 bp, Artificial Sequence
  Oligonucleotide for detection of SNP TSC0012789
gtcgttatttcgg

SEQ ID NO: 43112 - DNA, 13 bp, Artificial Sequence
  Oligonucleotide for detection of SNP TSC0012789
ccgaaataacgac

SEQ ID NO: 43113 - DNA, 13 bp, Artificial Sequence
  Oligonucleotide for detection of SNP TSC0012789
gttgttgtttcgg

SEQ ID NO: 43114 - DNA, 13 bp, Artificial Sequence
  Oligonucleotide for detection of SNP TSC0012789
ccgaaacaacaac

SEQ ID NO: 43115 - DNA, 13 bp, Artificial Sequence
  Oligonucleotide for detection of SNP TSC0012789
gtcgtcgttttgg

SEQ ID NO: 43116 - DNA, 13 bp, Artificial Sequence
  Oligonucleotide for detection of SNP TSC0012789
ccaaaacgacgac

SEQ ID NO: 43117 - DNA, 13 bp, Artificial Sequence
  Oligonucleotide for detection of SNP TSC0012789
gtcgttgtttcgg

SEQ ID NO: 43118 - DNA, 13 bp, Artificial Sequence
  Oligonucleotide for detection of SNP TSC0012789
ccgaaacaacgac

SEQ ID NO: 43119 - DNA, 13 bp, Artificial Sequence
  Oligonucleotide for detection of SNP TSC0012789
gttgtcgtttcgg

SEQ ID NO: 43120 - DNA, 13 bp, Artificial Sequence
  Oligonucleotide for detection of SNP TSC0012789
ccgaaacgacaac

SEQ ID NO: 43121 - DNA, 13 bp, Artificial Sequence
  Oligonucleotide for detection of SNP TSC0012789
gtcgtcgtttcgg

SEQ ID NO: 43122 - DNA, 13 bp, Artificial Sequence
  Oligonucleotide for detection of SNP TSC0012789
ccgaaacgacgac

SEQ ID NO: 43123 - DNA, 13 bp, Artificial Sequence
  Oligonucleotide for detection of SNP TSC0012789
ttgaaatggtggy

SEQ ID NO: 43124 - DNA, 13 bp, Artificial Sequence
  Oligonucleotide for detection of SNP TSC0012789
rccaccatttcaa

SEQ ID NO: 43125 - DNA, 13 bp, Artificial Sequence
  Oligonucleotide for detection of SNP TSC0012789
tcgaaatggtggy

SEQ ID NO: 43126 - DNA, 13 bp, Artificial Sequence
  Oligonucleotide for detection of SNP TSC0012789
rccaccatttcga

SEQ ID NO: 43127 - DNA, 13 bp, Artificial Sequence
  Oligonucleotide for detection of SNP TSC0012789
ttgaaatggcggy

SEQ ID NO: 43128 - DNA, 13 bp, Artificial Sequence
  Oligonucleotide for detection of SNP TSC0012789
rccgccatttcaa

SEQ ID NO: 43129 - DNA, 13 bp, Artificial Sequence
  Oligonucleotide for detection of SNP TSC0012789
ttgaaacggtggy

SEQ ID NO: 43130 - DNA, 13 bp, Artificial Sequence
  Oligonucleotide for detection of SNP TSC0012789
rccaccgtttcaa

SEQ ID NO: 43131 - DNA, 13 bp, Artificial Sequence
  Oligonucleotide for detection of SNP TSC0012789
tcgaaatggcggy

SEQ ID NO: 43132 - DNA, 13 bp, Artificial Sequence
  Oligonucleotide for detection of SNP TSC0012789
rccgccatttcga

SEQ ID NO: 43133 - DNA, 13 bp, Artificial Sequence
  Oligonucleotide for detection of SNP TSC0012789
tcgaaacggtggy

SEQ ID NO: 43134 - DNA, 13 bp, Artificial Sequence
  Oligonucleotide for detection of SNP TSC0012789
rccaccgtttcga

SEQ ID NO: 43135 - DNA, 13 bp, Artificial Sequence
  Oligonucleotide for detection of SNP TSC0012789
ttgaaacggcggy

SEQ ID NO: 43136 - DNA, 13 bp, Artificial Sequence
  Oligonucleotide for detection of SNP TSC0012789
rccgccgtttcaa

SEQ ID NO: 43137 - DNA, 13 bp, Artificial Sequence
  Oligonucleotide for detection of SNP TSC0012789
tcgaaacggcggy

SEQ ID NO: 43138 - DNA, 13 bp, Artificial Sequence
  Oligonucleotide for detection of SNP TSC0012789
rccgccgtttcga

SEQ ID NO: 43139 - DNA, 13 bp, Artificial Sequence
  Oligonucleotide for detection of SNP TSC0012790
tagattgagaggy

SEQ ID NO: 43140 - DNA, 13 bp, Artificial Sequence
  Oligonucleotide for detection of SNP TSC0012790
rcctctcaatcta

SEQ ID NO: 43141 - DNA, 13 bp, Artificial Sequence
  Oligonucleotide for detection of SNP TSC0012790
tagattaagaggy

SEQ ID NO: 43142 - DNA, 13 bp, Artificial Sequence
  Oligonucleotide for detection of SNP TSC0012790
rcctcttaatcta

SEQ ID NO: 43143 - DNA, 13 bp, Artificial Sequence
  Oligonucleotide for detection of SNP TSC0012791
ttgggggtaggga

SEQ ID NO: 43144 - DNA, 13 bp, Artificial Sequence
  Oligonucleotide for detection of SNP TSC0012791
tccctacccccaa

SEQ ID NO: 43145 - DNA, 13 bp, Artificial Sequence
  Oligonucleotide for detection of SNP TSC0012791
ttggggataggga

SEQ ID NO: 43146 - DNA, 13 bp, Artificial Sequence
  Oligonucleotide for detection of SNP TSC0012791
tccctatccccaa

SEQ ID NO: 43147 - DNA, 13 bp, Artificial Sequence
  Oligonucleotide for detection of SNP TSC0012792
ttatttgtttgta

SEQ ID NO: 43148 - DNA, 13 bp, Artificial Sequence
  Oligonucleotide for detection of SNP TSC0012792
tacaaacaaataa

SEQ ID NO: 43149 - DNA, 13 bp, Artificial Sequence
  Oligonucleotide for detection of SNP TSC0012792
ttattcgtttgta

SEQ ID NO: 43150 - DNA, 13 bp, Artificial Sequence
  Oligonucleotide for detection of SNP TSC0012792
tacaaacgaataa

SEQ ID NO: 43151 - DNA, 13 bp, Artificial Sequence
  Oligonucleotide for detection of SNP TSC0012792
tgtaaatggataa

SEQ ID NO: 43152 - DNA, 13 bp, Artificial Sequence
  Oligonucleotide for detection of SNP TSC0012792
ttatccatttaca

SEQ ID NO: 43153 - DNA, 13 bp, Artificial Sequence
  Oligonucleotide for detection of SNP TSC0012792
tgtaaacggataa

SEQ ID NO: 43154 - DNA, 13 bp, Artificial Sequence
  Oligonucleotide for detection of SNP TSC0012792
ttatccgtttaca

SEQ ID NO: 43155 - DNA, 13 bp, Artificial Sequence
  Oligonucleotide for detection of SNP TSC0012793
atttgtatattta

SEQ ID NO: 43156 - DNA, 13 bp, Artificial Sequence
  Oligonucleotide for detection of SNP TSC0012793
taaatatacaaat

SEQ ID NO: 43157 - DNA, 13 bp, Artificial Sequence
  Oligonucleotide for detection of SNP TSC0012793
atttgtgtattta

SEQ ID NO: 43158 - DNA, 13 bp, Artificial Sequence
  Oligonucleotide for detection of SNP TSC0012793
taaatacacaaat

SEQ ID NO: 43159 - DNA, 13 bp, Artificial Sequence
  Oligonucleotide for detection of SNP TSC0012793
atttgcgtattta

SEQ ID NO: 43160 - DNA, 13 bp, Artificial Sequence
  Oligonucleotide for detection of SNP TSC0012793
taaatacgcaaat

SEQ ID NO: 43161 - DNA, 13 bp, Artificial Sequence
  Oligonucleotide for detection of SNP TSC0012793
taaatatgtaaat

SEQ ID NO: 43162 - DNA, 13 bp, Artificial Sequence
  Oligonucleotide for detection of SNP TSC0012793
atttacatattta

SEQ ID NO: 43163 - DNA, 13 bp, Artificial Sequence
  Oligonucleotide for detection of SNP TSC0012793
taaatacgtaaat

SEQ ID NO: 43164 - DNA, 13 bp, Artificial Sequence
  Oligonucleotide for detection of SNP TSC0012793
atttacgtattta

SEQ ID NO: 43165 - DNA, 13 bp, Artificial Sequence
  Oligonucleotide for detection of SNP TSC0012794
tgattaataaata

SEQ ID NO: 43166 - DNA, 13 bp, Artificial Sequence
  Oligonucleotide for detection of SNP TSC0012794
tatttattaatca

SEQ ID NO: 43167 - DNA, 13 bp, Artificial Sequence
  Oligonucleotide for detection of SNP TSC0012794
tgattagtaaata

SEQ ID NO: 43168 - DNA, 13 bp, Artificial Sequence
  Oligonucleotide for detection of SNP TSC0012794
tatttactaatca

SEQ ID NO: 43169 - DNA, 13 bp, Artificial Sequence
  Oligonucleotide for detection of SNP TSC0012795
atatataggttgy

SEQ ID NO: 43170 - DNA, 13 bp, Artificial Sequence
  Oligonucleotide for detection of SNP TSC0012795
rcaacctatatat

SEQ ID NO: 43171 - DNA, 13 bp, Artificial Sequence
  Oligonucleotide for detection of SNP TSC0012795
atatatgggttgy

SEQ ID NO: 43172 - DNA, 13 bp, Artificial Sequence
  Oligonucleotide for detection of SNP TSC0012795
rcaacccatatat

SEQ ID NO: 43173 - DNA, 13 bp, Artificial Sequence
  Oligonucleotide for detection of SNP TSC0012795
atatacgggttgy

SEQ ID NO: 43174 - DNA, 13 bp, Artificial Sequence
  Oligonucleotide for detection of SNP TSC0012795
rcaacccgtatat

SEQ ID NO: 43175 - DNA, 13 bp, Artificial Sequence
  Oligonucleotide for detection of SNP TSC0012795
gtagtttgtgtgt

SEQ ID NO: 43176 - DNA, 13 bp, Artificial Sequence
  Oligonucleotide for detection of SNP TSC0012795
acacacaaactac

SEQ ID NO: 43177 - DNA, 13 bp, Artificial Sequence
  Oligonucleotide for detection of SNP TSC0012795
gtagttcgtgtgt

SEQ ID NO: 43178 - DNA, 13 bp, Artificial Sequence
  Oligonucleotide for detection of SNP TSC0012795
acacacgaactac

SEQ ID NO: 43179 - DNA, 13 bp, Artificial Sequence
  Oligonucleotide for detection of SNP TSC0012796
ttatgggagaata

SEQ ID NO: 43180 - DNA, 13 bp, Artificial Sequence
  Oligonucleotide for detection of SNP TSC0012796
tattctcccataa

SEQ ID NO: 43181 - DNA, 13 bp, Artificial Sequence
  Oligonucleotide for detection of SNP TSC0012796
ttatggaagaata

SEQ ID NO: 43182 - DNA, 13 bp, Artificial Sequence
  Oligonucleotide for detection of SNP TSC0012796
tattcttccataa

SEQ ID NO: 43183 - DNA, 13 bp, Artificial Sequence
  Oligonucleotide for detection of SNP TSC0012797
agggttggtagat

SEQ ID NO: 43184 - DNA, 13 bp, Artificial Sequence
  Oligonucleotide for detection of SNP TSC0012797
atctaccaaccct

SEQ ID NO: 43185 - DNA, 13 bp, Artificial Sequence
  Oligonucleotide for detection of SNP TSC0012797
agggtttgtagat

SEQ ID NO: 43186 - DNA, 13 bp, Artificial Sequence
  Oligonucleotide for detection of SNP TSC0012797
atctacaaaccct

SEQ ID NO: 43187 - DNA, 13 bp, Artificial Sequence
  Oligonucleotide for detection of SNP TSC0012797
atttattaatttt

SEQ ID NO: 43188 - DNA, 13 bp, Artificial Sequence
  Oligonucleotide for detection of SNP TSC0012797
aaaattaataaat

SEQ ID NO: 43189 - DNA, 13 bp, Artificial Sequence
  Oligonucleotide for detection of SNP TSC0012797
atttataaatttt

SEQ ID NO: 43190 - DNA, 13 bp, Artificial Sequence
  Oligonucleotide for detection of SNP TSC0012797
aaaatttataaat

SEQ ID NO: 43191 - DNA, 13 bp, Artificial Sequence
  Oligonucleotide for detection of SNP TSC0012798
taatatataaaag

SEQ ID NO: 43192 - DNA, 13 bp, Artificial Sequence
  Oligonucleotide for detection of SNP TSC0012798
cttttatatatta

SEQ ID NO: 43193 - DNA, 13 bp, Artificial Sequence
  Oligonucleotide for detection of SNP TSC0012798
taatatgtaaaag

SEQ ID NO: 43194 - DNA, 13 bp, Artificial Sequence
  Oligonucleotide for detection of SNP TSC0012798
cttttacatatta

SEQ ID NO: 43195 - DNA, 13 bp, Artificial Sequence
  Oligonucleotide for detection of SNP TSC0012798
taatacgtaaaag

SEQ ID NO: 43196 - DNA, 13 bp, Artificial Sequence
  Oligonucleotide for detection of SNP TSC0012798
cttttacgtatta

SEQ ID NO: 43197 - DNA, 13 bp, Artificial Sequence
  Oligonucleotide for detection of SNP TSC0012798
tttttatgtattg

SEQ ID NO: 43198 - DNA, 13 bp, Artificial Sequence
  Oligonucleotide for detection of SNP TSC0012798
caatacataaaaa

SEQ ID NO: 43199 - DNA, 13 bp, Artificial Sequence
  Oligonucleotide for detection of SNP TSC0012798
tttttacgtattg

SEQ ID NO: 43200 - DNA, 13 bp, Artificial Sequence
  Oligonucleotide for detection of SNP TSC0012798
caatacgtaaaaa

SEQ ID NO: 43201 - DNA, 13 bp, Artificial Sequence
  Oligonucleotide for detection of SNP TSC0012799
aataatatttaty

SEQ ID NO: 43202 - DNA, 13 bp, Artificial Sequence
  Oligonucleotide for detection of SNP TSC0012799
rataaatattatt

SEQ ID NO: 43203 - DNA, 13 bp, Artificial Sequence
  Oligonucleotide for detection of SNP TSC0012799
aataatttttaty

SEQ ID NO: 43204 - DNA, 13 bp, Artificial Sequence
  Oligonucleotide for detection of SNP TSC0012799
rataaaaattatt

SEQ ID NO: 43205 - DNA, 13 bp, Artificial Sequence
  Oligonucleotide for detection of SNP TSC0012799
gatagatgttatt

SEQ ID NO: 43206 - DNA, 13 bp, Artificial Sequence
  Oligonucleotide for detection of SNP TSC0012799
aataacatctatc

SEQ ID NO: 43207 - DNA, 13 bp, Artificial Sequence
  Oligonucleotide for detection of SNP TSC0012799
gatagaagttatt

SEQ ID NO: 43208 - DNA, 13 bp, Artificial Sequence
  Oligonucleotide for detection of SNP TSC0012799
aataacttctatc

SEQ ID NO: 43209 - DNA, 13 bp, Artificial Sequence
  Oligonucleotide for detection of SNP TSC0012804
taggaggttttty

SEQ ID NO: 43210 - DNA, 13 bp, Artificial Sequence
  Oligonucleotide for detection of SNP TSC0012804
raaaaacctccta

SEQ ID NO: 43211 - DNA, 13 bp, Artificial Sequence
  Oligonucleotide for detection of SNP TSC0012804
taggagattttty

SEQ ID NO: 43212 - DNA, 13 bp, Artificial Sequence
  Oligonucleotide for detection of SNP TSC0012804
raaaaatctccta

SEQ ID NO: 43213 - DNA, 13 bp, Artificial Sequence
  Oligonucleotide for detection of SNP TSC0012807
aattttgttttty

SEQ ID NO: 43214 - DNA, 13 bp, Artificial Sequence
  Oligonucleotide for detection of SNP TSC0012807
raaaaacaaaatt

SEQ ID NO: 43215 - DNA, 13 bp, Artificial Sequence
  Oligonucleotide for detection of SNP TSC0012807
aatttttttttty

SEQ ID NO: 43216 - DNA, 13 bp, Artificial Sequence
  Oligonucleotide for detection of SNP TSC0012807
raaaaaaaaaatt

SEQ ID NO: 43217 - DNA, 13 bp, Artificial Sequence
  Oligonucleotide for detection of SNP TSC0012807
ggagagtaaaatt

SEQ ID NO: 43218 - DNA, 13 bp, Artificial Sequence
  Oligonucleotide for detection of SNP TSC0012807
aattttactctcc

SEQ ID NO: 43219 - DNA, 13 bp, Artificial Sequence
  Oligonucleotide for detection of SNP TSC0012807
ggagagaaaaatt

SEQ ID NO: 43220 - DNA, 13 bp, Artificial Sequence
  Oligonucleotide for detection of SNP TSC0012807
aatttttctctcc

SEQ ID NO: 43221 - DNA, 13 bp, Artificial Sequence
  Oligonucleotide for detection of SNP TSC0012808
ttttttattttgg

SEQ ID NO: 43222 - DNA, 13 bp, Artificial Sequence
  Oligonucleotide for detection of SNP TSC0012808
ccaaaataaaaaa

SEQ ID NO: 43223 - DNA, 13 bp, Artificial Sequence
  Oligonucleotide for detection of SNP TSC0012809
ttattagtttagy

SEQ ID NO: 43224 - DNA, 13 bp, Artificial Sequence
  Oligonucleotide for detection of SNP TSC0012809
rctaaactaataa

SEQ ID NO: 43225 - DNA, 13 bp, Artificial Sequence
  Oligonucleotide for detection of SNP TSC0012809
ttattaatttagy

SEQ ID NO: 43226 - DNA, 13 bp, Artificial Sequence
  Oligonucleotide for detection of SNP TSC0012809
rctaaattaataa

SEQ ID NO: 43227 - DNA, 13 bp, Artificial Sequence
  Oligonucleotide for detection of SNP TSC0012811
tttttgatgttty

SEQ ID NO: 43228 - DNA, 13 bp, Artificial Sequence
  Oligonucleotide for detection of SNP TSC0012811
raaacatcaaaaa

SEQ ID NO: 43229 - DNA, 13 bp, Artificial Sequence
  Oligonucleotide for detection of SNP TSC0012811
tttttgttgttty

SEQ ID NO: 43230 - DNA, 13 bp, Artificial Sequence
  Oligonucleotide for detection of SNP TSC0012811
raaacaacaaaaa

SEQ ID NO: 43231 - DNA, 13 bp, Artificial Sequence
  Oligonucleotide for detection of SNP TSC0012811
gaaatattaagga

SEQ ID NO: 43232 - DNA, 13 bp, Artificial Sequence
  Oligonucleotide for detection of SNP TSC0012811
tccttaatatttc

SEQ ID NO: 43233 - DNA, 13 bp, Artificial Sequence
  Oligonucleotide for detection of SNP TSC0012811
gaaatagtaagga

SEQ ID NO: 43234 - DNA, 13 bp, Artificial Sequence
  Oligonucleotide for detection of SNP TSC0012811
tccttactatttc

SEQ ID NO: 43235 - DNA, 13 bp, Artificial Sequence
  Oligonucleotide for detection of SNP TSC0012812
tgttatatgtagg

SEQ ID NO: 43236 - DNA, 13 bp, Artificial Sequence
  Oligonucleotide for detection of SNP TSC0012812
cctacatataaca

SEQ ID NO: 43237 - DNA, 13 bp, Artificial Sequence
  Oligonucleotide for detection of SNP TSC0012812
tgttatgtgtagg

SEQ ID NO: 43238 - DNA, 13 bp, Artificial Sequence
  Oligonucleotide for detection of SNP TSC0012812
cctacacataaca

SEQ ID NO: 43239 - DNA, 13 bp, Artificial Sequence
  Oligonucleotide for detection of SNP TSC0012812
tgttacgtgtagg

SEQ ID NO: 43240 - DNA, 13 bp, Artificial Sequence
  Oligonucleotide for detection of SNP TSC0012812
cctacacgtaaca

SEQ ID NO: 43241 - DNA, 13 bp, Artificial Sequence
  Oligonucleotide for detection of SNP TSC0012812
tttgtatgtgata

SEQ ID NO: 43242 - DNA, 13 bp, Artificial Sequence
  Oligonucleotide for detection of SNP TSC0012812
tatcacatacaaa

SEQ ID NO: 43243 - DNA, 13 bp, Artificial Sequence
  Oligonucleotide for detection of SNP TSC0012812
tttgtacgtgata

SEQ ID NO: 43244 - DNA, 13 bp, Artificial Sequence
  Oligonucleotide for detection of SNP TSC0012812
tatcacgtacaaa

SEQ ID NO: 43245 - DNA, 13 bp, Artificial Sequence
  Oligonucleotide for detection of SNP TSC0012813
ttttattttttaa

SEQ ID NO: 43246 - DNA, 13 bp, Artificial Sequence
  Oligonucleotide for detection of SNP TSC0012813
ttaaaaaataaaa

SEQ ID NO: 43247 - DNA, 13 bp, Artificial Sequence
  Oligonucleotide for detection of SNP TSC0012813
ttggaggatggaa

SEQ ID NO: 43248 - DNA, 13 bp, Artificial Sequence
  Oligonucleotide for detection of SNP TSC0012813
ttccatcctccaa

SEQ ID NO: 43249 - DNA, 13 bp, Artificial Sequence
  Oligonucleotide for detection of SNP TSC0012813
ttggagtatggaa

SEQ ID NO: 43250 - DNA, 13 bp, Artificial Sequence
  Oligonucleotide for detection of SNP TSC0012813
ttccatactccaa

SEQ ID NO: 43251 - DNA, 13 bp, Artificial Sequence
  Oligonucleotide for detection of SNP TSC0012814
agggaggtggtga

SEQ ID NO: 43252 - DNA, 13 bp, Artificial Sequence
  Oligonucleotide for detection of SNP TSC0012814
tcaccacctccct

SEQ ID NO: 43253 - DNA, 13 bp, Artificial Sequence
  Oligonucleotide for detection of SNP TSC0012814
agggagatggtga

SEQ ID NO: 43254 - DNA, 13 bp, Artificial Sequence
  Oligonucleotide for detection of SNP TSC0012814
tcaccatctccct

SEQ ID NO: 43255 - DNA, 13 bp, Artificial Sequence
  Oligonucleotide for detection of SNP TSC0012814
agggaggtggcga

SEQ ID NO: 43256 - DNA, 13 bp, Artificial Sequence
  Oligonucleotide for detection of SNP TSC0012814
tcgccacctccct

SEQ ID NO: 43257 - DNA, 13 bp, Artificial Sequence
  Oligonucleotide for detection of SNP TSC0012814
agggagatggcga

SEQ ID NO: 43258 - DNA, 13 bp, Artificial Sequence
  Oligonucleotide for detection of SNP TSC0012814
tcgccatctccct

SEQ ID NO: 43259 - DNA, 13 bp, Artificial Sequence
  Oligonucleotide for detection of SNP TSC0012815
gggtatagtggat

SEQ ID NO: 43260 - DNA, 13 bp, Artificial Sequence
  Oligonucleotide for detection of SNP TSC0012815
atccactataccc

SEQ ID NO: 43261 - DNA, 13 bp, Artificial Sequence
  Oligonucleotide for detection of SNP TSC0012815
gggtatggtggat

SEQ ID NO: 43262 - DNA, 13 bp, Artificial Sequence
  Oligonucleotide for detection of SNP TSC0012815
atccaccataccc

SEQ ID NO: 43263 - DNA, 13 bp, Artificial Sequence
  Oligonucleotide for detection of SNP TSC0012815
gggtacggtggat

SEQ ID NO: 43264 - DNA, 13 bp, Artificial Sequence
  Oligonucleotide for detection of SNP TSC0012815
atccaccgtaccc

SEQ ID NO: 43265 - DNA, 13 bp, Artificial Sequence
  Oligonucleotide for detection of SNP TSC0012815
atttattgtgtty

SEQ ID NO: 43266 - DNA, 13 bp, Artificial Sequence
  Oligonucleotide for detection of SNP TSC0012815
raacacaataaat

SEQ ID NO: 43267 - DNA, 13 bp, Artificial Sequence
  Oligonucleotide for detection of SNP TSC0012815
atttatcgtgtty

SEQ ID NO: 43268 - DNA, 13 bp, Artificial Sequence
  Oligonucleotide for detection of SNP TSC0012815
raacacgataaat

SEQ ID NO: 43269 - DNA, 13 bp, Artificial Sequence
  Oligonucleotide for detection of SNP TSC0012816
gtattaaatttay

SEQ ID NO: 43270 - DNA, 13 bp, Artificial Sequence
  Oligonucleotide for detection of SNP TSC0012816
rtaaatttaatac

SEQ ID NO: 43271 - DNA, 13 bp, Artificial Sequence
  Oligonucleotide for detection of SNP TSC0012816
gtattatatttay

SEQ ID NO: 43272 - DNA, 13 bp, Artificial Sequence
  Oligonucleotide for detection of SNP TSC0012816
rtaaatataatac

SEQ ID NO: 43273 - DNA, 13 bp, Artificial Sequence
  Oligonucleotide for detection of SNP TSC0012816
gtgagtttaatay

SEQ ID NO: 43274 - DNA, 13 bp, Artificial Sequence
  Oligonucleotide for detection of SNP TSC0012816
rtattaaactcac

SEQ ID NO: 43275 - DNA, 13 bp, Artificial Sequence
  Oligonucleotide for detection of SNP TSC0012816
gtgagtataatay

SEQ ID NO: 43276 - DNA, 13 bp, Artificial Sequence
  Oligonucleotide for detection of SNP TSC0012816
rtattatactcac

SEQ ID NO: 43277 - DNA, 13 bp, Artificial Sequence
  Oligonucleotide for detection of SNP TSC0012817
atgaataatataa

SEQ ID NO: 43278 - DNA, 13 bp, Artificial Sequence
  Oligonucleotide for detection of SNP TSC0012817
ttatattattcat

SEQ ID NO: 43279 - DNA, 13 bp, Artificial Sequence
  Oligonucleotide for detection of SNP TSC0012817
atgaattatataa

SEQ ID NO: 43280 - DNA, 13 bp, Artificial Sequence
  Oligonucleotide for detection of SNP TSC0012817
ttatataattcat

SEQ ID NO: 43281 - DNA, 13 bp, Artificial Sequence
  Oligonucleotide for detection of SNP TSC0012817
ttatgttgtttat

SEQ ID NO: 43282 - DNA, 13 bp, Artificial Sequence
  Oligonucleotide for detection of SNP TSC0012817
ataaacaacataa

SEQ ID NO: 43283 - DNA, 13 bp, Artificial Sequence
  Oligonucleotide for detection of SNP TSC0012817
ttatgtggtttat

SEQ ID NO: 43284 - DNA, 13 bp, Artificial Sequence
  Oligonucleotide for detection of SNP TSC0012817
ataaaccacataa

SEQ ID NO: 43285 - DNA, 13 bp, Artificial Sequence
  Oligonucleotide for detection of SNP TSC0012820
aaggttttagggt

SEQ ID NO: 43286 - DNA, 13 bp, Artificial Sequence
  Oligonucleotide for detection of SNP TSC0012820
accctaaaacctt

SEQ ID NO: 43287 - DNA, 13 bp, Artificial Sequence
  Oligonucleotide for detection of SNP TSC0012820
aaggttgtagggt

SEQ ID NO: 43288 - DNA, 13 bp, Artificial Sequence
  Oligonucleotide for detection of SNP TSC0012820
accctacaacctt

SEQ ID NO: 43289 - DNA, 13 bp, Artificial Sequence
  Oligonucleotide for detection of SNP TSC0012820
aaggtcgtagggt

SEQ ID NO: 43290 - DNA, 13 bp, Artificial Sequence
  Oligonucleotide for detection of SNP TSC0012820
accctacgacctt

SEQ ID NO: 43291 - DNA, 13 bp, Artificial Sequence
  Oligonucleotide for detection of SNP TSC0012820
attttggggtttt

SEQ ID NO: 43292 - DNA, 13 bp, Artificial Sequence
  Oligonucleotide for detection of SNP TSC0012820
aaaaccccaaaat

SEQ ID NO: 43293 - DNA, 13 bp, Artificial Sequence
  Oligonucleotide for detection of SNP TSC0012820
attttgtggtttt

SEQ ID NO: 43294 - DNA, 13 bp, Artificial Sequence
  Oligonucleotide for detection of SNP TSC0012820
aaaaccacaaaat

SEQ ID NO: 43295 - DNA, 13 bp, Artificial Sequence
  Oligonucleotide for detection of SNP TSC0012820
attttgcggtttt

SEQ ID NO: 43296 - DNA, 13 bp, Artificial Sequence
  Oligonucleotide for detection of SNP TSC0012820
aaaaccgcaaaat

SEQ ID NO: 43297 - DNA, 13 bp, Artificial Sequence
  Oligonucleotide for detection of SNP TSC0012821
tgaaaagagattt

SEQ ID NO: 43298 - DNA, 13 bp, Artificial Sequence
  Oligonucleotide for detection of SNP TSC0012821
aaatctcttttca

SEQ ID NO: 43299 - DNA, 13 bp, Artificial Sequence
  Oligonucleotide for detection of SNP TSC0012821
tgaaaaaagattt

SEQ ID NO: 43300 - DNA, 13 bp, Artificial Sequence
  Oligonucleotide for detection of SNP TSC0012821
aaatcttttttca

SEQ ID NO: 43301 - DNA, 13 bp, Artificial Sequence
  Oligonucleotide for detection of SNP TSC0012825
agttattaagttt

SEQ ID NO: 43302 - DNA, 13 bp, Artificial Sequence
  Oligonucleotide for detection of SNP TSC0012825
aaacttaataact

SEQ ID NO: 43303 - DNA, 13 bp, Artificial Sequence
  Oligonucleotide for detection of SNP TSC0012825
agttatgaagttt

SEQ ID NO: 43304 - DNA, 13 bp, Artificial Sequence
  Oligonucleotide for detection of SNP TSC0012825
aaacttcataact

SEQ ID NO: 43305 - DNA, 13 bp, Artificial Sequence
  Oligonucleotide for detection of SNP TSC0012825
agttacgaagttt

SEQ ID NO: 43306 - DNA, 13 bp, Artificial Sequence
  Oligonucleotide for detection of SNP TSC0012825
aaacttcgtaact

SEQ ID NO: 43307 - DNA, 13 bp, Artificial Sequence
  Oligonucleotide for detection of SNP TSC0012825
aggtttggtgatt

SEQ ID NO: 43308 - DNA, 13 bp, Artificial Sequence
  Oligonucleotide for detection of SNP TSC0012825
aatcaccaaacct

SEQ ID NO: 43309 - DNA, 13 bp, Artificial Sequence
  Oligonucleotide for detection of SNP TSC0012825
aggttttgtgatt

SEQ ID NO: 43310 - DNA, 13 bp, Artificial Sequence
  Oligonucleotide for detection of SNP TSC0012825
aatcacaaaacct

SEQ ID NO: 43311 - DNA, 13 bp, Artificial Sequence
  Oligonucleotide for detection of SNP TSC0012825
aggtttcgtgatt

SEQ ID NO: 43312 - DNA, 13 bp, Artificial Sequence
  Oligonucleotide for detection of SNP TSC0012825
aatcacgaaacct

SEQ ID NO: 43313 - DNA, 13 bp, Artificial Sequence
  Oligonucleotide for detection of SNP TSC0012826
aaggttgggtatg

SEQ ID NO: 43314 - DNA, 13 bp, Artificial Sequence
  Oligonucleotide for detection of SNP TSC0012826
catacccaacctt

SEQ ID NO: 43315 - DNA, 13 bp, Artificial Sequence
  Oligonucleotide for detection of SNP TSC0012826
aaggtttggtatg

SEQ ID NO: 43316 - DNA, 13 bp, Artificial Sequence
  Oligonucleotide for detection of SNP TSC0012826
cataccaaacctt

SEQ ID NO: 43317 - DNA, 13 bp, Artificial Sequence
  Oligonucleotide for detection of SNP TSC0012826
tatgtttaatttt

SEQ ID NO: 43318 - DNA, 13 bp, Artificial Sequence
  Oligonucleotide for detection of SNP TSC0012826
aaaattaaacata

SEQ ID NO: 43319 - DNA, 13 bp, Artificial Sequence
  Oligonucleotide for detection of SNP TSC0012826
tatgttaaatttt

SEQ ID NO: 43320 - DNA, 13 bp, Artificial Sequence
  Oligonucleotide for detection of SNP TSC0012826
aaaatttaacata

SEQ ID NO: 43321 - DNA, 13 bp, Artificial Sequence
  Oligonucleotide for detection of SNP TSC0012827
gtaggtatgaaga

SEQ ID NO: 43322 - DNA, 13 bp, Artificial Sequence
  Oligonucleotide for detection of SNP TSC0012827
tcttcatacctac

SEQ ID NO: 43323 - DNA, 13 bp, Artificial Sequence
  Oligonucleotide for detection of SNP TSC0012827
gtaggtgtgaaga

SEQ ID NO: 43324 - DNA, 13 bp, Artificial Sequence
  Oligonucleotide for detection of SNP TSC0012827
tcttcacacctac

SEQ ID NO: 43325 - DNA, 13 bp, Artificial Sequence
  Oligonucleotide for detection of SNP TSC0012827
gtaggcgtgaaga

SEQ ID NO: 43326 - DNA, 13 bp, Artificial Sequence
  Oligonucleotide for detection of SNP TSC0012827
tcttcacgcctac

SEQ ID NO: 43327 - DNA, 13 bp, Artificial Sequence
  Oligonucleotide for detection of SNP TSC0012830
gggatggaataga

SEQ ID NO: 43328 - DNA, 13 bp, Artificial Sequence
  Oligonucleotide for detection of SNP TSC0012830
tctattccatccc

SEQ ID NO: 43329 - DNA, 13 bp, Artificial Sequence
  Oligonucleotide for detection of SNP TSC0012830
gggatgaaataga

SEQ ID NO: 43330 - DNA, 13 bp, Artificial Sequence
  Oligonucleotide for detection of SNP TSC0012830
tctatttcatccc

SEQ ID NO: 43331 - DNA, 13 bp, Artificial Sequence
  Oligonucleotide for detection of SNP TSC0012831
attttaattgttt

SEQ ID NO: 43332 - DNA, 13 bp, Artificial Sequence
  Oligonucleotide for detection of SNP TSC0012831
aaacaattaaaat

SEQ ID NO: 43333 - DNA, 13 bp, Artificial Sequence
  Oligonucleotide for detection of SNP TSC0012831
attttatttgttt

SEQ ID NO: 43334 - DNA, 13 bp, Artificial Sequence
  Oligonucleotide for detection of SNP TSC0012831
aaacaaataaaat

SEQ ID NO: 43335 - DNA, 13 bp, Artificial Sequence
  Oligonucleotide for detection of SNP TSC0012831
attttaatcgttt

SEQ ID NO: 43336 - DNA, 13 bp, Artificial Sequence
  Oligonucleotide for detection of SNP TSC0012831
aaacgattaaaat

SEQ ID NO: 43337 - DNA, 13 bp, Artificial Sequence
  Oligonucleotide for detection of SNP TSC0012831
attttattcgttt

SEQ ID NO: 43338 - DNA, 13 bp, Artificial Sequence
  Oligonucleotide for detection of SNP TSC0012831
aaacgaataaaat

SEQ ID NO: 43339 - DNA, 13 bp, Artificial Sequence
  Oligonucleotide for detection of SNP TSC0012831
aaatgattgaagt

SEQ ID NO: 43340 - DNA, 13 bp, Artificial Sequence
  Oligonucleotide for detection of SNP TSC0012831
acttcaatcattt

SEQ ID NO: 43341 - DNA, 13 bp, Artificial Sequence
  Oligonucleotide for detection of SNP TSC0012831
aaatgaatgaagt

SEQ ID NO: 43342 - DNA, 13 bp, Artificial Sequence
  Oligonucleotide for detection of SNP TSC0012831
acttcattcattt

SEQ ID NO: 43343 - DNA, 13 bp, Artificial Sequence
  Oligonucleotide for detection of SNP TSC0012831
aaacgattgaagt

SEQ ID NO: 43344 - DNA, 13 bp, Artificial Sequence
  Oligonucleotide for detection of SNP TSC0012831
acttcaatcgttt

SEQ ID NO: 43345 - DNA, 13 bp, Artificial Sequence
  Oligonucleotide for detection of SNP TSC0012831
aaacgaatgaagt

SEQ ID NO: 43346 - DNA, 13 bp, Artificial Sequence
  Oligonucleotide for detection of SNP TSC0012831
acttcattcgttt

SEQ ID NO: 43347 - DNA, 13 bp, Artificial Sequence
  Oligonucleotide for detection of SNP TSC0012832
ttttataatgagg

SEQ ID NO: 43348 - DNA, 13 bp, Artificial Sequence
  Oligonucleotide for detection of SNP TSC0012832
cctcattataaaa

SEQ ID NO: 43349 - DNA, 13 bp, Artificial Sequence
  Oligonucleotide for detection of SNP TSC0012832
ttttattatgagg

SEQ ID NO: 43350 - DNA, 13 bp, Artificial Sequence
  Oligonucleotide for detection of SNP TSC0012832
cctcataataaaa

SEQ ID NO: 43351 - DNA, 13 bp, Artificial Sequence
  Oligonucleotide for detection of SNP TSC0012835
tttaagaattgaa

SEQ ID NO: 43352 - DNA, 13 bp, Artificial Sequence
  Oligonucleotide for detection of SNP TSC0012835
ttcaattcttaaa

SEQ ID NO: 43353 - DNA, 13 bp, Artificial Sequence
  Oligonucleotide for detection of SNP TSC0012835
tttaaggattgaa

SEQ ID NO: 43354 - DNA, 13 bp, Artificial Sequence
  Oligonucleotide for detection of SNP TSC0012835
ttcaatccttaaa

SEQ ID NO: 43355 - DNA, 13 bp, Artificial Sequence
  Oligonucleotide for detection of SNP TSC0012836
tatgagagatagt

SEQ ID NO: 43356 - DNA, 13 bp, Artificial Sequence
  Oligonucleotide for detection of SNP TSC0012836
actatctctcata

SEQ ID NO: 43357 - DNA, 13 bp, Artificial Sequence
  Oligonucleotide for detection of SNP TSC0012836
tatgagggatagt

SEQ ID NO: 43358 - DNA, 13 bp, Artificial Sequence
  Oligonucleotide for detection of SNP TSC0012836
actatccctcata

SEQ ID NO: 43359 - DNA, 13 bp, Artificial Sequence
  Oligonucleotide for detection of SNP TSC0012837
ggataggattgta

SEQ ID NO: 43360 - DNA, 13 bp, Artificial Sequence
  Oligonucleotide for detection of SNP TSC0012837
tacaatcctatcc

SEQ ID NO: 43361 - DNA, 13 bp, Artificial Sequence
  Oligonucleotide for detection of SNP TSC0012837
ggatagaattgta

SEQ ID NO: 43362 - DNA, 13 bp, Artificial Sequence
  Oligonucleotide for detection of SNP TSC0012837
tacaattctatcc

SEQ ID NO: 43363 - DNA, 13 bp, Artificial Sequence
  Oligonucleotide for detection of SNP TSC0012838
taaatattttgta

SEQ ID NO: 43364 - DNA, 13 bp, Artificial Sequence
  Oligonucleotide for detection of SNP TSC0012838
tacaaaatattta

SEQ ID NO: 43365 - DNA, 13 bp, Artificial Sequence
  Oligonucleotide for detection of SNP TSC0012838
taaatagtttgta

SEQ ID NO: 43366 - DNA, 13 bp, Artificial Sequence
  Oligonucleotide for detection of SNP TSC0012838
tacaaactattta

SEQ ID NO: 43367 - DNA, 13 bp, Artificial Sequence
  Oligonucleotide for detection of SNP TSC0012838
tgtaaagtattta

SEQ ID NO: 43368 - DNA, 13 bp, Artificial Sequence
  Oligonucleotide for detection of SNP TSC0012838
taaatactttaca

SEQ ID NO: 43369 - DNA, 13 bp, Artificial Sequence
  Oligonucleotide for detection of SNP TSC0012838
tgtaaattattta

SEQ ID NO: 43370 - DNA, 13 bp, Artificial Sequence
  Oligonucleotide for detection of SNP TSC0012838
taaataatttaca

SEQ ID NO: 43371 - DNA, 13 bp, Artificial Sequence
  Oligonucleotide for detection of SNP TSC0012839
tgtaaatagtaay

SEQ ID NO: 43372 - DNA, 13 bp, Artificial Sequence
  Oligonucleotide for detection of SNP TSC0012839
rttactatttaca

SEQ ID NO: 43373 - DNA, 13 bp, Artificial Sequence
  Oligonucleotide for detection of SNP TSC0012839
tgtaaagagtaay

SEQ ID NO: 43374 - DNA, 13 bp, Artificial Sequence
  Oligonucleotide for detection of SNP TSC0012839
rttactctttaca

SEQ ID NO: 43375 - DNA, 13 bp, Artificial Sequence
  Oligonucleotide for detection of SNP TSC0012839
gttattgtttgta

SEQ ID NO: 43376 - DNA, 13 bp, Artificial Sequence
  Oligonucleotide for detection of SNP TSC0012839
tacaaacaataac

SEQ ID NO: 43377 - DNA, 13 bp, Artificial Sequence
  Oligonucleotide for detection of SNP TSC0012839
gttattttttgta

SEQ ID NO: 43378 - DNA, 13 bp, Artificial Sequence
  Oligonucleotide for detection of SNP TSC0012839
tacaaaaaataac

SEQ ID NO: 43379 - DNA, 13 bp, Artificial Sequence
  Oligonucleotide for detection of SNP TSC0012840
attttttgttata

SEQ ID NO: 43380 - DNA, 13 bp, Artificial Sequence
  Oligonucleotide for detection of SNP TSC0012840
tataacaaaaaat

SEQ ID NO: 43381 - DNA, 13 bp, Artificial Sequence
  Oligonucleotide for detection of SNP TSC0012840
atttttggttata

SEQ ID NO: 43382 - DNA, 13 bp, Artificial Sequence
  Oligonucleotide for detection of SNP TSC0012840
tataaccaaaaat

SEQ ID NO: 43383 - DNA, 13 bp, Artificial Sequence
  Oligonucleotide for detection of SNP TSC0012840
atttttcgttata

SEQ ID NO: 43384 - DNA, 13 bp, Artificial Sequence
  Oligonucleotide for detection of SNP TSC0012840
tataacgaaaaat

SEQ ID NO: 43385 - DNA, 13 bp, Artificial Sequence
  Oligonucleotide for detection of SNP TSC0012840
tgtaatgaaagat

SEQ ID NO: 43386 - DNA, 13 bp, Artificial Sequence
  Oligonucleotide for detection of SNP TSC0012840
atctttcattaca

SEQ ID NO: 43387 - DNA, 13 bp, Artificial Sequence
  Oligonucleotide for detection of SNP TSC0012840
tgtaattaaagat

SEQ ID NO: 43388 - DNA, 13 bp, Artificial Sequence
  Oligonucleotide for detection of SNP TSC0012840
atctttaattaca

SEQ ID NO: 43389 - DNA, 13 bp, Artificial Sequence
  Oligonucleotide for detection of SNP TSC0012840
tgtaacgaaagat

SEQ ID NO: 43390 - DNA, 13 bp, Artificial Sequence
  Oligonucleotide for detection of SNP TSC0012840
atctttcgttaca

SEQ ID NO: 43391 - DNA, 13 bp, Artificial Sequence
  Oligonucleotide for detection of SNP TSC0012841
tttaataggatty

SEQ ID NO: 43392 - DNA, 13 bp, Artificial Sequence
  Oligonucleotide for detection of SNP TSC0012841
raatcctattaaa

SEQ ID NO: 43393 - DNA, 13 bp, Artificial Sequence
  Oligonucleotide for detection of SNP TSC0012841
tttaattggatty

SEQ ID NO: 43394 - DNA, 13 bp, Artificial Sequence
  Oligonucleotide for detection of SNP TSC0012841
raatccaattaaa

SEQ ID NO: 43395 - DNA, 13 bp, Artificial Sequence
  Oligonucleotide for detection of SNP TSC0012841
gagttttgttaag

SEQ ID NO: 43396 - DNA, 13 bp, Artificial Sequence
  Oligonucleotide for detection of SNP TSC0012841
cttaacaaaactc

SEQ ID NO: 43397 - DNA, 13 bp, Artificial Sequence
  Oligonucleotide for detection of SNP TSC0012841
gagtttagttaag

SEQ ID NO: 43398 - DNA, 13 bp, Artificial Sequence
  Oligonucleotide for detection of SNP TSC0012841
cttaactaaactc

SEQ ID NO: 43399 - DNA, 13 bp, Artificial Sequence
  Oligonucleotide for detection of SNP TSC0012842
aagatatgtaaaa

SEQ ID NO: 43400 - DNA, 13 bp, Artificial Sequence
  Oligonucleotide for detection of SNP TSC0012842
ttttacatatctt

SEQ ID NO: 43401 - DNA, 13 bp, Artificial Sequence
  Oligonucleotide for detection of SNP TSC0012842
aagatacgtaaaa

SEQ ID NO: 43402 - DNA, 13 bp, Artificial Sequence
  Oligonucleotide for detection of SNP TSC0012842
ttttacgtatctt

SEQ ID NO: 43403 - DNA, 13 bp, Artificial Sequence
  Oligonucleotide for detection of SNP TSC0012843
ataaataatttta

SEQ ID NO: 43404 - DNA, 13 bp, Artificial Sequence
  Oligonucleotide for detection of SNP TSC0012843
taaaattatttat

SEQ ID NO: 43405 - DNA, 13 bp, Artificial Sequence
  Oligonucleotide for detection of SNP TSC0012843
ataaatgatttta

SEQ ID NO: 43406 - DNA, 13 bp, Artificial Sequence
  Oligonucleotide for detection of SNP TSC0012843
taaaatcatttat

SEQ ID NO: 43407 - DNA, 13 bp, Artificial Sequence
  Oligonucleotide for detection of SNP TSC0012844
tgtagagggaatt

SEQ ID NO: 43408 - DNA, 13 bp, Artificial Sequence
  Oligonucleotide for detection of SNP TSC0012844
aattccctctaca

SEQ ID NO: 43409 - DNA, 13 bp, Artificial Sequence
  Oligonucleotide for detection of SNP TSC0012844
tgtagaaggaatt

SEQ ID NO: 43410 - DNA, 13 bp, Artificial Sequence
  Oligonucleotide for detection of SNP TSC0012844
aattccttctaca

SEQ ID NO: 43411 - DNA, 13 bp, Artificial Sequence
  Oligonucleotide for detection of SNP TSC0012848
ttagttatttttg

SEQ ID NO: 43412 - DNA, 13 bp, Artificial Sequence
  Oligonucleotide for detection of SNP TSC0012848
caaaaataactaa

SEQ ID NO: 43413 - DNA, 13 bp, Artificial Sequence
  Oligonucleotide for detection of SNP TSC0012848
ttagttattttcg

SEQ ID NO: 43414 - DNA, 13 bp, Artificial Sequence
  Oligonucleotide for detection of SNP TSC0012848
cgaaaataactaa

SEQ ID NO: 43415 - DNA, 13 bp, Artificial Sequence
  Oligonucleotide for detection of SNP TSC0012848
ttagttgttttcg

SEQ ID NO: 43416 - DNA, 13 bp, Artificial Sequence
  Oligonucleotide for detection of SNP TSC0012848
cgaaaacaactaa

SEQ ID NO: 43417 - DNA, 13 bp, Artificial Sequence
  Oligonucleotide for detection of SNP TSC0012849
atttttaggatag

SEQ ID NO: 43418 - DNA, 13 bp, Artificial Sequence
  Oligonucleotide for detection of SNP TSC0012849
ctatcctaaaaat

SEQ ID NO: 43419 - DNA, 13 bp, Artificial Sequence
  Oligonucleotide for detection of SNP TSC0012849
atttttgggatag

SEQ ID NO: 43420 - DNA, 13 bp, Artificial Sequence
  Oligonucleotide for detection of SNP TSC0012849
ctatcccaaaaat

SEQ ID NO: 43421 - DNA, 13 bp, Artificial Sequence
  Oligonucleotide for detection of SNP TSC0012849
attttcgggatag

SEQ ID NO: 43422 - DNA, 13 bp, Artificial Sequence
  Oligonucleotide for detection of SNP TSC0012849
ctatcccgaaaat

SEQ ID NO: 43423 - DNA, 13 bp, Artificial Sequence
  Oligonucleotide for detection of SNP TSC0012849
ttgttttggggat

SEQ ID NO: 43424 - DNA, 13 bp, Artificial Sequence
  Oligonucleotide for detection of SNP TSC0012849
atccccaaaacaa

SEQ ID NO: 43425 - DNA, 13 bp, Artificial Sequence
  Oligonucleotide for detection of SNP TSC0012849
ttgtttcggggat

SEQ ID NO: 43426 - DNA, 13 bp, Artificial Sequence
  Oligonucleotide for detection of SNP TSC0012849
atccccgaaacaa

SEQ ID NO: 43427 - DNA, 13 bp, Artificial Sequence
  Oligonucleotide for detection of SNP TSC0012850
ttttggaagttty

SEQ ID NO: 43428 - DNA, 13 bp, Artificial Sequence
  Oligonucleotide for detection of SNP TSC0012850
raaacttccaaaa

SEQ ID NO: 43429 - DNA, 13 bp, Artificial Sequence
  Oligonucleotide for detection of SNP TSC0012850
ttttgggagttty

SEQ ID NO: 43430 - DNA, 13 bp, Artificial Sequence
  Oligonucleotide for detection of SNP TSC0012850
raaactcccaaaa

SEQ ID NO: 43431 - DNA, 13 bp, Artificial Sequence
  Oligonucleotide for detection of SNP TSC0012851
tatttataatgaa

SEQ ID NO: 43432 - DNA, 13 bp, Artificial Sequence
  Oligonucleotide for detection of SNP TSC0012851
ttcattataaata

SEQ ID NO: 43433 - DNA, 13 bp, Artificial Sequence
  Oligonucleotide for detection of SNP TSC0012851
tatttaaaatgaa

SEQ ID NO: 43434 - DNA, 13 bp, Artificial Sequence
  Oligonucleotide for detection of SNP TSC0012851
ttcattttaaata

SEQ ID NO: 43435 - DNA, 13 bp, Artificial Sequence
  Oligonucleotide for detection of SNP TSC0012854
gagtgaatttttg

SEQ ID NO: 43436 - DNA, 13 bp, Artificial Sequence
  Oligonucleotide for detection of SNP TSC0012854
caaaaattcactc

SEQ ID NO: 43437 - DNA, 13 bp, Artificial Sequence
  Oligonucleotide for detection of SNP TSC0012854
gagtgagtttttg

SEQ ID NO: 43438 - DNA, 13 bp, Artificial Sequence
  Oligonucleotide for detection of SNP TSC0012854
caaaaactcactc

SEQ ID NO: 43439 - DNA, 13 bp, Artificial Sequence
  Oligonucleotide for detection of SNP TSC0012855
attaggttgttta

SEQ ID NO: 43440 - DNA, 13 bp, Artificial Sequence
  Oligonucleotide for detection of SNP TSC0012855
taaacaacctaat

SEQ ID NO: 43441 - DNA, 13 bp, Artificial Sequence
  Oligonucleotide for detection of SNP TSC0012855
attagggtgttta

SEQ ID NO: 43442 - DNA, 13 bp, Artificial Sequence
  Oligonucleotide for detection of SNP TSC0012855
taaacaccctaat

SEQ ID NO: 43443 - DNA, 13 bp, Artificial Sequence
  Oligonucleotide for detection of SNP TSC0012855
taaataatttgat

SEQ ID NO: 43444 - DNA, 13 bp, Artificial Sequence
  Oligonucleotide for detection of SNP TSC0012855
atcaaattattta

SEQ ID NO: 43445 - DNA, 13 bp, Artificial Sequence
  Oligonucleotide for detection of SNP TSC0012855
taaatattttgat

SEQ ID NO: 43446 - DNA, 13 bp, Artificial Sequence
  Oligonucleotide for detection of SNP TSC0012855
atcaaaatattta

SEQ ID NO: 43447 - DNA, 13 bp, Artificial Sequence
  Oligonucleotide for detection of SNP TSC0012856
gatattgtagtgt

SEQ ID NO: 43448 - DNA, 13 bp, Artificial Sequence
  Oligonucleotide for detection of SNP TSC0012856
acactacaatatc

SEQ ID NO: 43449 - DNA, 13 bp, Artificial Sequence
  Oligonucleotide for detection of SNP TSC0012856
gatattatagtgt

SEQ ID NO: 43450 - DNA, 13 bp, Artificial Sequence
  Oligonucleotide for detection of SNP TSC0012856
acactataatatc

SEQ ID NO: 43451 - DNA, 13 bp, Artificial Sequence
  Oligonucleotide for detection of SNP TSC0012857
agttatatatgaa

SEQ ID NO: 43452 - DNA, 13 bp, Artificial Sequence
  Oligonucleotide for detection of SNP TSC0012857
ttcatatataact

SEQ ID NO: 43453 - DNA, 13 bp, Artificial Sequence
  Oligonucleotide for detection of SNP TSC0012857
agttatgtatgaa

SEQ ID NO: 43454 - DNA, 13 bp, Artificial Sequence
  Oligonucleotide for detection of SNP TSC0012857
ttcatacataact

SEQ ID NO: 43455 - DNA, 13 bp, Artificial Sequence
  Oligonucleotide for detection of SNP TSC0012858
gttatagatggga

SEQ ID NO: 43456 - DNA, 13 bp, Artificial Sequence
  Oligonucleotide for detection of SNP TSC0012858
tcccatctataac

SEQ ID NO: 43457 - DNA, 13 bp, Artificial Sequence
  Oligonucleotide for detection of SNP TSC0012858
gttataaatggga

SEQ ID NO: 43458 - DNA, 13 bp, Artificial Sequence
  Oligonucleotide for detection of SNP TSC0012858
tcccatttataac

SEQ ID NO: 43459 - DNA, 13 bp, Artificial Sequence
  Oligonucleotide for detection of SNP TSC0012861
atttatatagttg

SEQ ID NO: 43460 - DNA, 13 bp, Artificial Sequence
  Oligonucleotide for detection of SNP TSC0012861
caactatataaat

SEQ ID NO: 43461 - DNA, 13 bp, Artificial Sequence
  Oligonucleotide for detection of SNP TSC0012861
atttatgtagttg

SEQ ID NO: 43462 - DNA, 13 bp, Artificial Sequence
  Oligonucleotide for detection of SNP TSC0012861
caactacataaat

SEQ ID NO: 43463 - DNA, 13 bp, Artificial Sequence
  Oligonucleotide for detection of SNP TSC0012861
atttacgtagttg

SEQ ID NO: 43464 - DNA, 13 bp, Artificial Sequence
  Oligonucleotide for detection of SNP TSC0012861
caactacgtaaat

SEQ ID NO: 43465 - DNA, 13 bp, Artificial Sequence
  Oligonucleotide for detection of SNP TSC0012861
taattgtgtgaat

SEQ ID NO: 43466 - DNA, 13 bp, Artificial Sequence
  Oligonucleotide for detection of SNP TSC0012861
attcacacaatta

SEQ ID NO: 43467 - DNA, 13 bp, Artificial Sequence
  Oligonucleotide for detection of SNP TSC0012861
taattgcgtgaat

SEQ ID NO: 43468 - DNA, 13 bp, Artificial Sequence
  Oligonucleotide for detection of SNP TSC0012861
attcacgcaatta

SEQ ID NO: 43469 - DNA, 13 bp, Artificial Sequence
  Oligonucleotide for detection of SNP TSC0012862
tgtgtggtattay

SEQ ID NO: 43470 - DNA, 13 bp, Artificial Sequence
  Oligonucleotide for detection of SNP TSC0012862
rtaataccacaca

SEQ ID NO: 43471 - DNA, 13 bp, Artificial Sequence
  Oligonucleotide for detection of SNP TSC0012862
tgtgtgatattay

SEQ ID NO: 43472 - DNA, 13 bp, Artificial Sequence
  Oligonucleotide for detection of SNP TSC0012862
rtaatatcacaca

SEQ ID NO: 43473 - DNA, 13 bp, Artificial Sequence
  Oligonucleotide for detection of SNP TSC0012863
ttttagaggtaay

SEQ ID NO: 43474 - DNA, 13 bp, Artificial Sequence
  Oligonucleotide for detection of SNP TSC0012863
rttacctctaaaa

SEQ ID NO: 43475 - DNA, 13 bp, Artificial Sequence
  Oligonucleotide for detection of SNP TSC0012863
ttttagtggtaay

SEQ ID NO: 43476 - DNA, 13 bp, Artificial Sequence
  Oligonucleotide for detection of SNP TSC0012863
rttaccactaaaa

SEQ ID NO: 43477 - DNA, 13 bp, Artificial Sequence
  Oligonucleotide for detection of SNP TSC0012863
ttttagcggtaay

SEQ ID NO: 43478 - DNA, 13 bp, Artificial Sequence
  Oligonucleotide for detection of SNP TSC0012863
rttaccgctaaaa

SEQ ID NO: 43479 - DNA, 13 bp, Artificial Sequence
  Oligonucleotide for detection of SNP TSC0012863
gttgtttttggag

SEQ ID NO: 43480 - DNA, 13 bp, Artificial Sequence
  Oligonucleotide for detection of SNP TSC0012863
ctccaaaaacaac

SEQ ID NO: 43481 - DNA, 13 bp, Artificial Sequence
  Oligonucleotide for detection of SNP TSC0012863
gttgttgttggag

SEQ ID NO: 43482 - DNA, 13 bp, Artificial Sequence
  Oligonucleotide for detection of SNP TSC0012863
ctccaacaacaac

SEQ ID NO: 43483 - DNA, 13 bp, Artificial Sequence
  Oligonucleotide for detection of SNP TSC0012863
gttgtcgttggag

SEQ ID NO: 43484 - DNA, 13 bp, Artificial Sequence
  Oligonucleotide for detection of SNP TSC0012863
ctccaacgacaac

SEQ ID NO: 43485 - DNA, 13 bp, Artificial Sequence
  Oligonucleotide for detection of SNP TSC0012864
tggagagtttttg

SEQ ID NO: 43486 - DNA, 13 bp, Artificial Sequence
  Oligonucleotide for detection of SNP TSC0012864
caaaaactctcca

SEQ ID NO: 43487 - DNA, 13 bp, Artificial Sequence
  Oligonucleotide for detection of SNP TSC0012864
tggagattttttg

SEQ ID NO: 43488 - DNA, 13 bp, Artificial Sequence
  Oligonucleotide for detection of SNP TSC0012864
caaaaaatctcca

SEQ ID NO: 43489 - DNA, 13 bp, Artificial Sequence
  Oligonucleotide for detection of SNP TSC0012864
taggagtttttta

SEQ ID NO: 43490 - DNA, 13 bp, Artificial Sequence
  Oligonucleotide for detection of SNP TSC0012864
taaaaaactccta

SEQ ID NO: 43491 - DNA, 13 bp, Artificial Sequence
  Oligonucleotide for detection of SNP TSC0012864
taggagattttta

SEQ ID NO: 43492 - DNA, 13 bp, Artificial Sequence
  Oligonucleotide for detection of SNP TSC0012864
taaaaatctccta

SEQ ID NO: 43493 - DNA, 13 bp, Artificial Sequence
  Oligonucleotide for detection of SNP TSC0012865
ggttattgattgg

SEQ ID NO: 43494 - DNA, 13 bp, Artificial Sequence
  Oligonucleotide for detection of SNP TSC0012865
ccaatcaataacc

SEQ ID NO: 43495 - DNA, 13 bp, Artificial Sequence
  Oligonucleotide for detection of SNP TSC0012865
ggttatcgattgg

SEQ ID NO: 43496 - DNA, 13 bp, Artificial Sequence
  Oligonucleotide for detection of SNP TSC0012865
ccaatcgataacc

SEQ ID NO: 43497 - DNA, 13 bp, Artificial Sequence
  Oligonucleotide for detection of SNP TSC0012865
ttaattggtgaty

SEQ ID NO: 43498 - DNA, 13 bp, Artificial Sequence
  Oligonucleotide for detection of SNP TSC0012865
ratcaccaattaa

SEQ ID NO: 43499 - DNA, 13 bp, Artificial Sequence
  Oligonucleotide for detection of SNP TSC0012865
ttaattagtgaty

SEQ ID NO: 43500 - DNA, 13 bp, Artificial Sequence
  Oligonucleotide for detection of SNP TSC0012865
ratcactaattaa

SEQ ID NO: 43501 - DNA, 13 bp, Artificial Sequence
  Oligonucleotide for detection of SNP TSC0012865
ttaatcggtgaty

SEQ ID NO: 43502 - DNA, 13 bp, Artificial Sequence
  Oligonucleotide for detection of SNP TSC0012865
ratcaccgattaa

SEQ ID NO: 43503 - DNA, 13 bp, Artificial Sequence
  Oligonucleotide for detection of SNP TSC0012866
ttgaggagggtgg

SEQ ID NO: 43504 - DNA, 13 bp, Artificial Sequence
  Oligonucleotide for detection of SNP TSC0012866
ccaccctcctcaa

SEQ ID NO: 43505 - DNA, 13 bp, Artificial Sequence
  Oligonucleotide for detection of SNP TSC0012866
ttgaggtgggtgg

SEQ ID NO: 43506 - DNA, 13 bp, Artificial Sequence
  Oligonucleotide for detection of SNP TSC0012866
ccacccacctcaa

SEQ ID NO: 43507 - DNA, 13 bp, Artificial Sequence
  Oligonucleotide for detection of SNP TSC0012866
ttgaggcgggtgg

SEQ ID NO: 43508 - DNA, 13 bp, Artificial Sequence
  Oligonucleotide for detection of SNP TSC0012866
ccacccgcctcaa

SEQ ID NO: 43509 - DNA, 13 bp, Artificial Sequence
  Oligonucleotide for detection of SNP TSC0012867
gagttaatagtgy

SEQ ID NO: 43510 - DNA, 13 bp, Artificial Sequence
  Oligonucleotide for detection of SNP TSC0012867
rcactattaactc

SEQ ID NO: 43511 - DNA, 13 bp, Artificial Sequence
  Oligonucleotide for detection of SNP TSC0012867
gagttattagtgy

SEQ ID NO: 43512 - DNA, 13 bp, Artificial Sequence
  Oligonucleotide for detection of SNP TSC0012867
rcactaataactc

SEQ ID NO: 43513 - DNA, 13 bp, Artificial Sequence
  Oligonucleotide for detection of SNP TSC0012867
gtattgttgatty

SEQ ID NO: 43514 - DNA, 13 bp, Artificial Sequence
  Oligonucleotide for detection of SNP TSC0012867
raatcaacaatac

SEQ ID NO: 43515 - DNA, 13 bp, Artificial Sequence
  Oligonucleotide for detection of SNP TSC0012867
gtattggtgatty

SEQ ID NO: 43516 - DNA, 13 bp, Artificial Sequence
  Oligonucleotide for detection of SNP TSC0012867
raatcaccaatac

SEQ ID NO: 43517 - DNA, 13 bp, Artificial Sequence
  Oligonucleotide for detection of SNP TSC0012868
atagtgttataay

SEQ ID NO: 43518 - DNA, 13 bp, Artificial Sequence
  Oligonucleotide for detection of SNP TSC0012868
rttataacactat

SEQ ID NO: 43519 - DNA, 13 bp, Artificial Sequence
  Oligonucleotide for detection of SNP TSC0012868
atagtggtataay

SEQ ID NO: 43520 - DNA, 13 bp, Artificial Sequence
  Oligonucleotide for detection of SNP TSC0012868
rttataccactat

SEQ ID NO: 43521 - DNA, 13 bp, Artificial Sequence
  Oligonucleotide for detection of SNP TSC0012868
gttatggtattgt

SEQ ID NO: 43522 - DNA, 13 bp, Artificial Sequence
  Oligonucleotide for detection of SNP TSC0012868
acaataccataac

SEQ ID NO: 43523 - DNA, 13 bp, Artificial Sequence
  Oligonucleotide for detection of SNP TSC0012868
gttatgttattgt

SEQ ID NO: 43524 - DNA, 13 bp, Artificial Sequence
  Oligonucleotide for detection of SNP TSC0012868
acaataacataac

SEQ ID NO: 43525 - DNA, 13 bp, Artificial Sequence
  Oligonucleotide for detection of SNP TSC0012869
agtattgttgtag

SEQ ID NO: 43526 - DNA, 13 bp, Artificial Sequence
  Oligonucleotide for detection of SNP TSC0012869
ctacaacaatact

SEQ ID NO: 43527 - DNA, 13 bp, Artificial Sequence
  Oligonucleotide for detection of SNP TSC0012869
agtattattgtag

SEQ ID NO: 43528 - DNA, 13 bp, Artificial Sequence
  Oligonucleotide for detection of SNP TSC0012869
ctacaataatact

SEQ ID NO: 43529 - DNA, 13 bp, Artificial Sequence
  Oligonucleotide for detection of SNP TSC0012870
ttatgtaggtgat

SEQ ID NO: 43530 - DNA, 13 bp, Artificial Sequence
  Oligonucleotide for detection of SNP TSC0012870
atcacctacataa

SEQ ID NO: 43531 - DNA, 13 bp, Artificial Sequence
  Oligonucleotide for detection of SNP TSC0012870
ttatgtgggtgat

SEQ ID NO: 43532 - DNA, 13 bp, Artificial Sequence
  Oligonucleotide for detection of SNP TSC0012870
atcacccacataa

SEQ ID NO: 43533 - DNA, 13 bp, Artificial Sequence
  Oligonucleotide for detection of SNP TSC0012870
ttacgtaggtgat

SEQ ID NO: 43534 - DNA, 13 bp, Artificial Sequence
  Oligonucleotide for detection of SNP TSC0012870
atcacctacgtaa

SEQ ID NO: 43535 - DNA, 13 bp, Artificial Sequence
  Oligonucleotide for detection of SNP TSC0012870
ttacgtgggtgat

SEQ ID NO: 43536 - DNA, 13 bp, Artificial Sequence
  Oligonucleotide for detection of SNP TSC0012870
atcacccacgtaa

SEQ ID NO: 43537 - DNA, 13 bp, Artificial Sequence
  Oligonucleotide for detection of SNP TSC0012870
ttatgcgggtgat

SEQ ID NO: 43538 - DNA, 13 bp, Artificial Sequence
  Oligonucleotide for detection of SNP TSC0012870
atcacccgcataa

SEQ ID NO: 43539 - DNA, 13 bp, Artificial Sequence
  Oligonucleotide for detection of SNP TSC0012870
ttacgcgggtgat

SEQ ID NO: 43540 - DNA, 13 bp, Artificial Sequence
  Oligonucleotide for detection of SNP TSC0012870
atcacccgcgtaa

SEQ ID NO: 43541 - DNA, 13 bp, Artificial Sequence
  Oligonucleotide for detection of SNP TSC0012870
attatttgtgtgg

SEQ ID NO: 43542 - DNA, 13 bp, Artificial Sequence
  Oligonucleotide for detection of SNP TSC0012870
ccacacaaataat

SEQ ID NO: 43543 - DNA, 13 bp, Artificial Sequence
  Oligonucleotide for detection of SNP TSC0012870
attatttgcgtgg

SEQ ID NO: 43544 - DNA, 13 bp, Artificial Sequence
  Oligonucleotide for detection of SNP TSC0012870
ccacgcaaataat

SEQ ID NO: 43545 - DNA, 13 bp, Artificial Sequence
  Oligonucleotide for detection of SNP TSC0012870
attattcgtgtgg

SEQ ID NO: 43546 - DNA, 13 bp, Artificial Sequence
  Oligonucleotide for detection of SNP TSC0012870
ccacacgaataat

SEQ ID NO: 43547 - DNA, 13 bp, Artificial Sequence
  Oligonucleotide for detection of SNP TSC0012870
attattcgcgtgg

SEQ ID NO: 43548 - DNA, 13 bp, Artificial Sequence
  Oligonucleotide for detection of SNP TSC0012870
ccacgcgaataat

SEQ ID NO: 43549 - DNA, 13 bp, Artificial Sequence
  Oligonucleotide for detection of SNP TSC0012871
gtttgaattttty

SEQ ID NO: 43550 - DNA, 13 bp, Artificial Sequence
  Oligonucleotide for detection of SNP TSC0012871
raaaaattcaaac

SEQ ID NO: 43551 - DNA, 13 bp, Artificial Sequence
  Oligonucleotide for detection of SNP TSC0012871
gtttgatttttty

SEQ ID NO: 43552 - DNA, 13 bp, Artificial Sequence
  Oligonucleotide for detection of SNP TSC0012871
raaaaaatcaaac

SEQ ID NO: 43553 - DNA, 13 bp, Artificial Sequence
  Oligonucleotide for detection of SNP TSC0012871
gggagatttaggy

SEQ ID NO: 43554 - DNA, 13 bp, Artificial Sequence
  Oligonucleotide for detection of SNP TSC0012871
rcctaaatctccc

SEQ ID NO: 43555 - DNA, 13 bp, Artificial Sequence
  Oligonucleotide for detection of SNP TSC0012871
gggagagttaggy

SEQ ID NO: 43556 - DNA, 13 bp, Artificial Sequence
  Oligonucleotide for detection of SNP TSC0012871
rcctaactctccc

SEQ ID NO: 43557 - DNA, 13 bp, Artificial Sequence
  Oligonucleotide for detection of SNP TSC0012872
gttgaaggttgtt

SEQ ID NO: 43558 - DNA, 13 bp, Artificial Sequence
  Oligonucleotide for detection of SNP TSC0012872
aacaaccttcaac

SEQ ID NO: 43559 - DNA, 13 bp, Artificial Sequence
  Oligonucleotide for detection of SNP TSC0012872
gttgaaagttgtt

SEQ ID NO: 43560 - DNA, 13 bp, Artificial Sequence
  Oligonucleotide for detection of SNP TSC0012872
aacaactttcaac

SEQ ID NO: 43561 - DNA, 13 bp, Artificial Sequence
  Oligonucleotide for detection of SNP TSC0012875
aattttaatttta

SEQ ID NO: 43562 - DNA, 13 bp, Artificial Sequence
  Oligonucleotide for detection of SNP TSC0012875
taaaattaaaatt

SEQ ID NO: 43563 - DNA, 13 bp, Artificial Sequence
  Oligonucleotide for detection of SNP TSC0012875
aatttttatttta

SEQ ID NO: 43564 - DNA, 13 bp, Artificial Sequence
  Oligonucleotide for detection of SNP TSC0012875
taaaataaaaatt

SEQ ID NO: 43565 - DNA, 13 bp, Artificial Sequence
  Oligonucleotide for detection of SNP TSC0012875
tgggattaaaatt

SEQ ID NO: 43566 - DNA, 13 bp, Artificial Sequence
  Oligonucleotide for detection of SNP TSC0012875
aattttaatccca

SEQ ID NO: 43567 - DNA, 13 bp, Artificial Sequence
  Oligonucleotide for detection of SNP TSC0012875
tgggatgaaaatt

SEQ ID NO: 43568 - DNA, 13 bp, Artificial Sequence
  Oligonucleotide for detection of SNP TSC0012875
aattttcatccca

SEQ ID NO: 43569 - DNA, 13 bp, Artificial Sequence
  Oligonucleotide for detection of SNP TSC0012877
atttatagaggtg

SEQ ID NO: 43570 - DNA, 13 bp, Artificial Sequence
  Oligonucleotide for detection of SNP TSC0012877
cacctctataaat

SEQ ID NO: 43571 - DNA, 13 bp, Artificial Sequence
  Oligonucleotide for detection of SNP TSC0012877
atttatggaggtg

SEQ ID NO: 43572 - DNA, 13 bp, Artificial Sequence
  Oligonucleotide for detection of SNP TSC0012877
cacctccataaat

SEQ ID NO: 43573 - DNA, 13 bp, Artificial Sequence
  Oligonucleotide for detection of SNP TSC0012877
atttatagaggcg

SEQ ID NO: 43574 - DNA, 13 bp, Artificial Sequence
  Oligonucleotide for detection of SNP TSC0012877
cgcctctataaat

SEQ ID NO: 43575 - DNA, 13 bp, Artificial Sequence
  Oligonucleotide for detection of SNP TSC0012877
atttacggaggtg

SEQ ID NO: 43576 - DNA, 13 bp, Artificial Sequence
  Oligonucleotide for detection of SNP TSC0012877
cacctccgtaaat

SEQ ID NO: 43577 - DNA, 13 bp, Artificial Sequence
  Oligonucleotide for detection of SNP TSC0012877
atttatggaggcg

SEQ ID NO: 43578 - DNA, 13 bp, Artificial Sequence
  Oligonucleotide for detection of SNP TSC0012877
cgcctccataaat

SEQ ID NO: 43579 - DNA, 13 bp, Artificial Sequence
  Oligonucleotide for detection of SNP TSC0012877
atttacggaggcg

SEQ ID NO: 43580 - DNA, 13 bp, Artificial Sequence
  Oligonucleotide for detection of SNP TSC0012877
cgcctccgtaaat

SEQ ID NO: 43581 - DNA, 13 bp, Artificial Sequence
  Oligonucleotide for detection of SNP TSC0012877
tgtttttgtgggt

SEQ ID NO: 43582 - DNA, 13 bp, Artificial Sequence
  Oligonucleotide for detection of SNP TSC0012877
acccacaaaaaca

SEQ ID NO: 43583 - DNA, 13 bp, Artificial Sequence
  Oligonucleotide for detection of SNP TSC0012877
cgtttttgtgggt

SEQ ID NO: 43584 - DNA, 13 bp, Artificial Sequence
  Oligonucleotide for detection of SNP TSC0012877
acccacaaaaacg

SEQ ID NO: 43585 - DNA, 13 bp, Artificial Sequence
  Oligonucleotide for detection of SNP TSC0012877
tgttttcgtgggt

SEQ ID NO: 43586 - DNA, 13 bp, Artificial Sequence
  Oligonucleotide for detection of SNP TSC0012877
acccacgaaaaca

SEQ ID NO: 43587 - DNA, 13 bp, Artificial Sequence
  Oligonucleotide for detection of SNP TSC0012877
cgttttcgtgggt

SEQ ID NO: 43588 - DNA, 13 bp, Artificial Sequence
  Oligonucleotide for detection of SNP TSC0012877
acccacgaaaacg

SEQ ID NO: 43589 - DNA, 13 bp, Artificial Sequence
  Oligonucleotide for detection of SNP TSC0012878
gttgggaagttta

SEQ ID NO: 43590 - DNA, 13 bp, Artificial Sequence
  Oligonucleotide for detection of SNP TSC0012878
taaacttcccaac

SEQ ID NO: 43591 - DNA, 13 bp, Artificial Sequence
  Oligonucleotide for detection of SNP TSC0012878
gttggggagttta

SEQ ID NO: 43592 - DNA, 13 bp, Artificial Sequence
  Oligonucleotide for detection of SNP TSC0012878
taaactccccaac

SEQ ID NO: 43593 - DNA, 13 bp, Artificial Sequence
  Oligonucleotide for detection of SNP TSC0012882
atatttggataaa

SEQ ID NO: 43594 - DNA, 13 bp, Artificial Sequence
  Oligonucleotide for detection of SNP TSC0012882
tttatccaaatat

SEQ ID NO: 43595 - DNA, 13 bp, Artificial Sequence
  Oligonucleotide for detection of SNP TSC0012882
atatttagataaa

SEQ ID NO: 43596 - DNA, 13 bp, Artificial Sequence
  Oligonucleotide for detection of SNP TSC0012882
tttatctaaatat

SEQ ID NO: 43597 - DNA, 13 bp, Artificial Sequence
  Oligonucleotide for detection of SNP TSC0012883
gataaaattttay

SEQ ID NO: 43598 - DNA, 13 bp, Artificial Sequence
  Oligonucleotide for detection of SNP TSC0012883
rtaaaattttatc

SEQ ID NO: 43599 - DNA, 13 bp, Artificial Sequence
  Oligonucleotide for detection of SNP TSC0012883
gataaatttttay

SEQ ID NO: 43600 - DNA, 13 bp, Artificial Sequence
  Oligonucleotide for detection of SNP TSC0012883
rtaaaaatttatc

SEQ ID NO: 43601 - DNA, 13 bp, Artificial Sequence
  Oligonucleotide for detection of SNP TSC0012883
gtggagttttaty

SEQ ID NO: 43602 - DNA, 13 bp, Artificial Sequence
  Oligonucleotide for detection of SNP TSC0012883
rataaaactccac

SEQ ID NO: 43603 - DNA, 13 bp, Artificial Sequence
  Oligonucleotide for detection of SNP TSC0012883
gtggaggtttaty

SEQ ID NO: 43604 - DNA, 13 bp, Artificial Sequence
  Oligonucleotide for detection of SNP TSC0012883
rataaacctccac

SEQ ID NO: 43605 - DNA, 13 bp, Artificial Sequence
  Oligonucleotide for detection of SNP TSC0012884
tgtataatgttgy

SEQ ID NO: 43606 - DNA, 13 bp, Artificial Sequence
  Oligonucleotide for detection of SNP TSC0012884
rcaacattataca

SEQ ID NO: 43607 - DNA, 13 bp, Artificial Sequence
  Oligonucleotide for detection of SNP TSC0012884
tgtatagtgttgy

SEQ ID NO: 43608 - DNA, 13 bp, Artificial Sequence
  Oligonucleotide for detection of SNP TSC0012884
rcaacactataca

SEQ ID NO: 43609 - DNA, 13 bp, Artificial Sequence
  Oligonucleotide for detection of SNP TSC0012885
tgtataatgtttt

SEQ ID NO: 43610 - DNA, 13 bp, Artificial Sequence
  Oligonucleotide for detection of SNP TSC0012885
aaaacattataca

SEQ ID NO: 43611 - DNA, 13 bp, Artificial Sequence
  Oligonucleotide for detection of SNP TSC0012885
tgtatagtgtttt

SEQ ID NO: 43612 - DNA, 13 bp, Artificial Sequence
  Oligonucleotide for detection of SNP TSC0012885
aaaacactataca

SEQ ID NO: 43613 - DNA, 13 bp, Artificial Sequence
  Oligonucleotide for detection of SNP TSC0012885
cgtataatgtttt

SEQ ID NO: 43614 - DNA, 13 bp, Artificial Sequence
  Oligonucleotide for detection of SNP TSC0012885
aaaacattatacg

SEQ ID NO: 43615 - DNA, 13 bp, Artificial Sequence
  Oligonucleotide for detection of SNP TSC0012885
cgtatagtgtttt

SEQ ID NO: 43616 - DNA, 13 bp, Artificial Sequence
  Oligonucleotide for detection of SNP TSC0012885
aaaacactatacg

SEQ ID NO: 43617 - DNA, 13 bp, Artificial Sequence
  Oligonucleotide for detection of SNP TSC0012886
tgttaaattgatt

SEQ ID NO: 43618 - DNA, 13 bp, Artificial Sequence
  Oligonucleotide for detection of SNP TSC0012886
aatcaatttaaca

SEQ ID NO: 43619 - DNA, 13 bp, Artificial Sequence
  Oligonucleotide for detection of SNP TSC0012886
tgttaatttgatt

SEQ ID NO: 43620 - DNA, 13 bp, Artificial Sequence
  Oligonucleotide for detection of SNP TSC0012886
aatcaaattaaca

SEQ ID NO: 43621 - DNA, 13 bp, Artificial Sequence
  Oligonucleotide for detection of SNP TSC0012886
agttaatttaata

SEQ ID NO: 43622 - DNA, 13 bp, Artificial Sequence
  Oligonucleotide for detection of SNP TSC0012886
tattaaattaact

SEQ ID NO: 43623 - DNA, 13 bp, Artificial Sequence
  Oligonucleotide for detection of SNP TSC0012886
agttaagttaata

SEQ ID NO: 43624 - DNA, 13 bp, Artificial Sequence
  Oligonucleotide for detection of SNP TSC0012886
tattaacttaact

SEQ ID NO: 43625 - DNA, 13 bp, Artificial Sequence
  Oligonucleotide for detection of SNP TSC0012887
aaagtaattagag

SEQ ID NO: 43626 - DNA, 13 bp, Artificial Sequence
  Oligonucleotide for detection of SNP TSC0012887
ctctaattacttt

SEQ ID NO: 43627 - DNA, 13 bp, Artificial Sequence
  Oligonucleotide for detection of SNP TSC0012887
aaagtatttagag

SEQ ID NO: 43628 - DNA, 13 bp, Artificial Sequence
  Oligonucleotide for detection of SNP TSC0012887
ctctaaatacttt

SEQ ID NO: 43629 - DNA, 13 bp, Artificial Sequence
  Oligonucleotide for detection of SNP TSC0012887
ttttggttgtttt

SEQ ID NO: 43630 - DNA, 13 bp, Artificial Sequence
  Oligonucleotide for detection of SNP TSC0012887
aaaacaaccaaaa

SEQ ID NO: 43631 - DNA, 13 bp, Artificial Sequence
  Oligonucleotide for detection of SNP TSC0012887
ttttgggtgtttt

SEQ ID NO: 43632 - DNA, 13 bp, Artificial Sequence
  Oligonucleotide for detection of SNP TSC0012887
aaaacacccaaaa

SEQ ID NO: 43633 - DNA, 13 bp, Artificial Sequence
  Oligonucleotide for detection of SNP TSC0012890
aatttaatttagy

SEQ ID NO: 43634 - DNA, 13 bp, Artificial Sequence
  Oligonucleotide for detection of SNP TSC0012890
rctaaattaaatt

SEQ ID NO: 43635 - DNA, 13 bp, Artificial Sequence
  Oligonucleotide for detection of SNP TSC0012890
aatttagtttagy

SEQ ID NO: 43636 - DNA, 13 bp, Artificial Sequence
  Oligonucleotide for detection of SNP TSC0012890
rctaaactaaatt

SEQ ID NO: 43637 - DNA, 13 bp, Artificial Sequence
  Oligonucleotide for detection of SNP TSC0012892
aatttgatatata

SEQ ID NO: 43638 - DNA, 13 bp, Artificial Sequence
  Oligonucleotide for detection of SNP TSC0012892
tatatatcaaatt

SEQ ID NO: 43639 - DNA, 13 bp, Artificial Sequence
  Oligonucleotide for detection of SNP TSC0012892
aatttggtatata

SEQ ID NO: 43640 - DNA, 13 bp, Artificial Sequence
  Oligonucleotide for detection of SNP TSC0012892
tatataccaaatt

SEQ ID NO: 43641 - DNA, 13 bp, Artificial Sequence
  Oligonucleotide for detection of SNP TSC0012893
attataatttttg

SEQ ID NO: 43642 - DNA, 13 bp, Artificial Sequence
  Oligonucleotide for detection of SNP TSC0012893
caaaaattataat

SEQ ID NO: 43643 - DNA, 13 bp, Artificial Sequence
  Oligonucleotide for detection of SNP TSC0012893
attatattttttg

SEQ ID NO: 43644 - DNA, 13 bp, Artificial Sequence
  Oligonucleotide for detection of SNP TSC0012893
caaaaaatataat

SEQ ID NO: 43645 - DNA, 13 bp, Artificial Sequence
  Oligonucleotide for detection of SNP TSC0012893
attataattttcg

SEQ ID NO: 43646 - DNA, 13 bp, Artificial Sequence
  Oligonucleotide for detection of SNP TSC0012893
cgaaaattataat

SEQ ID NO: 43647 - DNA, 13 bp, Artificial Sequence
  Oligonucleotide for detection of SNP TSC0012893
attatatttttcg

SEQ ID NO: 43648 - DNA, 13 bp, Artificial Sequence
  Oligonucleotide for detection of SNP TSC0012893
cgaaaaatataat

SEQ ID NO: 43649 - DNA, 13 bp, Artificial Sequence
  Oligonucleotide for detection of SNP TSC0012893
tggaggttgtagt

SEQ ID NO: 43650 - DNA, 13 bp, Artificial Sequence
  Oligonucleotide for detection of SNP TSC0012893
actacaacctcca

SEQ ID NO: 43651 - DNA, 13 bp, Artificial Sequence
  Oligonucleotide for detection of SNP TSC0012893
tggagggtgtagt

SEQ ID NO: 43652 - DNA, 13 bp, Artificial Sequence
  Oligonucleotide for detection of SNP TSC0012893
actacaccctcca

SEQ ID NO: 43653 - DNA, 13 bp, Artificial Sequence
  Oligonucleotide for detection of SNP TSC0012893
cggaggttgtagt

SEQ ID NO: 43654 - DNA, 13 bp, Artificial Sequence
  Oligonucleotide for detection of SNP TSC0012893
actacaacctccg

SEQ ID NO: 43655 - DNA, 13 bp, Artificial Sequence
  Oligonucleotide for detection of SNP TSC0012893
cggagggtgtagt

SEQ ID NO: 43656 - DNA, 13 bp, Artificial Sequence
  Oligonucleotide for detection of SNP TSC0012893
actacaccctccg

SEQ ID NO: 43657 - DNA, 13 bp, Artificial Sequence
  Oligonucleotide for detection of SNP TSC0012895
aggttgtggtgag

SEQ ID NO: 43658 - DNA, 13 bp, Artificial Sequence
  Oligonucleotide for detection of SNP TSC0012895
ctcaccacaacct

SEQ ID NO: 43659 - DNA, 13 bp, Artificial Sequence
  Oligonucleotide for detection of SNP TSC0012895
aggttgcggtgag

SEQ ID NO: 43660 - DNA, 13 bp, Artificial Sequence
  Oligonucleotide for detection of SNP TSC0012895
ctcaccgcaacct

SEQ ID NO: 43661 - DNA, 13 bp, Artificial Sequence
  Oligonucleotide for detection of SNP TSC0012895
tttatcgtaattt

SEQ ID NO: 43662 - DNA, 13 bp, Artificial Sequence
  Oligonucleotide for detection of SNP TSC0012895
aaattacgataaa

SEQ ID NO: 43663 - DNA, 13 bp, Artificial Sequence
  Oligonucleotide for detection of SNP TSC0012897
atttttaaaaagg

SEQ ID NO: 43664 - DNA, 13 bp, Artificial Sequence
  Oligonucleotide for detection of SNP TSC0012897
cctttttaaaaat

SEQ ID NO: 43665 - DNA, 13 bp, Artificial Sequence
  Oligonucleotide for detection of SNP TSC0012897
attttttaaaagg

SEQ ID NO: 43666 - DNA, 13 bp, Artificial Sequence
  Oligonucleotide for detection of SNP TSC0012897
ccttttaaaaaat

SEQ ID NO: 43667 - DNA, 13 bp, Artificial Sequence
  Oligonucleotide for detection of SNP TSC0012897
tttttttaggaat

SEQ ID NO: 43668 - DNA, 13 bp, Artificial Sequence
  Oligonucleotide for detection of SNP TSC0012897
attcctaaaaaaa

SEQ ID NO: 43669 - DNA, 13 bp, Artificial Sequence
  Oligonucleotide for detection of SNP TSC0012897
ttttttaaggaat

SEQ ID NO: 43670 - DNA, 13 bp, Artificial Sequence
  Oligonucleotide for detection of SNP TSC0012897
attccttaaaaaa

SEQ ID NO: 43671 - DNA, 13 bp, Artificial Sequence
  Oligonucleotide for detection of SNP TSC0012898
ttgattgtagttt

SEQ ID NO: 43672 - DNA, 13 bp, Artificial Sequence
  Oligonucleotide for detection of SNP TSC0012898
aaactacaatcaa

SEQ ID NO: 43673 - DNA, 13 bp, Artificial Sequence
  Oligonucleotide for detection of SNP TSC0012898
ttgattttagttt

SEQ ID NO: 43674 - DNA, 13 bp, Artificial Sequence
  Oligonucleotide for detection of SNP TSC0012898
aaactaaaatcaa

SEQ ID NO: 43675 - DNA, 13 bp, Artificial Sequence
  Oligonucleotide for detection of SNP TSC0012898
aagttataattag

SEQ ID NO: 43676 - DNA, 13 bp, Artificial Sequence
  Oligonucleotide for detection of SNP TSC0012898
ctaattataactt

SEQ ID NO: 43677 - DNA, 13 bp, Artificial Sequence
  Oligonucleotide for detection of SNP TSC0012898
aagttaaaattag

SEQ ID NO: 43678 - DNA, 13 bp, Artificial Sequence
  Oligonucleotide for detection of SNP TSC0012898
ctaattttaactt

SEQ ID NO: 43679 - DNA, 13 bp, Artificial Sequence
  Oligonucleotide for detection of SNP TSC0012899
tgagaagatttaa

SEQ ID NO: 43680 - DNA, 13 bp, Artificial Sequence
  Oligonucleotide for detection of SNP TSC0012899
ttaaatcttctca

SEQ ID NO: 43681 - DNA, 13 bp, Artificial Sequence
  Oligonucleotide for detection of SNP TSC0012899
tgagaaaatttaa

SEQ ID NO: 43682 - DNA, 13 bp, Artificial Sequence
  Oligonucleotide for detection of SNP TSC0012899
ttaaattttctca

SEQ ID NO: 43683 - DNA, 13 bp, Artificial Sequence
  Oligonucleotide for detection of SNP TSC0012900
tttaggattggtg

SEQ ID NO: 43684 - DNA, 13 bp, Artificial Sequence
  Oligonucleotide for detection of SNP TSC0012900
caccaatcctaaa

SEQ ID NO: 43685 - DNA, 13 bp, Artificial Sequence
  Oligonucleotide for detection of SNP TSC0012900
tttagggttggtg

SEQ ID NO: 43686 - DNA, 13 bp, Artificial Sequence
  Oligonucleotide for detection of SNP TSC0012900
caccaaccctaaa

SEQ ID NO: 43687 - DNA, 13 bp, Artificial Sequence
  Oligonucleotide for detection of SNP TSC0012901
agggtttaggtgy

SEQ ID NO: 43688 - DNA, 13 bp, Artificial Sequence
  Oligonucleotide for detection of SNP TSC0012901
rcacctaaaccct

SEQ ID NO: 43689 - DNA, 13 bp, Artificial Sequence
  Oligonucleotide for detection of SNP TSC0012901
agggttgaggtgy

SEQ ID NO: 43690 - DNA, 13 bp, Artificial Sequence
  Oligonucleotide for detection of SNP TSC0012901
rcacctcaaccct

SEQ ID NO: 43691 - DNA, 13 bp, Artificial Sequence
  Oligonucleotide for detection of SNP TSC0012901
agggtttaggcgy

SEQ ID NO: 43692 - DNA, 13 bp, Artificial Sequence
  Oligonucleotide for detection of SNP TSC0012901
rcgcctaaaccct

SEQ ID NO: 43693 - DNA, 13 bp, Artificial Sequence
  Oligonucleotide for detection of SNP TSC0012901
agggtcgaggtgy

SEQ ID NO: 43694 - DNA, 13 bp, Artificial Sequence
  Oligonucleotide for detection of SNP TSC0012901
rcacctcgaccct

SEQ ID NO: 43695 - DNA, 13 bp, Artificial Sequence
  Oligonucleotide for detection of SNP TSC0012901
agggttgaggcgy

SEQ ID NO: 43696 - DNA, 13 bp, Artificial Sequence
  Oligonucleotide for detection of SNP TSC0012901
rcgcctcaaccct

SEQ ID NO: 43697 - DNA, 13 bp, Artificial Sequence
  Oligonucleotide for detection of SNP TSC0012901
agggtcgaggcgy

SEQ ID NO: 43698 - DNA, 13 bp, Artificial Sequence
  Oligonucleotide for detection of SNP TSC0012901
rcgcctcgaccct

SEQ ID NO: 43699 - DNA, 13 bp, Artificial Sequence
  Oligonucleotide for detection of SNP TSC0012901
gtgtttgggtttt

SEQ ID NO: 43700 - DNA, 13 bp, Artificial Sequence
  Oligonucleotide for detection of SNP TSC0012901
aaaacccaaacac

SEQ ID NO: 43701 - DNA, 13 bp, Artificial Sequence
  Oligonucleotide for detection of SNP TSC0012901
gtgttttggtttt

SEQ ID NO: 43702 - DNA, 13 bp, Artificial Sequence
  Oligonucleotide for detection of SNP TSC0012901
aaaaccaaaacac

SEQ ID NO: 43703 - DNA, 13 bp, Artificial Sequence
  Oligonucleotide for detection of SNP TSC0012901
gcgtttgggtttt

SEQ ID NO: 43704 - DNA, 13 bp, Artificial Sequence
  Oligonucleotide for detection of SNP TSC0012901
aaaacccaaacgc

SEQ ID NO: 43705 - DNA, 13 bp, Artificial Sequence
  Oligonucleotide for detection of SNP TSC0012901
gcgttttggtttt

SEQ ID NO: 43706 - DNA, 13 bp, Artificial Sequence
  Oligonucleotide for detection of SNP TSC0012901
aaaaccaaaacgc

SEQ ID NO: 43707 - DNA, 13 bp, Artificial Sequence
  Oligonucleotide for detection of SNP TSC0012901
gtgtttcggtttt

SEQ ID NO: 43708 - DNA, 13 bp, Artificial Sequence
  Oligonucleotide for detection of SNP TSC0012901
aaaaccgaaacac

SEQ ID NO: 43709 - DNA, 13 bp, Artificial Sequence
  Oligonucleotide for detection of SNP TSC0012901
gcgtttcggtttt

SEQ ID NO: 43710 - DNA, 13 bp, Artificial Sequence
  Oligonucleotide for detection of SNP TSC0012901
aaaaccgaaacgc

SEQ ID NO: 43711 - DNA, 13 bp, Artificial Sequence
  Oligonucleotide for detection of SNP TSC0012902
agagagggggggg

SEQ ID NO: 43712 - DNA, 13 bp, Artificial Sequence
  Oligonucleotide for detection of SNP TSC0012902
cccccccctctct

SEQ ID NO: 43713 - DNA, 13 bp, Artificial Sequence
  Oligonucleotide for detection of SNP TSC0012902
agagagagggggg

SEQ ID NO: 43714 - DNA, 13 bp, Artificial Sequence
  Oligonucleotide for detection of SNP TSC0012902
cccccctctctct

SEQ ID NO: 43715 - DNA, 13 bp, Artificial Sequence
  Oligonucleotide for detection of SNP TSC0012903
aggtgagtgagty

SEQ ID NO: 43716 - DNA, 13 bp, Artificial Sequence
  Oligonucleotide for detection of SNP TSC0012903
ractcactcacct

SEQ ID NO: 43717 - DNA, 13 bp, Artificial Sequence
  Oligonucleotide for detection of SNP TSC0012903
aggtgaatgagty

SEQ ID NO: 43718 - DNA, 13 bp, Artificial Sequence
  Oligonucleotide for detection of SNP TSC0012903
ractcattcacct

SEQ ID NO: 43719 - DNA, 13 bp, Artificial Sequence
  Oligonucleotide for detection of SNP TSC0012906
atatatgtgtgta

SEQ ID NO: 43720 - DNA, 13 bp, Artificial Sequence
  Oligonucleotide for detection of SNP TSC0012906
tacacacatatat

SEQ ID NO: 43721 - DNA, 13 bp, Artificial Sequence
  Oligonucleotide for detection of SNP TSC0012906
atatatatgtgta

SEQ ID NO: 43722 - DNA, 13 bp, Artificial Sequence
  Oligonucleotide for detection of SNP TSC0012906
tacacatatatat

SEQ ID NO: 43723 - DNA, 13 bp, Artificial Sequence
  Oligonucleotide for detection of SNP TSC0012907
tttttaaagaata

SEQ ID NO: 43724 - DNA, 13 bp, Artificial Sequence
  Oligonucleotide for detection of SNP TSC0012907
tattctttaaaaa

SEQ ID NO: 43725 - DNA, 13 bp, Artificial Sequence
  Oligonucleotide for detection of SNP TSC0012907
tttttatagaata

SEQ ID NO: 43726 - DNA, 13 bp, Artificial Sequence
  Oligonucleotide for detection of SNP TSC0012907
tattctataaaaa

SEQ ID NO: 43727 - DNA, 13 bp, Artificial Sequence
  Oligonucleotide for detection of SNP TSC0012907
tattttttggaag

SEQ ID NO: 43728 - DNA, 13 bp, Artificial Sequence
  Oligonucleotide for detection of SNP TSC0012907
cttccaaaaaata

SEQ ID NO: 43729 - DNA, 13 bp, Artificial Sequence
  Oligonucleotide for detection of SNP TSC0012907
tattttgtggaag

SEQ ID NO: 43730 - DNA, 13 bp, Artificial Sequence
  Oligonucleotide for detection of SNP TSC0012907
cttccacaaaata

SEQ ID NO: 43731 - DNA, 13 bp, Artificial Sequence
  Oligonucleotide for detection of SNP TSC0012908
tattggattagga

SEQ ID NO: 43732 - DNA, 13 bp, Artificial Sequence
  Oligonucleotide for detection of SNP TSC0012908
tcctaatccaata

SEQ ID NO: 43733 - DNA, 13 bp, Artificial Sequence
  Oligonucleotide for detection of SNP TSC0012908
tattggtttagga

SEQ ID NO: 43734 - DNA, 13 bp, Artificial Sequence
  Oligonucleotide for detection of SNP TSC0012908
tcctaaaccaata

SEQ ID NO: 43735 - DNA, 13 bp, Artificial Sequence
  Oligonucleotide for detection of SNP TSC0012908
ttttaatttagtg

SEQ ID NO: 43736 - DNA, 13 bp, Artificial Sequence
  Oligonucleotide for detection of SNP TSC0012908
cactaaattaaaa

SEQ ID NO: 43737 - DNA, 13 bp, Artificial Sequence
  Oligonucleotide for detection of SNP TSC0012908
ttttaaattagtg

SEQ ID NO: 43738 - DNA, 13 bp, Artificial Sequence
  Oligonucleotide for detection of SNP TSC0012908
cactaatttaaaa

SEQ ID NO: 43739 - DNA, 13 bp, Artificial Sequence
  Oligonucleotide for detection of SNP TSC0012909
ttgtaagttattt

SEQ ID NO: 43740 - DNA, 13 bp, Artificial Sequence
  Oligonucleotide for detection of SNP TSC0012909
aaataacttacaa

SEQ ID NO: 43741 - DNA, 13 bp, Artificial Sequence
  Oligonucleotide for detection of SNP TSC0012909
ttgtaaattattt

SEQ ID NO: 43742 - DNA, 13 bp, Artificial Sequence
  Oligonucleotide for detection of SNP TSC0012909
aaataatttacaa

SEQ ID NO: 43743 - DNA, 13 bp, Artificial Sequence
  Oligonucleotide for detection of SNP TSC0012911
aggtataatggtg

SEQ ID NO: 43744 - DNA, 13 bp, Artificial Sequence
  Oligonucleotide for detection of SNP TSC0012911
caccattatacct

SEQ ID NO: 43745 - DNA, 13 bp, Artificial Sequence
  Oligonucleotide for detection of SNP TSC0012911
aggtatgatggtg

SEQ ID NO: 43746 - DNA, 13 bp, Artificial Sequence
  Oligonucleotide for detection of SNP TSC0012911
caccatcatacct

SEQ ID NO: 43747 - DNA, 13 bp, Artificial Sequence
  Oligonucleotide for detection of SNP TSC0012911
aggtacgatggtg

SEQ ID NO: 43748 - DNA, 13 bp, Artificial Sequence
  Oligonucleotide for detection of SNP TSC0012911
caccatcgtacct

SEQ ID NO: 43749 - DNA, 13 bp, Artificial Sequence
  Oligonucleotide for detection of SNP TSC0012911
tattattgtgttt

SEQ ID NO: 43750 - DNA, 13 bp, Artificial Sequence
  Oligonucleotide for detection of SNP TSC0012911
aaacacaataata

SEQ ID NO: 43751 - DNA, 13 bp, Artificial Sequence
  Oligonucleotide for detection of SNP TSC0012911
tattatcgtgttt

SEQ ID NO: 43752 - DNA, 13 bp, Artificial Sequence
  Oligonucleotide for detection of SNP TSC0012911
aaacacgataata

SEQ ID NO: 43753 - DNA, 13 bp, Artificial Sequence
  Oligonucleotide for detection of SNP TSC0012912
gttagaaaaggta

SEQ ID NO: 43754 - DNA, 13 bp, Artificial Sequence
  Oligonucleotide for detection of SNP TSC0012912
taccttttctaac

SEQ ID NO: 43755 - DNA, 13 bp, Artificial Sequence
  Oligonucleotide for detection of SNP TSC0012912
gttagagaaggta

SEQ ID NO: 43756 - DNA, 13 bp, Artificial Sequence
  Oligonucleotide for detection of SNP TSC0012912
taccttctctaac

SEQ ID NO: 43757 - DNA, 13 bp, Artificial Sequence
  Oligonucleotide for detection of SNP TSC0012913
ttaagtaattgta

SEQ ID NO: 43758 - DNA, 13 bp, Artificial Sequence
  Oligonucleotide for detection of SNP TSC0012913
tacaattacttaa

SEQ ID NO: 43759 - DNA, 13 bp, Artificial Sequence
  Oligonucleotide for detection of SNP TSC0012913
ttaagttattgta

SEQ ID NO: 43760 - DNA, 13 bp, Artificial Sequence
  Oligonucleotide for detection of SNP TSC0012913
tacaataacttaa

SEQ ID NO: 43761 - DNA, 13 bp, Artificial Sequence
  Oligonucleotide for detection of SNP TSC0012913
tgtagttgtttaa

SEQ ID NO: 43762 - DNA, 13 bp, Artificial Sequence
  Oligonucleotide for detection of SNP TSC0012913
ttaaacaactaca

SEQ ID NO: 43763 - DNA, 13 bp, Artificial Sequence
  Oligonucleotide for detection of SNP TSC0012913
tgtagtggtttaa

SEQ ID NO: 43764 - DNA, 13 bp, Artificial Sequence
  Oligonucleotide for detection of SNP TSC0012913
ttaaaccactaca

SEQ ID NO: 43765 - DNA, 13 bp, Artificial Sequence
  Oligonucleotide for detection of SNP TSC0012915
tatagtagtaaga

SEQ ID NO: 43766 - DNA, 13 bp, Artificial Sequence
  Oligonucleotide for detection of SNP TSC0012915
tcttactactata

SEQ ID NO: 43767 - DNA, 13 bp, Artificial Sequence
  Oligonucleotide for detection of SNP TSC0012915
tatagtggtaaga

SEQ ID NO: 43768 - DNA, 13 bp, Artificial Sequence
  Oligonucleotide for detection of SNP TSC0012915
tcttaccactata

SEQ ID NO: 43769 - DNA, 13 bp, Artificial Sequence
  Oligonucleotide for detection of SNP TSC0012915
tatagcggtaaga

SEQ ID NO: 43770 - DNA, 13 bp, Artificial Sequence
  Oligonucleotide for detection of SNP TSC0012915
tcttaccgctata

SEQ ID NO: 43771 - DNA, 13 bp, Artificial Sequence
  Oligonucleotide for detection of SNP TSC0012915
ttttattgttgta

SEQ ID NO: 43772 - DNA, 13 bp, Artificial Sequence
  Oligonucleotide for detection of SNP TSC0012915
tacaacaataaaa

SEQ ID NO: 43773 - DNA, 13 bp, Artificial Sequence
  Oligonucleotide for detection of SNP TSC0012915
ttttatcgttgta

SEQ ID NO: 43774 - DNA, 13 bp, Artificial Sequence
  Oligonucleotide for detection of SNP TSC0012915
tacaacgataaaa

SEQ ID NO: 43775 - DNA, 13 bp, Artificial Sequence
  Oligonucleotide for detection of SNP TSC0012916
tgttaagtatagy

SEQ ID NO: 43776 - DNA, 13 bp, Artificial Sequence
  Oligonucleotide for detection of SNP TSC0012916
rctatacttaaca

SEQ ID NO: 43777 - DNA, 13 bp, Artificial Sequence
  Oligonucleotide for detection of SNP TSC0012916
tgttaaatatagy

SEQ ID NO: 43778 - DNA, 13 bp, Artificial Sequence
  Oligonucleotide for detection of SNP TSC0012916
rctatatttaaca

SEQ ID NO: 43779 - DNA, 13 bp, Artificial Sequence
  Oligonucleotide for detection of SNP TSC0012917
taggttgtagtay

SEQ ID NO: 43780 - DNA, 13 bp, Artificial Sequence
  Oligonucleotide for detection of SNP TSC0012917
rtactacaaccta

SEQ ID NO: 43781 - DNA, 13 bp, Artificial Sequence
  Oligonucleotide for detection of SNP TSC0012917
taggttatagtay

SEQ ID NO: 43782 - DNA, 13 bp, Artificial Sequence
  Oligonucleotide for detection of SNP TSC0012917
rtactataaccta

SEQ ID NO: 43783 - DNA, 13 bp, Artificial Sequence
  Oligonucleotide for detection of SNP TSC0012920
tatttttggaatt

SEQ ID NO: 43784 - DNA, 13 bp, Artificial Sequence
  Oligonucleotide for detection of SNP TSC0012920
aattccaaaaata

SEQ ID NO: 43785 - DNA, 13 bp, Artificial Sequence
  Oligonucleotide for detection of SNP TSC0012920
tattttcggaatt

SEQ ID NO: 43786 - DNA, 13 bp, Artificial Sequence
  Oligonucleotide for detection of SNP TSC0012920
aattccgaaaata

SEQ ID NO: 43787 - DNA, 13 bp, Artificial Sequence
  Oligonucleotide for detection of SNP TSC0012920
agttttgagagta

SEQ ID NO: 43788 - DNA, 13 bp, Artificial Sequence
  Oligonucleotide for detection of SNP TSC0012920
tactctcaaaact

SEQ ID NO: 43789 - DNA, 13 bp, Artificial Sequence
  Oligonucleotide for detection of SNP TSC0012920
agttttaagagta

SEQ ID NO: 43790 - DNA, 13 bp, Artificial Sequence
  Oligonucleotide for detection of SNP TSC0012920
tactcttaaaact

SEQ ID NO: 43791 - DNA, 13 bp, Artificial Sequence
  Oligonucleotide for detection of SNP TSC0012920
agtttcgagagta

SEQ ID NO: 43792 - DNA, 13 bp, Artificial Sequence
  Oligonucleotide for detection of SNP TSC0012920
tactctcgaaact

SEQ ID NO: 43793 - DNA, 13 bp, Artificial Sequence
  Oligonucleotide for detection of SNP TSC0012921
tttaaagttagga

SEQ ID NO: 43794 - DNA, 13 bp, Artificial Sequence
  Oligonucleotide for detection of SNP TSC0012921
tcctaactttaaa

SEQ ID NO: 43795 - DNA, 13 bp, Artificial Sequence
  Oligonucleotide for detection of SNP TSC0012921
tttaaatttagga

SEQ ID NO: 43796 - DNA, 13 bp, Artificial Sequence
  Oligonucleotide for detection of SNP TSC0012921
tcctaaatttaaa

SEQ ID NO: 43797 - DNA, 13 bp, Artificial Sequence
  Oligonucleotide for detection of SNP TSC0012921
ttttagttttgag

SEQ ID NO: 43798 - DNA, 13 bp, Artificial Sequence
  Oligonucleotide for detection of SNP TSC0012921
ctcaaaactaaaa

SEQ ID NO: 43799 - DNA, 13 bp, Artificial Sequence
  Oligonucleotide for detection of SNP TSC0012921
ttttagatttgag

SEQ ID NO: 43800 - DNA, 13 bp, Artificial Sequence
  Oligonucleotide for detection of SNP TSC0012921
ctcaaatctaaaa

SEQ ID NO: 43801 - DNA, 13 bp, Artificial Sequence
  Oligonucleotide for detection of SNP TSC0012922
attgttattattg

SEQ ID NO: 43802 - DNA, 13 bp, Artificial Sequence
  Oligonucleotide for detection of SNP TSC0012922
caataataacaat

SEQ ID NO: 43803 - DNA, 13 bp, Artificial Sequence
  Oligonucleotide for detection of SNP TSC0012922
attgttgttattg

SEQ ID NO: 43804 - DNA, 13 bp, Artificial Sequence
  Oligonucleotide for detection of SNP TSC0012922
caataacaacaat

SEQ ID NO: 43805 - DNA, 13 bp, Artificial Sequence
  Oligonucleotide for detection of SNP TSC0012922
atcgttattattg

SEQ ID NO: 43806 - DNA, 13 bp, Artificial Sequence
  Oligonucleotide for detection of SNP TSC0012922
caataataacgat

SEQ ID NO: 43807 - DNA, 13 bp, Artificial Sequence
  Oligonucleotide for detection of SNP TSC0012922
atcgttgttattg

SEQ ID NO: 43808 - DNA, 13 bp, Artificial Sequence
  Oligonucleotide for detection of SNP TSC0012922
caataacaacgat

SEQ ID NO: 43809 - DNA, 13 bp, Artificial Sequence
  Oligonucleotide for detection of SNP TSC0012925
aagaaaggattta

SEQ ID NO: 43810 - DNA, 13 bp, Artificial Sequence
  Oligonucleotide for detection of SNP TSC0012925
taaatcctttctt

SEQ ID NO: 43811 - DNA, 13 bp, Artificial Sequence
  Oligonucleotide for detection of SNP TSC0012925
aagaaaagattta

SEQ ID NO: 43812 - DNA, 13 bp, Artificial Sequence
  Oligonucleotide for detection of SNP TSC0012925
taaatcttttctt

SEQ ID NO: 43813 - DNA, 13 bp, Artificial Sequence
  Oligonucleotide for detection of SNP TSC0012926
ttttgtaagttay

SEQ ID NO: 43814 - DNA, 13 bp, Artificial Sequence
  Oligonucleotide for detection of SNP TSC0012926
rtaacttacaaaa

SEQ ID NO: 43815 - DNA, 13 bp, Artificial Sequence
  Oligonucleotide for detection of SNP TSC0012926
ttttgttagttay

SEQ ID NO: 43816 - DNA, 13 bp, Artificial Sequence
  Oligonucleotide for detection of SNP TSC0012926
rtaactaacaaaa

SEQ ID NO: 43817 - DNA, 13 bp, Artificial Sequence
  Oligonucleotide for detection of SNP TSC0012926
gtgatttgtaggg

SEQ ID NO: 43818 - DNA, 13 bp, Artificial Sequence
  Oligonucleotide for detection of SNP TSC0012926
ccctacaaatcac

SEQ ID NO: 43819 - DNA, 13 bp, Artificial Sequence
  Oligonucleotide for detection of SNP TSC0012926
gtgattggtaggg

SEQ ID NO: 43820 - DNA, 13 bp, Artificial Sequence
  Oligonucleotide for detection of SNP TSC0012926
ccctaccaatcac

SEQ ID NO: 43821 - DNA, 13 bp, Artificial Sequence
  Oligonucleotide for detection of SNP TSC0012927
ttttatgtgggta

SEQ ID NO: 43822 - DNA, 13 bp, Artificial Sequence
  Oligonucleotide for detection of SNP TSC0012927
tacccacataaaa

SEQ ID NO: 43823 - DNA, 13 bp, Artificial Sequence
  Oligonucleotide for detection of SNP TSC0012927
ttttatttgggta

SEQ ID NO: 43824 - DNA, 13 bp, Artificial Sequence
  Oligonucleotide for detection of SNP TSC0012927
tacccaaataaaa

SEQ ID NO: 43825 - DNA, 13 bp, Artificial Sequence
  Oligonucleotide for detection of SNP TSC0012927
ttttacgtgggta

SEQ ID NO: 43826 - DNA, 13 bp, Artificial Sequence
  Oligonucleotide for detection of SNP TSC0012927
tacccacgtaaaa

SEQ ID NO: 43827 - DNA, 13 bp, Artificial Sequence
  Oligonucleotide for detection of SNP TSC0012927
tatttatgtgaga

SEQ ID NO: 43828 - DNA, 13 bp, Artificial Sequence
  Oligonucleotide for detection of SNP TSC0012927
tctcacataaata

SEQ ID NO: 43829 - DNA, 13 bp, Artificial Sequence
  Oligonucleotide for detection of SNP TSC0012927
tatttaagtgaga

SEQ ID NO: 43830 - DNA, 13 bp, Artificial Sequence
  Oligonucleotide for detection of SNP TSC0012927
tctcacttaaata

SEQ ID NO: 43831 - DNA, 13 bp, Artificial Sequence
  Oligonucleotide for detection of SNP TSC0012927
tatttacgtgaga

SEQ ID NO: 43832 - DNA, 13 bp, Artificial Sequence
  Oligonucleotide for detection of SNP TSC0012927
tctcacgtaaata

SEQ ID NO: 43833 - DNA, 13 bp, Artificial Sequence
  Oligonucleotide for detection of SNP TSC0012928
aggaattgtgtgt

SEQ ID NO: 43834 - DNA, 13 bp, Artificial Sequence
  Oligonucleotide for detection of SNP TSC0012928
acacacaattcct

SEQ ID NO: 43835 - DNA, 13 bp, Artificial Sequence
  Oligonucleotide for detection of SNP TSC0012928
aggaatcgtgtgt

SEQ ID NO: 43836 - DNA, 13 bp, Artificial Sequence
  Oligonucleotide for detection of SNP TSC0012928
acacacgattcct

SEQ ID NO: 43837 - DNA, 13 bp, Artificial Sequence
  Oligonucleotide for detection of SNP TSC0012928
atatatggttttt

SEQ ID NO: 43838 - DNA, 13 bp, Artificial Sequence
  Oligonucleotide for detection of SNP TSC0012928
aaaaaccatatat

SEQ ID NO: 43839 - DNA, 13 bp, Artificial Sequence
  Oligonucleotide for detection of SNP TSC0012928
atatatagttttt

SEQ ID NO: 43840 - DNA, 13 bp, Artificial Sequence
  Oligonucleotide for detection of SNP TSC0012928
aaaaactatatat

SEQ ID NO: 43841 - DNA, 13 bp, Artificial Sequence
  Oligonucleotide for detection of SNP TSC0012928
atatacggttttt

SEQ ID NO: 43842 - DNA, 13 bp, Artificial Sequence
  Oligonucleotide for detection of SNP TSC0012928
aaaaaccgtatat

SEQ ID NO: 43843 - DNA, 13 bp, Artificial Sequence
  Oligonucleotide for detection of SNP TSC0012929
tttgggggtggtg

SEQ ID NO: 43844 - DNA, 13 bp, Artificial Sequence
  Oligonucleotide for detection of SNP TSC0012929
caccacccccaaa

SEQ ID NO: 43845 - DNA, 13 bp, Artificial Sequence
  Oligonucleotide for detection of SNP TSC0012929
tttgggagtggtg

SEQ ID NO: 43846 - DNA, 13 bp, Artificial Sequence
  Oligonucleotide for detection of SNP TSC0012929
caccactcccaaa

SEQ ID NO: 43847 - DNA, 13 bp, Artificial Sequence
  Oligonucleotide for detection of SNP TSC0012929
ttcgggggtggtg

SEQ ID NO: 43848 - DNA, 13 bp, Artificial Sequence
  Oligonucleotide for detection of SNP TSC0012929
caccacccccgaa

SEQ ID NO: 43849 - DNA, 13 bp, Artificial Sequence
  Oligonucleotide for detection of SNP TSC0012929
ttcgggagtggtg

SEQ ID NO: 43850 - DNA, 13 bp, Artificial Sequence
  Oligonucleotide for detection of SNP TSC0012929
caccactcccgaa

SEQ ID NO: 43851 - DNA, 13 bp, Artificial Sequence
  Oligonucleotide for detection of SNP TSC0012930
attatagtgatgt

SEQ ID NO: 43852 - DNA, 13 bp, Artificial Sequence
  Oligonucleotide for detection of SNP TSC0012930
acatcactataat

SEQ ID NO: 43853 - DNA, 13 bp, Artificial Sequence
  Oligonucleotide for detection of SNP TSC0012930
attataatgatgt

SEQ ID NO: 43854 - DNA, 13 bp, Artificial Sequence
  Oligonucleotide for detection of SNP TSC0012930
acatcattataat

SEQ ID NO: 43855 - DNA, 13 bp, Artificial Sequence
  Oligonucleotide for detection of SNP TSC0012931
ataatatgttaty

SEQ ID NO: 43856 - DNA, 13 bp, Artificial Sequence
  Oligonucleotide for detection of SNP TSC0012931
rataacatattat

SEQ ID NO: 43857 - DNA, 13 bp, Artificial Sequence
  Oligonucleotide for detection of SNP TSC0012931
ataatacgttaty

SEQ ID NO: 43858 - DNA, 13 bp, Artificial Sequence
  Oligonucleotide for detection of SNP TSC0012931
rataacgtattat

SEQ ID NO: 43859 - DNA, 13 bp, Artificial Sequence
  Oligonucleotide for detection of SNP TSC0012931
gataatgtattat

SEQ ID NO: 43860 - DNA, 13 bp, Artificial Sequence
  Oligonucleotide for detection of SNP TSC0012931
ataatacattatc

SEQ ID NO: 43861 - DNA, 13 bp, Artificial Sequence
  Oligonucleotide for detection of SNP TSC0012931
gataatatattat

SEQ ID NO: 43862 - DNA, 13 bp, Artificial Sequence
  Oligonucleotide for detection of SNP TSC0012931
ataatatattatc

SEQ ID NO: 43863 - DNA, 13 bp, Artificial Sequence
  Oligonucleotide for detection of SNP TSC0012931
gataacgtattat

SEQ ID NO: 43864 - DNA, 13 bp, Artificial Sequence
  Oligonucleotide for detection of SNP TSC0012931
ataatacgttatc

SEQ ID NO: 43865 - DNA, 13 bp, Artificial Sequence
  Oligonucleotide for detection of SNP TSC0012932
taatttgattttt

SEQ ID NO: 43866 - DNA, 13 bp, Artificial Sequence
  Oligonucleotide for detection of SNP TSC0012932
aaaaatcaaatta

SEQ ID NO: 43867 - DNA, 13 bp, Artificial Sequence
  Oligonucleotide for detection of SNP TSC0012932
taattttattttt

SEQ ID NO: 43868 - DNA, 13 bp, Artificial Sequence
  Oligonucleotide for detection of SNP TSC0012932
aaaaataaaatta

SEQ ID NO: 43869 - DNA, 13 bp, Artificial Sequence
  Oligonucleotide for detection of SNP TSC0012932
agaaattaaattg

SEQ ID NO: 43870 - DNA, 13 bp, Artificial Sequence
  Oligonucleotide for detection of SNP TSC0012932
caatttaatttct

SEQ ID NO: 43871 - DNA, 13 bp, Artificial Sequence
  Oligonucleotide for detection of SNP TSC0012932
agaaataaaattg

SEQ ID NO: 43872 - DNA, 13 bp, Artificial Sequence
  Oligonucleotide for detection of SNP TSC0012932
caattttatttct

SEQ ID NO: 43873 - DNA, 13 bp, Artificial Sequence
  Oligonucleotide for detection of SNP TSC0012933
atgttaattttta

SEQ ID NO: 43874 - DNA, 13 bp, Artificial Sequence
  Oligonucleotide for detection of SNP TSC0012933
taaaaattaacat

SEQ ID NO: 43875 - DNA, 13 bp, Artificial Sequence
  Oligonucleotide for detection of SNP TSC0012933
atgttagttttta

SEQ ID NO: 43876 - DNA, 13 bp, Artificial Sequence
  Oligonucleotide for detection of SNP TSC0012933
taaaaactaacat

SEQ ID NO: 43877 - DNA, 13 bp, Artificial Sequence
  Oligonucleotide for detection of SNP TSC0012933
acgttaattttta

SEQ ID NO: 43878 - DNA, 13 bp, Artificial Sequence
  Oligonucleotide for detection of SNP TSC0012933
taaaaattaacgt

SEQ ID NO: 43879 - DNA, 13 bp, Artificial Sequence
  Oligonucleotide for detection of SNP TSC0012933
acgttagttttta

SEQ ID NO: 43880 - DNA, 13 bp, Artificial Sequence
  Oligonucleotide for detection of SNP TSC0012933
taaaaactaacgt

SEQ ID NO: 43881 - DNA, 13 bp, Artificial Sequence
  Oligonucleotide for detection of SNP TSC0012935
ttttgtgttttgt

SEQ ID NO: 43882 - DNA, 13 bp, Artificial Sequence
  Oligonucleotide for detection of SNP TSC0012935
acaaaacacaaaa

SEQ ID NO: 43883 - DNA, 13 bp, Artificial Sequence
  Oligonucleotide for detection of SNP TSC0012935
ttttgtattttgt

SEQ ID NO: 43884 - DNA, 13 bp, Artificial Sequence
  Oligonucleotide for detection of SNP TSC0012935
acaaaatacaaaa

SEQ ID NO: 43885 - DNA, 13 bp, Artificial Sequence
  Oligonucleotide for detection of SNP TSC0012939
attatttgagttt

SEQ ID NO: 43886 - DNA, 13 bp, Artificial Sequence
  Oligonucleotide for detection of SNP TSC0012939
aaactcaaataat

SEQ ID NO: 43887 - DNA, 13 bp, Artificial Sequence
  Oligonucleotide for detection of SNP TSC0012939
attattcgagttt

SEQ ID NO: 43888 - DNA, 13 bp, Artificial Sequence
  Oligonucleotide for detection of SNP TSC0012939
aaactcgaataat

SEQ ID NO: 43889 - DNA, 13 bp, Artificial Sequence
  Oligonucleotide for detection of SNP TSC0012939
aggtttgagtgat

SEQ ID NO: 43890 - DNA, 13 bp, Artificial Sequence
  Oligonucleotide for detection of SNP TSC0012939
atcactcaaacct

SEQ ID NO: 43891 - DNA, 13 bp, Artificial Sequence
  Oligonucleotide for detection of SNP TSC0012939
aggtttaagtgat

SEQ ID NO: 43892 - DNA, 13 bp, Artificial Sequence
  Oligonucleotide for detection of SNP TSC0012939
atcacttaaacct

SEQ ID NO: 43893 - DNA, 13 bp, Artificial Sequence
  Oligonucleotide for detection of SNP TSC0012939
aggttcgagtgat

SEQ ID NO: 43894 - DNA, 13 bp, Artificial Sequence
  Oligonucleotide for detection of SNP TSC0012939
atcactcgaacct

SEQ ID NO: 43895 - DNA, 13 bp, Artificial Sequence
  Oligonucleotide for detection of SNP TSC0012942
gttttagttaggg

SEQ ID NO: 43896 - DNA, 13 bp, Artificial Sequence
  Oligonucleotide for detection of SNP TSC0012942
ccctaactaaaac

SEQ ID NO: 43897 - DNA, 13 bp, Artificial Sequence
  Oligonucleotide for detection of SNP TSC0012942
gttttaattaggg

SEQ ID NO: 43898 - DNA, 13 bp, Artificial Sequence
  Oligonucleotide for detection of SNP TSC0012942
ccctaattaaaac

SEQ ID NO: 43899 - DNA, 13 bp, Artificial Sequence
  Oligonucleotide for detection of SNP TSC0012943
gttttgatagtay

SEQ ID NO: 43900 - DNA, 13 bp, Artificial Sequence
  Oligonucleotide for detection of SNP TSC0012943
rtactatcaaaac

SEQ ID NO: 43901 - DNA, 13 bp, Artificial Sequence
  Oligonucleotide for detection of SNP TSC0012943
gttttgttagtay

SEQ ID NO: 43902 - DNA, 13 bp, Artificial Sequence
  Oligonucleotide for detection of SNP TSC0012943
rtactaacaaaac

SEQ ID NO: 43903 - DNA, 13 bp, Artificial Sequence
  Oligonucleotide for detection of SNP TSC0012943
gtattattagggy

SEQ ID NO: 43904 - DNA, 13 bp, Artificial Sequence
  Oligonucleotide for detection of SNP TSC0012943
rccctaataatac

SEQ ID NO: 43905 - DNA, 13 bp, Artificial Sequence
  Oligonucleotide for detection of SNP TSC0012943
gtattagtagggy

SEQ ID NO: 43906 - DNA, 13 bp, Artificial Sequence
  Oligonucleotide for detection of SNP TSC0012943
rccctactaatac

SEQ ID NO: 43907 - DNA, 13 bp, Artificial Sequence
  Oligonucleotide for detection of SNP TSC0012944
gtgttacgtttag

SEQ ID NO: 43908 - DNA, 13 bp, Artificial Sequence
  Oligonucleotide for detection of SNP TSC0012944
ctaaacgtaacac

SEQ ID NO: 43909 - DNA, 13 bp, Artificial Sequence
  Oligonucleotide for detection of SNP TSC0012944
ttgggtgtgatay

SEQ ID NO: 43910 - DNA, 13 bp, Artificial Sequence
  Oligonucleotide for detection of SNP TSC0012944
rtatcacacccaa

SEQ ID NO: 43911 - DNA, 13 bp, Artificial Sequence
  Oligonucleotide for detection of SNP TSC0012944
ttgggtatgatay

SEQ ID NO: 43912 - DNA, 13 bp, Artificial Sequence
  Oligonucleotide for detection of SNP TSC0012944
rtatcatacccaa

SEQ ID NO: 43913 - DNA, 13 bp, Artificial Sequence
  Oligonucleotide for detection of SNP TSC0012944
ttgggcgtgatay

SEQ ID NO: 43914 - DNA, 13 bp, Artificial Sequence
  Oligonucleotide for detection of SNP TSC0012944
rtatcacgcccaa

SEQ ID NO: 43915 - DNA, 13 bp, Artificial Sequence
  Oligonucleotide for detection of SNP TSC0012949
tttatttgggagt

SEQ ID NO: 43916 - DNA, 13 bp, Artificial Sequence
  Oligonucleotide for detection of SNP TSC0012949
actcccaaataaa

SEQ ID NO: 43917 - DNA, 13 bp, Artificial Sequence
  Oligonucleotide for detection of SNP TSC0012949
tttattcgggagt

SEQ ID NO: 43918 - DNA, 13 bp, Artificial Sequence
  Oligonucleotide for detection of SNP TSC0012949
actcccgaataaa

SEQ ID NO: 43919 - DNA, 13 bp, Artificial Sequence
  Oligonucleotide for detection of SNP TSC0012949
atttttgaatgag

SEQ ID NO: 43920 - DNA, 13 bp, Artificial Sequence
  Oligonucleotide for detection of SNP TSC0012949
ctcattcaaaaat

SEQ ID NO: 43921 - DNA, 13 bp, Artificial Sequence
  Oligonucleotide for detection of SNP TSC0012949
atttttaaatgag

SEQ ID NO: 43922 - DNA, 13 bp, Artificial Sequence
  Oligonucleotide for detection of SNP TSC0012949
ctcatttaaaaat

SEQ ID NO: 43923 - DNA, 13 bp, Artificial Sequence
  Oligonucleotide for detection of SNP TSC0012949
attttcgaatgag

SEQ ID NO: 43924 - DNA, 13 bp, Artificial Sequence
  Oligonucleotide for detection of SNP TSC0012949
ctcattcgaaaat

SEQ ID NO: 43925 - DNA, 13 bp, Artificial Sequence
  Oligonucleotide for detection of SNP TSC0012950
tgtgtttgggagg

SEQ ID NO: 43926 - DNA, 13 bp, Artificial Sequence
  Oligonucleotide for detection of SNP TSC0012950
cctcccaaacaca

SEQ ID NO: 43927 - DNA, 13 bp, Artificial Sequence
  Oligonucleotide for detection of SNP TSC0012950
tgtgttcgggagg

SEQ ID NO: 43928 - DNA, 13 bp, Artificial Sequence
  Oligonucleotide for detection of SNP TSC0012950
cctcccgaacaca

SEQ ID NO: 43929 - DNA, 13 bp, Artificial Sequence
  Oligonucleotide for detection of SNP TSC0012950
ttttttgggtata

SEQ ID NO: 43930 - DNA, 13 bp, Artificial Sequence
  Oligonucleotide for detection of SNP TSC0012950
tatacccaaaaaa

SEQ ID NO: 43931 - DNA, 13 bp, Artificial Sequence
  Oligonucleotide for detection of SNP TSC0012950
ttttttaggtata

SEQ ID NO: 43932 - DNA, 13 bp, Artificial Sequence
  Oligonucleotide for detection of SNP TSC0012950
tatacctaaaaaa

SEQ ID NO: 43933 - DNA, 13 bp, Artificial Sequence
  Oligonucleotide for detection of SNP TSC0012950
tttttcgggtata

SEQ ID NO: 43934 - DNA, 13 bp, Artificial Sequence
  Oligonucleotide for detection of SNP TSC0012950
tatacccgaaaaa

SEQ ID NO: 43935 - DNA, 13 bp, Artificial Sequence
  Oligonucleotide for detection of SNP TSC0012951
taggttttgtgtg

SEQ ID NO: 43936 - DNA, 13 bp, Artificial Sequence
  Oligonucleotide for detection of SNP TSC0012951
cacacaaaaccta

SEQ ID NO: 43937 - DNA, 13 bp, Artificial Sequence
  Oligonucleotide for detection of SNP TSC0012951
taggttgtgtgtg

SEQ ID NO: 43938 - DNA, 13 bp, Artificial Sequence
  Oligonucleotide for detection of SNP TSC0012951
cacacacaaccta

SEQ ID NO: 43939 - DNA, 13 bp, Artificial Sequence
  Oligonucleotide for detection of SNP TSC0012951
taggtttcgtgtg

SEQ ID NO: 43940 - DNA, 13 bp, Artificial Sequence
  Oligonucleotide for detection of SNP TSC0012951
cacacgaaaccta

SEQ ID NO: 43941 - DNA, 13 bp, Artificial Sequence
  Oligonucleotide for detection of SNP TSC0012951
taggttgcgtgtg

SEQ ID NO: 43942 - DNA, 13 bp, Artificial Sequence
  Oligonucleotide for detection of SNP TSC0012951
cacacgcaaccta

SEQ ID NO: 43943 - DNA, 13 bp, Artificial Sequence
  Oligonucleotide for detection of SNP TSC0012951
taggttttgtgcg

SEQ ID NO: 43944 - DNA, 13 bp, Artificial Sequence
  Oligonucleotide for detection of SNP TSC0012951
cgcacaaaaccta

SEQ ID NO: 43945 - DNA, 13 bp, Artificial Sequence
  Oligonucleotide for detection of SNP TSC0012951
taggttgtgtgcg

SEQ ID NO: 43946 - DNA, 13 bp, Artificial Sequence
  Oligonucleotide for detection of SNP TSC0012951
cgcacacaaccta

SEQ ID NO: 43947 - DNA, 13 bp, Artificial Sequence
  Oligonucleotide for detection of SNP TSC0012951
taggtttcgtgcg

SEQ ID NO: 43948 - DNA, 13 bp, Artificial Sequence
  Oligonucleotide for detection of SNP TSC0012951
cgcacgaaaccta

SEQ ID NO: 43949 - DNA, 13 bp, Artificial Sequence
  Oligonucleotide for detection of SNP TSC0012951
taggttgcgtgcg

SEQ ID NO: 43950 - DNA, 13 bp, Artificial Sequence
  Oligonucleotide for detection of SNP TSC0012951
cgcacgcaaccta

SEQ ID NO: 43951 - DNA, 13 bp, Artificial Sequence
  Oligonucleotide for detection of SNP TSC0012951
tgtatggagtttg

SEQ ID NO: 43952 - DNA, 13 bp, Artificial Sequence
  Oligonucleotide for detection of SNP TSC0012951
caaactccataca

SEQ ID NO: 43953 - DNA, 13 bp, Artificial Sequence
  Oligonucleotide for detection of SNP TSC0012951
tgtatgtagtttg

SEQ ID NO: 43954 - DNA, 13 bp, Artificial Sequence
  Oligonucleotide for detection of SNP TSC0012951
caaactacataca

SEQ ID NO: 43955 - DNA, 13 bp, Artificial Sequence
  Oligonucleotide for detection of SNP TSC0012951
cgtatggagtttg

SEQ ID NO: 43956 - DNA, 13 bp, Artificial Sequence
  Oligonucleotide for detection of SNP TSC0012951
caaactccatacg

SEQ ID NO: 43957 - DNA, 13 bp, Artificial Sequence
  Oligonucleotide for detection of SNP TSC0012951
cgtatgtagtttg

SEQ ID NO: 43958 - DNA, 13 bp, Artificial Sequence
  Oligonucleotide for detection of SNP TSC0012951
caaactacatacg

SEQ ID NO: 43959 - DNA, 13 bp, Artificial Sequence
  Oligonucleotide for detection of SNP TSC0012951
tgtacggagtttg

SEQ ID NO: 43960 - DNA, 13 bp, Artificial Sequence
  Oligonucleotide for detection of SNP TSC0012951
caaactccgtaca

SEQ ID NO: 43961 - DNA, 13 bp, Artificial Sequence
  Oligonucleotide for detection of SNP TSC0012951
tgtacgtagtttg

SEQ ID NO: 43962 - DNA, 13 bp, Artificial Sequence
  Oligonucleotide for detection of SNP TSC0012951
caaactacgtaca

SEQ ID NO: 43963 - DNA, 13 bp, Artificial Sequence
  Oligonucleotide for detection of SNP TSC0012951
cgtacggagtttg

SEQ ID NO: 43964 - DNA, 13 bp, Artificial Sequence
  Oligonucleotide for detection of SNP TSC0012951
caaactccgtacg

SEQ ID NO: 43965 - DNA, 13 bp, Artificial Sequence
  Oligonucleotide for detection of SNP TSC0012951
cgtacgtagtttg

SEQ ID NO: 43966 - DNA, 13 bp, Artificial Sequence
  Oligonucleotide for detection of SNP TSC0012951
caaactacgtacg

SEQ ID NO: 43967 - DNA, 13 bp, Artificial Sequence
  Oligonucleotide for detection of SNP TSC0012953
atgtttatgtggg

SEQ ID NO: 43968 - DNA, 13 bp, Artificial Sequence
  Oligonucleotide for detection of SNP TSC0012953
cccacataaacat

SEQ ID NO: 43969 - DNA, 13 bp, Artificial Sequence
  Oligonucleotide for detection of SNP TSC0012953
atgtttgtgtggg

SEQ ID NO: 43970 - DNA, 13 bp, Artificial Sequence
  Oligonucleotide for detection of SNP TSC0012953
cccacacaaacat

SEQ ID NO: 43971 - DNA, 13 bp, Artificial Sequence
  Oligonucleotide for detection of SNP TSC0012953
atgtttacgtggg

SEQ ID NO: 43972 - DNA, 13 bp, Artificial Sequence
  Oligonucleotide for detection of SNP TSC0012953
cccacgtaaacat

SEQ ID NO: 43973 - DNA, 13 bp, Artificial Sequence
  Oligonucleotide for detection of SNP TSC0012953
atgttcgtgtggg

SEQ ID NO: 43974 - DNA, 13 bp, Artificial Sequence
  Oligonucleotide for detection of SNP TSC0012953
cccacacgaacat

SEQ ID NO: 43975 - DNA, 13 bp, Artificial Sequence
  Oligonucleotide for detection of SNP TSC0012953
atgtttgcgtggg

SEQ ID NO: 43976 - DNA, 13 bp, Artificial Sequence
  Oligonucleotide for detection of SNP TSC0012953
cccacgcaaacat

SEQ ID NO: 43977 - DNA, 13 bp, Artificial Sequence
  Oligonucleotide for detection of SNP TSC0012953
atgttcgcgtggg

SEQ ID NO: 43978 - DNA, 13 bp, Artificial Sequence
  Oligonucleotide for detection of SNP TSC0012953
cccacgcgaacat

SEQ ID NO: 43979 - DNA, 13 bp, Artificial Sequence
  Oligonucleotide for detection of SNP TSC0012953
tttatgtgggtat

SEQ ID NO: 43980 - DNA, 13 bp, Artificial Sequence
  Oligonucleotide for detection of SNP TSC0012953
atacccacataaa

SEQ ID NO: 43981 - DNA, 13 bp, Artificial Sequence
  Oligonucleotide for detection of SNP TSC0012953
tttacgtgggtat

SEQ ID NO: 43982 - DNA, 13 bp, Artificial Sequence
  Oligonucleotide for detection of SNP TSC0012953
atacccacgtaaa

SEQ ID NO: 43983 - DNA, 13 bp, Artificial Sequence
  Oligonucleotide for detection of SNP TSC0012953
tttatgcgggtat

SEQ ID NO: 43984 - DNA, 13 bp, Artificial Sequence
  Oligonucleotide for detection of SNP TSC0012953
atacccgcataaa

SEQ ID NO: 43985 - DNA, 13 bp, Artificial Sequence
  Oligonucleotide for detection of SNP TSC0012953
tttacgcgggtat

SEQ ID NO: 43986 - DNA, 13 bp, Artificial Sequence
  Oligonucleotide for detection of SNP TSC0012953
atacccgcgtaaa

SEQ ID NO: 43987 - DNA, 13 bp, Artificial Sequence
  Oligonucleotide for detection of SNP TSC0012954
tgtaattttagtt

SEQ ID NO: 43988 - DNA, 13 bp, Artificial Sequence
  Oligonucleotide for detection of SNP TSC0012954
aactaaaattaca

SEQ ID NO: 43989 - DNA, 13 bp, Artificial Sequence
  Oligonucleotide for detection of SNP TSC0012954
tgtaatattagtt

SEQ ID NO: 43990 - DNA, 13 bp, Artificial Sequence
  Oligonucleotide for detection of SNP TSC0012954
aactaatattaca

SEQ ID NO: 43991 - DNA, 13 bp, Artificial Sequence
  Oligonucleotide for detection of SNP TSC0012955
gggttttgattag

SEQ ID NO: 43992 - DNA, 13 bp, Artificial Sequence
  Oligonucleotide for detection of SNP TSC0012955
ctaatcaaaaccc

SEQ ID NO: 43993 - DNA, 13 bp, Artificial Sequence
  Oligonucleotide for detection of SNP TSC0012955
gggtttcgattag

SEQ ID NO: 43994 - DNA, 13 bp, Artificial Sequence
  Oligonucleotide for detection of SNP TSC0012955
ctaatcgaaaccc

SEQ ID NO: 43995 - DNA, 13 bp, Artificial Sequence
  Oligonucleotide for detection of SNP TSC0012955
ttggttgagatty

SEQ ID NO: 43996 - DNA, 13 bp, Artificial Sequence
  Oligonucleotide for detection of SNP TSC0012955
raatctcaaccaa

SEQ ID NO: 43997 - DNA, 13 bp, Artificial Sequence
  Oligonucleotide for detection of SNP TSC0012955
ttggttaagatty

SEQ ID NO: 43998 - DNA, 13 bp, Artificial Sequence
  Oligonucleotide for detection of SNP TSC0012955
raatcttaaccaa

SEQ ID NO: 43999 - DNA, 13 bp, Artificial Sequence
  Oligonucleotide for detection of SNP TSC0012955
ttggtcgagatty

SEQ ID NO: 44000 - DNA, 13 bp, Artificial Sequence
  Oligonucleotide for detection of SNP TSC0012955
raatctcgaccaa

SEQ ID NO: 44001 - DNA, 13 bp, Artificial Sequence
  Oligonucleotide for detection of SNP TSC0012956
taggtgagtgtta

SEQ ID NO: 44002 - DNA, 13 bp, Artificial Sequence
  Oligonucleotide for detection of SNP TSC0012956
taacactcaccta

SEQ ID NO: 44003 - DNA, 13 bp, Artificial Sequence
  Oligonucleotide for detection of SNP TSC0012956
taggtgtgtgtta

SEQ ID NO: 44004 - DNA, 13 bp, Artificial Sequence
  Oligonucleotide for detection of SNP TSC0012956
taacacacaccta

SEQ ID NO: 44005 - DNA, 13 bp, Artificial Sequence
  Oligonucleotide for detection of SNP TSC0012956
tggtatttatttg

SEQ ID NO: 44006 - DNA, 13 bp, Artificial Sequence
  Oligonucleotide for detection of SNP TSC0012956
caaataaatacca

SEQ ID NO: 44007 - DNA, 13 bp, Artificial Sequence
  Oligonucleotide for detection of SNP TSC0012956
tggtatatatttg

SEQ ID NO: 44008 - DNA, 13 bp, Artificial Sequence
  Oligonucleotide for detection of SNP TSC0012956
caaatatatacca

SEQ ID NO: 44009 - DNA, 13 bp, Artificial Sequence
  Oligonucleotide for detection of SNP TSC0012957
ttagttagatgta

SEQ ID NO: 44010 - DNA, 13 bp, Artificial Sequence
  Oligonucleotide for detection of SNP TSC0012957
tacatctaactaa

SEQ ID NO: 44011 - DNA, 13 bp, Artificial Sequence
  Oligonucleotide for detection of SNP TSC0012957
ttagttggatgta

SEQ ID NO: 44012 - DNA, 13 bp, Artificial Sequence
  Oligonucleotide for detection of SNP TSC0012957
tacatccaactaa

SEQ ID NO: 44013 - DNA, 13 bp, Artificial Sequence
  Oligonucleotide for detection of SNP TSC0012957
ttagtcggatgta

SEQ ID NO: 44014 - DNA, 13 bp, Artificial Sequence
  Oligonucleotide for detection of SNP TSC0012957
tacatccgactaa

SEQ ID NO: 44015 - DNA, 13 bp, Artificial Sequence
  Oligonucleotide for detection of SNP TSC0012957
tgtatttggttgg

SEQ ID NO: 44016 - DNA, 13 bp, Artificial Sequence
  Oligonucleotide for detection of SNP TSC0012957
ccaaccaaataca

SEQ ID NO: 44017 - DNA, 13 bp, Artificial Sequence
  Oligonucleotide for detection of SNP TSC0012957
tgtattcggttgg

SEQ ID NO: 44018 - DNA, 13 bp, Artificial Sequence
  Oligonucleotide for detection of SNP TSC0012957
ccaaccgaataca

SEQ ID NO: 44019 - DNA, 13 bp, Artificial Sequence
  Oligonucleotide for detection of SNP TSC0012958
aagaaaaaaagaa

SEQ ID NO: 44020 - DNA, 13 bp, Artificial Sequence
  Oligonucleotide for detection of SNP TSC0012958
ttctttttttctt

SEQ ID NO: 44021 - DNA, 13 bp, Artificial Sequence
  Oligonucleotide for detection of SNP TSC0012958
aagaaagaaagaa

SEQ ID NO: 44022 - DNA, 13 bp, Artificial Sequence
  Oligonucleotide for detection of SNP TSC0012958
ttctttctttctt

SEQ ID NO: 44023 - DNA, 13 bp, Artificial Sequence
  Oligonucleotide for detection of SNP TSC0012959
gagttatgtttay

SEQ ID NO: 44024 - DNA, 13 bp, Artificial Sequence
  Oligonucleotide for detection of SNP TSC0012959
rtaaacataactc

SEQ ID NO: 44025 - DNA, 13 bp, Artificial Sequence
  Oligonucleotide for detection of SNP TSC0012959
gagttacgtttay

SEQ ID NO: 44026 - DNA, 13 bp, Artificial Sequence
  Oligonucleotide for detection of SNP TSC0012959
rtaaacgtaactc

SEQ ID NO: 44027 - DNA, 13 bp, Artificial Sequence
  Oligonucleotide for detection of SNP TSC0012959
gtgggtgtggtty

SEQ ID NO: 44028 - DNA, 13 bp, Artificial Sequence
  Oligonucleotide for detection of SNP TSC0012959
raaccacacccac

SEQ ID NO: 44029 - DNA, 13 bp, Artificial Sequence
  Oligonucleotide for detection of SNP TSC0012959
gtgggtatggtty

SEQ ID NO: 44030 - DNA, 13 bp, Artificial Sequence
  Oligonucleotide for detection of SNP TSC0012959
raaccatacccac

SEQ ID NO: 44031 - DNA, 13 bp, Artificial Sequence
  Oligonucleotide for detection of SNP TSC0012959
gtgggcgtggtty

SEQ ID NO: 44032 - DNA, 13 bp, Artificial Sequence
  Oligonucleotide for detection of SNP TSC0012959
raaccacgcccac

SEQ ID NO: 44033 - DNA, 13 bp, Artificial Sequence
  Oligonucleotide for detection of SNP TSC0012960
gtttagaaagggy

SEQ ID NO: 44034 - DNA, 13 bp, Artificial Sequence
  Oligonucleotide for detection of SNP TSC0012960
rccctttctaaac

SEQ ID NO: 44035 - DNA, 13 bp, Artificial Sequence
  Oligonucleotide for detection of SNP TSC0012960
gtttagtaagggy

SEQ ID NO: 44036 - DNA, 13 bp, Artificial Sequence
  Oligonucleotide for detection of SNP TSC0012960
rcccttactaaac

SEQ ID NO: 44037 - DNA, 13 bp, Artificial Sequence
  Oligonucleotide for detection of SNP TSC0012960
gttttttttaagy

SEQ ID NO: 44038 - DNA, 13 bp, Artificial Sequence
  Oligonucleotide for detection of SNP TSC0012960
rcttaaaaaaaac

SEQ ID NO: 44039 - DNA, 13 bp, Artificial Sequence
  Oligonucleotide for detection of SNP TSC0012960
gtttttattaagy

SEQ ID NO: 44040 - DNA, 13 bp, Artificial Sequence
  Oligonucleotide for detection of SNP TSC0012960
rcttaataaaaac

SEQ ID NO: 44041 - DNA, 13 bp, Artificial Sequence
  Oligonucleotide for detection of SNP TSC0012961
taggaaattgttg

SEQ ID NO: 44042 - DNA, 13 bp, Artificial Sequence
  Oligonucleotide for detection of SNP TSC0012961
caacaatttccta

SEQ ID NO: 44043 - DNA, 13 bp, Artificial Sequence
  Oligonucleotide for detection of SNP TSC0012961
taggaatttgttg

SEQ ID NO: 44044 - DNA, 13 bp, Artificial Sequence
  Oligonucleotide for detection of SNP TSC0012961
caacaaattccta

SEQ ID NO: 44045 - DNA, 13 bp, Artificial Sequence
  Oligonucleotide for detection of SNP TSC0012961
tagtaatttttta

SEQ ID NO: 44046 - DNA, 13 bp, Artificial Sequence
  Oligonucleotide for detection of SNP TSC0012961
taaaaaattacta

SEQ ID NO: 44047 - DNA, 13 bp, Artificial Sequence
  Oligonucleotide for detection of SNP TSC0012961
tagtaagttttta

SEQ ID NO: 44048 - DNA, 13 bp, Artificial Sequence
  Oligonucleotide for detection of SNP TSC0012961
taaaaacttacta

SEQ ID NO: 44049 - DNA, 13 bp, Artificial Sequence
  Oligonucleotide for detection of SNP TSC0012962
tttgtggaaatgt

SEQ ID NO: 44050 - DNA, 13 bp, Artificial Sequence
  Oligonucleotide for detection of SNP TSC0012962
acatttccacaaa

SEQ ID NO: 44051 - DNA, 13 bp, Artificial Sequence
  Oligonucleotide for detection of SNP TSC0012962
tttgtgaaaatgt

SEQ ID NO: 44052 - DNA, 13 bp, Artificial Sequence
  Oligonucleotide for detection of SNP TSC0012962
acattttcacaaa

SEQ ID NO: 44053 - DNA, 13 bp, Artificial Sequence
  Oligonucleotide for detection of SNP TSC0012962
ttcgtggaaatgt

SEQ ID NO: 44054 - DNA, 13 bp, Artificial Sequence
  Oligonucleotide for detection of SNP TSC0012962
acatttccacgaa

SEQ ID NO: 44055 - DNA, 13 bp, Artificial Sequence
  Oligonucleotide for detection of SNP TSC0012962
ttcgtgaaaatgt

SEQ ID NO: 44056 - DNA, 13 bp, Artificial Sequence
  Oligonucleotide for detection of SNP TSC0012962
acattttcacgaa

SEQ ID NO: 44057 - DNA, 13 bp, Artificial Sequence
  Oligonucleotide for detection of SNP TSC0012963
gtagatgtgaata

SEQ ID NO: 44058 - DNA, 13 bp, Artificial Sequence
  Oligonucleotide for detection of SNP TSC0012963
tattcacatctac

SEQ ID NO: 44059 - DNA, 13 bp, Artificial Sequence
  Oligonucleotide for detection of SNP TSC0012963
gtagatatgaata

SEQ ID NO: 44060 - DNA, 13 bp, Artificial Sequence
  Oligonucleotide for detection of SNP TSC0012963
tattcatatctac

SEQ ID NO: 44061 - DNA, 13 bp, Artificial Sequence
  Oligonucleotide for detection of SNP TSC0012964
atattaattgttt

SEQ ID NO: 44062 - DNA, 13 bp, Artificial Sequence
  Oligonucleotide for detection of SNP TSC0012964
aaacaattaatat

SEQ ID NO: 44063 - DNA, 13 bp, Artificial Sequence
  Oligonucleotide for detection of SNP TSC0012964
atattatttgttt

SEQ ID NO: 44064 - DNA, 13 bp, Artificial Sequence
  Oligonucleotide for detection of SNP TSC0012964
aaacaaataatat

SEQ ID NO: 44065 - DNA, 13 bp, Artificial Sequence
  Oligonucleotide for detection of SNP TSC0012964
agatagttgatat

SEQ ID NO: 44066 - DNA, 13 bp, Artificial Sequence
  Oligonucleotide for detection of SNP TSC0012964
atatcaactatct

SEQ ID NO: 44067 - DNA, 13 bp, Artificial Sequence
  Oligonucleotide for detection of SNP TSC0012964
agataggtgatat

SEQ ID NO: 44068 - DNA, 13 bp, Artificial Sequence
  Oligonucleotide for detection of SNP TSC0012964
atatcacctatct

SEQ ID NO: 44069 - DNA, 13 bp, Artificial Sequence
  Oligonucleotide for detection of SNP TSC0012965
tatgtgttttaag

SEQ ID NO: 44070 - DNA, 13 bp, Artificial Sequence
  Oligonucleotide for detection of SNP TSC0012965
cttaaaacacata

SEQ ID NO: 44071 - DNA, 13 bp, Artificial Sequence
  Oligonucleotide for detection of SNP TSC0012965
tatgtggtttaag

SEQ ID NO: 44072 - DNA, 13 bp, Artificial Sequence
  Oligonucleotide for detection of SNP TSC0012965
cttaaaccacata

SEQ ID NO: 44073 - DNA, 13 bp, Artificial Sequence
  Oligonucleotide for detection of SNP TSC0012965
tttaaggtatatg

SEQ ID NO: 44074 - DNA, 13 bp, Artificial Sequence
  Oligonucleotide for detection of SNP TSC0012965
catataccttaaa

SEQ ID NO: 44075 - DNA, 13 bp, Artificial Sequence
  Oligonucleotide for detection of SNP TSC0012965
tttaagttatatg

SEQ ID NO: 44076 - DNA, 13 bp, Artificial Sequence
  Oligonucleotide for detection of SNP TSC0012965
catataacttaaa

SEQ ID NO: 44077 - DNA, 13 bp, Artificial Sequence
  Oligonucleotide for detection of SNP TSC0012966
ggtatgagttatt

SEQ ID NO: 44078 - DNA, 13 bp, Artificial Sequence
  Oligonucleotide for detection of SNP TSC0012966
aataactcatacc

SEQ ID NO: 44079 - DNA, 13 bp, Artificial Sequence
  Oligonucleotide for detection of SNP TSC0012966
ggtatgggttatt

SEQ ID NO: 44080 - DNA, 13 bp, Artificial Sequence
  Oligonucleotide for detection of SNP TSC0012966
aataacccatacc

SEQ ID NO: 44081 - DNA, 13 bp, Artificial Sequence
  Oligonucleotide for detection of SNP TSC0012969
atttttagttggy

SEQ ID NO: 44082 - DNA, 13 bp, Artificial Sequence
  Oligonucleotide for detection of SNP TSC0012969
rccaactaaaaat

SEQ ID NO: 44083 - DNA, 13 bp, Artificial Sequence
  Oligonucleotide for detection of SNP TSC0012969
atttttggttggy

SEQ ID NO: 44084 - DNA, 13 bp, Artificial Sequence
  Oligonucleotide for detection of SNP TSC0012969
rccaaccaaaaat

SEQ ID NO: 44085 - DNA, 13 bp, Artificial Sequence
  Oligonucleotide for detection of SNP TSC0012970
agtttttggtttg

SEQ ID NO: 44086 - DNA, 13 bp, Artificial Sequence
  Oligonucleotide for detection of SNP TSC0012970
caaaccaaaaact

SEQ ID NO: 44087 - DNA, 13 bp, Artificial Sequence
  Oligonucleotide for detection of SNP TSC0012970
agttttcggtttg

SEQ ID NO: 44088 - DNA, 13 bp, Artificial Sequence
  Oligonucleotide for detection of SNP TSC0012970
caaaccgaaaact

SEQ ID NO: 44089 - DNA, 13 bp, Artificial Sequence
  Oligonucleotide for detection of SNP TSC0012970
taagttgggagtt

SEQ ID NO: 44090 - DNA, 13 bp, Artificial Sequence
  Oligonucleotide for detection of SNP TSC0012970
aactcccaactta

SEQ ID NO: 44091 - DNA, 13 bp, Artificial Sequence
  Oligonucleotide for detection of SNP TSC0012970
taagttaggagtt

SEQ ID NO: 44092 - DNA, 13 bp, Artificial Sequence
  Oligonucleotide for detection of SNP TSC0012970
aactcctaactta

SEQ ID NO: 44093 - DNA, 13 bp, Artificial Sequence
  Oligonucleotide for detection of SNP TSC0012970
taagtcgggagtt

SEQ ID NO: 44094 - DNA, 13 bp, Artificial Sequence
  Oligonucleotide for detection of SNP TSC0012970
aactcccgactta

SEQ ID NO: 44095 - DNA, 13 bp, Artificial Sequence
  Oligonucleotide for detection of SNP TSC0012971
ttgtatgataaty

SEQ ID NO: 44096 - DNA, 13 bp, Artificial Sequence
  Oligonucleotide for detection of SNP TSC0012971
rattatcatacaa

SEQ ID NO: 44097 - DNA, 13 bp, Artificial Sequence
  Oligonucleotide for detection of SNP TSC0012971
ttgtataataaty

SEQ ID NO: 44098 - DNA, 13 bp, Artificial Sequence
  Oligonucleotide for detection of SNP TSC0012971
rattattatacaa

SEQ ID NO: 44099 - DNA, 13 bp, Artificial Sequence
  Oligonucleotide for detection of SNP TSC0012971
ttgtacgataaty

SEQ ID NO: 44100 - DNA, 13 bp, Artificial Sequence
  Oligonucleotide for detection of SNP TSC0012971
rattatcgtacaa

SEQ ID NO: 44101 - DNA, 13 bp, Artificial Sequence
  Oligonucleotide for detection of SNP TSC0012974
tgtattatagtat

SEQ ID NO: 44102 - DNA, 13 bp, Artificial Sequence
  Oligonucleotide for detection of SNP TSC0012974
atactataataca

SEQ ID NO: 44103 - DNA, 13 bp, Artificial Sequence
  Oligonucleotide for detection of SNP TSC0012974
tgtattgtagtat

SEQ ID NO: 44104 - DNA, 13 bp, Artificial Sequence
  Oligonucleotide for detection of SNP TSC0012974
atactacaataca

SEQ ID NO: 44105 - DNA, 13 bp, Artificial Sequence
  Oligonucleotide for detection of SNP TSC0012978
agttataaggtaa

SEQ ID NO: 44106 - DNA, 13 bp, Artificial Sequence
  Oligonucleotide for detection of SNP TSC0012978
ttaccttataact

SEQ ID NO: 44107 - DNA, 13 bp, Artificial Sequence
  Oligonucleotide for detection of SNP TSC0012978
agttatgaggtaa

SEQ ID NO: 44108 - DNA, 13 bp, Artificial Sequence
  Oligonucleotide for detection of SNP TSC0012978
ttacctcataact

SEQ ID NO: 44109 - DNA, 13 bp, Artificial Sequence
  Oligonucleotide for detection of SNP TSC0012978
agttacgaggtaa

SEQ ID NO: 44110 - DNA, 13 bp, Artificial Sequence
  Oligonucleotide for detection of SNP TSC0012978
ttacctcgtaact

SEQ ID NO: 44111 - DNA, 13 bp, Artificial Sequence
  Oligonucleotide for detection of SNP TSC0012978
ttgttttgtagtt

SEQ ID NO: 44112 - DNA, 13 bp, Artificial Sequence
  Oligonucleotide for detection of SNP TSC0012978
aactacaaaacaa

SEQ ID NO: 44113 - DNA, 13 bp, Artificial Sequence
  Oligonucleotide for detection of SNP TSC0012978
ttgtttcgtagtt

SEQ ID NO: 44114 - DNA, 13 bp, Artificial Sequence
  Oligonucleotide for detection of SNP TSC0012978
aactacgaaacaa

SEQ ID NO: 44115 - DNA, 13 bp, Artificial Sequence
  Oligonucleotide for detection of SNP TSC0012979
tgtagtgaattat

SEQ ID NO: 44116 - DNA, 13 bp, Artificial Sequence
  Oligonucleotide for detection of SNP TSC0012979
ataattcactaca

SEQ ID NO: 44117 - DNA, 13 bp, Artificial Sequence
  Oligonucleotide for detection of SNP TSC0012979
tgtagttaattat

SEQ ID NO: 44118 - DNA, 13 bp, Artificial Sequence
  Oligonucleotide for detection of SNP TSC0012979
ataattaactaca

SEQ ID NO: 44119 - DNA, 13 bp, Artificial Sequence
  Oligonucleotide for detection of SNP TSC0012979
atggtttattgta

SEQ ID NO: 44120 - DNA, 13 bp, Artificial Sequence
  Oligonucleotide for detection of SNP TSC0012979
tacaataaaccat

SEQ ID NO: 44121 - DNA, 13 bp, Artificial Sequence
  Oligonucleotide for detection of SNP TSC0012979
atggttaattgta

SEQ ID NO: 44122 - DNA, 13 bp, Artificial Sequence
  Oligonucleotide for detection of SNP TSC0012979
tacaattaaccat

SEQ ID NO: 44123 - DNA, 13 bp, Artificial Sequence
  Oligonucleotide for detection of SNP TSC0012980
ttgggtaataggg

SEQ ID NO: 44124 - DNA, 13 bp, Artificial Sequence
  Oligonucleotide for detection of SNP TSC0012980
ccctattacccaa

SEQ ID NO: 44125 - DNA, 13 bp, Artificial Sequence
  Oligonucleotide for detection of SNP TSC0012980
ttgggtgataggg

SEQ ID NO: 44126 - DNA, 13 bp, Artificial Sequence
  Oligonucleotide for detection of SNP TSC0012980
ccctatcacccaa

SEQ ID NO: 44127 - DNA, 13 bp, Artificial Sequence
  Oligonucleotide for detection of SNP TSC0012981
gtgttgagttgty

SEQ ID NO: 44128 - DNA, 13 bp, Artificial Sequence
  Oligonucleotide for detection of SNP TSC0012981
racaactcaacac

SEQ ID NO: 44129 - DNA, 13 bp, Artificial Sequence
  Oligonucleotide for detection of SNP TSC0012981
gtgttgggttgty

SEQ ID NO: 44130 - DNA, 13 bp, Artificial Sequence
  Oligonucleotide for detection of SNP TSC0012981
racaacccaacac

SEQ ID NO: 44131 - DNA, 13 bp, Artificial Sequence
  Oligonucleotide for detection of SNP TSC0012982
gttgtatgggttt

SEQ ID NO: 44132 - DNA, 13 bp, Artificial Sequence
  Oligonucleotide for detection of SNP TSC0012982
aaacccatacaac

SEQ ID NO: 44133 - DNA, 13 bp, Artificial Sequence
  Oligonucleotide for detection of SNP TSC0012982
gttgtacgggttt

SEQ ID NO: 44134 - DNA, 13 bp, Artificial Sequence
  Oligonucleotide for detection of SNP TSC0012982
aaacccgtacaac

SEQ ID NO: 44135 - DNA, 13 bp, Artificial Sequence
  Oligonucleotide for detection of SNP TSC0012982
agatttgtgtagy

SEQ ID NO: 44136 - DNA, 13 bp, Artificial Sequence
  Oligonucleotide for detection of SNP TSC0012982
rctacacaaatct

SEQ ID NO: 44137 - DNA, 13 bp, Artificial Sequence
  Oligonucleotide for detection of SNP TSC0012982
agatttatgtagy

SEQ ID NO: 44138 - DNA, 13 bp, Artificial Sequence
  Oligonucleotide for detection of SNP TSC0012982
rctacataaatct

SEQ ID NO: 44139 - DNA, 13 bp, Artificial Sequence
  Oligonucleotide for detection of SNP TSC0012982
agattcgtgtagy

SEQ ID NO: 44140 - DNA, 13 bp, Artificial Sequence
  Oligonucleotide for detection of SNP TSC0012982
rctacacgaatct

SEQ ID NO: 44141 - DNA, 13 bp, Artificial Sequence
  Oligonucleotide for detection of SNP TSC0012983
gttattatatatg

SEQ ID NO: 44142 - DNA, 13 bp, Artificial Sequence
  Oligonucleotide for detection of SNP TSC0012983
catatataataac

SEQ ID NO: 44143 - DNA, 13 bp, Artificial Sequence
  Oligonucleotide for detection of SNP TSC0012983
gttattgtatatg

SEQ ID NO: 44144 - DNA, 13 bp, Artificial Sequence
  Oligonucleotide for detection of SNP TSC0012983
catatacaataac

SEQ ID NO: 44145 - DNA, 13 bp, Artificial Sequence
  Oligonucleotide for detection of SNP TSC0012984
taggtggagatga

SEQ ID NO: 44146 - DNA, 13 bp, Artificial Sequence
  Oligonucleotide for detection of SNP TSC0012984
tcatctccaccta

SEQ ID NO: 44147 - DNA, 13 bp, Artificial Sequence
  Oligonucleotide for detection of SNP TSC0012984
taggtgaagatga

SEQ ID NO: 44148 - DNA, 13 bp, Artificial Sequence
  Oligonucleotide for detection of SNP TSC0012984
tcatcttcaccta

SEQ ID NO: 44149 - DNA, 13 bp, Artificial Sequence
  Oligonucleotide for detection of SNP TSC0012985
gaagattgtatta

SEQ ID NO: 44150 - DNA, 13 bp, Artificial Sequence
  Oligonucleotide for detection of SNP TSC0012985
taatacaatcttc

SEQ ID NO: 44151 - DNA, 13 bp, Artificial Sequence
  Oligonucleotide for detection of SNP TSC0012985
gaagatcgtatta

SEQ ID NO: 44152 - DNA, 13 bp, Artificial Sequence
  Oligonucleotide for detection of SNP TSC0012985
taatacgatcttc

SEQ ID NO: 44153 - DNA, 13 bp, Artificial Sequence
  Oligonucleotide for detection of SNP TSC0012985
tgatatgatttty

SEQ ID NO: 44154 - DNA, 13 bp, Artificial Sequence
  Oligonucleotide for detection of SNP TSC0012985
raaaatcatatca

SEQ ID NO: 44155 - DNA, 13 bp, Artificial Sequence
  Oligonucleotide for detection of SNP TSC0012985
tgatataatttty

SEQ ID NO: 44156 - DNA, 13 bp, Artificial Sequence
  Oligonucleotide for detection of SNP TSC0012985
raaaattatatca

SEQ ID NO: 44157 - DNA, 13 bp, Artificial Sequence
  Oligonucleotide for detection of SNP TSC0012985
tgatacgatttty

SEQ ID NO: 44158 - DNA, 13 bp, Artificial Sequence
  Oligonucleotide for detection of SNP TSC0012985
raaaatcgtatca

SEQ ID NO: 44159 - DNA, 13 bp, Artificial Sequence
  Oligonucleotide for detection of SNP TSC0012986
ttgaatatagaga

SEQ ID NO: 44160 - DNA, 13 bp, Artificial Sequence
  Oligonucleotide for detection of SNP TSC0012986
tctctatattcaa

SEQ ID NO: 44161 - DNA, 13 bp, Artificial Sequence
  Oligonucleotide for detection of SNP TSC0012986
ttgaatgtagaga

SEQ ID NO: 44162 - DNA, 13 bp, Artificial Sequence
  Oligonucleotide for detection of SNP TSC0012986
tctctacattcaa

SEQ ID NO: 44163 - DNA, 13 bp, Artificial Sequence
  Oligonucleotide for detection of SNP TSC0012986
ttgaacgtagaga

SEQ ID NO: 44164 - DNA, 13 bp, Artificial Sequence
  Oligonucleotide for detection of SNP TSC0012986
tctctacgttcaa

SEQ ID NO: 44165 - DNA, 13 bp, Artificial Sequence
  Oligonucleotide for detection of SNP TSC0012987
agaagatggaaag

SEQ ID NO: 44166 - DNA, 13 bp, Artificial Sequence
  Oligonucleotide for detection of SNP TSC0012987
ctttccatcttct

SEQ ID NO: 44167 - DNA, 13 bp, Artificial Sequence
  Oligonucleotide for detection of SNP TSC0012987
agaagacggaaag

SEQ ID NO: 44168 - DNA, 13 bp, Artificial Sequence
  Oligonucleotide for detection of SNP TSC0012987
ctttccgtcttct

SEQ ID NO: 44169 - DNA, 13 bp, Artificial Sequence
  Oligonucleotide for detection of SNP TSC0012988
taggttttgttty

SEQ ID NO: 44170 - DNA, 13 bp, Artificial Sequence
  Oligonucleotide for detection of SNP TSC0012988
raaacaaaaccta

SEQ ID NO: 44171 - DNA, 13 bp, Artificial Sequence
  Oligonucleotide for detection of SNP TSC0012988
taggttgtgttty

SEQ ID NO: 44172 - DNA, 13 bp, Artificial Sequence
  Oligonucleotide for detection of SNP TSC0012988
raaacacaaccta

SEQ ID NO: 44173 - DNA, 13 bp, Artificial Sequence
  Oligonucleotide for detection of SNP TSC0012988
ggaatagagtttg

SEQ ID NO: 44174 - DNA, 13 bp, Artificial Sequence
  Oligonucleotide for detection of SNP TSC0012988
caaactctattcc

SEQ ID NO: 44175 - DNA, 13 bp, Artificial Sequence
  Oligonucleotide for detection of SNP TSC0012988
ggaatatagtttg

SEQ ID NO: 44176 - DNA, 13 bp, Artificial Sequence
  Oligonucleotide for detection of SNP TSC0012988
caaactatattcc

SEQ ID NO: 44177 - DNA, 13 bp, Artificial Sequence
  Oligonucleotide for detection of SNP TSC0012989
attattaaagaty

SEQ ID NO: 44178 - DNA, 13 bp, Artificial Sequence
  Oligonucleotide for detection of SNP TSC0012989
ratctttaataat

SEQ ID NO: 44179 - DNA, 13 bp, Artificial Sequence
  Oligonucleotide for detection of SNP TSC0012989
attattgaagaty

SEQ ID NO: 44180 - DNA, 13 bp, Artificial Sequence
  Oligonucleotide for detection of SNP TSC0012989
ratcttcaataat

SEQ ID NO: 44181 - DNA, 13 bp, Artificial Sequence
  Oligonucleotide for detection of SNP TSC0012990
atagttaaaaaty

SEQ ID NO: 44182 - DNA, 13 bp, Artificial Sequence
  Oligonucleotide for detection of SNP TSC0012990
ratttttaactat

SEQ ID NO: 44183 - DNA, 13 bp, Artificial Sequence
  Oligonucleotide for detection of SNP TSC0012990
atagttgaaaaty

SEQ ID NO: 44184 - DNA, 13 bp, Artificial Sequence
  Oligonucleotide for detection of SNP TSC0012990
rattttcaactat

SEQ ID NO: 44185 - DNA, 13 bp, Artificial Sequence
  Oligonucleotide for detection of SNP TSC0012991
aatttgtgtttag

SEQ ID NO: 44186 - DNA, 13 bp, Artificial Sequence
  Oligonucleotide for detection of SNP TSC0012991
ctaaacacaaatt

SEQ ID NO: 44187 - DNA, 13 bp, Artificial Sequence
  Oligonucleotide for detection of SNP TSC0012991
aatttgcgtttag

SEQ ID NO: 44188 - DNA, 13 bp, Artificial Sequence
  Oligonucleotide for detection of SNP TSC0012991
ctaaacgcaaatt

SEQ ID NO: 44189 - DNA, 13 bp, Artificial Sequence
  Oligonucleotide for detection of SNP TSC0012991
ttgagtgtaggtt

SEQ ID NO: 44190 - DNA, 13 bp, Artificial Sequence
  Oligonucleotide for detection of SNP TSC0012991
aacctacactcaa

SEQ ID NO: 44191 - DNA, 13 bp, Artificial Sequence
  Oligonucleotide for detection of SNP TSC0012991
ttgagtataggtt

SEQ ID NO: 44192 - DNA, 13 bp, Artificial Sequence
  Oligonucleotide for detection of SNP TSC0012991
aacctatactcaa

SEQ ID NO: 44193 - DNA, 13 bp, Artificial Sequence
  Oligonucleotide for detection of SNP TSC0012991
ttgagcgtaggtt

SEQ ID NO: 44194 - DNA, 13 bp, Artificial Sequence
  Oligonucleotide for detection of SNP TSC0012991
aacctacgctcaa

SEQ ID NO: 44195 - DNA, 13 bp, Artificial Sequence
  Oligonucleotide for detection of SNP TSC0012992
ggaagggaaaaay

SEQ ID NO: 44196 - DNA, 13 bp, Artificial Sequence
  Oligonucleotide for detection of SNP TSC0012992
rtttttcccttcc

SEQ ID NO: 44197 - DNA, 13 bp, Artificial Sequence
  Oligonucleotide for detection of SNP TSC0012992
ggaaggaaaaaay

SEQ ID NO: 44198 - DNA, 13 bp, Artificial Sequence
  Oligonucleotide for detection of SNP TSC0012992
rttttttccttcc

SEQ ID NO: 44199 - DNA, 13 bp, Artificial Sequence
  Oligonucleotide for detection of SNP TSC0012993
tggagaaaggttg

SEQ ID NO: 44200 - DNA, 13 bp, Artificial Sequence
  Oligonucleotide for detection of SNP TSC0012993
caacctttctcca

SEQ ID NO: 44201 - DNA, 13 bp, Artificial Sequence
  Oligonucleotide for detection of SNP TSC0012993
tggagagaggttg

SEQ ID NO: 44202 - DNA, 13 bp, Artificial Sequence
  Oligonucleotide for detection of SNP TSC0012993
caacctctctcca

SEQ ID NO: 44203 - DNA, 13 bp, Artificial Sequence
  Oligonucleotide for detection of SNP TSC0012994
ttgtatgttatat

SEQ ID NO: 44204 - DNA, 13 bp, Artificial Sequence
  Oligonucleotide for detection of SNP TSC0012994
atataacatacaa

SEQ ID NO: 44205 - DNA, 13 bp, Artificial Sequence
  Oligonucleotide for detection of SNP TSC0012994
ttgtatattatat

SEQ ID NO: 44206 - DNA, 13 bp, Artificial Sequence
  Oligonucleotide for detection of SNP TSC0012994
atataatatacaa

SEQ ID NO: 44207 - DNA, 13 bp, Artificial Sequence
  Oligonucleotide for detection of SNP TSC0012995
tatgtaattggga

SEQ ID NO: 44208 - DNA, 13 bp, Artificial Sequence
  Oligonucleotide for detection of SNP TSC0012995
tcccaattacata

SEQ ID NO: 44209 - DNA, 13 bp, Artificial Sequence
  Oligonucleotide for detection of SNP TSC0012995
tatgtagttggga

SEQ ID NO: 44210 - DNA, 13 bp, Artificial Sequence
  Oligonucleotide for detection of SNP TSC0012995
tcccaactacata

SEQ ID NO: 44211 - DNA, 13 bp, Artificial Sequence
  Oligonucleotide for detection of SNP TSC0013001
tagtataagtgta

SEQ ID NO: 44212 - DNA, 13 bp, Artificial Sequence
  Oligonucleotide for detection of SNP TSC0013001
tacacttatacta

SEQ ID NO: 44213 - DNA, 13 bp, Artificial Sequence
  Oligonucleotide for detection of SNP TSC0013001
tagtatgagtgta

SEQ ID NO: 44214 - DNA, 13 bp, Artificial Sequence
  Oligonucleotide for detection of SNP TSC0013001
tacactcatacta

SEQ ID NO: 44215 - DNA, 13 bp, Artificial Sequence
  Oligonucleotide for detection of SNP TSC0013001
tagtacgagtgta

SEQ ID NO: 44216 - DNA, 13 bp, Artificial Sequence
  Oligonucleotide for detection of SNP TSC0013001
tacactcgtacta

SEQ ID NO: 44217 - DNA, 13 bp, Artificial Sequence
  Oligonucleotide for detection of SNP TSC0013001
tatatttgtatta

SEQ ID NO: 44218 - DNA, 13 bp, Artificial Sequence
  Oligonucleotide for detection of SNP TSC0013001
taatacaaatata

SEQ ID NO: 44219 - DNA, 13 bp, Artificial Sequence
  Oligonucleotide for detection of SNP TSC0013001
tatattcgtatta

SEQ ID NO: 44220 - DNA, 13 bp, Artificial Sequence
  Oligonucleotide for detection of SNP TSC0013001
taatacgaatata

SEQ ID NO: 44221 - DNA, 13 bp, Artificial Sequence
  Oligonucleotide for detection of SNP TSC0013002
gagtttttgtgtt

SEQ ID NO: 44222 - DNA, 13 bp, Artificial Sequence
  Oligonucleotide for detection of SNP TSC0013002
aacacaaaaactc

SEQ ID NO: 44223 - DNA, 13 bp, Artificial Sequence
  Oligonucleotide for detection of SNP TSC0013002
gagtttgtgtgtt

SEQ ID NO: 44224 - DNA, 13 bp, Artificial Sequence
  Oligonucleotide for detection of SNP TSC0013002
aacacacaaactc

SEQ ID NO: 44225 - DNA, 13 bp, Artificial Sequence
  Oligonucleotide for detection of SNP TSC0013002
agtatagaggtty

SEQ ID NO: 44226 - DNA, 13 bp, Artificial Sequence
  Oligonucleotide for detection of SNP TSC0013002
raacctctatact

SEQ ID NO: 44227 - DNA, 13 bp, Artificial Sequence
  Oligonucleotide for detection of SNP TSC0013002
agtatataggtty

SEQ ID NO: 44228 - DNA, 13 bp, Artificial Sequence
  Oligonucleotide for detection of SNP TSC0013002
raacctatatact

SEQ ID NO: 44229 - DNA, 13 bp, Artificial Sequence
  Oligonucleotide for detection of SNP TSC0013003
ttgaaggttattt

SEQ ID NO: 44230 - DNA, 13 bp, Artificial Sequence
  Oligonucleotide for detection of SNP TSC0013003
aaataaccttcaa

SEQ ID NO: 44231 - DNA, 13 bp, Artificial Sequence
  Oligonucleotide for detection of SNP TSC0013003
ttgaagattattt

SEQ ID NO: 44232 - DNA, 13 bp, Artificial Sequence
  Oligonucleotide for detection of SNP TSC0013003
aaataatcttcaa

SEQ ID NO: 44233 - DNA, 13 bp, Artificial Sequence
  Oligonucleotide for detection of SNP TSC0013003
tcgaaggttattt

SEQ ID NO: 44234 - DNA, 13 bp, Artificial Sequence
  Oligonucleotide for detection of SNP TSC0013003
aaataaccttcga

SEQ ID NO: 44235 - DNA, 13 bp, Artificial Sequence
  Oligonucleotide for detection of SNP TSC0013003
tcgaagattattt

SEQ ID NO: 44236 - DNA, 13 bp, Artificial Sequence
  Oligonucleotide for detection of SNP TSC0013003
aaataatcttcga

SEQ ID NO: 44237 - DNA, 13 bp, Artificial Sequence
  Oligonucleotide for detection of SNP TSC0013006
aaattagatttgt

SEQ ID NO: 44238 - DNA, 13 bp, Artificial Sequence
  Oligonucleotide for detection of SNP TSC0013006
acaaatctaattt

SEQ ID NO: 44239 - DNA, 13 bp, Artificial Sequence
  Oligonucleotide for detection of SNP TSC0013006
aaattaaatttgt

SEQ ID NO: 44240 - DNA, 13 bp, Artificial Sequence
  Oligonucleotide for detection of SNP TSC0013006
acaaatttaattt

SEQ ID NO: 44241 - DNA, 13 bp, Artificial Sequence
  Oligonucleotide for detection of SNP TSC0013007
aagtttatattag

SEQ ID NO: 44242 - DNA, 13 bp, Artificial Sequence
  Oligonucleotide for detection of SNP TSC0013007
ctaatataaactt

SEQ ID NO: 44243 - DNA, 13 bp, Artificial Sequence
  Oligonucleotide for detection of SNP TSC0013007
aagtttttattag

SEQ ID NO: 44244 - DNA, 13 bp, Artificial Sequence
  Oligonucleotide for detection of SNP TSC0013007
ctaataaaaactt

SEQ ID NO: 44245 - DNA, 13 bp, Artificial Sequence
  Oligonucleotide for detection of SNP TSC0013007
ttgatatggattt

SEQ ID NO: 44246 - DNA, 13 bp, Artificial Sequence
  Oligonucleotide for detection of SNP TSC0013007
aaatccatatcaa

SEQ ID NO: 44247 - DNA, 13 bp, Artificial Sequence
  Oligonucleotide for detection of SNP TSC0013007
ttgatagggattt

SEQ ID NO: 44248 - DNA, 13 bp, Artificial Sequence
  Oligonucleotide for detection of SNP TSC0013007
aaatccctatcaa

SEQ ID NO: 44249 - DNA, 13 bp, Artificial Sequence
  Oligonucleotide for detection of SNP TSC0013008
ttaattaggagtt

SEQ ID NO: 44250 - DNA, 13 bp, Artificial Sequence
  Oligonucleotide for detection of SNP TSC0013008
aactcctaattaa

SEQ ID NO: 44251 - DNA, 13 bp, Artificial Sequence
  Oligonucleotide for detection of SNP TSC0013008
ttaattgggagtt

SEQ ID NO: 44252 - DNA, 13 bp, Artificial Sequence
  Oligonucleotide for detection of SNP TSC0013008
aactcccaattaa

SEQ ID NO: 44253 - DNA, 13 bp, Artificial Sequence
  Oligonucleotide for detection of SNP TSC0013009
agggaagtttaty

SEQ ID NO: 44254 - DNA, 13 bp, Artificial Sequence
  Oligonucleotide for detection of SNP TSC0013009
rataaacttccct

SEQ ID NO: 44255 - DNA, 13 bp, Artificial Sequence
  Oligonucleotide for detection of SNP TSC0013009
agggaaatttaty

SEQ ID NO: 44256 - DNA, 13 bp, Artificial Sequence
  Oligonucleotide for detection of SNP TSC0013009
rataaatttccct

SEQ ID NO: 44257 - DNA, 13 bp, Artificial Sequence
  Oligonucleotide for detection of SNP TSC0013010
tttcgatttttty

SEQ ID NO: 44258 - DNA, 13 bp, Artificial Sequence
  Oligonucleotide for detection of SNP TSC0013010
raaaaaatcgaaa

SEQ ID NO: 44259 - DNA, 13 bp, Artificial Sequence
  Oligonucleotide for detection of SNP TSC0013010
tttcgagttttty

SEQ ID NO: 44260 - DNA, 13 bp, Artificial Sequence
  Oligonucleotide for detection of SNP TSC0013010
raaaaactcgaaa

SEQ ID NO: 44261 - DNA, 13 bp, Artificial Sequence
  Oligonucleotide for detection of SNP TSC0013010
gaggaagttgggg

SEQ ID NO: 44262 - DNA, 13 bp, Artificial Sequence
  Oligonucleotide for detection of SNP TSC0013010
ccccaacttcctc

SEQ ID NO: 44263 - DNA, 13 bp, Artificial Sequence
  Oligonucleotide for detection of SNP TSC0013010
gaggaatttgggg

SEQ ID NO: 44264 - DNA, 13 bp, Artificial Sequence
  Oligonucleotide for detection of SNP TSC0013010
ccccaaattcctc

SEQ ID NO: 44265 - DNA, 13 bp, Artificial Sequence
  Oligonucleotide for detection of SNP TSC0013010
gaggaagtcgggg

SEQ ID NO: 44266 - DNA, 13 bp, Artificial Sequence
  Oligonucleotide for detection of SNP TSC0013010
ccccgacttcctc

SEQ ID NO: 44267 - DNA, 13 bp, Artificial Sequence
  Oligonucleotide for detection of SNP TSC0013010
gaggaattcgggg

SEQ ID NO: 44268 - DNA, 13 bp, Artificial Sequence
  Oligonucleotide for detection of SNP TSC0013010
ccccgaattcctc

SEQ ID NO: 44269 - DNA, 13 bp, Artificial Sequence
  Oligonucleotide for detection of SNP TSC0013011
agttgagtgaaat

SEQ ID NO: 44270 - DNA, 13 bp, Artificial Sequence
  Oligonucleotide for detection of SNP TSC0013011
atttcactcaact

SEQ ID NO: 44271 - DNA, 13 bp, Artificial Sequence
  Oligonucleotide for detection of SNP TSC0013011
agttgaatgaaat

SEQ ID NO: 44272 - DNA, 13 bp, Artificial Sequence
  Oligonucleotide for detection of SNP TSC0013011
atttcattcaact

SEQ ID NO: 44273 - DNA, 13 bp, Artificial Sequence
  Oligonucleotide for detection of SNP TSC0013012
ttatatatgtttg

SEQ ID NO: 44274 - DNA, 13 bp, Artificial Sequence
  Oligonucleotide for detection of SNP TSC0013012
caaacatatataa

SEQ ID NO: 44275 - DNA, 13 bp, Artificial Sequence
  Oligonucleotide for detection of SNP TSC0013012
ttatatgtgtttg

SEQ ID NO: 44276 - DNA, 13 bp, Artificial Sequence
  Oligonucleotide for detection of SNP TSC0013012
caaacacatataa

SEQ ID NO: 44277 - DNA, 13 bp, Artificial Sequence
  Oligonucleotide for detection of SNP TSC0013012
ttatacgtgtttg

SEQ ID NO: 44278 - DNA, 13 bp, Artificial Sequence
  Oligonucleotide for detection of SNP TSC0013012
caaacacgtataa

SEQ ID NO: 44279 - DNA, 13 bp, Artificial Sequence
  Oligonucleotide for detection of SNP TSC0013012
taggtatgtgtga

SEQ ID NO: 44280 - DNA, 13 bp, Artificial Sequence
  Oligonucleotide for detection of SNP TSC0013012
tcacacataccta

SEQ ID NO: 44281 - DNA, 13 bp, Artificial Sequence
  Oligonucleotide for detection of SNP TSC0013012
taggtacgtgtga

SEQ ID NO: 44282 - DNA, 13 bp, Artificial Sequence
  Oligonucleotide for detection of SNP TSC0013012
tcacacgtaccta

SEQ ID NO: 44283 - DNA, 13 bp, Artificial Sequence
  Oligonucleotide for detection of SNP TSC0013013
atgataagaaaty

SEQ ID NO: 44284 - DNA, 13 bp, Artificial Sequence
  Oligonucleotide for detection of SNP TSC0013013
ratttcttatcat

SEQ ID NO: 44285 - DNA, 13 bp, Artificial Sequence
  Oligonucleotide for detection of SNP TSC0013013
atgataggaaaty

SEQ ID NO: 44286 - DNA, 13 bp, Artificial Sequence
  Oligonucleotide for detection of SNP TSC0013013
ratttcctatcat

SEQ ID NO: 44287 - DNA, 13 bp, Artificial Sequence
  Oligonucleotide for detection of SNP TSC0013015
attttcgtatttt

SEQ ID NO: 44288 - DNA, 13 bp, Artificial Sequence
  Oligonucleotide for detection of SNP TSC0013015
aaaatacgaaaat

SEQ ID NO: 44289 - DNA, 13 bp, Artificial Sequence
  Oligonucleotide for detection of SNP TSC0013015
agaatatgggggt

SEQ ID NO: 44290 - DNA, 13 bp, Artificial Sequence
  Oligonucleotide for detection of SNP TSC0013015
acccccatattct

SEQ ID NO: 44291 - DNA, 13 bp, Artificial Sequence
  Oligonucleotide for detection of SNP TSC0013015
agaatacgggggt

SEQ ID NO: 44292 - DNA, 13 bp, Artificial Sequence
  Oligonucleotide for detection of SNP TSC0013015
acccccgtattct

SEQ ID NO: 44293 - DNA, 13 bp, Artificial Sequence
  Oligonucleotide for detection of SNP TSC0013016
ggtgtttttttga

SEQ ID NO: 44294 - DNA, 13 bp, Artificial Sequence
  Oligonucleotide for detection of SNP TSC0013016
tcaaaaaaacacc

SEQ ID NO: 44295 - DNA, 13 bp, Artificial Sequence
  Oligonucleotide for detection of SNP TSC0013016
ggtgttgttttga

SEQ ID NO: 44296 - DNA, 13 bp, Artificial Sequence
  Oligonucleotide for detection of SNP TSC0013016
tcaaaacaacacc

SEQ ID NO: 44297 - DNA, 13 bp, Artificial Sequence
  Oligonucleotide for detection of SNP TSC0013016
ggcgtttttttga

SEQ ID NO: 44298 - DNA, 13 bp, Artificial Sequence
  Oligonucleotide for detection of SNP TSC0013016
tcaaaaaaacgcc

SEQ ID NO: 44299 - DNA, 13 bp, Artificial Sequence
  Oligonucleotide for detection of SNP TSC0013016
ggcgttgttttga

SEQ ID NO: 44300 - DNA, 13 bp, Artificial Sequence
  Oligonucleotide for detection of SNP TSC0013016
tcaaaacaacgcc

SEQ ID NO: 44301 - DNA, 13 bp, Artificial Sequence
  Oligonucleotide for detection of SNP TSC0013016
ggtgttttttcga

SEQ ID NO: 44302 - DNA, 13 bp, Artificial Sequence
  Oligonucleotide for detection of SNP TSC0013016
tcgaaaaaacacc

SEQ ID NO: 44303 - DNA, 13 bp, Artificial Sequence
  Oligonucleotide for detection of SNP TSC0013016
ggtgttgtttcga

SEQ ID NO: 44304 - DNA, 13 bp, Artificial Sequence
  Oligonucleotide for detection of SNP TSC0013016
tcgaaacaacacc

SEQ ID NO: 44305 - DNA, 13 bp, Artificial Sequence
  Oligonucleotide for detection of SNP TSC0013016
ggcgttttttcga

SEQ ID NO: 44306 - DNA, 13 bp, Artificial Sequence
  Oligonucleotide for detection of SNP TSC0013016
tcgaaaaaacgcc

SEQ ID NO: 44307 - DNA, 13 bp, Artificial Sequence
  Oligonucleotide for detection of SNP TSC0013016
ggcgttgtttcga

SEQ ID NO: 44308 - DNA, 13 bp, Artificial Sequence
  Oligonucleotide for detection of SNP TSC0013016
tcgaaacaacgcc

SEQ ID NO: 44309 - DNA, 13 bp, Artificial Sequence
  Oligonucleotide for detection of SNP TSC0013016
ttgagagagtgty

SEQ ID NO: 44310 - DNA, 13 bp, Artificial Sequence
  Oligonucleotide for detection of SNP TSC0013016
racactctctcaa

SEQ ID NO: 44311 - DNA, 13 bp, Artificial Sequence
  Oligonucleotide for detection of SNP TSC0013016
ttgagatagtgty

SEQ ID NO: 44312 - DNA, 13 bp, Artificial Sequence
  Oligonucleotide for detection of SNP TSC0013016
racactatctcaa

SEQ ID NO: 44313 - DNA, 13 bp, Artificial Sequence
  Oligonucleotide for detection of SNP TSC0013016
tcgagagagtgty

SEQ ID NO: 44314 - DNA, 13 bp, Artificial Sequence
  Oligonucleotide for detection of SNP TSC0013016
racactctctcga

SEQ ID NO: 44315 - DNA, 13 bp, Artificial Sequence
  Oligonucleotide for detection of SNP TSC0013016
tcgagatagtgty

SEQ ID NO: 44316 - DNA, 13 bp, Artificial Sequence
  Oligonucleotide for detection of SNP TSC0013016
racactatctcga

SEQ ID NO: 44317 - DNA, 13 bp, Artificial Sequence
  Oligonucleotide for detection of SNP TSC0013016
ttgagagagcgty

SEQ ID NO: 44318 - DNA, 13 bp, Artificial Sequence
  Oligonucleotide for detection of SNP TSC0013016
racgctctctcaa

SEQ ID NO: 44319 - DNA, 13 bp, Artificial Sequence
  Oligonucleotide for detection of SNP TSC0013016
ttgagatagcgty

SEQ ID NO: 44320 - DNA, 13 bp, Artificial Sequence
  Oligonucleotide for detection of SNP TSC0013016
racgctatctcaa

SEQ ID NO: 44321 - DNA, 13 bp, Artificial Sequence
  Oligonucleotide for detection of SNP TSC0013016
tcgagagagcgty

SEQ ID NO: 44322 - DNA, 13 bp, Artificial Sequence
  Oligonucleotide for detection of SNP TSC0013016
racgctctctcga

SEQ ID NO: 44323 - DNA, 13 bp, Artificial Sequence
  Oligonucleotide for detection of SNP TSC0013016
tcgagatagcgty

SEQ ID NO: 44324 - DNA, 13 bp, Artificial Sequence
  Oligonucleotide for detection of SNP TSC0013016
racgctatctcga

SEQ ID NO: 44325 - DNA, 13 bp, Artificial Sequence
  Oligonucleotide for detection of SNP TSC0013017
atataaataatta

SEQ ID NO: 44326 - DNA, 13 bp, Artificial Sequence
  Oligonucleotide for detection of SNP TSC0013017
taattatttatat

SEQ ID NO: 44327 - DNA, 13 bp, Artificial Sequence
  Oligonucleotide for detection of SNP TSC0013017
atataagtaatta

SEQ ID NO: 44328 - DNA, 13 bp, Artificial Sequence
  Oligonucleotide for detection of SNP TSC0013017
taattacttatat

SEQ ID NO: 44329 - DNA, 13 bp, Artificial Sequence
  Oligonucleotide for detection of SNP TSC0013018
tgtgttatgagtt

SEQ ID NO: 44330 - DNA, 13 bp, Artificial Sequence
  Oligonucleotide for detection of SNP TSC0013018
aactcataacaca

SEQ ID NO: 44331 - DNA, 13 bp, Artificial Sequence
  Oligonucleotide for detection of SNP TSC0013018
tgtgttgtgagtt

SEQ ID NO: 44332 - DNA, 13 bp, Artificial Sequence
  Oligonucleotide for detection of SNP TSC0013018
aactcacaacaca

SEQ ID NO: 44333 - DNA, 13 bp, Artificial Sequence
  Oligonucleotide for detection of SNP TSC0013019
aaggaagaaagga

SEQ ID NO: 44334 - DNA, 13 bp, Artificial Sequence
  Oligonucleotide for detection of SNP TSC0013019
tcctttcttcctt

SEQ ID NO: 44335 - DNA, 13 bp, Artificial Sequence
  Oligonucleotide for detection of SNP TSC0013019
aaggaataaagga

SEQ ID NO: 44336 - DNA, 13 bp, Artificial Sequence
  Oligonucleotide for detection of SNP TSC0013019
tcctttattcctt

SEQ ID NO: 44337 - DNA, 13 bp, Artificial Sequence
  Oligonucleotide for detection of SNP TSC0013021
taaatgatttagy

SEQ ID NO: 44338 - DNA, 13 bp, Artificial Sequence
  Oligonucleotide for detection of SNP TSC0013021
rctaaatcattta

SEQ ID NO: 44339 - DNA, 13 bp, Artificial Sequence
  Oligonucleotide for detection of SNP TSC0013021
taaatggtttagy

SEQ ID NO: 44340 - DNA, 13 bp, Artificial Sequence
  Oligonucleotide for detection of SNP TSC0013021
rctaaaccattta

SEQ ID NO: 44341 - DNA, 13 bp, Artificial Sequence
  Oligonucleotide for detection of SNP TSC0013023
tatataattagtt

SEQ ID NO: 44342 - DNA, 13 bp, Artificial Sequence
  Oligonucleotide for detection of SNP TSC0013023
aactaattatata

SEQ ID NO: 44343 - DNA, 13 bp, Artificial Sequence
  Oligonucleotide for detection of SNP TSC0013023
tatatagttagtt

SEQ ID NO: 44344 - DNA, 13 bp, Artificial Sequence
  Oligonucleotide for detection of SNP TSC0013023
aactaactatata

SEQ ID NO: 44345 - DNA, 13 bp, Artificial Sequence
  Oligonucleotide for detection of SNP TSC0013024
taagattggagty

SEQ ID NO: 44346 - DNA, 13 bp, Artificial Sequence
  Oligonucleotide for detection of SNP TSC0013024
ractccaatctta

SEQ ID NO: 44347 - DNA, 13 bp, Artificial Sequence
  Oligonucleotide for detection of SNP TSC0013024
taagatcggagty

SEQ ID NO: 44348 - DNA, 13 bp, Artificial Sequence
  Oligonucleotide for detection of SNP TSC0013024
ractccgatctta

SEQ ID NO: 44349 - DNA, 13 bp, Artificial Sequence
  Oligonucleotide for detection of SNP TSC0013025
agttaggttggag

SEQ ID NO: 44350 - DNA, 13 bp, Artificial Sequence
  Oligonucleotide for detection of SNP TSC0013025
ctccaacctaact

SEQ ID NO: 44351 - DNA, 13 bp, Artificial Sequence
  Oligonucleotide for detection of SNP TSC0013025
agttagattggag

SEQ ID NO: 44352 - DNA, 13 bp, Artificial Sequence
  Oligonucleotide for detection of SNP TSC0013025
ctccaatctaact

SEQ ID NO: 44353 - DNA, 13 bp, Artificial Sequence
  Oligonucleotide for detection of SNP TSC0013027
tataggtgtgtgy

SEQ ID NO: 44354 - DNA, 13 bp, Artificial Sequence
  Oligonucleotide for detection of SNP TSC0013027
rcacacacctata

SEQ ID NO: 44355 - DNA, 13 bp, Artificial Sequence
  Oligonucleotide for detection of SNP TSC0013027
tataggcgtgtgy

SEQ ID NO: 44356 - DNA, 13 bp, Artificial Sequence
  Oligonucleotide for detection of SNP TSC0013027
rcacacgcctata

SEQ ID NO: 44357 - DNA, 13 bp, Artificial Sequence
  Oligonucleotide for detection of SNP TSC0013027
gtatatgtttgta

SEQ ID NO: 44358 - DNA, 13 bp, Artificial Sequence
  Oligonucleotide for detection of SNP TSC0013027
tacaaacatatac

SEQ ID NO: 44359 - DNA, 13 bp, Artificial Sequence
  Oligonucleotide for detection of SNP TSC0013027
gtatatatttgta

SEQ ID NO: 44360 - DNA, 13 bp, Artificial Sequence
  Oligonucleotide for detection of SNP TSC0013027
tacaaatatatac

SEQ ID NO: 44361 - DNA, 13 bp, Artificial Sequence
  Oligonucleotide for detection of SNP TSC0013027
gtatacgtttgta

SEQ ID NO: 44362 - DNA, 13 bp, Artificial Sequence
  Oligonucleotide for detection of SNP TSC0013027
tacaaacgtatac

SEQ ID NO: 44363 - DNA, 13 bp, Artificial Sequence
  Oligonucleotide for detection of SNP TSC0013028
atataatgtatta

SEQ ID NO: 44364 - DNA, 13 bp, Artificial Sequence
  Oligonucleotide for detection of SNP TSC0013028
taatacattatat

SEQ ID NO: 44365 - DNA, 13 bp, Artificial Sequence
  Oligonucleotide for detection of SNP TSC0013028
atataacgtatta

SEQ ID NO: 44366 - DNA, 13 bp, Artificial Sequence
  Oligonucleotide for detection of SNP TSC0013028
taatacgttatat

SEQ ID NO: 44367 - DNA, 13 bp, Artificial Sequence
  Oligonucleotide for detection of SNP TSC0013028
tggtgtgttgtat

SEQ ID NO: 44368 - DNA, 13 bp, Artificial Sequence
  Oligonucleotide for detection of SNP TSC0013028
atacaacacacca

SEQ ID NO: 44369 - DNA, 13 bp, Artificial Sequence
  Oligonucleotide for detection of SNP TSC0013028
tggtgtattgtat

SEQ ID NO: 44370 - DNA, 13 bp, Artificial Sequence
  Oligonucleotide for detection of SNP TSC0013028
atacaatacacca

SEQ ID NO: 44371 - DNA, 13 bp, Artificial Sequence
  Oligonucleotide for detection of SNP TSC0013028
tggtgcgttgtat

SEQ ID NO: 44372 - DNA, 13 bp, Artificial Sequence
  Oligonucleotide for detection of SNP TSC0013028
atacaacgcacca

SEQ ID NO: 44373 - DNA, 13 bp, Artificial Sequence
  Oligonucleotide for detection of SNP TSC0013029
gtttatgatgttg

SEQ ID NO: 44374 - DNA, 13 bp, Artificial Sequence
  Oligonucleotide for detection of SNP TSC0013029
caacatcataaac

SEQ ID NO: 44375 - DNA, 13 bp, Artificial Sequence
  Oligonucleotide for detection of SNP TSC0013029
gtttataatgttg

SEQ ID NO: 44376 - DNA, 13 bp, Artificial Sequence
  Oligonucleotide for detection of SNP TSC0013029
caacattataaac

SEQ ID NO: 44377 - DNA, 13 bp, Artificial Sequence
  Oligonucleotide for detection of SNP TSC0013030
ttggataaagtgg

SEQ ID NO: 44378 - DNA, 13 bp, Artificial Sequence
  Oligonucleotide for detection of SNP TSC0013030
ccactttatccaa

SEQ ID NO: 44379 - DNA, 13 bp, Artificial Sequence
  Oligonucleotide for detection of SNP TSC0013030
ttggatgaagtgg

SEQ ID NO: 44380 - DNA, 13 bp, Artificial Sequence
  Oligonucleotide for detection of SNP TSC0013030
ccacttcatccaa

SEQ ID NO: 44381 - DNA, 13 bp, Artificial Sequence
  Oligonucleotide for detection of SNP TSC0013030
ttggacgaagtgg

SEQ ID NO: 44382 - DNA, 13 bp, Artificial Sequence
  Oligonucleotide for detection of SNP TSC0013030
ccacttcgtccaa

SEQ ID NO: 44383 - DNA, 13 bp, Artificial Sequence
  Oligonucleotide for detection of SNP TSC0013030
ttattttgtttag

SEQ ID NO: 44384 - DNA, 13 bp, Artificial Sequence
  Oligonucleotide for detection of SNP TSC0013030
ctaaacaaaataa

SEQ ID NO: 44385 - DNA, 13 bp, Artificial Sequence
  Oligonucleotide for detection of SNP TSC0013030
ttatttcgtttag

SEQ ID NO: 44386 - DNA, 13 bp, Artificial Sequence
  Oligonucleotide for detection of SNP TSC0013030
ctaaacgaaataa

SEQ ID NO: 44387 - DNA, 13 bp, Artificial Sequence
  Oligonucleotide for detection of SNP TSC0013032
tgagattgtgtta

SEQ ID NO: 44388 - DNA, 13 bp, Artificial Sequence
  Oligonucleotide for detection of SNP TSC0013032
taacacaatctca

SEQ ID NO: 44389 - DNA, 13 bp, Artificial Sequence
  Oligonucleotide for detection of SNP TSC0013032
tgagatcgtgtta

SEQ ID NO: 44390 - DNA, 13 bp, Artificial Sequence
  Oligonucleotide for detection of SNP TSC0013032
taacacgatctca

SEQ ID NO: 44391 - DNA, 13 bp, Artificial Sequence
  Oligonucleotide for detection of SNP TSC0013032
tggtatgatttta

SEQ ID NO: 44392 - DNA, 13 bp, Artificial Sequence
  Oligonucleotide for detection of SNP TSC0013032
taaaatcatacca

SEQ ID NO: 44393 - DNA, 13 bp, Artificial Sequence
  Oligonucleotide for detection of SNP TSC0013032
tggtataatttta

SEQ ID NO: 44394 - DNA, 13 bp, Artificial Sequence
  Oligonucleotide for detection of SNP TSC0013032
taaaattatacca

SEQ ID NO: 44395 - DNA, 13 bp, Artificial Sequence
  Oligonucleotide for detection of SNP TSC0013032
tggtacgatttta

SEQ ID NO: 44396 - DNA, 13 bp, Artificial Sequence
  Oligonucleotide for detection of SNP TSC0013032
taaaatcgtacca

SEQ ID NO: 44397 - DNA, 13 bp, Artificial Sequence
  Oligonucleotide for detection of SNP TSC0013033
ttttagattgggt

SEQ ID NO: 44398 - DNA, 13 bp, Artificial Sequence
  Oligonucleotide for detection of SNP TSC0013033
acccaatctaaaa

SEQ ID NO: 44399 - DNA, 13 bp, Artificial Sequence
  Oligonucleotide for detection of SNP TSC0013033
ttttagtttgggt

SEQ ID NO: 44400 - DNA, 13 bp, Artificial Sequence
  Oligonucleotide for detection of SNP TSC0013033
acccaaactaaaa

SEQ ID NO: 44401 - DNA, 13 bp, Artificial Sequence
  Oligonucleotide for detection of SNP TSC0013033
atttagtttggag

SEQ ID NO: 44402 - DNA, 13 bp, Artificial Sequence
  Oligonucleotide for detection of SNP TSC0013033
ctccaaactaaat

SEQ ID NO: 44403 - DNA, 13 bp, Artificial Sequence
  Oligonucleotide for detection of SNP TSC0013033
atttaggttggag

SEQ ID NO: 44404 - DNA, 13 bp, Artificial Sequence
  Oligonucleotide for detection of SNP TSC0013033
ctccaacctaaat

SEQ ID NO: 44405 - DNA, 13 bp, Artificial Sequence
  Oligonucleotide for detection of SNP TSC0013034
ggtaggatgggay

SEQ ID NO: 44406 - DNA, 13 bp, Artificial Sequence
  Oligonucleotide for detection of SNP TSC0013034
rtcccatcctacc

SEQ ID NO: 44407 - DNA, 13 bp, Artificial Sequence
  Oligonucleotide for detection of SNP TSC0013034
ggtagggtgggay

SEQ ID NO: 44408 - DNA, 13 bp, Artificial Sequence
  Oligonucleotide for detection of SNP TSC0013034
rtcccaccctacc

SEQ ID NO: 44409 - DNA, 13 bp, Artificial Sequence
  Oligonucleotide for detection of SNP TSC0013035
tgtaggattatta

SEQ ID NO: 44410 - DNA, 13 bp, Artificial Sequence
  Oligonucleotide for detection of SNP TSC0013035
taataatcctaca

SEQ ID NO: 44411 - DNA, 13 bp, Artificial Sequence
  Oligonucleotide for detection of SNP TSC0013035
tgtagggttatta

SEQ ID NO: 44412 - DNA, 13 bp, Artificial Sequence
  Oligonucleotide for detection of SNP TSC0013035
taataaccctaca

SEQ ID NO: 44413 - DNA, 13 bp, Artificial Sequence
  Oligonucleotide for detection of SNP TSC0013035
cgtaggattatta

SEQ ID NO: 44414 - DNA, 13 bp, Artificial Sequence
  Oligonucleotide for detection of SNP TSC0013035
taataatcctacg

SEQ ID NO: 44415 - DNA, 13 bp, Artificial Sequence
  Oligonucleotide for detection of SNP TSC0013035
cgtagggttatta

SEQ ID NO: 44416 - DNA, 13 bp, Artificial Sequence
  Oligonucleotide for detection of SNP TSC0013035
taataaccctacg

SEQ ID NO: 44417 - DNA, 13 bp, Artificial Sequence
  Oligonucleotide for detection of SNP TSC0013036
agtaaatgatttt

SEQ ID NO: 44418 - DNA, 13 bp, Artificial Sequence
  Oligonucleotide for detection of SNP TSC0013036
aaaatcatttact

SEQ ID NO: 44419 - DNA, 13 bp, Artificial Sequence
  Oligonucleotide for detection of SNP TSC0013036
agtaaacgatttt

SEQ ID NO: 44420 - DNA, 13 bp, Artificial Sequence
  Oligonucleotide for detection of SNP TSC0013036
aaaatcgtttact

SEQ ID NO: 44421 - DNA, 13 bp, Artificial Sequence
  Oligonucleotide for detection of SNP TSC0013036
aaaattgtttatt

SEQ ID NO: 44422 - DNA, 13 bp, Artificial Sequence
  Oligonucleotide for detection of SNP TSC0013036
aataaacaatttt

SEQ ID NO: 44423 - DNA, 13 bp, Artificial Sequence
  Oligonucleotide for detection of SNP TSC0013036
aaaattatttatt

SEQ ID NO: 44424 - DNA, 13 bp, Artificial Sequence
  Oligonucleotide for detection of SNP TSC0013036
aataaataatttt

SEQ ID NO: 44425 - DNA, 13 bp, Artificial Sequence
  Oligonucleotide for detection of SNP TSC0013036
aaaatcgtttatt

SEQ ID NO: 44426 - DNA, 13 bp, Artificial Sequence
  Oligonucleotide for detection of SNP TSC0013036
aataaacgatttt

SEQ ID NO: 44427 - DNA, 13 bp, Artificial Sequence
  Oligonucleotide for detection of SNP TSC0013037
gtatttgattata

SEQ ID NO: 44428 - DNA, 13 bp, Artificial Sequence
  Oligonucleotide for detection of SNP TSC0013037
tataatcaaatac

SEQ ID NO: 44429 - DNA, 13 bp, Artificial Sequence
  Oligonucleotide for detection of SNP TSC0013037
gtatttaattata

SEQ ID NO: 44430 - DNA, 13 bp, Artificial Sequence
  Oligonucleotide for detection of SNP TSC0013037
tataattaaatac

SEQ ID NO: 44431 - DNA, 13 bp, Artificial Sequence
  Oligonucleotide for detection of SNP TSC0013038
aagatggtagttt

SEQ ID NO: 44432 - DNA, 13 bp, Artificial Sequence
  Oligonucleotide for detection of SNP TSC0013038
aaactaccatctt

SEQ ID NO: 44433 - DNA, 13 bp, Artificial Sequence
  Oligonucleotide for detection of SNP TSC0013038
aagatgatagttt

SEQ ID NO: 44434 - DNA, 13 bp, Artificial Sequence
  Oligonucleotide for detection of SNP TSC0013038
aaactatcatctt

SEQ ID NO: 44435 - DNA, 13 bp, Artificial Sequence
  Oligonucleotide for detection of SNP TSC0013038
aagacggtagttt

SEQ ID NO: 44436 - DNA, 13 bp, Artificial Sequence
  Oligonucleotide for detection of SNP TSC0013038
aaactaccgtctt

SEQ ID NO: 44437 - DNA, 13 bp, Artificial Sequence
  Oligonucleotide for detection of SNP TSC0013038
aagacgatagttt

SEQ ID NO: 44438 - DNA, 13 bp, Artificial Sequence
  Oligonucleotide for detection of SNP TSC0013038
aaactatcgtctt

SEQ ID NO: 44439 - DNA, 13 bp, Artificial Sequence
  Oligonucleotide for detection of SNP TSC0013039
tgaaggtgttggy

SEQ ID NO: 44440 - DNA, 13 bp, Artificial Sequence
  Oligonucleotide for detection of SNP TSC0013039
rccaacaccttca

SEQ ID NO: 44441 - DNA, 13 bp, Artificial Sequence
  Oligonucleotide for detection of SNP TSC0013039
cgaaggtgttggy

SEQ ID NO: 44442 - DNA, 13 bp, Artificial Sequence
  Oligonucleotide for detection of SNP TSC0013039
rccaacaccttcg

SEQ ID NO: 44443 - DNA, 13 bp, Artificial Sequence
  Oligonucleotide for detection of SNP TSC0013039
tgaaggcgttggy

SEQ ID NO: 44444 - DNA, 13 bp, Artificial Sequence
  Oligonucleotide for detection of SNP TSC0013039
rccaacgccttca

SEQ ID NO: 44445 - DNA, 13 bp, Artificial Sequence
  Oligonucleotide for detection of SNP TSC0013039
cgaaggcgttggy

SEQ ID NO: 44446 - DNA, 13 bp, Artificial Sequence
  Oligonucleotide for detection of SNP TSC0013039
rccaacgccttcg

SEQ ID NO: 44447 - DNA, 13 bp, Artificial Sequence
  Oligonucleotide for detection of SNP TSC0013039
gttaatgtttttg

SEQ ID NO: 44448 - DNA, 13 bp, Artificial Sequence
  Oligonucleotide for detection of SNP TSC0013039
caaaaacattaac

SEQ ID NO: 44449 - DNA, 13 bp, Artificial Sequence
  Oligonucleotide for detection of SNP TSC0013039
gttaatatttttg

SEQ ID NO: 44450 - DNA, 13 bp, Artificial Sequence
  Oligonucleotide for detection of SNP TSC0013039
caaaaatattaac

SEQ ID NO: 44451 - DNA, 13 bp, Artificial Sequence
  Oligonucleotide for detection of SNP TSC0013039
gttaacgtttttg

SEQ ID NO: 44452 - DNA, 13 bp, Artificial Sequence
  Oligonucleotide for detection of SNP TSC0013039
caaaaacgttaac

SEQ ID NO: 44453 - DNA, 13 bp, Artificial Sequence
  Oligonucleotide for detection of SNP TSC0013039
gttaatattttcg

SEQ ID NO: 44454 - DNA, 13 bp, Artificial Sequence
  Oligonucleotide for detection of SNP TSC0013039
cgaaaatattaac

SEQ ID NO: 44455 - DNA, 13 bp, Artificial Sequence
  Oligonucleotide for detection of SNP TSC0013039
gttaatgttttcg

SEQ ID NO: 44456 - DNA, 13 bp, Artificial Sequence
  Oligonucleotide for detection of SNP TSC0013039
cgaaaacattaac

SEQ ID NO: 44457 - DNA, 13 bp, Artificial Sequence
  Oligonucleotide for detection of SNP TSC0013039
gttaacgttttcg

SEQ ID NO: 44458 - DNA, 13 bp, Artificial Sequence
  Oligonucleotide for detection of SNP TSC0013039
cgaaaacgttaac

SEQ ID NO: 44459 - DNA, 13 bp, Artificial Sequence
  Oligonucleotide for detection of SNP TSC0013040
tttgttattatta

SEQ ID NO: 44460 - DNA, 13 bp, Artificial Sequence
  Oligonucleotide for detection of SNP TSC0013040
taataataacaaa

SEQ ID NO: 44461 - DNA, 13 bp, Artificial Sequence
  Oligonucleotide for detection of SNP TSC0013040
tttgtcgttatta

SEQ ID NO: 44462 - DNA, 13 bp, Artificial Sequence
  Oligonucleotide for detection of SNP TSC0013040
taataacgacaaa

SEQ ID NO: 44463 - DNA, 13 bp, Artificial Sequence
  Oligonucleotide for detection of SNP TSC0013040
tggtggtggtaga

SEQ ID NO: 44464 - DNA, 13 bp, Artificial Sequence
  Oligonucleotide for detection of SNP TSC0013040
tctaccaccacca

SEQ ID NO: 44465 - DNA, 13 bp, Artificial Sequence
  Oligonucleotide for detection of SNP TSC0013040
tggtggcggtaga

SEQ ID NO: 44466 - DNA, 13 bp, Artificial Sequence
  Oligonucleotide for detection of SNP TSC0013040
tctaccgccacca

SEQ ID NO: 44467 - DNA, 13 bp, Artificial Sequence
  Oligonucleotide for detection of SNP TSC0013041
ttaaatatggaaa

SEQ ID NO: 44468 - DNA, 13 bp, Artificial Sequence
  Oligonucleotide for detection of SNP TSC0013041
tttccatatttaa

SEQ ID NO: 44469 - DNA, 13 bp, Artificial Sequence
  Oligonucleotide for detection of SNP TSC0013041
ttaaatgtggaaa

SEQ ID NO: 44470 - DNA, 13 bp, Artificial Sequence
  Oligonucleotide for detection of SNP TSC0013041
tttccacatttaa

SEQ ID NO: 44471 - DNA, 13 bp, Artificial Sequence
  Oligonucleotide for detection of SNP TSC0013041
ttaaacgtggaaa

SEQ ID NO: 44472 - DNA, 13 bp, Artificial Sequence
  Oligonucleotide for detection of SNP TSC0013041
tttccacgtttaa

SEQ ID NO: 44473 - DNA, 13 bp, Artificial Sequence
  Oligonucleotide for detection of SNP TSC0013042
aagtataaaatty

SEQ ID NO: 44474 - DNA, 13 bp, Artificial Sequence
  Oligonucleotide for detection of SNP TSC0013042
raattttatactt

SEQ ID NO: 44475 - DNA, 13 bp, Artificial Sequence
  Oligonucleotide for detection of SNP TSC0013042
aagtatgaaatty

SEQ ID NO: 44476 - DNA, 13 bp, Artificial Sequence
  Oligonucleotide for detection of SNP TSC0013042
raatttcatactt

SEQ ID NO: 44477 - DNA, 13 bp, Artificial Sequence
  Oligonucleotide for detection of SNP TSC0013043
agatttattgttt

SEQ ID NO: 44478 - DNA, 13 bp, Artificial Sequence
  Oligonucleotide for detection of SNP TSC0013043
aaacaataaatct

SEQ ID NO: 44479 - DNA, 13 bp, Artificial Sequence
  Oligonucleotide for detection of SNP TSC0013043
agatttgttgttt

SEQ ID NO: 44480 - DNA, 13 bp, Artificial Sequence
  Oligonucleotide for detection of SNP TSC0013043
aaacaacaaatct

SEQ ID NO: 44481 - DNA, 13 bp, Artificial Sequence
  Oligonucleotide for detection of SNP TSC0013044
ttggtaagtatag

SEQ ID NO: 44482 - DNA, 13 bp, Artificial Sequence
  Oligonucleotide for detection of SNP TSC0013044
ctatacttaccaa

SEQ ID NO: 44483 - DNA, 13 bp, Artificial Sequence
  Oligonucleotide for detection of SNP TSC0013044
ttggtatgtatag

SEQ ID NO: 44484 - DNA, 13 bp, Artificial Sequence
  Oligonucleotide for detection of SNP TSC0013044
ctatacataccaa

SEQ ID NO: 44485 - DNA, 13 bp, Artificial Sequence
  Oligonucleotide for detection of SNP TSC0013044
ttggtacgtatag

SEQ ID NO: 44486 - DNA, 13 bp, Artificial Sequence
  Oligonucleotide for detection of SNP TSC0013044
ctatacgtaccaa

SEQ ID NO: 44487 - DNA, 13 bp, Artificial Sequence
  Oligonucleotide for detection of SNP TSC0013044
ttatatttgttag

SEQ ID NO: 44488 - DNA, 13 bp, Artificial Sequence
  Oligonucleotide for detection of SNP TSC0013044
ctaacaaatataa

SEQ ID NO: 44489 - DNA, 13 bp, Artificial Sequence
  Oligonucleotide for detection of SNP TSC0013044
ttatatgtgttag

SEQ ID NO: 44490 - DNA, 13 bp, Artificial Sequence
  Oligonucleotide for detection of SNP TSC0013044
ctaacacatataa

SEQ ID NO: 44491 - DNA, 13 bp, Artificial Sequence
  Oligonucleotide for detection of SNP TSC0013044
ttatacgtgttag

SEQ ID NO: 44492 - DNA, 13 bp, Artificial Sequence
  Oligonucleotide for detection of SNP TSC0013044
ctaacacgtataa

SEQ ID NO: 44493 - DNA, 13 bp, Artificial Sequence
  Oligonucleotide for detection of SNP TSC0013045
tttagagttgaag

SEQ ID NO: 44494 - DNA, 13 bp, Artificial Sequence
  Oligonucleotide for detection of SNP TSC0013045
cttcaactctaaa

SEQ ID NO: 44495 - DNA, 13 bp, Artificial Sequence
  Oligonucleotide for detection of SNP TSC0013045
tttagaattgaag

SEQ ID NO: 44496 - DNA, 13 bp, Artificial Sequence
  Oligonucleotide for detection of SNP TSC0013045
cttcaattctaaa

SEQ ID NO: 44497 - DNA, 13 bp, Artificial Sequence
  Oligonucleotide for detection of SNP TSC0013046
aaaattaaagttt

SEQ ID NO: 44498 - DNA, 13 bp, Artificial Sequence
  Oligonucleotide for detection of SNP TSC0013046
aaactttaatttt

SEQ ID NO: 44499 - DNA, 13 bp, Artificial Sequence
  Oligonucleotide for detection of SNP TSC0013046
aaaattgaagttt

SEQ ID NO: 44500 - DNA, 13 bp, Artificial Sequence
  Oligonucleotide for detection of SNP TSC0013046
aaacttcaatttt

SEQ ID NO: 44501 - DNA, 13 bp, Artificial Sequence
  Oligonucleotide for detection of SNP TSC0013047
ggtggggttaggg

SEQ ID NO: 44502 - DNA, 13 bp, Artificial Sequence
  Oligonucleotide for detection of SNP TSC0013047
ccctaaccccacc

SEQ ID NO: 44503 - DNA, 13 bp, Artificial Sequence
  Oligonucleotide for detection of SNP TSC0013047
ggtgggattaggg

SEQ ID NO: 44504 - DNA, 13 bp, Artificial Sequence
  Oligonucleotide for detection of SNP TSC0013047
ccctaatcccacc

SEQ ID NO: 44505 - DNA, 13 bp, Artificial Sequence
  Oligonucleotide for detection of SNP TSC0013048
taatagatgtttg

SEQ ID NO: 44506 - DNA, 13 bp, Artificial Sequence
  Oligonucleotide for detection of SNP TSC0013048
caaacatctatta

SEQ ID NO: 44507 - DNA, 13 bp, Artificial Sequence
  Oligonucleotide for detection of SNP TSC0013048
taatagttgtttg

SEQ ID NO: 44508 - DNA, 13 bp, Artificial Sequence
  Oligonucleotide for detection of SNP TSC0013048
caaacaactatta

SEQ ID NO: 44509 - DNA, 13 bp, Artificial Sequence
  Oligonucleotide for detection of SNP TSC0013048
taaatatttatta

SEQ ID NO: 44510 - DNA, 13 bp, Artificial Sequence
  Oligonucleotide for detection of SNP TSC0013048
taataaatattta

SEQ ID NO: 44511 - DNA, 13 bp, Artificial Sequence
  Oligonucleotide for detection of SNP TSC0013048
taaataattatta

SEQ ID NO: 44512 - DNA, 13 bp, Artificial Sequence
  Oligonucleotide for detection of SNP TSC0013048
taataattattta

SEQ ID NO: 44513 - DNA, 13 bp, Artificial Sequence
  Oligonucleotide for detection of SNP TSC0013053
ggggagatagagg

SEQ ID NO: 44514 - DNA, 13 bp, Artificial Sequence
  Oligonucleotide for detection of SNP TSC0013053
cctctatctcccc

SEQ ID NO: 44515 - DNA, 13 bp, Artificial Sequence
  Oligonucleotide for detection of SNP TSC0013053
ggggaggtagagg

SEQ ID NO: 44516 - DNA, 13 bp, Artificial Sequence
  Oligonucleotide for detection of SNP TSC0013053
cctctacctcccc

SEQ ID NO: 44517 - DNA, 13 bp, Artificial Sequence
  Oligonucleotide for detection of SNP TSC0013054
gttgtaggagaat

SEQ ID NO: 44518 - DNA, 13 bp, Artificial Sequence
  Oligonucleotide for detection of SNP TSC0013054
attctcctacaac

SEQ ID NO: 44519 - DNA, 13 bp, Artificial Sequence
  Oligonucleotide for detection of SNP TSC0013054
gttgtaagagaat

SEQ ID NO: 44520 - DNA, 13 bp, Artificial Sequence
  Oligonucleotide for detection of SNP TSC0013054
attctcttacaac

SEQ ID NO: 44521 - DNA, 13 bp, Artificial Sequence
  Oligonucleotide for detection of SNP TSC0013055
tattatatttaag

SEQ ID NO: 44522 - DNA, 13 bp, Artificial Sequence
  Oligonucleotide for detection of SNP TSC0013055
cttaaatataata

SEQ ID NO: 44523 - DNA, 13 bp, Artificial Sequence
  Oligonucleotide for detection of SNP TSC0013055
tattatgtttaag

SEQ ID NO: 44524 - DNA, 13 bp, Artificial Sequence
  Oligonucleotide for detection of SNP TSC0013055
cttaaacataata

SEQ ID NO: 44525 - DNA, 13 bp, Artificial Sequence
  Oligonucleotide for detection of SNP TSC0013056
gatgattgttagg

SEQ ID NO: 44526 - DNA, 13 bp, Artificial Sequence
  Oligonucleotide for detection of SNP TSC0013056
cctaacaatcatc

SEQ ID NO: 44527 - DNA, 13 bp, Artificial Sequence
  Oligonucleotide for detection of SNP TSC0013056
gatgatcgttagg

SEQ ID NO: 44528 - DNA, 13 bp, Artificial Sequence
  Oligonucleotide for detection of SNP TSC0013056
cctaacgatcatc

SEQ ID NO: 44529 - DNA, 13 bp, Artificial Sequence
  Oligonucleotide for detection of SNP TSC0013056
tttggtggttaty

SEQ ID NO: 44530 - DNA, 13 bp, Artificial Sequence
  Oligonucleotide for detection of SNP TSC0013056
rataaccaccaaa

SEQ ID NO: 44531 - DNA, 13 bp, Artificial Sequence
  Oligonucleotide for detection of SNP TSC0013056
tttggtagttaty

SEQ ID NO: 44532 - DNA, 13 bp, Artificial Sequence
  Oligonucleotide for detection of SNP TSC0013056
rataactaccaaa

SEQ ID NO: 44533 - DNA, 13 bp, Artificial Sequence
  Oligonucleotide for detection of SNP TSC0013056
tttggcggttaty

SEQ ID NO: 44534 - DNA, 13 bp, Artificial Sequence
  Oligonucleotide for detection of SNP TSC0013056
rataaccgccaaa

SEQ ID NO: 44535 - DNA, 13 bp, Artificial Sequence
  Oligonucleotide for detection of SNP TSC0013058
aggtaagtggaay

SEQ ID NO: 44536 - DNA, 13 bp, Artificial Sequence
  Oligonucleotide for detection of SNP TSC0013058
rttccacttacct

SEQ ID NO: 44537 - DNA, 13 bp, Artificial Sequence
  Oligonucleotide for detection of SNP TSC0013058
aggtaaatggaay

SEQ ID NO: 44538 - DNA, 13 bp, Artificial Sequence
  Oligonucleotide for detection of SNP TSC0013058
rttccatttacct

SEQ ID NO: 44539 - DNA, 13 bp, Artificial Sequence
  Oligonucleotide for detection of SNP TSC0013059
gatttagtggtty

SEQ ID NO: 44540 - DNA, 13 bp, Artificial Sequence
  Oligonucleotide for detection of SNP TSC0013059
raaccactaaatc

SEQ ID NO: 44541 - DNA, 13 bp, Artificial Sequence
  Oligonucleotide for detection of SNP TSC0013059
gatttaatggtty

SEQ ID NO: 44542 - DNA, 13 bp, Artificial Sequence
  Oligonucleotide for detection of SNP TSC0013059
raaccattaaatc

SEQ ID NO: 44543 - DNA, 13 bp, Artificial Sequence
  Oligonucleotide for detection of SNP TSC0013061
ttgatagtggtgg

SEQ ID NO: 44544 - DNA, 13 bp, Artificial Sequence
  Oligonucleotide for detection of SNP TSC0013061
ccaccactatcaa

SEQ ID NO: 44545 - DNA, 13 bp, Artificial Sequence
  Oligonucleotide for detection of SNP TSC0013061
ttgatattggtgg

SEQ ID NO: 44546 - DNA, 13 bp, Artificial Sequence
  Oligonucleotide for detection of SNP TSC0013061
ccaccaatatcaa

SEQ ID NO: 44547 - DNA, 13 bp, Artificial Sequence
  Oligonucleotide for detection of SNP TSC0013061
ttattattattaa

SEQ ID NO: 44548 - DNA, 13 bp, Artificial Sequence
  Oligonucleotide for detection of SNP TSC0013061
ttaataataataa

SEQ ID NO: 44549 - DNA, 13 bp, Artificial Sequence
  Oligonucleotide for detection of SNP TSC0013061
ttattaatattaa

SEQ ID NO: 44550 - DNA, 13 bp, Artificial Sequence
  Oligonucleotide for detection of SNP TSC0013061
ttaatattaataa

SEQ ID NO: 44551 - DNA, 13 bp, Artificial Sequence
  Oligonucleotide for detection of SNP TSC0013062
atgttagttagtt

SEQ ID NO: 44552 - DNA, 13 bp, Artificial Sequence
  Oligonucleotide for detection of SNP TSC0013062
aactaactaacat

SEQ ID NO: 44553 - DNA, 13 bp, Artificial Sequence
  Oligonucleotide for detection of SNP TSC0013062
atgttaattagtt

SEQ ID NO: 44554 - DNA, 13 bp, Artificial Sequence
  Oligonucleotide for detection of SNP TSC0013062
aactaattaacat

SEQ ID NO: 44555 - DNA, 13 bp, Artificial Sequence
  Oligonucleotide for detection of SNP TSC0013063
tgataaaagaagg

SEQ ID NO: 44556 - DNA, 13 bp, Artificial Sequence
  Oligonucleotide for detection of SNP TSC0013063
ccttcttttatca

SEQ ID NO: 44557 - DNA, 13 bp, Artificial Sequence
  Oligonucleotide for detection of SNP TSC0013063
tgataatagaagg

SEQ ID NO: 44558 - DNA, 13 bp, Artificial Sequence
  Oligonucleotide for detection of SNP TSC0013063
ccttctattatca

SEQ ID NO: 44559 - DNA, 13 bp, Artificial Sequence
  Oligonucleotide for detection of SNP TSC0013063
tttttttttgtta

SEQ ID NO: 44560 - DNA, 13 bp, Artificial Sequence
  Oligonucleotide for detection of SNP TSC0013063
taacaaaaaaaaa

SEQ ID NO: 44561 - DNA, 13 bp, Artificial Sequence
  Oligonucleotide for detection of SNP TSC0013064
tgggtgatttggg

SEQ ID NO: 44562 - DNA, 13 bp, Artificial Sequence
  Oligonucleotide for detection of SNP TSC0013064
cccaaatcaccca

SEQ ID NO: 44563 - DNA, 13 bp, Artificial Sequence
  Oligonucleotide for detection of SNP TSC0013064
tgggtgttttggg

SEQ ID NO: 44564 - DNA, 13 bp, Artificial Sequence
  Oligonucleotide for detection of SNP TSC0013064
cccaaaacaccca

SEQ ID NO: 44565 - DNA, 13 bp, Artificial Sequence
  Oligonucleotide for detection of SNP TSC0013064
tgggcgatttggg

SEQ ID NO: 44566 - DNA, 13 bp, Artificial Sequence
  Oligonucleotide for detection of SNP TSC0013064
cccaaatcgccca

SEQ ID NO: 44567 - DNA, 13 bp, Artificial Sequence
  Oligonucleotide for detection of SNP TSC0013064
tgggcgttttggg

SEQ ID NO: 44568 - DNA, 13 bp, Artificial Sequence
  Oligonucleotide for detection of SNP TSC0013064
cccaaaacgccca

SEQ ID NO: 44569 - DNA, 13 bp, Artificial Sequence
  Oligonucleotide for detection of SNP TSC0013064
tttaagttgttta

SEQ ID NO: 44570 - DNA, 13 bp, Artificial Sequence
  Oligonucleotide for detection of SNP TSC0013064
taaacaacttaaa

SEQ ID NO: 44571 - DNA, 13 bp, Artificial Sequence
  Oligonucleotide for detection of SNP TSC0013064
tttaagatgttta

SEQ ID NO: 44572 - DNA, 13 bp, Artificial Sequence
  Oligonucleotide for detection of SNP TSC0013064
taaacatcttaaa

SEQ ID NO: 44573 - DNA, 13 bp, Artificial Sequence
  Oligonucleotide for detection of SNP TSC0013064
tttaagtcgttta

SEQ ID NO: 44574 - DNA, 13 bp, Artificial Sequence
  Oligonucleotide for detection of SNP TSC0013064
taaacgacttaaa

SEQ ID NO: 44575 - DNA, 13 bp, Artificial Sequence
  Oligonucleotide for detection of SNP TSC0013064
tttaagacgttta

SEQ ID NO: 44576 - DNA, 13 bp, Artificial Sequence
  Oligonucleotide for detection of SNP TSC0013064
taaacgtcttaaa

SEQ ID NO: 44577 - DNA, 13 bp, Artificial Sequence
  Oligonucleotide for detection of SNP TSC0013065
gagtgtggtggtt

SEQ ID NO: 44578 - DNA, 13 bp, Artificial Sequence
  Oligonucleotide for detection of SNP TSC0013065
aaccaccacactc

SEQ ID NO: 44579 - DNA, 13 bp, Artificial Sequence
  Oligonucleotide for detection of SNP TSC0013065
gagtgttgtggtt

SEQ ID NO: 44580 - DNA, 13 bp, Artificial Sequence
  Oligonucleotide for detection of SNP TSC0013065
aaccacaacactc

SEQ ID NO: 44581 - DNA, 13 bp, Artificial Sequence
  Oligonucleotide for detection of SNP TSC0013065
gagcgtggtggtt

SEQ ID NO: 44582 - DNA, 13 bp, Artificial Sequence
  Oligonucleotide for detection of SNP TSC0013065
aaccaccacgctc

SEQ ID NO: 44583 - DNA, 13 bp, Artificial Sequence
  Oligonucleotide for detection of SNP TSC0013065
gagcgttgtggtt

SEQ ID NO: 44584 - DNA, 13 bp, Artificial Sequence
  Oligonucleotide for detection of SNP TSC0013065
aaccacaacgctc

SEQ ID NO: 44585 - DNA, 13 bp, Artificial Sequence
  Oligonucleotide for detection of SNP TSC0013065
gagtgcggtggtt

SEQ ID NO: 44586 - DNA, 13 bp, Artificial Sequence
  Oligonucleotide for detection of SNP TSC0013065
aaccaccgcactc

SEQ ID NO: 44587 - DNA, 13 bp, Artificial Sequence
  Oligonucleotide for detection of SNP TSC0013065
gagcgcggtggtt

SEQ ID NO: 44588 - DNA, 13 bp, Artificial Sequence
  Oligonucleotide for detection of SNP TSC0013065
aaccaccgcgctc

SEQ ID NO: 44589 - DNA, 13 bp, Artificial Sequence
  Oligonucleotide for detection of SNP TSC0013065
agttatagtgtty

SEQ ID NO: 44590 - DNA, 13 bp, Artificial Sequence
  Oligonucleotide for detection of SNP TSC0013065
raacactataact

SEQ ID NO: 44591 - DNA, 13 bp, Artificial Sequence
  Oligonucleotide for detection of SNP TSC0013065
agttatagcgtty

SEQ ID NO: 44592 - DNA, 13 bp, Artificial Sequence
  Oligonucleotide for detection of SNP TSC0013065
raacgctataact

SEQ ID NO: 44593 - DNA, 13 bp, Artificial Sequence
  Oligonucleotide for detection of SNP TSC0013066
tttgagattagty

SEQ ID NO: 44594 - DNA, 13 bp, Artificial Sequence
  Oligonucleotide for detection of SNP TSC0013066
ractaatctcaaa

SEQ ID NO: 44595 - DNA, 13 bp, Artificial Sequence
  Oligonucleotide for detection of SNP TSC0013066
tttgaggttagty

SEQ ID NO: 44596 - DNA, 13 bp, Artificial Sequence
  Oligonucleotide for detection of SNP TSC0013066
ractaacctcaaa

SEQ ID NO: 44597 - DNA, 13 bp, Artificial Sequence
  Oligonucleotide for detection of SNP TSC0013068
tttaggggttttt

SEQ ID NO: 44598 - DNA, 13 bp, Artificial Sequence
  Oligonucleotide for detection of SNP TSC0013068
aaaaacccctaaa

SEQ ID NO: 44599 - DNA, 13 bp, Artificial Sequence
  Oligonucleotide for detection of SNP TSC0013068
tttaggagttttt

SEQ ID NO: 44600 - DNA, 13 bp, Artificial Sequence
  Oligonucleotide for detection of SNP TSC0013068
aaaaactcctaaa

SEQ ID NO: 44601 - DNA, 13 bp, Artificial Sequence
  Oligonucleotide for detection of SNP TSC0013069
tatataagtagga

SEQ ID NO: 44602 - DNA, 13 bp, Artificial Sequence
  Oligonucleotide for detection of SNP TSC0013069
tcctacttatata

SEQ ID NO: 44603 - DNA, 13 bp, Artificial Sequence
  Oligonucleotide for detection of SNP TSC0013069
tatatatgtagga

SEQ ID NO: 44604 - DNA, 13 bp, Artificial Sequence
  Oligonucleotide for detection of SNP TSC0013069
tcctacatatata

SEQ ID NO: 44605 - DNA, 13 bp, Artificial Sequence
  Oligonucleotide for detection of SNP TSC0013069
ttttgtttgtgtg

SEQ ID NO: 44606 - DNA, 13 bp, Artificial Sequence
  Oligonucleotide for detection of SNP TSC0013069
cacacaaacaaaa

SEQ ID NO: 44607 - DNA, 13 bp, Artificial Sequence
  Oligonucleotide for detection of SNP TSC0013069
ttttgtatgtgtg

SEQ ID NO: 44608 - DNA, 13 bp, Artificial Sequence
  Oligonucleotide for detection of SNP TSC0013069
cacacatacaaaa

SEQ ID NO: 44609 - DNA, 13 bp, Artificial Sequence
  Oligonucleotide for detection of SNP TSC0013070
atgtgtaagtgty

SEQ ID NO: 44610 - DNA, 13 bp, Artificial Sequence
  Oligonucleotide for detection of SNP TSC0013070
racacttacacat

SEQ ID NO: 44611 - DNA, 13 bp, Artificial Sequence
  Oligonucleotide for detection of SNP TSC0013070
atgtgtgagtgty

SEQ ID NO: 44612 - DNA, 13 bp, Artificial Sequence
  Oligonucleotide for detection of SNP TSC0013070
racactcacacat

SEQ ID NO: 44613 - DNA, 13 bp, Artificial Sequence
  Oligonucleotide for detection of SNP TSC0013073
aaaaaaagaaaaa

SEQ ID NO: 44614 - DNA, 13 bp, Artificial Sequence
  Oligonucleotide for detection of SNP TSC0013073
tttttcttttttt

SEQ ID NO: 44615 - DNA, 13 bp, Artificial Sequence
  Oligonucleotide for detection of SNP TSC0013073
aaaaaaggaaaaa

SEQ ID NO: 44616 - DNA, 13 bp, Artificial Sequence
  Oligonucleotide for detection of SNP TSC0013073
tttttcctttttt

SEQ ID NO: 44617 - DNA, 13 bp, Artificial Sequence
  Oligonucleotide for detection of SNP TSC0013076
ttttagaataaga

SEQ ID NO: 44618 - DNA, 13 bp, Artificial Sequence
  Oligonucleotide for detection of SNP TSC0013076
tcttattctaaaa

SEQ ID NO: 44619 - DNA, 13 bp, Artificial Sequence
  Oligonucleotide for detection of SNP TSC0013076
ttttagtataaga

SEQ ID NO: 44620 - DNA, 13 bp, Artificial Sequence
  Oligonucleotide for detection of SNP TSC0013076
tcttatactaaaa

SEQ ID NO: 44621 - DNA, 13 bp, Artificial Sequence
  Oligonucleotide for detection of SNP TSC0013076
ttttgttttagaa

SEQ ID NO: 44622 - DNA, 13 bp, Artificial Sequence
  Oligonucleotide for detection of SNP TSC0013076
ttctaaaacaaaa

SEQ ID NO: 44623 - DNA, 13 bp, Artificial Sequence
  Oligonucleotide for detection of SNP TSC0013076
ttttgtgttagaa

SEQ ID NO: 44624 - DNA, 13 bp, Artificial Sequence
  Oligonucleotide for detection of SNP TSC0013076
ttctaacacaaaa

SEQ ID NO: 44625 - DNA, 13 bp, Artificial Sequence
  Oligonucleotide for detection of SNP TSC0013077
tttttatttatgy

SEQ ID NO: 44626 - DNA, 13 bp, Artificial Sequence
  Oligonucleotide for detection of SNP TSC0013077
rcataaataaaaa

SEQ ID NO: 44627 - DNA, 13 bp, Artificial Sequence
  Oligonucleotide for detection of SNP TSC0013077
tttttagttatgy

SEQ ID NO: 44628 - DNA, 13 bp, Artificial Sequence
  Oligonucleotide for detection of SNP TSC0013077
rcataactaaaaa

SEQ ID NO: 44629 - DNA, 13 bp, Artificial Sequence
  Oligonucleotide for detection of SNP TSC0013077
gtatgagtagggg

SEQ ID NO: 44630 - DNA, 13 bp, Artificial Sequence
  Oligonucleotide for detection of SNP TSC0013077
cccctactcatac

SEQ ID NO: 44631 - DNA, 13 bp, Artificial Sequence
  Oligonucleotide for detection of SNP TSC0013077
gtatgattagggg

SEQ ID NO: 44632 - DNA, 13 bp, Artificial Sequence
  Oligonucleotide for detection of SNP TSC0013077
cccctaatcatac

SEQ ID NO: 44633 - DNA, 13 bp, Artificial Sequence
  Oligonucleotide for detection of SNP TSC0013078
gtagggtggtaty

SEQ ID NO: 44634 - DNA, 13 bp, Artificial Sequence
  Oligonucleotide for detection of SNP TSC0013078
rataccaccctac

SEQ ID NO: 44635 - DNA, 13 bp, Artificial Sequence
  Oligonucleotide for detection of SNP TSC0013078
gtagggcggtaty

SEQ ID NO: 44636 - DNA, 13 bp, Artificial Sequence
  Oligonucleotide for detection of SNP TSC0013078
rataccgccctac

SEQ ID NO: 44637 - DNA, 13 bp, Artificial Sequence
  Oligonucleotide for detection of SNP TSC0013078
ggtattgttttgy

SEQ ID NO: 44638 - DNA, 13 bp, Artificial Sequence
  Oligonucleotide for detection of SNP TSC0013078
rcaaaacaatacc

SEQ ID NO: 44639 - DNA, 13 bp, Artificial Sequence
  Oligonucleotide for detection of SNP TSC0013078
ggtattattttgy

SEQ ID NO: 44640 - DNA, 13 bp, Artificial Sequence
  Oligonucleotide for detection of SNP TSC0013078
rcaaaataatacc

SEQ ID NO: 44641 - DNA, 13 bp, Artificial Sequence
  Oligonucleotide for detection of SNP TSC0013078
ggtatcgttttgy

SEQ ID NO: 44642 - DNA, 13 bp, Artificial Sequence
  Oligonucleotide for detection of SNP TSC0013078
rcaaaacgatacc

SEQ ID NO: 44643 - DNA, 13 bp, Artificial Sequence
  Oligonucleotide for detection of SNP TSC0013079
tatggggtggttt

SEQ ID NO: 44644 - DNA, 13 bp, Artificial Sequence
  Oligonucleotide for detection of SNP TSC0013079
aaaccaccccata

SEQ ID NO: 44645 - DNA, 13 bp, Artificial Sequence
  Oligonucleotide for detection of SNP TSC0013079
tatgggatggttt

SEQ ID NO: 44646 - DNA, 13 bp, Artificial Sequence
  Oligonucleotide for detection of SNP TSC0013079
aaaccatcccata

SEQ ID NO: 44647 - DNA, 13 bp, Artificial Sequence
  Oligonucleotide for detection of SNP TSC0013079
tacggggtggttt

SEQ ID NO: 44648 - DNA, 13 bp, Artificial Sequence
  Oligonucleotide for detection of SNP TSC0013079
aaaccaccccgta

SEQ ID NO: 44649 - DNA, 13 bp, Artificial Sequence
  Oligonucleotide for detection of SNP TSC0013079
tacgggatggttt

SEQ ID NO: 44650 - DNA, 13 bp, Artificial Sequence
  Oligonucleotide for detection of SNP TSC0013079
aaaccatcccgta

SEQ ID NO: 44651 - DNA, 13 bp, Artificial Sequence
  Oligonucleotide for detection of SNP TSC0013081
tgttgttgtttty

SEQ ID NO: 44652 - DNA, 13 bp, Artificial Sequence
  Oligonucleotide for detection of SNP TSC0013081
raaaacaacaaca

SEQ ID NO: 44653 - DNA, 13 bp, Artificial Sequence
  Oligonucleotide for detection of SNP TSC0013081
tgttgtcgtttty

SEQ ID NO: 44654 - DNA, 13 bp, Artificial Sequence
  Oligonucleotide for detection of SNP TSC0013081
raaaacgacaaca

SEQ ID NO: 44655 - DNA, 13 bp, Artificial Sequence
  Oligonucleotide for detection of SNP TSC0013081
gagagtgatagta

SEQ ID NO: 44656 - DNA, 13 bp, Artificial Sequence
  Oligonucleotide for detection of SNP TSC0013081
tactatcactctc

SEQ ID NO: 44657 - DNA, 13 bp, Artificial Sequence
  Oligonucleotide for detection of SNP TSC0013081
gagagtaatagta

SEQ ID NO: 44658 - DNA, 13 bp, Artificial Sequence
  Oligonucleotide for detection of SNP TSC0013081
tactattactctc

SEQ ID NO: 44659 - DNA, 13 bp, Artificial Sequence
  Oligonucleotide for detection of SNP TSC0013081
gagagcgatagta

SEQ ID NO: 44660 - DNA, 13 bp, Artificial Sequence
  Oligonucleotide for detection of SNP TSC0013081
tactatcgctctc

SEQ ID NO: 44661 - DNA, 13 bp, Artificial Sequence
  Oligonucleotide for detection of SNP TSC0013083
agaattggagtaa

SEQ ID NO: 44662 - DNA, 13 bp, Artificial Sequence
  Oligonucleotide for detection of SNP TSC0013083
ttactccaattct

SEQ ID NO: 44663 - DNA, 13 bp, Artificial Sequence
  Oligonucleotide for detection of SNP TSC0013083
agaattagagtaa

SEQ ID NO: 44664 - DNA, 13 bp, Artificial Sequence
  Oligonucleotide for detection of SNP TSC0013083
ttactctaattct

SEQ ID NO: 44665 - DNA, 13 bp, Artificial Sequence
  Oligonucleotide for detection of SNP TSC0013084
tatggaaaaattg

SEQ ID NO: 44666 - DNA, 13 bp, Artificial Sequence
  Oligonucleotide for detection of SNP TSC0013084
caatttttccata

SEQ ID NO: 44667 - DNA, 13 bp, Artificial Sequence
  Oligonucleotide for detection of SNP TSC0013084
tatggagaaattg

SEQ ID NO: 44668 - DNA, 13 bp, Artificial Sequence
  Oligonucleotide for detection of SNP TSC0013084
caatttctccata

SEQ ID NO: 44669 - DNA, 13 bp, Artificial Sequence
  Oligonucleotide for detection of SNP TSC0013085
attattagtttaa

SEQ ID NO: 44670 - DNA, 13 bp, Artificial Sequence
  Oligonucleotide for detection of SNP TSC0013085
ttaaactaataat

SEQ ID NO: 44671 - DNA, 13 bp, Artificial Sequence
  Oligonucleotide for detection of SNP TSC0013085
attattggtttaa

SEQ ID NO: 44672 - DNA, 13 bp, Artificial Sequence
  Oligonucleotide for detection of SNP TSC0013085
ttaaaccaataat

SEQ ID NO: 44673 - DNA, 13 bp, Artificial Sequence
  Oligonucleotide for detection of SNP TSC0013086
tatgataaaagag

SEQ ID NO: 44674 - DNA, 13 bp, Artificial Sequence
  Oligonucleotide for detection of SNP TSC0013086
ctcttttatcata

SEQ ID NO: 44675 - DNA, 13 bp, Artificial Sequence
  Oligonucleotide for detection of SNP TSC0013086
tatgattaaagag

SEQ ID NO: 44676 - DNA, 13 bp, Artificial Sequence
  Oligonucleotide for detection of SNP TSC0013086
ctctttaatcata

SEQ ID NO: 44677 - DNA, 13 bp, Artificial Sequence
  Oligonucleotide for detection of SNP TSC0013086
ttttttgattatg

SEQ ID NO: 44678 - DNA, 13 bp, Artificial Sequence
  Oligonucleotide for detection of SNP TSC0013086
cataatcaaaaaa

SEQ ID NO: 44679 - DNA, 13 bp, Artificial Sequence
  Oligonucleotide for detection of SNP TSC0013087
ttttgtgatgttg

SEQ ID NO: 44680 - DNA, 13 bp, Artificial Sequence
  Oligonucleotide for detection of SNP TSC0013087
caacatcacaaaa

SEQ ID NO: 44681 - DNA, 13 bp, Artificial Sequence
  Oligonucleotide for detection of SNP TSC0013087
ttttgttatgttg

SEQ ID NO: 44682 - DNA, 13 bp, Artificial Sequence
  Oligonucleotide for detection of SNP TSC0013087
caacataacaaaa

SEQ ID NO: 44683 - DNA, 13 bp, Artificial Sequence
  Oligonucleotide for detection of SNP TSC0013087
ttttgcgatgttg

SEQ ID NO: 44684 - DNA, 13 bp, Artificial Sequence
  Oligonucleotide for detection of SNP TSC0013087
caacatcgcaaaa

SEQ ID NO: 44685 - DNA, 13 bp, Artificial Sequence
  Oligonucleotide for detection of SNP TSC0013087
taatattgtaaga

SEQ ID NO: 44686 - DNA, 13 bp, Artificial Sequence
  Oligonucleotide for detection of SNP TSC0013087
tcttacaatatta

SEQ ID NO: 44687 - DNA, 13 bp, Artificial Sequence
  Oligonucleotide for detection of SNP TSC0013087
taatatagtaaga

SEQ ID NO: 44688 - DNA, 13 bp, Artificial Sequence
  Oligonucleotide for detection of SNP TSC0013087
tcttactatatta

SEQ ID NO: 44689 - DNA, 13 bp, Artificial Sequence
  Oligonucleotide for detection of SNP TSC0013087
taatatcgtaaga

SEQ ID NO: 44690 - DNA, 13 bp, Artificial Sequence
  Oligonucleotide for detection of SNP TSC0013087
tcttacgatatta

SEQ ID NO: 44691 - DNA, 13 bp, Artificial Sequence
  Oligonucleotide for detection of SNP TSC0013088
aatggaaattaag

SEQ ID NO: 44692 - DNA, 13 bp, Artificial Sequence
  Oligonucleotide for detection of SNP TSC0013088
cttaatttccatt

SEQ ID NO: 44693 - DNA, 13 bp, Artificial Sequence
  Oligonucleotide for detection of SNP TSC0013088
aatggagattaag

SEQ ID NO: 44694 - DNA, 13 bp, Artificial Sequence
  Oligonucleotide for detection of SNP TSC0013088
cttaatctccatt

SEQ ID NO: 44695 - DNA, 13 bp, Artificial Sequence
  Oligonucleotide for detection of SNP TSC0013089
gttttggagaata

SEQ ID NO: 44696 - DNA, 13 bp, Artificial Sequence
  Oligonucleotide for detection of SNP TSC0013089
tattctccaaaac

SEQ ID NO: 44697 - DNA, 13 bp, Artificial Sequence
  Oligonucleotide for detection of SNP TSC0013089
gttttgaagaata

SEQ ID NO: 44698 - DNA, 13 bp, Artificial Sequence
  Oligonucleotide for detection of SNP TSC0013089
tattcttcaaaac

SEQ ID NO: 44699 - DNA, 13 bp, Artificial Sequence
  Oligonucleotide for detection of SNP TSC0013090
gttatgataggag

SEQ ID NO: 44700 - DNA, 13 bp, Artificial Sequence
  Oligonucleotide for detection of SNP TSC0013090
ctcctatcataac

SEQ ID NO: 44701 - DNA, 13 bp, Artificial Sequence
  Oligonucleotide for detection of SNP TSC0013090
gttatggtaggag

SEQ ID NO: 44702 - DNA, 13 bp, Artificial Sequence
  Oligonucleotide for detection of SNP TSC0013090
ctcctaccataac

SEQ ID NO: 44703 - DNA, 13 bp, Artificial Sequence
  Oligonucleotide for detection of SNP TSC0013091
agggtagtaaaty

SEQ ID NO: 44704 - DNA, 13 bp, Artificial Sequence
  Oligonucleotide for detection of SNP TSC0013091
ratttactaccct

SEQ ID NO: 44705 - DNA, 13 bp, Artificial Sequence
  Oligonucleotide for detection of SNP TSC0013091
agggtaataaaty

SEQ ID NO: 44706 - DNA, 13 bp, Artificial Sequence
  Oligonucleotide for detection of SNP TSC0013091
ratttattaccct

SEQ ID NO: 44707 - DNA, 13 bp, Artificial Sequence
  Oligonucleotide for detection of SNP TSC0013092
tttaaagtagtty

SEQ ID NO: 44708 - DNA, 13 bp, Artificial Sequence
  Oligonucleotide for detection of SNP TSC0013092
raactactttaaa

SEQ ID NO: 44709 - DNA, 13 bp, Artificial Sequence
  Oligonucleotide for detection of SNP TSC0013092
tttaaaatagtty

SEQ ID NO: 44710 - DNA, 13 bp, Artificial Sequence
  Oligonucleotide for detection of SNP TSC0013092
raactattttaaa

SEQ ID NO: 44711 - DNA, 13 bp, Artificial Sequence
  Oligonucleotide for detection of SNP TSC0013093
gagaattggaaty

SEQ ID NO: 44712 - DNA, 13 bp, Artificial Sequence
  Oligonucleotide for detection of SNP TSC0013093
rattccaattctc

SEQ ID NO: 44713 - DNA, 13 bp, Artificial Sequence
  Oligonucleotide for detection of SNP TSC0013093
gagaatcggaaty

SEQ ID NO: 44714 - DNA, 13 bp, Artificial Sequence
  Oligonucleotide for detection of SNP TSC0013093
rattccgattctc

SEQ ID NO: 44715 - DNA, 13 bp, Artificial Sequence
  Oligonucleotide for detection of SNP TSC0013093
ggttttagtttty

SEQ ID NO: 44716 - DNA, 13 bp, Artificial Sequence
  Oligonucleotide for detection of SNP TSC0013093
raaaactaaaacc

SEQ ID NO: 44717 - DNA, 13 bp, Artificial Sequence
  Oligonucleotide for detection of SNP TSC0013093
ggtttcggtttty

SEQ ID NO: 44718 - DNA, 13 bp, Artificial Sequence
  Oligonucleotide for detection of SNP TSC0013093
raaaaccgaaacc

SEQ ID NO: 44719 - DNA, 13 bp, Artificial Sequence
  Oligonucleotide for detection of SNP TSC0013094
tagagtattgtaa

SEQ ID NO: 44720 - DNA, 13 bp, Artificial Sequence
  Oligonucleotide for detection of SNP TSC0013094
ttacaatactcta

SEQ ID NO: 44721 - DNA, 13 bp, Artificial Sequence
  Oligonucleotide for detection of SNP TSC0013094
tagagtgttgtaa

SEQ ID NO: 44722 - DNA, 13 bp, Artificial Sequence
  Oligonucleotide for detection of SNP TSC0013094
ttacaacactcta

SEQ ID NO: 44723 - DNA, 13 bp, Artificial Sequence
  Oligonucleotide for detection of SNP TSC0013095
gttttagtgttgg

SEQ ID NO: 44724 - DNA, 13 bp, Artificial Sequence
  Oligonucleotide for detection of SNP TSC0013095
ccaacactaaaac

SEQ ID NO: 44725 - DNA, 13 bp, Artificial Sequence
  Oligonucleotide for detection of SNP TSC0013095
gttttaatgttgg

SEQ ID NO: 44726 - DNA, 13 bp, Artificial Sequence
  Oligonucleotide for detection of SNP TSC0013095
ccaacattaaaac

SEQ ID NO: 44727 - DNA, 13 bp, Artificial Sequence
  Oligonucleotide for detection of SNP TSC0013096
ggaaggtggggaa

SEQ ID NO: 44728 - DNA, 13 bp, Artificial Sequence
  Oligonucleotide for detection of SNP TSC0013096
ttccccaccttcc

SEQ ID NO: 44729 - DNA, 13 bp, Artificial Sequence
  Oligonucleotide for detection of SNP TSC0013096
ggaaggaggggaa

SEQ ID NO: 44730 - DNA, 13 bp, Artificial Sequence
  Oligonucleotide for detection of SNP TSC0013096
ttcccctccttcc

SEQ ID NO: 44731 - DNA, 13 bp, Artificial Sequence
  Oligonucleotide for detection of SNP TSC0013097
tagtggaatgtaa

SEQ ID NO: 44732 - DNA, 13 bp, Artificial Sequence
  Oligonucleotide for detection of SNP TSC0013097
ttacattccacta

SEQ ID NO: 44733 - DNA, 13 bp, Artificial Sequence
  Oligonucleotide for detection of SNP TSC0013097
tagtgggatgtaa

SEQ ID NO: 44734 - DNA, 13 bp, Artificial Sequence
  Oligonucleotide for detection of SNP TSC0013097
ttacatcccacta

SEQ ID NO: 44735 - DNA, 13 bp, Artificial Sequence
  Oligonucleotide for detection of SNP TSC0013098
tgattatgtatag

SEQ ID NO: 44736 - DNA, 13 bp, Artificial Sequence
  Oligonucleotide for detection of SNP TSC0013098
ctatacataatca

SEQ ID NO: 44737 - DNA, 13 bp, Artificial Sequence
  Oligonucleotide for detection of SNP TSC0013098
tgattacgtatag

SEQ ID NO: 44738 - DNA, 13 bp, Artificial Sequence
  Oligonucleotide for detection of SNP TSC0013098
ctatacgtaatca

SEQ ID NO: 44739 - DNA, 13 bp, Artificial Sequence
  Oligonucleotide for detection of SNP TSC0013098
ttgtgtgtgatta

SEQ ID NO: 44740 - DNA, 13 bp, Artificial Sequence
  Oligonucleotide for detection of SNP TSC0013098
taatcacacacaa

SEQ ID NO: 44741 - DNA, 13 bp, Artificial Sequence
  Oligonucleotide for detection of SNP TSC0013098
ttgtgtatgatta

SEQ ID NO: 44742 - DNA, 13 bp, Artificial Sequence
  Oligonucleotide for detection of SNP TSC0013098
taatcatacacaa

SEQ ID NO: 44743 - DNA, 13 bp, Artificial Sequence
  Oligonucleotide for detection of SNP TSC0013098
ttgtgcgtgatta

SEQ ID NO: 44744 - DNA, 13 bp, Artificial Sequence
  Oligonucleotide for detection of SNP TSC0013098
taatcacgcacaa

SEQ ID NO: 44745 - DNA, 13 bp, Artificial Sequence
  Oligonucleotide for detection of SNP TSC0013099
taatttgaagtty

SEQ ID NO: 44746 - DNA, 13 bp, Artificial Sequence
  Oligonucleotide for detection of SNP TSC0013099
raacttcaaatta

SEQ ID NO: 44747 - DNA, 13 bp, Artificial Sequence
  Oligonucleotide for detection of SNP TSC0013099
taatttaaagtty

SEQ ID NO: 44748 - DNA, 13 bp, Artificial Sequence
  Oligonucleotide for detection of SNP TSC0013099
raactttaaatta

SEQ ID NO: 44749 - DNA, 13 bp, Artificial Sequence
  Oligonucleotide for detection of SNP TSC0013100
gtatgaattttat

SEQ ID NO: 44750 - DNA, 13 bp, Artificial Sequence
  Oligonucleotide for detection of SNP TSC0013100
ataaaattcatac

SEQ ID NO: 44751 - DNA, 13 bp, Artificial Sequence
  Oligonucleotide for detection of SNP TSC0013100
gtatgagttttat

SEQ ID NO: 44752 - DNA, 13 bp, Artificial Sequence
  Oligonucleotide for detection of SNP TSC0013100
ataaaactcatac

SEQ ID NO: 44753 - DNA, 13 bp, Artificial Sequence
  Oligonucleotide for detection of SNP TSC0013101
atttaatgtttta

SEQ ID NO: 44754 - DNA, 13 bp, Artificial Sequence
  Oligonucleotide for detection of SNP TSC0013101
taaaacattaaat

SEQ ID NO: 44755 - DNA, 13 bp, Artificial Sequence
  Oligonucleotide for detection of SNP TSC0013101
atttaacgtttta

SEQ ID NO: 44756 - DNA, 13 bp, Artificial Sequence
  Oligonucleotide for detection of SNP TSC0013101
taaaacgttaaat

SEQ ID NO: 44757 - DNA, 13 bp, Artificial Sequence
  Oligonucleotide for detection of SNP TSC0013101
taaggtgttagat

SEQ ID NO: 44758 - DNA, 13 bp, Artificial Sequence
  Oligonucleotide for detection of SNP TSC0013101
atctaacacctta

SEQ ID NO: 44759 - DNA, 13 bp, Artificial Sequence
  Oligonucleotide for detection of SNP TSC0013101
taaggtattagat

SEQ ID NO: 44760 - DNA, 13 bp, Artificial Sequence
  Oligonucleotide for detection of SNP TSC0013101
atctaatacctta

SEQ ID NO: 44761 - DNA, 13 bp, Artificial Sequence
  Oligonucleotide for detection of SNP TSC0013101
taaggcgttagat

SEQ ID NO: 44762 - DNA, 13 bp, Artificial Sequence
  Oligonucleotide for detection of SNP TSC0013101
atctaacgcctta

SEQ ID NO: 44763 - DNA, 13 bp, Artificial Sequence
  Oligonucleotide for detection of SNP TSC0013102
atttaagtgttay

SEQ ID NO: 44764 - DNA, 13 bp, Artificial Sequence
  Oligonucleotide for detection of SNP TSC0013102
rtaacacttaaat

SEQ ID NO: 44765 - DNA, 13 bp, Artificial Sequence
  Oligonucleotide for detection of SNP TSC0013102
atttaaatgttay

SEQ ID NO: 44766 - DNA, 13 bp, Artificial Sequence
  Oligonucleotide for detection of SNP TSC0013102
rtaacatttaaat

SEQ ID NO: 44767 - DNA, 13 bp, Artificial Sequence
  Oligonucleotide for detection of SNP TSC0013105
tttgttgttttga

SEQ ID NO: 44768 - DNA, 13 bp, Artificial Sequence
  Oligonucleotide for detection of SNP TSC0013105
tcaaaacaacaaa

SEQ ID NO: 44769 - DNA, 13 bp, Artificial Sequence
  Oligonucleotide for detection of SNP TSC0013105
tttgtttttttga

SEQ ID NO: 44770 - DNA, 13 bp, Artificial Sequence
  Oligonucleotide for detection of SNP TSC0013105
tcaaaaaaacaaa

SEQ ID NO: 44771 - DNA, 13 bp, Artificial Sequence
  Oligonucleotide for detection of SNP TSC0013105
ttagagtaataag

SEQ ID NO: 44772 - DNA, 13 bp, Artificial Sequence
  Oligonucleotide for detection of SNP TSC0013105
cttattactctaa

SEQ ID NO: 44773 - DNA, 13 bp, Artificial Sequence
  Oligonucleotide for detection of SNP TSC0013105
ttagagaaataag

SEQ ID NO: 44774 - DNA, 13 bp, Artificial Sequence
  Oligonucleotide for detection of SNP TSC0013105
cttatttctctaa

SEQ ID NO: 44775 - DNA, 13 bp, Artificial Sequence
  Oligonucleotide for detection of SNP TSC0013106
ttaaaatgaagtt

SEQ ID NO: 44776 - DNA, 13 bp, Artificial Sequence
  Oligonucleotide for detection of SNP TSC0013106
aacttcattttaa

SEQ ID NO: 44777 - DNA, 13 bp, Artificial Sequence
  Oligonucleotide for detection of SNP TSC0013106
ttaaaacgaagtt

SEQ ID NO: 44778 - DNA, 13 bp, Artificial Sequence
  Oligonucleotide for detection of SNP TSC0013106
aacttcgttttaa

SEQ ID NO: 44779 - DNA, 13 bp, Artificial Sequence
  Oligonucleotide for detection of SNP TSC0013107
aatggtatgaaag

SEQ ID NO: 44780 - DNA, 13 bp, Artificial Sequence
  Oligonucleotide for detection of SNP TSC0013107
ctttcataccatt

SEQ ID NO: 44781 - DNA, 13 bp, Artificial Sequence
  Oligonucleotide for detection of SNP TSC0013107
aatggtgtgaaag

SEQ ID NO: 44782 - DNA, 13 bp, Artificial Sequence
  Oligonucleotide for detection of SNP TSC0013107
ctttcacaccatt

SEQ ID NO: 44783 - DNA, 13 bp, Artificial Sequence
  Oligonucleotide for detection of SNP TSC0013107
aatggcgtgaaag

SEQ ID NO: 44784 - DNA, 13 bp, Artificial Sequence
  Oligonucleotide for detection of SNP TSC0013107
ctttcacgccatt

SEQ ID NO: 44785 - DNA, 13 bp, Artificial Sequence
  Oligonucleotide for detection of SNP TSC0013107
tttttatgttatt

SEQ ID NO: 44786 - DNA, 13 bp, Artificial Sequence
  Oligonucleotide for detection of SNP TSC0013107
aataacataaaaa

SEQ ID NO: 44787 - DNA, 13 bp, Artificial Sequence
  Oligonucleotide for detection of SNP TSC0013107
tttttacgttatt

SEQ ID NO: 44788 - DNA, 13 bp, Artificial Sequence
  Oligonucleotide for detection of SNP TSC0013107
aataacgtaaaaa

SEQ ID NO: 44789 - DNA, 13 bp, Artificial Sequence
  Oligonucleotide for detection of SNP TSC0013109
aaaggaggtaata

SEQ ID NO: 44790 - DNA, 13 bp, Artificial Sequence
  Oligonucleotide for detection of SNP TSC0013109
tattacctccttt

SEQ ID NO: 44791 - DNA, 13 bp, Artificial Sequence
  Oligonucleotide for detection of SNP TSC0013109
aaaggaagtaata

SEQ ID NO: 44792 - DNA, 13 bp, Artificial Sequence
  Oligonucleotide for detection of SNP TSC0013109
tattacttccttt

SEQ ID NO: 44793 - DNA, 13 bp, Artificial Sequence
  Oligonucleotide for detection of SNP TSC0013110
gtattttggatat

SEQ ID NO: 44794 - DNA, 13 bp, Artificial Sequence
  Oligonucleotide for detection of SNP TSC0013110
atatccaaaatac

SEQ ID NO: 44795 - DNA, 13 bp, Artificial Sequence
  Oligonucleotide for detection of SNP TSC0013110
gtatttcggatat

SEQ ID NO: 44796 - DNA, 13 bp, Artificial Sequence
  Oligonucleotide for detection of SNP TSC0013110
atatccgaaatac

SEQ ID NO: 44797 - DNA, 13 bp, Artificial Sequence
  Oligonucleotide for detection of SNP TSC0013110
atatttgaaatgy

SEQ ID NO: 44798 - DNA, 13 bp, Artificial Sequence
  Oligonucleotide for detection of SNP TSC0013110
rcatttcaaatat

SEQ ID NO: 44799 - DNA, 13 bp, Artificial Sequence
  Oligonucleotide for detection of SNP TSC0013110
atatttaaaatgy

SEQ ID NO: 44800 - DNA, 13 bp, Artificial Sequence
  Oligonucleotide for detection of SNP TSC0013110
rcattttaaatat

SEQ ID NO: 44801 - DNA, 13 bp, Artificial Sequence
  Oligonucleotide for detection of SNP TSC0013110
atattcgaaatgy

SEQ ID NO: 44802 - DNA, 13 bp, Artificial Sequence
  Oligonucleotide for detection of SNP TSC0013110
rcatttcgaatat

SEQ ID NO: 44803 - DNA, 13 bp, Artificial Sequence
  Oligonucleotide for detection of SNP TSC0013111
gttggagggaaat

SEQ ID NO: 44804 - DNA, 13 bp, Artificial Sequence
  Oligonucleotide for detection of SNP TSC0013111
atttccctccaac

SEQ ID NO: 44805 - DNA, 13 bp, Artificial Sequence
  Oligonucleotide for detection of SNP TSC0013111
gttggaaggaaat

SEQ ID NO: 44806 - DNA, 13 bp, Artificial Sequence
  Oligonucleotide for detection of SNP TSC0013111
atttccttccaac

SEQ ID NO: 44807 - DNA, 13 bp, Artificial Sequence
  Oligonucleotide for detection of SNP TSC0013112
ttgtttgttttta

SEQ ID NO: 44808 - DNA, 13 bp, Artificial Sequence
  Oligonucleotide for detection of SNP TSC0013112
taaaaacaaacaa

SEQ ID NO: 44809 - DNA, 13 bp, Artificial Sequence
  Oligonucleotide for detection of SNP TSC0013112
ttgttttttttta

SEQ ID NO: 44810 - DNA, 13 bp, Artificial Sequence
  Oligonucleotide for detection of SNP TSC0013112
taaaaaaaaacaa

SEQ ID NO: 44811 - DNA, 13 bp, Artificial Sequence
  Oligonucleotide for detection of SNP TSC0013112
ttgttcgttttta

SEQ ID NO: 44812 - DNA, 13 bp, Artificial Sequence
  Oligonucleotide for detection of SNP TSC0013112
taaaaacgaacaa

SEQ ID NO: 44813 - DNA, 13 bp, Artificial Sequence
  Oligonucleotide for detection of SNP TSC0013112
tggaagtgaatag

SEQ ID NO: 44814 - DNA, 13 bp, Artificial Sequence
  Oligonucleotide for detection of SNP TSC0013112
ctattcacttcca

SEQ ID NO: 44815 - DNA, 13 bp, Artificial Sequence
  Oligonucleotide for detection of SNP TSC0013112
tggaagagaatag

SEQ ID NO: 44816 - DNA, 13 bp, Artificial Sequence
  Oligonucleotide for detection of SNP TSC0013112
ctattctcttcca

SEQ ID NO: 44817 - DNA, 13 bp, Artificial Sequence
  Oligonucleotide for detection of SNP TSC0013112
tggaagcgaatag

SEQ ID NO: 44818 - DNA, 13 bp, Artificial Sequence
  Oligonucleotide for detection of SNP TSC0013112
ctattcgcttcca

SEQ ID NO: 44819 - DNA, 13 bp, Artificial Sequence
  Oligonucleotide for detection of SNP TSC0013115
tggaaatgatatt

SEQ ID NO: 44820 - DNA, 13 bp, Artificial Sequence
  Oligonucleotide for detection of SNP TSC0013115
aatatcatttcca

SEQ ID NO: 44821 - DNA, 13 bp, Artificial Sequence
  Oligonucleotide for detection of SNP TSC0013115
tggaaacgatatt

SEQ ID NO: 44822 - DNA, 13 bp, Artificial Sequence
  Oligonucleotide for detection of SNP TSC0013115
aatatcgtttcca

SEQ ID NO: 44823 - DNA, 13 bp, Artificial Sequence
  Oligonucleotide for detection of SNP TSC0013115
aatattgttttta

SEQ ID NO: 44824 - DNA, 13 bp, Artificial Sequence
  Oligonucleotide for detection of SNP TSC0013115
taaaaacaatatt

SEQ ID NO: 44825 - DNA, 13 bp, Artificial Sequence
  Oligonucleotide for detection of SNP TSC0013115
aatattattttta

SEQ ID NO: 44826 - DNA, 13 bp, Artificial Sequence
  Oligonucleotide for detection of SNP TSC0013115
taaaaataatatt

SEQ ID NO: 44827 - DNA, 13 bp, Artificial Sequence
  Oligonucleotide for detection of SNP TSC0013115
aatatcgttttta

SEQ ID NO: 44828 - DNA, 13 bp, Artificial Sequence
  Oligonucleotide for detection of SNP TSC0013115
taaaaacgatatt

SEQ ID NO: 44829 - DNA, 13 bp, Artificial Sequence
  Oligonucleotide for detection of SNP TSC0013116
ttgagtggtgagt

SEQ ID NO: 44830 - DNA, 13 bp, Artificial Sequence
  Oligonucleotide for detection of SNP TSC0013116
actcaccactcaa

SEQ ID NO: 44831 - DNA, 13 bp, Artificial Sequence
  Oligonucleotide for detection of SNP TSC0013116
ttgagtagtgagt

SEQ ID NO: 44832 - DNA, 13 bp, Artificial Sequence
  Oligonucleotide for detection of SNP TSC0013116
actcactactcaa

SEQ ID NO: 44833 - DNA, 13 bp, Artificial Sequence
  Oligonucleotide for detection of SNP TSC0013117
tatataagaagaa

SEQ ID NO: 44834 - DNA, 13 bp, Artificial Sequence
  Oligonucleotide for detection of SNP TSC0013117
ttcttcttatata

SEQ ID NO: 44835 - DNA, 13 bp, Artificial Sequence
  Oligonucleotide for detection of SNP TSC0013118
gaaagttgaggay

SEQ ID NO: 44836 - DNA, 13 bp, Artificial Sequence
  Oligonucleotide for detection of SNP TSC0013118
rtcctcaactttc

SEQ ID NO: 44837 - DNA, 13 bp, Artificial Sequence
  Oligonucleotide for detection of SNP TSC0013118
gaaagtcgaggay

SEQ ID NO: 44838 - DNA, 13 bp, Artificial Sequence
  Oligonucleotide for detection of SNP TSC0013118
rtcctcgactttc

SEQ ID NO: 44839 - DNA, 13 bp, Artificial Sequence
  Oligonucleotide for detection of SNP TSC0013118
gtttttgatttty

SEQ ID NO: 44840 - DNA, 13 bp, Artificial Sequence
  Oligonucleotide for detection of SNP TSC0013118
raaaatcaaaaac

SEQ ID NO: 44841 - DNA, 13 bp, Artificial Sequence
  Oligonucleotide for detection of SNP TSC0013118
gtttttaatttty

SEQ ID NO: 44842 - DNA, 13 bp, Artificial Sequence
  Oligonucleotide for detection of SNP TSC0013118
raaaattaaaaac

SEQ ID NO: 44843 - DNA, 13 bp, Artificial Sequence
  Oligonucleotide for detection of SNP TSC0013118
gttttcgatttty

SEQ ID NO: 44844 - DNA, 13 bp, Artificial Sequence
  Oligonucleotide for detection of SNP TSC0013118
raaaatcgaaaac

SEQ ID NO: 44845 - DNA, 13 bp, Artificial Sequence
  Oligonucleotide for detection of SNP TSC0013119
ttttataaaaaag

SEQ ID NO: 44846 - DNA, 13 bp, Artificial Sequence
  Oligonucleotide for detection of SNP TSC0013119
cttttttataaaa

SEQ ID NO: 44847 - DNA, 13 bp, Artificial Sequence
  Oligonucleotide for detection of SNP TSC0013119
ttttatgaaaaag

SEQ ID NO: 44848 - DNA, 13 bp, Artificial Sequence
  Oligonucleotide for detection of SNP TSC0013119
ctttttcataaaa

SEQ ID NO: 44849 - DNA, 13 bp, Artificial Sequence
  Oligonucleotide for detection of SNP TSC0013119
ttttacgaaaaag

SEQ ID NO: 44850 - DNA, 13 bp, Artificial Sequence
  Oligonucleotide for detection of SNP TSC0013119
ctttttcgtaaaa

SEQ ID NO: 44851 - DNA, 13 bp, Artificial Sequence
  Oligonucleotide for detection of SNP TSC0013119
tttttttgtgaga

SEQ ID NO: 44852 - DNA, 13 bp, Artificial Sequence
  Oligonucleotide for detection of SNP TSC0013119
tctcacaaaaaaa

SEQ ID NO: 44853 - DNA, 13 bp, Artificial Sequence
  Oligonucleotide for detection of SNP TSC0013119
ttttttcgtgaga

SEQ ID NO: 44854 - DNA, 13 bp, Artificial Sequence
  Oligonucleotide for detection of SNP TSC0013119
tctcacgaaaaaa

SEQ ID NO: 44855 - DNA, 13 bp, Artificial Sequence
  Oligonucleotide for detection of SNP TSC0013120
ttttaagttgtta

SEQ ID NO: 44856 - DNA, 13 bp, Artificial Sequence
  Oligonucleotide for detection of SNP TSC0013120
taacaacttaaaa

SEQ ID NO: 44857 - DNA, 13 bp, Artificial Sequence
  Oligonucleotide for detection of SNP TSC0013120
ttttaaattgtta

SEQ ID NO: 44858 - DNA, 13 bp, Artificial Sequence
  Oligonucleotide for detection of SNP TSC0013120
taacaatttaaaa

SEQ ID NO: 44859 - DNA, 13 bp, Artificial Sequence
  Oligonucleotide for detection of SNP TSC0013121
aatatattttttt

SEQ ID NO: 44860 - DNA, 13 bp, Artificial Sequence
  Oligonucleotide for detection of SNP TSC0013121
aaaaaaatatatt

SEQ ID NO: 44861 - DNA, 13 bp, Artificial Sequence
  Oligonucleotide for detection of SNP TSC0013121
aatatagtttttt

SEQ ID NO: 44862 - DNA, 13 bp, Artificial Sequence
  Oligonucleotide for detection of SNP TSC0013121
aaaaaactatatt

SEQ ID NO: 44863 - DNA, 13 bp, Artificial Sequence
  Oligonucleotide for detection of SNP TSC0013121
aaaagagtgtatt

SEQ ID NO: 44864 - DNA, 13 bp, Artificial Sequence
  Oligonucleotide for detection of SNP TSC0013121
aatacactctttt

SEQ ID NO: 44865 - DNA, 13 bp, Artificial Sequence
  Oligonucleotide for detection of SNP TSC0013121
aaaagattgtatt

SEQ ID NO: 44866 - DNA, 13 bp, Artificial Sequence
  Oligonucleotide for detection of SNP TSC0013121
aatacaatctttt

SEQ ID NO: 44867 - DNA, 13 bp, Artificial Sequence
  Oligonucleotide for detection of SNP TSC0013123
tttttaggattgt

SEQ ID NO: 44868 - DNA, 13 bp, Artificial Sequence
  Oligonucleotide for detection of SNP TSC0013123
acaatcctaaaaa

SEQ ID NO: 44869 - DNA, 13 bp, Artificial Sequence
  Oligonucleotide for detection of SNP TSC0013123
tttttaagattgt

SEQ ID NO: 44870 - DNA, 13 bp, Artificial Sequence
  Oligonucleotide for detection of SNP TSC0013123
acaatcttaaaaa

SEQ ID NO: 44871 - DNA, 13 bp, Artificial Sequence
  Oligonucleotide for detection of SNP TSC0013126
atgtagttgtggt

SEQ ID NO: 44872 - DNA, 13 bp, Artificial Sequence
  Oligonucleotide for detection of SNP TSC0013126
accacaactacat

SEQ ID NO: 44873 - DNA, 13 bp, Artificial Sequence
  Oligonucleotide for detection of SNP TSC0013126
atgtaggtgtggt

SEQ ID NO: 44874 - DNA, 13 bp, Artificial Sequence
  Oligonucleotide for detection of SNP TSC0013126
accacacctacat

SEQ ID NO: 44875 - DNA, 13 bp, Artificial Sequence
  Oligonucleotide for detection of SNP TSC0013126
attatagttgtat

SEQ ID NO: 44876 - DNA, 13 bp, Artificial Sequence
  Oligonucleotide for detection of SNP TSC0013126
atacaactataat

SEQ ID NO: 44877 - DNA, 13 bp, Artificial Sequence
  Oligonucleotide for detection of SNP TSC0013126
attatatttgtat

SEQ ID NO: 44878 - DNA, 13 bp, Artificial Sequence
  Oligonucleotide for detection of SNP TSC0013126
atacaaatataat

SEQ ID NO: 44879 - DNA, 13 bp, Artificial Sequence
  Oligonucleotide for detection of SNP TSC0013128
atataagagtttt

SEQ ID NO: 44880 - DNA, 13 bp, Artificial Sequence
  Oligonucleotide for detection of SNP TSC0013128
aaaactcttatat

SEQ ID NO: 44881 - DNA, 13 bp, Artificial Sequence
  Oligonucleotide for detection of SNP TSC0013128
atataatagtttt

SEQ ID NO: 44882 - DNA, 13 bp, Artificial Sequence
  Oligonucleotide for detection of SNP TSC0013128
aaaactattatat

SEQ ID NO: 44883 - DNA, 13 bp, Artificial Sequence
  Oligonucleotide for detection of SNP TSC0013128
agagtttttatat

SEQ ID NO: 44884 - DNA, 13 bp, Artificial Sequence
  Oligonucleotide for detection of SNP TSC0013128
atataaaaactct

SEQ ID NO: 44885 - DNA, 13 bp, Artificial Sequence
  Oligonucleotide for detection of SNP TSC0013128
agagttattatat

SEQ ID NO: 44886 - DNA, 13 bp, Artificial Sequence
  Oligonucleotide for detection of SNP TSC0013128
atataataactct

SEQ ID NO: 44887 - DNA, 13 bp, Artificial Sequence
  Oligonucleotide for detection of SNP TSC0013129
taggttagaagga

SEQ ID NO: 44888 - DNA, 13 bp, Artificial Sequence
  Oligonucleotide for detection of SNP TSC0013129
tccttctaaccta

SEQ ID NO: 44889 - DNA, 13 bp, Artificial Sequence
  Oligonucleotide for detection of SNP TSC0013129
taggttggaagga

SEQ ID NO: 44890 - DNA, 13 bp, Artificial Sequence
  Oligonucleotide for detection of SNP TSC0013129
tccttccaaccta

SEQ ID NO: 44891 - DNA, 13 bp, Artificial Sequence
  Oligonucleotide for detection of SNP TSC0013129
taggtcggaagga

SEQ ID NO: 44892 - DNA, 13 bp, Artificial Sequence
  Oligonucleotide for detection of SNP TSC0013129
tccttccgaccta

SEQ ID NO: 44893 - DNA, 13 bp, Artificial Sequence
  Oligonucleotide for detection of SNP TSC0013129
tttttttggttta

SEQ ID NO: 44894 - DNA, 13 bp, Artificial Sequence
  Oligonucleotide for detection of SNP TSC0013129
taaaccaaaaaaa

SEQ ID NO: 44895 - DNA, 13 bp, Artificial Sequence
  Oligonucleotide for detection of SNP TSC0013129
ttttttcggttta

SEQ ID NO: 44896 - DNA, 13 bp, Artificial Sequence
  Oligonucleotide for detection of SNP TSC0013129
taaaccgaaaaaa

SEQ ID NO: 44897 - DNA, 13 bp, Artificial Sequence
  Oligonucleotide for detection of SNP TSC0013130
atttggaaggttg

SEQ ID NO: 44898 - DNA, 13 bp, Artificial Sequence
  Oligonucleotide for detection of SNP TSC0013130
caaccttccaaat

SEQ ID NO: 44899 - DNA, 13 bp, Artificial Sequence
  Oligonucleotide for detection of SNP TSC0013130
atttgggaggttg

SEQ ID NO: 44900 - DNA, 13 bp, Artificial Sequence
  Oligonucleotide for detection of SNP TSC0013130
caacctcccaaat

SEQ ID NO: 44901 - DNA, 13 bp, Artificial Sequence
  Oligonucleotide for detection of SNP TSC0013131
gtggtaatgagtt

SEQ ID NO: 44902 - DNA, 13 bp, Artificial Sequence
  Oligonucleotide for detection of SNP TSC0013131
aactcattaccac

SEQ ID NO: 44903 - DNA, 13 bp, Artificial Sequence
  Oligonucleotide for detection of SNP TSC0013131
gtggtagtgagtt

SEQ ID NO: 44904 - DNA, 13 bp, Artificial Sequence
  Oligonucleotide for detection of SNP TSC0013131
aactcactaccac

SEQ ID NO: 44905 - DNA, 13 bp, Artificial Sequence
  Oligonucleotide for detection of SNP TSC0013133
ggatgtagtggtt

SEQ ID NO: 44906 - DNA, 13 bp, Artificial Sequence
  Oligonucleotide for detection of SNP TSC0013133
aaccactacatcc

SEQ ID NO: 44907 - DNA, 13 bp, Artificial Sequence
  Oligonucleotide for detection of SNP TSC0013133
ggatgtggtggtt

SEQ ID NO: 44908 - DNA, 13 bp, Artificial Sequence
  Oligonucleotide for detection of SNP TSC0013133
aaccaccacatcc

SEQ ID NO: 44909 - DNA, 13 bp, Artificial Sequence
  Oligonucleotide for detection of SNP TSC0013133
ggatgcggtggtt

SEQ ID NO: 44910 - DNA, 13 bp, Artificial Sequence
  Oligonucleotide for detection of SNP TSC0013133
aaccaccgcatcc

SEQ ID NO: 44911 - DNA, 13 bp, Artificial Sequence
  Oligonucleotide for detection of SNP TSC0013133
agttattgtatty

SEQ ID NO: 44912 - DNA, 13 bp, Artificial Sequence
  Oligonucleotide for detection of SNP TSC0013133
raatacaataact

SEQ ID NO: 44913 - DNA, 13 bp, Artificial Sequence
  Oligonucleotide for detection of SNP TSC0013133
agttatcgtatty

SEQ ID NO: 44914 - DNA, 13 bp, Artificial Sequence
  Oligonucleotide for detection of SNP TSC0013133
raatacgataact

SEQ ID NO: 44915 - DNA, 13 bp, Artificial Sequence
  Oligonucleotide for detection of SNP TSC0013134
tttataagatata

SEQ ID NO: 44916 - DNA, 13 bp, Artificial Sequence
  Oligonucleotide for detection of SNP TSC0013134
tatatcttataaa

SEQ ID NO: 44917 - DNA, 13 bp, Artificial Sequence
  Oligonucleotide for detection of SNP TSC0013134
tttatatgatata

SEQ ID NO: 44918 - DNA, 13 bp, Artificial Sequence
  Oligonucleotide for detection of SNP TSC0013134
tatatcatataaa

SEQ ID NO: 44919 - DNA, 13 bp, Artificial Sequence
  Oligonucleotide for detection of SNP TSC0013134
tgtgttttgtgag

SEQ ID NO: 44920 - DNA, 13 bp, Artificial Sequence
  Oligonucleotide for detection of SNP TSC0013134
ctcacaaaacaca

SEQ ID NO: 44921 - DNA, 13 bp, Artificial Sequence
  Oligonucleotide for detection of SNP TSC0013134
tgtgttatgtgag

SEQ ID NO: 44922 - DNA, 13 bp, Artificial Sequence
  Oligonucleotide for detection of SNP TSC0013134
ctcacataacaca

SEQ ID NO: 44923 - DNA, 13 bp, Artificial Sequence
  Oligonucleotide for detection of SNP TSC0013136
agaaaagaaaaaa

SEQ ID NO: 44924 - DNA, 13 bp, Artificial Sequence
  Oligonucleotide for detection of SNP TSC0013136
ttttttcttttct

SEQ ID NO: 44925 - DNA, 13 bp, Artificial Sequence
  Oligonucleotide for detection of SNP TSC0013138
ataaatatattgt

SEQ ID NO: 44926 - DNA, 13 bp, Artificial Sequence
  Oligonucleotide for detection of SNP TSC0013138
acaatatatttat

SEQ ID NO: 44927 - DNA, 13 bp, Artificial Sequence
  Oligonucleotide for detection of SNP TSC0013138
ataaatgtattgt

SEQ ID NO: 44928 - DNA, 13 bp, Artificial Sequence
  Oligonucleotide for detection of SNP TSC0013138
acaatacatttat

SEQ ID NO: 44929 - DNA, 13 bp, Artificial Sequence
  Oligonucleotide for detection of SNP TSC0013144
ttgattatgtatg

SEQ ID NO: 44930 - DNA, 13 bp, Artificial Sequence
  Oligonucleotide for detection of SNP TSC0013144
catacataatcaa

SEQ ID NO: 44931 - DNA, 13 bp, Artificial Sequence
  Oligonucleotide for detection of SNP TSC0013144
ttgattttgtatg

SEQ ID NO: 44932 - DNA, 13 bp, Artificial Sequence
  Oligonucleotide for detection of SNP TSC0013144
catacaaaatcaa

SEQ ID NO: 44933 - DNA, 13 bp, Artificial Sequence
  Oligonucleotide for detection of SNP TSC0013144
tatatataattaa

SEQ ID NO: 44934 - DNA, 13 bp, Artificial Sequence
  Oligonucleotide for detection of SNP TSC0013144
ttaattatatata

SEQ ID NO: 44935 - DNA, 13 bp, Artificial Sequence
  Oligonucleotide for detection of SNP TSC0013144
tatataaaattaa

SEQ ID NO: 44936 - DNA, 13 bp, Artificial Sequence
  Oligonucleotide for detection of SNP TSC0013144
ttaattttatata

SEQ ID NO: 44937 - DNA, 13 bp, Artificial Sequence
  Oligonucleotide for detection of SNP TSC0013145
tgttttgaataaa

SEQ ID NO: 44938 - DNA, 13 bp, Artificial Sequence
  Oligonucleotide for detection of SNP TSC0013145
tttattcaaaaca

SEQ ID NO: 44939 - DNA, 13 bp, Artificial Sequence
  Oligonucleotide for detection of SNP TSC0013145
tgtttttaataaa

SEQ ID NO: 44940 - DNA, 13 bp, Artificial Sequence
  Oligonucleotide for detection of SNP TSC0013145
tttattaaaaaca

SEQ ID NO: 44941 - DNA, 13 bp, Artificial Sequence
  Oligonucleotide for detection of SNP TSC0013146
aattgtattgtgg

SEQ ID NO: 44942 - DNA, 13 bp, Artificial Sequence
  Oligonucleotide for detection of SNP TSC0013146
ccacaatacaatt

SEQ ID NO: 44943 - DNA, 13 bp, Artificial Sequence
  Oligonucleotide for detection of SNP TSC0013146
aattgttttgtgg

SEQ ID NO: 44944 - DNA, 13 bp, Artificial Sequence
  Oligonucleotide for detection of SNP TSC0013146
ccacaaaacaatt

SEQ ID NO: 44945 - DNA, 13 bp, Artificial Sequence
  Oligonucleotide for detection of SNP TSC0013146
ttatagtgtagtt

SEQ ID NO: 44946 - DNA, 13 bp, Artificial Sequence
  Oligonucleotide for detection of SNP TSC0013146
aactacactataa

SEQ ID NO: 44947 - DNA, 13 bp, Artificial Sequence
  Oligonucleotide for detection of SNP TSC0013146
ttatagagtagtt

SEQ ID NO: 44948 - DNA, 13 bp, Artificial Sequence
  Oligonucleotide for detection of SNP TSC0013146
aactactctataa

SEQ ID NO: 44949 - DNA, 13 bp, Artificial Sequence
  Oligonucleotide for detection of SNP TSC0013151
gattgtattgaay

SEQ ID NO: 44950 - DNA, 13 bp, Artificial Sequence
  Oligonucleotide for detection of SNP TSC0013151
rttcaatacaatc

SEQ ID NO: 44951 - DNA, 13 bp, Artificial Sequence
  Oligonucleotide for detection of SNP TSC0013151
gattgtgttgaay

SEQ ID NO: 44952 - DNA, 13 bp, Artificial Sequence
  Oligonucleotide for detection of SNP TSC0013151
rttcaacacaatc

SEQ ID NO: 44953 - DNA, 13 bp, Artificial Sequence
  Oligonucleotide for detection of SNP TSC0013151
gattgcgttgaay

SEQ ID NO: 44954 - DNA, 13 bp, Artificial Sequence
  Oligonucleotide for detection of SNP TSC0013151
rttcaacgcaatc

SEQ ID NO: 44955 - DNA, 13 bp, Artificial Sequence
  Oligonucleotide for detection of SNP TSC0013151
gtttaatgtaaty

SEQ ID NO: 44956 - DNA, 13 bp, Artificial Sequence
  Oligonucleotide for detection of SNP TSC0013151
rattacattaaac

SEQ ID NO: 44957 - DNA, 13 bp, Artificial Sequence
  Oligonucleotide for detection of SNP TSC0013151
gtttaacgtaaty

SEQ ID NO: 44958 - DNA, 13 bp, Artificial Sequence
  Oligonucleotide for detection of SNP TSC0013151
rattacgttaaac

SEQ ID NO: 44959 - DNA, 13 bp, Artificial Sequence
  Oligonucleotide for detection of SNP TSC0013153
gggagggggttat

SEQ ID NO: 44960 - DNA, 13 bp, Artificial Sequence
  Oligonucleotide for detection of SNP TSC0013153
ataaccccctccc

SEQ ID NO: 44961 - DNA, 13 bp, Artificial Sequence
  Oligonucleotide for detection of SNP TSC0013153
gggaggaggttat

SEQ ID NO: 44962 - DNA, 13 bp, Artificial Sequence
  Oligonucleotide for detection of SNP TSC0013153
ataacctcctccc

SEQ ID NO: 44963 - DNA, 13 bp, Artificial Sequence
  Oligonucleotide for detection of SNP TSC0013155
ttaagtttttaty

SEQ ID NO: 44964 - DNA, 13 bp, Artificial Sequence
  Oligonucleotide for detection of SNP TSC0013155
rataaaaacttaa

SEQ ID NO: 44965 - DNA, 13 bp, Artificial Sequence
  Oligonucleotide for detection of SNP TSC0013155
ttaagtgtttaty

SEQ ID NO: 44966 - DNA, 13 bp, Artificial Sequence
  Oligonucleotide for detection of SNP TSC0013155
rataaacacttaa

SEQ ID NO: 44967 - DNA, 13 bp, Artificial Sequence
  Oligonucleotide for detection of SNP TSC0013155
ttaagcgtttaty

SEQ ID NO: 44968 - DNA, 13 bp, Artificial Sequence
  Oligonucleotide for detection of SNP TSC0013155
rataaacgcttaa

SEQ ID NO: 44969 - DNA, 13 bp, Artificial Sequence
  Oligonucleotide for detection of SNP TSC0013155
ggtaggggtttaa

SEQ ID NO: 44970 - DNA, 13 bp, Artificial Sequence
  Oligonucleotide for detection of SNP TSC0013155
ttaaacccctacc

SEQ ID NO: 44971 - DNA, 13 bp, Artificial Sequence
  Oligonucleotide for detection of SNP TSC0013155
ggtaggtgtttaa

SEQ ID NO: 44972 - DNA, 13 bp, Artificial Sequence
  Oligonucleotide for detection of SNP TSC0013155
ttaaacacctacc

SEQ ID NO: 44973 - DNA, 13 bp, Artificial Sequence
  Oligonucleotide for detection of SNP TSC0013155
ggtaggcgtttaa

SEQ ID NO: 44974 - DNA, 13 bp, Artificial Sequence
  Oligonucleotide for detection of SNP TSC0013155
ttaaacgcctacc

SEQ ID NO: 44975 - DNA, 13 bp, Artificial Sequence
  Oligonucleotide for detection of SNP TSC0013156
ttgataagggaga

SEQ ID NO: 44976 - DNA, 13 bp, Artificial Sequence
  Oligonucleotide for detection of SNP TSC0013156
tctcccttatcaa

SEQ ID NO: 44977 - DNA, 13 bp, Artificial Sequence
  Oligonucleotide for detection of SNP TSC0013156
ttgataggggaga

SEQ ID NO: 44978 - DNA, 13 bp, Artificial Sequence
  Oligonucleotide for detection of SNP TSC0013156
tctcccctatcaa

SEQ ID NO: 44979 - DNA, 13 bp, Artificial Sequence
  Oligonucleotide for detection of SNP TSC0013157
gtataaaatggaa

SEQ ID NO: 44980 - DNA, 13 bp, Artificial Sequence
  Oligonucleotide for detection of SNP TSC0013157
ttccattttatac

SEQ ID NO: 44981 - DNA, 13 bp, Artificial Sequence
  Oligonucleotide for detection of SNP TSC0013157
gtataatatggaa

SEQ ID NO: 44982 - DNA, 13 bp, Artificial Sequence
  Oligonucleotide for detection of SNP TSC0013157
ttccatattatac

SEQ ID NO: 44983 - DNA, 13 bp, Artificial Sequence
  Oligonucleotide for detection of SNP TSC0013157
ttttattttatgy

SEQ ID NO: 44984 - DNA, 13 bp, Artificial Sequence
  Oligonucleotide for detection of SNP TSC0013157
rcataaaataaaa

SEQ ID NO: 44985 - DNA, 13 bp, Artificial Sequence
  Oligonucleotide for detection of SNP TSC0013157
ttttatgttatgy

SEQ ID NO: 44986 - DNA, 13 bp, Artificial Sequence
  Oligonucleotide for detection of SNP TSC0013157
rcataacataaaa

SEQ ID NO: 44987 - DNA, 13 bp, Artificial Sequence
  Oligonucleotide for detection of SNP TSC0013158
tgttagagtatga

SEQ ID NO: 44988 - DNA, 13 bp, Artificial Sequence
  Oligonucleotide for detection of SNP TSC0013158
tcatactctaaca

SEQ ID NO: 44989 - DNA, 13 bp, Artificial Sequence
  Oligonucleotide for detection of SNP TSC0013158
tgttagggtatga

SEQ ID NO: 44990 - DNA, 13 bp, Artificial Sequence
  Oligonucleotide for detection of SNP TSC0013158
tcataccctaaca

SEQ ID NO: 44991 - DNA, 13 bp, Artificial Sequence
  Oligonucleotide for detection of SNP TSC0013159
tttaggattttay

SEQ ID NO: 44992 - DNA, 13 bp, Artificial Sequence
  Oligonucleotide for detection of SNP TSC0013159
rtaaaatcctaaa

SEQ ID NO: 44993 - DNA, 13 bp, Artificial Sequence
  Oligonucleotide for detection of SNP TSC0013159
tttaggtttttay

SEQ ID NO: 44994 - DNA, 13 bp, Artificial Sequence
  Oligonucleotide for detection of SNP TSC0013159
rtaaaaacctaaa

SEQ ID NO: 44995 - DNA, 13 bp, Artificial Sequence
  Oligonucleotide for detection of SNP TSC0013159
gtgaggttttgaa

SEQ ID NO: 44996 - DNA, 13 bp, Artificial Sequence
  Oligonucleotide for detection of SNP TSC0013159
ttcaaaacctcac

SEQ ID NO: 44997 - DNA, 13 bp, Artificial Sequence
  Oligonucleotide for detection of SNP TSC0013159
gtgaggatttgaa

SEQ ID NO: 44998 - DNA, 13 bp, Artificial Sequence
  Oligonucleotide for detection of SNP TSC0013159
ttcaaatcctcac

SEQ ID NO: 44999 - DNA, 13 bp, Artificial Sequence
  Oligonucleotide for detection of SNP TSC0013160
agtgtatgatgty

SEQ ID NO: 45000 - DNA, 13 bp, Artificial Sequence
  Oligonucleotide for detection of SNP TSC0013160
racatcatacact

SEQ ID NO: 45001 - DNA, 13 bp, Artificial Sequence
  Oligonucleotide for detection of SNP TSC0013160
agtgtacgatgty

SEQ ID NO: 45002 - DNA, 13 bp, Artificial Sequence
  Oligonucleotide for detection of SNP TSC0013160
racatcgtacact

SEQ ID NO: 45003 - DNA, 13 bp, Artificial Sequence
  Oligonucleotide for detection of SNP TSC0013160
gatattgtgtatt

SEQ ID NO: 45004 - DNA, 13 bp, Artificial Sequence
  Oligonucleotide for detection of SNP TSC0013160
aatacacaatatc

SEQ ID NO: 45005 - DNA, 13 bp, Artificial Sequence
  Oligonucleotide for detection of SNP TSC0013160
gatattatgtatt

SEQ ID NO: 45006 - DNA, 13 bp, Artificial Sequence
  Oligonucleotide for detection of SNP TSC0013160
aatacataatatc

SEQ ID NO: 45007 - DNA, 13 bp, Artificial Sequence
  Oligonucleotide for detection of SNP TSC0013160
gatatcgtgtatt

SEQ ID NO: 45008 - DNA, 13 bp, Artificial Sequence
  Oligonucleotide for detection of SNP TSC0013160
aatacacgatatc

SEQ ID NO: 45009 - DNA, 13 bp, Artificial Sequence
  Oligonucleotide for detection of SNP TSC0013161
gtgggtgtggagg

SEQ ID NO: 45010 - DNA, 13 bp, Artificial Sequence
  Oligonucleotide for detection of SNP TSC0013161
cctccacacccac

SEQ ID NO: 45011 - DNA, 13 bp, Artificial Sequence
  Oligonucleotide for detection of SNP TSC0013161
gtgggtatggagg

SEQ ID NO: 45012 - DNA, 13 bp, Artificial Sequence
  Oligonucleotide for detection of SNP TSC0013161
cctccatacccac

SEQ ID NO: 45013 - DNA, 13 bp, Artificial Sequence
  Oligonucleotide for detection of SNP TSC0013161
gcgggtgtggagg

SEQ ID NO: 45014 - DNA, 13 bp, Artificial Sequence
  Oligonucleotide for detection of SNP TSC0013161
cctccacacccgc

SEQ ID NO: 45015 - DNA, 13 bp, Artificial Sequence
  Oligonucleotide for detection of SNP TSC0013161
gcgggtatggagg

SEQ ID NO: 45016 - DNA, 13 bp, Artificial Sequence
  Oligonucleotide for detection of SNP TSC0013161
cctccatacccgc

SEQ ID NO: 45017 - DNA, 13 bp, Artificial Sequence
  Oligonucleotide for detection of SNP TSC0013163
tatgtgggaattt

SEQ ID NO: 45018 - DNA, 13 bp, Artificial Sequence
  Oligonucleotide for detection of SNP TSC0013163
aaattcccacata

SEQ ID NO: 45019 - DNA, 13 bp, Artificial Sequence
  Oligonucleotide for detection of SNP TSC0013163
tatgtgagaattt

SEQ ID NO: 45020 - DNA, 13 bp, Artificial Sequence
  Oligonucleotide for detection of SNP TSC0013163
aaattctcacata

SEQ ID NO: 45021 - DNA, 13 bp, Artificial Sequence
  Oligonucleotide for detection of SNP TSC0013164
tatttgtgtaata

SEQ ID NO: 45022 - DNA, 13 bp, Artificial Sequence
  Oligonucleotide for detection of SNP TSC0013164
tattacacaaata

SEQ ID NO: 45023 - DNA, 13 bp, Artificial Sequence
  Oligonucleotide for detection of SNP TSC0013164
tatttgcgtaata

SEQ ID NO: 45024 - DNA, 13 bp, Artificial Sequence
  Oligonucleotide for detection of SNP TSC0013164
tattacgcaaata

SEQ ID NO: 45025 - DNA, 13 bp, Artificial Sequence
  Oligonucleotide for detection of SNP TSC0013164
tgttgtgtaagta

SEQ ID NO: 45026 - DNA, 13 bp, Artificial Sequence
  Oligonucleotide for detection of SNP TSC0013164
tacttacacaaca

SEQ ID NO: 45027 - DNA, 13 bp, Artificial Sequence
  Oligonucleotide for detection of SNP TSC0013164
tgttgtataagta

SEQ ID NO: 45028 - DNA, 13 bp, Artificial Sequence
  Oligonucleotide for detection of SNP TSC0013164
tacttatacaaca

SEQ ID NO: 45029 - DNA, 13 bp, Artificial Sequence
  Oligonucleotide for detection of SNP TSC0013164
tgttgcgtaagta

SEQ ID NO: 45030 - DNA, 13 bp, Artificial Sequence
  Oligonucleotide for detection of SNP TSC0013164
tacttacgcaaca

SEQ ID NO: 45031 - DNA, 13 bp, Artificial Sequence
  Oligonucleotide for detection of SNP TSC0013165
ttgtttatttgty

SEQ ID NO: 45032 - DNA, 13 bp, Artificial Sequence
  Oligonucleotide for detection of SNP TSC0013165
racaaataaacaa

SEQ ID NO: 45033 - DNA, 13 bp, Artificial Sequence
  Oligonucleotide for detection of SNP TSC0013165
ttgtttgtttgty

SEQ ID NO: 45034 - DNA, 13 bp, Artificial Sequence
  Oligonucleotide for detection of SNP TSC0013165
racaaacaaacaa

SEQ ID NO: 45035 - DNA, 13 bp, Artificial Sequence
  Oligonucleotide for detection of SNP TSC0013165
ttgttcgtttgty

SEQ ID NO: 45036 - DNA, 13 bp, Artificial Sequence
  Oligonucleotide for detection of SNP TSC0013165
racaaacgaacaa

SEQ ID NO: 45037 - DNA, 13 bp, Artificial Sequence
  Oligonucleotide for detection of SNP TSC0013165
gatagatggataa

SEQ ID NO: 45038 - DNA, 13 bp, Artificial Sequence
  Oligonucleotide for detection of SNP TSC0013165
ttatccatctatc

SEQ ID NO: 45039 - DNA, 13 bp, Artificial Sequence
  Oligonucleotide for detection of SNP TSC0013165
gatagacggataa

SEQ ID NO: 45040 - DNA, 13 bp, Artificial Sequence
  Oligonucleotide for detection of SNP TSC0013165
ttatccgtctatc

SEQ ID NO: 45041 - DNA, 13 bp, Artificial Sequence
  Oligonucleotide for detection of SNP TSC0013167
tttgttatgtgag

SEQ ID NO: 45042 - DNA, 13 bp, Artificial Sequence
  Oligonucleotide for detection of SNP TSC0013167
ctcacataacaaa

SEQ ID NO: 45043 - DNA, 13 bp, Artificial Sequence
  Oligonucleotide for detection of SNP TSC0013167
tttgttgtgtgag

SEQ ID NO: 45044 - DNA, 13 bp, Artificial Sequence
  Oligonucleotide for detection of SNP TSC0013167
ctcacacaacaaa

SEQ ID NO: 45045 - DNA, 13 bp, Artificial Sequence
  Oligonucleotide for detection of SNP TSC0013167
ttcgttatgtgag

SEQ ID NO: 45046 - DNA, 13 bp, Artificial Sequence
  Oligonucleotide for detection of SNP TSC0013167
ctcacataacgaa

SEQ ID NO: 45047 - DNA, 13 bp, Artificial Sequence
  Oligonucleotide for detection of SNP TSC0013167
ttcgttgtgtgag

SEQ ID NO: 45048 - DNA, 13 bp, Artificial Sequence
  Oligonucleotide for detection of SNP TSC0013167
ctcacacaacgaa

SEQ ID NO: 45049 - DNA, 13 bp, Artificial Sequence
  Oligonucleotide for detection of SNP TSC0013167
tttgttatgcgag

SEQ ID NO: 45050 - DNA, 13 bp, Artificial Sequence
  Oligonucleotide for detection of SNP TSC0013167
ctcgcataacaaa

SEQ ID NO: 45051 - DNA, 13 bp, Artificial Sequence
  Oligonucleotide for detection of SNP TSC0013167
tttgtcgtgtgag

SEQ ID NO: 45052 - DNA, 13 bp, Artificial Sequence
  Oligonucleotide for detection of SNP TSC0013167
ctcacacgacaaa

SEQ ID NO: 45053 - DNA, 13 bp, Artificial Sequence
  Oligonucleotide for detection of SNP TSC0013167
ttcgttatgcgag

SEQ ID NO: 45054 - DNA, 13 bp, Artificial Sequence
  Oligonucleotide for detection of SNP TSC0013167
ctcgcataacgaa

SEQ ID NO: 45055 - DNA, 13 bp, Artificial Sequence
  Oligonucleotide for detection of SNP TSC0013167
tttgttgtgcgag

SEQ ID NO: 45056 - DNA, 13 bp, Artificial Sequence
  Oligonucleotide for detection of SNP TSC0013167
ctcgcacaacaaa

SEQ ID NO: 45057 - DNA, 13 bp, Artificial Sequence
  Oligonucleotide for detection of SNP TSC0013167
ttcgtcgtgtgag

SEQ ID NO: 45058 - DNA, 13 bp, Artificial Sequence
  Oligonucleotide for detection of SNP TSC0013167
ctcacacgacgaa

SEQ ID NO: 45059 - DNA, 13 bp, Artificial Sequence
  Oligonucleotide for detection of SNP TSC0013167
ttcgttgtgcgag

SEQ ID NO: 45060 - DNA, 13 bp, Artificial Sequence
  Oligonucleotide for detection of SNP TSC0013167
ctcgcacaacgaa

SEQ ID NO: 45061 - DNA, 13 bp, Artificial Sequence
  Oligonucleotide for detection of SNP TSC0013167
tttgtcgtgcgag

SEQ ID NO: 45062 - DNA, 13 bp, Artificial Sequence
  Oligonucleotide for detection of SNP TSC0013167
ctcgcacgacaaa

SEQ ID NO: 45063 - DNA, 13 bp, Artificial Sequence
  Oligonucleotide for detection of SNP TSC0013167
ttcgtcgtgcgag

SEQ ID NO: 45064 - DNA, 13 bp, Artificial Sequence
  Oligonucleotide for detection of SNP TSC0013167
ctcgcacgacgaa

SEQ ID NO: 45065 - DNA, 13 bp, Artificial Sequence
  Oligonucleotide for detection of SNP TSC0013167
tttgtatgatgga

SEQ ID NO: 45066 - DNA, 13 bp, Artificial Sequence
  Oligonucleotide for detection of SNP TSC0013167
tccatcatacaaa

SEQ ID NO: 45067 - DNA, 13 bp, Artificial Sequence
  Oligonucleotide for detection of SNP TSC0013167
ttcgtatgatgga

SEQ ID NO: 45068 - DNA, 13 bp, Artificial Sequence
  Oligonucleotide for detection of SNP TSC0013167
tccatcatacgaa

SEQ ID NO: 45069 - DNA, 13 bp, Artificial Sequence
  Oligonucleotide for detection of SNP TSC0013167
tttgtatgacgga

SEQ ID NO: 45070 - DNA, 13 bp, Artificial Sequence
  Oligonucleotide for detection of SNP TSC0013167
tccgtcatacaaa

SEQ ID NO: 45071 - DNA, 13 bp, Artificial Sequence
  Oligonucleotide for detection of SNP TSC0013167
tttgtacgatgga

SEQ ID NO: 45072 - DNA, 13 bp, Artificial Sequence
  Oligonucleotide for detection of SNP TSC0013167
tccatcgtacaaa

SEQ ID NO: 45073 - DNA, 13 bp, Artificial Sequence
  Oligonucleotide for detection of SNP TSC0013167
ttcgtatgacgga

SEQ ID NO: 45074 - DNA, 13 bp, Artificial Sequence
  Oligonucleotide for detection of SNP TSC0013167
tccgtcatacgaa

SEQ ID NO: 45075 - DNA, 13 bp, Artificial Sequence
  Oligonucleotide for detection of SNP TSC0013167
ttcgtacgatgga

SEQ ID NO: 45076 - DNA, 13 bp, Artificial Sequence
  Oligonucleotide for detection of SNP TSC0013167
tccatcgtacgaa

SEQ ID NO: 45077 - DNA, 13 bp, Artificial Sequence
  Oligonucleotide for detection of SNP TSC0013167
tttgtacgacgga

SEQ ID NO: 45078 - DNA, 13 bp, Artificial Sequence
  Oligonucleotide for detection of SNP TSC0013167
tccgtcgtacaaa

SEQ ID NO: 45079 - DNA, 13 bp, Artificial Sequence
  Oligonucleotide for detection of SNP TSC0013167
ttcgtacgacgga

SEQ ID NO: 45080 - DNA, 13 bp, Artificial Sequence
  Oligonucleotide for detection of SNP TSC0013167
tccgtcgtacgaa

SEQ ID NO: 45081 - DNA, 13 bp, Artificial Sequence
  Oligonucleotide for detection of SNP TSC0013168
gtatttatttatg

SEQ ID NO: 45082 - DNA, 13 bp, Artificial Sequence
  Oligonucleotide for detection of SNP TSC0013168
cataaataaatac

SEQ ID NO: 45083 - DNA, 13 bp, Artificial Sequence
  Oligonucleotide for detection of SNP TSC0013168
gtatttgtttatg

SEQ ID NO: 45084 - DNA, 13 bp, Artificial Sequence
  Oligonucleotide for detection of SNP TSC0013168
cataaacaaatac

SEQ ID NO: 45085 - DNA, 13 bp, Artificial Sequence
  Oligonucleotide for detection of SNP TSC0013168
gtatttatttacg

SEQ ID NO: 45086 - DNA, 13 bp, Artificial Sequence
  Oligonucleotide for detection of SNP TSC0013168
cgtaaataaatac

SEQ ID NO: 45087 - DNA, 13 bp, Artificial Sequence
  Oligonucleotide for detection of SNP TSC0013168
gtattcgtttatg

SEQ ID NO: 45088 - DNA, 13 bp, Artificial Sequence
  Oligonucleotide for detection of SNP TSC0013168
cataaacgaatac

SEQ ID NO: 45089 - DNA, 13 bp, Artificial Sequence
  Oligonucleotide for detection of SNP TSC0013168
gtatttgtttacg

SEQ ID NO: 45090 - DNA, 13 bp, Artificial Sequence
  Oligonucleotide for detection of SNP TSC0013168
cgtaaacaaatac

SEQ ID NO: 45091 - DNA, 13 bp, Artificial Sequence
  Oligonucleotide for detection of SNP TSC0013168
gtattcgtttacg

SEQ ID NO: 45092 - DNA, 13 bp, Artificial Sequence
  Oligonucleotide for detection of SNP TSC0013168
cgtaaacgaatac

SEQ ID NO: 45093 - DNA, 13 bp, Artificial Sequence
  Oligonucleotide for detection of SNP TSC0013168
tgtgagtgagtgy

SEQ ID NO: 45094 - DNA, 13 bp, Artificial Sequence
  Oligonucleotide for detection of SNP TSC0013168
rcactcactcaca

SEQ ID NO: 45095 - DNA, 13 bp, Artificial Sequence
  Oligonucleotide for detection of SNP TSC0013168
cgtgagtgagtgy

SEQ ID NO: 45096 - DNA, 13 bp, Artificial Sequence
  Oligonucleotide for detection of SNP TSC0013168
rcactcactcacg

SEQ ID NO: 45097 - DNA, 13 bp, Artificial Sequence
  Oligonucleotide for detection of SNP TSC0013168
tgtgagcgagtgy

SEQ ID NO: 45098 - DNA, 13 bp, Artificial Sequence
  Oligonucleotide for detection of SNP TSC0013168
rcactcgctcaca

SEQ ID NO: 45099 - DNA, 13 bp, Artificial Sequence
  Oligonucleotide for detection of SNP TSC0013168
cgtgagcgagtgy

SEQ ID NO: 45100 - DNA, 13 bp, Artificial Sequence
  Oligonucleotide for detection of SNP TSC0013168
rcactcgctcacg

SEQ ID NO: 45101 - DNA, 13 bp, Artificial Sequence
  Oligonucleotide for detection of SNP TSC0013169
tttgagtgttgty

SEQ ID NO: 45102 - DNA, 13 bp, Artificial Sequence
  Oligonucleotide for detection of SNP TSC0013169
racaacactcaaa

SEQ ID NO: 45103 - DNA, 13 bp, Artificial Sequence
  Oligonucleotide for detection of SNP TSC0013169
tttgagggttgty

SEQ ID NO: 45104 - DNA, 13 bp, Artificial Sequence
  Oligonucleotide for detection of SNP TSC0013169
racaaccctcaaa

SEQ ID NO: 45105 - DNA, 13 bp, Artificial Sequence
  Oligonucleotide for detection of SNP TSC0013169
tttgagcgttgty

SEQ ID NO: 45106 - DNA, 13 bp, Artificial Sequence
  Oligonucleotide for detection of SNP TSC0013169
racaacgctcaaa

SEQ ID NO: 45107 - DNA, 13 bp, Artificial Sequence
  Oligonucleotide for detection of SNP TSC0013169
gataatgtttaga

SEQ ID NO: 45108 - DNA, 13 bp, Artificial Sequence
  Oligonucleotide for detection of SNP TSC0013169
tctaaacattatc

SEQ ID NO: 45109 - DNA, 13 bp, Artificial Sequence
  Oligonucleotide for detection of SNP TSC0013169
gataatttttaga

SEQ ID NO: 45110 - DNA, 13 bp, Artificial Sequence
  Oligonucleotide for detection of SNP TSC0013169
tctaaaaattatc

SEQ ID NO: 45111 - DNA, 13 bp, Artificial Sequence
  Oligonucleotide for detection of SNP TSC0013169
gataacgtttaga

SEQ ID NO: 45112 - DNA, 13 bp, Artificial Sequence
  Oligonucleotide for detection of SNP TSC0013169
tctaaacgttatc

SEQ ID NO: 45113 - DNA, 13 bp, Artificial Sequence
  Oligonucleotide for detection of SNP TSC0013170
tagagtaatgtag

SEQ ID NO: 45114 - DNA, 13 bp, Artificial Sequence
  Oligonucleotide for detection of SNP TSC0013170
ctacattactcta

SEQ ID NO: 45115 - DNA, 13 bp, Artificial Sequence
  Oligonucleotide for detection of SNP TSC0013170
tagagtgatgtag

SEQ ID NO: 45116 - DNA, 13 bp, Artificial Sequence
  Oligonucleotide for detection of SNP TSC0013170
ctacatcactcta

SEQ ID NO: 45117 - DNA, 13 bp, Artificial Sequence
  Oligonucleotide for detection of SNP TSC0013171
aggtttatgttat

SEQ ID NO: 45118 - DNA, 13 bp, Artificial Sequence
  Oligonucleotide for detection of SNP TSC0013171
ataacataaacct

SEQ ID NO: 45119 - DNA, 13 bp, Artificial Sequence
  Oligonucleotide for detection of SNP TSC0013171
aggtttgtgttat

SEQ ID NO: 45120 - DNA, 13 bp, Artificial Sequence
  Oligonucleotide for detection of SNP TSC0013171
ataacacaaacct

SEQ ID NO: 45121 - DNA, 13 bp, Artificial Sequence
  Oligonucleotide for detection of SNP TSC0013172
ggatgtaggaggt

SEQ ID NO: 45122 - DNA, 13 bp, Artificial Sequence
  Oligonucleotide for detection of SNP TSC0013172
acctcctacatcc

SEQ ID NO: 45123 - DNA, 13 bp, Artificial Sequence
  Oligonucleotide for detection of SNP TSC0013172
ggatgttggaggt

SEQ ID NO: 45124 - DNA, 13 bp, Artificial Sequence
  Oligonucleotide for detection of SNP TSC0013172
acctccaacatcc

SEQ ID NO: 45125 - DNA, 13 bp, Artificial Sequence
  Oligonucleotide for detection of SNP TSC0013172
ggatgtcggaggt

SEQ ID NO: 45126 - DNA, 13 bp, Artificial Sequence
  Oligonucleotide for detection of SNP TSC0013172
acctccgacatcc

SEQ ID NO: 45127 - DNA, 13 bp, Artificial Sequence
  Oligonucleotide for detection of SNP TSC0013173
ttttaagtaatag

SEQ ID NO: 45128 - DNA, 13 bp, Artificial Sequence
  Oligonucleotide for detection of SNP TSC0013173
ctattacttaaaa

SEQ ID NO: 45129 - DNA, 13 bp, Artificial Sequence
  Oligonucleotide for detection of SNP TSC0013173
ttttaaataatag

SEQ ID NO: 45130 - DNA, 13 bp, Artificial Sequence
  Oligonucleotide for detection of SNP TSC0013173
ctattatttaaaa

SEQ ID NO: 45131 - DNA, 13 bp, Artificial Sequence
  Oligonucleotide for detection of SNP TSC0013174
ttttgaattttty

SEQ ID NO: 45132 - DNA, 13 bp, Artificial Sequence
  Oligonucleotide for detection of SNP TSC0013174
raaaaattcaaaa

SEQ ID NO: 45133 - DNA, 13 bp, Artificial Sequence
  Oligonucleotide for detection of SNP TSC0013175
ttaattgagggtt

SEQ ID NO: 45134 - DNA, 13 bp, Artificial Sequence
  Oligonucleotide for detection of SNP TSC0013175
aaccctcaattaa

SEQ ID NO: 45135 - DNA, 13 bp, Artificial Sequence
  Oligonucleotide for detection of SNP TSC0013175
ttaattaagggtt

SEQ ID NO: 45136 - DNA, 13 bp, Artificial Sequence
  Oligonucleotide for detection of SNP TSC0013175
aacccttaattaa

SEQ ID NO: 45137 - DNA, 13 bp, Artificial Sequence
  Oligonucleotide for detection of SNP TSC0013175
ttaatcgagggtt

SEQ ID NO: 45138 - DNA, 13 bp, Artificial Sequence
  Oligonucleotide for detection of SNP TSC0013175
aaccctcgattaa

SEQ ID NO: 45139 - DNA, 13 bp, Artificial Sequence
  Oligonucleotide for detection of SNP TSC0013177
tatattatattga

SEQ ID NO: 45140 - DNA, 13 bp, Artificial Sequence
  Oligonucleotide for detection of SNP TSC0013177
tcaatataatata

SEQ ID NO: 45141 - DNA, 13 bp, Artificial Sequence
  Oligonucleotide for detection of SNP TSC0013177
tatattttattga

SEQ ID NO: 45142 - DNA, 13 bp, Artificial Sequence
  Oligonucleotide for detection of SNP TSC0013177
tcaataaaatata

SEQ ID NO: 45143 - DNA, 13 bp, Artificial Sequence
  Oligonucleotide for detection of SNP TSC0013177
ttaatgtaatata

SEQ ID NO: 45144 - DNA, 13 bp, Artificial Sequence
  Oligonucleotide for detection of SNP TSC0013177
tatattacattaa

SEQ ID NO: 45145 - DNA, 13 bp, Artificial Sequence
  Oligonucleotide for detection of SNP TSC0013177
ttaatgaaatata

SEQ ID NO: 45146 - DNA, 13 bp, Artificial Sequence
  Oligonucleotide for detection of SNP TSC0013177
tatatttcattaa

SEQ ID NO: 45147 - DNA, 13 bp, Artificial Sequence
  Oligonucleotide for detection of SNP TSC0013178
tttaatgtaatat

SEQ ID NO: 45148 - DNA, 13 bp, Artificial Sequence
  Oligonucleotide for detection of SNP TSC0013178
atattacattaaa

SEQ ID NO: 45149 - DNA, 13 bp, Artificial Sequence
  Oligonucleotide for detection of SNP TSC0013178
tttaatataatat

SEQ ID NO: 45150 - DNA, 13 bp, Artificial Sequence
  Oligonucleotide for detection of SNP TSC0013178
atattatattaaa

SEQ ID NO: 45151 - DNA, 13 bp, Artificial Sequence
  Oligonucleotide for detection of SNP TSC0013183
tgtttatgttgaa

SEQ ID NO: 45152 - DNA, 13 bp, Artificial Sequence
  Oligonucleotide for detection of SNP TSC0013183
ttcaacataaaca

SEQ ID NO: 45153 - DNA, 13 bp, Artificial Sequence
  Oligonucleotide for detection of SNP TSC0013183
tgtttaggttgaa

SEQ ID NO: 45154 - DNA, 13 bp, Artificial Sequence
  Oligonucleotide for detection of SNP TSC0013183
ttcaacctaaaca

SEQ ID NO: 45155 - DNA, 13 bp, Artificial Sequence
  Oligonucleotide for detection of SNP TSC0013188
aggatgggttttg

SEQ ID NO: 45156 - DNA, 13 bp, Artificial Sequence
  Oligonucleotide for detection of SNP TSC0013188
caaaacccatcct

SEQ ID NO: 45157 - DNA, 13 bp, Artificial Sequence
  Oligonucleotide for detection of SNP TSC0013188
aggatgagttttg

SEQ ID NO: 45158 - DNA, 13 bp, Artificial Sequence
  Oligonucleotide for detection of SNP TSC0013188
caaaactcatcct

SEQ ID NO: 45159 - DNA, 13 bp, Artificial Sequence
  Oligonucleotide for detection of SNP TSC0013189
atttttgtttaaa

SEQ ID NO: 45160 - DNA, 13 bp, Artificial Sequence
  Oligonucleotide for detection of SNP TSC0013189
tttaaacaaaaat

SEQ ID NO: 45161 - DNA, 13 bp, Artificial Sequence
  Oligonucleotide for detection of SNP TSC0013189
atttttttttaaa

SEQ ID NO: 45162 - DNA, 13 bp, Artificial Sequence
  Oligonucleotide for detection of SNP TSC0013189
tttaaaaaaaaat

SEQ ID NO: 45163 - DNA, 13 bp, Artificial Sequence
  Oligonucleotide for detection of SNP TSC0013189
attttcgtttaaa

SEQ ID NO: 45164 - DNA, 13 bp, Artificial Sequence
  Oligonucleotide for detection of SNP TSC0013189
tttaaacgaaaat

SEQ ID NO: 45165 - DNA, 13 bp, Artificial Sequence
  Oligonucleotide for detection of SNP TSC0013189
tttgaatgggaat

SEQ ID NO: 45166 - DNA, 13 bp, Artificial Sequence
  Oligonucleotide for detection of SNP TSC0013189
attcccattcaaa

SEQ ID NO: 45167 - DNA, 13 bp, Artificial Sequence
  Oligonucleotide for detection of SNP TSC0013189
tttgaaagggaat

SEQ ID NO: 45168 - DNA, 13 bp, Artificial Sequence
  Oligonucleotide for detection of SNP TSC0013189
attccctttcaaa

SEQ ID NO: 45169 - DNA, 13 bp, Artificial Sequence
  Oligonucleotide for detection of SNP TSC0013189
tttgaacgggaat

SEQ ID NO: 45170 - DNA, 13 bp, Artificial Sequence
  Oligonucleotide for detection of SNP TSC0013189
attcccgttcaaa

SEQ ID NO: 45171 - DNA, 13 bp, Artificial Sequence
  Oligonucleotide for detection of SNP TSC0013190
tttgtttgtatta

SEQ ID NO: 45172 - DNA, 13 bp, Artificial Sequence
  Oligonucleotide for detection of SNP TSC0013190
taatacaaacaaa

SEQ ID NO: 45173 - DNA, 13 bp, Artificial Sequence
  Oligonucleotide for detection of SNP TSC0013190
tttgttcgtatta

SEQ ID NO: 45174 - DNA, 13 bp, Artificial Sequence
  Oligonucleotide for detection of SNP TSC0013190
taatacgaacaaa

SEQ ID NO: 45175 - DNA, 13 bp, Artificial Sequence
  Oligonucleotide for detection of SNP TSC0013190
taatgtgaataaa

SEQ ID NO: 45176 - DNA, 13 bp, Artificial Sequence
  Oligonucleotide for detection of SNP TSC0013190
tttattcacatta

SEQ ID NO: 45177 - DNA, 13 bp, Artificial Sequence
  Oligonucleotide for detection of SNP TSC0013190
taatgtaaataaa

SEQ ID NO: 45178 - DNA, 13 bp, Artificial Sequence
  Oligonucleotide for detection of SNP TSC0013190
tttatttacatta

SEQ ID NO: 45179 - DNA, 13 bp, Artificial Sequence
  Oligonucleotide for detection of SNP TSC0013190
taatgcgaataaa

SEQ ID NO: 45180 - DNA, 13 bp, Artificial Sequence
  Oligonucleotide for detection of SNP TSC0013190
tttattcgcatta

SEQ ID NO: 45181 - DNA, 13 bp, Artificial Sequence
  Oligonucleotide for detection of SNP TSC0013191
tttgagtgataga

SEQ ID NO: 45182 - DNA, 13 bp, Artificial Sequence
  Oligonucleotide for detection of SNP TSC0013191
tctatcactcaaa

SEQ ID NO: 45183 - DNA, 13 bp, Artificial Sequence
  Oligonucleotide for detection of SNP TSC0013191
tttgagcgataga

SEQ ID NO: 45184 - DNA, 13 bp, Artificial Sequence
  Oligonucleotide for detection of SNP TSC0013191
tctatcgctcaaa

SEQ ID NO: 45185 - DNA, 13 bp, Artificial Sequence
  Oligonucleotide for detection of SNP TSC0013192
ggtatagttatag

SEQ ID NO: 45186 - DNA, 13 bp, Artificial Sequence
  Oligonucleotide for detection of SNP TSC0013192
ctataactatacc

SEQ ID NO: 45187 - DNA, 13 bp, Artificial Sequence
  Oligonucleotide for detection of SNP TSC0013192
ggtataattatag

SEQ ID NO: 45188 - DNA, 13 bp, Artificial Sequence
  Oligonucleotide for detection of SNP TSC0013192
ctataattatacc

SEQ ID NO: 45189 - DNA, 13 bp, Artificial Sequence
  Oligonucleotide for detection of SNP TSC0013193
tgatttatggatt

SEQ ID NO: 45190 - DNA, 13 bp, Artificial Sequence
  Oligonucleotide for detection of SNP TSC0013193
aatccataaatca

SEQ ID NO: 45191 - DNA, 13 bp, Artificial Sequence
  Oligonucleotide for detection of SNP TSC0013193
tgatttgtggatt

SEQ ID NO: 45192 - DNA, 13 bp, Artificial Sequence
  Oligonucleotide for detection of SNP TSC0013193
aatccacaaatca

SEQ ID NO: 45193 - DNA, 13 bp, Artificial Sequence
  Oligonucleotide for detection of SNP TSC0013193
tgattcgtggatt

SEQ ID NO: 45194 - DNA, 13 bp, Artificial Sequence
  Oligonucleotide for detection of SNP TSC0013193
aatccacgaatca

SEQ ID NO: 45195 - DNA, 13 bp, Artificial Sequence
  Oligonucleotide for detection of SNP TSC0013193
aatttatgaatta

SEQ ID NO: 45196 - DNA, 13 bp, Artificial Sequence
  Oligonucleotide for detection of SNP TSC0013193
taattcataaatt

SEQ ID NO: 45197 - DNA, 13 bp, Artificial Sequence
  Oligonucleotide for detection of SNP TSC0013193
aatttacgaatta

SEQ ID NO: 45198 - DNA, 13 bp, Artificial Sequence
  Oligonucleotide for detection of SNP TSC0013193
taattcgtaaatt

SEQ ID NO: 45199 - DNA, 13 bp, Artificial Sequence
  Oligonucleotide for detection of SNP TSC0013194
ggaaaaattaaag

SEQ ID NO: 45200 - DNA, 13 bp, Artificial Sequence
  Oligonucleotide for detection of SNP TSC0013194
ctttaatttttcc

SEQ ID NO: 45201 - DNA, 13 bp, Artificial Sequence
  Oligonucleotide for detection of SNP TSC0013194
ggaaaatttaaag

SEQ ID NO: 45202 - DNA, 13 bp, Artificial Sequence
  Oligonucleotide for detection of SNP TSC0013194
ctttaaattttcc

SEQ ID NO: 45203 - DNA, 13 bp, Artificial Sequence
  Oligonucleotide for detection of SNP TSC0013194
ttttaatttttty

SEQ ID NO: 45204 - DNA, 13 bp, Artificial Sequence
  Oligonucleotide for detection of SNP TSC0013194
raaaaaattaaaa

SEQ ID NO: 45205 - DNA, 13 bp, Artificial Sequence
  Oligonucleotide for detection of SNP TSC0013194
ttttaaattttty

SEQ ID NO: 45206 - DNA, 13 bp, Artificial Sequence
  Oligonucleotide for detection of SNP TSC0013194
raaaaatttaaaa

SEQ ID NO: 45207 - DNA, 13 bp, Artificial Sequence
  Oligonucleotide for detection of SNP TSC0013196
gttaatatttagg

SEQ ID NO: 45208 - DNA, 13 bp, Artificial Sequence
  Oligonucleotide for detection of SNP TSC0013196
cctaaatattaac

SEQ ID NO: 45209 - DNA, 13 bp, Artificial Sequence
  Oligonucleotide for detection of SNP TSC0013196
gttaatttttagg

SEQ ID NO: 45210 - DNA, 13 bp, Artificial Sequence
  Oligonucleotide for detection of SNP TSC0013196
cctaaaaattaac

SEQ ID NO: 45211 - DNA, 13 bp, Artificial Sequence
  Oligonucleotide for detection of SNP TSC0013196
tttaggtattagy

SEQ ID NO: 45212 - DNA, 13 bp, Artificial Sequence
  Oligonucleotide for detection of SNP TSC0013196
rctaatacctaaa

SEQ ID NO: 45213 - DNA, 13 bp, Artificial Sequence
  Oligonucleotide for detection of SNP TSC0013196
tttaggaattagy

SEQ ID NO: 45214 - DNA, 13 bp, Artificial Sequence
  Oligonucleotide for detection of SNP TSC0013196
rctaattcctaaa

SEQ ID NO: 45215 - DNA, 13 bp, Artificial Sequence
  Oligonucleotide for detection of SNP TSC0013197
tttaggtgtgtag

SEQ ID NO: 45216 - DNA, 13 bp, Artificial Sequence
  Oligonucleotide for detection of SNP TSC0013197
ctacacacctaaa

SEQ ID NO: 45217 - DNA, 13 bp, Artificial Sequence
  Oligonucleotide for detection of SNP TSC0013197
tttaggcgtgtag

SEQ ID NO: 45218 - DNA, 13 bp, Artificial Sequence
  Oligonucleotide for detection of SNP TSC0013197
ctacacgcctaaa

SEQ ID NO: 45219 - DNA, 13 bp, Artificial Sequence
  Oligonucleotide for detection of SNP TSC0013197
ttatacgtttagg

SEQ ID NO: 45220 - DNA, 13 bp, Artificial Sequence
  Oligonucleotide for detection of SNP TSC0013197
cctaaacgtataa

SEQ ID NO: 45221 - DNA, 13 bp, Artificial Sequence
  Oligonucleotide for detection of SNP TSC0013198
gtaataaggtata

SEQ ID NO: 45222 - DNA, 13 bp, Artificial Sequence
  Oligonucleotide for detection of SNP TSC0013198
tataccttattac

SEQ ID NO: 45223 - DNA, 13 bp, Artificial Sequence
  Oligonucleotide for detection of SNP TSC0013198
gtaatagggtata

SEQ ID NO: 45224 - DNA, 13 bp, Artificial Sequence
  Oligonucleotide for detection of SNP TSC0013198
tataccctattac

SEQ ID NO: 45225 - DNA, 13 bp, Artificial Sequence
  Oligonucleotide for detection of SNP TSC0013199
tagtaagataaag

SEQ ID NO: 45226 - DNA, 13 bp, Artificial Sequence
  Oligonucleotide for detection of SNP TSC0013199
ctttatcttacta

SEQ ID NO: 45227 - DNA, 13 bp, Artificial Sequence
  Oligonucleotide for detection of SNP TSC0013199
tagtaaaataaag

SEQ ID NO: 45228 - DNA, 13 bp, Artificial Sequence
  Oligonucleotide for detection of SNP TSC0013199
ctttattttacta

SEQ ID NO: 45229 - DNA, 13 bp, Artificial Sequence
  Oligonucleotide for detection of SNP TSC0013200
tataatgtttatt

SEQ ID NO: 45230 - DNA, 13 bp, Artificial Sequence
  Oligonucleotide for detection of SNP TSC0013200
aataaacattata

SEQ ID NO: 45231 - DNA, 13 bp, Artificial Sequence
  Oligonucleotide for detection of SNP TSC0013200
tataatttttatt

SEQ ID NO: 45232 - DNA, 13 bp, Artificial Sequence
  Oligonucleotide for detection of SNP TSC0013200
aataaaaattata

SEQ ID NO: 45233 - DNA, 13 bp, Artificial Sequence
  Oligonucleotide for detection of SNP TSC0013200
aataggtattata

SEQ ID NO: 45234 - DNA, 13 bp, Artificial Sequence
  Oligonucleotide for detection of SNP TSC0013200
tataatacctatt

SEQ ID NO: 45235 - DNA, 13 bp, Artificial Sequence
  Oligonucleotide for detection of SNP TSC0013200
aataggaattata

SEQ ID NO: 45236 - DNA, 13 bp, Artificial Sequence
  Oligonucleotide for detection of SNP TSC0013200
tataattcctatt

SEQ ID NO: 45237 - DNA, 13 bp, Artificial Sequence
  Oligonucleotide for detection of SNP TSC0013201
aaaggttgtgaag

SEQ ID NO: 45238 - DNA, 13 bp, Artificial Sequence
  Oligonucleotide for detection of SNP TSC0013201
cttcacaaccttt

SEQ ID NO: 45239 - DNA, 13 bp, Artificial Sequence
  Oligonucleotide for detection of SNP TSC0013201
aaaggtagtgaag

SEQ ID NO: 45240 - DNA, 13 bp, Artificial Sequence
  Oligonucleotide for detection of SNP TSC0013201
cttcactaccttt

SEQ ID NO: 45241 - DNA, 13 bp, Artificial Sequence
  Oligonucleotide for detection of SNP TSC0013204
tgtgtgagttatg

SEQ ID NO: 45242 - DNA, 13 bp, Artificial Sequence
  Oligonucleotide for detection of SNP TSC0013204
cataactcacaca

SEQ ID NO: 45243 - DNA, 13 bp, Artificial Sequence
  Oligonucleotide for detection of SNP TSC0013204
tgtgtgtgttatg

SEQ ID NO: 45244 - DNA, 13 bp, Artificial Sequence
  Oligonucleotide for detection of SNP TSC0013204
cataacacacaca

SEQ ID NO: 45245 - DNA, 13 bp, Artificial Sequence
  Oligonucleotide for detection of SNP TSC0013204
tatgatttatata

SEQ ID NO: 45246 - DNA, 13 bp, Artificial Sequence
  Oligonucleotide for detection of SNP TSC0013204
tatataaatcata

SEQ ID NO: 45247 - DNA, 13 bp, Artificial Sequence
  Oligonucleotide for detection of SNP TSC0013204
tatgatatatata

SEQ ID NO: 45248 - DNA, 13 bp, Artificial Sequence
  Oligonucleotide for detection of SNP TSC0013204
tatatatatcata

SEQ ID NO: 45249 - DNA, 13 bp, Artificial Sequence
  Oligonucleotide for detection of SNP TSC0013205
gtttggagtttty

SEQ ID NO: 45250 - DNA, 13 bp, Artificial Sequence
  Oligonucleotide for detection of SNP TSC0013205
raaaactccaaac

SEQ ID NO: 45251 - DNA, 13 bp, Artificial Sequence
  Oligonucleotide for detection of SNP TSC0013205
gtttggggtttty

SEQ ID NO: 45252 - DNA, 13 bp, Artificial Sequence
  Oligonucleotide for detection of SNP TSC0013205
raaaaccccaaac

SEQ ID NO: 45253 - DNA, 13 bp, Artificial Sequence
  Oligonucleotide for detection of SNP TSC0013206
ttggttgttgttt

SEQ ID NO: 45254 - DNA, 13 bp, Artificial Sequence
  Oligonucleotide for detection of SNP TSC0013206
aaacaacaaccaa

SEQ ID NO: 45255 - DNA, 13 bp, Artificial Sequence
  Oligonucleotide for detection of SNP TSC0013206
ttggttattgttt

SEQ ID NO: 45256 - DNA, 13 bp, Artificial Sequence
  Oligonucleotide for detection of SNP TSC0013206
aaacaataaccaa

SEQ ID NO: 45257 - DNA, 13 bp, Artificial Sequence
  Oligonucleotide for detection of SNP TSC0013208
agattagtttggt

SEQ ID NO: 45258 - DNA, 13 bp, Artificial Sequence
  Oligonucleotide for detection of SNP TSC0013208
accaaactaatct

SEQ ID NO: 45259 - DNA, 13 bp, Artificial Sequence
  Oligonucleotide for detection of SNP TSC0013208
agattaatttggt

SEQ ID NO: 45260 - DNA, 13 bp, Artificial Sequence
  Oligonucleotide for detection of SNP TSC0013208
accaaattaatct

SEQ ID NO: 45261 - DNA, 13 bp, Artificial Sequence
  Oligonucleotide for detection of SNP TSC0013209
aaatatgttagat

SEQ ID NO: 45262 - DNA, 13 bp, Artificial Sequence
  Oligonucleotide for detection of SNP TSC0013209
atctaacatattt

SEQ ID NO: 45263 - DNA, 13 bp, Artificial Sequence
  Oligonucleotide for detection of SNP TSC0013209
aaatatattagat

SEQ ID NO: 45264 - DNA, 13 bp, Artificial Sequence
  Oligonucleotide for detection of SNP TSC0013209
atctaatatattt

SEQ ID NO: 45265 - DNA, 13 bp, Artificial Sequence
  Oligonucleotide for detection of SNP TSC0013211
tagtttgtttgty

SEQ ID NO: 45266 - DNA, 13 bp, Artificial Sequence
  Oligonucleotide for detection of SNP TSC0013211
racaaacaaacta

SEQ ID NO: 45267 - DNA, 13 bp, Artificial Sequence
  Oligonucleotide for detection of SNP TSC0013211
tagtttttttgty

SEQ ID NO: 45268 - DNA, 13 bp, Artificial Sequence
  Oligonucleotide for detection of SNP TSC0013211
racaaaaaaacta

SEQ ID NO: 45269 - DNA, 13 bp, Artificial Sequence
  Oligonucleotide for detection of SNP TSC0013211
gataggtagattg

SEQ ID NO: 45270 - DNA, 13 bp, Artificial Sequence
  Oligonucleotide for detection of SNP TSC0013211
caatctacctatc

SEQ ID NO: 45271 - DNA, 13 bp, Artificial Sequence
  Oligonucleotide for detection of SNP TSC0013211
gataggaagattg

SEQ ID NO: 45272 - DNA, 13 bp, Artificial Sequence
  Oligonucleotide for detection of SNP TSC0013211
caatcttcctatc

SEQ ID NO: 45273 - DNA, 13 bp, Artificial Sequence
  Oligonucleotide for detection of SNP TSC0013212
gggggggaaatag

SEQ ID NO: 45274 - DNA, 13 bp, Artificial Sequence
  Oligonucleotide for detection of SNP TSC0013212
ctatttccccccc

SEQ ID NO: 45275 - DNA, 13 bp, Artificial Sequence
  Oligonucleotide for detection of SNP TSC0013212
ggggggaaaatag

SEQ ID NO: 45276 - DNA, 13 bp, Artificial Sequence
  Oligonucleotide for detection of SNP TSC0013212
ctattttcccccc

SEQ ID NO: 45277 - DNA, 13 bp, Artificial Sequence
  Oligonucleotide for detection of SNP TSC0013213
tatagggatttty

SEQ ID NO: 45278 - DNA, 13 bp, Artificial Sequence
  Oligonucleotide for detection of SNP TSC0013213
raaaatccctata

SEQ ID NO: 45279 - DNA, 13 bp, Artificial Sequence
  Oligonucleotide for detection of SNP TSC0013213
tataggaatttty

SEQ ID NO: 45280 - DNA, 13 bp, Artificial Sequence
  Oligonucleotide for detection of SNP TSC0013213
raaaattcctata

SEQ ID NO: 45281 - DNA, 13 bp, Artificial Sequence
  Oligonucleotide for detection of SNP TSC0013214
gtgttttgtgtat

SEQ ID NO: 45282 - DNA, 13 bp, Artificial Sequence
  Oligonucleotide for detection of SNP TSC0013214
atacacaaaacac

SEQ ID NO: 45283 - DNA, 13 bp, Artificial Sequence
  Oligonucleotide for detection of SNP TSC0013214
gtgtttcgtgtat

SEQ ID NO: 45284 - DNA, 13 bp, Artificial Sequence
  Oligonucleotide for detection of SNP TSC0013214
atacacgaaacac

SEQ ID NO: 45285 - DNA, 13 bp, Artificial Sequence
  Oligonucleotide for detection of SNP TSC0013214
atgtatgggatay

SEQ ID NO: 45286 - DNA, 13 bp, Artificial Sequence
  Oligonucleotide for detection of SNP TSC0013214
rtatcccatacat

SEQ ID NO: 45287 - DNA, 13 bp, Artificial Sequence
  Oligonucleotide for detection of SNP TSC0013214
atgtataggatay

SEQ ID NO: 45288 - DNA, 13 bp, Artificial Sequence
  Oligonucleotide for detection of SNP TSC0013214
rtatcctatacat

SEQ ID NO: 45289 - DNA, 13 bp, Artificial Sequence
  Oligonucleotide for detection of SNP TSC0013214
atgtacgggatay

SEQ ID NO: 45290 - DNA, 13 bp, Artificial Sequence
  Oligonucleotide for detection of SNP TSC0013214
rtatcccgtacat

SEQ ID NO: 45291 - DNA, 13 bp, Artificial Sequence
  Oligonucleotide for detection of SNP TSC0013215
ggtttgagtaaaa

SEQ ID NO: 45292 - DNA, 13 bp, Artificial Sequence
  Oligonucleotide for detection of SNP TSC0013215
ttttactcaaacc

SEQ ID NO: 45293 - DNA, 13 bp, Artificial Sequence
  Oligonucleotide for detection of SNP TSC0013215
ggtttgggtaaaa

SEQ ID NO: 45294 - DNA, 13 bp, Artificial Sequence
  Oligonucleotide for detection of SNP TSC0013215
ttttacccaaacc

SEQ ID NO: 45295 - DNA, 13 bp, Artificial Sequence
  Oligonucleotide for detection of SNP TSC0013216
ttatagataattt

SEQ ID NO: 45296 - DNA, 13 bp, Artificial Sequence
  Oligonucleotide for detection of SNP TSC0013216
aaattatctataa

SEQ ID NO: 45297 - DNA, 13 bp, Artificial Sequence
  Oligonucleotide for detection of SNP TSC0013216
ttataggtaattt

SEQ ID NO: 45298 - DNA, 13 bp, Artificial Sequence
  Oligonucleotide for detection of SNP TSC0013216
aaattacctataa

SEQ ID NO: 45299 - DNA, 13 bp, Artificial Sequence
  Oligonucleotide for detection of SNP TSC0013217
agagatatttttg

SEQ ID NO: 45300 - DNA, 13 bp, Artificial Sequence
  Oligonucleotide for detection of SNP TSC0013217
caaaaatatctct

SEQ ID NO: 45301 - DNA, 13 bp, Artificial Sequence
  Oligonucleotide for detection of SNP TSC0013217
agagatgtttttg

SEQ ID NO: 45302 - DNA, 13 bp, Artificial Sequence
  Oligonucleotide for detection of SNP TSC0013217
caaaaacatctct

SEQ ID NO: 45303 - DNA, 13 bp, Artificial Sequence
  Oligonucleotide for detection of SNP TSC0013217
agagacgtttttg

SEQ ID NO: 45304 - DNA, 13 bp, Artificial Sequence
  Oligonucleotide for detection of SNP TSC0013217
caaaaacgtctct

SEQ ID NO: 45305 - DNA, 13 bp, Artificial Sequence
  Oligonucleotide for detection of SNP TSC0013217
taggggtgttttt

SEQ ID NO: 45306 - DNA, 13 bp, Artificial Sequence
  Oligonucleotide for detection of SNP TSC0013217
aaaaacaccccta

SEQ ID NO: 45307 - DNA, 13 bp, Artificial Sequence
  Oligonucleotide for detection of SNP TSC0013217
taggggcgttttt

SEQ ID NO: 45308 - DNA, 13 bp, Artificial Sequence
  Oligonucleotide for detection of SNP TSC0013217
aaaaacgccccta

SEQ ID NO: 45309 - DNA, 13 bp, Artificial Sequence
  Oligonucleotide for detection of SNP TSC0013218
ggttaattggaty

SEQ ID NO: 45310 - DNA, 13 bp, Artificial Sequence
  Oligonucleotide for detection of SNP TSC0013218
ratccaattaacc

SEQ ID NO: 45311 - DNA, 13 bp, Artificial Sequence
  Oligonucleotide for detection of SNP TSC0013218
ggttaagtggaty

SEQ ID NO: 45312 - DNA, 13 bp, Artificial Sequence
  Oligonucleotide for detection of SNP TSC0013218
ratccacttaacc

SEQ ID NO: 45313 - DNA, 13 bp, Artificial Sequence
  Oligonucleotide for detection of SNP TSC0013218
ggtttagttagty

SEQ ID NO: 45314 - DNA, 13 bp, Artificial Sequence
  Oligonucleotide for detection of SNP TSC0013218
ractaactaaacc

SEQ ID NO: 45315 - DNA, 13 bp, Artificial Sequence
  Oligonucleotide for detection of SNP TSC0013218
ggtttatttagty

SEQ ID NO: 45316 - DNA, 13 bp, Artificial Sequence
  Oligonucleotide for detection of SNP TSC0013218
ractaaataaacc

SEQ ID NO: 45317 - DNA, 13 bp, Artificial Sequence
  Oligonucleotide for detection of SNP TSC0013219
tgaagtatagata

SEQ ID NO: 45318 - DNA, 13 bp, Artificial Sequence
  Oligonucleotide for detection of SNP TSC0013219
tatctatacttca

SEQ ID NO: 45319 - DNA, 13 bp, Artificial Sequence
  Oligonucleotide for detection of SNP TSC0013219
tgaagtgtagata

SEQ ID NO: 45320 - DNA, 13 bp, Artificial Sequence
  Oligonucleotide for detection of SNP TSC0013219
tatctacacttca

SEQ ID NO: 45321 - DNA, 13 bp, Artificial Sequence
  Oligonucleotide for detection of SNP TSC0013220
gttttttgtagta

SEQ ID NO: 45322 - DNA, 13 bp, Artificial Sequence
  Oligonucleotide for detection of SNP TSC0013220
tactacaaaaaac

SEQ ID NO: 45323 - DNA, 13 bp, Artificial Sequence
  Oligonucleotide for detection of SNP TSC0013220
gtttttcgtagta

SEQ ID NO: 45324 - DNA, 13 bp, Artificial Sequence
  Oligonucleotide for detection of SNP TSC0013220
tactacgaaaaac

SEQ ID NO: 45325 - DNA, 13 bp, Artificial Sequence
  Oligonucleotide for detection of SNP TSC0013220
tgttgtgaaagay

SEQ ID NO: 45326 - DNA, 13 bp, Artificial Sequence
  Oligonucleotide for detection of SNP TSC0013220
rtctttcacaaca

SEQ ID NO: 45327 - DNA, 13 bp, Artificial Sequence
  Oligonucleotide for detection of SNP TSC0013220
tgttgtaaaagay

SEQ ID NO: 45328 - DNA, 13 bp, Artificial Sequence
  Oligonucleotide for detection of SNP TSC0013220
rtcttttacaaca

SEQ ID NO: 45329 - DNA, 13 bp, Artificial Sequence
  Oligonucleotide for detection of SNP TSC0013220
tgttgcgaaagay

SEQ ID NO: 45330 - DNA, 13 bp, Artificial Sequence
  Oligonucleotide for detection of SNP TSC0013220
rtctttcgcaaca

SEQ ID NO: 45331 - DNA, 13 bp, Artificial Sequence
  Oligonucleotide for detection of SNP TSC0013221
aattaggggtgtt

SEQ ID NO: 45332 - DNA, 13 bp, Artificial Sequence
  Oligonucleotide for detection of SNP TSC0013221
aacacccctaatt

SEQ ID NO: 45333 - DNA, 13 bp, Artificial Sequence
  Oligonucleotide for detection of SNP TSC0013221
aattagaggtgtt

SEQ ID NO: 45334 - DNA, 13 bp, Artificial Sequence
  Oligonucleotide for detection of SNP TSC0013221
aacacctctaatt

SEQ ID NO: 45335 - DNA, 13 bp, Artificial Sequence
  Oligonucleotide for detection of SNP TSC0013222
tttttttgattty

SEQ ID NO: 45336 - DNA, 13 bp, Artificial Sequence
  Oligonucleotide for detection of SNP TSC0013222
raaatcaaaaaaa

SEQ ID NO: 45337 - DNA, 13 bp, Artificial Sequence
  Oligonucleotide for detection of SNP TSC0013222
ttttttcgattty

SEQ ID NO: 45338 - DNA, 13 bp, Artificial Sequence
  Oligonucleotide for detection of SNP TSC0013222
raaatcgaaaaaa

SEQ ID NO: 45339 - DNA, 13 bp, Artificial Sequence
  Oligonucleotide for detection of SNP TSC0013222
ggaattggaaaag

SEQ ID NO: 45340 - DNA, 13 bp, Artificial Sequence
  Oligonucleotide for detection of SNP TSC0013222
cttttccaattcc

SEQ ID NO: 45341 - DNA, 13 bp, Artificial Sequence
  Oligonucleotide for detection of SNP TSC0013222
ggaattagaaaag

SEQ ID NO: 45342 - DNA, 13 bp, Artificial Sequence
  Oligonucleotide for detection of SNP TSC0013222
cttttctaattcc

SEQ ID NO: 45343 - DNA, 13 bp, Artificial Sequence
  Oligonucleotide for detection of SNP TSC0013222
ggaatcggaaaag

SEQ ID NO: 45344 - DNA, 13 bp, Artificial Sequence
  Oligonucleotide for detection of SNP TSC0013222
cttttccgattcc

SEQ ID NO: 45345 - DNA, 13 bp, Artificial Sequence
  Oligonucleotide for detection of SNP TSC0013223
ataggtattttag

SEQ ID NO: 45346 - DNA, 13 bp, Artificial Sequence
  Oligonucleotide for detection of SNP TSC0013223
ctaaaatacctat

SEQ ID NO: 45347 - DNA, 13 bp, Artificial Sequence
  Oligonucleotide for detection of SNP TSC0013223
ataggtgttttag

SEQ ID NO: 45348 - DNA, 13 bp, Artificial Sequence
  Oligonucleotide for detection of SNP TSC0013223
ctaaaacacctat

SEQ ID NO: 45349 - DNA, 13 bp, Artificial Sequence
  Oligonucleotide for detection of SNP TSC0013226
aaggtttggtttt

SEQ ID NO: 45350 - DNA, 13 bp, Artificial Sequence
  Oligonucleotide for detection of SNP TSC0013226
aaaaccaaacctt

SEQ ID NO: 45351 - DNA, 13 bp, Artificial Sequence
  Oligonucleotide for detection of SNP TSC0013226
aaggttgggtttt

SEQ ID NO: 45352 - DNA, 13 bp, Artificial Sequence
  Oligonucleotide for detection of SNP TSC0013226
aaaacccaacctt

SEQ ID NO: 45353 - DNA, 13 bp, Artificial Sequence
  Oligonucleotide for detection of SNP TSC0013226
aaggttcggtttt

SEQ ID NO: 45354 - DNA, 13 bp, Artificial Sequence
  Oligonucleotide for detection of SNP TSC0013226
aaaaccgaacctt

SEQ ID NO: 45355 - DNA, 13 bp, Artificial Sequence
  Oligonucleotide for detection of SNP TSC0013226
aaggtcgggtttt

SEQ ID NO: 45356 - DNA, 13 bp, Artificial Sequence
  Oligonucleotide for detection of SNP TSC0013226
aaaacccgacctt

SEQ ID NO: 45357 - DNA, 13 bp, Artificial Sequence
  Oligonucleotide for detection of SNP TSC0013226
aggattgggtttt

SEQ ID NO: 45358 - DNA, 13 bp, Artificial Sequence
  Oligonucleotide for detection of SNP TSC0013226
aaaacccaatcct

SEQ ID NO: 45359 - DNA, 13 bp, Artificial Sequence
  Oligonucleotide for detection of SNP TSC0013226
aggatttggtttt

SEQ ID NO: 45360 - DNA, 13 bp, Artificial Sequence
  Oligonucleotide for detection of SNP TSC0013226
aaaaccaaatcct

SEQ ID NO: 45361 - DNA, 13 bp, Artificial Sequence
  Oligonucleotide for detection of SNP TSC0013226
aggatcgggtttt

SEQ ID NO: 45362 - DNA, 13 bp, Artificial Sequence
  Oligonucleotide for detection of SNP TSC0013226
aaaacccgatcct

SEQ ID NO: 45363 - DNA, 13 bp, Artificial Sequence
  Oligonucleotide for detection of SNP TSC0013226
aggattcggtttt

SEQ ID NO: 45364 - DNA, 13 bp, Artificial Sequence
  Oligonucleotide for detection of SNP TSC0013226
aaaaccgaatcct

SEQ ID NO: 45365 - DNA, 13 bp, Artificial Sequence
  Oligonucleotide for detection of SNP TSC0013227
ggtttggttttty

SEQ ID NO: 45366 - DNA, 13 bp, Artificial Sequence
  Oligonucleotide for detection of SNP TSC0013227
raaaaaccaaacc

SEQ ID NO: 45367 - DNA, 13 bp, Artificial Sequence
  Oligonucleotide for detection of SNP TSC0013227
ggtttgtttttty

SEQ ID NO: 45368 - DNA, 13 bp, Artificial Sequence
  Oligonucleotide for detection of SNP TSC0013227
raaaaaacaaacc

SEQ ID NO: 45369 - DNA, 13 bp, Artificial Sequence
  Oligonucleotide for detection of SNP TSC0013227
ggttcggttttty

SEQ ID NO: 45370 - DNA, 13 bp, Artificial Sequence
  Oligonucleotide for detection of SNP TSC0013227
raaaaaccgaacc

SEQ ID NO: 45371 - DNA, 13 bp, Artificial Sequence
  Oligonucleotide for detection of SNP TSC0013227
ggttcgtttttty

SEQ ID NO: 45372 - DNA, 13 bp, Artificial Sequence
  Oligonucleotide for detection of SNP TSC0013227
raaaaaacgaacc

SEQ ID NO: 45373 - DNA, 13 bp, Artificial Sequence
  Oligonucleotide for detection of SNP TSC0013227
gaaggattgggty

SEQ ID NO: 45374 - DNA, 13 bp, Artificial Sequence
  Oligonucleotide for detection of SNP TSC0013227
racccaatccttc

SEQ ID NO: 45375 - DNA, 13 bp, Artificial Sequence
  Oligonucleotide for detection of SNP TSC0013227
gaaggaatgggty

SEQ ID NO: 45376 - DNA, 13 bp, Artificial Sequence
  Oligonucleotide for detection of SNP TSC0013227
racccattccttc

SEQ ID NO: 45377 - DNA, 13 bp, Artificial Sequence
  Oligonucleotide for detection of SNP TSC0013227
gaaggatcgggty

SEQ ID NO: 45378 - DNA, 13 bp, Artificial Sequence
  Oligonucleotide for detection of SNP TSC0013227
racccgatccttc

SEQ ID NO: 45379 - DNA, 13 bp, Artificial Sequence
  Oligonucleotide for detection of SNP TSC0013227
gaaggaacgggty

SEQ ID NO: 45380 - DNA, 13 bp, Artificial Sequence
  Oligonucleotide for detection of SNP TSC0013227
racccgttccttc

SEQ ID NO: 45381 - DNA, 13 bp, Artificial Sequence
  Oligonucleotide for detection of SNP TSC0013228
gaagttagggtty

SEQ ID NO: 45382 - DNA, 13 bp, Artificial Sequence
  Oligonucleotide for detection of SNP TSC0013228
raaccctaacttc

SEQ ID NO: 45383 - DNA, 13 bp, Artificial Sequence
  Oligonucleotide for detection of SNP TSC0013228
gaagttggggtty

SEQ ID NO: 45384 - DNA, 13 bp, Artificial Sequence
  Oligonucleotide for detection of SNP TSC0013228
raaccccaacttc

SEQ ID NO: 45385 - DNA, 13 bp, Artificial Sequence
  Oligonucleotide for detection of SNP TSC0013228
gaagtcggggtty

SEQ ID NO: 45386 - DNA, 13 bp, Artificial Sequence
  Oligonucleotide for detection of SNP TSC0013228
raaccccgacttc

SEQ ID NO: 45387 - DNA, 13 bp, Artificial Sequence
  Oligonucleotide for detection of SNP TSC0013228
gggttttggttty

SEQ ID NO: 45388 - DNA, 13 bp, Artificial Sequence
  Oligonucleotide for detection of SNP TSC0013228
raaaccaaaaccc

SEQ ID NO: 45389 - DNA, 13 bp, Artificial Sequence
  Oligonucleotide for detection of SNP TSC0013228
gggtttcggttty

SEQ ID NO: 45390 - DNA, 13 bp, Artificial Sequence
  Oligonucleotide for detection of SNP TSC0013228
raaaccgaaaccc

SEQ ID NO: 45391 - DNA, 13 bp, Artificial Sequence
  Oligonucleotide for detection of SNP TSC0013231
ttagatatgttgg

SEQ ID NO: 45392 - DNA, 13 bp, Artificial Sequence
  Oligonucleotide for detection of SNP TSC0013231
ccaacatatctaa

SEQ ID NO: 45393 - DNA, 13 bp, Artificial Sequence
  Oligonucleotide for detection of SNP TSC0013231
ttagatgtgttgg

SEQ ID NO: 45394 - DNA, 13 bp, Artificial Sequence
  Oligonucleotide for detection of SNP TSC0013231
ccaacacatctaa

SEQ ID NO: 45395 - DNA, 13 bp, Artificial Sequence
  Oligonucleotide for detection of SNP TSC0013231
ttagatatgtcgg

SEQ ID NO: 45396 - DNA, 13 bp, Artificial Sequence
  Oligonucleotide for detection of SNP TSC0013231
ccgacatatctaa

SEQ ID NO: 45397 - DNA, 13 bp, Artificial Sequence
  Oligonucleotide for detection of SNP TSC0013231
ttagacgtgttgg

SEQ ID NO: 45398 - DNA, 13 bp, Artificial Sequence
  Oligonucleotide for detection of SNP TSC0013231
ccaacacgtctaa

SEQ ID NO: 45399 - DNA, 13 bp, Artificial Sequence
  Oligonucleotide for detection of SNP TSC0013231
ttagatgtgtcgg

SEQ ID NO: 45400 - DNA, 13 bp, Artificial Sequence
  Oligonucleotide for detection of SNP TSC0013231
ccgacacatctaa

SEQ ID NO: 45401 - DNA, 13 bp, Artificial Sequence
  Oligonucleotide for detection of SNP TSC0013231
ttagacgtgtcgg

SEQ ID NO: 45402 - DNA, 13 bp, Artificial Sequence
  Oligonucleotide for detection of SNP TSC0013231
ccgacacgtctaa

SEQ ID NO: 45403 - DNA, 13 bp, Artificial Sequence
  Oligonucleotide for detection of SNP TSC0013231
ttggtatgtttga

SEQ ID NO: 45404 - DNA, 13 bp, Artificial Sequence
  Oligonucleotide for detection of SNP TSC0013231
tcaaacataccaa

SEQ ID NO: 45405 - DNA, 13 bp, Artificial Sequence
  Oligonucleotide for detection of SNP TSC0013231
tcggtatgtttga

SEQ ID NO: 45406 - DNA, 13 bp, Artificial Sequence
  Oligonucleotide for detection of SNP TSC0013231
tcaaacataccga

SEQ ID NO: 45407 - DNA, 13 bp, Artificial Sequence
  Oligonucleotide for detection of SNP TSC0013231
ttggtacgtttga

SEQ ID NO: 45408 - DNA, 13 bp, Artificial Sequence
  Oligonucleotide for detection of SNP TSC0013231
tcaaacgtaccaa

SEQ ID NO: 45409 - DNA, 13 bp, Artificial Sequence
  Oligonucleotide for detection of SNP TSC0013231
tcggtacgtttga

SEQ ID NO: 45410 - DNA, 13 bp, Artificial Sequence
  Oligonucleotide for detection of SNP TSC0013231
tcaaacgtaccga

SEQ ID NO: 45411 - DNA, 13 bp, Artificial Sequence
  Oligonucleotide for detection of SNP TSC0013232
agggtaagggaag

SEQ ID NO: 45412 - DNA, 13 bp, Artificial Sequence
  Oligonucleotide for detection of SNP TSC0013232
cttcccttaccct

SEQ ID NO: 45413 - DNA, 13 bp, Artificial Sequence
  Oligonucleotide for detection of SNP TSC0013232
agggtaggggaag

SEQ ID NO: 45414 - DNA, 13 bp, Artificial Sequence
  Oligonucleotide for detection of SNP TSC0013232
cttcccctaccct

SEQ ID NO: 45415 - DNA, 13 bp, Artificial Sequence
  Oligonucleotide for detection of SNP TSC0013235
agtataatttgtt

SEQ ID NO: 45416 - DNA, 13 bp, Artificial Sequence
  Oligonucleotide for detection of SNP TSC0013235
aacaaattatact

SEQ ID NO: 45417 - DNA, 13 bp, Artificial Sequence
  Oligonucleotide for detection of SNP TSC0013235
agtatagtttgtt

SEQ ID NO: 45418 - DNA, 13 bp, Artificial Sequence
  Oligonucleotide for detection of SNP TSC0013235
aacaaactatact

SEQ ID NO: 45419 - DNA, 13 bp, Artificial Sequence
  Oligonucleotide for detection of SNP TSC0013236
attaggaggagay

SEQ ID NO: 45420 - DNA, 13 bp, Artificial Sequence
  Oligonucleotide for detection of SNP TSC0013236
rtctcctcctaat

SEQ ID NO: 45421 - DNA, 13 bp, Artificial Sequence
  Oligonucleotide for detection of SNP TSC0013236
attagggggagay

SEQ ID NO: 45422 - DNA, 13 bp, Artificial Sequence
  Oligonucleotide for detection of SNP TSC0013236
rtctccccctaat

SEQ ID NO: 45423 - DNA, 13 bp, Artificial Sequence
  Oligonucleotide for detection of SNP TSC0013237
attgtgattttga

SEQ ID NO: 45424 - DNA, 13 bp, Artificial Sequence
  Oligonucleotide for detection of SNP TSC0013237
tcaaaatcacaat

SEQ ID NO: 45425 - DNA, 13 bp, Artificial Sequence
  Oligonucleotide for detection of SNP TSC0013237
attgtggttttga

SEQ ID NO: 45426 - DNA, 13 bp, Artificial Sequence
  Oligonucleotide for detection of SNP TSC0013237
tcaaaaccacaat

SEQ ID NO: 45427 - DNA, 13 bp, Artificial Sequence
  Oligonucleotide for detection of SNP TSC0013238
aagtgaggaattt

SEQ ID NO: 45428 - DNA, 13 bp, Artificial Sequence
  Oligonucleotide for detection of SNP TSC0013238
aaattcctcactt

SEQ ID NO: 45429 - DNA, 13 bp, Artificial Sequence
  Oligonucleotide for detection of SNP TSC0013238
aagtgaagaattt

SEQ ID NO: 45430 - DNA, 13 bp, Artificial Sequence
  Oligonucleotide for detection of SNP TSC0013238
aaattcttcactt

SEQ ID NO: 45431 - DNA, 13 bp, Artificial Sequence
  Oligonucleotide for detection of SNP TSC0013241
ttatggaatttaa

SEQ ID NO: 45432 - DNA, 13 bp, Artificial Sequence
  Oligonucleotide for detection of SNP TSC0013241
ttaaattccataa

SEQ ID NO: 45433 - DNA, 13 bp, Artificial Sequence
  Oligonucleotide for detection of SNP TSC0013241
ttatggtatttaa

SEQ ID NO: 45434 - DNA, 13 bp, Artificial Sequence
  Oligonucleotide for detection of SNP TSC0013241
ttaaataccataa

SEQ ID NO: 45435 - DNA, 13 bp, Artificial Sequence
  Oligonucleotide for detection of SNP TSC0013241
ttaaattttataa

SEQ ID NO: 45436 - DNA, 13 bp, Artificial Sequence
  Oligonucleotide for detection of SNP TSC0013241
ttataaaatttaa

SEQ ID NO: 45437 - DNA, 13 bp, Artificial Sequence
  Oligonucleotide for detection of SNP TSC0013241
ttaaatgttataa

SEQ ID NO: 45438 - DNA, 13 bp, Artificial Sequence
  Oligonucleotide for detection of SNP TSC0013241
ttataacatttaa

SEQ ID NO: 45439 - DNA, 13 bp, Artificial Sequence
  Oligonucleotide for detection of SNP TSC0013242
atgtttaaggttg

SEQ ID NO: 45440 - DNA, 13 bp, Artificial Sequence
  Oligonucleotide for detection of SNP TSC0013242
caaccttaaacat

SEQ ID NO: 45441 - DNA, 13 bp, Artificial Sequence
  Oligonucleotide for detection of SNP TSC0013242
atgtttgaggttg

SEQ ID NO: 45442 - DNA, 13 bp, Artificial Sequence
  Oligonucleotide for detection of SNP TSC0013242
caacctcaaacat

SEQ ID NO: 45443 - DNA, 13 bp, Artificial Sequence
  Oligonucleotide for detection of SNP TSC0013242
atgttcgaggttg

SEQ ID NO: 45444 - DNA, 13 bp, Artificial Sequence
  Oligonucleotide for detection of SNP TSC0013242
caacctcgaacat

SEQ ID NO: 45445 - DNA, 13 bp, Artificial Sequence
  Oligonucleotide for detection of SNP TSC0013242
tagttttgaatat

SEQ ID NO: 45446 - DNA, 13 bp, Artificial Sequence
  Oligonucleotide for detection of SNP TSC0013242
atattcaaaacta

SEQ ID NO: 45447 - DNA, 13 bp, Artificial Sequence
  Oligonucleotide for detection of SNP TSC0013242
tagtttcgaatat

SEQ ID NO: 45448 - DNA, 13 bp, Artificial Sequence
  Oligonucleotide for detection of SNP TSC0013242
atattcgaaacta

SEQ ID NO: 45449 - DNA, 13 bp, Artificial Sequence
  Oligonucleotide for detection of SNP TSC0013243
attttaatattty

SEQ ID NO: 45450 - DNA, 13 bp, Artificial Sequence
  Oligonucleotide for detection of SNP TSC0013243
raaatattaaaat

SEQ ID NO: 45451 - DNA, 13 bp, Artificial Sequence
  Oligonucleotide for detection of SNP TSC0013243
attttagtattty

SEQ ID NO: 45452 - DNA, 13 bp, Artificial Sequence
  Oligonucleotide for detection of SNP TSC0013243
raaatactaaaat

SEQ ID NO: 45453 - DNA, 13 bp, Artificial Sequence
  Oligonucleotide for detection of SNP TSC0013244
aaaattaaaataa

SEQ ID NO: 45454 - DNA, 13 bp, Artificial Sequence
  Oligonucleotide for detection of SNP TSC0013244
ttattttaatttt

SEQ ID NO: 45455 - DNA, 13 bp, Artificial Sequence
  Oligonucleotide for detection of SNP TSC0013244
aaaattgaaataa

SEQ ID NO: 45456 - DNA, 13 bp, Artificial Sequence
  Oligonucleotide for detection of SNP TSC0013244
ttatttcaatttt

SEQ ID NO: 45457 - DNA, 13 bp, Artificial Sequence
  Oligonucleotide for detection of SNP TSC0013245
agaaaaaagagay

SEQ ID NO: 45458 - DNA, 13 bp, Artificial Sequence
  Oligonucleotide for detection of SNP TSC0013245
rtctcttttttct

SEQ ID NO: 45459 - DNA, 13 bp, Artificial Sequence
  Oligonucleotide for detection of SNP TSC0013245
agaaaagagagay

SEQ ID NO: 45460 - DNA, 13 bp, Artificial Sequence
  Oligonucleotide for detection of SNP TSC0013245
rtctctcttttct

SEQ ID NO: 45461 - DNA, 13 bp, Artificial Sequence
  Oligonucleotide for detection of SNP TSC0013246
tgaaattggttty

SEQ ID NO: 45462 - DNA, 13 bp, Artificial Sequence
  Oligonucleotide for detection of SNP TSC0013246
raaaccaatttca

SEQ ID NO: 45463 - DNA, 13 bp, Artificial Sequence
  Oligonucleotide for detection of SNP TSC0013246
tgaaatcggttty

SEQ ID NO: 45464 - DNA, 13 bp, Artificial Sequence
  Oligonucleotide for detection of SNP TSC0013246
raaaccgatttca

SEQ ID NO: 45465 - DNA, 13 bp, Artificial Sequence
  Oligonucleotide for detection of SNP TSC0013246
ggggttggtttta

SEQ ID NO: 45466 - DNA, 13 bp, Artificial Sequence
  Oligonucleotide for detection of SNP TSC0013246
taaaaccaacccc

SEQ ID NO: 45467 - DNA, 13 bp, Artificial Sequence
  Oligonucleotide for detection of SNP TSC0013246
ggggttagtttta

SEQ ID NO: 45468 - DNA, 13 bp, Artificial Sequence
  Oligonucleotide for detection of SNP TSC0013246
taaaactaacccc

SEQ ID NO: 45469 - DNA, 13 bp, Artificial Sequence
  Oligonucleotide for detection of SNP TSC0013246
ggggtcggtttta

SEQ ID NO: 45470 - DNA, 13 bp, Artificial Sequence
  Oligonucleotide for detection of SNP TSC0013246
taaaaccgacccc

SEQ ID NO: 45471 - DNA, 13 bp, Artificial Sequence
  Oligonucleotide for detection of SNP TSC0013247
tatatatgattty

SEQ ID NO: 45472 - DNA, 13 bp, Artificial Sequence
  Oligonucleotide for detection of SNP TSC0013247
raaatcatatata

SEQ ID NO: 45473 - DNA, 13 bp, Artificial Sequence
  Oligonucleotide for detection of SNP TSC0013247
tatatacgattty

SEQ ID NO: 45474 - DNA, 13 bp, Artificial Sequence
  Oligonucleotide for detection of SNP TSC0013247
raaatcgtatata

SEQ ID NO: 45475 - DNA, 13 bp, Artificial Sequence
  Oligonucleotide for detection of SNP TSC0013247
gaggttgtgtatg

SEQ ID NO: 45476 - DNA, 13 bp, Artificial Sequence
  Oligonucleotide for detection of SNP TSC0013247
catacacaacctc

SEQ ID NO: 45477 - DNA, 13 bp, Artificial Sequence
  Oligonucleotide for detection of SNP TSC0013247
gaggttatgtatg

SEQ ID NO: 45478 - DNA, 13 bp, Artificial Sequence
  Oligonucleotide for detection of SNP TSC0013247
catacataacctc

SEQ ID NO: 45479 - DNA, 13 bp, Artificial Sequence
  Oligonucleotide for detection of SNP TSC0013247
gaggtcgtgtatg

SEQ ID NO: 45480 - DNA, 13 bp, Artificial Sequence
  Oligonucleotide for detection of SNP TSC0013247
catacacgacctc

SEQ ID NO: 45481 - DNA, 13 bp, Artificial Sequence
  Oligonucleotide for detection of SNP TSC0013248
atttttgttttgg

SEQ ID NO: 45482 - DNA, 13 bp, Artificial Sequence
  Oligonucleotide for detection of SNP TSC0013248
ccaaaacaaaaat

SEQ ID NO: 45483 - DNA, 13 bp, Artificial Sequence
  Oligonucleotide for detection of SNP TSC0013250
ataaattaaaaga

SEQ ID NO: 45484 - DNA, 13 bp, Artificial Sequence
  Oligonucleotide for detection of SNP TSC0013250
tcttttaatttat

SEQ ID NO: 45485 - DNA, 13 bp, Artificial Sequence
  Oligonucleotide for detection of SNP TSC0013250
ataaataaaaaga

SEQ ID NO: 45486 - DNA, 13 bp, Artificial Sequence
  Oligonucleotide for detection of SNP TSC0013250
tctttttatttat

SEQ ID NO: 45487 - DNA, 13 bp, Artificial Sequence
  Oligonucleotide for detection of SNP TSC0013252
gttagaattggat

SEQ ID NO: 45488 - DNA, 13 bp, Artificial Sequence
  Oligonucleotide for detection of SNP TSC0013252
atccaattctaac

SEQ ID NO: 45489 - DNA, 13 bp, Artificial Sequence
  Oligonucleotide for detection of SNP TSC0013252
gttagagttggat

SEQ ID NO: 45490 - DNA, 13 bp, Artificial Sequence
  Oligonucleotide for detection of SNP TSC0013252
atccaactctaac

SEQ ID NO: 45491 - DNA, 13 bp, Artificial Sequence
  Oligonucleotide for detection of SNP TSC0013253
atttttattaata

SEQ ID NO: 45492 - DNA, 13 bp, Artificial Sequence
  Oligonucleotide for detection of SNP TSC0013253
tattaataaaaat

SEQ ID NO: 45493 - DNA, 13 bp, Artificial Sequence
  Oligonucleotide for detection of SNP TSC0013253
atttttgttaata

SEQ ID NO: 45494 - DNA, 13 bp, Artificial Sequence
  Oligonucleotide for detection of SNP TSC0013253
tattaacaaaaat

SEQ ID NO: 45495 - DNA, 13 bp, Artificial Sequence
  Oligonucleotide for detection of SNP TSC0013254
ttattgattgtga

SEQ ID NO: 45496 - DNA, 13 bp, Artificial Sequence
  Oligonucleotide for detection of SNP TSC0013254
tcacaatcaataa

SEQ ID NO: 45497 - DNA, 13 bp, Artificial Sequence
  Oligonucleotide for detection of SNP TSC0013254
ttattgtttgtga

SEQ ID NO: 45498 - DNA, 13 bp, Artificial Sequence
  Oligonucleotide for detection of SNP TSC0013254
tcacaaacaataa

SEQ ID NO: 45499 - DNA, 13 bp, Artificial Sequence
  Oligonucleotide for detection of SNP TSC0013254
ttatcgattgtga

SEQ ID NO: 45500 - DNA, 13 bp, Artificial Sequence
  Oligonucleotide for detection of SNP TSC0013254
tcacaatcgataa

SEQ ID NO: 45501 - DNA, 13 bp, Artificial Sequence
  Oligonucleotide for detection of SNP TSC0013254
ttatcgtttgtga

SEQ ID NO: 45502 - DNA, 13 bp, Artificial Sequence
  Oligonucleotide for detection of SNP TSC0013254
tcacaaacgataa

SEQ ID NO: 45503 - DNA, 13 bp, Artificial Sequence
  Oligonucleotide for detection of SNP TSC0013254
ttattgatcgtga

SEQ ID NO: 45504 - DNA, 13 bp, Artificial Sequence
  Oligonucleotide for detection of SNP TSC0013254
tcacgatcaataa

SEQ ID NO: 45505 - DNA, 13 bp, Artificial Sequence
  Oligonucleotide for detection of SNP TSC0013254
ttattgttcgtga

SEQ ID NO: 45506 - DNA, 13 bp, Artificial Sequence
  Oligonucleotide for detection of SNP TSC0013254
tcacgaacaataa

SEQ ID NO: 45507 - DNA, 13 bp, Artificial Sequence
  Oligonucleotide for detection of SNP TSC0013254
ttattgattgcga

SEQ ID NO: 45508 - DNA, 13 bp, Artificial Sequence
  Oligonucleotide for detection of SNP TSC0013254
tcgcaatcaataa

SEQ ID NO: 45509 - DNA, 13 bp, Artificial Sequence
  Oligonucleotide for detection of SNP TSC0013254
ttattgtttgcga

SEQ ID NO: 45510 - DNA, 13 bp, Artificial Sequence
  Oligonucleotide for detection of SNP TSC0013254
tcgcaaacaataa

SEQ ID NO: 45511 - DNA, 13 bp, Artificial Sequence
  Oligonucleotide for detection of SNP TSC0013254
ttatcgatcgtga

SEQ ID NO: 45512 - DNA, 13 bp, Artificial Sequence
  Oligonucleotide for detection of SNP TSC0013254
tcacgatcgataa

SEQ ID NO: 45513 - DNA, 13 bp, Artificial Sequence
  Oligonucleotide for detection of SNP TSC0013254
ttatcgttcgtga

SEQ ID NO: 45514 - DNA, 13 bp, Artificial Sequence
  Oligonucleotide for detection of SNP TSC0013254
tcacgaacgataa

SEQ ID NO: 45515 - DNA, 13 bp, Artificial Sequence
  Oligonucleotide for detection of SNP TSC0013254
ttatcgattgcga

SEQ ID NO: 45516 - DNA, 13 bp, Artificial Sequence
  Oligonucleotide for detection of SNP TSC0013254
tcgcaatcgataa

SEQ ID NO: 45517 - DNA, 13 bp, Artificial Sequence
  Oligonucleotide for detection of SNP TSC0013254
ttatcgtttgcga

SEQ ID NO: 45518 - DNA, 13 bp, Artificial Sequence
  Oligonucleotide for detection of SNP TSC0013254
tcgcaaacgataa

SEQ ID NO: 45519 - DNA, 13 bp, Artificial Sequence
  Oligonucleotide for detection of SNP TSC0013254
ttattgatcgcga

SEQ ID NO: 45520 - DNA, 13 bp, Artificial Sequence
  Oligonucleotide for detection of SNP TSC0013254
tcgcgatcaataa

SEQ ID NO: 45521 - DNA, 13 bp, Artificial Sequence
  Oligonucleotide for detection of SNP TSC0013254
ttattgttcgcga

SEQ ID NO: 45522 - DNA, 13 bp, Artificial Sequence
  Oligonucleotide for detection of SNP TSC0013254
tcgcgaacaataa

SEQ ID NO: 45523 - DNA, 13 bp, Artificial Sequence
  Oligonucleotide for detection of SNP TSC0013254
ttatcgatcgcga

SEQ ID NO: 45524 - DNA, 13 bp, Artificial Sequence
  Oligonucleotide for detection of SNP TSC0013254
tcgcgatcgataa

SEQ ID NO: 45525 - DNA, 13 bp, Artificial Sequence
  Oligonucleotide for detection of SNP TSC0013254
ttatcgttcgcga

SEQ ID NO: 45526 - DNA, 13 bp, Artificial Sequence
  Oligonucleotide for detection of SNP TSC0013254
tcgcgaacgataa

SEQ ID NO: 45527 - DNA, 13 bp, Artificial Sequence
  Oligonucleotide for detection of SNP TSC0013254
ttgtggttggtga

SEQ ID NO: 45528 - DNA, 13 bp, Artificial Sequence
  Oligonucleotide for detection of SNP TSC0013254
tcaccaaccacaa

SEQ ID NO: 45529 - DNA, 13 bp, Artificial Sequence
  Oligonucleotide for detection of SNP TSC0013254
ttgtgggtggtga

SEQ ID NO: 45530 - DNA, 13 bp, Artificial Sequence
  Oligonucleotide for detection of SNP TSC0013254
tcaccacccacaa

SEQ ID NO: 45531 - DNA, 13 bp, Artificial Sequence
  Oligonucleotide for detection of SNP TSC0013254
tcgtggttggtga

SEQ ID NO: 45532 - DNA, 13 bp, Artificial Sequence
  Oligonucleotide for detection of SNP TSC0013254
tcaccaaccacga

SEQ ID NO: 45533 - DNA, 13 bp, Artificial Sequence
  Oligonucleotide for detection of SNP TSC0013254
tcgtgggtggtga

SEQ ID NO: 45534 - DNA, 13 bp, Artificial Sequence
  Oligonucleotide for detection of SNP TSC0013254
tcaccacccacga

SEQ ID NO: 45535 - DNA, 13 bp, Artificial Sequence
  Oligonucleotide for detection of SNP TSC0013254
ttgcggttggtga

SEQ ID NO: 45536 - DNA, 13 bp, Artificial Sequence
  Oligonucleotide for detection of SNP TSC0013254
tcaccaaccgcaa

SEQ ID NO: 45537 - DNA, 13 bp, Artificial Sequence
  Oligonucleotide for detection of SNP TSC0013254
ttgcgggtggtga

SEQ ID NO: 45538 - DNA, 13 bp, Artificial Sequence
  Oligonucleotide for detection of SNP TSC0013254
tcaccacccgcaa

SEQ ID NO: 45539 - DNA, 13 bp, Artificial Sequence
  Oligonucleotide for detection of SNP TSC0013254
ttgtggtcggtga

SEQ ID NO: 45540 - DNA, 13 bp, Artificial Sequence
  Oligonucleotide for detection of SNP TSC0013254
tcaccgaccacaa

SEQ ID NO: 45541 - DNA, 13 bp, Artificial Sequence
  Oligonucleotide for detection of SNP TSC0013254
ttgtgggcggtga

SEQ ID NO: 45542 - DNA, 13 bp, Artificial Sequence
  Oligonucleotide for detection of SNP TSC0013254
tcaccgcccacaa

SEQ ID NO: 45543 - DNA, 13 bp, Artificial Sequence
  Oligonucleotide for detection of SNP TSC0013254
tcgcggttggtga

SEQ ID NO: 45544 - DNA, 13 bp, Artificial Sequence
  Oligonucleotide for detection of SNP TSC0013254
tcaccaaccgcga

SEQ ID NO: 45545 - DNA, 13 bp, Artificial Sequence
  Oligonucleotide for detection of SNP TSC0013254
tcgcgggtggtga

SEQ ID NO: 45546 - DNA, 13 bp, Artificial Sequence
  Oligonucleotide for detection of SNP TSC0013254
tcaccacccgcga

SEQ ID NO: 45547 - DNA, 13 bp, Artificial Sequence
  Oligonucleotide for detection of SNP TSC0013254
tcgtggtcggtga

SEQ ID NO: 45548 - DNA, 13 bp, Artificial Sequence
  Oligonucleotide for detection of SNP TSC0013254
tcaccgaccacga

SEQ ID NO: 45549 - DNA, 13 bp, Artificial Sequence
  Oligonucleotide for detection of SNP TSC0013254
tcgtgggcggtga

SEQ ID NO: 45550 - DNA, 13 bp, Artificial Sequence
  Oligonucleotide for detection of SNP TSC0013254
tcaccgcccacga

SEQ ID NO: 45551 - DNA, 13 bp, Artificial Sequence
  Oligonucleotide for detection of SNP TSC0013254
ttgcggtcggtga

SEQ ID NO: 45552 - DNA, 13 bp, Artificial Sequence
  Oligonucleotide for detection of SNP TSC0013254
tcaccgaccgcaa

SEQ ID NO: 45553 - DNA, 13 bp, Artificial Sequence
  Oligonucleotide for detection of SNP TSC0013254
ttgcgggcggtga

SEQ ID NO: 45554 - DNA, 13 bp, Artificial Sequence
  Oligonucleotide for detection of SNP TSC0013254
tcaccgcccgcaa

SEQ ID NO: 45555 - DNA, 13 bp, Artificial Sequence
  Oligonucleotide for detection of SNP TSC0013254
tcgcggtcggtga

SEQ ID NO: 45556 - DNA, 13 bp, Artificial Sequence
  Oligonucleotide for detection of SNP TSC0013254
tcaccgaccgcga

SEQ ID NO: 45557 - DNA, 13 bp, Artificial Sequence
  Oligonucleotide for detection of SNP TSC0013254
tcgcgggcggtga

SEQ ID NO: 45558 - DNA, 13 bp, Artificial Sequence
  Oligonucleotide for detection of SNP TSC0013254
tcaccgcccgcga

SEQ ID NO: 45559 - DNA, 13 bp, Artificial Sequence
  Oligonucleotide for detection of SNP TSC0013256
gaagtagaagtga

SEQ ID NO: 45560 - DNA, 13 bp, Artificial Sequence
  Oligonucleotide for detection of SNP TSC0013256
tcacttctacttc

SEQ ID NO: 45561 - DNA, 13 bp, Artificial Sequence
  Oligonucleotide for detection of SNP TSC0013256
gaagtataagtga

SEQ ID NO: 45562 - DNA, 13 bp, Artificial Sequence
  Oligonucleotide for detection of SNP TSC0013256
tcacttatacttc

SEQ ID NO: 45563 - DNA, 13 bp, Artificial Sequence
  Oligonucleotide for detection of SNP TSC0013257
ggttattgtttta

SEQ ID NO: 45564 - DNA, 13 bp, Artificial Sequence
  Oligonucleotide for detection of SNP TSC0013257
taaaacaataacc

SEQ ID NO: 45565 - DNA, 13 bp, Artificial Sequence
  Oligonucleotide for detection of SNP TSC0013257
ggttatcgtttta

SEQ ID NO: 45566 - DNA, 13 bp, Artificial Sequence
  Oligonucleotide for detection of SNP TSC0013257
taaaacgataacc

SEQ ID NO: 45567 - DNA, 13 bp, Artificial Sequence
  Oligonucleotide for detection of SNP TSC0013257
taggatggtgaty

SEQ ID NO: 45568 - DNA, 13 bp, Artificial Sequence
  Oligonucleotide for detection of SNP TSC0013257
ratcaccatccta

SEQ ID NO: 45569 - DNA, 13 bp, Artificial Sequence
  Oligonucleotide for detection of SNP TSC0013257
taggatagtgaty

SEQ ID NO: 45570 - DNA, 13 bp, Artificial Sequence
  Oligonucleotide for detection of SNP TSC0013257
ratcactatccta

SEQ ID NO: 45571 - DNA, 13 bp, Artificial Sequence
  Oligonucleotide for detection of SNP TSC0013257
taggacggtgaty

SEQ ID NO: 45572 - DNA, 13 bp, Artificial Sequence
  Oligonucleotide for detection of SNP TSC0013257
ratcaccgtccta

SEQ ID NO: 45573 - DNA, 13 bp, Artificial Sequence
  Oligonucleotide for detection of SNP TSC0013258
atttgtaggtttg

SEQ ID NO: 45574 - DNA, 13 bp, Artificial Sequence
  Oligonucleotide for detection of SNP TSC0013258
caaacctacaaat

SEQ ID NO: 45575 - DNA, 13 bp, Artificial Sequence
  Oligonucleotide for detection of SNP TSC0013258
atttgtgggtttg

SEQ ID NO: 45576 - DNA, 13 bp, Artificial Sequence
  Oligonucleotide for detection of SNP TSC0013258
caaacccacaaat

SEQ ID NO: 45577 - DNA, 13 bp, Artificial Sequence
  Oligonucleotide for detection of SNP TSC0013258
atttgcgggtttg

SEQ ID NO: 45578 - DNA, 13 bp, Artificial Sequence
  Oligonucleotide for detection of SNP TSC0013258
caaacccgcaaat

SEQ ID NO: 45579 - DNA, 13 bp, Artificial Sequence
  Oligonucleotide for detection of SNP TSC0013258
taggtttgtaaat

SEQ ID NO: 45580 - DNA, 13 bp, Artificial Sequence
  Oligonucleotide for detection of SNP TSC0013258
atttacaaaccta

SEQ ID NO: 45581 - DNA, 13 bp, Artificial Sequence
  Oligonucleotide for detection of SNP TSC0013258
taggttcgtaaat

SEQ ID NO: 45582 - DNA, 13 bp, Artificial Sequence
  Oligonucleotide for detection of SNP TSC0013258
atttacgaaccta

SEQ ID NO: 45583 - DNA, 13 bp, Artificial Sequence
  Oligonucleotide for detection of SNP TSC0013259
taaaggaaagtta

SEQ ID NO: 45584 - DNA, 13 bp, Artificial Sequence
  Oligonucleotide for detection of SNP TSC0013259
taactttccttta

SEQ ID NO: 45585 - DNA, 13 bp, Artificial Sequence
  Oligonucleotide for detection of SNP TSC0013259
taaagggaagtta

SEQ ID NO: 45586 - DNA, 13 bp, Artificial Sequence
  Oligonucleotide for detection of SNP TSC0013259
taacttcccttta

SEQ ID NO: 45587 - DNA, 13 bp, Artificial Sequence
  Oligonucleotide for detection of SNP TSC0013262
ggtgagagttagg

SEQ ID NO: 45588 - DNA, 13 bp, Artificial Sequence
  Oligonucleotide for detection of SNP TSC0013262
cctaactctcacc

SEQ ID NO: 45589 - DNA, 13 bp, Artificial Sequence
  Oligonucleotide for detection of SNP TSC0013262
ggtgagggttagg

SEQ ID NO: 45590 - DNA, 13 bp, Artificial Sequence
  Oligonucleotide for detection of SNP TSC0013262
cctaaccctcacc

SEQ ID NO: 45591 - DNA, 13 bp, Artificial Sequence
  Oligonucleotide for detection of SNP TSC0013264
tttagagggattt

SEQ ID NO: 45592 - DNA, 13 bp, Artificial Sequence
  Oligonucleotide for detection of SNP TSC0013264
aaatccctctaaa

SEQ ID NO: 45593 - DNA, 13 bp, Artificial Sequence
  Oligonucleotide for detection of SNP TSC0013264
tttagaaggattt

SEQ ID NO: 45594 - DNA, 13 bp, Artificial Sequence
  Oligonucleotide for detection of SNP TSC0013264
aaatccttctaaa

SEQ ID NO: 45595 - DNA, 13 bp, Artificial Sequence
  Oligonucleotide for detection of SNP TSC0013265
gttgtgattttgt

SEQ ID NO: 45596 - DNA, 13 bp, Artificial Sequence
  Oligonucleotide for detection of SNP TSC0013265
acaaaatcacaac

SEQ ID NO: 45597 - DNA, 13 bp, Artificial Sequence
  Oligonucleotide for detection of SNP TSC0013265
gttgtgtttttgt

SEQ ID NO: 45598 - DNA, 13 bp, Artificial Sequence
  Oligonucleotide for detection of SNP TSC0013265
acaaaaacacaac

SEQ ID NO: 45599 - DNA, 13 bp, Artificial Sequence
  Oligonucleotide for detection of SNP TSC0013265
gttgcgattttgt

SEQ ID NO: 45600 - DNA, 13 bp, Artificial Sequence
  Oligonucleotide for detection of SNP TSC0013265
acaaaatcgcaac

SEQ ID NO: 45601 - DNA, 13 bp, Artificial Sequence
  Oligonucleotide for detection of SNP TSC0013265
gttgcgtttttgt

SEQ ID NO: 45602 - DNA, 13 bp, Artificial Sequence
  Oligonucleotide for detection of SNP TSC0013265
acaaaaacgcaac

SEQ ID NO: 45603 - DNA, 13 bp, Artificial Sequence
  Oligonucleotide for detection of SNP TSC0013265
atagggttgtagy

SEQ ID NO: 45604 - DNA, 13 bp, Artificial Sequence
  Oligonucleotide for detection of SNP TSC0013265
rctacaaccctat

SEQ ID NO: 45605 - DNA, 13 bp, Artificial Sequence
  Oligonucleotide for detection of SNP TSC0013265
atagggatgtagy

SEQ ID NO: 45606 - DNA, 13 bp, Artificial Sequence
  Oligonucleotide for detection of SNP TSC0013265
rctacatccctat

SEQ ID NO: 45607 - DNA, 13 bp, Artificial Sequence
  Oligonucleotide for detection of SNP TSC0013265
atagggtcgtagy

SEQ ID NO: 45608 - DNA, 13 bp, Artificial Sequence
  Oligonucleotide for detection of SNP TSC0013265
rctacgaccctat

SEQ ID NO: 45609 - DNA, 13 bp, Artificial Sequence
  Oligonucleotide for detection of SNP TSC0013265
atagggacgtagy

SEQ ID NO: 45610 - DNA, 13 bp, Artificial Sequence
  Oligonucleotide for detection of SNP TSC0013265
rctacgtccctat

SEQ ID NO: 45611 - DNA, 13 bp, Artificial Sequence
  Oligonucleotide for detection of SNP TSC0013267
taataggaaaata

SEQ ID NO: 45612 - DNA, 13 bp, Artificial Sequence
  Oligonucleotide for detection of SNP TSC0013267
tattttcctatta

SEQ ID NO: 45613 - DNA, 13 bp, Artificial Sequence
  Oligonucleotide for detection of SNP TSC0013267
taatagaaaaata

SEQ ID NO: 45614 - DNA, 13 bp, Artificial Sequence
  Oligonucleotide for detection of SNP TSC0013267
tatttttctatta

SEQ ID NO: 45615 - DNA, 13 bp, Artificial Sequence
  Oligonucleotide for detection of SNP TSC0013269
ttaggaaagagta

SEQ ID NO: 45616 - DNA, 13 bp, Artificial Sequence
  Oligonucleotide for detection of SNP TSC0013269
tactctttcctaa

SEQ ID NO: 45617 - DNA, 13 bp, Artificial Sequence
  Oligonucleotide for detection of SNP TSC0013269
ttaggagagagta

SEQ ID NO: 45618 - DNA, 13 bp, Artificial Sequence
  Oligonucleotide for detection of SNP TSC0013269
tactctctcctaa

SEQ ID NO: 45619 - DNA, 13 bp, Artificial Sequence
  Oligonucleotide for detection of SNP TSC0013270
aaagatagtaatt

SEQ ID NO: 45620 - DNA, 13 bp, Artificial Sequence
  Oligonucleotide for detection of SNP TSC0013270
aattactatcttt

SEQ ID NO: 45621 - DNA, 13 bp, Artificial Sequence
  Oligonucleotide for detection of SNP TSC0013270
aaagatggtaatt

SEQ ID NO: 45622 - DNA, 13 bp, Artificial Sequence
  Oligonucleotide for detection of SNP TSC0013270
aattaccatcttt

SEQ ID NO: 45623 - DNA, 13 bp, Artificial Sequence
  Oligonucleotide for detection of SNP TSC0013271
tgtgttatgtaag

SEQ ID NO: 45624 - DNA, 13 bp, Artificial Sequence
  Oligonucleotide for detection of SNP TSC0013271
cttacataacaca

SEQ ID NO: 45625 - DNA, 13 bp, Artificial Sequence
  Oligonucleotide for detection of SNP TSC0013271
tgtgttttgtaag

SEQ ID NO: 45626 - DNA, 13 bp, Artificial Sequence
  Oligonucleotide for detection of SNP TSC0013271
cttacaaaacaca

SEQ ID NO: 45627 - DNA, 13 bp, Artificial Sequence
  Oligonucleotide for detection of SNP TSC0013271
tttatataatata

SEQ ID NO: 45628 - DNA, 13 bp, Artificial Sequence
  Oligonucleotide for detection of SNP TSC0013271
tatattatataaa

SEQ ID NO: 45629 - DNA, 13 bp, Artificial Sequence
  Oligonucleotide for detection of SNP TSC0013271
tttatagaatata

SEQ ID NO: 45630 - DNA, 13 bp, Artificial Sequence
  Oligonucleotide for detection of SNP TSC0013271
tatattctataaa

SEQ ID NO: 45631 - DNA, 13 bp, Artificial Sequence
  Oligonucleotide for detection of SNP TSC0013272
gaagaaggtggga

SEQ ID NO: 45632 - DNA, 13 bp, Artificial Sequence
  Oligonucleotide for detection of SNP TSC0013272
tcccaccttcttc

SEQ ID NO: 45633 - DNA, 13 bp, Artificial Sequence
  Oligonucleotide for detection of SNP TSC0013272
gaagaatgtggga

SEQ ID NO: 45634 - DNA, 13 bp, Artificial Sequence
  Oligonucleotide for detection of SNP TSC0013272
tcccacattcttc

SEQ ID NO: 45635 - DNA, 13 bp, Artificial Sequence
  Oligonucleotide for detection of SNP TSC0013272
gaagaacgtggga

SEQ ID NO: 45636 - DNA, 13 bp, Artificial Sequence
  Oligonucleotide for detection of SNP TSC0013272
tcccacgttcttc

SEQ ID NO: 45637 - DNA, 13 bp, Artificial Sequence
  Oligonucleotide for detection of SNP TSC0013273
gttggttgtatta

SEQ ID NO: 45638 - DNA, 13 bp, Artificial Sequence
  Oligonucleotide for detection of SNP TSC0013273
taatacaaccaac

SEQ ID NO: 45639 - DNA, 13 bp, Artificial Sequence
  Oligonucleotide for detection of SNP TSC0013273
gttggtcgtatta

SEQ ID NO: 45640 - DNA, 13 bp, Artificial Sequence
  Oligonucleotide for detection of SNP TSC0013273
taatacgaccaac

SEQ ID NO: 45641 - DNA, 13 bp, Artificial Sequence
  Oligonucleotide for detection of SNP TSC0013273
taatgtgattaay

SEQ ID NO: 45642 - DNA, 13 bp, Artificial Sequence
  Oligonucleotide for detection of SNP TSC0013273
rttaatcacatta

SEQ ID NO: 45643 - DNA, 13 bp, Artificial Sequence
  Oligonucleotide for detection of SNP TSC0013273
taatgtaattaay

SEQ ID NO: 45644 - DNA, 13 bp, Artificial Sequence
  Oligonucleotide for detection of SNP TSC0013273
rttaattacatta

SEQ ID NO: 45645 - DNA, 13 bp, Artificial Sequence
  Oligonucleotide for detection of SNP TSC0013273
taatgcgattaay

SEQ ID NO: 45646 - DNA, 13 bp, Artificial Sequence
  Oligonucleotide for detection of SNP TSC0013273
rttaatcgcatta

SEQ ID NO: 45647 - DNA, 13 bp, Artificial Sequence
  Oligonucleotide for detection of SNP TSC0013274
aattaaataagty

SEQ ID NO: 45648 - DNA, 13 bp, Artificial Sequence
  Oligonucleotide for detection of SNP TSC0013274
racttatttaatt

SEQ ID NO: 45649 - DNA, 13 bp, Artificial Sequence
  Oligonucleotide for detection of SNP TSC0013274
aattaagtaagty

SEQ ID NO: 45650 - DNA, 13 bp, Artificial Sequence
  Oligonucleotide for detection of SNP TSC0013274
racttacttaatt

SEQ ID NO: 45651 - DNA, 13 bp, Artificial Sequence
  Oligonucleotide for detection of SNP TSC0013275
tggattagagttt

SEQ ID NO: 45652 - DNA, 13 bp, Artificial Sequence
  Oligonucleotide for detection of SNP TSC0013275
aaactctaatcca

SEQ ID NO: 45653 - DNA, 13 bp, Artificial Sequence
  Oligonucleotide for detection of SNP TSC0013275
tggatttgagttt

SEQ ID NO: 45654 - DNA, 13 bp, Artificial Sequence
  Oligonucleotide for detection of SNP TSC0013275
aaactcaaatcca

SEQ ID NO: 45655 - DNA, 13 bp, Artificial Sequence
  Oligonucleotide for detection of SNP TSC0013275
tggattcgagttt

SEQ ID NO: 45656 - DNA, 13 bp, Artificial Sequence
  Oligonucleotide for detection of SNP TSC0013275
aaactcgaatcca

SEQ ID NO: 45657 - DNA, 13 bp, Artificial Sequence
  Oligonucleotide for detection of SNP TSC0013275
aggttttaattta

SEQ ID NO: 45658 - DNA, 13 bp, Artificial Sequence
  Oligonucleotide for detection of SNP TSC0013275
taaattaaaacct

SEQ ID NO: 45659 - DNA, 13 bp, Artificial Sequence
  Oligonucleotide for detection of SNP TSC0013275
aggtttgaattta

SEQ ID NO: 45660 - DNA, 13 bp, Artificial Sequence
  Oligonucleotide for detection of SNP TSC0013275
taaattcaaacct

SEQ ID NO: 45661 - DNA, 13 bp, Artificial Sequence
  Oligonucleotide for detection of SNP TSC0013275
aggttcgaattta

SEQ ID NO: 45662 - DNA, 13 bp, Artificial Sequence
  Oligonucleotide for detection of SNP TSC0013275
taaattcgaacct

SEQ ID NO: 45663 - DNA, 13 bp, Artificial Sequence
  Oligonucleotide for detection of SNP TSC0013276
aggttggtagtga

SEQ ID NO: 45664 - DNA, 13 bp, Artificial Sequence
  Oligonucleotide for detection of SNP TSC0013276
tcactaccaacct

SEQ ID NO: 45665 - DNA, 13 bp, Artificial Sequence
  Oligonucleotide for detection of SNP TSC0013276
aggttgttagtga

SEQ ID NO: 45666 - DNA, 13 bp, Artificial Sequence
  Oligonucleotide for detection of SNP TSC0013276
tcactaacaacct

SEQ ID NO: 45667 - DNA, 13 bp, Artificial Sequence
  Oligonucleotide for detection of SNP TSC0013276
ttattgttaattt

SEQ ID NO: 45668 - DNA, 13 bp, Artificial Sequence
  Oligonucleotide for detection of SNP TSC0013276
aaattaacaataa

SEQ ID NO: 45669 - DNA, 13 bp, Artificial Sequence
  Oligonucleotide for detection of SNP TSC0013276
ttattgataattt

SEQ ID NO: 45670 - DNA, 13 bp, Artificial Sequence
  Oligonucleotide for detection of SNP TSC0013276
aaattatcaataa

SEQ ID NO: 45671 - DNA, 13 bp, Artificial Sequence
  Oligonucleotide for detection of SNP TSC0013277
tattgggtattat

SEQ ID NO: 45672 - DNA, 13 bp, Artificial Sequence
  Oligonucleotide for detection of SNP TSC0013277
ataatacccaata

SEQ ID NO: 45673 - DNA, 13 bp, Artificial Sequence
  Oligonucleotide for detection of SNP TSC0013277
tattggatattat

SEQ ID NO: 45674 - DNA, 13 bp, Artificial Sequence
  Oligonucleotide for detection of SNP TSC0013277
ataatatccaata

SEQ ID NO: 45675 - DNA, 13 bp, Artificial Sequence
  Oligonucleotide for detection of SNP TSC0013282
gtgttaggtattt

SEQ ID NO: 45676 - DNA, 13 bp, Artificial Sequence
  Oligonucleotide for detection of SNP TSC0013282
aaatacctaacac

SEQ ID NO: 45677 - DNA, 13 bp, Artificial Sequence
  Oligonucleotide for detection of SNP TSC0013282
gtgttatgtattt

SEQ ID NO: 45678 - DNA, 13 bp, Artificial Sequence
  Oligonucleotide for detection of SNP TSC0013282
aaatacataacac

SEQ ID NO: 45679 - DNA, 13 bp, Artificial Sequence
  Oligonucleotide for detection of SNP TSC0013282
aggtgtttggtay

SEQ ID NO: 45680 - DNA, 13 bp, Artificial Sequence
  Oligonucleotide for detection of SNP TSC0013282
rtaccaaacacct

SEQ ID NO: 45681 - DNA, 13 bp, Artificial Sequence
  Oligonucleotide for detection of SNP TSC0013282
aggtgtatggtay

SEQ ID NO: 45682 - DNA, 13 bp, Artificial Sequence
  Oligonucleotide for detection of SNP TSC0013282
rtaccatacacct

SEQ ID NO: 45683 - DNA, 13 bp, Artificial Sequence
  Oligonucleotide for detection of SNP TSC0013284
ggtataatttttt

SEQ ID NO: 45684 - DNA, 13 bp, Artificial Sequence
  Oligonucleotide for detection of SNP TSC0013284
aaaaaattatacc

SEQ ID NO: 45685 - DNA, 13 bp, Artificial Sequence
  Oligonucleotide for detection of SNP TSC0013284
ggtatattttttt

SEQ ID NO: 45686 - DNA, 13 bp, Artificial Sequence
  Oligonucleotide for detection of SNP TSC0013284
aaaaaaatatacc

SEQ ID NO: 45687 - DNA, 13 bp, Artificial Sequence
  Oligonucleotide for detection of SNP TSC0013284
agggaattatgty

SEQ ID NO: 45688 - DNA, 13 bp, Artificial Sequence
  Oligonucleotide for detection of SNP TSC0013284
racataattccct

SEQ ID NO: 45689 - DNA, 13 bp, Artificial Sequence
  Oligonucleotide for detection of SNP TSC0013284
agggaagtatgty

SEQ ID NO: 45690 - DNA, 13 bp, Artificial Sequence
  Oligonucleotide for detection of SNP TSC0013284
racatacttccct

SEQ ID NO: 45691 - DNA, 13 bp, Artificial Sequence
  Oligonucleotide for detection of SNP TSC0013289
ggaggtataaaat

SEQ ID NO: 45692 - DNA, 13 bp, Artificial Sequence
  Oligonucleotide for detection of SNP TSC0013289
attttatacctcc

SEQ ID NO: 45693 - DNA, 13 bp, Artificial Sequence
  Oligonucleotide for detection of SNP TSC0013289
ggaggtttaaaat

SEQ ID NO: 45694 - DNA, 13 bp, Artificial Sequence
  Oligonucleotide for detection of SNP TSC0013289
attttaaacctcc

SEQ ID NO: 45695 - DNA, 13 bp, Artificial Sequence
  Oligonucleotide for detection of SNP TSC0013289
attttgtatttty

SEQ ID NO: 45696 - DNA, 13 bp, Artificial Sequence
  Oligonucleotide for detection of SNP TSC0013289
raaaatacaaaat

SEQ ID NO: 45697 - DNA, 13 bp, Artificial Sequence
  Oligonucleotide for detection of SNP TSC0013289
attttggatttty

SEQ ID NO: 45698 - DNA, 13 bp, Artificial Sequence
  Oligonucleotide for detection of SNP TSC0013289
raaaatccaaaat

SEQ ID NO: 45699 - DNA, 13 bp, Artificial Sequence
  Oligonucleotide for detection of SNP TSC0013290
atttttataatay

SEQ ID NO: 45700 - DNA, 13 bp, Artificial Sequence
  Oligonucleotide for detection of SNP TSC0013290
rtattataaaaat

SEQ ID NO: 45701 - DNA, 13 bp, Artificial Sequence
  Oligonucleotide for detection of SNP TSC0013290
atttttgtaatay

SEQ ID NO: 45702 - DNA, 13 bp, Artificial Sequence
  Oligonucleotide for detection of SNP TSC0013290
rtattacaaaaat

SEQ ID NO: 45703 - DNA, 13 bp, Artificial Sequence
  Oligonucleotide for detection of SNP TSC0013290
attttcgtaatay

SEQ ID NO: 45704 - DNA, 13 bp, Artificial Sequence
  Oligonucleotide for detection of SNP TSC0013290
rtattacgaaaat

SEQ ID NO: 45705 - DNA, 13 bp, Artificial Sequence
  Oligonucleotide for detection of SNP TSC0013290
gtattatggaaat

SEQ ID NO: 45706 - DNA, 13 bp, Artificial Sequence
  Oligonucleotide for detection of SNP TSC0013290
atttccataatac

SEQ ID NO: 45707 - DNA, 13 bp, Artificial Sequence
  Oligonucleotide for detection of SNP TSC0013290
gtattacggaaat

SEQ ID NO: 45708 - DNA, 13 bp, Artificial Sequence
  Oligonucleotide for detection of SNP TSC0013290
atttccgtaatac

SEQ ID NO: 45709 - DNA, 13 bp, Artificial Sequence
  Oligonucleotide for detection of SNP TSC0013291
gaatttgtgaatt

SEQ ID NO: 45710 - DNA, 13 bp, Artificial Sequence
  Oligonucleotide for detection of SNP TSC0013291
aattcacaaattc

SEQ ID NO: 45711 - DNA, 13 bp, Artificial Sequence
  Oligonucleotide for detection of SNP TSC0013291
gaatttatgaatt

SEQ ID NO: 45712 - DNA, 13 bp, Artificial Sequence
  Oligonucleotide for detection of SNP TSC0013291
aattcataaattc

SEQ ID NO: 45713 - DNA, 13 bp, Artificial Sequence
  Oligonucleotide for detection of SNP TSC0013293
ttgttaggaaatg

SEQ ID NO: 45714 - DNA, 13 bp, Artificial Sequence
  Oligonucleotide for detection of SNP TSC0013293
catttcctaacaa

SEQ ID NO: 45715 - DNA, 13 bp, Artificial Sequence
  Oligonucleotide for detection of SNP TSC0013293
ttgttaagaaatg

SEQ ID NO: 45716 - DNA, 13 bp, Artificial Sequence
  Oligonucleotide for detection of SNP TSC0013293
catttcttaacaa

SEQ ID NO: 45717 - DNA, 13 bp, Artificial Sequence
  Oligonucleotide for detection of SNP TSC0013294
gagtatatgttga

SEQ ID NO: 45718 - DNA, 13 bp, Artificial Sequence
  Oligonucleotide for detection of SNP TSC0013294
tcaacatatactc

SEQ ID NO: 45719 - DNA, 13 bp, Artificial Sequence
  Oligonucleotide for detection of SNP TSC0013294
gagtatgtgttga

SEQ ID NO: 45720 - DNA, 13 bp, Artificial Sequence
  Oligonucleotide for detection of SNP TSC0013294
tcaacacatactc

SEQ ID NO: 45721 - DNA, 13 bp, Artificial Sequence
  Oligonucleotide for detection of SNP TSC0013294
gagtacgtgttga

SEQ ID NO: 45722 - DNA, 13 bp, Artificial Sequence
  Oligonucleotide for detection of SNP TSC0013294
tcaacacgtactc

SEQ ID NO: 45723 - DNA, 13 bp, Artificial Sequence
  Oligonucleotide for detection of SNP TSC0013295
tgttttatgtttt

SEQ ID NO: 45724 - DNA, 13 bp, Artificial Sequence
  Oligonucleotide for detection of SNP TSC0013295
aaaacataaaaca

SEQ ID NO: 45725 - DNA, 13 bp, Artificial Sequence
  Oligonucleotide for detection of SNP TSC0013295
tgttttgtgtttt

SEQ ID NO: 45726 - DNA, 13 bp, Artificial Sequence
  Oligonucleotide for detection of SNP TSC0013295
aaaacacaaaaca

SEQ ID NO: 45727 - DNA, 13 bp, Artificial Sequence
  Oligonucleotide for detection of SNP TSC0013296
gtatagggtaggy

SEQ ID NO: 45728 - DNA, 13 bp, Artificial Sequence
  Oligonucleotide for detection of SNP TSC0013296
rcctaccctatac

SEQ ID NO: 45729 - DNA, 13 bp, Artificial Sequence
  Oligonucleotide for detection of SNP TSC0013296
gtatagagtaggy

SEQ ID NO: 45730 - DNA, 13 bp, Artificial Sequence
  Oligonucleotide for detection of SNP TSC0013296
rcctactctatac

SEQ ID NO: 45731 - DNA, 13 bp, Artificial Sequence
  Oligonucleotide for detection of SNP TSC0013297
tatttagtatttt

SEQ ID NO: 45732 - DNA, 13 bp, Artificial Sequence
  Oligonucleotide for detection of SNP TSC0013297
aaaatactaaata

SEQ ID NO: 45733 - DNA, 13 bp, Artificial Sequence
  Oligonucleotide for detection of SNP TSC0013297
aagatggtgggtg

SEQ ID NO: 45734 - DNA, 13 bp, Artificial Sequence
  Oligonucleotide for detection of SNP TSC0013297
cacccaccatctt

SEQ ID NO: 45735 - DNA, 13 bp, Artificial Sequence
  Oligonucleotide for detection of SNP TSC0013297
aagatgttgggtg

SEQ ID NO: 45736 - DNA, 13 bp, Artificial Sequence
  Oligonucleotide for detection of SNP TSC0013297
cacccaacatctt

SEQ ID NO: 45737 - DNA, 13 bp, Artificial Sequence
  Oligonucleotide for detection of SNP TSC0013298
ttgtatatttgag

SEQ ID NO: 45738 - DNA, 13 bp, Artificial Sequence
  Oligonucleotide for detection of SNP TSC0013298
ctcaaatatacaa

SEQ ID NO: 45739 - DNA, 13 bp, Artificial Sequence
  Oligonucleotide for detection of SNP TSC0013298
ttgtatgtttgag

SEQ ID NO: 45740 - DNA, 13 bp, Artificial Sequence
  Oligonucleotide for detection of SNP TSC0013298
ctcaaacatacaa

SEQ ID NO: 45741 - DNA, 13 bp, Artificial Sequence
  Oligonucleotide for detection of SNP TSC0013298
ttgtacgtttgag

SEQ ID NO: 45742 - DNA, 13 bp, Artificial Sequence
  Oligonucleotide for detection of SNP TSC0013298
ctcaaacgtacaa

SEQ ID NO: 45743 - DNA, 13 bp, Artificial Sequence
  Oligonucleotide for detection of SNP TSC0013298
tttaaatgtgtaa

SEQ ID NO: 45744 - DNA, 13 bp, Artificial Sequence
  Oligonucleotide for detection of SNP TSC0013298
ttacacatttaaa

SEQ ID NO: 45745 - DNA, 13 bp, Artificial Sequence
  Oligonucleotide for detection of SNP TSC0013298
tttaaacgtgtaa

SEQ ID NO: 45746 - DNA, 13 bp, Artificial Sequence
  Oligonucleotide for detection of SNP TSC0013298
ttacacgtttaaa

SEQ ID NO: 45747 - DNA, 13 bp, Artificial Sequence
  Oligonucleotide for detection of SNP TSC0013299
aataaagtataaa

SEQ ID NO: 45748 - DNA, 13 bp, Artificial Sequence
  Oligonucleotide for detection of SNP TSC0013299
tttatactttatt

SEQ ID NO: 45749 - DNA, 13 bp, Artificial Sequence
  Oligonucleotide for detection of SNP TSC0013299
aataaaatataaa

SEQ ID NO: 45750 - DNA, 13 bp, Artificial Sequence
  Oligonucleotide for detection of SNP TSC0013299
tttatattttatt

SEQ ID NO: 45751 - DNA, 13 bp, Artificial Sequence
  Oligonucleotide for detection of SNP TSC0013301
gttatagtttggy

SEQ ID NO: 45752 - DNA, 13 bp, Artificial Sequence
  Oligonucleotide for detection of SNP TSC0013301
rccaaactataac

SEQ ID NO: 45753 - DNA, 13 bp, Artificial Sequence
  Oligonucleotide for detection of SNP TSC0013301
gttatattttggy

SEQ ID NO: 45754 - DNA, 13 bp, Artificial Sequence
  Oligonucleotide for detection of SNP TSC0013301
rccaaaatataac

SEQ ID NO: 45755 - DNA, 13 bp, Artificial Sequence
  Oligonucleotide for detection of SNP TSC0013301
gttaaattatggy

SEQ ID NO: 45756 - DNA, 13 bp, Artificial Sequence
  Oligonucleotide for detection of SNP TSC0013301
rccataatttaac

SEQ ID NO: 45757 - DNA, 13 bp, Artificial Sequence
  Oligonucleotide for detection of SNP TSC0013301
gttaaaatatggy

SEQ ID NO: 45758 - DNA, 13 bp, Artificial Sequence
  Oligonucleotide for detection of SNP TSC0013301
rccatattttaac

SEQ ID NO: 45759 - DNA, 13 bp, Artificial Sequence
  Oligonucleotide for detection of SNP TSC0013302
aaaaatgaaagaa

SEQ ID NO: 45760 - DNA, 13 bp, Artificial Sequence
  Oligonucleotide for detection of SNP TSC0013302
ttctttcattttt

SEQ ID NO: 45761 - DNA, 13 bp, Artificial Sequence
  Oligonucleotide for detection of SNP TSC0013302
aaaaataaaagaa

SEQ ID NO: 45762 - DNA, 13 bp, Artificial Sequence
  Oligonucleotide for detection of SNP TSC0013302
ttcttttattttt

SEQ ID NO: 45763 - DNA, 13 bp, Artificial Sequence
  Oligonucleotide for detection of SNP TSC0013303
aaaaaatgaaaga

SEQ ID NO: 45764 - DNA, 13 bp, Artificial Sequence
  Oligonucleotide for detection of SNP TSC0013303
tctttcatttttt

SEQ ID NO: 45765 - DNA, 13 bp, Artificial Sequence
  Oligonucleotide for detection of SNP TSC0013304
tggattaggatty

SEQ ID NO: 45766 - DNA, 13 bp, Artificial Sequence
  Oligonucleotide for detection of SNP TSC0013304
raatcctaatcca

SEQ ID NO: 45767 - DNA, 13 bp, Artificial Sequence
  Oligonucleotide for detection of SNP TSC0013304
tggattgggatty

SEQ ID NO: 45768 - DNA, 13 bp, Artificial Sequence
  Oligonucleotide for detection of SNP TSC0013304
raatcccaatcca

SEQ ID NO: 45769 - DNA, 13 bp, Artificial Sequence
  Oligonucleotide for detection of SNP TSC0013304
tggatcgggatty

SEQ ID NO: 45770 - DNA, 13 bp, Artificial Sequence
  Oligonucleotide for detection of SNP TSC0013304
raatcccgatcca

SEQ ID NO: 45771 - DNA, 13 bp, Artificial Sequence
  Oligonucleotide for detection of SNP TSC0013304
gagttttgattta

SEQ ID NO: 45772 - DNA, 13 bp, Artificial Sequence
  Oligonucleotide for detection of SNP TSC0013304
taaatcaaaactc

SEQ ID NO: 45773 - DNA, 13 bp, Artificial Sequence
  Oligonucleotide for detection of SNP TSC0013304
gagtttcgattta

SEQ ID NO: 45774 - DNA, 13 bp, Artificial Sequence
  Oligonucleotide for detection of SNP TSC0013304
taaatcgaaactc

SEQ ID NO: 45775 - DNA, 13 bp, Artificial Sequence
  Oligonucleotide for detection of SNP TSC0013306
atgtataataagg

SEQ ID NO: 45776 - DNA, 13 bp, Artificial Sequence
  Oligonucleotide for detection of SNP TSC0013306
ccttattatacat

SEQ ID NO: 45777 - DNA, 13 bp, Artificial Sequence
  Oligonucleotide for detection of SNP TSC0013306
atgtattataagg

SEQ ID NO: 45778 - DNA, 13 bp, Artificial Sequence
  Oligonucleotide for detection of SNP TSC0013306
ccttataatacat

SEQ ID NO: 45779 - DNA, 13 bp, Artificial Sequence
  Oligonucleotide for detection of SNP TSC0013306
acgtataataagg

SEQ ID NO: 45780 - DNA, 13 bp, Artificial Sequence
  Oligonucleotide for detection of SNP TSC0013306
ccttattatacgt

SEQ ID NO: 45781 - DNA, 13 bp, Artificial Sequence
  Oligonucleotide for detection of SNP TSC0013306
acgtattataagg

SEQ ID NO: 45782 - DNA, 13 bp, Artificial Sequence
  Oligonucleotide for detection of SNP TSC0013306
ccttataatacgt

SEQ ID NO: 45783 - DNA, 13 bp, Artificial Sequence
  Oligonucleotide for detection of SNP TSC0013306
ttttgttgtgtgt

SEQ ID NO: 45784 - DNA, 13 bp, Artificial Sequence
  Oligonucleotide for detection of SNP TSC0013306
acacacaacaaaa

SEQ ID NO: 45785 - DNA, 13 bp, Artificial Sequence
  Oligonucleotide for detection of SNP TSC0013306
ttttgtagtgtgt

SEQ ID NO: 45786 - DNA, 13 bp, Artificial Sequence
  Oligonucleotide for detection of SNP TSC0013306
acacactacaaaa

SEQ ID NO: 45787 - DNA, 13 bp, Artificial Sequence
  Oligonucleotide for detection of SNP TSC0013306
ttttgttgtgcgt

SEQ ID NO: 45788 - DNA, 13 bp, Artificial Sequence
  Oligonucleotide for detection of SNP TSC0013306
acgcacaacaaaa

SEQ ID NO: 45789 - DNA, 13 bp, Artificial Sequence
  Oligonucleotide for detection of SNP TSC0013306
ttttgtagtgcgt

SEQ ID NO: 45790 - DNA, 13 bp, Artificial Sequence
  Oligonucleotide for detection of SNP TSC0013306
acgcactacaaaa

SEQ ID NO: 45791 - DNA, 13 bp, Artificial Sequence
  Oligonucleotide for detection of SNP TSC0013307
atttggaagatta

SEQ ID NO: 45792 - DNA, 13 bp, Artificial Sequence
  Oligonucleotide for detection of SNP TSC0013307
taatcttccaaat

SEQ ID NO: 45793 - DNA, 13 bp, Artificial Sequence
  Oligonucleotide for detection of SNP TSC0013307
atttgggagatta

SEQ ID NO: 45794 - DNA, 13 bp, Artificial Sequence
  Oligonucleotide for detection of SNP TSC0013307
taatctcccaaat

SEQ ID NO: 45795 - DNA, 13 bp, Artificial Sequence
  Oligonucleotide for detection of SNP TSC0013309
aaagaaatatagt

SEQ ID NO: 45796 - DNA, 13 bp, Artificial Sequence
  Oligonucleotide for detection of SNP TSC0013309
actatatttcttt

SEQ ID NO: 45797 - DNA, 13 bp, Artificial Sequence
  Oligonucleotide for detection of SNP TSC0013309
aaagaagtatagt

SEQ ID NO: 45798 - DNA, 13 bp, Artificial Sequence
  Oligonucleotide for detection of SNP TSC0013309
actatacttcttt

SEQ ID NO: 45799 - DNA, 13 bp, Artificial Sequence
  Oligonucleotide for detection of SNP TSC0013310
tgttttaaaagay

SEQ ID NO: 45800 - DNA, 13 bp, Artificial Sequence
  Oligonucleotide for detection of SNP TSC0013310
rtcttttaaaaca

SEQ ID NO: 45801 - DNA, 13 bp, Artificial Sequence
  Oligonucleotide for detection of SNP TSC0013310
tgttttgaaagay

SEQ ID NO: 45802 - DNA, 13 bp, Artificial Sequence
  Oligonucleotide for detection of SNP TSC0013310
rtctttcaaaaca

SEQ ID NO: 45803 - DNA, 13 bp, Artificial Sequence
  Oligonucleotide for detection of SNP TSC0013311
ttgaaagaaggaa

SEQ ID NO: 45804 - DNA, 13 bp, Artificial Sequence
  Oligonucleotide for detection of SNP TSC0013311
ttccttctttcaa

SEQ ID NO: 45805 - DNA, 13 bp, Artificial Sequence
  Oligonucleotide for detection of SNP TSC0013311
ttgaaataaggaa

SEQ ID NO: 45806 - DNA, 13 bp, Artificial Sequence
  Oligonucleotide for detection of SNP TSC0013311
ttccttatttcaa

SEQ ID NO: 45807 - DNA, 13 bp, Artificial Sequence
  Oligonucleotide for detection of SNP TSC0013311
tcgaaagaaggaa

SEQ ID NO: 45808 - DNA, 13 bp, Artificial Sequence
  Oligonucleotide for detection of SNP TSC0013311
ttccttctttcga

SEQ ID NO: 45809 - DNA, 13 bp, Artificial Sequence
  Oligonucleotide for detection of SNP TSC0013311
tcgaaataaggaa

SEQ ID NO: 45810 - DNA, 13 bp, Artificial Sequence
  Oligonucleotide for detection of SNP TSC0013311
ttccttatttcga

SEQ ID NO: 45811 - DNA, 13 bp, Artificial Sequence
  Oligonucleotide for detection of SNP TSC0013311
tttttttttttga

SEQ ID NO: 45812 - DNA, 13 bp, Artificial Sequence
  Oligonucleotide for detection of SNP TSC0013311
tcaaaaaaaaaaa

SEQ ID NO: 45813 - DNA, 13 bp, Artificial Sequence
  Oligonucleotide for detection of SNP TSC0013311
ttttttttttcga

SEQ ID NO: 45814 - DNA, 13 bp, Artificial Sequence
  Oligonucleotide for detection of SNP TSC0013311
tcgaaaaaaaaaa

SEQ ID NO: 45815 - DNA, 13 bp, Artificial Sequence
  Oligonucleotide for detection of SNP TSC0013311
ttttttatttcga

SEQ ID NO: 45816 - DNA, 13 bp, Artificial Sequence
  Oligonucleotide for detection of SNP TSC0013311
tcgaaataaaaaa

SEQ ID NO: 45817 - DNA, 13 bp, Artificial Sequence
  Oligonucleotide for detection of SNP TSC0013312
gaggggggtgtag

SEQ ID NO: 45818 - DNA, 13 bp, Artificial Sequence
  Oligonucleotide for detection of SNP TSC0013312
ctacacccccctc

SEQ ID NO: 45819 - DNA, 13 bp, Artificial Sequence
  Oligonucleotide for detection of SNP TSC0013312
gaggggagtgtag

SEQ ID NO: 45820 - DNA, 13 bp, Artificial Sequence
  Oligonucleotide for detection of SNP TSC0013312
ctacactcccctc

SEQ ID NO: 45821 - DNA, 13 bp, Artificial Sequence
  Oligonucleotide for detection of SNP TSC0013313
ggattttggggay

SEQ ID NO: 45822 - DNA, 13 bp, Artificial Sequence
  Oligonucleotide for detection of SNP TSC0013313
rtccccaaaatcc

SEQ ID NO: 45823 - DNA, 13 bp, Artificial Sequence
  Oligonucleotide for detection of SNP TSC0013313
ggatttcggggay

SEQ ID NO: 45824 - DNA, 13 bp, Artificial Sequence
  Oligonucleotide for detection of SNP TSC0013313
rtccccgaaatcc

SEQ ID NO: 45825 - DNA, 13 bp, Artificial Sequence
  Oligonucleotide for detection of SNP TSC0013313
gtttttgaagtty

SEQ ID NO: 45826 - DNA, 13 bp, Artificial Sequence
  Oligonucleotide for detection of SNP TSC0013313
raacttcaaaaac

SEQ ID NO: 45827 - DNA, 13 bp, Artificial Sequence
  Oligonucleotide for detection of SNP TSC0013313
gtttttaaagtty

SEQ ID NO: 45828 - DNA, 13 bp, Artificial Sequence
  Oligonucleotide for detection of SNP TSC0013313
raactttaaaaac

SEQ ID NO: 45829 - DNA, 13 bp, Artificial Sequence
  Oligonucleotide for detection of SNP TSC0013313
gttttcgaagtty

SEQ ID NO: 45830 - DNA, 13 bp, Artificial Sequence
  Oligonucleotide for detection of SNP TSC0013313
raacttcgaaaac

SEQ ID NO: 45831 - DNA, 13 bp, Artificial Sequence
  Oligonucleotide for detection of SNP TSC0013314
ggtattatataga

SEQ ID NO: 45832 - DNA, 13 bp, Artificial Sequence
  Oligonucleotide for detection of SNP TSC0013314
tctatataatacc

SEQ ID NO: 45833 - DNA, 13 bp, Artificial Sequence
  Oligonucleotide for detection of SNP TSC0013314
ggtattgtataga

SEQ ID NO: 45834 - DNA, 13 bp, Artificial Sequence
  Oligonucleotide for detection of SNP TSC0013314
tctatacaatacc

SEQ ID NO: 45835 - DNA, 13 bp, Artificial Sequence
  Oligonucleotide for detection of SNP TSC0013314
ggtatcgtataga

SEQ ID NO: 45836 - DNA, 13 bp, Artificial Sequence
  Oligonucleotide for detection of SNP TSC0013314
tctatacgatacc

SEQ ID NO: 45837 - DNA, 13 bp, Artificial Sequence
  Oligonucleotide for detection of SNP TSC0013314
tttatatgataty

SEQ ID NO: 45838 - DNA, 13 bp, Artificial Sequence
  Oligonucleotide for detection of SNP TSC0013314
ratatcatataaa

SEQ ID NO: 45839 - DNA, 13 bp, Artificial Sequence
  Oligonucleotide for detection of SNP TSC0013314
tttatacgataty

SEQ ID NO: 45840 - DNA, 13 bp, Artificial Sequence
  Oligonucleotide for detection of SNP TSC0013314
ratatcgtataaa

SEQ ID NO: 45841 - DNA, 13 bp, Artificial Sequence
  Oligonucleotide for detection of SNP TSC0013315
gaaagtatgtttg

SEQ ID NO: 45842 - DNA, 13 bp, Artificial Sequence
  Oligonucleotide for detection of SNP TSC0013315
caaacatactttc

SEQ ID NO: 45843 - DNA, 13 bp, Artificial Sequence
  Oligonucleotide for detection of SNP TSC0013315
gaaagtgtgtttg

SEQ ID NO: 45844 - DNA, 13 bp, Artificial Sequence
  Oligonucleotide for detection of SNP TSC0013315
caaacacactttc

SEQ ID NO: 45845 - DNA, 13 bp, Artificial Sequence
  Oligonucleotide for detection of SNP TSC0013315
gaaagcgtgtttg

SEQ ID NO: 45846 - DNA, 13 bp, Artificial Sequence
  Oligonucleotide for detection of SNP TSC0013315
caaacacgctttc

SEQ ID NO: 45847 - DNA, 13 bp, Artificial Sequence
  Oligonucleotide for detection of SNP TSC0013315
taaatatgtttty

SEQ ID NO: 45848 - DNA, 13 bp, Artificial Sequence
  Oligonucleotide for detection of SNP TSC0013315
raaaacatattta

SEQ ID NO: 45849 - DNA, 13 bp, Artificial Sequence
  Oligonucleotide for detection of SNP TSC0013315
taaatacgtttty

SEQ ID NO: 45850 - DNA, 13 bp, Artificial Sequence
  Oligonucleotide for detection of SNP TSC0013315
raaaacgtattta

SEQ ID NO: 45851 - DNA, 13 bp, Artificial Sequence
  Oligonucleotide for detection of SNP TSC0013316
tatttagtttttt

SEQ ID NO: 45852 - DNA, 13 bp, Artificial Sequence
  Oligonucleotide for detection of SNP TSC0013316
aaaaaactaaata

SEQ ID NO: 45853 - DNA, 13 bp, Artificial Sequence
  Oligonucleotide for detection of SNP TSC0013316
tatttaatttttt

SEQ ID NO: 45854 - DNA, 13 bp, Artificial Sequence
  Oligonucleotide for detection of SNP TSC0013316
aaaaaattaaata

SEQ ID NO: 45855 - DNA, 13 bp, Artificial Sequence
  Oligonucleotide for detection of SNP TSC0013317
attatgtttttat

SEQ ID NO: 45856 - DNA, 13 bp, Artificial Sequence
  Oligonucleotide for detection of SNP TSC0013317
ataaaaacataat

SEQ ID NO: 45857 - DNA, 13 bp, Artificial Sequence
  Oligonucleotide for detection of SNP TSC0013317
atgaaggtatgat

SEQ ID NO: 45858 - DNA, 13 bp, Artificial Sequence
  Oligonucleotide for detection of SNP TSC0013317
atcataccttcat

SEQ ID NO: 45859 - DNA, 13 bp, Artificial Sequence
  Oligonucleotide for detection of SNP TSC0013317
atgaagttatgat

SEQ ID NO: 45860 - DNA, 13 bp, Artificial Sequence
  Oligonucleotide for detection of SNP TSC0013317
atcataacttcat

SEQ ID NO: 45861 - DNA, 13 bp, Artificial Sequence
  Oligonucleotide for detection of SNP TSC0013319
ggaattagttgat

SEQ ID NO: 45862 - DNA, 13 bp, Artificial Sequence
  Oligonucleotide for detection of SNP TSC0013319
atcaactaattcc

SEQ ID NO: 45863 - DNA, 13 bp, Artificial Sequence
  Oligonucleotide for detection of SNP TSC0013319
ggaattggttgat

SEQ ID NO: 45864 - DNA, 13 bp, Artificial Sequence
  Oligonucleotide for detection of SNP TSC0013319
atcaaccaattcc

SEQ ID NO: 45865 - DNA, 13 bp, Artificial Sequence
  Oligonucleotide for detection of SNP TSC0013319
ggaatcggttgat

SEQ ID NO: 45866 - DNA, 13 bp, Artificial Sequence
  Oligonucleotide for detection of SNP TSC0013319
atcaaccgattcc

SEQ ID NO: 45867 - DNA, 13 bp, Artificial Sequence
  Oligonucleotide for detection of SNP TSC0013319
attaattgattty

SEQ ID NO: 45868 - DNA, 13 bp, Artificial Sequence
  Oligonucleotide for detection of SNP TSC0013319
raaatcaattaat

SEQ ID NO: 45869 - DNA, 13 bp, Artificial Sequence
  Oligonucleotide for detection of SNP TSC0013319
attaatcgattty

SEQ ID NO: 45870 - DNA, 13 bp, Artificial Sequence
  Oligonucleotide for detection of SNP TSC0013319
raaatcgattaat

SEQ ID NO: 45871 - DNA, 13 bp, Artificial Sequence
  Oligonucleotide for detection of SNP TSC0013320
gtttaatgtagta

SEQ ID NO: 45872 - DNA, 13 bp, Artificial Sequence
  Oligonucleotide for detection of SNP TSC0013320
tactacattaaac

SEQ ID NO: 45873 - DNA, 13 bp, Artificial Sequence
  Oligonucleotide for detection of SNP TSC0013320
gtttaacgtagta

SEQ ID NO: 45874 - DNA, 13 bp, Artificial Sequence
  Oligonucleotide for detection of SNP TSC0013320
tactacgttaaac

SEQ ID NO: 45875 - DNA, 13 bp, Artificial Sequence
  Oligonucleotide for detection of SNP TSC0013320
tgttgtgttgggy

SEQ ID NO: 45876 - DNA, 13 bp, Artificial Sequence
  Oligonucleotide for detection of SNP TSC0013320
rcccaacacaaca

SEQ ID NO: 45877 - DNA, 13 bp, Artificial Sequence
  Oligonucleotide for detection of SNP TSC0013320
tgttgtattgggy

SEQ ID NO: 45878 - DNA, 13 bp, Artificial Sequence
  Oligonucleotide for detection of SNP TSC0013320
rcccaatacaaca

SEQ ID NO: 45879 - DNA, 13 bp, Artificial Sequence
  Oligonucleotide for detection of SNP TSC0013320
tgttgcgttgggy

SEQ ID NO: 45880 - DNA, 13 bp, Artificial Sequence
  Oligonucleotide for detection of SNP TSC0013320
rcccaacgcaaca

SEQ ID NO: 45881 - DNA, 13 bp, Artificial Sequence
  Oligonucleotide for detection of SNP TSC0013321
ggttttttgggga

SEQ ID NO: 45882 - DNA, 13 bp, Artificial Sequence
  Oligonucleotide for detection of SNP TSC0013321
tccccaaaaaacc

SEQ ID NO: 45883 - DNA, 13 bp, Artificial Sequence
  Oligonucleotide for detection of SNP TSC0013321
ggttttgtgggga

SEQ ID NO: 45884 - DNA, 13 bp, Artificial Sequence
  Oligonucleotide for detection of SNP TSC0013321
tccccacaaaacc

SEQ ID NO: 45885 - DNA, 13 bp, Artificial Sequence
  Oligonucleotide for detection of SNP TSC0013321
tttttagaaaaty

SEQ ID NO: 45886 - DNA, 13 bp, Artificial Sequence
  Oligonucleotide for detection of SNP TSC0013321
rattttctaaaaa

SEQ ID NO: 45887 - DNA, 13 bp, Artificial Sequence
  Oligonucleotide for detection of SNP TSC0013321
tttttataaaaty

SEQ ID NO: 45888 - DNA, 13 bp, Artificial Sequence
  Oligonucleotide for detection of SNP TSC0013321
rattttataaaaa

SEQ ID NO: 45889 - DNA, 13 bp, Artificial Sequence
  Oligonucleotide for detection of SNP TSC0013322
ggtaggggttgtt

SEQ ID NO: 45890 - DNA, 13 bp, Artificial Sequence
  Oligonucleotide for detection of SNP TSC0013322
aacaacccctacc

SEQ ID NO: 45891 - DNA, 13 bp, Artificial Sequence
  Oligonucleotide for detection of SNP TSC0013322
ggtaggtgttgtt

SEQ ID NO: 45892 - DNA, 13 bp, Artificial Sequence
  Oligonucleotide for detection of SNP TSC0013322
aacaacacctacc

SEQ ID NO: 45893 - DNA, 13 bp, Artificial Sequence
  Oligonucleotide for detection of SNP TSC0013322
agtagtttttaty

SEQ ID NO: 45894 - DNA, 13 bp, Artificial Sequence
  Oligonucleotide for detection of SNP TSC0013322
rataaaaactact

SEQ ID NO: 45895 - DNA, 13 bp, Artificial Sequence
  Oligonucleotide for detection of SNP TSC0013322
agtagtatttaty

SEQ ID NO: 45896 - DNA, 13 bp, Artificial Sequence
  Oligonucleotide for detection of SNP TSC0013322
rataaatactact

SEQ ID NO: 45897 - DNA, 13 bp, Artificial Sequence
  Oligonucleotide for detection of SNP TSC0013323
tattttattataa

SEQ ID NO: 45898 - DNA, 13 bp, Artificial Sequence
  Oligonucleotide for detection of SNP TSC0013323
ttataataaaata

SEQ ID NO: 45899 - DNA, 13 bp, Artificial Sequence
  Oligonucleotide for detection of SNP TSC0013323
tattttgttataa

SEQ ID NO: 45900 - DNA, 13 bp, Artificial Sequence
  Oligonucleotide for detection of SNP TSC0013323
ttataacaaaata

SEQ ID NO: 45901 - DNA, 13 bp, Artificial Sequence
  Oligonucleotide for detection of SNP TSC0013324
taggtgtaaagta

SEQ ID NO: 45902 - DNA, 13 bp, Artificial Sequence
  Oligonucleotide for detection of SNP TSC0013324
tactttacaccta

SEQ ID NO: 45903 - DNA, 13 bp, Artificial Sequence
  Oligonucleotide for detection of SNP TSC0013324
taggtggaaagta

SEQ ID NO: 45904 - DNA, 13 bp, Artificial Sequence
  Oligonucleotide for detection of SNP TSC0013324
tactttccaccta

SEQ ID NO: 45905 - DNA, 13 bp, Artificial Sequence
  Oligonucleotide for detection of SNP TSC0013324
tattttgtatttg

SEQ ID NO: 45906 - DNA, 13 bp, Artificial Sequence
  Oligonucleotide for detection of SNP TSC0013324
caaatacaaaata

SEQ ID NO: 45907 - DNA, 13 bp, Artificial Sequence
  Oligonucleotide for detection of SNP TSC0013324
tattttttatttg

SEQ ID NO: 45908 - DNA, 13 bp, Artificial Sequence
  Oligonucleotide for detection of SNP TSC0013324
caaataaaaaata

SEQ ID NO: 45909 - DNA, 13 bp, Artificial Sequence
  Oligonucleotide for detection of SNP TSC0013326
ttgtttttattag

SEQ ID NO: 45910 - DNA, 13 bp, Artificial Sequence
  Oligonucleotide for detection of SNP TSC0013326
ctaataaaaacaa

SEQ ID NO: 45911 - DNA, 13 bp, Artificial Sequence
  Oligonucleotide for detection of SNP TSC0013326
ttgtttgtattag

SEQ ID NO: 45912 - DNA, 13 bp, Artificial Sequence
  Oligonucleotide for detection of SNP TSC0013326
ctaatacaaacaa

SEQ ID NO: 45913 - DNA, 13 bp, Artificial Sequence
  Oligonucleotide for detection of SNP TSC0013326
ttgatggaaatag

SEQ ID NO: 45914 - DNA, 13 bp, Artificial Sequence
  Oligonucleotide for detection of SNP TSC0013326
ctatttccatcaa

SEQ ID NO: 45915 - DNA, 13 bp, Artificial Sequence
  Oligonucleotide for detection of SNP TSC0013326
ttgatgtaaatag

SEQ ID NO: 45916 - DNA, 13 bp, Artificial Sequence
  Oligonucleotide for detection of SNP TSC0013326
ctatttacatcaa

SEQ ID NO: 45917 - DNA, 13 bp, Artificial Sequence
  Oligonucleotide for detection of SNP TSC0013329
ttgggtaatgaat

SEQ ID NO: 45918 - DNA, 13 bp, Artificial Sequence
  Oligonucleotide for detection of SNP TSC0013329
attcattacccaa

SEQ ID NO: 45919 - DNA, 13 bp, Artificial Sequence
  Oligonucleotide for detection of SNP TSC0013329
ttgggtgatgaat

SEQ ID NO: 45920 - DNA, 13 bp, Artificial Sequence
  Oligonucleotide for detection of SNP TSC0013329
attcatcacccaa

SEQ ID NO: 45921 - DNA, 13 bp, Artificial Sequence
  Oligonucleotide for detection of SNP TSC0013331
gaaaaaggtttta

SEQ ID NO: 45922 - DNA, 13 bp, Artificial Sequence
  Oligonucleotide for detection of SNP TSC0013331
taaaacctttttc

SEQ ID NO: 45923 - DNA, 13 bp, Artificial Sequence
  Oligonucleotide for detection of SNP TSC0013331
gaaaaaagtttta

SEQ ID NO: 45924 - DNA, 13 bp, Artificial Sequence
  Oligonucleotide for detection of SNP TSC0013331
taaaacttttttc

SEQ ID NO: 45925 - DNA, 13 bp, Artificial Sequence
  Oligonucleotide for detection of SNP TSC0013332
gtaggaataggtt

SEQ ID NO: 45926 - DNA, 13 bp, Artificial Sequence
  Oligonucleotide for detection of SNP TSC0013332
aacctattcctac

SEQ ID NO: 45927 - DNA, 13 bp, Artificial Sequence
  Oligonucleotide for detection of SNP TSC0013332
gtaggattaggtt

SEQ ID NO: 45928 - DNA, 13 bp, Artificial Sequence
  Oligonucleotide for detection of SNP TSC0013332
aacctaatcctac

SEQ ID NO: 45929 - DNA, 13 bp, Artificial Sequence
  Oligonucleotide for detection of SNP TSC0013333
ggatatagtggta

SEQ ID NO: 45930 - DNA, 13 bp, Artificial Sequence
  Oligonucleotide for detection of SNP TSC0013333
taccactatatcc

SEQ ID NO: 45931 - DNA, 13 bp, Artificial Sequence
  Oligonucleotide for detection of SNP TSC0013333
ggatatggtggta

SEQ ID NO: 45932 - DNA, 13 bp, Artificial Sequence
  Oligonucleotide for detection of SNP TSC0013333
taccaccatatcc

SEQ ID NO: 45933 - DNA, 13 bp, Artificial Sequence
  Oligonucleotide for detection of SNP TSC0013338
gtttagttattty

SEQ ID NO: 45934 - DNA, 13 bp, Artificial Sequence
  Oligonucleotide for detection of SNP TSC0013338
raaataactaaac

SEQ ID NO: 45935 - DNA, 13 bp, Artificial Sequence
  Oligonucleotide for detection of SNP TSC0013338
gaagtggttgaay

SEQ ID NO: 45936 - DNA, 13 bp, Artificial Sequence
  Oligonucleotide for detection of SNP TSC0013338
rttcaaccacttc

SEQ ID NO: 45937 - DNA, 13 bp, Artificial Sequence
  Oligonucleotide for detection of SNP TSC0013338
gaagtgtttgaay

SEQ ID NO: 45938 - DNA, 13 bp, Artificial Sequence
  Oligonucleotide for detection of SNP TSC0013338
rttcaaacacttc

SEQ ID NO: 45939 - DNA, 13 bp, Artificial Sequence
  Oligonucleotide for detection of SNP TSC0013339
ttattttttttta

SEQ ID NO: 45940 - DNA, 13 bp, Artificial Sequence
  Oligonucleotide for detection of SNP TSC0013339
taaaaaaaaataa

SEQ ID NO: 45941 - DNA, 13 bp, Artificial Sequence
  Oligonucleotide for detection of SNP TSC0013339
tgaagggaagtgg

SEQ ID NO: 45942 - DNA, 13 bp, Artificial Sequence
  Oligonucleotide for detection of SNP TSC0013339
ccacttcccttca

SEQ ID NO: 45943 - DNA, 13 bp, Artificial Sequence
  Oligonucleotide for detection of SNP TSC0013339
tgaaggtaagtgg

SEQ ID NO: 45944 - DNA, 13 bp, Artificial Sequence
  Oligonucleotide for detection of SNP TSC0013339
ccacttaccttca

SEQ ID NO: 45945 - DNA, 13 bp, Artificial Sequence
  Oligonucleotide for detection of SNP TSC0013340
taaggttggttga

SEQ ID NO: 45946 - DNA, 13 bp, Artificial Sequence
  Oligonucleotide for detection of SNP TSC0013340
tcaaccaacctta

SEQ ID NO: 45947 - DNA, 13 bp, Artificial Sequence
  Oligonucleotide for detection of SNP TSC0013340
taaggtcggttga

SEQ ID NO: 45948 - DNA, 13 bp, Artificial Sequence
  Oligonucleotide for detection of SNP TSC0013340
tcaaccgacctta

SEQ ID NO: 45949 - DNA, 13 bp, Artificial Sequence
  Oligonucleotide for detection of SNP TSC0013340
taaggttggtcga

SEQ ID NO: 45950 - DNA, 13 bp, Artificial Sequence
  Oligonucleotide for detection of SNP TSC0013340
tcgaccaacctta

SEQ ID NO: 45951 - DNA, 13 bp, Artificial Sequence
  Oligonucleotide for detection of SNP TSC0013340
taaggtcggtcga

SEQ ID NO: 45952 - DNA, 13 bp, Artificial Sequence
  Oligonucleotide for detection of SNP TSC0013340
tcgaccgacctta

SEQ ID NO: 45953 - DNA, 13 bp, Artificial Sequence
  Oligonucleotide for detection of SNP TSC0013340
ttggttggttttg

SEQ ID NO: 45954 - DNA, 13 bp, Artificial Sequence
  Oligonucleotide for detection of SNP TSC0013340
caaaaccaaccaa

SEQ ID NO: 45955 - DNA, 13 bp, Artificial Sequence
  Oligonucleotide for detection of SNP TSC0013340
ttggttagttttg

SEQ ID NO: 45956 - DNA, 13 bp, Artificial Sequence
  Oligonucleotide for detection of SNP TSC0013340
caaaactaaccaa

SEQ ID NO: 45957 - DNA, 13 bp, Artificial Sequence
  Oligonucleotide for detection of SNP TSC0013340
tcggttggttttg

SEQ ID NO: 45958 - DNA, 13 bp, Artificial Sequence
  Oligonucleotide for detection of SNP TSC0013340
caaaaccaaccga

SEQ ID NO: 45959 - DNA, 13 bp, Artificial Sequence
  Oligonucleotide for detection of SNP TSC0013340
tcggttagttttg

SEQ ID NO: 45960 - DNA, 13 bp, Artificial Sequence
  Oligonucleotide for detection of SNP TSC0013340
caaaactaaccga

SEQ ID NO: 45961 - DNA, 13 bp, Artificial Sequence
  Oligonucleotide for detection of SNP TSC0013340
ttggtcggttttg

SEQ ID NO: 45962 - DNA, 13 bp, Artificial Sequence
  Oligonucleotide for detection of SNP TSC0013340
caaaaccgaccaa

SEQ ID NO: 45963 - DNA, 13 bp, Artificial Sequence
  Oligonucleotide for detection of SNP TSC0013340
tcggtcggttttg

SEQ ID NO: 45964 - DNA, 13 bp, Artificial Sequence
  Oligonucleotide for detection of SNP TSC0013340
caaaaccgaccga

SEQ ID NO: 45965 - DNA, 13 bp, Artificial Sequence
  Oligonucleotide for detection of SNP TSC0013341
tgtgattggtagy

SEQ ID NO: 45966 - DNA, 13 bp, Artificial Sequence
  Oligonucleotide for detection of SNP TSC0013341
rctaccaatcaca

SEQ ID NO: 45967 - DNA, 13 bp, Artificial Sequence
  Oligonucleotide for detection of SNP TSC0013341
cgtgattggtagy

SEQ ID NO: 45968 - DNA, 13 bp, Artificial Sequence
  Oligonucleotide for detection of SNP TSC0013341
rctaccaatcacg

SEQ ID NO: 45969 - DNA, 13 bp, Artificial Sequence
  Oligonucleotide for detection of SNP TSC0013341
tgcgattggtagy

SEQ ID NO: 45970 - DNA, 13 bp, Artificial Sequence
  Oligonucleotide for detection of SNP TSC0013341
rctaccaatcgca

SEQ ID NO: 45971 - DNA, 13 bp, Artificial Sequence
  Oligonucleotide for detection of SNP TSC0013341
tgtgatcggtagy

SEQ ID NO: 45972 - DNA, 13 bp, Artificial Sequence
  Oligonucleotide for detection of SNP TSC0013341
rctaccgatcaca

SEQ ID NO: 45973 - DNA, 13 bp, Artificial Sequence
  Oligonucleotide for detection of SNP TSC0013341
cgcgattggtagy

SEQ ID NO: 45974 - DNA, 13 bp, Artificial Sequence
  Oligonucleotide for detection of SNP TSC0013341
rctaccaatcgcg

SEQ ID NO: 45975 - DNA, 13 bp, Artificial Sequence
  Oligonucleotide for detection of SNP TSC0013341
cgtgatcggtagy

SEQ ID NO: 45976 - DNA, 13 bp, Artificial Sequence
  Oligonucleotide for detection of SNP TSC0013341
rctaccgatcacg

SEQ ID NO: 45977 - DNA, 13 bp, Artificial Sequence
  Oligonucleotide for detection of SNP TSC0013341
tgcgatcggtagy

SEQ ID NO: 45978 - DNA, 13 bp, Artificial Sequence
  Oligonucleotide for detection of SNP TSC0013341
rctaccgatcgca

SEQ ID NO: 45979 - DNA, 13 bp, Artificial Sequence
  Oligonucleotide for detection of SNP TSC0013341
cgcgatcggtagy

SEQ ID NO: 45980 - DNA, 13 bp, Artificial Sequence
  Oligonucleotide for detection of SNP TSC0013341
rctaccgatcgcg

SEQ ID NO: 45981 - DNA, 13 bp, Artificial Sequence
  Oligonucleotide for detection of SNP TSC0013341
gttgttgattgtg

SEQ ID NO: 45982 - DNA, 13 bp, Artificial Sequence
  Oligonucleotide for detection of SNP TSC0013341
cacaatcaacaac

SEQ ID NO: 45983 - DNA, 13 bp, Artificial Sequence
  Oligonucleotide for detection of SNP TSC0013341
gttgttaattgtg

SEQ ID NO: 45984 - DNA, 13 bp, Artificial Sequence
  Oligonucleotide for detection of SNP TSC0013341
cacaattaacaac

SEQ ID NO: 45985 - DNA, 13 bp, Artificial Sequence
  Oligonucleotide for detection of SNP TSC0013341
gttgtcgattgtg

SEQ ID NO: 45986 - DNA, 13 bp, Artificial Sequence
  Oligonucleotide for detection of SNP TSC0013341
cacaatcgacaac

SEQ ID NO: 45987 - DNA, 13 bp, Artificial Sequence
  Oligonucleotide for detection of SNP TSC0013341
gttgttaatcgtg

SEQ ID NO: 45988 - DNA, 13 bp, Artificial Sequence
  Oligonucleotide for detection of SNP TSC0013341
cacgattaacaac

SEQ ID NO: 45989 - DNA, 13 bp, Artificial Sequence
  Oligonucleotide for detection of SNP TSC0013341
gttgttgatcgtg

SEQ ID NO: 45990 - DNA, 13 bp, Artificial Sequence
  Oligonucleotide for detection of SNP TSC0013341
cacgatcaacaac

SEQ ID NO: 45991 - DNA, 13 bp, Artificial Sequence
  Oligonucleotide for detection of SNP TSC0013341
gttgttaattgcg

SEQ ID NO: 45992 - DNA, 13 bp, Artificial Sequence
  Oligonucleotide for detection of SNP TSC0013341
cgcaattaacaac

SEQ ID NO: 45993 - DNA, 13 bp, Artificial Sequence
  Oligonucleotide for detection of SNP TSC0013341
gttgttgattgcg

SEQ ID NO: 45994 - DNA, 13 bp, Artificial Sequence
  Oligonucleotide for detection of SNP TSC0013341
cgcaatcaacaac

SEQ ID NO: 45995 - DNA, 13 bp, Artificial Sequence
  Oligonucleotide for detection of SNP TSC0013341
gttgttaatcgcg

SEQ ID NO: 45996 - DNA, 13 bp, Artificial Sequence
  Oligonucleotide for detection of SNP TSC0013341
cgcgattaacaac

SEQ ID NO: 45997 - DNA, 13 bp, Artificial Sequence
  Oligonucleotide for detection of SNP TSC0013341
gttgtcgatcgtg

SEQ ID NO: 45998 - DNA, 13 bp, Artificial Sequence
  Oligonucleotide for detection of SNP TSC0013341
cacgatcgacaac

SEQ ID NO: 45999 - DNA, 13 bp, Artificial Sequence
  Oligonucleotide for detection of SNP TSC0013341
gttgtcgattgcg

SEQ ID NO: 46000 - DNA, 13 bp, Artificial Sequence
  Oligonucleotide for detection of SNP TSC0013341
cgcaatcgacaac

SEQ ID NO: 46001 - DNA, 13 bp, Artificial Sequence
  Oligonucleotide for detection of SNP TSC0013341
gttgttgatcgcg

SEQ ID NO: 46002 - DNA, 13 bp, Artificial Sequence
  Oligonucleotide for detection of SNP TSC0013341
cgcgatcaacaac

SEQ ID NO: 46003 - DNA, 13 bp, Artificial Sequence
  Oligonucleotide for detection of SNP TSC0013341
gttgtcgatcgcg

SEQ ID NO: 46004 - DNA, 13 bp, Artificial Sequence
  Oligonucleotide for detection of SNP TSC0013341
cgcgatcgacaac

SEQ ID NO: 46005 - DNA, 13 bp, Artificial Sequence
  Oligonucleotide for detection of SNP TSC0013342
gggaatattaaat

SEQ ID NO: 46006 - DNA, 13 bp, Artificial Sequence
  Oligonucleotide for detection of SNP TSC0013342
atttaatattccc

SEQ ID NO: 46007 - DNA, 13 bp, Artificial Sequence
  Oligonucleotide for detection of SNP TSC0013342
gggaattttaaat

SEQ ID NO: 46008 - DNA, 13 bp, Artificial Sequence
  Oligonucleotide for detection of SNP TSC0013342
atttaaaattccc

SEQ ID NO: 46009 - DNA, 13 bp, Artificial Sequence
  Oligonucleotide for detection of SNP TSC0013342
atttggtgtttty

SEQ ID NO: 46010 - DNA, 13 bp, Artificial Sequence
  Oligonucleotide for detection of SNP TSC0013342
raaaacaccaaat

SEQ ID NO: 46011 - DNA, 13 bp, Artificial Sequence
  Oligonucleotide for detection of SNP TSC0013342
atttggggtttty

SEQ ID NO: 46012 - DNA, 13 bp, Artificial Sequence
  Oligonucleotide for detection of SNP TSC0013342
raaaaccccaaat

SEQ ID NO: 46013 - DNA, 13 bp, Artificial Sequence
  Oligonucleotide for detection of SNP TSC0013343
gtttataggttty

SEQ ID NO: 46014 - DNA, 13 bp, Artificial Sequence
  Oligonucleotide for detection of SNP TSC0013343
raaacctataaac

SEQ ID NO: 46015 - DNA, 13 bp, Artificial Sequence
  Oligonucleotide for detection of SNP TSC0013343
gtttatgggttty

SEQ ID NO: 46016 - DNA, 13 bp, Artificial Sequence
  Oligonucleotide for detection of SNP TSC0013343
raaacccataaac

SEQ ID NO: 46017 - DNA, 13 bp, Artificial Sequence
  Oligonucleotide for detection of SNP TSC0013344
tttattattggtg

SEQ ID NO: 46018 - DNA, 13 bp, Artificial Sequence
  Oligonucleotide for detection of SNP TSC0013344
caccaataataaa

SEQ ID NO: 46019 - DNA, 13 bp, Artificial Sequence
  Oligonucleotide for detection of SNP TSC0013344
tttattgttggtg

SEQ ID NO: 46020 - DNA, 13 bp, Artificial Sequence
  Oligonucleotide for detection of SNP TSC0013344
caccaacaataaa

SEQ ID NO: 46021 - DNA, 13 bp, Artificial Sequence
  Oligonucleotide for detection of SNP TSC0013344
tttatcgttggtg

SEQ ID NO: 46022 - DNA, 13 bp, Artificial Sequence
  Oligonucleotide for detection of SNP TSC0013344
caccaacgataaa

SEQ ID NO: 46023 - DNA, 13 bp, Artificial Sequence
  Oligonucleotide for detection of SNP TSC0013344
tattagtggtggg

SEQ ID NO: 46024 - DNA, 13 bp, Artificial Sequence
  Oligonucleotide for detection of SNP TSC0013344
cccaccactaata

SEQ ID NO: 46025 - DNA, 13 bp, Artificial Sequence
  Oligonucleotide for detection of SNP TSC0013344
tattagcggtggg

SEQ ID NO: 46026 - DNA, 13 bp, Artificial Sequence
  Oligonucleotide for detection of SNP TSC0013344
cccaccgctaata

SEQ ID NO: 46027 - DNA, 13 bp, Artificial Sequence
  Oligonucleotide for detection of SNP TSC0013345
tgtaaaaatttty

SEQ ID NO: 46028 - DNA, 13 bp, Artificial Sequence
  Oligonucleotide for detection of SNP TSC0013345
raaaatttttaca

SEQ ID NO: 46029 - DNA, 13 bp, Artificial Sequence
  Oligonucleotide for detection of SNP TSC0013345
tgtaaatatttty

SEQ ID NO: 46030 - DNA, 13 bp, Artificial Sequence
  Oligonucleotide for detection of SNP TSC0013345
raaaatatttaca

SEQ ID NO: 46031 - DNA, 13 bp, Artificial Sequence
  Oligonucleotide for detection of SNP TSC0013345
gaggatttttgta

SEQ ID NO: 46032 - DNA, 13 bp, Artificial Sequence
  Oligonucleotide for detection of SNP TSC0013345
tacaaaaatcctc

SEQ ID NO: 46033 - DNA, 13 bp, Artificial Sequence
  Oligonucleotide for detection of SNP TSC0013345
gaggatatttgta

SEQ ID NO: 46034 - DNA, 13 bp, Artificial Sequence
  Oligonucleotide for detection of SNP TSC0013345
tacaaatatcctc

SEQ ID NO: 46035 - DNA, 13 bp, Artificial Sequence
  Oligonucleotide for detection of SNP TSC0013350
ttaaggtagaagy

SEQ ID NO: 46036 - DNA, 13 bp, Artificial Sequence
  Oligonucleotide for detection of SNP TSC0013350
rcttctaccttaa

SEQ ID NO: 46037 - DNA, 13 bp, Artificial Sequence
  Oligonucleotide for detection of SNP TSC0013350
ttaagggagaagy

SEQ ID NO: 46038 - DNA, 13 bp, Artificial Sequence
  Oligonucleotide for detection of SNP TSC0013350
rcttctcccttaa

SEQ ID NO: 46039 - DNA, 13 bp, Artificial Sequence
  Oligonucleotide for detection of SNP TSC0013350
gtttttgttttgg

SEQ ID NO: 46040 - DNA, 13 bp, Artificial Sequence
  Oligonucleotide for detection of SNP TSC0013350
ccaaaacaaaaac

SEQ ID NO: 46041 - DNA, 13 bp, Artificial Sequence
  Oligonucleotide for detection of SNP TSC0013350
gttttttttttgg

SEQ ID NO: 46042 - DNA, 13 bp, Artificial Sequence
  Oligonucleotide for detection of SNP TSC0013350
ccaaaaaaaaaac

SEQ ID NO: 46043 - DNA, 13 bp, Artificial Sequence
  Oligonucleotide for detection of SNP TSC0013351
tatttagttgtta

SEQ ID NO: 46044 - DNA, 13 bp, Artificial Sequence
  Oligonucleotide for detection of SNP TSC0013351
taacaactaaata

SEQ ID NO: 46045 - DNA, 13 bp, Artificial Sequence
  Oligonucleotide for detection of SNP TSC0013351
tatttatttgtta

SEQ ID NO: 46046 - DNA, 13 bp, Artificial Sequence
  Oligonucleotide for detection of SNP TSC0013351
taacaaataaata

SEQ ID NO: 46047 - DNA, 13 bp, Artificial Sequence
  Oligonucleotide for detection of SNP TSC0013351
tgataattgggtg

SEQ ID NO: 46048 - DNA, 13 bp, Artificial Sequence
  Oligonucleotide for detection of SNP TSC0013351
cacccaattatca

SEQ ID NO: 46049 - DNA, 13 bp, Artificial Sequence
  Oligonucleotide for detection of SNP TSC0013351
tgataaatgggtg

SEQ ID NO: 46050 - DNA, 13 bp, Artificial Sequence
  Oligonucleotide for detection of SNP TSC0013351
cacccatttatca

SEQ ID NO: 46051 - DNA, 13 bp, Artificial Sequence
  Oligonucleotide for detection of SNP TSC0013352
atatataattttg

SEQ ID NO: 46052 - DNA, 13 bp, Artificial Sequence
  Oligonucleotide for detection of SNP TSC0013352
caaaattatatat

SEQ ID NO: 46053 - DNA, 13 bp, Artificial Sequence
  Oligonucleotide for detection of SNP TSC0013352
atatatgattttg

SEQ ID NO: 46054 - DNA, 13 bp, Artificial Sequence
  Oligonucleotide for detection of SNP TSC0013352
caaaatcatatat

SEQ ID NO: 46055 - DNA, 13 bp, Artificial Sequence
  Oligonucleotide for detection of SNP TSC0013352
atatacgattttg

SEQ ID NO: 46056 - DNA, 13 bp, Artificial Sequence
  Oligonucleotide for detection of SNP TSC0013352
caaaatcgtatat

SEQ ID NO: 46057 - DNA, 13 bp, Artificial Sequence
  Oligonucleotide for detection of SNP TSC0013352
taaagttgtatgt

SEQ ID NO: 46058 - DNA, 13 bp, Artificial Sequence
  Oligonucleotide for detection of SNP TSC0013352
acatacaacttta

SEQ ID NO: 46059 - DNA, 13 bp, Artificial Sequence
  Oligonucleotide for detection of SNP TSC0013352
taaagtcgtatgt

SEQ ID NO: 46060 - DNA, 13 bp, Artificial Sequence
  Oligonucleotide for detection of SNP TSC0013352
acatacgacttta

SEQ ID NO: 46061 - DNA, 13 bp, Artificial Sequence
  Oligonucleotide for detection of SNP TSC0013353
tttttttaaagat

SEQ ID NO: 46062 - DNA, 13 bp, Artificial Sequence
  Oligonucleotide for detection of SNP TSC0013353
atctttaaaaaaa

SEQ ID NO: 46063 - DNA, 13 bp, Artificial Sequence
  Oligonucleotide for detection of SNP TSC0013353
ttttttgaaagat

SEQ ID NO: 46064 - DNA, 13 bp, Artificial Sequence
  Oligonucleotide for detection of SNP TSC0013353
atctttcaaaaaa

SEQ ID NO: 46065 - DNA, 13 bp, Artificial Sequence
  Oligonucleotide for detection of SNP TSC0013353
atttttgaaggaa

SEQ ID NO: 46066 - DNA, 13 bp, Artificial Sequence
  Oligonucleotide for detection of SNP TSC0013353
ttccttcaaaaat

SEQ ID NO: 46067 - DNA, 13 bp, Artificial Sequence
  Oligonucleotide for detection of SNP TSC0013353
attttttaaggaa

SEQ ID NO: 46068 - DNA, 13 bp, Artificial Sequence
  Oligonucleotide for detection of SNP TSC0013353
ttccttaaaaaat

SEQ ID NO: 46069 - DNA, 13 bp, Artificial Sequence
  Oligonucleotide for detection of SNP TSC0013354
gttgtttgtgtgt

SEQ ID NO: 46070 - DNA, 13 bp, Artificial Sequence
  Oligonucleotide for detection of SNP TSC0013354
acacacaaacaac

SEQ ID NO: 46071 - DNA, 13 bp, Artificial Sequence
  Oligonucleotide for detection of SNP TSC0013354
gttgttcgtgtgt

SEQ ID NO: 46072 - DNA, 13 bp, Artificial Sequence
  Oligonucleotide for detection of SNP TSC0013354
acacacgaacaac

SEQ ID NO: 46073 - DNA, 13 bp, Artificial Sequence
  Oligonucleotide for detection of SNP TSC0013354
atatatgaatagy

SEQ ID NO: 46074 - DNA, 13 bp, Artificial Sequence
  Oligonucleotide for detection of SNP TSC0013354
rctattcatatat

SEQ ID NO: 46075 - DNA, 13 bp, Artificial Sequence
  Oligonucleotide for detection of SNP TSC0013354
atatataaatagy

SEQ ID NO: 46076 - DNA, 13 bp, Artificial Sequence
  Oligonucleotide for detection of SNP TSC0013354
rctatttatatat

SEQ ID NO: 46077 - DNA, 13 bp, Artificial Sequence
  Oligonucleotide for detection of SNP TSC0013354
atatacgaatagy

SEQ ID NO: 46078 - DNA, 13 bp, Artificial Sequence
  Oligonucleotide for detection of SNP TSC0013354
rctattcgtatat

SEQ ID NO: 46079 - DNA, 13 bp, Artificial Sequence
  Oligonucleotide for detection of SNP TSC0013355
atttttaaagtga

SEQ ID NO: 46080 - DNA, 13 bp, Artificial Sequence
  Oligonucleotide for detection of SNP TSC0013355
tcactttaaaaat

SEQ ID NO: 46081 - DNA, 13 bp, Artificial Sequence
  Oligonucleotide for detection of SNP TSC0013355
attttttaagtga

SEQ ID NO: 46082 - DNA, 13 bp, Artificial Sequence
  Oligonucleotide for detection of SNP TSC0013355
tcacttaaaaaat

SEQ ID NO: 46083 - DNA, 13 bp, Artificial Sequence
  Oligonucleotide for detection of SNP TSC0013355
ttattttaaaagt

SEQ ID NO: 46084 - DNA, 13 bp, Artificial Sequence
  Oligonucleotide for detection of SNP TSC0013355
acttttaaaataa

SEQ ID NO: 46085 - DNA, 13 bp, Artificial Sequence
  Oligonucleotide for detection of SNP TSC0013356
ggtttaattttat

SEQ ID NO: 46086 - DNA, 13 bp, Artificial Sequence
  Oligonucleotide for detection of SNP TSC0013356
ataaaattaaacc

SEQ ID NO: 46087 - DNA, 13 bp, Artificial Sequence
  Oligonucleotide for detection of SNP TSC0013356
ggtttatttttat

SEQ ID NO: 46088 - DNA, 13 bp, Artificial Sequence
  Oligonucleotide for detection of SNP TSC0013356
ataaaaataaacc

SEQ ID NO: 46089 - DNA, 13 bp, Artificial Sequence
  Oligonucleotide for detection of SNP TSC0013356
atagagttgaaty

SEQ ID NO: 46090 - DNA, 13 bp, Artificial Sequence
  Oligonucleotide for detection of SNP TSC0013356
rattcaactctat

SEQ ID NO: 46091 - DNA, 13 bp, Artificial Sequence
  Oligonucleotide for detection of SNP TSC0013356
atagagatgaaty

SEQ ID NO: 46092 - DNA, 13 bp, Artificial Sequence
  Oligonucleotide for detection of SNP TSC0013356
rattcatctctat

SEQ ID NO: 46093 - DNA, 13 bp, Artificial Sequence
  Oligonucleotide for detection of SNP TSC0013357
tttatagtgaaay

SEQ ID NO: 46094 - DNA, 13 bp, Artificial Sequence
  Oligonucleotide for detection of SNP TSC0013357
rtttcactataaa

SEQ ID NO: 46095 - DNA, 13 bp, Artificial Sequence
  Oligonucleotide for detection of SNP TSC0013357
tttataatgaaay

SEQ ID NO: 46096 - DNA, 13 bp, Artificial Sequence
  Oligonucleotide for detection of SNP TSC0013357
rtttcattataaa

SEQ ID NO: 46097 - DNA, 13 bp, Artificial Sequence
  Oligonucleotide for detection of SNP TSC0013358
gtattatatggta

SEQ ID NO: 46098 - DNA, 13 bp, Artificial Sequence
  Oligonucleotide for detection of SNP TSC0013358
taccatataatac

SEQ ID NO: 46099 - DNA, 13 bp, Artificial Sequence
  Oligonucleotide for detection of SNP TSC0013358
gtattagatggta

SEQ ID NO: 46100 - DNA, 13 bp, Artificial Sequence
  Oligonucleotide for detection of SNP TSC0013358
taccatctaatac

SEQ ID NO: 46101 - DNA, 13 bp, Artificial Sequence
  Oligonucleotide for detection of SNP TSC0013358
tattatgtaatay

SEQ ID NO: 46102 - DNA, 13 bp, Artificial Sequence
  Oligonucleotide for detection of SNP TSC0013358
rtattacataata

SEQ ID NO: 46103 - DNA, 13 bp, Artificial Sequence
  Oligonucleotide for detection of SNP TSC0013358
tattatttaatay

SEQ ID NO: 46104 - DNA, 13 bp, Artificial Sequence
  Oligonucleotide for detection of SNP TSC0013358
rtattaaataata

SEQ ID NO: 46105 - DNA, 13 bp, Artificial Sequence
  Oligonucleotide for detection of SNP TSC0013359
tgaagtagggtgt

SEQ ID NO: 46106 - DNA, 13 bp, Artificial Sequence
  Oligonucleotide for detection of SNP TSC0013359
acaccctacttca

SEQ ID NO: 46107 - DNA, 13 bp, Artificial Sequence
  Oligonucleotide for detection of SNP TSC0013359
tgaagttgggtgt

SEQ ID NO: 46108 - DNA, 13 bp, Artificial Sequence
  Oligonucleotide for detection of SNP TSC0013359
acacccaacttca

SEQ ID NO: 46109 - DNA, 13 bp, Artificial Sequence
  Oligonucleotide for detection of SNP TSC0013359
tgaagtcgggtgt

SEQ ID NO: 46110 - DNA, 13 bp, Artificial Sequence
  Oligonucleotide for detection of SNP TSC0013359
acacccgacttca

SEQ ID NO: 46111 - DNA, 13 bp, Artificial Sequence
  Oligonucleotide for detection of SNP TSC0013359
atattttatttta

SEQ ID NO: 46112 - DNA, 13 bp, Artificial Sequence
  Oligonucleotide for detection of SNP TSC0013359
taaaataaaatat

SEQ ID NO: 46113 - DNA, 13 bp, Artificial Sequence
  Oligonucleotide for detection of SNP TSC0013359
atatttgatttta

SEQ ID NO: 46114 - DNA, 13 bp, Artificial Sequence
  Oligonucleotide for detection of SNP TSC0013359
taaaatcaaatat

SEQ ID NO: 46115 - DNA, 13 bp, Artificial Sequence
  Oligonucleotide for detection of SNP TSC0013359
atattcgatttta

SEQ ID NO: 46116 - DNA, 13 bp, Artificial Sequence
  Oligonucleotide for detection of SNP TSC0013359
taaaatcgaatat

SEQ ID NO: 46117 - DNA, 13 bp, Artificial Sequence
  Oligonucleotide for detection of SNP TSC0013360
taaaggatagtga

SEQ ID NO: 46118 - DNA, 13 bp, Artificial Sequence
  Oligonucleotide for detection of SNP TSC0013360
tcactatccttta

SEQ ID NO: 46119 - DNA, 13 bp, Artificial Sequence
  Oligonucleotide for detection of SNP TSC0013360
taaagggtagtga

SEQ ID NO: 46120 - DNA, 13 bp, Artificial Sequence
  Oligonucleotide for detection of SNP TSC0013360
tcactacccttta

SEQ ID NO: 46121 - DNA, 13 bp, Artificial Sequence
  Oligonucleotide for detection of SNP TSC0013360
taaaggatagcga

SEQ ID NO: 46122 - DNA, 13 bp, Artificial Sequence
  Oligonucleotide for detection of SNP TSC0013360
tcgctatccttta

SEQ ID NO: 46123 - DNA, 13 bp, Artificial Sequence
  Oligonucleotide for detection of SNP TSC0013360
taaagggtagcga

SEQ ID NO: 46124 - DNA, 13 bp, Artificial Sequence
  Oligonucleotide for detection of SNP TSC0013360
tcgctacccttta

SEQ ID NO: 46125 - DNA, 13 bp, Artificial Sequence
  Oligonucleotide for detection of SNP TSC0013363
agatgtatttaaa

SEQ ID NO: 46126 - DNA, 13 bp, Artificial Sequence
  Oligonucleotide for detection of SNP TSC0013363
tttaaatacatct

SEQ ID NO: 46127 - DNA, 13 bp, Artificial Sequence
  Oligonucleotide for detection of SNP TSC0013363
agatgtgtttaaa

SEQ ID NO: 46128 - DNA, 13 bp, Artificial Sequence
  Oligonucleotide for detection of SNP TSC0013363
tttaaacacatct

SEQ ID NO: 46129 - DNA, 13 bp, Artificial Sequence
  Oligonucleotide for detection of SNP TSC0013364
gttatggggagaa

SEQ ID NO: 46130 - DNA, 13 bp, Artificial Sequence
  Oligonucleotide for detection of SNP TSC0013364
ttctccccataac

SEQ ID NO: 46131 - DNA, 13 bp, Artificial Sequence
  Oligonucleotide for detection of SNP TSC0013364
gttatgaggagaa

SEQ ID NO: 46132 - DNA, 13 bp, Artificial Sequence
  Oligonucleotide for detection of SNP TSC0013364
ttctcctcataac

SEQ ID NO: 46133 - DNA, 13 bp, Artificial Sequence
  Oligonucleotide for detection of SNP TSC0013365
tagaaggttttat

SEQ ID NO: 46134 - DNA, 13 bp, Artificial Sequence
  Oligonucleotide for detection of SNP TSC0013365
ataaaaccttcta

SEQ ID NO: 46135 - DNA, 13 bp, Artificial Sequence
  Oligonucleotide for detection of SNP TSC0013365
tagaagattttat

SEQ ID NO: 46136 - DNA, 13 bp, Artificial Sequence
  Oligonucleotide for detection of SNP TSC0013365
ataaaatcttcta

SEQ ID NO: 46137 - DNA, 13 bp, Artificial Sequence
  Oligonucleotide for detection of SNP TSC0013366
atgaatattttty

SEQ ID NO: 46138 - DNA, 13 bp, Artificial Sequence
  Oligonucleotide for detection of SNP TSC0013366
raaaaatattcat

SEQ ID NO: 46139 - DNA, 13 bp, Artificial Sequence
  Oligonucleotide for detection of SNP TSC0013366
atgaatgttttty

SEQ ID NO: 46140 - DNA, 13 bp, Artificial Sequence
  Oligonucleotide for detection of SNP TSC0013366
raaaaacattcat

SEQ ID NO: 46141 - DNA, 13 bp, Artificial Sequence
  Oligonucleotide for detection of SNP TSC0013366
acgaatattttty

SEQ ID NO: 46142 - DNA, 13 bp, Artificial Sequence
  Oligonucleotide for detection of SNP TSC0013366
raaaaatattcgt

SEQ ID NO: 46143 - DNA, 13 bp, Artificial Sequence
  Oligonucleotide for detection of SNP TSC0013366
acgaatgttttty

SEQ ID NO: 46144 - DNA, 13 bp, Artificial Sequence
  Oligonucleotide for detection of SNP TSC0013366
raaaaacattcgt

SEQ ID NO: 46145 - DNA, 13 bp, Artificial Sequence
  Oligonucleotide for detection of SNP TSC0013366
atgaacgttttty

SEQ ID NO: 46146 - DNA, 13 bp, Artificial Sequence
  Oligonucleotide for detection of SNP TSC0013366
raaaaacgttcat

SEQ ID NO: 46147 - DNA, 13 bp, Artificial Sequence
  Oligonucleotide for detection of SNP TSC0013366
acgaacgttttty

SEQ ID NO: 46148 - DNA, 13 bp, Artificial Sequence
  Oligonucleotide for detection of SNP TSC0013366
raaaaacgttcgt

SEQ ID NO: 46149 - DNA, 13 bp, Artificial Sequence
  Oligonucleotide for detection of SNP TSC0013366
gaaaggtgtttgt

SEQ ID NO: 46150 - DNA, 13 bp, Artificial Sequence
  Oligonucleotide for detection of SNP TSC0013366
acaaacacctttc

SEQ ID NO: 46151 - DNA, 13 bp, Artificial Sequence
  Oligonucleotide for detection of SNP TSC0013366
gaaaggtgttcgt

SEQ ID NO: 46152 - DNA, 13 bp, Artificial Sequence
  Oligonucleotide for detection of SNP TSC0013366
acgaacacctttc

SEQ ID NO: 46153 - DNA, 13 bp, Artificial Sequence
  Oligonucleotide for detection of SNP TSC0013366
gaaaggcgtttgt

SEQ ID NO: 46154 - DNA, 13 bp, Artificial Sequence
  Oligonucleotide for detection of SNP TSC0013366
acaaacgcctttc

SEQ ID NO: 46155 - DNA, 13 bp, Artificial Sequence
  Oligonucleotide for detection of SNP TSC0013366
gaaaggcgttcgt

SEQ ID NO: 46156 - DNA, 13 bp, Artificial Sequence
  Oligonucleotide for detection of SNP TSC0013366
acgaacgcctttc

SEQ ID NO: 46157 - DNA, 13 bp, Artificial Sequence
  Oligonucleotide for detection of SNP TSC0013367
taagtagagtggt

SEQ ID NO: 46158 - DNA, 13 bp, Artificial Sequence
  Oligonucleotide for detection of SNP TSC0013367
accactctactta

SEQ ID NO: 46159 - DNA, 13 bp, Artificial Sequence
  Oligonucleotide for detection of SNP TSC0013367
taagtaaagtggt

SEQ ID NO: 46160 - DNA, 13 bp, Artificial Sequence
  Oligonucleotide for detection of SNP TSC0013367
accactttactta

SEQ ID NO: 46161 - DNA, 13 bp, Artificial Sequence
  Oligonucleotide for detection of SNP TSC0013371
ggttgaattttgt

SEQ ID NO: 46162 - DNA, 13 bp, Artificial Sequence
  Oligonucleotide for detection of SNP TSC0013371
acaaaattcaacc

SEQ ID NO: 46163 - DNA, 13 bp, Artificial Sequence
  Oligonucleotide for detection of SNP TSC0013371
ggttgagttttgt

SEQ ID NO: 46164 - DNA, 13 bp, Artificial Sequence
  Oligonucleotide for detection of SNP TSC0013371
acaaaactcaacc

SEQ ID NO: 46165 - DNA, 13 bp, Artificial Sequence
  Oligonucleotide for detection of SNP TSC0013372
taaggtattttag

SEQ ID NO: 46166 - DNA, 13 bp, Artificial Sequence
  Oligonucleotide for detection of SNP TSC0013372
ctaaaatacctta

SEQ ID NO: 46167 - DNA, 13 bp, Artificial Sequence
  Oligonucleotide for detection of SNP TSC0013372
taaggttttttag

SEQ ID NO: 46168 - DNA, 13 bp, Artificial Sequence
  Oligonucleotide for detection of SNP TSC0013372
ctaaaaaacctta

SEQ ID NO: 46169 - DNA, 13 bp, Artificial Sequence
  Oligonucleotide for detection of SNP TSC0013372
ttaaaatattttg

SEQ ID NO: 46170 - DNA, 13 bp, Artificial Sequence
  Oligonucleotide for detection of SNP TSC0013372
caaaatattttaa

SEQ ID NO: 46171 - DNA, 13 bp, Artificial Sequence
  Oligonucleotide for detection of SNP TSC0013372
ttaaaagattttg

SEQ ID NO: 46172 - DNA, 13 bp, Artificial Sequence
  Oligonucleotide for detection of SNP TSC0013372
caaaatcttttaa

SEQ ID NO: 46173 - DNA, 13 bp, Artificial Sequence
  Oligonucleotide for detection of SNP TSC0013373
gttttatagttay

SEQ ID NO: 46174 - DNA, 13 bp, Artificial Sequence
  Oligonucleotide for detection of SNP TSC0013373
rtaactataaaac

SEQ ID NO: 46175 - DNA, 13 bp, Artificial Sequence
  Oligonucleotide for detection of SNP TSC0013373
gttttagagttay

SEQ ID NO: 46176 - DNA, 13 bp, Artificial Sequence
  Oligonucleotide for detection of SNP TSC0013373
rtaactctaaaac

SEQ ID NO: 46177 - DNA, 13 bp, Artificial Sequence
  Oligonucleotide for detection of SNP TSC0013373
gtagttgtaaaay

SEQ ID NO: 46178 - DNA, 13 bp, Artificial Sequence
  Oligonucleotide for detection of SNP TSC0013373
rttttacaactac

SEQ ID NO: 46179 - DNA, 13 bp, Artificial Sequence
  Oligonucleotide for detection of SNP TSC0013373
gtagttttaaaay

SEQ ID NO: 46180 - DNA, 13 bp, Artificial Sequence
  Oligonucleotide for detection of SNP TSC0013373
rttttaaaactac

SEQ ID NO: 46181 - DNA, 13 bp, Artificial Sequence
  Oligonucleotide for detection of SNP TSC0013375
gaaattgttttat

SEQ ID NO: 46182 - DNA, 13 bp, Artificial Sequence
  Oligonucleotide for detection of SNP TSC0013375
ataaaacaatttc

SEQ ID NO: 46183 - DNA, 13 bp, Artificial Sequence
  Oligonucleotide for detection of SNP TSC0013375
gaaatcgttttat

SEQ ID NO: 46184 - DNA, 13 bp, Artificial Sequence
  Oligonucleotide for detection of SNP TSC0013375
ataaaacgatttc

SEQ ID NO: 46185 - DNA, 13 bp, Artificial Sequence
  Oligonucleotide for detection of SNP TSC0013375
ataaagtggttty

SEQ ID NO: 46186 - DNA, 13 bp, Artificial Sequence
  Oligonucleotide for detection of SNP TSC0013375
raaaccactttat

SEQ ID NO: 46187 - DNA, 13 bp, Artificial Sequence
  Oligonucleotide for detection of SNP TSC0013375
ataaagaggttty

SEQ ID NO: 46188 - DNA, 13 bp, Artificial Sequence
  Oligonucleotide for detection of SNP TSC0013375
raaacctctttat

SEQ ID NO: 46189 - DNA, 13 bp, Artificial Sequence
  Oligonucleotide for detection of SNP TSC0013375
ataaagcggttty

SEQ ID NO: 46190 - DNA, 13 bp, Artificial Sequence
  Oligonucleotide for detection of SNP TSC0013375
raaaccgctttat

SEQ ID NO: 46191 - DNA, 13 bp, Artificial Sequence
  Oligonucleotide for detection of SNP TSC0013376
aattttattatay

SEQ ID NO: 46192 - DNA, 13 bp, Artificial Sequence
  Oligonucleotide for detection of SNP TSC0013376
rtataataaaatt

SEQ ID NO: 46193 - DNA, 13 bp, Artificial Sequence
  Oligonucleotide for detection of SNP TSC0013376
aattttgttatay

SEQ ID NO: 46194 - DNA, 13 bp, Artificial Sequence
  Oligonucleotide for detection of SNP TSC0013376
rtataacaaaatt

SEQ ID NO: 46195 - DNA, 13 bp, Artificial Sequence
  Oligonucleotide for detection of SNP TSC0013376
aatttcgttatay

SEQ ID NO: 46196 - DNA, 13 bp, Artificial Sequence
  Oligonucleotide for detection of SNP TSC0013376
rtataacgaaatt

SEQ ID NO: 46197 - DNA, 13 bp, Artificial Sequence
  Oligonucleotide for detection of SNP TSC0013376
gtgtggtggaatt

SEQ ID NO: 46198 - DNA, 13 bp, Artificial Sequence
  Oligonucleotide for detection of SNP TSC0013376
aattccaccacac

SEQ ID NO: 46199 - DNA, 13 bp, Artificial Sequence
  Oligonucleotide for detection of SNP TSC0013376
gtgtggcggaatt

SEQ ID NO: 46200 - DNA, 13 bp, Artificial Sequence
  Oligonucleotide for detection of SNP TSC0013376
aattccgccacac

SEQ ID NO: 46201 - DNA, 13 bp, Artificial Sequence
  Oligonucleotide for detection of SNP TSC0013379
gagataattttga

SEQ ID NO: 46202 - DNA, 13 bp, Artificial Sequence
  Oligonucleotide for detection of SNP TSC0013379
tcaaaattatctc

SEQ ID NO: 46203 - DNA, 13 bp, Artificial Sequence
  Oligonucleotide for detection of SNP TSC0013379
gagatagttttga

SEQ ID NO: 46204 - DNA, 13 bp, Artificial Sequence
  Oligonucleotide for detection of SNP TSC0013379
tcaaaactatctc

SEQ ID NO: 46205 - DNA, 13 bp, Artificial Sequence
  Oligonucleotide for detection of SNP TSC0013379
gagataatttcga

SEQ ID NO: 46206 - DNA, 13 bp, Artificial Sequence
  Oligonucleotide for detection of SNP TSC0013379
tcgaaattatctc

SEQ ID NO: 46207 - DNA, 13 bp, Artificial Sequence
  Oligonucleotide for detection of SNP TSC0013379
gagatagtttcga

SEQ ID NO: 46208 - DNA, 13 bp, Artificial Sequence
  Oligonucleotide for detection of SNP TSC0013379
tcgaaactatctc

SEQ ID NO: 46209 - DNA, 13 bp, Artificial Sequence
  Oligonucleotide for detection of SNP TSC0013380
aagattgtggttg

SEQ ID NO: 46210 - DNA, 13 bp, Artificial Sequence
  Oligonucleotide for detection of SNP TSC0013380
caaccacaatctt

SEQ ID NO: 46211 - DNA, 13 bp, Artificial Sequence
  Oligonucleotide for detection of SNP TSC0013380
aagattttggttg

SEQ ID NO: 46212 - DNA, 13 bp, Artificial Sequence
  Oligonucleotide for detection of SNP TSC0013380
caaccaaaatctt

SEQ ID NO: 46213 - DNA, 13 bp, Artificial Sequence
  Oligonucleotide for detection of SNP TSC0013380
aagatcgtggttg

SEQ ID NO: 46214 - DNA, 13 bp, Artificial Sequence
  Oligonucleotide for detection of SNP TSC0013380
caaccacgatctt

SEQ ID NO: 46215 - DNA, 13 bp, Artificial Sequence
  Oligonucleotide for detection of SNP TSC0013380
tagttatgatttt

SEQ ID NO: 46216 - DNA, 13 bp, Artificial Sequence
  Oligonucleotide for detection of SNP TSC0013380
aaaatcataacta

SEQ ID NO: 46217 - DNA, 13 bp, Artificial Sequence
  Oligonucleotide for detection of SNP TSC0013380
tagttaagatttt

SEQ ID NO: 46218 - DNA, 13 bp, Artificial Sequence
  Oligonucleotide for detection of SNP TSC0013380
aaaatcttaacta

SEQ ID NO: 46219 - DNA, 13 bp, Artificial Sequence
  Oligonucleotide for detection of SNP TSC0013380
tagttacgatttt

SEQ ID NO: 46220 - DNA, 13 bp, Artificial Sequence
  Oligonucleotide for detection of SNP TSC0013380
aaaatcgtaacta

SEQ ID NO: 46221 - DNA, 13 bp, Artificial Sequence
  Oligonucleotide for detection of SNP TSC0013381
ataatatgaatat

SEQ ID NO: 46222 - DNA, 13 bp, Artificial Sequence
  Oligonucleotide for detection of SNP TSC0013381
atattcatattat

SEQ ID NO: 46223 - DNA, 13 bp, Artificial Sequence
  Oligonucleotide for detection of SNP TSC0013381
ataataggaatat

SEQ ID NO: 46224 - DNA, 13 bp, Artificial Sequence
  Oligonucleotide for detection of SNP TSC0013381
atattcctattat

SEQ ID NO: 46225 - DNA, 13 bp, Artificial Sequence
  Oligonucleotide for detection of SNP TSC0013381
ataatacgaatat

SEQ ID NO: 46226 - DNA, 13 bp, Artificial Sequence
  Oligonucleotide for detection of SNP TSC0013381
atattcgtattat

SEQ ID NO: 46227 - DNA, 13 bp, Artificial Sequence
  Oligonucleotide for detection of SNP TSC0013381
atgtttgtattat

SEQ ID NO: 46228 - DNA, 13 bp, Artificial Sequence
  Oligonucleotide for detection of SNP TSC0013381
ataatacaaacat

SEQ ID NO: 46229 - DNA, 13 bp, Artificial Sequence
  Oligonucleotide for detection of SNP TSC0013381
atgtttttattat

SEQ ID NO: 46230 - DNA, 13 bp, Artificial Sequence
  Oligonucleotide for detection of SNP TSC0013381
ataataaaaacat

SEQ ID NO: 46231 - DNA, 13 bp, Artificial Sequence
  Oligonucleotide for detection of SNP TSC0013381
atgttcgtattat

SEQ ID NO: 46232 - DNA, 13 bp, Artificial Sequence
  Oligonucleotide for detection of SNP TSC0013381
ataatacgaacat

SEQ ID NO: 46233 - DNA, 13 bp, Artificial Sequence
  Oligonucleotide for detection of SNP TSC0013383
tatggtatgtgag

SEQ ID NO: 46234 - DNA, 13 bp, Artificial Sequence
  Oligonucleotide for detection of SNP TSC0013383
ctcacataccata

SEQ ID NO: 46235 - DNA, 13 bp, Artificial Sequence
  Oligonucleotide for detection of SNP TSC0013383
tatggtgtgtgag

SEQ ID NO: 46236 - DNA, 13 bp, Artificial Sequence
  Oligonucleotide for detection of SNP TSC0013383
ctcacacaccata

SEQ ID NO: 46237 - DNA, 13 bp, Artificial Sequence
  Oligonucleotide for detection of SNP TSC0013383
tatggcgtgtgag

SEQ ID NO: 46238 - DNA, 13 bp, Artificial Sequence
  Oligonucleotide for detection of SNP TSC0013383
ctcacacgccata

SEQ ID NO: 46239 - DNA, 13 bp, Artificial Sequence
  Oligonucleotide for detection of SNP TSC0013383
tttatatgttatg

SEQ ID NO: 46240 - DNA, 13 bp, Artificial Sequence
  Oligonucleotide for detection of SNP TSC0013383
cataacatataaa

SEQ ID NO: 46241 - DNA, 13 bp, Artificial Sequence
  Oligonucleotide for detection of SNP TSC0013383
tttatacgttatg

SEQ ID NO: 46242 - DNA, 13 bp, Artificial Sequence
  Oligonucleotide for detection of SNP TSC0013383
cataacgtataaa

SEQ ID NO: 46243 - DNA, 13 bp, Artificial Sequence
  Oligonucleotide for detection of SNP TSC0013388
ataaatggttttg

SEQ ID NO: 46244 - DNA, 13 bp, Artificial Sequence
  Oligonucleotide for detection of SNP TSC0013388
caaaaccatttat

SEQ ID NO: 46245 - DNA, 13 bp, Artificial Sequence
  Oligonucleotide for detection of SNP TSC0013388
ataaattgttttg

SEQ ID NO: 46246 - DNA, 13 bp, Artificial Sequence
  Oligonucleotide for detection of SNP TSC0013388
caaaacaatttat

SEQ ID NO: 46247 - DNA, 13 bp, Artificial Sequence
  Oligonucleotide for detection of SNP TSC0013388
ataaacggttttg

SEQ ID NO: 46248 - DNA, 13 bp, Artificial Sequence
  Oligonucleotide for detection of SNP TSC0013388
caaaaccgtttat

SEQ ID NO: 46249 - DNA, 13 bp, Artificial Sequence
  Oligonucleotide for detection of SNP TSC0013388
taaaattgtttat

SEQ ID NO: 46250 - DNA, 13 bp, Artificial Sequence
  Oligonucleotide for detection of SNP TSC0013388
ataaacaatttta

SEQ ID NO: 46251 - DNA, 13 bp, Artificial Sequence
  Oligonucleotide for detection of SNP TSC0013388
taaaatagtttat

SEQ ID NO: 46252 - DNA, 13 bp, Artificial Sequence
  Oligonucleotide for detection of SNP TSC0013388
ataaactatttta

SEQ ID NO: 46253 - DNA, 13 bp, Artificial Sequence
  Oligonucleotide for detection of SNP TSC0013388
taaaatcgtttat

SEQ ID NO: 46254 - DNA, 13 bp, Artificial Sequence
  Oligonucleotide for detection of SNP TSC0013388
ataaacgatttta

SEQ ID NO: 46255 - DNA, 13 bp, Artificial Sequence
  Oligonucleotide for detection of SNP TSC0013389
aaataggttttgg

SEQ ID NO: 46256 - DNA, 13 bp, Artificial Sequence
  Oligonucleotide for detection of SNP TSC0013389
ccaaaacctattt

SEQ ID NO: 46257 - DNA, 13 bp, Artificial Sequence
  Oligonucleotide for detection of SNP TSC0013389
ttaaaggttattt

SEQ ID NO: 46258 - DNA, 13 bp, Artificial Sequence
  Oligonucleotide for detection of SNP TSC0013389
aaataacctttaa

SEQ ID NO: 46259 - DNA, 13 bp, Artificial Sequence
  Oligonucleotide for detection of SNP TSC0013389
ttaaagtttattt

SEQ ID NO: 46260 - DNA, 13 bp, Artificial Sequence
  Oligonucleotide for detection of SNP TSC0013389
aaataaactttaa

SEQ ID NO: 46261 - DNA, 13 bp, Artificial Sequence
  Oligonucleotide for detection of SNP TSC0013392
aggaaagaatatt

SEQ ID NO: 46262 - DNA, 13 bp, Artificial Sequence
  Oligonucleotide for detection of SNP TSC0013392
aatattctttcct

SEQ ID NO: 46263 - DNA, 13 bp, Artificial Sequence
  Oligonucleotide for detection of SNP TSC0013392
aggaaataatatt

SEQ ID NO: 46264 - DNA, 13 bp, Artificial Sequence
  Oligonucleotide for detection of SNP TSC0013392
aatattatttcct

SEQ ID NO: 46265 - DNA, 13 bp, Artificial Sequence
  Oligonucleotide for detection of SNP TSC0013392
agtattttttttt

SEQ ID NO: 46266 - DNA, 13 bp, Artificial Sequence
  Oligonucleotide for detection of SNP TSC0013392
aaaaaaaaatact

SEQ ID NO: 46267 - DNA, 13 bp, Artificial Sequence
  Oligonucleotide for detection of SNP TSC0013392
agtattatttttt

SEQ ID NO: 46268 - DNA, 13 bp, Artificial Sequence
  Oligonucleotide for detection of SNP TSC0013392
aaaaaataatact

SEQ ID NO: 46269 - DNA, 13 bp, Artificial Sequence
  Oligonucleotide for detection of SNP TSC0013393
ggtgttattgttg

SEQ ID NO: 46270 - DNA, 13 bp, Artificial Sequence
  Oligonucleotide for detection of SNP TSC0013393
caacaataacacc

SEQ ID NO: 46271 - DNA, 13 bp, Artificial Sequence
  Oligonucleotide for detection of SNP TSC0013393
ggtgttgttgttg

SEQ ID NO: 46272 - DNA, 13 bp, Artificial Sequence
  Oligonucleotide for detection of SNP TSC0013393
caacaacaacacc

SEQ ID NO: 46273 - DNA, 13 bp, Artificial Sequence
  Oligonucleotide for detection of SNP TSC0013393
ggtgttattgtcg

SEQ ID NO: 46274 - DNA, 13 bp, Artificial Sequence
  Oligonucleotide for detection of SNP TSC0013393
cgacaataacacc

SEQ ID NO: 46275 - DNA, 13 bp, Artificial Sequence
  Oligonucleotide for detection of SNP TSC0013393
ggtgtcgttgttg

SEQ ID NO: 46276 - DNA, 13 bp, Artificial Sequence
  Oligonucleotide for detection of SNP TSC0013393
caacaacgacacc

SEQ ID NO: 46277 - DNA, 13 bp, Artificial Sequence
  Oligonucleotide for detection of SNP TSC0013393
ggtgttgttgtcg

SEQ ID NO: 46278 - DNA, 13 bp, Artificial Sequence
  Oligonucleotide for detection of SNP TSC0013393
cgacaacaacacc

SEQ ID NO: 46279 - DNA, 13 bp, Artificial Sequence
  Oligonucleotide for detection of SNP TSC0013393
ggtgtcgttgtcg

SEQ ID NO: 46280 - DNA, 13 bp, Artificial Sequence
  Oligonucleotide for detection of SNP TSC0013393
cgacaacgacacc

SEQ ID NO: 46281 - DNA, 13 bp, Artificial Sequence
  Oligonucleotide for detection of SNP TSC0013393
tgatagtgataty

SEQ ID NO: 46282 - DNA, 13 bp, Artificial Sequence
  Oligonucleotide for detection of SNP TSC0013393
ratatcactatca

SEQ ID NO: 46283 - DNA, 13 bp, Artificial Sequence
  Oligonucleotide for detection of SNP TSC0013393
cgatagtgataty

SEQ ID NO: 46284 - DNA, 13 bp, Artificial Sequence
  Oligonucleotide for detection of SNP TSC0013393
ratatcactatcg

SEQ ID NO: 46285 - DNA, 13 bp, Artificial Sequence
  Oligonucleotide for detection of SNP TSC0013393
tgatagcgataty

SEQ ID NO: 46286 - DNA, 13 bp, Artificial Sequence
  Oligonucleotide for detection of SNP TSC0013393
ratatcgctatca

SEQ ID NO: 46287 - DNA, 13 bp, Artificial Sequence
  Oligonucleotide for detection of SNP TSC0013393
cgatagcgataty

SEQ ID NO: 46288 - DNA, 13 bp, Artificial Sequence
  Oligonucleotide for detection of SNP TSC0013393
ratatcgctatcg

SEQ ID NO: 46289 - DNA, 13 bp, Artificial Sequence
  Oligonucleotide for detection of SNP TSC0013394
ttaaaagtgatta

SEQ ID NO: 46290 - DNA, 13 bp, Artificial Sequence
  Oligonucleotide for detection of SNP TSC0013394
taatcacttttaa

SEQ ID NO: 46291 - DNA, 13 bp, Artificial Sequence
  Oligonucleotide for detection of SNP TSC0013394
ttaaaaatgatta

SEQ ID NO: 46292 - DNA, 13 bp, Artificial Sequence
  Oligonucleotide for detection of SNP TSC0013394
taatcatttttaa

SEQ ID NO: 46293 - DNA, 13 bp, Artificial Sequence
  Oligonucleotide for detection of SNP TSC0013395
tttagtatggagt

SEQ ID NO: 46294 - DNA, 13 bp, Artificial Sequence
  Oligonucleotide for detection of SNP TSC0013395
actccatactaaa

SEQ ID NO: 46295 - DNA, 13 bp, Artificial Sequence
  Oligonucleotide for detection of SNP TSC0013395
tttagtttggagt

SEQ ID NO: 46296 - DNA, 13 bp, Artificial Sequence
  Oligonucleotide for detection of SNP TSC0013395
actccaaactaaa

SEQ ID NO: 46297 - DNA, 13 bp, Artificial Sequence
  Oligonucleotide for detection of SNP TSC0013395
attttatgttgag

SEQ ID NO: 46298 - DNA, 13 bp, Artificial Sequence
  Oligonucleotide for detection of SNP TSC0013395
ctcaacataaaat

SEQ ID NO: 46299 - DNA, 13 bp, Artificial Sequence
  Oligonucleotide for detection of SNP TSC0013395
attttaagttgag

SEQ ID NO: 46300 - DNA, 13 bp, Artificial Sequence
  Oligonucleotide for detection of SNP TSC0013395
ctcaacttaaaat

SEQ ID NO: 46301 - DNA, 13 bp, Artificial Sequence
  Oligonucleotide for detection of SNP TSC0013396
tgaattaattatt

SEQ ID NO: 46302 - DNA, 13 bp, Artificial Sequence
  Oligonucleotide for detection of SNP TSC0013396
aataattaattca

SEQ ID NO: 46303 - DNA, 13 bp, Artificial Sequence
  Oligonucleotide for detection of SNP TSC0013396
tgaattgattatt

SEQ ID NO: 46304 - DNA, 13 bp, Artificial Sequence
  Oligonucleotide for detection of SNP TSC0013396
aataatcaattca

SEQ ID NO: 46305 - DNA, 13 bp, Artificial Sequence
  Oligonucleotide for detection of SNP TSC0013399
tttgtaggtaaaa

SEQ ID NO: 46306 - DNA, 13 bp, Artificial Sequence
  Oligonucleotide for detection of SNP TSC0013399
ttttacctacaaa

SEQ ID NO: 46307 - DNA, 13 bp, Artificial Sequence
  Oligonucleotide for detection of SNP TSC0013399
tttgtaagtaaaa

SEQ ID NO: 46308 - DNA, 13 bp, Artificial Sequence
  Oligonucleotide for detection of SNP TSC0013399
ttttacttacaaa

SEQ ID NO: 46309 - DNA, 13 bp, Artificial Sequence
  Oligonucleotide for detection of SNP TSC0013400
gataaatggttty

SEQ ID NO: 46310 - DNA, 13 bp, Artificial Sequence
  Oligonucleotide for detection of SNP TSC0013400
raaaccatttatc

SEQ ID NO: 46311 - DNA, 13 bp, Artificial Sequence
  Oligonucleotide for detection of SNP TSC0013400
gataaacggttty

SEQ ID NO: 46312 - DNA, 13 bp, Artificial Sequence
  Oligonucleotide for detection of SNP TSC0013400
raaaccgtttatc

SEQ ID NO: 46313 - DNA, 13 bp, Artificial Sequence
  Oligonucleotide for detection of SNP TSC0013400
gaaattgtttaty

SEQ ID NO: 46314 - DNA, 13 bp, Artificial Sequence
  Oligonucleotide for detection of SNP TSC0013400
rataaacaatttc

SEQ ID NO: 46315 - DNA, 13 bp, Artificial Sequence
  Oligonucleotide for detection of SNP TSC0013400
gaaattatttaty

SEQ ID NO: 46316 - DNA, 13 bp, Artificial Sequence
  Oligonucleotide for detection of SNP TSC0013400
rataaataatttc

SEQ ID NO: 46317 - DNA, 13 bp, Artificial Sequence
  Oligonucleotide for detection of SNP TSC0013400
gaaatcgtttaty

SEQ ID NO: 46318 - DNA, 13 bp, Artificial Sequence
  Oligonucleotide for detection of SNP TSC0013400
rataaacgatttc

SEQ ID NO: 46319 - DNA, 13 bp, Artificial Sequence
  Oligonucleotide for detection of SNP TSC0013403
tttgattttgttt

SEQ ID NO: 46320 - DNA, 13 bp, Artificial Sequence
  Oligonucleotide for detection of SNP TSC0013403
aaacaaaatcaaa

SEQ ID NO: 46321 - DNA, 13 bp, Artificial Sequence
  Oligonucleotide for detection of SNP TSC0013403
tttgatgttgttt

SEQ ID NO: 46322 - DNA, 13 bp, Artificial Sequence
  Oligonucleotide for detection of SNP TSC0013403
aaacaacatcaaa

SEQ ID NO: 46323 - DNA, 13 bp, Artificial Sequence
  Oligonucleotide for detection of SNP TSC0013403
aggtaggattaga

SEQ ID NO: 46324 - DNA, 13 bp, Artificial Sequence
  Oligonucleotide for detection of SNP TSC0013403
tctaatcctacct

SEQ ID NO: 46325 - DNA, 13 bp, Artificial Sequence
  Oligonucleotide for detection of SNP TSC0013403
aggtagtattaga

SEQ ID NO: 46326 - DNA, 13 bp, Artificial Sequence
  Oligonucleotide for detection of SNP TSC0013403
tctaatactacct

SEQ ID NO: 46327 - DNA, 13 bp, Artificial Sequence
  Oligonucleotide for detection of SNP TSC0013404
agatttggaatta

SEQ ID NO: 46328 - DNA, 13 bp, Artificial Sequence
  Oligonucleotide for detection of SNP TSC0013404
taattccaaatct

SEQ ID NO: 46329 - DNA, 13 bp, Artificial Sequence
  Oligonucleotide for detection of SNP TSC0013404
agatttagaatta

SEQ ID NO: 46330 - DNA, 13 bp, Artificial Sequence
  Oligonucleotide for detection of SNP TSC0013404
taattctaaatct

SEQ ID NO: 46331 - DNA, 13 bp, Artificial Sequence
  Oligonucleotide for detection of SNP TSC0013405
aaaaaaatatagt

SEQ ID NO: 46332 - DNA, 13 bp, Artificial Sequence
  Oligonucleotide for detection of SNP TSC0013405
actatattttttt

SEQ ID NO: 46333 - DNA, 13 bp, Artificial Sequence
  Oligonucleotide for detection of SNP TSC0013405
aaaaaattatagt

SEQ ID NO: 46334 - DNA, 13 bp, Artificial Sequence
  Oligonucleotide for detection of SNP TSC0013405
actataatttttt

SEQ ID NO: 46335 - DNA, 13 bp, Artificial Sequence
  Oligonucleotide for detection of SNP TSC0013405
attatattttttt

SEQ ID NO: 46336 - DNA, 13 bp, Artificial Sequence
  Oligonucleotide for detection of SNP TSC0013405
aaaaaaatataat

SEQ ID NO: 46337 - DNA, 13 bp, Artificial Sequence
  Oligonucleotide for detection of SNP TSC0013405
attatagtttttt

SEQ ID NO: 46338 - DNA, 13 bp, Artificial Sequence
  Oligonucleotide for detection of SNP TSC0013405
aaaaaactataat

SEQ ID NO: 46339 - DNA, 13 bp, Artificial Sequence
  Oligonucleotide for detection of SNP TSC0013406
tatagttttaggg

SEQ ID NO: 46340 - DNA, 13 bp, Artificial Sequence
  Oligonucleotide for detection of SNP TSC0013406
ccctaaaactata

SEQ ID NO: 46341 - DNA, 13 bp, Artificial Sequence
  Oligonucleotide for detection of SNP TSC0013406
tatagtgttaggg

SEQ ID NO: 46342 - DNA, 13 bp, Artificial Sequence
  Oligonucleotide for detection of SNP TSC0013406
ccctaacactata

SEQ ID NO: 46343 - DNA, 13 bp, Artificial Sequence
  Oligonucleotide for detection of SNP TSC0013406
tatagcgttaggg

SEQ ID NO: 46344 - DNA, 13 bp, Artificial Sequence
  Oligonucleotide for detection of SNP TSC0013406
ccctaacgctata

SEQ ID NO: 46345 - DNA, 13 bp, Artificial Sequence
  Oligonucleotide for detection of SNP TSC0013406
ttttagggttatg

SEQ ID NO: 46346 - DNA, 13 bp, Artificial Sequence
  Oligonucleotide for detection of SNP TSC0013406
cataaccctaaaa

SEQ ID NO: 46347 - DNA, 13 bp, Artificial Sequence
  Oligonucleotide for detection of SNP TSC0013406
ttttagtgttatg

SEQ ID NO: 46348 - DNA, 13 bp, Artificial Sequence
  Oligonucleotide for detection of SNP TSC0013406
cataacactaaaa

SEQ ID NO: 46349 - DNA, 13 bp, Artificial Sequence
  Oligonucleotide for detection of SNP TSC0013406
ttttagcgttatg

SEQ ID NO: 46350 - DNA, 13 bp, Artificial Sequence
  Oligonucleotide for detection of SNP TSC0013406
cataacgctaaaa

SEQ ID NO: 46351 - DNA, 13 bp, Artificial Sequence
  Oligonucleotide for detection of SNP TSC0013407
tttgttgtagaay

SEQ ID NO: 46352 - DNA, 13 bp, Artificial Sequence
  Oligonucleotide for detection of SNP TSC0013407
rttctacaacaaa

SEQ ID NO: 46353 - DNA, 13 bp, Artificial Sequence
  Oligonucleotide for detection of SNP TSC0013407
tttgttttagaay

SEQ ID NO: 46354 - DNA, 13 bp, Artificial Sequence
  Oligonucleotide for detection of SNP TSC0013407
rttctaaaacaaa

SEQ ID NO: 46355 - DNA, 13 bp, Artificial Sequence
  Oligonucleotide for detection of SNP TSC0013407
ttcgttgtagaay

SEQ ID NO: 46356 - DNA, 13 bp, Artificial Sequence
  Oligonucleotide for detection of SNP TSC0013407
rttctacaacgaa

SEQ ID NO: 46357 - DNA, 13 bp, Artificial Sequence
  Oligonucleotide for detection of SNP TSC0013407
ttcgttttagaay

SEQ ID NO: 46358 - DNA, 13 bp, Artificial Sequence
  Oligonucleotide for detection of SNP TSC0013407
rttctaaaacgaa

SEQ ID NO: 46359 - DNA, 13 bp, Artificial Sequence
  Oligonucleotide for detection of SNP TSC0013407
tttgtcgtagaay

SEQ ID NO: 46360 - DNA, 13 bp, Artificial Sequence
  Oligonucleotide for detection of SNP TSC0013407
rttctacgacaaa

SEQ ID NO: 46361 - DNA, 13 bp, Artificial Sequence
  Oligonucleotide for detection of SNP TSC0013407
ttcgtcgtagaay

SEQ ID NO: 46362 - DNA, 13 bp, Artificial Sequence
  Oligonucleotide for detection of SNP TSC0013407
rttctacgacgaa

SEQ ID NO: 46363 - DNA, 13 bp, Artificial Sequence
  Oligonucleotide for detection of SNP TSC0013407
gttttatggtgga

SEQ ID NO: 46364 - DNA, 13 bp, Artificial Sequence
  Oligonucleotide for detection of SNP TSC0013407
tccaccataaaac

SEQ ID NO: 46365 - DNA, 13 bp, Artificial Sequence
  Oligonucleotide for detection of SNP TSC0013407
gttttaaggtgga

SEQ ID NO: 46366 - DNA, 13 bp, Artificial Sequence
  Oligonucleotide for detection of SNP TSC0013407
tccaccttaaaac

SEQ ID NO: 46367 - DNA, 13 bp, Artificial Sequence
  Oligonucleotide for detection of SNP TSC0013407
gttttacggtgga

SEQ ID NO: 46368 - DNA, 13 bp, Artificial Sequence
  Oligonucleotide for detection of SNP TSC0013407
tccaccgtaaaac

SEQ ID NO: 46369 - DNA, 13 bp, Artificial Sequence
  Oligonucleotide for detection of SNP TSC0013407
gttttaaggcgga

SEQ ID NO: 46370 - DNA, 13 bp, Artificial Sequence
  Oligonucleotide for detection of SNP TSC0013407
tccgccttaaaac

SEQ ID NO: 46371 - DNA, 13 bp, Artificial Sequence
  Oligonucleotide for detection of SNP TSC0013407
gttttatggcgga

SEQ ID NO: 46372 - DNA, 13 bp, Artificial Sequence
  Oligonucleotide for detection of SNP TSC0013407
tccgccataaaac

SEQ ID NO: 46373 - DNA, 13 bp, Artificial Sequence
  Oligonucleotide for detection of SNP TSC0013407
gttttacggcgga

SEQ ID NO: 46374 - DNA, 13 bp, Artificial Sequence
  Oligonucleotide for detection of SNP TSC0013407
tccgccgtaaaac

SEQ ID NO: 46375 - DNA, 13 bp, Artificial Sequence
  Oligonucleotide for detection of SNP TSC0013408
ttattgggatttt

SEQ ID NO: 46376 - DNA, 13 bp, Artificial Sequence
  Oligonucleotide for detection of SNP TSC0013408
aaaatcccaataa

SEQ ID NO: 46377 - DNA, 13 bp, Artificial Sequence
  Oligonucleotide for detection of SNP TSC0013408
ttattgtgatttt

SEQ ID NO: 46378 - DNA, 13 bp, Artificial Sequence
  Oligonucleotide for detection of SNP TSC0013408
aaaatcacaataa

SEQ ID NO: 46379 - DNA, 13 bp, Artificial Sequence
  Oligonucleotide for detection of SNP TSC0013408
ttatcgggatttt

SEQ ID NO: 46380 - DNA, 13 bp, Artificial Sequence
  Oligonucleotide for detection of SNP TSC0013408
aaaatcccgataa

SEQ ID NO: 46381 - DNA, 13 bp, Artificial Sequence
  Oligonucleotide for detection of SNP TSC0013408
ttatcgtgatttt

SEQ ID NO: 46382 - DNA, 13 bp, Artificial Sequence
  Oligonucleotide for detection of SNP TSC0013408
aaaatcacgataa

SEQ ID NO: 46383 - DNA, 13 bp, Artificial Sequence
  Oligonucleotide for detection of SNP TSC0013408
aaggttttgatgg

SEQ ID NO: 46384 - DNA, 13 bp, Artificial Sequence
  Oligonucleotide for detection of SNP TSC0013408
ccatcaaaacctt

SEQ ID NO: 46385 - DNA, 13 bp, Artificial Sequence
  Oligonucleotide for detection of SNP TSC0013408
aaggttatgatgg

SEQ ID NO: 46386 - DNA, 13 bp, Artificial Sequence
  Oligonucleotide for detection of SNP TSC0013408
ccatcataacctt

SEQ ID NO: 46387 - DNA, 13 bp, Artificial Sequence
  Oligonucleotide for detection of SNP TSC0013408
aaggtttcgatgg

SEQ ID NO: 46388 - DNA, 13 bp, Artificial Sequence
  Oligonucleotide for detection of SNP TSC0013408
ccatcgaaacctt

SEQ ID NO: 46389 - DNA, 13 bp, Artificial Sequence
  Oligonucleotide for detection of SNP TSC0013408
aaggttacgatgg

SEQ ID NO: 46390 - DNA, 13 bp, Artificial Sequence
  Oligonucleotide for detection of SNP TSC0013408
ccatcgtaacctt

SEQ ID NO: 46391 - DNA, 13 bp, Artificial Sequence
  Oligonucleotide for detection of SNP TSC0013409
tgtaatattatty

SEQ ID NO: 46392 - DNA, 13 bp, Artificial Sequence
  Oligonucleotide for detection of SNP TSC0013409
raataatattaca

SEQ ID NO: 46393 - DNA, 13 bp, Artificial Sequence
  Oligonucleotide for detection of SNP TSC0013409
tgtaatgttatty

SEQ ID NO: 46394 - DNA, 13 bp, Artificial Sequence
  Oligonucleotide for detection of SNP TSC0013409
raataacattaca

SEQ ID NO: 46395 - DNA, 13 bp, Artificial Sequence
  Oligonucleotide for detection of SNP TSC0013410
ttagatgtgttgt

SEQ ID NO: 46396 - DNA, 13 bp, Artificial Sequence
  Oligonucleotide for detection of SNP TSC0013410
acaacacatctaa

SEQ ID NO: 46397 - DNA, 13 bp, Artificial Sequence
  Oligonucleotide for detection of SNP TSC0013410
ttagatatgttgt

SEQ ID NO: 46398 - DNA, 13 bp, Artificial Sequence
  Oligonucleotide for detection of SNP TSC0013410
acaacatatctaa

SEQ ID NO: 46399 - DNA, 13 bp, Artificial Sequence
  Oligonucleotide for detection of SNP TSC0013411
taagaatgttaag

SEQ ID NO: 46400 - DNA, 13 bp, Artificial Sequence
  Oligonucleotide for detection of SNP TSC0013411
cttaacattctta

SEQ ID NO: 46401 - DNA, 13 bp, Artificial Sequence
  Oligonucleotide for detection of SNP TSC0013411
taagaacgttaag

SEQ ID NO: 46402 - DNA, 13 bp, Artificial Sequence
  Oligonucleotide for detection of SNP TSC0013411
cttaacgttctta

SEQ ID NO: 46403 - DNA, 13 bp, Artificial Sequence
  Oligonucleotide for detection of SNP TSC0013411
tttggtgtttttg

SEQ ID NO: 46404 - DNA, 13 bp, Artificial Sequence
  Oligonucleotide for detection of SNP TSC0013411
caaaaacaccaaa

SEQ ID NO: 46405 - DNA, 13 bp, Artificial Sequence
  Oligonucleotide for detection of SNP TSC0013411
tttggtatttttg

SEQ ID NO: 46406 - DNA, 13 bp, Artificial Sequence
  Oligonucleotide for detection of SNP TSC0013411
caaaaataccaaa

SEQ ID NO: 46407 - DNA, 13 bp, Artificial Sequence
  Oligonucleotide for detection of SNP TSC0013411
tttggcgtttttg

SEQ ID NO: 46408 - DNA, 13 bp, Artificial Sequence
  Oligonucleotide for detection of SNP TSC0013411
caaaaacgccaaa

SEQ ID NO: 46409 - DNA, 13 bp, Artificial Sequence
  Oligonucleotide for detection of SNP TSC0013412
ttttgggtttaag

SEQ ID NO: 46410 - DNA, 13 bp, Artificial Sequence
  Oligonucleotide for detection of SNP TSC0013412
cttaaacccaaaa

SEQ ID NO: 46411 - DNA, 13 bp, Artificial Sequence
  Oligonucleotide for detection of SNP TSC0013412
ttttggatttaag

SEQ ID NO: 46412 - DNA, 13 bp, Artificial Sequence
  Oligonucleotide for detection of SNP TSC0013412
cttaaatccaaaa

SEQ ID NO: 46413 - DNA, 13 bp, Artificial Sequence
  Oligonucleotide for detection of SNP TSC0013413
gtatattgtgttt

SEQ ID NO: 46414 - DNA, 13 bp, Artificial Sequence
  Oligonucleotide for detection of SNP TSC0013413
aaacacaatatac

SEQ ID NO: 46415 - DNA, 13 bp, Artificial Sequence
  Oligonucleotide for detection of SNP TSC0013413
gtatatcgtgttt

SEQ ID NO: 46416 - DNA, 13 bp, Artificial Sequence
  Oligonucleotide for detection of SNP TSC0013413
aaacacgatatac

SEQ ID NO: 46417 - DNA, 13 bp, Artificial Sequence
  Oligonucleotide for detection of SNP TSC0013413
agatatggtgtgy

SEQ ID NO: 46418 - DNA, 13 bp, Artificial Sequence
  Oligonucleotide for detection of SNP TSC0013413
rcacaccatatct

SEQ ID NO: 46419 - DNA, 13 bp, Artificial Sequence
  Oligonucleotide for detection of SNP TSC0013413
agatatagtgtgy

SEQ ID NO: 46420 - DNA, 13 bp, Artificial Sequence
  Oligonucleotide for detection of SNP TSC0013413
rcacactatatct

SEQ ID NO: 46421 - DNA, 13 bp, Artificial Sequence
  Oligonucleotide for detection of SNP TSC0013413
agatacggtgtgy

SEQ ID NO: 46422 - DNA, 13 bp, Artificial Sequence
  Oligonucleotide for detection of SNP TSC0013413
rcacaccgtatct

SEQ ID NO: 46423 - DNA, 13 bp, Artificial Sequence
  Oligonucleotide for detection of SNP TSC0013414
ttagttgttttty

SEQ ID NO: 46424 - DNA, 13 bp, Artificial Sequence
  Oligonucleotide for detection of SNP TSC0013414
raaaaacaactaa

SEQ ID NO: 46425 - DNA, 13 bp, Artificial Sequence
  Oligonucleotide for detection of SNP TSC0013414
ttagttattttty

SEQ ID NO: 46426 - DNA, 13 bp, Artificial Sequence
  Oligonucleotide for detection of SNP TSC0013414
raaaaataactaa

SEQ ID NO: 46427 - DNA, 13 bp, Artificial Sequence
  Oligonucleotide for detection of SNP TSC0013415
gtgtagaggtgay

SEQ ID NO: 46428 - DNA, 13 bp, Artificial Sequence
  Oligonucleotide for detection of SNP TSC0013415
rtcacctctacac

SEQ ID NO: 46429 - DNA, 13 bp, Artificial Sequence
  Oligonucleotide for detection of SNP TSC0013415
gtgtaggggtgay

SEQ ID NO: 46430 - DNA, 13 bp, Artificial Sequence
  Oligonucleotide for detection of SNP TSC0013415
rtcacccctacac

SEQ ID NO: 46431 - DNA, 13 bp, Artificial Sequence
  Oligonucleotide for detection of SNP TSC0013416
ttttttatttata

SEQ ID NO: 46432 - DNA, 13 bp, Artificial Sequence
  Oligonucleotide for detection of SNP TSC0013416
tataaataaaaaa

SEQ ID NO: 46433 - DNA, 13 bp, Artificial Sequence
  Oligonucleotide for detection of SNP TSC0013416
tgtgagtggaaaa

SEQ ID NO: 46434 - DNA, 13 bp, Artificial Sequence
  Oligonucleotide for detection of SNP TSC0013416
ttttccactcaca

SEQ ID NO: 46435 - DNA, 13 bp, Artificial Sequence
  Oligonucleotide for detection of SNP TSC0013416
tgtgagaggaaaa

SEQ ID NO: 46436 - DNA, 13 bp, Artificial Sequence
  Oligonucleotide for detection of SNP TSC0013416
ttttcctctcaca

SEQ ID NO: 46437 - DNA, 13 bp, Artificial Sequence
  Oligonucleotide for detection of SNP TSC0013417
ttagtagtatatg

SEQ ID NO: 46438 - DNA, 13 bp, Artificial Sequence
  Oligonucleotide for detection of SNP TSC0013417
catatactactaa

SEQ ID NO: 46439 - DNA, 13 bp, Artificial Sequence
  Oligonucleotide for detection of SNP TSC0013417
ttagtaatatatg

SEQ ID NO: 46440 - DNA, 13 bp, Artificial Sequence
  Oligonucleotide for detection of SNP TSC0013417
catatattactaa

SEQ ID NO: 46441 - DNA, 13 bp, Artificial Sequence
  Oligonucleotide for detection of SNP TSC0013418
tttaatattgtat

SEQ ID NO: 46442 - DNA, 13 bp, Artificial Sequence
  Oligonucleotide for detection of SNP TSC0013418
atacaatattaaa

SEQ ID NO: 46443 - DNA, 13 bp, Artificial Sequence
  Oligonucleotide for detection of SNP TSC0013418
tttaatgttgtat

SEQ ID NO: 46444 - DNA, 13 bp, Artificial Sequence
  Oligonucleotide for detection of SNP TSC0013418
atacaacattaaa

SEQ ID NO: 46445 - DNA, 13 bp, Artificial Sequence
  Oligonucleotide for detection of SNP TSC0013418
tttaatatcgtat

SEQ ID NO: 46446 - DNA, 13 bp, Artificial Sequence
  Oligonucleotide for detection of SNP TSC0013418
atacgatattaaa

SEQ ID NO: 46447 - DNA, 13 bp, Artificial Sequence
  Oligonucleotide for detection of SNP TSC0013418
tttaatgtcgtat

SEQ ID NO: 46448 - DNA, 13 bp, Artificial Sequence
  Oligonucleotide for detection of SNP TSC0013418
atacgacattaaa

SEQ ID NO: 46449 - DNA, 13 bp, Artificial Sequence
  Oligonucleotide for detection of SNP TSC0013419
gattagggaatag

SEQ ID NO: 46450 - DNA, 13 bp, Artificial Sequence
  Oligonucleotide for detection of SNP TSC0013419
ctattccctaatc

SEQ ID NO: 46451 - DNA, 13 bp, Artificial Sequence
  Oligonucleotide for detection of SNP TSC0013419
gattagagaatag

SEQ ID NO: 46452 - DNA, 13 bp, Artificial Sequence
  Oligonucleotide for detection of SNP TSC0013419
ctattctctaatc

SEQ ID NO: 46453 - DNA, 13 bp, Artificial Sequence
  Oligonucleotide for detection of SNP TSC0013420
attagtgtattta

SEQ ID NO: 46454 - DNA, 13 bp, Artificial Sequence
  Oligonucleotide for detection of SNP TSC0013420
taaatacactaat

SEQ ID NO: 46455 - DNA, 13 bp, Artificial Sequence
  Oligonucleotide for detection of SNP TSC0013420
attagtatattta

SEQ ID NO: 46456 - DNA, 13 bp, Artificial Sequence
  Oligonucleotide for detection of SNP TSC0013420
taaatatactaat

SEQ ID NO: 46457 - DNA, 13 bp, Artificial Sequence
  Oligonucleotide for detection of SNP TSC0013421
tgttttatagttg

SEQ ID NO: 46458 - DNA, 13 bp, Artificial Sequence
  Oligonucleotide for detection of SNP TSC0013421
caactataaaaca

SEQ ID NO: 46459 - DNA, 13 bp, Artificial Sequence
  Oligonucleotide for detection of SNP TSC0013421
tgttttgtagttg

SEQ ID NO: 46460 - DNA, 13 bp, Artificial Sequence
  Oligonucleotide for detection of SNP TSC0013421
caactacaaaaca

SEQ ID NO: 46461 - DNA, 13 bp, Artificial Sequence
  Oligonucleotide for detection of SNP TSC0013421
tgtttcgtagttg

SEQ ID NO: 46462 - DNA, 13 bp, Artificial Sequence
  Oligonucleotide for detection of SNP TSC0013421
caactacgaaaca

SEQ ID NO: 46463 - DNA, 13 bp, Artificial Sequence
  Oligonucleotide for detection of SNP TSC0013421
taattatggagta

SEQ ID NO: 46464 - DNA, 13 bp, Artificial Sequence
  Oligonucleotide for detection of SNP TSC0013421
tactccataatta

SEQ ID NO: 46465 - DNA, 13 bp, Artificial Sequence
  Oligonucleotide for detection of SNP TSC0013421
taattacggagta

SEQ ID NO: 46466 - DNA, 13 bp, Artificial Sequence
  Oligonucleotide for detection of SNP TSC0013421
tactccgtaatta

SEQ ID NO: 46467 - DNA, 13 bp, Artificial Sequence
  Oligonucleotide for detection of SNP TSC0013422
tagttttggaggt

SEQ ID NO: 46468 - DNA, 13 bp, Artificial Sequence
  Oligonucleotide for detection of SNP TSC0013422
acctccaaaacta

SEQ ID NO: 46469 - DNA, 13 bp, Artificial Sequence
  Oligonucleotide for detection of SNP TSC0013422
tagtttcggaggt

SEQ ID NO: 46470 - DNA, 13 bp, Artificial Sequence
  Oligonucleotide for detection of SNP TSC0013422
acctccgaaacta

SEQ ID NO: 46471 - DNA, 13 bp, Artificial Sequence
  Oligonucleotide for detection of SNP TSC0013422
atttttgaggtta

SEQ ID NO: 46472 - DNA, 13 bp, Artificial Sequence
  Oligonucleotide for detection of SNP TSC0013422
taacctcaaaaat

SEQ ID NO: 46473 - DNA, 13 bp, Artificial Sequence
  Oligonucleotide for detection of SNP TSC0013422
atttttaaggtta

SEQ ID NO: 46474 - DNA, 13 bp, Artificial Sequence
  Oligonucleotide for detection of SNP TSC0013422
taaccttaaaaat

SEQ ID NO: 46475 - DNA, 13 bp, Artificial Sequence
  Oligonucleotide for detection of SNP TSC0013422
attttcgaggtta

SEQ ID NO: 46476 - DNA, 13 bp, Artificial Sequence
  Oligonucleotide for detection of SNP TSC0013422
taacctcgaaaat

SEQ ID NO: 46477 - DNA, 13 bp, Artificial Sequence
  Oligonucleotide for detection of SNP TSC0013423
gaattaggaatty

SEQ ID NO: 46478 - DNA, 13 bp, Artificial Sequence
  Oligonucleotide for detection of SNP TSC0013423
raattcctaattc

SEQ ID NO: 46479 - DNA, 13 bp, Artificial Sequence
  Oligonucleotide for detection of SNP TSC0013423
gaattaagaatty

SEQ ID NO: 46480 - DNA, 13 bp, Artificial Sequence
  Oligonucleotide for detection of SNP TSC0013423
raattcttaattc

SEQ ID NO: 46481 - DNA, 13 bp, Artificial Sequence
  Oligonucleotide for detection of SNP TSC0013424
ttgttatggaaga

SEQ ID NO: 46482 - DNA, 13 bp, Artificial Sequence
  Oligonucleotide for detection of SNP TSC0013424
tcttccataacaa

SEQ ID NO: 46483 - DNA, 13 bp, Artificial Sequence
  Oligonucleotide for detection of SNP TSC0013424
ttgttacggaaga

SEQ ID NO: 46484 - DNA, 13 bp, Artificial Sequence
  Oligonucleotide for detection of SNP TSC0013424
tcttccgtaacaa

SEQ ID NO: 46485 - DNA, 13 bp, Artificial Sequence
  Oligonucleotide for detection of SNP TSC0013424
ttttttgtgatag

SEQ ID NO: 46486 - DNA, 13 bp, Artificial Sequence
  Oligonucleotide for detection of SNP TSC0013424
ctatcacaaaaaa

SEQ ID NO: 46487 - DNA, 13 bp, Artificial Sequence
  Oligonucleotide for detection of SNP TSC0013424
ttttttatgatag

SEQ ID NO: 46488 - DNA, 13 bp, Artificial Sequence
  Oligonucleotide for detection of SNP TSC0013424
ctatcataaaaaa

SEQ ID NO: 46489 - DNA, 13 bp, Artificial Sequence
  Oligonucleotide for detection of SNP TSC0013424
tttttcgtgatag

SEQ ID NO: 46490 - DNA, 13 bp, Artificial Sequence
  Oligonucleotide for detection of SNP TSC0013424
ctatcacgaaaaa

SEQ ID NO: 46491 - DNA, 13 bp, Artificial Sequence
  Oligonucleotide for detection of SNP TSC0013425
ttgtagaatggag

SEQ ID NO: 46492 - DNA, 13 bp, Artificial Sequence
  Oligonucleotide for detection of SNP TSC0013425
ctccattctacaa

SEQ ID NO: 46493 - DNA, 13 bp, Artificial Sequence
  Oligonucleotide for detection of SNP TSC0013425
ttgtagtatggag

SEQ ID NO: 46494 - DNA, 13 bp, Artificial Sequence
  Oligonucleotide for detection of SNP TSC0013425
ctccatactacaa

SEQ ID NO: 46495 - DNA, 13 bp, Artificial Sequence
  Oligonucleotide for detection of SNP TSC0013429
tgatagtggaggt

SEQ ID NO: 46496 - DNA, 13 bp, Artificial Sequence
  Oligonucleotide for detection of SNP TSC0013429
acctccactatca

SEQ ID NO: 46497 - DNA, 13 bp, Artificial Sequence
  Oligonucleotide for detection of SNP TSC0013429
tgatagaggaggt

SEQ ID NO: 46498 - DNA, 13 bp, Artificial Sequence
  Oligonucleotide for detection of SNP TSC0013429
acctcctctatca

SEQ ID NO: 46499 - DNA, 13 bp, Artificial Sequence
  Oligonucleotide for detection of SNP TSC0013430
gttgtagatgagt

SEQ ID NO: 46500 - DNA, 13 bp, Artificial Sequence
  Oligonucleotide for detection of SNP TSC0013430
actcatctacaac

SEQ ID NO: 46501 - DNA, 13 bp, Artificial Sequence
  Oligonucleotide for detection of SNP TSC0013430
gttgtatatgagt

SEQ ID NO: 46502 - DNA, 13 bp, Artificial Sequence
  Oligonucleotide for detection of SNP TSC0013430
actcatatacaac

SEQ ID NO: 46503 - DNA, 13 bp, Artificial Sequence
  Oligonucleotide for detection of SNP TSC0013430
atttatttgtaay

SEQ ID NO: 46504 - DNA, 13 bp, Artificial Sequence
  Oligonucleotide for detection of SNP TSC0013430
rttacaaataaat

SEQ ID NO: 46505 - DNA, 13 bp, Artificial Sequence
  Oligonucleotide for detection of SNP TSC0013430
atttatatgtaay

SEQ ID NO: 46506 - DNA, 13 bp, Artificial Sequence
  Oligonucleotide for detection of SNP TSC0013430
rttacatataaat

SEQ ID NO: 46507 - DNA, 13 bp, Artificial Sequence
  Oligonucleotide for detection of SNP TSC0013431
gtaaggagtagtt

SEQ ID NO: 46508 - DNA, 13 bp, Artificial Sequence
  Oligonucleotide for detection of SNP TSC0013431
aactactccttac

SEQ ID NO: 46509 - DNA, 13 bp, Artificial Sequence
  Oligonucleotide for detection of SNP TSC0013431
gtaaggggtagtt

SEQ ID NO: 46510 - DNA, 13 bp, Artificial Sequence
  Oligonucleotide for detection of SNP TSC0013431
aactaccccttac

SEQ ID NO: 46511 - DNA, 13 bp, Artificial Sequence
  Oligonucleotide for detection of SNP TSC0013432
atgattggtatta

SEQ ID NO: 46512 - DNA, 13 bp, Artificial Sequence
  Oligonucleotide for detection of SNP TSC0013432
taataccaatcat

SEQ ID NO: 46513 - DNA, 13 bp, Artificial Sequence
  Oligonucleotide for detection of SNP TSC0013432
atgattagtatta

SEQ ID NO: 46514 - DNA, 13 bp, Artificial Sequence
  Oligonucleotide for detection of SNP TSC0013432
taatactaatcat

SEQ ID NO: 46515 - DNA, 13 bp, Artificial Sequence
  Oligonucleotide for detection of SNP TSC0013433
tatttaaataaag

SEQ ID NO: 46516 - DNA, 13 bp, Artificial Sequence
  Oligonucleotide for detection of SNP TSC0013433
ctttatttaaata

SEQ ID NO: 46517 - DNA, 13 bp, Artificial Sequence
  Oligonucleotide for detection of SNP TSC0013433
tatttatataaag

SEQ ID NO: 46518 - DNA, 13 bp, Artificial Sequence
  Oligonucleotide for detection of SNP TSC0013433
ctttatataaata

SEQ ID NO: 46519 - DNA, 13 bp, Artificial Sequence
  Oligonucleotide for detection of SNP TSC0013433
ttttatttgaata

SEQ ID NO: 46520 - DNA, 13 bp, Artificial Sequence
  Oligonucleotide for detection of SNP TSC0013433
tattcaaataaaa

SEQ ID NO: 46521 - DNA, 13 bp, Artificial Sequence
  Oligonucleotide for detection of SNP TSC0013433
ttttatatgaata

SEQ ID NO: 46522 - DNA, 13 bp, Artificial Sequence
  Oligonucleotide for detection of SNP TSC0013433
tattcatataaaa

SEQ ID NO: 46523 - DNA, 13 bp, Artificial Sequence
  Oligonucleotide for detection of SNP TSC0013434
gttaggtaagtaa

SEQ ID NO: 46524 - DNA, 13 bp, Artificial Sequence
  Oligonucleotide for detection of SNP TSC0013434
ttacttacctaac

SEQ ID NO: 46525 - DNA, 13 bp, Artificial Sequence
  Oligonucleotide for detection of SNP TSC0013434
gttagggaagtaa

SEQ ID NO: 46526 - DNA, 13 bp, Artificial Sequence
  Oligonucleotide for detection of SNP TSC0013434
ttacttccctaac

SEQ ID NO: 46527 - DNA, 13 bp, Artificial Sequence
  Oligonucleotide for detection of SNP TSC0013434
ttgtttgtttgay

SEQ ID NO: 46528 - DNA, 13 bp, Artificial Sequence
  Oligonucleotide for detection of SNP TSC0013434
rtcaaacaaacaa

SEQ ID NO: 46529 - DNA, 13 bp, Artificial Sequence
  Oligonucleotide for detection of SNP TSC0013434
ttgtttttttgay

SEQ ID NO: 46530 - DNA, 13 bp, Artificial Sequence
  Oligonucleotide for detection of SNP TSC0013434
rtcaaaaaaacaa

SEQ ID NO: 46531 - DNA, 13 bp, Artificial Sequence
  Oligonucleotide for detection of SNP TSC0013435
tgggtggtgtaaa

SEQ ID NO: 46532 - DNA, 13 bp, Artificial Sequence
  Oligonucleotide for detection of SNP TSC0013435
tttacaccaccca

SEQ ID NO: 46533 - DNA, 13 bp, Artificial Sequence
  Oligonucleotide for detection of SNP TSC0013435
tgggtgttgtaaa

SEQ ID NO: 46534 - DNA, 13 bp, Artificial Sequence
  Oligonucleotide for detection of SNP TSC0013435
tttacaacaccca

SEQ ID NO: 46535 - DNA, 13 bp, Artificial Sequence
  Oligonucleotide for detection of SNP TSC0013435
tttataatattta

SEQ ID NO: 46536 - DNA, 13 bp, Artificial Sequence
  Oligonucleotide for detection of SNP TSC0013435
taaatattataaa

SEQ ID NO: 46537 - DNA, 13 bp, Artificial Sequence
  Oligonucleotide for detection of SNP TSC0013437
agaagatagtaag

SEQ ID NO: 46538 - DNA, 13 bp, Artificial Sequence
  Oligonucleotide for detection of SNP TSC0013437
cttactatcttct

SEQ ID NO: 46539 - DNA, 13 bp, Artificial Sequence
  Oligonucleotide for detection of SNP TSC0013437
agaagagagtaag

SEQ ID NO: 46540 - DNA, 13 bp, Artificial Sequence
  Oligonucleotide for detection of SNP TSC0013437
cttactctcttct

SEQ ID NO: 46541 - DNA, 13 bp, Artificial Sequence
  Oligonucleotide for detection of SNP TSC0013437
tttgttttttttt

SEQ ID NO: 46542 - DNA, 13 bp, Artificial Sequence
  Oligonucleotide for detection of SNP TSC0013437
aaaaaaaaacaaa

SEQ ID NO: 46543 - DNA, 13 bp, Artificial Sequence
  Oligonucleotide for detection of SNP TSC0013438
ggttggatttgay

SEQ ID NO: 46544 - DNA, 13 bp, Artificial Sequence
  Oligonucleotide for detection of SNP TSC0013438
rtcaaatccaacc

SEQ ID NO: 46545 - DNA, 13 bp, Artificial Sequence
  Oligonucleotide for detection of SNP TSC0013438
ggttgggtttgay

SEQ ID NO: 46546 - DNA, 13 bp, Artificial Sequence
  Oligonucleotide for detection of SNP TSC0013438
rtcaaacccaacc

SEQ ID NO: 46547 - DNA, 13 bp, Artificial Sequence
  Oligonucleotide for detection of SNP TSC0013438
ggttggattcgay

SEQ ID NO: 46548 - DNA, 13 bp, Artificial Sequence
  Oligonucleotide for detection of SNP TSC0013438
rtcgaatccaacc

SEQ ID NO: 46549 - DNA, 13 bp, Artificial Sequence
  Oligonucleotide for detection of SNP TSC0013438
ggttgggttcgay

SEQ ID NO: 46550 - DNA, 13 bp, Artificial Sequence
  Oligonucleotide for detection of SNP TSC0013438
rtcgaacccaacc

SEQ ID NO: 46551 - DNA, 13 bp, Artificial Sequence
  Oligonucleotide for detection of SNP TSC0013439
taggtgtggtggy

SEQ ID NO: 46552 - DNA, 13 bp, Artificial Sequence
  Oligonucleotide for detection of SNP TSC0013439
rccaccacaccta

SEQ ID NO: 46553 - DNA, 13 bp, Artificial Sequence
  Oligonucleotide for detection of SNP TSC0013439
taggtgcggtggy

SEQ ID NO: 46554 - DNA, 13 bp, Artificial Sequence
  Oligonucleotide for detection of SNP TSC0013439
rccaccgcaccta

SEQ ID NO: 46555 - DNA, 13 bp, Artificial Sequence
  Oligonucleotide for detection of SNP TSC0013440
tttagttgtggta

SEQ ID NO: 46556 - DNA, 13 bp, Artificial Sequence
  Oligonucleotide for detection of SNP TSC0013440
taccacaactaaa

SEQ ID NO: 46557 - DNA, 13 bp, Artificial Sequence
  Oligonucleotide for detection of SNP TSC0013440
tttagtcgtggta

SEQ ID NO: 46558 - DNA, 13 bp, Artificial Sequence
  Oligonucleotide for detection of SNP TSC0013440
taccacgactaaa

SEQ ID NO: 46559 - DNA, 13 bp, Artificial Sequence
  Oligonucleotide for detection of SNP TSC0013440
tattatagttggg

SEQ ID NO: 46560 - DNA, 13 bp, Artificial Sequence
  Oligonucleotide for detection of SNP TSC0013440
cccaactataata

SEQ ID NO: 46561 - DNA, 13 bp, Artificial Sequence
  Oligonucleotide for detection of SNP TSC0013440
tattatggttggg

SEQ ID NO: 46562 - DNA, 13 bp, Artificial Sequence
  Oligonucleotide for detection of SNP TSC0013440
cccaaccataata

SEQ ID NO: 46563 - DNA, 13 bp, Artificial Sequence
  Oligonucleotide for detection of SNP TSC0013440
tattacggttggg

SEQ ID NO: 46564 - DNA, 13 bp, Artificial Sequence
  Oligonucleotide for detection of SNP TSC0013440
cccaaccgtaata

SEQ ID NO: 46565 - DNA, 13 bp, Artificial Sequence
  Oligonucleotide for detection of SNP TSC0013441
agagatggagtty

SEQ ID NO: 46566 - DNA, 13 bp, Artificial Sequence
  Oligonucleotide for detection of SNP TSC0013441
raactccatctct

SEQ ID NO: 46567 - DNA, 13 bp, Artificial Sequence
  Oligonucleotide for detection of SNP TSC0013441
agagattgagtty

SEQ ID NO: 46568 - DNA, 13 bp, Artificial Sequence
  Oligonucleotide for detection of SNP TSC0013441
raactcaatctct

SEQ ID NO: 46569 - DNA, 13 bp, Artificial Sequence
  Oligonucleotide for detection of SNP TSC0013441
agagacggagtty

SEQ ID NO: 46570 - DNA, 13 bp, Artificial Sequence
  Oligonucleotide for detection of SNP TSC0013441
raactccgtctct

SEQ ID NO: 46571 - DNA, 13 bp, Artificial Sequence
  Oligonucleotide for detection of SNP TSC0013441
ggattttgttttt

SEQ ID NO: 46572 - DNA, 13 bp, Artificial Sequence
  Oligonucleotide for detection of SNP TSC0013441
aaaaacaaaatcc

SEQ ID NO: 46573 - DNA, 13 bp, Artificial Sequence
  Oligonucleotide for detection of SNP TSC0013441
ggatttagttttt

SEQ ID NO: 46574 - DNA, 13 bp, Artificial Sequence
  Oligonucleotide for detection of SNP TSC0013441
aaaaactaaatcc

SEQ ID NO: 46575 - DNA, 13 bp, Artificial Sequence
  Oligonucleotide for detection of SNP TSC0013441
ggatttcgttttt

SEQ ID NO: 46576 - DNA, 13 bp, Artificial Sequence
  Oligonucleotide for detection of SNP TSC0013441
aaaaacgaaatcc

SEQ ID NO: 46577 - DNA, 13 bp, Artificial Sequence
  Oligonucleotide for detection of SNP TSC0013442
gaattttgattta

SEQ ID NO: 46578 - DNA, 13 bp, Artificial Sequence
  Oligonucleotide for detection of SNP TSC0013442
taaatcaaaattc

SEQ ID NO: 46579 - DNA, 13 bp, Artificial Sequence
  Oligonucleotide for detection of SNP TSC0013442
gaatttcgattta

SEQ ID NO: 46580 - DNA, 13 bp, Artificial Sequence
  Oligonucleotide for detection of SNP TSC0013442
taaatcgaaattc

SEQ ID NO: 46581 - DNA, 13 bp, Artificial Sequence
  Oligonucleotide for detection of SNP TSC0013442
tgagttggggtty

SEQ ID NO: 46582 - DNA, 13 bp, Artificial Sequence
  Oligonucleotide for detection of SNP TSC0013442
raaccccaactca

SEQ ID NO: 46583 - DNA, 13 bp, Artificial Sequence
  Oligonucleotide for detection of SNP TSC0013442
tgagttagggtty

SEQ ID NO: 46584 - DNA, 13 bp, Artificial Sequence
  Oligonucleotide for detection of SNP TSC0013442
raaccctaactca

SEQ ID NO: 46585 - DNA, 13 bp, Artificial Sequence
  Oligonucleotide for detection of SNP TSC0013442
tgagtcggggtty

SEQ ID NO: 46586 - DNA, 13 bp, Artificial Sequence
  Oligonucleotide for detection of SNP TSC0013442
raaccccgactca

SEQ ID NO: 46587 - DNA, 13 bp, Artificial Sequence
  Oligonucleotide for detection of SNP TSC0013443
atttagatttttt

SEQ ID NO: 46588 - DNA, 13 bp, Artificial Sequence
  Oligonucleotide for detection of SNP TSC0013443
aaaaaatctaaat

SEQ ID NO: 46589 - DNA, 13 bp, Artificial Sequence
  Oligonucleotide for detection of SNP TSC0013443
atttaggtttttt

SEQ ID NO: 46590 - DNA, 13 bp, Artificial Sequence
  Oligonucleotide for detection of SNP TSC0013443
aaaaaacctaaat

SEQ ID NO: 46591 - DNA, 13 bp, Artificial Sequence
  Oligonucleotide for detection of SNP TSC0013444
tgtaagttgtttg

SEQ ID NO: 46592 - DNA, 13 bp, Artificial Sequence
  Oligonucleotide for detection of SNP TSC0013444
caaacaacttaca

SEQ ID NO: 46593 - DNA, 13 bp, Artificial Sequence
  Oligonucleotide for detection of SNP TSC0013444
tgtaagatgtttg

SEQ ID NO: 46594 - DNA, 13 bp, Artificial Sequence
  Oligonucleotide for detection of SNP TSC0013444
caaacatcttaca

SEQ ID NO: 46595 - DNA, 13 bp, Artificial Sequence
  Oligonucleotide for detection of SNP TSC0013445
tgattaggtagta

SEQ ID NO: 46596 - DNA, 13 bp, Artificial Sequence
  Oligonucleotide for detection of SNP TSC0013445
tactacctaatca

SEQ ID NO: 46597 - DNA, 13 bp, Artificial Sequence
  Oligonucleotide for detection of SNP TSC0013445
tgattaagtagta

SEQ ID NO: 46598 - DNA, 13 bp, Artificial Sequence
  Oligonucleotide for detection of SNP TSC0013445
tactacttaatca

SEQ ID NO: 46599 - DNA, 13 bp, Artificial Sequence
  Oligonucleotide for detection of SNP TSC0013446
gtagtttgtttat

SEQ ID NO: 46600 - DNA, 13 bp, Artificial Sequence
  Oligonucleotide for detection of SNP TSC0013446
ataaacaaactac

SEQ ID NO: 46601 - DNA, 13 bp, Artificial Sequence
  Oligonucleotide for detection of SNP TSC0013446
gtagttcgtttat

SEQ ID NO: 46602 - DNA, 13 bp, Artificial Sequence
  Oligonucleotide for detection of SNP TSC0013446
ataaacgaactac

SEQ ID NO: 46603 - DNA, 13 bp, Artificial Sequence
  Oligonucleotide for detection of SNP TSC0013446
atggatgagttgy

SEQ ID NO: 46604 - DNA, 13 bp, Artificial Sequence
  Oligonucleotide for detection of SNP TSC0013446
rcaactcatccat

SEQ ID NO: 46605 - DNA, 13 bp, Artificial Sequence
  Oligonucleotide for detection of SNP TSC0013446
atggataagttgy

SEQ ID NO: 46606 - DNA, 13 bp, Artificial Sequence
  Oligonucleotide for detection of SNP TSC0013446
rcaacttatccat

SEQ ID NO: 46607 - DNA, 13 bp, Artificial Sequence
  Oligonucleotide for detection of SNP TSC0013446
atggacgagttgy

SEQ ID NO: 46608 - DNA, 13 bp, Artificial Sequence
  Oligonucleotide for detection of SNP TSC0013446
rcaactcgtccat

SEQ ID NO: 46609 - DNA, 13 bp, Artificial Sequence
  Oligonucleotide for detection of SNP TSC0013447
atttgataataay

SEQ ID NO: 46610 - DNA, 13 bp, Artificial Sequence
  Oligonucleotide for detection of SNP TSC0013447
rttattatcaaat

SEQ ID NO: 46611 - DNA, 13 bp, Artificial Sequence
  Oligonucleotide for detection of SNP TSC0013447
atttgagaataay

SEQ ID NO: 46612 - DNA, 13 bp, Artificial Sequence
  Oligonucleotide for detection of SNP TSC0013447
rttattctcaaat

SEQ ID NO: 46613 - DNA, 13 bp, Artificial Sequence
  Oligonucleotide for detection of SNP TSC0013447
gttattgttaagt

SEQ ID NO: 46614 - DNA, 13 bp, Artificial Sequence
  Oligonucleotide for detection of SNP TSC0013447
acttaacaataac

SEQ ID NO: 46615 - DNA, 13 bp, Artificial Sequence
  Oligonucleotide for detection of SNP TSC0013447
gttatttttaagt

SEQ ID NO: 46616 - DNA, 13 bp, Artificial Sequence
  Oligonucleotide for detection of SNP TSC0013447
acttaaaaataac

SEQ ID NO: 46617 - DNA, 13 bp, Artificial Sequence
  Oligonucleotide for detection of SNP TSC0013448
agttgtatttaag

SEQ ID NO: 46618 - DNA, 13 bp, Artificial Sequence
  Oligonucleotide for detection of SNP TSC0013448
cttaaatacaact

SEQ ID NO: 46619 - DNA, 13 bp, Artificial Sequence
  Oligonucleotide for detection of SNP TSC0013448
agttgtgtttaag

SEQ ID NO: 46620 - DNA, 13 bp, Artificial Sequence
  Oligonucleotide for detection of SNP TSC0013448
cttaaacacaact

SEQ ID NO: 46621 - DNA, 13 bp, Artificial Sequence
  Oligonucleotide for detection of SNP TSC0013451
tttttaggtttty

SEQ ID NO: 46622 - DNA, 13 bp, Artificial Sequence
  Oligonucleotide for detection of SNP TSC0013451
raaaacctaaaaa

SEQ ID NO: 46623 - DNA, 13 bp, Artificial Sequence
  Oligonucleotide for detection of SNP TSC0013457
agagtagttgtga

SEQ ID NO: 46624 - DNA, 13 bp, Artificial Sequence
  Oligonucleotide for detection of SNP TSC0013457
tcacaactactct

SEQ ID NO: 46625 - DNA, 13 bp, Artificial Sequence
  Oligonucleotide for detection of SNP TSC0013457
agagtaattgtga

SEQ ID NO: 46626 - DNA, 13 bp, Artificial Sequence
  Oligonucleotide for detection of SNP TSC0013457
tcacaattactct

SEQ ID NO: 46627 - DNA, 13 bp, Artificial Sequence
  Oligonucleotide for detection of SNP TSC0013458
ttattatgatttg

SEQ ID NO: 46628 - DNA, 13 bp, Artificial Sequence
  Oligonucleotide for detection of SNP TSC0013458
caaatcataataa

SEQ ID NO: 46629 - DNA, 13 bp, Artificial Sequence
  Oligonucleotide for detection of SNP TSC0013458
ttattacgatttg

SEQ ID NO: 46630 - DNA, 13 bp, Artificial Sequence
  Oligonucleotide for detection of SNP TSC0013458
caaatcgtaataa

SEQ ID NO: 46631 - DNA, 13 bp, Artificial Sequence
  Oligonucleotide for detection of SNP TSC0013458
taaattgtgatag

SEQ ID NO: 46632 - DNA, 13 bp, Artificial Sequence
  Oligonucleotide for detection of SNP TSC0013458
ctatcacaattta

SEQ ID NO: 46633 - DNA, 13 bp, Artificial Sequence
  Oligonucleotide for detection of SNP TSC0013458
taaattatgatag

SEQ ID NO: 46634 - DNA, 13 bp, Artificial Sequence
  Oligonucleotide for detection of SNP TSC0013458
ctatcataattta

SEQ ID NO: 46635 - DNA, 13 bp, Artificial Sequence
  Oligonucleotide for detection of SNP TSC0013458
taaatcgtgatag

SEQ ID NO: 46636 - DNA, 13 bp, Artificial Sequence
  Oligonucleotide for detection of SNP TSC0013458
ctatcacgattta

SEQ ID NO: 46637 - DNA, 13 bp, Artificial Sequence
  Oligonucleotide for detection of SNP TSC0013460
tagttttgttttt

SEQ ID NO: 46638 - DNA, 13 bp, Artificial Sequence
  Oligonucleotide for detection of SNP TSC0013460
aaaaacaaaacta

SEQ ID NO: 46639 - DNA, 13 bp, Artificial Sequence
  Oligonucleotide for detection of SNP TSC0013460
tagtttcgttttt

SEQ ID NO: 46640 - DNA, 13 bp, Artificial Sequence
  Oligonucleotide for detection of SNP TSC0013460
aaaaacgaaacta

SEQ ID NO: 46641 - DNA, 13 bp, Artificial Sequence
  Oligonucleotide for detection of SNP TSC0013460
aagggtggagttg

SEQ ID NO: 46642 - DNA, 13 bp, Artificial Sequence
  Oligonucleotide for detection of SNP TSC0013460
caactccaccctt

SEQ ID NO: 46643 - DNA, 13 bp, Artificial Sequence
  Oligonucleotide for detection of SNP TSC0013460
aagggtagagttg

SEQ ID NO: 46644 - DNA, 13 bp, Artificial Sequence
  Oligonucleotide for detection of SNP TSC0013460
caactctaccctt

SEQ ID NO: 46645 - DNA, 13 bp, Artificial Sequence
  Oligonucleotide for detection of SNP TSC0013460
aagggcggagttg

SEQ ID NO: 46646 - DNA, 13 bp, Artificial Sequence
  Oligonucleotide for detection of SNP TSC0013460
caactccgccctt

SEQ ID NO: 46647 - DNA, 13 bp, Artificial Sequence
  Oligonucleotide for detection of SNP TSC0013461
agtttcgtttttg

SEQ ID NO: 46648 - DNA, 13 bp, Artificial Sequence
  Oligonucleotide for detection of SNP TSC0013461
caaaaacgaaact

SEQ ID NO: 46649 - DNA, 13 bp, Artificial Sequence
  Oligonucleotide for detection of SNP TSC0013461
taagggtggagtt

SEQ ID NO: 46650 - DNA, 13 bp, Artificial Sequence
  Oligonucleotide for detection of SNP TSC0013461
aactccaccctta

SEQ ID NO: 46651 - DNA, 13 bp, Artificial Sequence
  Oligonucleotide for detection of SNP TSC0013461
taagggaggagtt

SEQ ID NO: 46652 - DNA, 13 bp, Artificial Sequence
  Oligonucleotide for detection of SNP TSC0013461
aactcctccctta

SEQ ID NO: 46653 - DNA, 13 bp, Artificial Sequence
  Oligonucleotide for detection of SNP TSC0013461
taagggcggagtt

SEQ ID NO: 46654 - DNA, 13 bp, Artificial Sequence
  Oligonucleotide for detection of SNP TSC0013461
aactccgccctta

SEQ ID NO: 46655 - DNA, 13 bp, Artificial Sequence
  Oligonucleotide for detection of SNP TSC0013462
aggaaggtaggaa

SEQ ID NO: 46656 - DNA, 13 bp, Artificial Sequence
  Oligonucleotide for detection of SNP TSC0013462
ttcctaccttcct

SEQ ID NO: 46657 - DNA, 13 bp, Artificial Sequence
  Oligonucleotide for detection of SNP TSC0013462
aggaagataggaa

SEQ ID NO: 46658 - DNA, 13 bp, Artificial Sequence
  Oligonucleotide for detection of SNP TSC0013462
ttcctatcttcct

SEQ ID NO: 46659 - DNA, 13 bp, Artificial Sequence
  Oligonucleotide for detection of SNP TSC0013463
tttagaaatatgy

SEQ ID NO: 46660 - DNA, 13 bp, Artificial Sequence
  Oligonucleotide for detection of SNP TSC0013463
rcatatttctaaa

SEQ ID NO: 46661 - DNA, 13 bp, Artificial Sequence
  Oligonucleotide for detection of SNP TSC0013463
tttagatatatgy

SEQ ID NO: 46662 - DNA, 13 bp, Artificial Sequence
  Oligonucleotide for detection of SNP TSC0013463
rcatatatctaaa

SEQ ID NO: 46663 - DNA, 13 bp, Artificial Sequence
  Oligonucleotide for detection of SNP TSC0013463
gtatatttttaaa

SEQ ID NO: 46664 - DNA, 13 bp, Artificial Sequence
  Oligonucleotide for detection of SNP TSC0013463
tttaaaaatatac

SEQ ID NO: 46665 - DNA, 13 bp, Artificial Sequence
  Oligonucleotide for detection of SNP TSC0013463
gtatatgtttaaa

SEQ ID NO: 46666 - DNA, 13 bp, Artificial Sequence
  Oligonucleotide for detection of SNP TSC0013463
tttaaacatatac

SEQ ID NO: 46667 - DNA, 13 bp, Artificial Sequence
  Oligonucleotide for detection of SNP TSC0013464
aatttgagtgttt

SEQ ID NO: 46668 - DNA, 13 bp, Artificial Sequence
  Oligonucleotide for detection of SNP TSC0013464
aaacactcaaatt

SEQ ID NO: 46669 - DNA, 13 bp, Artificial Sequence
  Oligonucleotide for detection of SNP TSC0013464
aatttgggtgttt

SEQ ID NO: 46670 - DNA, 13 bp, Artificial Sequence
  Oligonucleotide for detection of SNP TSC0013464
aaacacccaaatt

SEQ ID NO: 46671 - DNA, 13 bp, Artificial Sequence
  Oligonucleotide for detection of SNP TSC0013465
ttagtaatgttty

SEQ ID NO: 46672 - DNA, 13 bp, Artificial Sequence
  Oligonucleotide for detection of SNP TSC0013465
raaacattactaa

SEQ ID NO: 46673 - DNA, 13 bp, Artificial Sequence
  Oligonucleotide for detection of SNP TSC0013465
ttagtagtgttty

SEQ ID NO: 46674 - DNA, 13 bp, Artificial Sequence
  Oligonucleotide for detection of SNP TSC0013465
raaacactactaa

SEQ ID NO: 46675 - DNA, 13 bp, Artificial Sequence
  Oligonucleotide for detection of SNP TSC0013466
aaatgtagttatg

SEQ ID NO: 46676 - DNA, 13 bp, Artificial Sequence
  Oligonucleotide for detection of SNP TSC0013466
cataactacattt

SEQ ID NO: 46677 - DNA, 13 bp, Artificial Sequence
  Oligonucleotide for detection of SNP TSC0013466
aaatgttgttatg

SEQ ID NO: 46678 - DNA, 13 bp, Artificial Sequence
  Oligonucleotide for detection of SNP TSC0013466
cataacaacattt

SEQ ID NO: 46679 - DNA, 13 bp, Artificial Sequence
  Oligonucleotide for detection of SNP TSC0013466
tataattgtattt

SEQ ID NO: 46680 - DNA, 13 bp, Artificial Sequence
  Oligonucleotide for detection of SNP TSC0013466
aaatacaattata

SEQ ID NO: 46681 - DNA, 13 bp, Artificial Sequence
  Oligonucleotide for detection of SNP TSC0013466
tataatagtattt

SEQ ID NO: 46682 - DNA, 13 bp, Artificial Sequence
  Oligonucleotide for detection of SNP TSC0013466
aaatactattata

SEQ ID NO: 46683 - DNA, 13 bp, Artificial Sequence
  Oligonucleotide for detection of SNP TSC0013468
aattaatgttgta

SEQ ID NO: 46684 - DNA, 13 bp, Artificial Sequence
  Oligonucleotide for detection of SNP TSC0013468
tacaacattaatt

SEQ ID NO: 46685 - DNA, 13 bp, Artificial Sequence
  Oligonucleotide for detection of SNP TSC0013468
aattaacgttgta

SEQ ID NO: 46686 - DNA, 13 bp, Artificial Sequence
  Oligonucleotide for detection of SNP TSC0013468
tacaacgttaatt

SEQ ID NO: 46687 - DNA, 13 bp, Artificial Sequence
  Oligonucleotide for detection of SNP TSC0013468
tatagtgttagtt

SEQ ID NO: 46688 - DNA, 13 bp, Artificial Sequence
  Oligonucleotide for detection of SNP TSC0013468
aactaacactata

SEQ ID NO: 46689 - DNA, 13 bp, Artificial Sequence
  Oligonucleotide for detection of SNP TSC0013468
tatagtattagtt

SEQ ID NO: 46690 - DNA, 13 bp, Artificial Sequence
  Oligonucleotide for detection of SNP TSC0013468
aactaatactata

SEQ ID NO: 46691 - DNA, 13 bp, Artificial Sequence
  Oligonucleotide for detection of SNP TSC0013468
tatagcgttagtt

SEQ ID NO: 46692 - DNA, 13 bp, Artificial Sequence
  Oligonucleotide for detection of SNP TSC0013468
aactaacgctata

SEQ ID NO: 46693 - DNA, 13 bp, Artificial Sequence
  Oligonucleotide for detection of SNP TSC0013469
atgttatgtgatt

SEQ ID NO: 46694 - DNA, 13 bp, Artificial Sequence
  Oligonucleotide for detection of SNP TSC0013469
aatcacataacat

SEQ ID NO: 46695 - DNA, 13 bp, Artificial Sequence
  Oligonucleotide for detection of SNP TSC0013469
acgttatgtgatt

SEQ ID NO: 46696 - DNA, 13 bp, Artificial Sequence
  Oligonucleotide for detection of SNP TSC0013469
aatcacataacgt

SEQ ID NO: 46697 - DNA, 13 bp, Artificial Sequence
  Oligonucleotide for detection of SNP TSC0013469
atgttacgtgatt

SEQ ID NO: 46698 - DNA, 13 bp, Artificial Sequence
  Oligonucleotide for detection of SNP TSC0013469
aatcacgtaacat

SEQ ID NO: 46699 - DNA, 13 bp, Artificial Sequence
  Oligonucleotide for detection of SNP TSC0013469
acgttacgtgatt

SEQ ID NO: 46700 - DNA, 13 bp, Artificial Sequence
  Oligonucleotide for detection of SNP TSC0013469
aatcacgtaacgt

SEQ ID NO: 46701 - DNA, 13 bp, Artificial Sequence
  Oligonucleotide for detection of SNP TSC0013469
agttatgtgatgt

SEQ ID NO: 46702 - DNA, 13 bp, Artificial Sequence
  Oligonucleotide for detection of SNP TSC0013469
acatcacataact

SEQ ID NO: 46703 - DNA, 13 bp, Artificial Sequence
  Oligonucleotide for detection of SNP TSC0013469
agttatatgatgt

SEQ ID NO: 46704 - DNA, 13 bp, Artificial Sequence
  Oligonucleotide for detection of SNP TSC0013469
acatcatataact

SEQ ID NO: 46705 - DNA, 13 bp, Artificial Sequence
  Oligonucleotide for detection of SNP TSC0013469
agttacgtgatgt

SEQ ID NO: 46706 - DNA, 13 bp, Artificial Sequence
  Oligonucleotide for detection of SNP TSC0013469
acatcacgtaact

SEQ ID NO: 46707 - DNA, 13 bp, Artificial Sequence
  Oligonucleotide for detection of SNP TSC0013469
agttatatgacgt

SEQ ID NO: 46708 - DNA, 13 bp, Artificial Sequence
  Oligonucleotide for detection of SNP TSC0013469
acgtcatataact

SEQ ID NO: 46709 - DNA, 13 bp, Artificial Sequence
  Oligonucleotide for detection of SNP TSC0013469
agttatgtgacgt

SEQ ID NO: 46710 - DNA, 13 bp, Artificial Sequence
  Oligonucleotide for detection of SNP TSC0013469
acgtcacataact

SEQ ID NO: 46711 - DNA, 13 bp, Artificial Sequence
  Oligonucleotide for detection of SNP TSC0013469
agttacgtgacgt

SEQ ID NO: 46712 - DNA, 13 bp, Artificial Sequence
  Oligonucleotide for detection of SNP TSC0013469
acgtcacgtaact

SEQ ID NO: 46713 - DNA, 13 bp, Artificial Sequence
  Oligonucleotide for detection of SNP TSC0013470
ttaaatatatttt

SEQ ID NO: 46714 - DNA, 13 bp, Artificial Sequence
  Oligonucleotide for detection of SNP TSC0013470
aaaatatatttaa

SEQ ID NO: 46715 - DNA, 13 bp, Artificial Sequence
  Oligonucleotide for detection of SNP TSC0013470
ttaaatgtatttt

SEQ ID NO: 46716 - DNA, 13 bp, Artificial Sequence
  Oligonucleotide for detection of SNP TSC0013470
aaaatacatttaa

SEQ ID NO: 46717 - DNA, 13 bp, Artificial Sequence
  Oligonucleotide for detection of SNP TSC0013470
ttaaacgtatttt

SEQ ID NO: 46718 - DNA, 13 bp, Artificial Sequence
  Oligonucleotide for detection of SNP TSC0013470
aaaatacgtttaa

SEQ ID NO: 46719 - DNA, 13 bp, Artificial Sequence
  Oligonucleotide for detection of SNP TSC0013470
aagatgtgtttaa

SEQ ID NO: 46720 - DNA, 13 bp, Artificial Sequence
  Oligonucleotide for detection of SNP TSC0013470
ttaaacacatctt

SEQ ID NO: 46721 - DNA, 13 bp, Artificial Sequence
  Oligonucleotide for detection of SNP TSC0013470
aagatgcgtttaa

SEQ ID NO: 46722 - DNA, 13 bp, Artificial Sequence
  Oligonucleotide for detection of SNP TSC0013470
ttaaacgcatctt

SEQ ID NO: 46723 - DNA, 13 bp, Artificial Sequence
  Oligonucleotide for detection of SNP TSC0013471
agtgggaatgggg

SEQ ID NO: 46724 - DNA, 13 bp, Artificial Sequence
  Oligonucleotide for detection of SNP TSC0013471
ccccattcccact

SEQ ID NO: 46725 - DNA, 13 bp, Artificial Sequence
  Oligonucleotide for detection of SNP TSC0013471
agtggggatgggg

SEQ ID NO: 46726 - DNA, 13 bp, Artificial Sequence
  Oligonucleotide for detection of SNP TSC0013471
ccccatccccact

SEQ ID NO: 46727 - DNA, 13 bp, Artificial Sequence
  Oligonucleotide for detection of SNP TSC0013471
agtgggaacgggg

SEQ ID NO: 46728 - DNA, 13 bp, Artificial Sequence
  Oligonucleotide for detection of SNP TSC0013471
ccccgttcccact

SEQ ID NO: 46729 - DNA, 13 bp, Artificial Sequence
  Oligonucleotide for detection of SNP TSC0013471
agtggggacgggg

SEQ ID NO: 46730 - DNA, 13 bp, Artificial Sequence
  Oligonucleotide for detection of SNP TSC0013471
ccccgtccccact

SEQ ID NO: 46731 - DNA, 13 bp, Artificial Sequence
  Oligonucleotide for detection of SNP TSC0013472
tgggaatggggga

SEQ ID NO: 46732 - DNA, 13 bp, Artificial Sequence
  Oligonucleotide for detection of SNP TSC0013472
tcccccattccca

SEQ ID NO: 46733 - DNA, 13 bp, Artificial Sequence
  Oligonucleotide for detection of SNP TSC0013472
tgggaacggggga

SEQ ID NO: 46734 - DNA, 13 bp, Artificial Sequence
  Oligonucleotide for detection of SNP TSC0013472
tcccccgttccca

SEQ ID NO: 46735 - DNA, 13 bp, Artificial Sequence
  Oligonucleotide for detection of SNP TSC0013473
ttgataagaggta

SEQ ID NO: 46736 - DNA, 13 bp, Artificial Sequence
  Oligonucleotide for detection of SNP TSC0013473
tacctcttatcaa

SEQ ID NO: 46737 - DNA, 13 bp, Artificial Sequence
  Oligonucleotide for detection of SNP TSC0013473
ttgataggaggta

SEQ ID NO: 46738 - DNA, 13 bp, Artificial Sequence
  Oligonucleotide for detection of SNP TSC0013473
tacctcctatcaa

SEQ ID NO: 46739 - DNA, 13 bp, Artificial Sequence
  Oligonucleotide for detection of SNP TSC0013474
tggtgtaattttg

SEQ ID NO: 46740 - DNA, 13 bp, Artificial Sequence
  Oligonucleotide for detection of SNP TSC0013474
caaaattacacca

SEQ ID NO: 46741 - DNA, 13 bp, Artificial Sequence
  Oligonucleotide for detection of SNP TSC0013474
tggtgtgattttg

SEQ ID NO: 46742 - DNA, 13 bp, Artificial Sequence
  Oligonucleotide for detection of SNP TSC0013474
caaaatcacacca

SEQ ID NO: 46743 - DNA, 13 bp, Artificial Sequence
  Oligonucleotide for detection of SNP TSC0013474
tggtgtaatttcg

SEQ ID NO: 46744 - DNA, 13 bp, Artificial Sequence
  Oligonucleotide for detection of SNP TSC0013474
cgaaattacacca

SEQ ID NO: 46745 - DNA, 13 bp, Artificial Sequence
  Oligonucleotide for detection of SNP TSC0013474
tggtgcgattttg

SEQ ID NO: 46746 - DNA, 13 bp, Artificial Sequence
  Oligonucleotide for detection of SNP TSC0013474
caaaatcgcacca

SEQ ID NO: 46747 - DNA, 13 bp, Artificial Sequence
  Oligonucleotide for detection of SNP TSC0013474
tggtgtgatttcg

SEQ ID NO: 46748 - DNA, 13 bp, Artificial Sequence
  Oligonucleotide for detection of SNP TSC0013474
cgaaatcacacca

SEQ ID NO: 46749 - DNA, 13 bp, Artificial Sequence
  Oligonucleotide for detection of SNP TSC0013474
tggtgcgatttcg

SEQ ID NO: 46750 - DNA, 13 bp, Artificial Sequence
  Oligonucleotide for detection of SNP TSC0013474
cgaaatcgcacca

SEQ ID NO: 46751 - DNA, 13 bp, Artificial Sequence
  Oligonucleotide for detection of SNP TSC0013474
tgagattgtatta

SEQ ID NO: 46752 - DNA, 13 bp, Artificial Sequence
  Oligonucleotide for detection of SNP TSC0013474
taatacaatctca

SEQ ID NO: 46753 - DNA, 13 bp, Artificial Sequence
  Oligonucleotide for detection of SNP TSC0013474
cgagattgtatta

SEQ ID NO: 46754 - DNA, 13 bp, Artificial Sequence
  Oligonucleotide for detection of SNP TSC0013474
taatacaatctcg

SEQ ID NO: 46755 - DNA, 13 bp, Artificial Sequence
  Oligonucleotide for detection of SNP TSC0013474
tgagatcgtatta

SEQ ID NO: 46756 - DNA, 13 bp, Artificial Sequence
  Oligonucleotide for detection of SNP TSC0013474
taatacgatctca

SEQ ID NO: 46757 - DNA, 13 bp, Artificial Sequence
  Oligonucleotide for detection of SNP TSC0013474
cgagatcgtatta

SEQ ID NO: 46758 - DNA, 13 bp, Artificial Sequence
  Oligonucleotide for detection of SNP TSC0013474
taatacgatctcg

SEQ ID NO: 46759 - DNA, 13 bp, Artificial Sequence
  Oligonucleotide for detection of SNP TSC0013476
ttatgtaataaat

SEQ ID NO: 46760 - DNA, 13 bp, Artificial Sequence
  Oligonucleotide for detection of SNP TSC0013476
atttattacataa

SEQ ID NO: 46761 - DNA, 13 bp, Artificial Sequence
  Oligonucleotide for detection of SNP TSC0013476
ttatgtgataaat

SEQ ID NO: 46762 - DNA, 13 bp, Artificial Sequence
  Oligonucleotide for detection of SNP TSC0013476
atttatcacataa

SEQ ID NO: 46763 - DNA, 13 bp, Artificial Sequence
  Oligonucleotide for detection of SNP TSC0013476
ttacgtaataaat

SEQ ID NO: 46764 - DNA, 13 bp, Artificial Sequence
  Oligonucleotide for detection of SNP TSC0013476
atttattacgtaa

SEQ ID NO: 46765 - DNA, 13 bp, Artificial Sequence
  Oligonucleotide for detection of SNP TSC0013476
ttacgtgataaat

SEQ ID NO: 46766 - DNA, 13 bp, Artificial Sequence
  Oligonucleotide for detection of SNP TSC0013476
atttatcacgtaa

SEQ ID NO: 46767 - DNA, 13 bp, Artificial Sequence
  Oligonucleotide for detection of SNP TSC0013477
taagtgtttggag

SEQ ID NO: 46768 - DNA, 13 bp, Artificial Sequence
  Oligonucleotide for detection of SNP TSC0013477
ctccaaacactta

SEQ ID NO: 46769 - DNA, 13 bp, Artificial Sequence
  Oligonucleotide for detection of SNP TSC0013477
taagtggttggag

SEQ ID NO: 46770 - DNA, 13 bp, Artificial Sequence
  Oligonucleotide for detection of SNP TSC0013477
ctccaaccactta

SEQ ID NO: 46771 - DNA, 13 bp, Artificial Sequence
  Oligonucleotide for detection of SNP TSC0013477
ttttaggtattta

SEQ ID NO: 46772 - DNA, 13 bp, Artificial Sequence
  Oligonucleotide for detection of SNP TSC0013477
taaatacctaaaa

SEQ ID NO: 46773 - DNA, 13 bp, Artificial Sequence
  Oligonucleotide for detection of SNP TSC0013477
ttttagttattta

SEQ ID NO: 46774 - DNA, 13 bp, Artificial Sequence
  Oligonucleotide for detection of SNP TSC0013477
taaataactaaaa

SEQ ID NO: 46775 - DNA, 13 bp, Artificial Sequence
  Oligonucleotide for detection of SNP TSC0013478
tgtaagatagata

SEQ ID NO: 46776 - DNA, 13 bp, Artificial Sequence
  Oligonucleotide for detection of SNP TSC0013478
tatctatcttaca

SEQ ID NO: 46777 - DNA, 13 bp, Artificial Sequence
  Oligonucleotide for detection of SNP TSC0013478
tgtaaggtagata

SEQ ID NO: 46778 - DNA, 13 bp, Artificial Sequence
  Oligonucleotide for detection of SNP TSC0013478
tatctaccttaca

SEQ ID NO: 46779 - DNA, 13 bp, Artificial Sequence
  Oligonucleotide for detection of SNP TSC0013479
tttagttgataty

SEQ ID NO: 46780 - DNA, 13 bp, Artificial Sequence
  Oligonucleotide for detection of SNP TSC0013479
ratatcaactaaa

SEQ ID NO: 46781 - DNA, 13 bp, Artificial Sequence
  Oligonucleotide for detection of SNP TSC0013479
tttagtcgataty

SEQ ID NO: 46782 - DNA, 13 bp, Artificial Sequence
  Oligonucleotide for detection of SNP TSC0013479
ratatcgactaaa

SEQ ID NO: 46783 - DNA, 13 bp, Artificial Sequence
  Oligonucleotide for detection of SNP TSC0013479
ggtgttgattaaa

SEQ ID NO: 46784 - DNA, 13 bp, Artificial Sequence
  Oligonucleotide for detection of SNP TSC0013479
tttaatcaacacc

SEQ ID NO: 46785 - DNA, 13 bp, Artificial Sequence
  Oligonucleotide for detection of SNP TSC0013479
ggtgttaattaaa

SEQ ID NO: 46786 - DNA, 13 bp, Artificial Sequence
  Oligonucleotide for detection of SNP TSC0013479
tttaattaacacc

SEQ ID NO: 46787 - DNA, 13 bp, Artificial Sequence
  Oligonucleotide for detection of SNP TSC0013479
ggtgtcgattaaa

SEQ ID NO: 46788 - DNA, 13 bp, Artificial Sequence
  Oligonucleotide for detection of SNP TSC0013479
tttaatcgacacc

SEQ ID NO: 46789 - DNA, 13 bp, Artificial Sequence
  Oligonucleotide for detection of SNP TSC0013480
ttatggttagaga

SEQ ID NO: 46790 - DNA, 13 bp, Artificial Sequence
  Oligonucleotide for detection of SNP TSC0013480
tctctaaccataa

SEQ ID NO: 46791 - DNA, 13 bp, Artificial Sequence
  Oligonucleotide for detection of SNP TSC0013480
ttatgggtagaga

SEQ ID NO: 46792 - DNA, 13 bp, Artificial Sequence
  Oligonucleotide for detection of SNP TSC0013480
tctctacccataa

SEQ ID NO: 46793 - DNA, 13 bp, Artificial Sequence
  Oligonucleotide for detection of SNP TSC0013480
tttttagttatga

SEQ ID NO: 46794 - DNA, 13 bp, Artificial Sequence
  Oligonucleotide for detection of SNP TSC0013480
tcataactaaaaa

SEQ ID NO: 46795 - DNA, 13 bp, Artificial Sequence
  Oligonucleotide for detection of SNP TSC0013480
tttttatttatga

SEQ ID NO: 46796 - DNA, 13 bp, Artificial Sequence
  Oligonucleotide for detection of SNP TSC0013480
tcataaataaaaa

SEQ ID NO: 46797 - DNA, 13 bp, Artificial Sequence
  Oligonucleotide for detection of SNP TSC0013481
ttttagtttggat

SEQ ID NO: 46798 - DNA, 13 bp, Artificial Sequence
  Oligonucleotide for detection of SNP TSC0013481
atccaaactaaaa

SEQ ID NO: 46799 - DNA, 13 bp, Artificial Sequence
  Oligonucleotide for detection of SNP TSC0013481
ttttagattggat

SEQ ID NO: 46800 - DNA, 13 bp, Artificial Sequence
  Oligonucleotide for detection of SNP TSC0013481
atccaatctaaaa

SEQ ID NO: 46801 - DNA, 13 bp, Artificial Sequence
  Oligonucleotide for detection of SNP TSC0013482
gtatgtatatgaa

SEQ ID NO: 46802 - DNA, 13 bp, Artificial Sequence
  Oligonucleotide for detection of SNP TSC0013482
ttcatatacatac

SEQ ID NO: 46803 - DNA, 13 bp, Artificial Sequence
  Oligonucleotide for detection of SNP TSC0013482
gtatgtgtatgaa

SEQ ID NO: 46804 - DNA, 13 bp, Artificial Sequence
  Oligonucleotide for detection of SNP TSC0013482
ttcatacacatac

SEQ ID NO: 46805 - DNA, 13 bp, Artificial Sequence
  Oligonucleotide for detection of SNP TSC0013483
aattttgttattt

SEQ ID NO: 46806 - DNA, 13 bp, Artificial Sequence
  Oligonucleotide for detection of SNP TSC0013483
aaataacaaaatt

SEQ ID NO: 46807 - DNA, 13 bp, Artificial Sequence
  Oligonucleotide for detection of SNP TSC0013483
aattttattattt

SEQ ID NO: 46808 - DNA, 13 bp, Artificial Sequence
  Oligonucleotide for detection of SNP TSC0013483
aaataataaaatt

SEQ ID NO: 46809 - DNA, 13 bp, Artificial Sequence
  Oligonucleotide for detection of SNP TSC0013484
tttgaagatgaag

SEQ ID NO: 46810 - DNA, 13 bp, Artificial Sequence
  Oligonucleotide for detection of SNP TSC0013484
cttcatcttcaaa

SEQ ID NO: 46811 - DNA, 13 bp, Artificial Sequence
  Oligonucleotide for detection of SNP TSC0013484
tttgaaaatgaag

SEQ ID NO: 46812 - DNA, 13 bp, Artificial Sequence
  Oligonucleotide for detection of SNP TSC0013484
cttcattttcaaa

SEQ ID NO: 46813 - DNA, 13 bp, Artificial Sequence
  Oligonucleotide for detection of SNP TSC0013485
attagtgagagaa

SEQ ID NO: 46814 - DNA, 13 bp, Artificial Sequence
  Oligonucleotide for detection of SNP TSC0013485
ttctctcactaat

SEQ ID NO: 46815 - DNA, 13 bp, Artificial Sequence
  Oligonucleotide for detection of SNP TSC0013485
attagtaagagaa

SEQ ID NO: 46816 - DNA, 13 bp, Artificial Sequence
  Oligonucleotide for detection of SNP TSC0013485
ttctcttactaat

SEQ ID NO: 46817 - DNA, 13 bp, Artificial Sequence
  Oligonucleotide for detection of SNP TSC0013486
ggttttgttttta

SEQ ID NO: 46818 - DNA, 13 bp, Artificial Sequence
  Oligonucleotide for detection of SNP TSC0013486
taaaaacaaaacc

SEQ ID NO: 46819 - DNA, 13 bp, Artificial Sequence
  Oligonucleotide for detection of SNP TSC0013486
ggtttttttttta

SEQ ID NO: 46820 - DNA, 13 bp, Artificial Sequence
  Oligonucleotide for detection of SNP TSC0013486
taaaaaaaaaacc

SEQ ID NO: 46821 - DNA, 13 bp, Artificial Sequence
  Oligonucleotide for detection of SNP TSC0013486
ggtttcgttttta

SEQ ID NO: 46822 - DNA, 13 bp, Artificial Sequence
  Oligonucleotide for detection of SNP TSC0013486
taaaaacgaaacc

SEQ ID NO: 46823 - DNA, 13 bp, Artificial Sequence
  Oligonucleotide for detection of SNP TSC0013486
tagaggtgaggty

SEQ ID NO: 46824 - DNA, 13 bp, Artificial Sequence
  Oligonucleotide for detection of SNP TSC0013486
racctcacctcta

SEQ ID NO: 46825 - DNA, 13 bp, Artificial Sequence
  Oligonucleotide for detection of SNP TSC0013486
tagaggagaggty

SEQ ID NO: 46826 - DNA, 13 bp, Artificial Sequence
  Oligonucleotide for detection of SNP TSC0013486
racctctcctcta

SEQ ID NO: 46827 - DNA, 13 bp, Artificial Sequence
  Oligonucleotide for detection of SNP TSC0013486
tagaggcgaggty

SEQ ID NO: 46828 - DNA, 13 bp, Artificial Sequence
  Oligonucleotide for detection of SNP TSC0013486
racctcgcctcta

SEQ ID NO: 46829 - DNA, 13 bp, Artificial Sequence
  Oligonucleotide for detection of SNP TSC0013487
tgaggaattttty

SEQ ID NO: 46830 - DNA, 13 bp, Artificial Sequence
  Oligonucleotide for detection of SNP TSC0013487
raaaaattcctca

SEQ ID NO: 46831 - DNA, 13 bp, Artificial Sequence
  Oligonucleotide for detection of SNP TSC0013487
tgaggatttttty

SEQ ID NO: 46832 - DNA, 13 bp, Artificial Sequence
  Oligonucleotide for detection of SNP TSC0013487
raaaaaatcctca

SEQ ID NO: 46833 - DNA, 13 bp, Artificial Sequence
  Oligonucleotide for detection of SNP TSC0013487
ggagagtttttta

SEQ ID NO: 46834 - DNA, 13 bp, Artificial Sequence
  Oligonucleotide for detection of SNP TSC0013487
taaaaaactctcc

SEQ ID NO: 46835 - DNA, 13 bp, Artificial Sequence
  Oligonucleotide for detection of SNP TSC0013487
ggagaggttttta

SEQ ID NO: 46836 - DNA, 13 bp, Artificial Sequence
  Oligonucleotide for detection of SNP TSC0013487
taaaaacctctcc

SEQ ID NO: 46837 - DNA, 13 bp, Artificial Sequence
  Oligonucleotide for detection of SNP TSC0013488
tggatagaggagg

SEQ ID NO: 46838 - DNA, 13 bp, Artificial Sequence
  Oligonucleotide for detection of SNP TSC0013488
cctcctctatcca

SEQ ID NO: 46839 - DNA, 13 bp, Artificial Sequence
  Oligonucleotide for detection of SNP TSC0013488
tggatataggagg

SEQ ID NO: 46840 - DNA, 13 bp, Artificial Sequence
  Oligonucleotide for detection of SNP TSC0013488
cctcctatatcca

SEQ ID NO: 46841 - DNA, 13 bp, Artificial Sequence
  Oligonucleotide for detection of SNP TSC0013490
ttttttatggtgg

SEQ ID NO: 46842 - DNA, 13 bp, Artificial Sequence
  Oligonucleotide for detection of SNP TSC0013490
ccaccataaaaaa

SEQ ID NO: 46843 - DNA, 13 bp, Artificial Sequence
  Oligonucleotide for detection of SNP TSC0013490
ttttttgtggtgg

SEQ ID NO: 46844 - DNA, 13 bp, Artificial Sequence
  Oligonucleotide for detection of SNP TSC0013490
ccaccacaaaaaa

SEQ ID NO: 46845 - DNA, 13 bp, Artificial Sequence
  Oligonucleotide for detection of SNP TSC0013490
tttttcgtggtgg

SEQ ID NO: 46846 - DNA, 13 bp, Artificial Sequence
  Oligonucleotide for detection of SNP TSC0013490
ccaccacgaaaaa

SEQ ID NO: 46847 - DNA, 13 bp, Artificial Sequence
  Oligonucleotide for detection of SNP TSC0013490
ttattatggaagg

SEQ ID NO: 46848 - DNA, 13 bp, Artificial Sequence
  Oligonucleotide for detection of SNP TSC0013490
ccttccataataa

SEQ ID NO: 46849 - DNA, 13 bp, Artificial Sequence
  Oligonucleotide for detection of SNP TSC0013490
ttattacggaagg

SEQ ID NO: 46850 - DNA, 13 bp, Artificial Sequence
  Oligonucleotide for detection of SNP TSC0013490
ccttccgtaataa

SEQ ID NO: 46851 - DNA, 13 bp, Artificial Sequence
  Oligonucleotide for detection of SNP TSC0013491
tgttgaagatgaa

SEQ ID NO: 46852 - DNA, 13 bp, Artificial Sequence
  Oligonucleotide for detection of SNP TSC0013491
ttcatcttcaaca

SEQ ID NO: 46853 - DNA, 13 bp, Artificial Sequence
  Oligonucleotide for detection of SNP TSC0013491
tgttgaggatgaa

SEQ ID NO: 46854 - DNA, 13 bp, Artificial Sequence
  Oligonucleotide for detection of SNP TSC0013491
ttcatcctcaaca

SEQ ID NO: 46855 - DNA, 13 bp, Artificial Sequence
  Oligonucleotide for detection of SNP TSC0013496
taaaaaatagttt

SEQ ID NO: 46856 - DNA, 13 bp, Artificial Sequence
  Oligonucleotide for detection of SNP TSC0013496
aaactatttttta

SEQ ID NO: 46857 - DNA, 13 bp, Artificial Sequence
  Oligonucleotide for detection of SNP TSC0013496
taaaaattagttt

SEQ ID NO: 46858 - DNA, 13 bp, Artificial Sequence
  Oligonucleotide for detection of SNP TSC0013496
aaactaattttta

SEQ ID NO: 46859 - DNA, 13 bp, Artificial Sequence
  Oligonucleotide for detection of SNP TSC0013496
aaattgtttttta

SEQ ID NO: 46860 - DNA, 13 bp, Artificial Sequence
  Oligonucleotide for detection of SNP TSC0013496
taaaaaacaattt

SEQ ID NO: 46861 - DNA, 13 bp, Artificial Sequence
  Oligonucleotide for detection of SNP TSC0013496
aaattggttttta

SEQ ID NO: 46862 - DNA, 13 bp, Artificial Sequence
  Oligonucleotide for detection of SNP TSC0013496
taaaaaccaattt

SEQ ID NO: 46863 - DNA, 13 bp, Artificial Sequence
  Oligonucleotide for detection of SNP TSC0013497
ttgtttggttaaa

SEQ ID NO: 46864 - DNA, 13 bp, Artificial Sequence
  Oligonucleotide for detection of SNP TSC0013497
tttaaccaaacaa

SEQ ID NO: 46865 - DNA, 13 bp, Artificial Sequence
  Oligonucleotide for detection of SNP TSC0013497
ttgtttagttaaa

SEQ ID NO: 46866 - DNA, 13 bp, Artificial Sequence
  Oligonucleotide for detection of SNP TSC0013497
tttaactaaacaa

SEQ ID NO: 46867 - DNA, 13 bp, Artificial Sequence
  Oligonucleotide for detection of SNP TSC0013498
atttttataaatg

SEQ ID NO: 46868 - DNA, 13 bp, Artificial Sequence
  Oligonucleotide for detection of SNP TSC0013498
catttataaaaat

SEQ ID NO: 46869 - DNA, 13 bp, Artificial Sequence
  Oligonucleotide for detection of SNP TSC0013498
atttttttaaatg

SEQ ID NO: 46870 - DNA, 13 bp, Artificial Sequence
  Oligonucleotide for detection of SNP TSC0013498
catttaaaaaaat

SEQ ID NO: 46871 - DNA, 13 bp, Artificial Sequence
  Oligonucleotide for detection of SNP TSC0013498
tatttatgggagt

SEQ ID NO: 46872 - DNA, 13 bp, Artificial Sequence
  Oligonucleotide for detection of SNP TSC0013498
actcccataaata

SEQ ID NO: 46873 - DNA, 13 bp, Artificial Sequence
  Oligonucleotide for detection of SNP TSC0013498
tatttaggggagt

SEQ ID NO: 46874 - DNA, 13 bp, Artificial Sequence
  Oligonucleotide for detection of SNP TSC0013498
actcccctaaata

SEQ ID NO: 46875 - DNA, 13 bp, Artificial Sequence
  Oligonucleotide for detection of SNP TSC0013499
tgtttgagtagtt

SEQ ID NO: 46876 - DNA, 13 bp, Artificial Sequence
  Oligonucleotide for detection of SNP TSC0013499
aactactcaaaca

SEQ ID NO: 46877 - DNA, 13 bp, Artificial Sequence
  Oligonucleotide for detection of SNP TSC0013499
tgtttgtgtagtt

SEQ ID NO: 46878 - DNA, 13 bp, Artificial Sequence
  Oligonucleotide for detection of SNP TSC0013499
aactacacaaaca

SEQ ID NO: 46879 - DNA, 13 bp, Artificial Sequence
  Oligonucleotide for detection of SNP TSC0013499
aattgtttaagta

SEQ ID NO: 46880 - DNA, 13 bp, Artificial Sequence
  Oligonucleotide for detection of SNP TSC0013499
tacttaaacaatt

SEQ ID NO: 46881 - DNA, 13 bp, Artificial Sequence
  Oligonucleotide for detection of SNP TSC0013499
aattgtataagta

SEQ ID NO: 46882 - DNA, 13 bp, Artificial Sequence
  Oligonucleotide for detection of SNP TSC0013499
tacttatacaatt

SEQ ID NO: 46883 - DNA, 13 bp, Artificial Sequence
  Oligonucleotide for detection of SNP TSC0013501
gtttttgatggaa

SEQ ID NO: 46884 - DNA, 13 bp, Artificial Sequence
  Oligonucleotide for detection of SNP TSC0013501
ttccatcaaaaac

SEQ ID NO: 46885 - DNA, 13 bp, Artificial Sequence
  Oligonucleotide for detection of SNP TSC0013501
gtttttaatggaa

SEQ ID NO: 46886 - DNA, 13 bp, Artificial Sequence
  Oligonucleotide for detection of SNP TSC0013501
ttccattaaaaac

SEQ ID NO: 46887 - DNA, 13 bp, Artificial Sequence
  Oligonucleotide for detection of SNP TSC0013502
tatttaatgtttt

SEQ ID NO: 46888 - DNA, 13 bp, Artificial Sequence
  Oligonucleotide for detection of SNP TSC0013502
aaaacattaaata

SEQ ID NO: 46889 - DNA, 13 bp, Artificial Sequence
  Oligonucleotide for detection of SNP TSC0013504
ttataatttttaa

SEQ ID NO: 46890 - DNA, 13 bp, Artificial Sequence
  Oligonucleotide for detection of SNP TSC0013504
ttaaaaattataa

SEQ ID NO: 46891 - DNA, 13 bp, Artificial Sequence
  Oligonucleotide for detection of SNP TSC0013504
ttataagttttaa

SEQ ID NO: 46892 - DNA, 13 bp, Artificial Sequence
  Oligonucleotide for detection of SNP TSC0013504
ttaaaacttataa

SEQ ID NO: 46893 - DNA, 13 bp, Artificial Sequence
  Oligonucleotide for detection of SNP TSC0013504
ttaagggttgtgg

SEQ ID NO: 46894 - DNA, 13 bp, Artificial Sequence
  Oligonucleotide for detection of SNP TSC0013504
ccacaacccttaa

SEQ ID NO: 46895 - DNA, 13 bp, Artificial Sequence
  Oligonucleotide for detection of SNP TSC0013504
ttaaggtttgtgg

SEQ ID NO: 46896 - DNA, 13 bp, Artificial Sequence
  Oligonucleotide for detection of SNP TSC0013504
ccacaaaccttaa

SEQ ID NO: 46897 - DNA, 13 bp, Artificial Sequence
  Oligonucleotide for detection of SNP TSC0013505
tttgagatagagt

SEQ ID NO: 46898 - DNA, 13 bp, Artificial Sequence
  Oligonucleotide for detection of SNP TSC0013505
actctatctcaaa

SEQ ID NO: 46899 - DNA, 13 bp, Artificial Sequence
  Oligonucleotide for detection of SNP TSC0013505
tttgaggtagagt

SEQ ID NO: 46900 - DNA, 13 bp, Artificial Sequence
  Oligonucleotide for detection of SNP TSC0013505
actctacctcaaa

SEQ ID NO: 46901 - DNA, 13 bp, Artificial Sequence
  Oligonucleotide for detection of SNP TSC0013506
aaaataaaggtta

SEQ ID NO: 46902 - DNA, 13 bp, Artificial Sequence
  Oligonucleotide for detection of SNP TSC0013506
taacctttatttt

SEQ ID NO: 46903 - DNA, 13 bp, Artificial Sequence
  Oligonucleotide for detection of SNP TSC0013506
aaaatagaggtta

SEQ ID NO: 46904 - DNA, 13 bp, Artificial Sequence
  Oligonucleotide for detection of SNP TSC0013506
taacctctatttt

SEQ ID NO: 46905 - DNA, 13 bp, Artificial Sequence
  Oligonucleotide for detection of SNP TSC0013508
gtatagtgatatt

SEQ ID NO: 46906 - DNA, 13 bp, Artificial Sequence
  Oligonucleotide for detection of SNP TSC0013508
aatatcactatac

SEQ ID NO: 46907 - DNA, 13 bp, Artificial Sequence
  Oligonucleotide for detection of SNP TSC0013508
gtatagcgatatt

SEQ ID NO: 46908 - DNA, 13 bp, Artificial Sequence
  Oligonucleotide for detection of SNP TSC0013508
aatatcgctatac

SEQ ID NO: 46909 - DNA, 13 bp, Artificial Sequence
  Oligonucleotide for detection of SNP TSC0013508
agtgttgttgtgy

SEQ ID NO: 46910 - DNA, 13 bp, Artificial Sequence
  Oligonucleotide for detection of SNP TSC0013508
rcacaacaacact

SEQ ID NO: 46911 - DNA, 13 bp, Artificial Sequence
  Oligonucleotide for detection of SNP TSC0013508
agtgttattgtgy

SEQ ID NO: 46912 - DNA, 13 bp, Artificial Sequence
  Oligonucleotide for detection of SNP TSC0013508
rcacaataacact

SEQ ID NO: 46913 - DNA, 13 bp, Artificial Sequence
  Oligonucleotide for detection of SNP TSC0013508
agtgtcgttgtgy

SEQ ID NO: 46914 - DNA, 13 bp, Artificial Sequence
  Oligonucleotide for detection of SNP TSC0013508
rcacaacgacact

SEQ ID NO: 46915 - DNA, 13 bp, Artificial Sequence
  Oligonucleotide for detection of SNP TSC0013509
gttattgaatttt

SEQ ID NO: 46916 - DNA, 13 bp, Artificial Sequence
  Oligonucleotide for detection of SNP TSC0013509
aaaattcaataac

SEQ ID NO: 46917 - DNA, 13 bp, Artificial Sequence
  Oligonucleotide for detection of SNP TSC0013509
gttattaaatttt

SEQ ID NO: 46918 - DNA, 13 bp, Artificial Sequence
  Oligonucleotide for detection of SNP TSC0013509
aaaatttaataac

SEQ ID NO: 46919 - DNA, 13 bp, Artificial Sequence
  Oligonucleotide for detection of SNP TSC0013511
agagtttatatgg

SEQ ID NO: 46920 - DNA, 13 bp, Artificial Sequence
  Oligonucleotide for detection of SNP TSC0013511
ccatataaactct

SEQ ID NO: 46921 - DNA, 13 bp, Artificial Sequence
  Oligonucleotide for detection of SNP TSC0013511
agagttgatatgg

SEQ ID NO: 46922 - DNA, 13 bp, Artificial Sequence
  Oligonucleotide for detection of SNP TSC0013511
ccatatcaactct

SEQ ID NO: 46923 - DNA, 13 bp, Artificial Sequence
  Oligonucleotide for detection of SNP TSC0013511
ttatgtgagtttt

SEQ ID NO: 46924 - DNA, 13 bp, Artificial Sequence
  Oligonucleotide for detection of SNP TSC0013511
aaaactcacataa

SEQ ID NO: 46925 - DNA, 13 bp, Artificial Sequence
  Oligonucleotide for detection of SNP TSC0013511
ttatgttagtttt

SEQ ID NO: 46926 - DNA, 13 bp, Artificial Sequence
  Oligonucleotide for detection of SNP TSC0013511
aaaactaacataa

SEQ ID NO: 46927 - DNA, 13 bp, Artificial Sequence
  Oligonucleotide for detection of SNP TSC0013512
gttggaggtattt

SEQ ID NO: 46928 - DNA, 13 bp, Artificial Sequence
  Oligonucleotide for detection of SNP TSC0013512
aaatacctccaac

SEQ ID NO: 46929 - DNA, 13 bp, Artificial Sequence
  Oligonucleotide for detection of SNP TSC0013512
gttggatgtattt

SEQ ID NO: 46930 - DNA, 13 bp, Artificial Sequence
  Oligonucleotide for detection of SNP TSC0013512
aaatacatccaac

SEQ ID NO: 46931 - DNA, 13 bp, Artificial Sequence
  Oligonucleotide for detection of SNP TSC0013512
aagtatttttagy

SEQ ID NO: 46932 - DNA, 13 bp, Artificial Sequence
  Oligonucleotide for detection of SNP TSC0013512
rctaaaaatactt

SEQ ID NO: 46933 - DNA, 13 bp, Artificial Sequence
  Oligonucleotide for detection of SNP TSC0013512
aagtatatttagy

SEQ ID NO: 46934 - DNA, 13 bp, Artificial Sequence
  Oligonucleotide for detection of SNP TSC0013512
rctaaatatactt

SEQ ID NO: 46935 - DNA, 13 bp, Artificial Sequence
  Oligonucleotide for detection of SNP TSC0013513
gagaaaataggtt

SEQ ID NO: 46936 - DNA, 13 bp, Artificial Sequence
  Oligonucleotide for detection of SNP TSC0013513
aacctattttctc

SEQ ID NO: 46937 - DNA, 13 bp, Artificial Sequence
  Oligonucleotide for detection of SNP TSC0013513
gagaaagtaggtt

SEQ ID NO: 46938 - DNA, 13 bp, Artificial Sequence
  Oligonucleotide for detection of SNP TSC0013513
aacctactttctc

SEQ ID NO: 46939 - DNA, 13 bp, Artificial Sequence
  Oligonucleotide for detection of SNP TSC0013514
agatttgaatatg

SEQ ID NO: 46940 - DNA, 13 bp, Artificial Sequence
  Oligonucleotide for detection of SNP TSC0013514
catattcaaatct

SEQ ID NO: 46941 - DNA, 13 bp, Artificial Sequence
  Oligonucleotide for detection of SNP TSC0013514
agatttaaatatg

SEQ ID NO: 46942 - DNA, 13 bp, Artificial Sequence
  Oligonucleotide for detection of SNP TSC0013514
catatttaaatct

SEQ ID NO: 46943 - DNA, 13 bp, Artificial Sequence
  Oligonucleotide for detection of SNP TSC0013515
aaatggtatatay

SEQ ID NO: 46944 - DNA, 13 bp, Artificial Sequence
  Oligonucleotide for detection of SNP TSC0013515
rtatataccattt

SEQ ID NO: 46945 - DNA, 13 bp, Artificial Sequence
  Oligonucleotide for detection of SNP TSC0013515
aaatgggatatay

SEQ ID NO: 46946 - DNA, 13 bp, Artificial Sequence
  Oligonucleotide for detection of SNP TSC0013515
rtatatcccattt

SEQ ID NO: 46947 - DNA, 13 bp, Artificial Sequence
  Oligonucleotide for detection of SNP TSC0013515
gtatatgttattt

SEQ ID NO: 46948 - DNA, 13 bp, Artificial Sequence
  Oligonucleotide for detection of SNP TSC0013515
aaataacatatac

SEQ ID NO: 46949 - DNA, 13 bp, Artificial Sequence
  Oligonucleotide for detection of SNP TSC0013515
gtatattttattt

SEQ ID NO: 46950 - DNA, 13 bp, Artificial Sequence
  Oligonucleotide for detection of SNP TSC0013515
aaataaaatatac

SEQ ID NO: 46951 - DNA, 13 bp, Artificial Sequence
  Oligonucleotide for detection of SNP TSC0013516
tattttgagtagg

SEQ ID NO: 46952 - DNA, 13 bp, Artificial Sequence
  Oligonucleotide for detection of SNP TSC0013516
cctactcaaaata

SEQ ID NO: 46953 - DNA, 13 bp, Artificial Sequence
  Oligonucleotide for detection of SNP TSC0013516
tattttaagtagg

SEQ ID NO: 46954 - DNA, 13 bp, Artificial Sequence
  Oligonucleotide for detection of SNP TSC0013516
cctacttaaaata

SEQ ID NO: 46955 - DNA, 13 bp, Artificial Sequence
  Oligonucleotide for detection of SNP TSC0013517
ttttttatattty

SEQ ID NO: 46956 - DNA, 13 bp, Artificial Sequence
  Oligonucleotide for detection of SNP TSC0013517
raaatataaaaaa

SEQ ID NO: 46957 - DNA, 13 bp, Artificial Sequence
  Oligonucleotide for detection of SNP TSC0013517
ttttttgtattty

SEQ ID NO: 46958 - DNA, 13 bp, Artificial Sequence
  Oligonucleotide for detection of SNP TSC0013517
raaatacaaaaaa

SEQ ID NO: 46959 - DNA, 13 bp, Artificial Sequence
  Oligonucleotide for detection of SNP TSC0013519
gatggagtaagat

SEQ ID NO: 46960 - DNA, 13 bp, Artificial Sequence
  Oligonucleotide for detection of SNP TSC0013519
atcttactccatc

SEQ ID NO: 46961 - DNA, 13 bp, Artificial Sequence
  Oligonucleotide for detection of SNP TSC0013519
gatggaataagat

SEQ ID NO: 46962 - DNA, 13 bp, Artificial Sequence
  Oligonucleotide for detection of SNP TSC0013519
atcttattccatc

SEQ ID NO: 46963 - DNA, 13 bp, Artificial Sequence
  Oligonucleotide for detection of SNP TSC0013523
aaaattatttggt

SEQ ID NO: 46964 - DNA, 13 bp, Artificial Sequence
  Oligonucleotide for detection of SNP TSC0013523
accaaataatttt

SEQ ID NO: 46965 - DNA, 13 bp, Artificial Sequence
  Oligonucleotide for detection of SNP TSC0013523
aaaattttttggt

SEQ ID NO: 46966 - DNA, 13 bp, Artificial Sequence
  Oligonucleotide for detection of SNP TSC0013523
accaaaaaatttt

SEQ ID NO: 46967 - DNA, 13 bp, Artificial Sequence
  Oligonucleotide for detection of SNP TSC0013523
attaaatagtttt

SEQ ID NO: 46968 - DNA, 13 bp, Artificial Sequence
  Oligonucleotide for detection of SNP TSC0013523
aaaactatttaat

SEQ ID NO: 46969 - DNA, 13 bp, Artificial Sequence
  Oligonucleotide for detection of SNP TSC0013523
attaaagagtttt

SEQ ID NO: 46970 - DNA, 13 bp, Artificial Sequence
  Oligonucleotide for detection of SNP TSC0013523
aaaactctttaat

SEQ ID NO: 46971 - DNA, 13 bp, Artificial Sequence
  Oligonucleotide for detection of SNP TSC0013524
tatttagttgaty

SEQ ID NO: 46972 - DNA, 13 bp, Artificial Sequence
  Oligonucleotide for detection of SNP TSC0013524
ratcaactaaata

SEQ ID NO: 46973 - DNA, 13 bp, Artificial Sequence
  Oligonucleotide for detection of SNP TSC0013524
tatttaattgaty

SEQ ID NO: 46974 - DNA, 13 bp, Artificial Sequence
  Oligonucleotide for detection of SNP TSC0013524
ratcaattaaata

SEQ ID NO: 46975 - DNA, 13 bp, Artificial Sequence
  Oligonucleotide for detection of SNP TSC0013525
ttgggtgaaatag

SEQ ID NO: 46976 - DNA, 13 bp, Artificial Sequence
  Oligonucleotide for detection of SNP TSC0013525
ctatttcacccaa

SEQ ID NO: 46977 - DNA, 13 bp, Artificial Sequence
  Oligonucleotide for detection of SNP TSC0013525
ttgggtaaaatag

SEQ ID NO: 46978 - DNA, 13 bp, Artificial Sequence
  Oligonucleotide for detection of SNP TSC0013525
ctattttacccaa

SEQ ID NO: 46979 - DNA, 13 bp, Artificial Sequence
  Oligonucleotide for detection of SNP TSC0013526
tatgtggtgtgtt

SEQ ID NO: 46980 - DNA, 13 bp, Artificial Sequence
  Oligonucleotide for detection of SNP TSC0013526
aacacaccacata

SEQ ID NO: 46981 - DNA, 13 bp, Artificial Sequence
  Oligonucleotide for detection of SNP TSC0013526
tatgtgatgtgtt

SEQ ID NO: 46982 - DNA, 13 bp, Artificial Sequence
  Oligonucleotide for detection of SNP TSC0013526
aacacatcacata

SEQ ID NO: 46983 - DNA, 13 bp, Artificial Sequence
  Oligonucleotide for detection of SNP TSC0013529
gttttgagttatt

SEQ ID NO: 46984 - DNA, 13 bp, Artificial Sequence
  Oligonucleotide for detection of SNP TSC0013529
aataactcaaaac

SEQ ID NO: 46985 - DNA, 13 bp, Artificial Sequence
  Oligonucleotide for detection of SNP TSC0013529
gttttgggttatt

SEQ ID NO: 46986 - DNA, 13 bp, Artificial Sequence
  Oligonucleotide for detection of SNP TSC0013529
aataacccaaaac

SEQ ID NO: 46987 - DNA, 13 bp, Artificial Sequence
  Oligonucleotide for detection of SNP TSC0013530
ggaattgtttaag

SEQ ID NO: 46988 - DNA, 13 bp, Artificial Sequence
  Oligonucleotide for detection of SNP TSC0013530
cttaaacaattcc

SEQ ID NO: 46989 - DNA, 13 bp, Artificial Sequence
  Oligonucleotide for detection of SNP TSC0013530
ggaattttttaag

SEQ ID NO: 46990 - DNA, 13 bp, Artificial Sequence
  Oligonucleotide for detection of SNP TSC0013530
cttaaaaaattcc

SEQ ID NO: 46991 - DNA, 13 bp, Artificial Sequence
  Oligonucleotide for detection of SNP TSC0013530
tttaaataattty

SEQ ID NO: 46992 - DNA, 13 bp, Artificial Sequence
  Oligonucleotide for detection of SNP TSC0013530
raaattatttaaa

SEQ ID NO: 46993 - DNA, 13 bp, Artificial Sequence
  Oligonucleotide for detection of SNP TSC0013533
ttattaatgttta

SEQ ID NO: 46994 - DNA, 13 bp, Artificial Sequence
  Oligonucleotide for detection of SNP TSC0013533
taaacattaataa

SEQ ID NO: 46995 - DNA, 13 bp, Artificial Sequence
  Oligonucleotide for detection of SNP TSC0013533
ttattagtgttta

SEQ ID NO: 46996 - DNA, 13 bp, Artificial Sequence
  Oligonucleotide for detection of SNP TSC0013533
taaacactaataa

SEQ ID NO: 46997 - DNA, 13 bp, Artificial Sequence
  Oligonucleotide for detection of SNP TSC0013535
tatgtaagtagty

SEQ ID NO: 46998 - DNA, 13 bp, Artificial Sequence
  Oligonucleotide for detection of SNP TSC0013535
ractacttacata

SEQ ID NO: 46999 - DNA, 13 bp, Artificial Sequence
  Oligonucleotide for detection of SNP TSC0013535
tatgtaggtagty

SEQ ID NO: 47000 - DNA, 13 bp, Artificial Sequence
  Oligonucleotide for detection of SNP TSC0013535
ractacctacata

SEQ ID NO: 47001 - DNA, 13 bp, Artificial Sequence
  Oligonucleotide for detection of SNP TSC0013536
ttttttatattgy

SEQ ID NO: 47002 - DNA, 13 bp, Artificial Sequence
  Oligonucleotide for detection of SNP TSC0013536
rcaatataaaaaa

SEQ ID NO: 47003 - DNA, 13 bp, Artificial Sequence
  Oligonucleotide for detection of SNP TSC0013536
ttttttttattgy

SEQ ID NO: 47004 - DNA, 13 bp, Artificial Sequence
  Oligonucleotide for detection of SNP TSC0013536
rcaataaaaaaaa

SEQ ID NO: 47005 - DNA, 13 bp, Artificial Sequence
  Oligonucleotide for detection of SNP TSC0013536
ttttttatatcgy

SEQ ID NO: 47006 - DNA, 13 bp, Artificial Sequence
  Oligonucleotide for detection of SNP TSC0013536
rcgatataaaaaa

SEQ ID NO: 47007 - DNA, 13 bp, Artificial Sequence
  Oligonucleotide for detection of SNP TSC0013536
ttttttttatcgy

SEQ ID NO: 47008 - DNA, 13 bp, Artificial Sequence
  Oligonucleotide for detection of SNP TSC0013536
rcgataaaaaaaa

SEQ ID NO: 47009 - DNA, 13 bp, Artificial Sequence
  Oligonucleotide for detection of SNP TSC0013536
gtgatgtgggggg

SEQ ID NO: 47010 - DNA, 13 bp, Artificial Sequence
  Oligonucleotide for detection of SNP TSC0013536
ccccccacatcac

SEQ ID NO: 47011 - DNA, 13 bp, Artificial Sequence
  Oligonucleotide for detection of SNP TSC0013536
gtgatgggggggg

SEQ ID NO: 47012 - DNA, 13 bp, Artificial Sequence
  Oligonucleotide for detection of SNP TSC0013536
ccccccccatcac

SEQ ID NO: 47013 - DNA, 13 bp, Artificial Sequence
  Oligonucleotide for detection of SNP TSC0013536
gcgatgtgggggg

SEQ ID NO: 47014 - DNA, 13 bp, Artificial Sequence
  Oligonucleotide for detection of SNP TSC0013536
ccccccacatcgc

SEQ ID NO: 47015 - DNA, 13 bp, Artificial Sequence
  Oligonucleotide for detection of SNP TSC0013536
gcgatgggggggg

SEQ ID NO: 47016 - DNA, 13 bp, Artificial Sequence
  Oligonucleotide for detection of SNP TSC0013536
ccccccccatcgc

SEQ ID NO: 47017 - DNA, 13 bp, Artificial Sequence
  Oligonucleotide for detection of SNP TSC0013537
aaataagaagaaa

SEQ ID NO: 47018 - DNA, 13 bp, Artificial Sequence
  Oligonucleotide for detection of SNP TSC0013537
tttcttcttattt

SEQ ID NO: 47019 - DNA, 13 bp, Artificial Sequence
  Oligonucleotide for detection of SNP TSC0013537
aaataaaaagaaa

SEQ ID NO: 47020 - DNA, 13 bp, Artificial Sequence
  Oligonucleotide for detection of SNP TSC0013537
tttctttttattt

SEQ ID NO: 47021 - DNA, 13 bp, Artificial Sequence
  Oligonucleotide for detection of SNP TSC0013538
ttggtgtggtttt

SEQ ID NO: 47022 - DNA, 13 bp, Artificial Sequence
  Oligonucleotide for detection of SNP TSC0013538
aaaaccacaccaa

SEQ ID NO: 47023 - DNA, 13 bp, Artificial Sequence
  Oligonucleotide for detection of SNP TSC0013538
ttggtgcggtttt

SEQ ID NO: 47024 - DNA, 13 bp, Artificial Sequence
  Oligonucleotide for detection of SNP TSC0013538
aaaaccgcaccaa

SEQ ID NO: 47025 - DNA, 13 bp, Artificial Sequence
  Oligonucleotide for detection of SNP TSC0013538
aaagttgtattaa

SEQ ID NO: 47026 - DNA, 13 bp, Artificial Sequence
  Oligonucleotide for detection of SNP TSC0013538
ttaatacaacttt

SEQ ID NO: 47027 - DNA, 13 bp, Artificial Sequence
  Oligonucleotide for detection of SNP TSC0013538
aaagttatattaa

SEQ ID NO: 47028 - DNA, 13 bp, Artificial Sequence
  Oligonucleotide for detection of SNP TSC0013538
ttaatataacttt

SEQ ID NO: 47029 - DNA, 13 bp, Artificial Sequence
  Oligonucleotide for detection of SNP TSC0013538
aaagtcgtattaa

SEQ ID NO: 47030 - DNA, 13 bp, Artificial Sequence
  Oligonucleotide for detection of SNP TSC0013538
ttaatacgacttt

SEQ ID NO: 47031 - DNA, 13 bp, Artificial Sequence
  Oligonucleotide for detection of SNP TSC0013539
ttgtaatgaggaa

SEQ ID NO: 47032 - DNA, 13 bp, Artificial Sequence
  Oligonucleotide for detection of SNP TSC0013539
ttcctcattacaa

SEQ ID NO: 47033 - DNA, 13 bp, Artificial Sequence
  Oligonucleotide for detection of SNP TSC0013539
tcgtaatgaggaa

SEQ ID NO: 47034 - DNA, 13 bp, Artificial Sequence
  Oligonucleotide for detection of SNP TSC0013539
ttcctcattacga

SEQ ID NO: 47035 - DNA, 13 bp, Artificial Sequence
  Oligonucleotide for detection of SNP TSC0013539
ttgtaacgaggaa

SEQ ID NO: 47036 - DNA, 13 bp, Artificial Sequence
  Oligonucleotide for detection of SNP TSC0013539
ttcctcgttacaa

SEQ ID NO: 47037 - DNA, 13 bp, Artificial Sequence
  Oligonucleotide for detection of SNP TSC0013539
tcgtaacgaggaa

SEQ ID NO: 47038 - DNA, 13 bp, Artificial Sequence
  Oligonucleotide for detection of SNP TSC0013539
ttcctcgttacga

SEQ ID NO: 47039 - DNA, 13 bp, Artificial Sequence
  Oligonucleotide for detection of SNP TSC0013539
ttttttattacgg

SEQ ID NO: 47040 - DNA, 13 bp, Artificial Sequence
  Oligonucleotide for detection of SNP TSC0013539
ccgtaataaaaaa

SEQ ID NO: 47041 - DNA, 13 bp, Artificial Sequence
  Oligonucleotide for detection of SNP TSC0013539
ttttttgttacgg

SEQ ID NO: 47042 - DNA, 13 bp, Artificial Sequence
  Oligonucleotide for detection of SNP TSC0013539
ccgtaacaaaaaa

SEQ ID NO: 47043 - DNA, 13 bp, Artificial Sequence
  Oligonucleotide for detection of SNP TSC0013539
tttttcgttacgg

SEQ ID NO: 47044 - DNA, 13 bp, Artificial Sequence
  Oligonucleotide for detection of SNP TSC0013539
ccgtaacgaaaaa

SEQ ID NO: 47045 - DNA, 13 bp, Artificial Sequence
  Oligonucleotide for detection of SNP TSC0013540
gttatatgaagay

SEQ ID NO: 47046 - DNA, 13 bp, Artificial Sequence
  Oligonucleotide for detection of SNP TSC0013540
rtcttcatataac

SEQ ID NO: 47047 - DNA, 13 bp, Artificial Sequence
  Oligonucleotide for detection of SNP TSC0013540
gttatacgaagay

SEQ ID NO: 47048 - DNA, 13 bp, Artificial Sequence
  Oligonucleotide for detection of SNP TSC0013540
rtcttcgtataac

SEQ ID NO: 47049 - DNA, 13 bp, Artificial Sequence
  Oligonucleotide for detection of SNP TSC0013540
gtttttgtgtgay

SEQ ID NO: 47050 - DNA, 13 bp, Artificial Sequence
  Oligonucleotide for detection of SNP TSC0013540
rtcacacaaaaac

SEQ ID NO: 47051 - DNA, 13 bp, Artificial Sequence
  Oligonucleotide for detection of SNP TSC0013540
gtttttatgtgay

SEQ ID NO: 47052 - DNA, 13 bp, Artificial Sequence
  Oligonucleotide for detection of SNP TSC0013540
rtcacataaaaac

SEQ ID NO: 47053 - DNA, 13 bp, Artificial Sequence
  Oligonucleotide for detection of SNP TSC0013540
gttttcgtgtgay

SEQ ID NO: 47054 - DNA, 13 bp, Artificial Sequence
  Oligonucleotide for detection of SNP TSC0013540
rtcacacgaaaac

SEQ ID NO: 47055 - DNA, 13 bp, Artificial Sequence
  Oligonucleotide for detection of SNP TSC0013541
aaaataaggaggg

SEQ ID NO: 47056 - DNA, 13 bp, Artificial Sequence
  Oligonucleotide for detection of SNP TSC0013541
ccctccttatttt

SEQ ID NO: 47057 - DNA, 13 bp, Artificial Sequence
  Oligonucleotide for detection of SNP TSC0013541
aaaatagggaggg

SEQ ID NO: 47058 - DNA, 13 bp, Artificial Sequence
  Oligonucleotide for detection of SNP TSC0013541
ccctccctatttt

SEQ ID NO: 47059 - DNA, 13 bp, Artificial Sequence
  Oligonucleotide for detection of SNP TSC0013542
tttgatgttatta

SEQ ID NO: 47060 - DNA, 13 bp, Artificial Sequence
  Oligonucleotide for detection of SNP TSC0013542
taataacatcaaa

SEQ ID NO: 47061 - DNA, 13 bp, Artificial Sequence
  Oligonucleotide for detection of SNP TSC0013542
tttgatattatta

SEQ ID NO: 47062 - DNA, 13 bp, Artificial Sequence
  Oligonucleotide for detection of SNP TSC0013542
taataatatcaaa

SEQ ID NO: 47063 - DNA, 13 bp, Artificial Sequence
  Oligonucleotide for detection of SNP TSC0013543
tataaatatatag

SEQ ID NO: 47064 - DNA, 13 bp, Artificial Sequence
  Oligonucleotide for detection of SNP TSC0013543
ctatatatttata

SEQ ID NO: 47065 - DNA, 13 bp, Artificial Sequence
  Oligonucleotide for detection of SNP TSC0013543
tataaagatatag

SEQ ID NO: 47066 - DNA, 13 bp, Artificial Sequence
  Oligonucleotide for detection of SNP TSC0013543
ctatatctttata

SEQ ID NO: 47067 - DNA, 13 bp, Artificial Sequence
  Oligonucleotide for detection of SNP TSC0013545
attgggatgagaa

SEQ ID NO: 47068 - DNA, 13 bp, Artificial Sequence
  Oligonucleotide for detection of SNP TSC0013545
ttctcatcccaat

SEQ ID NO: 47069 - DNA, 13 bp, Artificial Sequence
  Oligonucleotide for detection of SNP TSC0013545
attggggtgagaa

SEQ ID NO: 47070 - DNA, 13 bp, Artificial Sequence
  Oligonucleotide for detection of SNP TSC0013545
ttctcaccccaat

SEQ ID NO: 47071 - DNA, 13 bp, Artificial Sequence
  Oligonucleotide for detection of SNP TSC0013546
gttagtattttty

SEQ ID NO: 47072 - DNA, 13 bp, Artificial Sequence
  Oligonucleotide for detection of SNP TSC0013546
raaaaatactaac

SEQ ID NO: 47073 - DNA, 13 bp, Artificial Sequence
  Oligonucleotide for detection of SNP TSC0013546
gttagtgttttty

SEQ ID NO: 47074 - DNA, 13 bp, Artificial Sequence
  Oligonucleotide for detection of SNP TSC0013546
raaaaacactaac

SEQ ID NO: 47075 - DNA, 13 bp, Artificial Sequence
  Oligonucleotide for detection of SNP TSC0013546
gttagcgttttty

SEQ ID NO: 47076 - DNA, 13 bp, Artificial Sequence
  Oligonucleotide for detection of SNP TSC0013546
raaaaacgctaac

SEQ ID NO: 47077 - DNA, 13 bp, Artificial Sequence
  Oligonucleotide for detection of SNP TSC0013546
gaaggatgttggy

SEQ ID NO: 47078 - DNA, 13 bp, Artificial Sequence
  Oligonucleotide for detection of SNP TSC0013546
rccaacatccttc

SEQ ID NO: 47079 - DNA, 13 bp, Artificial Sequence
  Oligonucleotide for detection of SNP TSC0013546
gaaggacgttggy

SEQ ID NO: 47080 - DNA, 13 bp, Artificial Sequence
  Oligonucleotide for detection of SNP TSC0013546
rccaacgtccttc

SEQ ID NO: 47081 - DNA, 13 bp, Artificial Sequence
  Oligonucleotide for detection of SNP TSC0013547
gagtttatgtttt

SEQ ID NO: 47082 - DNA, 13 bp, Artificial Sequence
  Oligonucleotide for detection of SNP TSC0013547
aaaacataaactc

SEQ ID NO: 47083 - DNA, 13 bp, Artificial Sequence
  Oligonucleotide for detection of SNP TSC0013547
gagtttgtgtttt

SEQ ID NO: 47084 - DNA, 13 bp, Artificial Sequence
  Oligonucleotide for detection of SNP TSC0013547
aaaacacaaactc

SEQ ID NO: 47085 - DNA, 13 bp, Artificial Sequence
  Oligonucleotide for detection of SNP TSC0013548
ttttatgtatata

SEQ ID NO: 47086 - DNA, 13 bp, Artificial Sequence
  Oligonucleotide for detection of SNP TSC0013548
tatatacataaaa

SEQ ID NO: 47087 - DNA, 13 bp, Artificial Sequence
  Oligonucleotide for detection of SNP TSC0013549
ttgaatgttaaay

SEQ ID NO: 47088 - DNA, 13 bp, Artificial Sequence
  Oligonucleotide for detection of SNP TSC0013549
rtttaacattcaa

SEQ ID NO: 47089 - DNA, 13 bp, Artificial Sequence
  Oligonucleotide for detection of SNP TSC0013549
ttgaatattaaay

SEQ ID NO: 47090 - DNA, 13 bp, Artificial Sequence
  Oligonucleotide for detection of SNP TSC0013549
rtttaatattcaa

SEQ ID NO: 47091 - DNA, 13 bp, Artificial Sequence
  Oligonucleotide for detection of SNP TSC0013553
agaggtgagaaga

SEQ ID NO: 47092 - DNA, 13 bp, Artificial Sequence
  Oligonucleotide for detection of SNP TSC0013553
tcttctcacctct

SEQ ID NO: 47093 - DNA, 13 bp, Artificial Sequence
  Oligonucleotide for detection of SNP TSC0013553
agaggtaagaaga

SEQ ID NO: 47094 - DNA, 13 bp, Artificial Sequence
  Oligonucleotide for detection of SNP TSC0013553
tcttcttacctct

SEQ ID NO: 47095 - DNA, 13 bp, Artificial Sequence
  Oligonucleotide for detection of SNP TSC0013553
agaggcgagaaga

SEQ ID NO: 47096 - DNA, 13 bp, Artificial Sequence
  Oligonucleotide for detection of SNP TSC0013553
tcttctcgcctct

SEQ ID NO: 47097 - DNA, 13 bp, Artificial Sequence
  Oligonucleotide for detection of SNP TSC0013554
tatgttattatay

SEQ ID NO: 47098 - DNA, 13 bp, Artificial Sequence
  Oligonucleotide for detection of SNP TSC0013554
rtataataacata

SEQ ID NO: 47099 - DNA, 13 bp, Artificial Sequence
  Oligonucleotide for detection of SNP TSC0013554
tatgttgttatay

SEQ ID NO: 47100 - DNA, 13 bp, Artificial Sequence
  Oligonucleotide for detection of SNP TSC0013554
rtataacaacata

SEQ ID NO: 47101 - DNA, 13 bp, Artificial Sequence
  Oligonucleotide for detection of SNP TSC0013554
tatgtcgttatay

SEQ ID NO: 47102 - DNA, 13 bp, Artificial Sequence
  Oligonucleotide for detection of SNP TSC0013554
rtataacgacata

SEQ ID NO: 47103 - DNA, 13 bp, Artificial Sequence
  Oligonucleotide for detection of SNP TSC0013554
gtgtggtggtatg

SEQ ID NO: 47104 - DNA, 13 bp, Artificial Sequence
  Oligonucleotide for detection of SNP TSC0013554
cataccaccacac

SEQ ID NO: 47105 - DNA, 13 bp, Artificial Sequence
  Oligonucleotide for detection of SNP TSC0013554
gtgtggcggtatg

SEQ ID NO: 47106 - DNA, 13 bp, Artificial Sequence
  Oligonucleotide for detection of SNP TSC0013554
cataccgccacac

SEQ ID NO: 47107 - DNA, 13 bp, Artificial Sequence
  Oligonucleotide for detection of SNP TSC0013555
aaaatcgaaataa

SEQ ID NO: 47108 - DNA, 13 bp, Artificial Sequence
  Oligonucleotide for detection of SNP TSC0013555
ttatttcgatttt

SEQ ID NO: 47109 - DNA, 13 bp, Artificial Sequence
  Oligonucleotide for detection of SNP TSC0013555
ttgttttggtttt

SEQ ID NO: 47110 - DNA, 13 bp, Artificial Sequence
  Oligonucleotide for detection of SNP TSC0013555
aaaaccaaaacaa

SEQ ID NO: 47111 - DNA, 13 bp, Artificial Sequence
  Oligonucleotide for detection of SNP TSC0013555
ttgtttcggtttt

SEQ ID NO: 47112 - DNA, 13 bp, Artificial Sequence
  Oligonucleotide for detection of SNP TSC0013555
aaaaccgaaacaa

SEQ ID NO: 47113 - DNA, 13 bp, Artificial Sequence
  Oligonucleotide for detection of SNP TSC0013556
ttagtaaggggta

SEQ ID NO: 47114 - DNA, 13 bp, Artificial Sequence
  Oligonucleotide for detection of SNP TSC0013556
taccccttactaa

SEQ ID NO: 47115 - DNA, 13 bp, Artificial Sequence
  Oligonucleotide for detection of SNP TSC0013556
ttagtagggggta

SEQ ID NO: 47116 - DNA, 13 bp, Artificial Sequence
  Oligonucleotide for detection of SNP TSC0013556
taccccctactaa

SEQ ID NO: 47117 - DNA, 13 bp, Artificial Sequence
  Oligonucleotide for detection of SNP TSC0013559
agagtggagttay

SEQ ID NO: 47118 - DNA, 13 bp, Artificial Sequence
  Oligonucleotide for detection of SNP TSC0013559
rtaactccactct

SEQ ID NO: 47119 - DNA, 13 bp, Artificial Sequence
  Oligonucleotide for detection of SNP TSC0013559
agagtgaagttay

SEQ ID NO: 47120 - DNA, 13 bp, Artificial Sequence
  Oligonucleotide for detection of SNP TSC0013559
rtaacttcactct

SEQ ID NO: 47121 - DNA, 13 bp, Artificial Sequence
  Oligonucleotide for detection of SNP TSC0013560
ttttgtgagattt

SEQ ID NO: 47122 - DNA, 13 bp, Artificial Sequence
  Oligonucleotide for detection of SNP TSC0013560
aaatctcacaaaa

SEQ ID NO: 47123 - DNA, 13 bp, Artificial Sequence
  Oligonucleotide for detection of SNP TSC0013560
ttttgttagattt

SEQ ID NO: 47124 - DNA, 13 bp, Artificial Sequence
  Oligonucleotide for detection of SNP TSC0013560
aaatctaacaaaa

SEQ ID NO: 47125 - DNA, 13 bp, Artificial Sequence
  Oligonucleotide for detection of SNP TSC0013560
ttttgcgagattt

SEQ ID NO: 47126 - DNA, 13 bp, Artificial Sequence
  Oligonucleotide for detection of SNP TSC0013560
aaatctcgcaaaa

SEQ ID NO: 47127 - DNA, 13 bp, Artificial Sequence
  Oligonucleotide for detection of SNP TSC0013560
aaattttgtaagg

SEQ ID NO: 47128 - DNA, 13 bp, Artificial Sequence
  Oligonucleotide for detection of SNP TSC0013560
ccttacaaaattt

SEQ ID NO: 47129 - DNA, 13 bp, Artificial Sequence
  Oligonucleotide for detection of SNP TSC0013560
aaatttagtaagg

SEQ ID NO: 47130 - DNA, 13 bp, Artificial Sequence
  Oligonucleotide for detection of SNP TSC0013560
ccttactaaattt

SEQ ID NO: 47131 - DNA, 13 bp, Artificial Sequence
  Oligonucleotide for detection of SNP TSC0013560
aaatttcgtaagg

SEQ ID NO: 47132 - DNA, 13 bp, Artificial Sequence
  Oligonucleotide for detection of SNP TSC0013560
ccttacgaaattt

SEQ ID NO: 47133 - DNA, 13 bp, Artificial Sequence
  Oligonucleotide for detection of SNP TSC0013561
tttgtatgataaa

SEQ ID NO: 47134 - DNA, 13 bp, Artificial Sequence
  Oligonucleotide for detection of SNP TSC0013561
tttatcatacaaa

SEQ ID NO: 47135 - DNA, 13 bp, Artificial Sequence
  Oligonucleotide for detection of SNP TSC0013561
tttgtacgataaa

SEQ ID NO: 47136 - DNA, 13 bp, Artificial Sequence
  Oligonucleotide for detection of SNP TSC0013561
tttatcgtacaaa

SEQ ID NO: 47137 - DNA, 13 bp, Artificial Sequence
  Oligonucleotide for detection of SNP TSC0013561
tttgttgtataga

SEQ ID NO: 47138 - DNA, 13 bp, Artificial Sequence
  Oligonucleotide for detection of SNP TSC0013561
tctatacaacaaa

SEQ ID NO: 47139 - DNA, 13 bp, Artificial Sequence
  Oligonucleotide for detection of SNP TSC0013561
tttgttatataga

SEQ ID NO: 47140 - DNA, 13 bp, Artificial Sequence
  Oligonucleotide for detection of SNP TSC0013561
tctatataacaaa

SEQ ID NO: 47141 - DNA, 13 bp, Artificial Sequence
  Oligonucleotide for detection of SNP TSC0013561
tttgtcgtataga

SEQ ID NO: 47142 - DNA, 13 bp, Artificial Sequence
  Oligonucleotide for detection of SNP TSC0013561
tctatacgacaaa

SEQ ID NO: 47143 - DNA, 13 bp, Artificial Sequence
  Oligonucleotide for detection of SNP TSC0013562
tgtgttatttttt

SEQ ID NO: 47144 - DNA, 13 bp, Artificial Sequence
  Oligonucleotide for detection of SNP TSC0013562
aaaaaataacaca

SEQ ID NO: 47145 - DNA, 13 bp, Artificial Sequence
  Oligonucleotide for detection of SNP TSC0013562
cgtgttgtttttt

SEQ ID NO: 47146 - DNA, 13 bp, Artificial Sequence
  Oligonucleotide for detection of SNP TSC0013562
aaaaaacaacacg

SEQ ID NO: 47147 - DNA, 13 bp, Artificial Sequence
  Oligonucleotide for detection of SNP TSC0013562
cgtgttatttttt

SEQ ID NO: 47148 - DNA, 13 bp, Artificial Sequence
  Oligonucleotide for detection of SNP TSC0013562
aaaaaataacacg

SEQ ID NO: 47149 - DNA, 13 bp, Artificial Sequence
  Oligonucleotide for detection of SNP TSC0013563
aatttgaaagttt

SEQ ID NO: 47150 - DNA, 13 bp, Artificial Sequence
  Oligonucleotide for detection of SNP TSC0013563
aaactttcaaatt

SEQ ID NO: 47151 - DNA, 13 bp, Artificial Sequence
  Oligonucleotide for detection of SNP TSC0013563
aatttggaagttt

SEQ ID NO: 47152 - DNA, 13 bp, Artificial Sequence
  Oligonucleotide for detection of SNP TSC0013563
aaacttccaaatt

SEQ ID NO: 47153 - DNA, 13 bp, Artificial Sequence
  Oligonucleotide for detection of SNP TSC0013564
tttagtaatattg

SEQ ID NO: 47154 - DNA, 13 bp, Artificial Sequence
  Oligonucleotide for detection of SNP TSC0013564
caatattactaaa

SEQ ID NO: 47155 - DNA, 13 bp, Artificial Sequence
  Oligonucleotide for detection of SNP TSC0013564
tttagtgatattg

SEQ ID NO: 47156 - DNA, 13 bp, Artificial Sequence
  Oligonucleotide for detection of SNP TSC0013564
caatatcactaaa

SEQ ID NO: 47157 - DNA, 13 bp, Artificial Sequence
  Oligonucleotide for detection of SNP TSC0013565
gattttattaaat

SEQ ID NO: 47158 - DNA, 13 bp, Artificial Sequence
  Oligonucleotide for detection of SNP TSC0013565
atttaataaaatc

SEQ ID NO: 47159 - DNA, 13 bp, Artificial Sequence
  Oligonucleotide for detection of SNP TSC0013565
gatttttttaaat

SEQ ID NO: 47160 - DNA, 13 bp, Artificial Sequence
  Oligonucleotide for detection of SNP TSC0013565
atttaaaaaaatc

SEQ ID NO: 47161 - DNA, 13 bp, Artificial Sequence
  Oligonucleotide for detection of SNP TSC0013565
atttggtgggaty

SEQ ID NO: 47162 - DNA, 13 bp, Artificial Sequence
  Oligonucleotide for detection of SNP TSC0013565
ratcccaccaaat

SEQ ID NO: 47163 - DNA, 13 bp, Artificial Sequence
  Oligonucleotide for detection of SNP TSC0013565
atttggagggaty

SEQ ID NO: 47164 - DNA, 13 bp, Artificial Sequence
  Oligonucleotide for detection of SNP TSC0013565
ratccctccaaat

SEQ ID NO: 47165 - DNA, 13 bp, Artificial Sequence
  Oligonucleotide for detection of SNP TSC0013571
ttgtataattaat

SEQ ID NO: 47166 - DNA, 13 bp, Artificial Sequence
  Oligonucleotide for detection of SNP TSC0013571
attaattatacaa

SEQ ID NO: 47167 - DNA, 13 bp, Artificial Sequence
  Oligonucleotide for detection of SNP TSC0013571
ttgtattattaat

SEQ ID NO: 47168 - DNA, 13 bp, Artificial Sequence
  Oligonucleotide for detection of SNP TSC0013571
attaataatacaa

SEQ ID NO: 47169 - DNA, 13 bp, Artificial Sequence
  Oligonucleotide for detection of SNP TSC0013571
attaattgtgtaa

SEQ ID NO: 47170 - DNA, 13 bp, Artificial Sequence
  Oligonucleotide for detection of SNP TSC0013571
ttacacaattaat

SEQ ID NO: 47171 - DNA, 13 bp, Artificial Sequence
  Oligonucleotide for detection of SNP TSC0013571
attaatggtgtaa

SEQ ID NO: 47172 - DNA, 13 bp, Artificial Sequence
  Oligonucleotide for detection of SNP TSC0013571
ttacaccattaat

SEQ ID NO: 47173 - DNA, 13 bp, Artificial Sequence
  Oligonucleotide for detection of SNP TSC0013572
tatattattttty

SEQ ID NO: 47174 - DNA, 13 bp, Artificial Sequence
  Oligonucleotide for detection of SNP TSC0013572
raaaaataatata

SEQ ID NO: 47175 - DNA, 13 bp, Artificial Sequence
  Oligonucleotide for detection of SNP TSC0013572
tatattgttttty

SEQ ID NO: 47176 - DNA, 13 bp, Artificial Sequence
  Oligonucleotide for detection of SNP TSC0013572
raaaaacaatata

SEQ ID NO: 47177 - DNA, 13 bp, Artificial Sequence
  Oligonucleotide for detection of SNP TSC0013573
agtaacgttttta

SEQ ID NO: 47178 - DNA, 13 bp, Artificial Sequence
  Oligonucleotide for detection of SNP TSC0013573
taaaaacgttact

SEQ ID NO: 47179 - DNA, 13 bp, Artificial Sequence
  Oligonucleotide for detection of SNP TSC0013573
tagaagtgttgtt

SEQ ID NO: 47180 - DNA, 13 bp, Artificial Sequence
  Oligonucleotide for detection of SNP TSC0013573
aacaacacttcta

SEQ ID NO: 47181 - DNA, 13 bp, Artificial Sequence
  Oligonucleotide for detection of SNP TSC0013573
tagaagcgttgtt

SEQ ID NO: 47182 - DNA, 13 bp, Artificial Sequence
  Oligonucleotide for detection of SNP TSC0013573
aacaacgcttcta

SEQ ID NO: 47183 - DNA, 13 bp, Artificial Sequence
  Oligonucleotide for detection of SNP TSC0013577
gtttgggtgttag

SEQ ID NO: 47184 - DNA, 13 bp, Artificial Sequence
  Oligonucleotide for detection of SNP TSC0013577
ctaacacccaaac

SEQ ID NO: 47185 - DNA, 13 bp, Artificial Sequence
  Oligonucleotide for detection of SNP TSC0013577
gtttggatgttag

SEQ ID NO: 47186 - DNA, 13 bp, Artificial Sequence
  Oligonucleotide for detection of SNP TSC0013577
ctaacatccaaac

SEQ ID NO: 47187 - DNA, 13 bp, Artificial Sequence
  Oligonucleotide for detection of SNP TSC0013579
tttttaggtgtta

SEQ ID NO: 47188 - DNA, 13 bp, Artificial Sequence
  Oligonucleotide for detection of SNP TSC0013579
taacacctaaaaa

SEQ ID NO: 47189 - DNA, 13 bp, Artificial Sequence
  Oligonucleotide for detection of SNP TSC0013579
tttttaagtgtta

SEQ ID NO: 47190 - DNA, 13 bp, Artificial Sequence
  Oligonucleotide for detection of SNP TSC0013579
taacacttaaaaa

SEQ ID NO: 47191 - DNA, 13 bp, Artificial Sequence
  Oligonucleotide for detection of SNP TSC0013580
gatggatggatag

SEQ ID NO: 47192 - DNA, 13 bp, Artificial Sequence
  Oligonucleotide for detection of SNP TSC0013580
ctatccatccatc

SEQ ID NO: 47193 - DNA, 13 bp, Artificial Sequence
  Oligonucleotide for detection of SNP TSC0013580
gatggacggatag

SEQ ID NO: 47194 - DNA, 13 bp, Artificial Sequence
  Oligonucleotide for detection of SNP TSC0013580
ctatccgtccatc

SEQ ID NO: 47195 - DNA, 13 bp, Artificial Sequence
  Oligonucleotide for detection of SNP TSC0013581
ttatttatatttg

SEQ ID NO: 47196 - DNA, 13 bp, Artificial Sequence
  Oligonucleotide for detection of SNP TSC0013581
caaatataaataa

SEQ ID NO: 47197 - DNA, 13 bp, Artificial Sequence
  Oligonucleotide for detection of SNP TSC0013581
ttatttgtatttg

SEQ ID NO: 47198 - DNA, 13 bp, Artificial Sequence
  Oligonucleotide for detection of SNP TSC0013581
caaatacaaataa

SEQ ID NO: 47199 - DNA, 13 bp, Artificial Sequence
  Oligonucleotide for detection of SNP TSC0013582
aattttaaaattt

SEQ ID NO: 47200 - DNA, 13 bp, Artificial Sequence
  Oligonucleotide for detection of SNP TSC0013582
aaattttaaaatt

SEQ ID NO: 47201 - DNA, 13 bp, Artificial Sequence
  Oligonucleotide for detection of SNP TSC0013582
aatttttaaattt

SEQ ID NO: 47202 - DNA, 13 bp, Artificial Sequence
  Oligonucleotide for detection of SNP TSC0013582
aaatttaaaaatt

SEQ ID NO: 47203 - DNA, 13 bp, Artificial Sequence
  Oligonucleotide for detection of SNP TSC0013583
tgaaaaaatgttt

SEQ ID NO: 47204 - DNA, 13 bp, Artificial Sequence
  Oligonucleotide for detection of SNP TSC0013583
aaacattttttca

SEQ ID NO: 47205 - DNA, 13 bp, Artificial Sequence
  Oligonucleotide for detection of SNP TSC0013583
tgaaaatatgttt

SEQ ID NO: 47206 - DNA, 13 bp, Artificial Sequence
  Oligonucleotide for detection of SNP TSC0013583
aaacatattttca

SEQ ID NO: 47207 - DNA, 13 bp, Artificial Sequence
  Oligonucleotide for detection of SNP TSC0013583
aaatattttttta

SEQ ID NO: 47208 - DNA, 13 bp, Artificial Sequence
  Oligonucleotide for detection of SNP TSC0013583
taaaaaaatattt

SEQ ID NO: 47209 - DNA, 13 bp, Artificial Sequence
  Oligonucleotide for detection of SNP TSC0013583
aaatatattttta

SEQ ID NO: 47210 - DNA, 13 bp, Artificial Sequence
  Oligonucleotide for detection of SNP TSC0013583
taaaaatatattt

SEQ ID NO: 47211 - DNA, 13 bp, Artificial Sequence
  Oligonucleotide for detection of SNP TSC0013585
attgtatgtatty

SEQ ID NO: 47212 - DNA, 13 bp, Artificial Sequence
  Oligonucleotide for detection of SNP TSC0013585
raatacatacaat

SEQ ID NO: 47213 - DNA, 13 bp, Artificial Sequence
  Oligonucleotide for detection of SNP TSC0013585
atcgtatgtatty

SEQ ID NO: 47214 - DNA, 13 bp, Artificial Sequence
  Oligonucleotide for detection of SNP TSC0013585
raatacatacgat

SEQ ID NO: 47215 - DNA, 13 bp, Artificial Sequence
  Oligonucleotide for detection of SNP TSC0013585
attgtacgtatty

SEQ ID NO: 47216 - DNA, 13 bp, Artificial Sequence
  Oligonucleotide for detection of SNP TSC0013585
raatacgtacaat

SEQ ID NO: 47217 - DNA, 13 bp, Artificial Sequence
  Oligonucleotide for detection of SNP TSC0013585
atcgtacgtatty

SEQ ID NO: 47218 - DNA, 13 bp, Artificial Sequence
  Oligonucleotide for detection of SNP TSC0013585
raatacgtacgat

SEQ ID NO: 47219 - DNA, 13 bp, Artificial Sequence
  Oligonucleotide for detection of SNP TSC0013585
gagtgtgtatggt

SEQ ID NO: 47220 - DNA, 13 bp, Artificial Sequence
  Oligonucleotide for detection of SNP TSC0013585
accatacacactc

SEQ ID NO: 47221 - DNA, 13 bp, Artificial Sequence
  Oligonucleotide for detection of SNP TSC0013585
gagtgtatatggt

SEQ ID NO: 47222 - DNA, 13 bp, Artificial Sequence
  Oligonucleotide for detection of SNP TSC0013585
accatatacactc

SEQ ID NO: 47223 - DNA, 13 bp, Artificial Sequence
  Oligonucleotide for detection of SNP TSC0013585
gagtgcgtatggt

SEQ ID NO: 47224 - DNA, 13 bp, Artificial Sequence
  Oligonucleotide for detection of SNP TSC0013585
accatacgcactc

SEQ ID NO: 47225 - DNA, 13 bp, Artificial Sequence
  Oligonucleotide for detection of SNP TSC0013585
gagtgtatacggt

SEQ ID NO: 47226 - DNA, 13 bp, Artificial Sequence
  Oligonucleotide for detection of SNP TSC0013585
accgtatacactc

SEQ ID NO: 47227 - DNA, 13 bp, Artificial Sequence
  Oligonucleotide for detection of SNP TSC0013585
gagtgtgtacggt

SEQ ID NO: 47228 - DNA, 13 bp, Artificial Sequence
  Oligonucleotide for detection of SNP TSC0013585
accgtacacactc

SEQ ID NO: 47229 - DNA, 13 bp, Artificial Sequence
  Oligonucleotide for detection of SNP TSC0013585
gagtgcgtacggt

SEQ ID NO: 47230 - DNA, 13 bp, Artificial Sequence
  Oligonucleotide for detection of SNP TSC0013585
accgtacgcactc

SEQ ID NO: 47231 - DNA, 13 bp, Artificial Sequence
  Oligonucleotide for detection of SNP TSC0013587
tttttgtgaaggg

SEQ ID NO: 47232 - DNA, 13 bp, Artificial Sequence
  Oligonucleotide for detection of SNP TSC0013587
cccttcacaaaaa

SEQ ID NO: 47233 - DNA, 13 bp, Artificial Sequence
  Oligonucleotide for detection of SNP TSC0013587
tttttgcgaaggg

SEQ ID NO: 47234 - DNA, 13 bp, Artificial Sequence
  Oligonucleotide for detection of SNP TSC0013587
cccttcgcaaaaa

SEQ ID NO: 47235 - DNA, 13 bp, Artificial Sequence
  Oligonucleotide for detection of SNP TSC0013587
ttttttgtaggaa

SEQ ID NO: 47236 - DNA, 13 bp, Artificial Sequence
  Oligonucleotide for detection of SNP TSC0013587
ttcctacaaaaaa

SEQ ID NO: 47237 - DNA, 13 bp, Artificial Sequence
  Oligonucleotide for detection of SNP TSC0013587
ttttttataggaa

SEQ ID NO: 47238 - DNA, 13 bp, Artificial Sequence
  Oligonucleotide for detection of SNP TSC0013587
ttcctataaaaaa

SEQ ID NO: 47239 - DNA, 13 bp, Artificial Sequence
  Oligonucleotide for detection of SNP TSC0013587
tttttcgtaggaa

SEQ ID NO: 47240 - DNA, 13 bp, Artificial Sequence
  Oligonucleotide for detection of SNP TSC0013587
ttcctacgaaaaa

SEQ ID NO: 47241 - DNA, 13 bp, Artificial Sequence
  Oligonucleotide for detection of SNP TSC0013588
agaagtgttggty

SEQ ID NO: 47242 - DNA, 13 bp, Artificial Sequence
  Oligonucleotide for detection of SNP TSC0013588
raccaacacttct

SEQ ID NO: 47243 - DNA, 13 bp, Artificial Sequence
  Oligonucleotide for detection of SNP TSC0013588
agaagtattggty

SEQ ID NO: 47244 - DNA, 13 bp, Artificial Sequence
  Oligonucleotide for detection of SNP TSC0013588
raccaatacttct

SEQ ID NO: 47245 - DNA, 13 bp, Artificial Sequence
  Oligonucleotide for detection of SNP TSC0013591
aaaaaaaaaataa

SEQ ID NO: 47246 - DNA, 13 bp, Artificial Sequence
  Oligonucleotide for detection of SNP TSC0013591
ttatttttttttt

SEQ ID NO: 47247 - DNA, 13 bp, Artificial Sequence
  Oligonucleotide for detection of SNP TSC0013592
gatattttggatt

SEQ ID NO: 47248 - DNA, 13 bp, Artificial Sequence
  Oligonucleotide for detection of SNP TSC0013592
aatccaaaatatc

SEQ ID NO: 47249 - DNA, 13 bp, Artificial Sequence
  Oligonucleotide for detection of SNP TSC0013592
gatattgtggatt

SEQ ID NO: 47250 - DNA, 13 bp, Artificial Sequence
  Oligonucleotide for detection of SNP TSC0013592
aatccacaatatc

SEQ ID NO: 47251 - DNA, 13 bp, Artificial Sequence
  Oligonucleotide for detection of SNP TSC0013592
gatatcgtggatt

SEQ ID NO: 47252 - DNA, 13 bp, Artificial Sequence
  Oligonucleotide for detection of SNP TSC0013592
aatccacgatatc

SEQ ID NO: 47253 - DNA, 13 bp, Artificial Sequence
  Oligonucleotide for detection of SNP TSC0013592
agtttagggtgty

SEQ ID NO: 47254 - DNA, 13 bp, Artificial Sequence
  Oligonucleotide for detection of SNP TSC0013592
racaccctaaact

SEQ ID NO: 47255 - DNA, 13 bp, Artificial Sequence
  Oligonucleotide for detection of SNP TSC0013592
agtttatggtgty

SEQ ID NO: 47256 - DNA, 13 bp, Artificial Sequence
  Oligonucleotide for detection of SNP TSC0013592
racaccataaact

SEQ ID NO: 47257 - DNA, 13 bp, Artificial Sequence
  Oligonucleotide for detection of SNP TSC0013592
agtttacggtgty

SEQ ID NO: 47258 - DNA, 13 bp, Artificial Sequence
  Oligonucleotide for detection of SNP TSC0013592
racaccgtaaact

SEQ ID NO: 47259 - DNA, 13 bp, Artificial Sequence
  Oligonucleotide for detection of SNP TSC0013593
tttttgatgttgt

SEQ ID NO: 47260 - DNA, 13 bp, Artificial Sequence
  Oligonucleotide for detection of SNP TSC0013593
acaacatcaaaaa

SEQ ID NO: 47261 - DNA, 13 bp, Artificial Sequence
  Oligonucleotide for detection of SNP TSC0013593
tttttgttgttgt

SEQ ID NO: 47262 - DNA, 13 bp, Artificial Sequence
  Oligonucleotide for detection of SNP TSC0013593
acaacaacaaaaa

SEQ ID NO: 47263 - DNA, 13 bp, Artificial Sequence
  Oligonucleotide for detection of SNP TSC0013593
ttttcgatgttgt

SEQ ID NO: 47264 - DNA, 13 bp, Artificial Sequence
  Oligonucleotide for detection of SNP TSC0013593
acaacatcgaaaa

SEQ ID NO: 47265 - DNA, 13 bp, Artificial Sequence
  Oligonucleotide for detection of SNP TSC0013593
ttttcgttgttgt

SEQ ID NO: 47266 - DNA, 13 bp, Artificial Sequence
  Oligonucleotide for detection of SNP TSC0013593
acaacaacgaaaa

SEQ ID NO: 47267 - DNA, 13 bp, Artificial Sequence
  Oligonucleotide for detection of SNP TSC0013593
tttttgacgttgt

SEQ ID NO: 47268 - DNA, 13 bp, Artificial Sequence
  Oligonucleotide for detection of SNP TSC0013593
acaacgtcaaaaa

SEQ ID NO: 47269 - DNA, 13 bp, Artificial Sequence
  Oligonucleotide for detection of SNP TSC0013593
tttttgtcgttgt

SEQ ID NO: 47270 - DNA, 13 bp, Artificial Sequence
  Oligonucleotide for detection of SNP TSC0013593
acaacgacaaaaa

SEQ ID NO: 47271 - DNA, 13 bp, Artificial Sequence
  Oligonucleotide for detection of SNP TSC0013593
ttttcgacgttgt

SEQ ID NO: 47272 - DNA, 13 bp, Artificial Sequence
  Oligonucleotide for detection of SNP TSC0013593
acaacgtcgaaaa

SEQ ID NO: 47273 - DNA, 13 bp, Artificial Sequence
  Oligonucleotide for detection of SNP TSC0013593
ttttcgtcgttgt

SEQ ID NO: 47274 - DNA, 13 bp, Artificial Sequence
  Oligonucleotide for detection of SNP TSC0013593
acaacgacgaaaa

SEQ ID NO: 47275 - DNA, 13 bp, Artificial Sequence
  Oligonucleotide for detection of SNP TSC0013593
atagtgttggaag

SEQ ID NO: 47276 - DNA, 13 bp, Artificial Sequence
  Oligonucleotide for detection of SNP TSC0013593
cttccaacactat

SEQ ID NO: 47277 - DNA, 13 bp, Artificial Sequence
  Oligonucleotide for detection of SNP TSC0013593
atagtgatggaag

SEQ ID NO: 47278 - DNA, 13 bp, Artificial Sequence
  Oligonucleotide for detection of SNP TSC0013593
cttccatcactat

SEQ ID NO: 47279 - DNA, 13 bp, Artificial Sequence
  Oligonucleotide for detection of SNP TSC0013593
atagcgttggaag

SEQ ID NO: 47280 - DNA, 13 bp, Artificial Sequence
  Oligonucleotide for detection of SNP TSC0013593
cttccaacgctat

SEQ ID NO: 47281 - DNA, 13 bp, Artificial Sequence
  Oligonucleotide for detection of SNP TSC0013593
atagcgatggaag

SEQ ID NO: 47282 - DNA, 13 bp, Artificial Sequence
  Oligonucleotide for detection of SNP TSC0013593
cttccatcgctat

SEQ ID NO: 47283 - DNA, 13 bp, Artificial Sequence
  Oligonucleotide for detection of SNP TSC0013593
atagtgtcggaag

SEQ ID NO: 47284 - DNA, 13 bp, Artificial Sequence
  Oligonucleotide for detection of SNP TSC0013593
cttccgacactat

SEQ ID NO: 47285 - DNA, 13 bp, Artificial Sequence
  Oligonucleotide for detection of SNP TSC0013593
atagtgacggaag

SEQ ID NO: 47286 - DNA, 13 bp, Artificial Sequence
  Oligonucleotide for detection of SNP TSC0013593
cttccgtcactat

SEQ ID NO: 47287 - DNA, 13 bp, Artificial Sequence
  Oligonucleotide for detection of SNP TSC0013593
atagcgtcggaag

SEQ ID NO: 47288 - DNA, 13 bp, Artificial Sequence
  Oligonucleotide for detection of SNP TSC0013593
cttccgacgctat

SEQ ID NO: 47289 - DNA, 13 bp, Artificial Sequence
  Oligonucleotide for detection of SNP TSC0013593
atagcgacggaag

SEQ ID NO: 47290 - DNA, 13 bp, Artificial Sequence
  Oligonucleotide for detection of SNP TSC0013593
cttccgtcgctat

SEQ ID NO: 47291 - DNA, 13 bp, Artificial Sequence
  Oligonucleotide for detection of SNP TSC0013594
gaagtgatatttt

SEQ ID NO: 47292 - DNA, 13 bp, Artificial Sequence
  Oligonucleotide for detection of SNP TSC0013594
aaaatatcacttc

SEQ ID NO: 47293 - DNA, 13 bp, Artificial Sequence
  Oligonucleotide for detection of SNP TSC0013594
gaagtgttatttt

SEQ ID NO: 47294 - DNA, 13 bp, Artificial Sequence
  Oligonucleotide for detection of SNP TSC0013594
aaaataacacttc

SEQ ID NO: 47295 - DNA, 13 bp, Artificial Sequence
  Oligonucleotide for detection of SNP TSC0013594
aaaatgttattty

SEQ ID NO: 47296 - DNA, 13 bp, Artificial Sequence
  Oligonucleotide for detection of SNP TSC0013594
raaataacatttt

SEQ ID NO: 47297 - DNA, 13 bp, Artificial Sequence
  Oligonucleotide for detection of SNP TSC0013594
aaaatgatattty

SEQ ID NO: 47298 - DNA, 13 bp, Artificial Sequence
  Oligonucleotide for detection of SNP TSC0013594
raaatatcatttt

SEQ ID NO: 47299 - DNA, 13 bp, Artificial Sequence
  Oligonucleotide for detection of SNP TSC0013595
gagtttttatgtt

SEQ ID NO: 47300 - DNA, 13 bp, Artificial Sequence
  Oligonucleotide for detection of SNP TSC0013595
aacataaaaactc

SEQ ID NO: 47301 - DNA, 13 bp, Artificial Sequence
  Oligonucleotide for detection of SNP TSC0013595
gagtttgtatgtt

SEQ ID NO: 47302 - DNA, 13 bp, Artificial Sequence
  Oligonucleotide for detection of SNP TSC0013595
aacatacaaactc

SEQ ID NO: 47303 - DNA, 13 bp, Artificial Sequence
  Oligonucleotide for detection of SNP TSC0013595
aatatagaaatty

SEQ ID NO: 47304 - DNA, 13 bp, Artificial Sequence
  Oligonucleotide for detection of SNP TSC0013595
raatttctatatt

SEQ ID NO: 47305 - DNA, 13 bp, Artificial Sequence
  Oligonucleotide for detection of SNP TSC0013596
gttattaatattt

SEQ ID NO: 47306 - DNA, 13 bp, Artificial Sequence
  Oligonucleotide for detection of SNP TSC0013596
aaatattaataac

SEQ ID NO: 47307 - DNA, 13 bp, Artificial Sequence
  Oligonucleotide for detection of SNP TSC0013596
gttattgatattt

SEQ ID NO: 47308 - DNA, 13 bp, Artificial Sequence
  Oligonucleotide for detection of SNP TSC0013596
aaatatcaataac

SEQ ID NO: 47309 - DNA, 13 bp, Artificial Sequence
  Oligonucleotide for detection of SNP TSC0013596
gttatcgatattt

SEQ ID NO: 47310 - DNA, 13 bp, Artificial Sequence
  Oligonucleotide for detection of SNP TSC0013596
aaatatcgataac

SEQ ID NO: 47311 - DNA, 13 bp, Artificial Sequence
  Oligonucleotide for detection of SNP TSC0013596
aagtgttggtaay

SEQ ID NO: 47312 - DNA, 13 bp, Artificial Sequence
  Oligonucleotide for detection of SNP TSC0013596
rttaccaacactt

SEQ ID NO: 47313 - DNA, 13 bp, Artificial Sequence
  Oligonucleotide for detection of SNP TSC0013596
aagtgtcggtaay

SEQ ID NO: 47314 - DNA, 13 bp, Artificial Sequence
  Oligonucleotide for detection of SNP TSC0013596
rttaccgacactt

SEQ ID NO: 47315 - DNA, 13 bp, Artificial Sequence
  Oligonucleotide for detection of SNP TSC0013597
ttttatagaaata

SEQ ID NO: 47316 - DNA, 13 bp, Artificial Sequence
  Oligonucleotide for detection of SNP TSC0013597
tatttctataaaa

SEQ ID NO: 47317 - DNA, 13 bp, Artificial Sequence
  Oligonucleotide for detection of SNP TSC0013597
ttttatggaaata

SEQ ID NO: 47318 - DNA, 13 bp, Artificial Sequence
  Oligonucleotide for detection of SNP TSC0013597
tatttccataaaa

SEQ ID NO: 47319 - DNA, 13 bp, Artificial Sequence
  Oligonucleotide for detection of SNP TSC0013598
tagttaattttta

SEQ ID NO: 47320 - DNA, 13 bp, Artificial Sequence
  Oligonucleotide for detection of SNP TSC0013598
taaaaattaacta

SEQ ID NO: 47321 - DNA, 13 bp, Artificial Sequence
  Oligonucleotide for detection of SNP TSC0013598
tagttagttttta

SEQ ID NO: 47322 - DNA, 13 bp, Artificial Sequence
  Oligonucleotide for detection of SNP TSC0013598
taaaaactaacta

SEQ ID NO: 47323 - DNA, 13 bp, Artificial Sequence
  Oligonucleotide for detection of SNP TSC0013601
tttattatagtat

SEQ ID NO: 47324 - DNA, 13 bp, Artificial Sequence
  Oligonucleotide for detection of SNP TSC0013601
atactataataaa

SEQ ID NO: 47325 - DNA, 13 bp, Artificial Sequence
  Oligonucleotide for detection of SNP TSC0013601
tttatcgtagtat

SEQ ID NO: 47326 - DNA, 13 bp, Artificial Sequence
  Oligonucleotide for detection of SNP TSC0013601
atactacgataaa

SEQ ID NO: 47327 - DNA, 13 bp, Artificial Sequence
  Oligonucleotide for detection of SNP TSC0013601
atgttgtggtggg

SEQ ID NO: 47328 - DNA, 13 bp, Artificial Sequence
  Oligonucleotide for detection of SNP TSC0013601
cccaccacaacat

SEQ ID NO: 47329 - DNA, 13 bp, Artificial Sequence
  Oligonucleotide for detection of SNP TSC0013601
atgttgcggtggg

SEQ ID NO: 47330 - DNA, 13 bp, Artificial Sequence
  Oligonucleotide for detection of SNP TSC0013601
cccaccgcaacat

SEQ ID NO: 47331 - DNA, 13 bp, Artificial Sequence
  Oligonucleotide for detection of SNP TSC0013602
gttatgtgtatta

SEQ ID NO: 47332 - DNA, 13 bp, Artificial Sequence
  Oligonucleotide for detection of SNP TSC0013602
taatacacataac

SEQ ID NO: 47333 - DNA, 13 bp, Artificial Sequence
  Oligonucleotide for detection of SNP TSC0013602
gttatgcgtatta

SEQ ID NO: 47334 - DNA, 13 bp, Artificial Sequence
  Oligonucleotide for detection of SNP TSC0013602
taatacgcataac

SEQ ID NO: 47335 - DNA, 13 bp, Artificial Sequence
  Oligonucleotide for detection of SNP TSC0013602
tggtgtgtatggy

SEQ ID NO: 47336 - DNA, 13 bp, Artificial Sequence
  Oligonucleotide for detection of SNP TSC0013602
rccatacacacca

SEQ ID NO: 47337 - DNA, 13 bp, Artificial Sequence
  Oligonucleotide for detection of SNP TSC0013602
tggtgtatatggy

SEQ ID NO: 47338 - DNA, 13 bp, Artificial Sequence
  Oligonucleotide for detection of SNP TSC0013602
rccatatacacca

SEQ ID NO: 47339 - DNA, 13 bp, Artificial Sequence
  Oligonucleotide for detection of SNP TSC0013602
tggtgcgtatggy

SEQ ID NO: 47340 - DNA, 13 bp, Artificial Sequence
  Oligonucleotide for detection of SNP TSC0013602
rccatacgcacca

SEQ ID NO: 47341 - DNA, 13 bp, Artificial Sequence
  Oligonucleotide for detection of SNP TSC0013604
tttatggtttttt

SEQ ID NO: 47342 - DNA, 13 bp, Artificial Sequence
  Oligonucleotide for detection of SNP TSC0013604
aaaaaaccataaa

SEQ ID NO: 47343 - DNA, 13 bp, Artificial Sequence
  Oligonucleotide for detection of SNP TSC0013604
tttatgatttttt

SEQ ID NO: 47344 - DNA, 13 bp, Artificial Sequence
  Oligonucleotide for detection of SNP TSC0013604
aaaaaatcataaa

SEQ ID NO: 47345 - DNA, 13 bp, Artificial Sequence
  Oligonucleotide for detection of SNP TSC0013604
tttacggtttttt

SEQ ID NO: 47346 - DNA, 13 bp, Artificial Sequence
  Oligonucleotide for detection of SNP TSC0013604
aaaaaaccgtaaa

SEQ ID NO: 47347 - DNA, 13 bp, Artificial Sequence
  Oligonucleotide for detection of SNP TSC0013604
tttacgatttttt

SEQ ID NO: 47348 - DNA, 13 bp, Artificial Sequence
  Oligonucleotide for detection of SNP TSC0013604
aaaaaatcgtaaa

SEQ ID NO: 47349 - DNA, 13 bp, Artificial Sequence
  Oligonucleotide for detection of SNP TSC0013605
tatgatgtagtta

SEQ ID NO: 47350 - DNA, 13 bp, Artificial Sequence
  Oligonucleotide for detection of SNP TSC0013605
taactacatcata

SEQ ID NO: 47351 - DNA, 13 bp, Artificial Sequence
  Oligonucleotide for detection of SNP TSC0013605
tatgatatagtta

SEQ ID NO: 47352 - DNA, 13 bp, Artificial Sequence
  Oligonucleotide for detection of SNP TSC0013605
taactatatcata

SEQ ID NO: 47353 - DNA, 13 bp, Artificial Sequence
  Oligonucleotide for detection of SNP TSC0013606
gtatttaggagty

SEQ ID NO: 47354 - DNA, 13 bp, Artificial Sequence
  Oligonucleotide for detection of SNP TSC0013606
ractcctaaatac

SEQ ID NO: 47355 - DNA, 13 bp, Artificial Sequence
  Oligonucleotide for detection of SNP TSC0013606
gtatttgggagty

SEQ ID NO: 47356 - DNA, 13 bp, Artificial Sequence
  Oligonucleotide for detection of SNP TSC0013606
ractcccaaatac

SEQ ID NO: 47357 - DNA, 13 bp, Artificial Sequence
  Oligonucleotide for detection of SNP TSC0013606
gtattcgggagty

SEQ ID NO: 47358 - DNA, 13 bp, Artificial Sequence
  Oligonucleotide for detection of SNP TSC0013606
ractcccgaatac

SEQ ID NO: 47359 - DNA, 13 bp, Artificial Sequence
  Oligonucleotide for detection of SNP TSC0013606
gatttttggatgy

SEQ ID NO: 47360 - DNA, 13 bp, Artificial Sequence
  Oligonucleotide for detection of SNP TSC0013606
rcatccaaaaatc

SEQ ID NO: 47361 - DNA, 13 bp, Artificial Sequence
  Oligonucleotide for detection of SNP TSC0013606
gattttcggatgy

SEQ ID NO: 47362 - DNA, 13 bp, Artificial Sequence
  Oligonucleotide for detection of SNP TSC0013606
rcatccgaaaatc

SEQ ID NO: 47363 - DNA, 13 bp, Artificial Sequence
  Oligonucleotide for detection of SNP TSC0013607
atatggtatattt

SEQ ID NO: 47364 - DNA, 13 bp, Artificial Sequence
  Oligonucleotide for detection of SNP TSC0013607
aaatataccatat

SEQ ID NO: 47365 - DNA, 13 bp, Artificial Sequence
  Oligonucleotide for detection of SNP TSC0013607
atatgggatattt

SEQ ID NO: 47366 - DNA, 13 bp, Artificial Sequence
  Oligonucleotide for detection of SNP TSC0013607
aaatatcccatat

SEQ ID NO: 47367 - DNA, 13 bp, Artificial Sequence
  Oligonucleotide for detection of SNP TSC0013607
aaatatgttatgt

SEQ ID NO: 47368 - DNA, 13 bp, Artificial Sequence
  Oligonucleotide for detection of SNP TSC0013607
acataacatattt

SEQ ID NO: 47369 - DNA, 13 bp, Artificial Sequence
  Oligonucleotide for detection of SNP TSC0013607
aaatattttatgt

SEQ ID NO: 47370 - DNA, 13 bp, Artificial Sequence
  Oligonucleotide for detection of SNP TSC0013607
acataaaatattt

SEQ ID NO: 47371 - DNA, 13 bp, Artificial Sequence
  Oligonucleotide for detection of SNP TSC0013608
gttaggagtttta

SEQ ID NO: 47372 - DNA, 13 bp, Artificial Sequence
  Oligonucleotide for detection of SNP TSC0013608
taaaactcctaac

SEQ ID NO: 47373 - DNA, 13 bp, Artificial Sequence
  Oligonucleotide for detection of SNP TSC0013608
gttaggggtttta

SEQ ID NO: 47374 - DNA, 13 bp, Artificial Sequence
  Oligonucleotide for detection of SNP TSC0013608
taaaacccctaac

SEQ ID NO: 47375 - DNA, 13 bp, Artificial Sequence
  Oligonucleotide for detection of SNP TSC0013609
taggttgtggtta

SEQ ID NO: 47376 - DNA, 13 bp, Artificial Sequence
  Oligonucleotide for detection of SNP TSC0013609
taaccacaaccta

SEQ ID NO: 47377 - DNA, 13 bp, Artificial Sequence
  Oligonucleotide for detection of SNP TSC0013609
taggttttggtta

SEQ ID NO: 47378 - DNA, 13 bp, Artificial Sequence
  Oligonucleotide for detection of SNP TSC0013609
taaccaaaaccta

SEQ ID NO: 47379 - DNA, 13 bp, Artificial Sequence
  Oligonucleotide for detection of SNP TSC0013609
taggtcgtggtta

SEQ ID NO: 47380 - DNA, 13 bp, Artificial Sequence
  Oligonucleotide for detection of SNP TSC0013609
taaccacgaccta

SEQ ID NO: 47381 - DNA, 13 bp, Artificial Sequence
  Oligonucleotide for detection of SNP TSC0013609
taattatggtttg

SEQ ID NO: 47382 - DNA, 13 bp, Artificial Sequence
  Oligonucleotide for detection of SNP TSC0013609
caaaccataatta

SEQ ID NO: 47383 - DNA, 13 bp, Artificial Sequence
  Oligonucleotide for detection of SNP TSC0013609
taattaaggtttg

SEQ ID NO: 47384 - DNA, 13 bp, Artificial Sequence
  Oligonucleotide for detection of SNP TSC0013609
caaaccttaatta

SEQ ID NO: 47385 - DNA, 13 bp, Artificial Sequence
  Oligonucleotide for detection of SNP TSC0013609
taattacggtttg

SEQ ID NO: 47386 - DNA, 13 bp, Artificial Sequence
  Oligonucleotide for detection of SNP TSC0013609
caaaccgtaatta

SEQ ID NO: 47387 - DNA, 13 bp, Artificial Sequence
  Oligonucleotide for detection of SNP TSC0013610
ataggaattttag

SEQ ID NO: 47388 - DNA, 13 bp, Artificial Sequence
  Oligonucleotide for detection of SNP TSC0013610
ctaaaattcctat

SEQ ID NO: 47389 - DNA, 13 bp, Artificial Sequence
  Oligonucleotide for detection of SNP TSC0013610
ataggagttttag

SEQ ID NO: 47390 - DNA, 13 bp, Artificial Sequence
  Oligonucleotide for detection of SNP TSC0013610
ctaaaactcctat

SEQ ID NO: 47391 - DNA, 13 bp, Artificial Sequence
  Oligonucleotide for detection of SNP TSC0013612
ttgtagattggtg

SEQ ID NO: 47392 - DNA, 13 bp, Artificial Sequence
  Oligonucleotide for detection of SNP TSC0013612
caccaatctacaa

SEQ ID NO: 47393 - DNA, 13 bp, Artificial Sequence
  Oligonucleotide for detection of SNP TSC0013612
ttgtagtttggtg

SEQ ID NO: 47394 - DNA, 13 bp, Artificial Sequence
  Oligonucleotide for detection of SNP TSC0013612
caccaaactacaa

SEQ ID NO: 47395 - DNA, 13 bp, Artificial Sequence
  Oligonucleotide for detection of SNP TSC0013612
ttgtagatcggtg

SEQ ID NO: 47396 - DNA, 13 bp, Artificial Sequence
  Oligonucleotide for detection of SNP TSC0013612
caccgatctacaa

SEQ ID NO: 47397 - DNA, 13 bp, Artificial Sequence
  Oligonucleotide for detection of SNP TSC0013612
ttgtagttcggtg

SEQ ID NO: 47398 - DNA, 13 bp, Artificial Sequence
  Oligonucleotide for detection of SNP TSC0013612
caccgaactacaa

SEQ ID NO: 47399 - DNA, 13 bp, Artificial Sequence
  Oligonucleotide for detection of SNP TSC0013612
tattgatttataa

SEQ ID NO: 47400 - DNA, 13 bp, Artificial Sequence
  Oligonucleotide for detection of SNP TSC0013612
ttataaatcaata

SEQ ID NO: 47401 - DNA, 13 bp, Artificial Sequence
  Oligonucleotide for detection of SNP TSC0013612
tattgaattataa

SEQ ID NO: 47402 - DNA, 13 bp, Artificial Sequence
  Oligonucleotide for detection of SNP TSC0013612
ttataattcaata

SEQ ID NO: 47403 - DNA, 13 bp, Artificial Sequence
  Oligonucleotide for detection of SNP TSC0013612
tatcgatttataa

SEQ ID NO: 47404 - DNA, 13 bp, Artificial Sequence
  Oligonucleotide for detection of SNP TSC0013612
ttataaatcgata

SEQ ID NO: 47405 - DNA, 13 bp, Artificial Sequence
  Oligonucleotide for detection of SNP TSC0013612
tatcgaattataa

SEQ ID NO: 47406 - DNA, 13 bp, Artificial Sequence
  Oligonucleotide for detection of SNP TSC0013612
ttataattcgata

SEQ ID NO: 47407 - DNA, 13 bp, Artificial Sequence
  Oligonucleotide for detection of SNP TSC0013613
ttttgtatattaa

SEQ ID NO: 47408 - DNA, 13 bp, Artificial Sequence
  Oligonucleotide for detection of SNP TSC0013613
ttaatatacaaaa

SEQ ID NO: 47409 - DNA, 13 bp, Artificial Sequence
  Oligonucleotide for detection of SNP TSC0013613
ttttgtgtattaa

SEQ ID NO: 47410 - DNA, 13 bp, Artificial Sequence
  Oligonucleotide for detection of SNP TSC0013613
ttaatacacaaaa

SEQ ID NO: 47411 - DNA, 13 bp, Artificial Sequence
  Oligonucleotide for detection of SNP TSC0013614
aatttaaaatgga

SEQ ID NO: 47412 - DNA, 13 bp, Artificial Sequence
  Oligonucleotide for detection of SNP TSC0013614
tccattttaaatt

SEQ ID NO: 47413 - DNA, 13 bp, Artificial Sequence
  Oligonucleotide for detection of SNP TSC0013614
aatttagaatgga

SEQ ID NO: 47414 - DNA, 13 bp, Artificial Sequence
  Oligonucleotide for detection of SNP TSC0013614
tccattctaaatt

SEQ ID NO: 47415 - DNA, 13 bp, Artificial Sequence
  Oligonucleotide for detection of SNP TSC0013615
ttagatttaaaay

SEQ ID NO: 47416 - DNA, 13 bp, Artificial Sequence
  Oligonucleotide for detection of SNP TSC0013615
rttttaaatctaa

SEQ ID NO: 47417 - DNA, 13 bp, Artificial Sequence
  Oligonucleotide for detection of SNP TSC0013615
ttagatgtaaaay

SEQ ID NO: 47418 - DNA, 13 bp, Artificial Sequence
  Oligonucleotide for detection of SNP TSC0013615
rttttacatctaa

SEQ ID NO: 47419 - DNA, 13 bp, Artificial Sequence
  Oligonucleotide for detection of SNP TSC0013615
ttagacgtaaaay

SEQ ID NO: 47420 - DNA, 13 bp, Artificial Sequence
  Oligonucleotide for detection of SNP TSC0013615
rttttacgtctaa

SEQ ID NO: 47421 - DNA, 13 bp, Artificial Sequence
  Oligonucleotide for detection of SNP TSC0013615
gttttaggtttaa

SEQ ID NO: 47422 - DNA, 13 bp, Artificial Sequence
  Oligonucleotide for detection of SNP TSC0013615
ttaaacctaaaac

SEQ ID NO: 47423 - DNA, 13 bp, Artificial Sequence
  Oligonucleotide for detection of SNP TSC0013615
gttttatgtttaa

SEQ ID NO: 47424 - DNA, 13 bp, Artificial Sequence
  Oligonucleotide for detection of SNP TSC0013615
ttaaacataaaac

SEQ ID NO: 47425 - DNA, 13 bp, Artificial Sequence
  Oligonucleotide for detection of SNP TSC0013615
gttttacgtttaa

SEQ ID NO: 47426 - DNA, 13 bp, Artificial Sequence
  Oligonucleotide for detection of SNP TSC0013615
ttaaacgtaaaac

SEQ ID NO: 47427 - DNA, 13 bp, Artificial Sequence
  Oligonucleotide for detection of SNP TSC0013616
ggaattgttgaat

SEQ ID NO: 47428 - DNA, 13 bp, Artificial Sequence
  Oligonucleotide for detection of SNP TSC0013616
attcaacaattcc

SEQ ID NO: 47429 - DNA, 13 bp, Artificial Sequence
  Oligonucleotide for detection of SNP TSC0013616
ggaattattgaat

SEQ ID NO: 47430 - DNA, 13 bp, Artificial Sequence
  Oligonucleotide for detection of SNP TSC0013616
attcaataattcc

SEQ ID NO: 47431 - DNA, 13 bp, Artificial Sequence
  Oligonucleotide for detection of SNP TSC0013617
tttttaattgtay

SEQ ID NO: 47432 - DNA, 13 bp, Artificial Sequence
  Oligonucleotide for detection of SNP TSC0013617
rtacaattaaaaa

SEQ ID NO: 47433 - DNA, 13 bp, Artificial Sequence
  Oligonucleotide for detection of SNP TSC0013617
tttttagttgtay

SEQ ID NO: 47434 - DNA, 13 bp, Artificial Sequence
  Oligonucleotide for detection of SNP TSC0013617
rtacaactaaaaa

SEQ ID NO: 47435 - DNA, 13 bp, Artificial Sequence
  Oligonucleotide for detection of SNP TSC0013618
tttagtggtagtt

SEQ ID NO: 47436 - DNA, 13 bp, Artificial Sequence
  Oligonucleotide for detection of SNP TSC0013618
aactaccactaaa

SEQ ID NO: 47437 - DNA, 13 bp, Artificial Sequence
  Oligonucleotide for detection of SNP TSC0013618
tttagtagtagtt

SEQ ID NO: 47438 - DNA, 13 bp, Artificial Sequence
  Oligonucleotide for detection of SNP TSC0013618
aactactactaaa

SEQ ID NO: 47439 - DNA, 13 bp, Artificial Sequence
  Oligonucleotide for detection of SNP TSC0013623
atagagaggagtg

SEQ ID NO: 47440 - DNA, 13 bp, Artificial Sequence
  Oligonucleotide for detection of SNP TSC0013623
cactcctctctat

SEQ ID NO: 47441 - DNA, 13 bp, Artificial Sequence
  Oligonucleotide for detection of SNP TSC0013623
atagagtggagtg

SEQ ID NO: 47442 - DNA, 13 bp, Artificial Sequence
  Oligonucleotide for detection of SNP TSC0013623
cactccactctat

SEQ ID NO: 47443 - DNA, 13 bp, Artificial Sequence
  Oligonucleotide for detection of SNP TSC0013623
tatttttttttat

SEQ ID NO: 47444 - DNA, 13 bp, Artificial Sequence
  Oligonucleotide for detection of SNP TSC0013623
ataaaaaaaaata

SEQ ID NO: 47445 - DNA, 13 bp, Artificial Sequence
  Oligonucleotide for detection of SNP TSC0013624
tttagtaagatty

SEQ ID NO: 47446 - DNA, 13 bp, Artificial Sequence
  Oligonucleotide for detection of SNP TSC0013624
raatcttactaaa

SEQ ID NO: 47447 - DNA, 13 bp, Artificial Sequence
  Oligonucleotide for detection of SNP TSC0013624
tttagtgagatty

SEQ ID NO: 47448 - DNA, 13 bp, Artificial Sequence
  Oligonucleotide for detection of SNP TSC0013624
raatctcactaaa

SEQ ID NO: 47449 - DNA, 13 bp, Artificial Sequence
  Oligonucleotide for detection of SNP TSC0013628
gatataaatgggg

SEQ ID NO: 47450 - DNA, 13 bp, Artificial Sequence
  Oligonucleotide for detection of SNP TSC0013628
ccccatttatatc

SEQ ID NO: 47451 - DNA, 13 bp, Artificial Sequence
  Oligonucleotide for detection of SNP TSC0013628
gatatatatgggg

SEQ ID NO: 47452 - DNA, 13 bp, Artificial Sequence
  Oligonucleotide for detection of SNP TSC0013628
ccccatatatatc

SEQ ID NO: 47453 - DNA, 13 bp, Artificial Sequence
  Oligonucleotide for detection of SNP TSC0013628
gatataaacgggg

SEQ ID NO: 47454 - DNA, 13 bp, Artificial Sequence
  Oligonucleotide for detection of SNP TSC0013628
ccccgtttatatc

SEQ ID NO: 47455 - DNA, 13 bp, Artificial Sequence
  Oligonucleotide for detection of SNP TSC0013628
gatatatacgggg

SEQ ID NO: 47456 - DNA, 13 bp, Artificial Sequence
  Oligonucleotide for detection of SNP TSC0013628
ccccgtatatatc

SEQ ID NO: 47457 - DNA, 13 bp, Artificial Sequence
  Oligonucleotide for detection of SNP TSC0013628
ttttgtttgtgty

SEQ ID NO: 47458 - DNA, 13 bp, Artificial Sequence
  Oligonucleotide for detection of SNP TSC0013628
racacaaacaaaa

SEQ ID NO: 47459 - DNA, 13 bp, Artificial Sequence
  Oligonucleotide for detection of SNP TSC0013628
ttttgtgtgtgty

SEQ ID NO: 47460 - DNA, 13 bp, Artificial Sequence
  Oligonucleotide for detection of SNP TSC0013628
racacacacaaaa

SEQ ID NO: 47461 - DNA, 13 bp, Artificial Sequence
  Oligonucleotide for detection of SNP TSC0013628
tttcgtttgtgty

SEQ ID NO: 47462 - DNA, 13 bp, Artificial Sequence
  Oligonucleotide for detection of SNP TSC0013628
racacaaacgaaa

SEQ ID NO: 47463 - DNA, 13 bp, Artificial Sequence
  Oligonucleotide for detection of SNP TSC0013628
tttcgtgtgtgty

SEQ ID NO: 47464 - DNA, 13 bp, Artificial Sequence
  Oligonucleotide for detection of SNP TSC0013628
racacacacgaaa

SEQ ID NO: 47465 - DNA, 13 bp, Artificial Sequence
  Oligonucleotide for detection of SNP TSC0013629
gaatatagagtty

SEQ ID NO: 47466 - DNA, 13 bp, Artificial Sequence
  Oligonucleotide for detection of SNP TSC0013629
raactctatattc

SEQ ID NO: 47467 - DNA, 13 bp, Artificial Sequence
  Oligonucleotide for detection of SNP TSC0013629
gaatatggagtty

SEQ ID NO: 47468 - DNA, 13 bp, Artificial Sequence
  Oligonucleotide for detection of SNP TSC0013629
raactccatattc

SEQ ID NO: 47469 - DNA, 13 bp, Artificial Sequence
  Oligonucleotide for detection of SNP TSC0013629
gaatacggagtty

SEQ ID NO: 47470 - DNA, 13 bp, Artificial Sequence
  Oligonucleotide for detection of SNP TSC0013629
raactccgtattc

SEQ ID NO: 47471 - DNA, 13 bp, Artificial Sequence
  Oligonucleotide for detection of SNP TSC0013629
gagttttgtatty

SEQ ID NO: 47472 - DNA, 13 bp, Artificial Sequence
  Oligonucleotide for detection of SNP TSC0013629
raatacaaaactc

SEQ ID NO: 47473 - DNA, 13 bp, Artificial Sequence
  Oligonucleotide for detection of SNP TSC0013629
gagtttcgtatty

SEQ ID NO: 47474 - DNA, 13 bp, Artificial Sequence
  Oligonucleotide for detection of SNP TSC0013629
raatacgaaactc

SEQ ID NO: 47475 - DNA, 13 bp, Artificial Sequence
  Oligonucleotide for detection of SNP TSC0013631
atgggatgggtaa

SEQ ID NO: 47476 - DNA, 13 bp, Artificial Sequence
  Oligonucleotide for detection of SNP TSC0013631
ttacccatcccat

SEQ ID NO: 47477 - DNA, 13 bp, Artificial Sequence
  Oligonucleotide for detection of SNP TSC0013631
atgggaggggtaa

SEQ ID NO: 47478 - DNA, 13 bp, Artificial Sequence
  Oligonucleotide for detection of SNP TSC0013631
ttacccctcccat

SEQ ID NO: 47479 - DNA, 13 bp, Artificial Sequence
  Oligonucleotide for detection of SNP TSC0013631
atgggacgggtaa

SEQ ID NO: 47480 - DNA, 13 bp, Artificial Sequence
  Oligonucleotide for detection of SNP TSC0013631
ttacccgtcccat

SEQ ID NO: 47481 - DNA, 13 bp, Artificial Sequence
  Oligonucleotide for detection of SNP TSC0013632
aaaggattgggta

SEQ ID NO: 47482 - DNA, 13 bp, Artificial Sequence
  Oligonucleotide for detection of SNP TSC0013632
tacccaatccttt

SEQ ID NO: 47483 - DNA, 13 bp, Artificial Sequence
  Oligonucleotide for detection of SNP TSC0013632
aaaggagtgggta

SEQ ID NO: 47484 - DNA, 13 bp, Artificial Sequence
  Oligonucleotide for detection of SNP TSC0013632
tacccactccttt

SEQ ID NO: 47485 - DNA, 13 bp, Artificial Sequence
  Oligonucleotide for detection of SNP TSC0013632
aaaggatcgggta

SEQ ID NO: 47486 - DNA, 13 bp, Artificial Sequence
  Oligonucleotide for detection of SNP TSC0013632
tacccgatccttt

SEQ ID NO: 47487 - DNA, 13 bp, Artificial Sequence
  Oligonucleotide for detection of SNP TSC0013632
aaaggagcgggta

SEQ ID NO: 47488 - DNA, 13 bp, Artificial Sequence
  Oligonucleotide for detection of SNP TSC0013632
tacccgctccttt

SEQ ID NO: 47489 - DNA, 13 bp, Artificial Sequence
  Oligonucleotide for detection of SNP TSC0013632
tattcggtttttt

SEQ ID NO: 47490 - DNA, 13 bp, Artificial Sequence
  Oligonucleotide for detection of SNP TSC0013632
aaaaaaccgaata

SEQ ID NO: 47491 - DNA, 13 bp, Artificial Sequence
  Oligonucleotide for detection of SNP TSC0013632
tattcgttttttt

SEQ ID NO: 47492 - DNA, 13 bp, Artificial Sequence
  Oligonucleotide for detection of SNP TSC0013632
aaaaaaacgaata

SEQ ID NO: 47493 - DNA, 13 bp, Artificial Sequence
  Oligonucleotide for detection of SNP TSC0013633
tagtaagaattta

SEQ ID NO: 47494 - DNA, 13 bp, Artificial Sequence
  Oligonucleotide for detection of SNP TSC0013633
taaattcttacta

SEQ ID NO: 47495 - DNA, 13 bp, Artificial Sequence
  Oligonucleotide for detection of SNP TSC0013633
tagtaataattta

SEQ ID NO: 47496 - DNA, 13 bp, Artificial Sequence
  Oligonucleotide for detection of SNP TSC0013633
taaattattacta

SEQ ID NO: 47497 - DNA, 13 bp, Artificial Sequence
  Oligonucleotide for detection of SNP TSC0013633
tgagtttttgtta

SEQ ID NO: 47498 - DNA, 13 bp, Artificial Sequence
  Oligonucleotide for detection of SNP TSC0013633
taacaaaaactca

SEQ ID NO: 47499 - DNA, 13 bp, Artificial Sequence
  Oligonucleotide for detection of SNP TSC0013633
tgagttattgtta

SEQ ID NO: 47500 - DNA, 13 bp, Artificial Sequence
  Oligonucleotide for detection of SNP TSC0013633
taacaataactca

SEQ ID NO: 47501 - DNA, 13 bp, Artificial Sequence
  Oligonucleotide for detection of SNP TSC0013634
gtaagaatttaty

SEQ ID NO: 47502 - DNA, 13 bp, Artificial Sequence
  Oligonucleotide for detection of SNP TSC0013634
rataaattcttac

SEQ ID NO: 47503 - DNA, 13 bp, Artificial Sequence
  Oligonucleotide for detection of SNP TSC0013634
gtaagattttaty

SEQ ID NO: 47504 - DNA, 13 bp, Artificial Sequence
  Oligonucleotide for detection of SNP TSC0013634
rataaaatcttac

SEQ ID NO: 47505 - DNA, 13 bp, Artificial Sequence
  Oligonucleotide for detection of SNP TSC0013634
gatgagtttttgy

SEQ ID NO: 47506 - DNA, 13 bp, Artificial Sequence
  Oligonucleotide for detection of SNP TSC0013634
rcaaaaactcatc

SEQ ID NO: 47507 - DNA, 13 bp, Artificial Sequence
  Oligonucleotide for detection of SNP TSC0013634
gatgaggttttgy

SEQ ID NO: 47508 - DNA, 13 bp, Artificial Sequence
  Oligonucleotide for detection of SNP TSC0013634
rcaaaacctcatc

SEQ ID NO: 47509 - DNA, 13 bp, Artificial Sequence
  Oligonucleotide for detection of SNP TSC0013635
gggaagggtttaa

SEQ ID NO: 47510 - DNA, 13 bp, Artificial Sequence
  Oligonucleotide for detection of SNP TSC0013635
ttaaacccttccc

SEQ ID NO: 47511 - DNA, 13 bp, Artificial Sequence
  Oligonucleotide for detection of SNP TSC0013635
gggaagagtttaa

SEQ ID NO: 47512 - DNA, 13 bp, Artificial Sequence
  Oligonucleotide for detection of SNP TSC0013635
ttaaactcttccc

SEQ ID NO: 47513 - DNA, 13 bp, Artificial Sequence
  Oligonucleotide for detection of SNP TSC0013636
tatgttgttgtty

SEQ ID NO: 47514 - DNA, 13 bp, Artificial Sequence
  Oligonucleotide for detection of SNP TSC0013636
raacaacaacata

SEQ ID NO: 47515 - DNA, 13 bp, Artificial Sequence
  Oligonucleotide for detection of SNP TSC0013636
tatgtttttgtty

SEQ ID NO: 47516 - DNA, 13 bp, Artificial Sequence
  Oligonucleotide for detection of SNP TSC0013636
raacaaaaacata

SEQ ID NO: 47517 - DNA, 13 bp, Artificial Sequence
  Oligonucleotide for detection of SNP TSC0013636
gggtagtagtatg

SEQ ID NO: 47518 - DNA, 13 bp, Artificial Sequence
  Oligonucleotide for detection of SNP TSC0013636
catactactaccc

SEQ ID NO: 47519 - DNA, 13 bp, Artificial Sequence
  Oligonucleotide for detection of SNP TSC0013636
gggtagaagtatg

SEQ ID NO: 47520 - DNA, 13 bp, Artificial Sequence
  Oligonucleotide for detection of SNP TSC0013636
catacttctaccc

SEQ ID NO: 47521 - DNA, 13 bp, Artificial Sequence
  Oligonucleotide for detection of SNP TSC0013637
aatttttgtattt

SEQ ID NO: 47522 - DNA, 13 bp, Artificial Sequence
  Oligonucleotide for detection of SNP TSC0013637
aaatacaaaaatt

SEQ ID NO: 47523 - DNA, 13 bp, Artificial Sequence
  Oligonucleotide for detection of SNP TSC0013637
aattttcgtattt

SEQ ID NO: 47524 - DNA, 13 bp, Artificial Sequence
  Oligonucleotide for detection of SNP TSC0013637
aaatacgaaaatt

SEQ ID NO: 47525 - DNA, 13 bp, Artificial Sequence
  Oligonucleotide for detection of SNP TSC0013637
agatatgaagatt

SEQ ID NO: 47526 - DNA, 13 bp, Artificial Sequence
  Oligonucleotide for detection of SNP TSC0013637
aatcttcatatct

SEQ ID NO: 47527 - DNA, 13 bp, Artificial Sequence
  Oligonucleotide for detection of SNP TSC0013637
agatataaagatt

SEQ ID NO: 47528 - DNA, 13 bp, Artificial Sequence
  Oligonucleotide for detection of SNP TSC0013637
aatctttatatct

SEQ ID NO: 47529 - DNA, 13 bp, Artificial Sequence
  Oligonucleotide for detection of SNP TSC0013637
agatacgaagatt

SEQ ID NO: 47530 - DNA, 13 bp, Artificial Sequence
  Oligonucleotide for detection of SNP TSC0013637
aatcttcgtatct

SEQ ID NO: 47531 - DNA, 13 bp, Artificial Sequence
  Oligonucleotide for detection of SNP TSC0013638
tggtttgaaagag

SEQ ID NO: 47532 - DNA, 13 bp, Artificial Sequence
  Oligonucleotide for detection of SNP TSC0013638
ctctttcaaacca

SEQ ID NO: 47533 - DNA, 13 bp, Artificial Sequence
  Oligonucleotide for detection of SNP TSC0013638
tggtttaaaagag

SEQ ID NO: 47534 - DNA, 13 bp, Artificial Sequence
  Oligonucleotide for detection of SNP TSC0013638
ctcttttaaacca

SEQ ID NO: 47535 - DNA, 13 bp, Artificial Sequence
  Oligonucleotide for detection of SNP TSC0013639
ataaaaggatttg

SEQ ID NO: 47536 - DNA, 13 bp, Artificial Sequence
  Oligonucleotide for detection of SNP TSC0013639
caaatccttttat

SEQ ID NO: 47537 - DNA, 13 bp, Artificial Sequence
  Oligonucleotide for detection of SNP TSC0013639
ataaaaagatttg

SEQ ID NO: 47538 - DNA, 13 bp, Artificial Sequence
  Oligonucleotide for detection of SNP TSC0013639
caaatctttttat

SEQ ID NO: 47539 - DNA, 13 bp, Artificial Sequence
  Oligonucleotide for detection of SNP TSC0013643
tatgtggtattat

SEQ ID NO: 47540 - DNA, 13 bp, Artificial Sequence
  Oligonucleotide for detection of SNP TSC0013643
ataataccacata

SEQ ID NO: 47541 - DNA, 13 bp, Artificial Sequence
  Oligonucleotide for detection of SNP TSC0013644
ttaatttttatag

SEQ ID NO: 47542 - DNA, 13 bp, Artificial Sequence
  Oligonucleotide for detection of SNP TSC0013644
ctataaaaattaa

SEQ ID NO: 47543 - DNA, 13 bp, Artificial Sequence
  Oligonucleotide for detection of SNP TSC0013644
ttaattgttatag

SEQ ID NO: 47544 - DNA, 13 bp, Artificial Sequence
  Oligonucleotide for detection of SNP TSC0013644
ctataacaattaa

SEQ ID NO: 47545 - DNA, 13 bp, Artificial Sequence
  Oligonucleotide for detection of SNP TSC0013644
ttaatcgttatag

SEQ ID NO: 47546 - DNA, 13 bp, Artificial Sequence
  Oligonucleotide for detection of SNP TSC0013644
ctataacgattaa

SEQ ID NO: 47547 - DNA, 13 bp, Artificial Sequence
  Oligonucleotide for detection of SNP TSC0013644
ttgtaaggattag

SEQ ID NO: 47548 - DNA, 13 bp, Artificial Sequence
  Oligonucleotide for detection of SNP TSC0013644
ctaatccttacaa

SEQ ID NO: 47549 - DNA, 13 bp, Artificial Sequence
  Oligonucleotide for detection of SNP TSC0013644
ttgtaatgattag

SEQ ID NO: 47550 - DNA, 13 bp, Artificial Sequence
  Oligonucleotide for detection of SNP TSC0013644
ctaatcattacaa

SEQ ID NO: 47551 - DNA, 13 bp, Artificial Sequence
  Oligonucleotide for detection of SNP TSC0013644
ttgtaacgattag

SEQ ID NO: 47552 - DNA, 13 bp, Artificial Sequence
  Oligonucleotide for detection of SNP TSC0013644
ctaatcgttacaa

SEQ ID NO: 47553 - DNA, 13 bp, Artificial Sequence
  Oligonucleotide for detection of SNP TSC0013645
agggttatgaaga

SEQ ID NO: 47554 - DNA, 13 bp, Artificial Sequence
  Oligonucleotide for detection of SNP TSC0013645
tcttcataaccct

SEQ ID NO: 47555 - DNA, 13 bp, Artificial Sequence
  Oligonucleotide for detection of SNP TSC0013645
agggttgtgaaga

SEQ ID NO: 47556 - DNA, 13 bp, Artificial Sequence
  Oligonucleotide for detection of SNP TSC0013645
tcttcacaaccct

SEQ ID NO: 47557 - DNA, 13 bp, Artificial Sequence
  Oligonucleotide for detection of SNP TSC0013646
aagttggtttaty

SEQ ID NO: 47558 - DNA, 13 bp, Artificial Sequence
  Oligonucleotide for detection of SNP TSC0013646
rataaaccaactt

SEQ ID NO: 47559 - DNA, 13 bp, Artificial Sequence
  Oligonucleotide for detection of SNP TSC0013646
aagttgttttaty

SEQ ID NO: 47560 - DNA, 13 bp, Artificial Sequence
  Oligonucleotide for detection of SNP TSC0013646
rataaaacaactt

SEQ ID NO: 47561 - DNA, 13 bp, Artificial Sequence
  Oligonucleotide for detection of SNP TSC0013646
gatgaattagttt

SEQ ID NO: 47562 - DNA, 13 bp, Artificial Sequence
  Oligonucleotide for detection of SNP TSC0013646
aaactaattcatc

SEQ ID NO: 47563 - DNA, 13 bp, Artificial Sequence
  Oligonucleotide for detection of SNP TSC0013646
gatgaaatagttt

SEQ ID NO: 47564 - DNA, 13 bp, Artificial Sequence
  Oligonucleotide for detection of SNP TSC0013646
aaactatttcatc

SEQ ID NO: 47565 - DNA, 13 bp, Artificial Sequence
  Oligonucleotide for detection of SNP TSC0013648
ttttatgttatty

SEQ ID NO: 47566 - DNA, 13 bp, Artificial Sequence
  Oligonucleotide for detection of SNP TSC0013648
raataacataaaa

SEQ ID NO: 47567 - DNA, 13 bp, Artificial Sequence
  Oligonucleotide for detection of SNP TSC0013648
ttttatattatty

SEQ ID NO: 47568 - DNA, 13 bp, Artificial Sequence
  Oligonucleotide for detection of SNP TSC0013648
raataatataaaa

SEQ ID NO: 47569 - DNA, 13 bp, Artificial Sequence
  Oligonucleotide for detection of SNP TSC0013649
tagggttaagaag

SEQ ID NO: 47570 - DNA, 13 bp, Artificial Sequence
  Oligonucleotide for detection of SNP TSC0013649
cttcttaacccta

SEQ ID NO: 47571 - DNA, 13 bp, Artificial Sequence
  Oligonucleotide for detection of SNP TSC0013649
tagggtgaagaag

SEQ ID NO: 47572 - DNA, 13 bp, Artificial Sequence
  Oligonucleotide for detection of SNP TSC0013649
cttcttcacccta

SEQ ID NO: 47573 - DNA, 13 bp, Artificial Sequence
  Oligonucleotide for detection of SNP TSC0013649
tagggcgaagaag

SEQ ID NO: 47574 - DNA, 13 bp, Artificial Sequence
  Oligonucleotide for detection of SNP TSC0013649
cttcttcgcccta

SEQ ID NO: 47575 - DNA, 13 bp, Artificial Sequence
  Oligonucleotide for detection of SNP TSC0013649
ttttttggttttg

SEQ ID NO: 47576 - DNA, 13 bp, Artificial Sequence
  Oligonucleotide for detection of SNP TSC0013649
caaaaccaaaaaa

SEQ ID NO: 47577 - DNA, 13 bp, Artificial Sequence
  Oligonucleotide for detection of SNP TSC0013650
ttatgtatgagta

SEQ ID NO: 47578 - DNA, 13 bp, Artificial Sequence
  Oligonucleotide for detection of SNP TSC0013650
tactcatacataa

SEQ ID NO: 47579 - DNA, 13 bp, Artificial Sequence
  Oligonucleotide for detection of SNP TSC0013650
ttatgtgtgagta

SEQ ID NO: 47580 - DNA, 13 bp, Artificial Sequence
  Oligonucleotide for detection of SNP TSC0013650
tactcacacataa

SEQ ID NO: 47581 - DNA, 13 bp, Artificial Sequence
  Oligonucleotide for detection of SNP TSC0013650
ttacgtatgagta

SEQ ID NO: 47582 - DNA, 13 bp, Artificial Sequence
  Oligonucleotide for detection of SNP TSC0013650
tactcatacgtaa

SEQ ID NO: 47583 - DNA, 13 bp, Artificial Sequence
  Oligonucleotide for detection of SNP TSC0013650
ttacgtgtgagta

SEQ ID NO: 47584 - DNA, 13 bp, Artificial Sequence
  Oligonucleotide for detection of SNP TSC0013650
tactcacacgtaa

SEQ ID NO: 47585 - DNA, 13 bp, Artificial Sequence
  Oligonucleotide for detection of SNP TSC0013650
ttatgcgtgagta

SEQ ID NO: 47586 - DNA, 13 bp, Artificial Sequence
  Oligonucleotide for detection of SNP TSC0013650
tactcacgcataa

SEQ ID NO: 47587 - DNA, 13 bp, Artificial Sequence
  Oligonucleotide for detection of SNP TSC0013650
ttacgcgtgagta

SEQ ID NO: 47588 - DNA, 13 bp, Artificial Sequence
  Oligonucleotide for detection of SNP TSC0013650
tactcacgcgtaa

SEQ ID NO: 47589 - DNA, 13 bp, Artificial Sequence
  Oligonucleotide for detection of SNP TSC0013650
tgtttatgtgtgg

SEQ ID NO: 47590 - DNA, 13 bp, Artificial Sequence
  Oligonucleotide for detection of SNP TSC0013650
ccacacataaaca

SEQ ID NO: 47591 - DNA, 13 bp, Artificial Sequence
  Oligonucleotide for detection of SNP TSC0013650
tgtttatgcgtgg

SEQ ID NO: 47592 - DNA, 13 bp, Artificial Sequence
  Oligonucleotide for detection of SNP TSC0013650
ccacgcataaaca

SEQ ID NO: 47593 - DNA, 13 bp, Artificial Sequence
  Oligonucleotide for detection of SNP TSC0013650
tgtttacgtgtgg

SEQ ID NO: 47594 - DNA, 13 bp, Artificial Sequence
  Oligonucleotide for detection of SNP TSC0013650
ccacacgtaaaca

SEQ ID NO: 47595 - DNA, 13 bp, Artificial Sequence
  Oligonucleotide for detection of SNP TSC0013650
tgtttacgcgtgg

SEQ ID NO: 47596 - DNA, 13 bp, Artificial Sequence
  Oligonucleotide for detection of SNP TSC0013650
ccacgcgtaaaca

SEQ ID NO: 47597 - DNA, 13 bp, Artificial Sequence
  Oligonucleotide for detection of SNP TSC0013651
ttttagttagttt

SEQ ID NO: 47598 - DNA, 13 bp, Artificial Sequence
  Oligonucleotide for detection of SNP TSC0013651
aaactaactaaaa

SEQ ID NO: 47599 - DNA, 13 bp, Artificial Sequence
  Oligonucleotide for detection of SNP TSC0013651
ttttaggtagttt

SEQ ID NO: 47600 - DNA, 13 bp, Artificial Sequence
  Oligonucleotide for detection of SNP TSC0013651
aaactacctaaaa

SEQ ID NO: 47601 - DNA, 13 bp, Artificial Sequence
  Oligonucleotide for detection of SNP TSC0013651
aaattggttggaa

SEQ ID NO: 47602 - DNA, 13 bp, Artificial Sequence
  Oligonucleotide for detection of SNP TSC0013651
ttccaaccaattt

SEQ ID NO: 47603 - DNA, 13 bp, Artificial Sequence
  Oligonucleotide for detection of SNP TSC0013651
aaattgtttggaa

SEQ ID NO: 47604 - DNA, 13 bp, Artificial Sequence
  Oligonucleotide for detection of SNP TSC0013651
ttccaaacaattt

SEQ ID NO: 47605 - DNA, 13 bp, Artificial Sequence
  Oligonucleotide for detection of SNP TSC0013653
tgttggagggagy

SEQ ID NO: 47606 - DNA, 13 bp, Artificial Sequence
  Oligonucleotide for detection of SNP TSC0013653
rctccctccaaca

SEQ ID NO: 47607 - DNA, 13 bp, Artificial Sequence
  Oligonucleotide for detection of SNP TSC0013653
tgttggtgggagy

SEQ ID NO: 47608 - DNA, 13 bp, Artificial Sequence
  Oligonucleotide for detection of SNP TSC0013653
rctcccaccaaca

SEQ ID NO: 47609 - DNA, 13 bp, Artificial Sequence
  Oligonucleotide for detection of SNP TSC0013653
tgttggcgggagy

SEQ ID NO: 47610 - DNA, 13 bp, Artificial Sequence
  Oligonucleotide for detection of SNP TSC0013653
rctcccgccaaca

SEQ ID NO: 47611 - DNA, 13 bp, Artificial Sequence
  Oligonucleotide for detection of SNP TSC0013653
gttttttttagta

SEQ ID NO: 47612 - DNA, 13 bp, Artificial Sequence
  Oligonucleotide for detection of SNP TSC0013653
tactaaaaaaaac

SEQ ID NO: 47613 - DNA, 13 bp, Artificial Sequence
  Oligonucleotide for detection of SNP TSC0013653
gtttttgttagta

SEQ ID NO: 47614 - DNA, 13 bp, Artificial Sequence
  Oligonucleotide for detection of SNP TSC0013653
tactaacaaaaac

SEQ ID NO: 47615 - DNA, 13 bp, Artificial Sequence
  Oligonucleotide for detection of SNP TSC0013653
gttttcgttagta

SEQ ID NO: 47616 - DNA, 13 bp, Artificial Sequence
  Oligonucleotide for detection of SNP TSC0013653
tactaacgaaaac

SEQ ID NO: 47617 - DNA, 13 bp, Artificial Sequence
  Oligonucleotide for detection of SNP TSC0013654
tatattagtataa

SEQ ID NO: 47618 - DNA, 13 bp, Artificial Sequence
  Oligonucleotide for detection of SNP TSC0013654
ttatactaatata

SEQ ID NO: 47619 - DNA, 13 bp, Artificial Sequence
  Oligonucleotide for detection of SNP TSC0013654
tatattggtataa

SEQ ID NO: 47620 - DNA, 13 bp, Artificial Sequence
  Oligonucleotide for detection of SNP TSC0013654
ttataccaatata

SEQ ID NO: 47621 - DNA, 13 bp, Artificial Sequence
  Oligonucleotide for detection of SNP TSC0013654
tatatcggtataa

SEQ ID NO: 47622 - DNA, 13 bp, Artificial Sequence
  Oligonucleotide for detection of SNP TSC0013654
ttataccgatata

SEQ ID NO: 47623 - DNA, 13 bp, Artificial Sequence
  Oligonucleotide for detection of SNP TSC0013654
ttatgttggtgtg

SEQ ID NO: 47624 - DNA, 13 bp, Artificial Sequence
  Oligonucleotide for detection of SNP TSC0013654
cacaccaacataa

SEQ ID NO: 47625 - DNA, 13 bp, Artificial Sequence
  Oligonucleotide for detection of SNP TSC0013654
ttatgtcggtgtg

SEQ ID NO: 47626 - DNA, 13 bp, Artificial Sequence
  Oligonucleotide for detection of SNP TSC0013654
cacaccgacataa

SEQ ID NO: 47627 - DNA, 13 bp, Artificial Sequence
  Oligonucleotide for detection of SNP TSC0013655
gtgggatggatag

SEQ ID NO: 47628 - DNA, 13 bp, Artificial Sequence
  Oligonucleotide for detection of SNP TSC0013655
ctatccatcccac

SEQ ID NO: 47629 - DNA, 13 bp, Artificial Sequence
  Oligonucleotide for detection of SNP TSC0013655
gtgggagggatag

SEQ ID NO: 47630 - DNA, 13 bp, Artificial Sequence
  Oligonucleotide for detection of SNP TSC0013655
ctatccctcccac

SEQ ID NO: 47631 - DNA, 13 bp, Artificial Sequence
  Oligonucleotide for detection of SNP TSC0013655
gtgggacggatag

SEQ ID NO: 47632 - DNA, 13 bp, Artificial Sequence
  Oligonucleotide for detection of SNP TSC0013655
ctatccgtcccac

SEQ ID NO: 47633 - DNA, 13 bp, Artificial Sequence
  Oligonucleotide for detection of SNP TSC0013655
ttgttcgttttay

SEQ ID NO: 47634 - DNA, 13 bp, Artificial Sequence
  Oligonucleotide for detection of SNP TSC0013655
rtaaaacgaacaa

SEQ ID NO: 47635 - DNA, 13 bp, Artificial Sequence
  Oligonucleotide for detection of SNP TSC0013659
tgtttagtaatty

SEQ ID NO: 47636 - DNA, 13 bp, Artificial Sequence
  Oligonucleotide for detection of SNP TSC0013659
raattactaaaca

SEQ ID NO: 47637 - DNA, 13 bp, Artificial Sequence
  Oligonucleotide for detection of SNP TSC0013659
tgtttaataatty

SEQ ID NO: 47638 - DNA, 13 bp, Artificial Sequence
  Oligonucleotide for detection of SNP TSC0013659
raattattaaaca

SEQ ID NO: 47639 - DNA, 13 bp, Artificial Sequence
  Oligonucleotide for detection of SNP TSC0013660
tagagtaggggag

SEQ ID NO: 47640 - DNA, 13 bp, Artificial Sequence
  Oligonucleotide for detection of SNP TSC0013660
ctcccctactcta

SEQ ID NO: 47641 - DNA, 13 bp, Artificial Sequence
  Oligonucleotide for detection of SNP TSC0013660
tagagtgggggag

SEQ ID NO: 47642 - DNA, 13 bp, Artificial Sequence
  Oligonucleotide for detection of SNP TSC0013660
ctcccccactcta

SEQ ID NO: 47643 - DNA, 13 bp, Artificial Sequence
  Oligonucleotide for detection of SNP TSC0013661
atttataagttaa

SEQ ID NO: 47644 - DNA, 13 bp, Artificial Sequence
  Oligonucleotide for detection of SNP TSC0013661
ttaacttataaat

SEQ ID NO: 47645 - DNA, 13 bp, Artificial Sequence
  Oligonucleotide for detection of SNP TSC0013661
atttattagttaa

SEQ ID NO: 47646 - DNA, 13 bp, Artificial Sequence
  Oligonucleotide for detection of SNP TSC0013661
ttaactaataaat

SEQ ID NO: 47647 - DNA, 13 bp, Artificial Sequence
  Oligonucleotide for detection of SNP TSC0013661
ttggtttgtaggt

SEQ ID NO: 47648 - DNA, 13 bp, Artificial Sequence
  Oligonucleotide for detection of SNP TSC0013661
acctacaaaccaa

SEQ ID NO: 47649 - DNA, 13 bp, Artificial Sequence
  Oligonucleotide for detection of SNP TSC0013661
ttggttggtaggt

SEQ ID NO: 47650 - DNA, 13 bp, Artificial Sequence
  Oligonucleotide for detection of SNP TSC0013661
acctaccaaccaa

SEQ ID NO: 47651 - DNA, 13 bp, Artificial Sequence
  Oligonucleotide for detection of SNP TSC0013662
tagtttatttaag

SEQ ID NO: 47652 - DNA, 13 bp, Artificial Sequence
  Oligonucleotide for detection of SNP TSC0013662
cttaaataaacta

SEQ ID NO: 47653 - DNA, 13 bp, Artificial Sequence
  Oligonucleotide for detection of SNP TSC0013662
tagtttgtttaag

SEQ ID NO: 47654 - DNA, 13 bp, Artificial Sequence
  Oligonucleotide for detection of SNP TSC0013662
cttaaacaaacta

SEQ ID NO: 47655 - DNA, 13 bp, Artificial Sequence
  Oligonucleotide for detection of SNP TSC0013662
tagttcgtttaag

SEQ ID NO: 47656 - DNA, 13 bp, Artificial Sequence
  Oligonucleotide for detection of SNP TSC0013662
cttaaacgaacta

SEQ ID NO: 47657 - DNA, 13 bp, Artificial Sequence
  Oligonucleotide for detection of SNP TSC0013662
tttaaatggattg

SEQ ID NO: 47658 - DNA, 13 bp, Artificial Sequence
  Oligonucleotide for detection of SNP TSC0013662
caatccatttaaa

SEQ ID NO: 47659 - DNA, 13 bp, Artificial Sequence
  Oligonucleotide for detection of SNP TSC0013662
tttaaacggattg

SEQ ID NO: 47660 - DNA, 13 bp, Artificial Sequence
  Oligonucleotide for detection of SNP TSC0013662
caatccgtttaaa

SEQ ID NO: 47661 - DNA, 13 bp, Artificial Sequence
  Oligonucleotide for detection of SNP TSC0013664
ttaggtatggggg

SEQ ID NO: 47662 - DNA, 13 bp, Artificial Sequence
  Oligonucleotide for detection of SNP TSC0013664
cccccatacctaa

SEQ ID NO: 47663 - DNA, 13 bp, Artificial Sequence
  Oligonucleotide for detection of SNP TSC0013664
ttaggtgtggggg

SEQ ID NO: 47664 - DNA, 13 bp, Artificial Sequence
  Oligonucleotide for detection of SNP TSC0013664
cccccacacctaa

SEQ ID NO: 47665 - DNA, 13 bp, Artificial Sequence
  Oligonucleotide for detection of SNP TSC0013664
ttaggcgtggggg

SEQ ID NO: 47666 - DNA, 13 bp, Artificial Sequence
  Oligonucleotide for detection of SNP TSC0013664
cccccacgcctaa

SEQ ID NO: 47667 - DNA, 13 bp, Artificial Sequence
  Oligonucleotide for detection of SNP TSC0013664
tttttatgtttgg

SEQ ID NO: 47668 - DNA, 13 bp, Artificial Sequence
  Oligonucleotide for detection of SNP TSC0013664
ccaaacataaaaa

SEQ ID NO: 47669 - DNA, 13 bp, Artificial Sequence
  Oligonucleotide for detection of SNP TSC0013664
tttttacgtttgg

SEQ ID NO: 47670 - DNA, 13 bp, Artificial Sequence
  Oligonucleotide for detection of SNP TSC0013664
ccaaacgtaaaaa

SEQ ID NO: 47671 - DNA, 13 bp, Artificial Sequence
  Oligonucleotide for detection of SNP TSC0013665
gagtaatttttty

SEQ ID NO: 47672 - DNA, 13 bp, Artificial Sequence
  Oligonucleotide for detection of SNP TSC0013665
raaaaaattactc

SEQ ID NO: 47673 - DNA, 13 bp, Artificial Sequence
  Oligonucleotide for detection of SNP TSC0013665
gagtaagttttty

SEQ ID NO: 47674 - DNA, 13 bp, Artificial Sequence
  Oligonucleotide for detection of SNP TSC0013665
raaaaacttactc

SEQ ID NO: 47675 - DNA, 13 bp, Artificial Sequence
  Oligonucleotide for detection of SNP TSC0013665
gagagagttatty

SEQ ID NO: 47676 - DNA, 13 bp, Artificial Sequence
  Oligonucleotide for detection of SNP TSC0013665
raataactctctc

SEQ ID NO: 47677 - DNA, 13 bp, Artificial Sequence
  Oligonucleotide for detection of SNP TSC0013665
gagagatttatty

SEQ ID NO: 47678 - DNA, 13 bp, Artificial Sequence
  Oligonucleotide for detection of SNP TSC0013665
raataaatctctc

SEQ ID NO: 47679 - DNA, 13 bp, Artificial Sequence
  Oligonucleotide for detection of SNP TSC0013666
gtaatgatatttt

SEQ ID NO: 47680 - DNA, 13 bp, Artificial Sequence
  Oligonucleotide for detection of SNP TSC0013666
aaaatatcattac

SEQ ID NO: 47681 - DNA, 13 bp, Artificial Sequence
  Oligonucleotide for detection of SNP TSC0013666
gtaatggtatttt

SEQ ID NO: 47682 - DNA, 13 bp, Artificial Sequence
  Oligonucleotide for detection of SNP TSC0013666
aaaataccattac

SEQ ID NO: 47683 - DNA, 13 bp, Artificial Sequence
  Oligonucleotide for detection of SNP TSC0013667
ttatttgagaagy

SEQ ID NO: 47684 - DNA, 13 bp, Artificial Sequence
  Oligonucleotide for detection of SNP TSC0013667
rcttctcaaataa

SEQ ID NO: 47685 - DNA, 13 bp, Artificial Sequence
  Oligonucleotide for detection of SNP TSC0013667
ttattttagaagy

SEQ ID NO: 47686 - DNA, 13 bp, Artificial Sequence
  Oligonucleotide for detection of SNP TSC0013667
rcttctaaaataa

SEQ ID NO: 47687 - DNA, 13 bp, Artificial Sequence
  Oligonucleotide for detection of SNP TSC0013667
ttattcgagaagy

SEQ ID NO: 47688 - DNA, 13 bp, Artificial Sequence
  Oligonucleotide for detection of SNP TSC0013667
rcttctcgaataa

SEQ ID NO: 47689 - DNA, 13 bp, Artificial Sequence
  Oligonucleotide for detection of SNP TSC0013667
gttttttgagtaa

SEQ ID NO: 47690 - DNA, 13 bp, Artificial Sequence
  Oligonucleotide for detection of SNP TSC0013667
ttactcaaaaaac

SEQ ID NO: 47691 - DNA, 13 bp, Artificial Sequence
  Oligonucleotide for detection of SNP TSC0013667
gtttttagagtaa

SEQ ID NO: 47692 - DNA, 13 bp, Artificial Sequence
  Oligonucleotide for detection of SNP TSC0013667
ttactctaaaaac

SEQ ID NO: 47693 - DNA, 13 bp, Artificial Sequence
  Oligonucleotide for detection of SNP TSC0013667
gtttttcgagtaa

SEQ ID NO: 47694 - DNA, 13 bp, Artificial Sequence
  Oligonucleotide for detection of SNP TSC0013667
ttactcgaaaaac

SEQ ID NO: 47695 - DNA, 13 bp, Artificial Sequence
  Oligonucleotide for detection of SNP TSC0013672
aggaaagattata

SEQ ID NO: 47696 - DNA, 13 bp, Artificial Sequence
  Oligonucleotide for detection of SNP TSC0013672
tataatctttcct

SEQ ID NO: 47697 - DNA, 13 bp, Artificial Sequence
  Oligonucleotide for detection of SNP TSC0013672
aggaaaaattata

SEQ ID NO: 47698 - DNA, 13 bp, Artificial Sequence
  Oligonucleotide for detection of SNP TSC0013672
tataatttttcct

SEQ ID NO: 47699 - DNA, 13 bp, Artificial Sequence
  Oligonucleotide for detection of SNP TSC0013677
tatttgtgttagg

SEQ ID NO: 47700 - DNA, 13 bp, Artificial Sequence
  Oligonucleotide for detection of SNP TSC0013677
cctaacacaaata

SEQ ID NO: 47701 - DNA, 13 bp, Artificial Sequence
  Oligonucleotide for detection of SNP TSC0013677
tatttgggttagg

SEQ ID NO: 47702 - DNA, 13 bp, Artificial Sequence
  Oligonucleotide for detection of SNP TSC0013677
cctaacccaaata

SEQ ID NO: 47703 - DNA, 13 bp, Artificial Sequence
  Oligonucleotide for detection of SNP TSC0013677
tatttgcgttagg

SEQ ID NO: 47704 - DNA, 13 bp, Artificial Sequence
  Oligonucleotide for detection of SNP TSC0013677
cctaacgcaaata

SEQ ID NO: 47705 - DNA, 13 bp, Artificial Sequence
  Oligonucleotide for detection of SNP TSC0013677
tttgatgtaggtg

SEQ ID NO: 47706 - DNA, 13 bp, Artificial Sequence
  Oligonucleotide for detection of SNP TSC0013677
cacctacatcaaa

SEQ ID NO: 47707 - DNA, 13 bp, Artificial Sequence
  Oligonucleotide for detection of SNP TSC0013677
tttgatttaggtg

SEQ ID NO: 47708 - DNA, 13 bp, Artificial Sequence
  Oligonucleotide for detection of SNP TSC0013677
cacctaaatcaaa

SEQ ID NO: 47709 - DNA, 13 bp, Artificial Sequence
  Oligonucleotide for detection of SNP TSC0013677
tttgacgtaggtg

SEQ ID NO: 47710 - DNA, 13 bp, Artificial Sequence
  Oligonucleotide for detection of SNP TSC0013677
cacctacgtcaaa

SEQ ID NO: 47711 - DNA, 13 bp, Artificial Sequence
  Oligonucleotide for detection of SNP TSC0013678
ttgaagaaaatga

SEQ ID NO: 47712 - DNA, 13 bp, Artificial Sequence
  Oligonucleotide for detection of SNP TSC0013678
tcattttcttcaa

SEQ ID NO: 47713 - DNA, 13 bp, Artificial Sequence
  Oligonucleotide for detection of SNP TSC0013678
ttgaaggaaatga

SEQ ID NO: 47714 - DNA, 13 bp, Artificial Sequence
  Oligonucleotide for detection of SNP TSC0013678
tcatttccttcaa

SEQ ID NO: 47715 - DNA, 13 bp, Artificial Sequence
  Oligonucleotide for detection of SNP TSC0013679
ttttgtatttgtt

SEQ ID NO: 47716 - DNA, 13 bp, Artificial Sequence
  Oligonucleotide for detection of SNP TSC0013679
aacaaatacaaaa

SEQ ID NO: 47717 - DNA, 13 bp, Artificial Sequence
  Oligonucleotide for detection of SNP TSC0013679
ttttgtgtttgtt

SEQ ID NO: 47718 - DNA, 13 bp, Artificial Sequence
  Oligonucleotide for detection of SNP TSC0013679
aacaaacacaaaa

SEQ ID NO: 47719 - DNA, 13 bp, Artificial Sequence
  Oligonucleotide for detection of SNP TSC0013679
ttttgcgtttgtt

SEQ ID NO: 47720 - DNA, 13 bp, Artificial Sequence
  Oligonucleotide for detection of SNP TSC0013679
aacaaacgcaaaa

SEQ ID NO: 47721 - DNA, 13 bp, Artificial Sequence
  Oligonucleotide for detection of SNP TSC0013679
aataggtgtagag

SEQ ID NO: 47722 - DNA, 13 bp, Artificial Sequence
  Oligonucleotide for detection of SNP TSC0013679
ctctacacctatt

SEQ ID NO: 47723 - DNA, 13 bp, Artificial Sequence
  Oligonucleotide for detection of SNP TSC0013679
aataggcgtagag

SEQ ID NO: 47724 - DNA, 13 bp, Artificial Sequence
  Oligonucleotide for detection of SNP TSC0013679
ctctacgcctatt

SEQ ID NO: 47725 - DNA, 13 bp, Artificial Sequence
  Oligonucleotide for detection of SNP TSC0013680
gagggggtaatgt

SEQ ID NO: 47726 - DNA, 13 bp, Artificial Sequence
  Oligonucleotide for detection of SNP TSC0013680
acattaccccctc

SEQ ID NO: 47727 - DNA, 13 bp, Artificial Sequence
  Oligonucleotide for detection of SNP TSC0013680
gaggggataatgt

SEQ ID NO: 47728 - DNA, 13 bp, Artificial Sequence
  Oligonucleotide for detection of SNP TSC0013680
acattatcccctc

SEQ ID NO: 47729 - DNA, 13 bp, Artificial Sequence
  Oligonucleotide for detection of SNP TSC0013681
tattgtgtatttg

SEQ ID NO: 47730 - DNA, 13 bp, Artificial Sequence
  Oligonucleotide for detection of SNP TSC0013681
caaatacacaata

SEQ ID NO: 47731 - DNA, 13 bp, Artificial Sequence
  Oligonucleotide for detection of SNP TSC0013681
tattgtatatttg

SEQ ID NO: 47732 - DNA, 13 bp, Artificial Sequence
  Oligonucleotide for detection of SNP TSC0013681
caaatatacaata

SEQ ID NO: 47733 - DNA, 13 bp, Artificial Sequence
  Oligonucleotide for detection of SNP TSC0013684
tttttaattttgy

SEQ ID NO: 47734 - DNA, 13 bp, Artificial Sequence
  Oligonucleotide for detection of SNP TSC0013684
rcaaaattaaaaa

SEQ ID NO: 47735 - DNA, 13 bp, Artificial Sequence
  Oligonucleotide for detection of SNP TSC0013684
tttttatttttgy

SEQ ID NO: 47736 - DNA, 13 bp, Artificial Sequence
  Oligonucleotide for detection of SNP TSC0013684
rcaaaaataaaaa

SEQ ID NO: 47737 - DNA, 13 bp, Artificial Sequence
  Oligonucleotide for detection of SNP TSC0013684
gtaaaattaaaaa

SEQ ID NO: 47738 - DNA, 13 bp, Artificial Sequence
  Oligonucleotide for detection of SNP TSC0013684
tttttaattttac

SEQ ID NO: 47739 - DNA, 13 bp, Artificial Sequence
  Oligonucleotide for detection of SNP TSC0013684
gtaaaaataaaaa

SEQ ID NO: 47740 - DNA, 13 bp, Artificial Sequence
  Oligonucleotide for detection of SNP TSC0013684
tttttatttttac

SEQ ID NO: 47741 - DNA, 13 bp, Artificial Sequence
  Oligonucleotide for detection of SNP TSC0013687
attaatataatta

SEQ ID NO: 47742 - DNA, 13 bp, Artificial Sequence
  Oligonucleotide for detection of SNP TSC0013687
taattatattaat

SEQ ID NO: 47743 - DNA, 13 bp, Artificial Sequence
  Oligonucleotide for detection of SNP TSC0013687
attaatttaatta

SEQ ID NO: 47744 - DNA, 13 bp, Artificial Sequence
  Oligonucleotide for detection of SNP TSC0013687
taattaaattaat

SEQ ID NO: 47745 - DNA, 13 bp, Artificial Sequence
  Oligonucleotide for detection of SNP TSC0013687
taattgtgttagt

SEQ ID NO: 47746 - DNA, 13 bp, Artificial Sequence
  Oligonucleotide for detection of SNP TSC0013687
actaacacaatta

SEQ ID NO: 47747 - DNA, 13 bp, Artificial Sequence
  Oligonucleotide for detection of SNP TSC0013687
taattgagttagt

SEQ ID NO: 47748 - DNA, 13 bp, Artificial Sequence
  Oligonucleotide for detection of SNP TSC0013687
actaactcaatta

SEQ ID NO: 47749 - DNA, 13 bp, Artificial Sequence
  Oligonucleotide for detection of SNP TSC0013688
ataaaaatttata

SEQ ID NO: 47750 - DNA, 13 bp, Artificial Sequence
  Oligonucleotide for detection of SNP TSC0013688
tataaatttttat

SEQ ID NO: 47751 - DNA, 13 bp, Artificial Sequence
  Oligonucleotide for detection of SNP TSC0013688
ataaaattttata

SEQ ID NO: 47752 - DNA, 13 bp, Artificial Sequence
  Oligonucleotide for detection of SNP TSC0013688
tataaaattttat

SEQ ID NO: 47753 - DNA, 13 bp, Artificial Sequence
  Oligonucleotide for detection of SNP TSC0013688
tgtaaatttttat

SEQ ID NO: 47754 - DNA, 13 bp, Artificial Sequence
  Oligonucleotide for detection of SNP TSC0013688
ataaaaatttaca

SEQ ID NO: 47755 - DNA, 13 bp, Artificial Sequence
  Oligonucleotide for detection of SNP TSC0013688
tgtaaaattttat

SEQ ID NO: 47756 - DNA, 13 bp, Artificial Sequence
  Oligonucleotide for detection of SNP TSC0013688
ataaaattttaca

SEQ ID NO: 47757 - DNA, 13 bp, Artificial Sequence
  Oligonucleotide for detection of SNP TSC0013689
ttttatgagtagt

SEQ ID NO: 47758 - DNA, 13 bp, Artificial Sequence
  Oligonucleotide for detection of SNP TSC0013689
actactcataaaa

SEQ ID NO: 47759 - DNA, 13 bp, Artificial Sequence
  Oligonucleotide for detection of SNP TSC0013689
ttttataagtagt

SEQ ID NO: 47760 - DNA, 13 bp, Artificial Sequence
  Oligonucleotide for detection of SNP TSC0013689
actacttataaaa

SEQ ID NO: 47761 - DNA, 13 bp, Artificial Sequence
  Oligonucleotide for detection of SNP TSC0013690
ttttttcgtggty

SEQ ID NO: 47762 - DNA, 13 bp, Artificial Sequence
  Oligonucleotide for detection of SNP TSC0013690
raccacgaaaaaa

SEQ ID NO: 47763 - DNA, 13 bp, Artificial Sequence
  Oligonucleotide for detection of SNP TSC0013690
gattatgggaggg

SEQ ID NO: 47764 - DNA, 13 bp, Artificial Sequence
  Oligonucleotide for detection of SNP TSC0013690
ccctcccataatc

SEQ ID NO: 47765 - DNA, 13 bp, Artificial Sequence
  Oligonucleotide for detection of SNP TSC0013690
gattataggaggg

SEQ ID NO: 47766 - DNA, 13 bp, Artificial Sequence
  Oligonucleotide for detection of SNP TSC0013690
ccctcctataatc

SEQ ID NO: 47767 - DNA, 13 bp, Artificial Sequence
  Oligonucleotide for detection of SNP TSC0013690
gattacgggaggg

SEQ ID NO: 47768 - DNA, 13 bp, Artificial Sequence
  Oligonucleotide for detection of SNP TSC0013690
ccctcccgtaatc

SEQ ID NO: 47769 - DNA, 13 bp, Artificial Sequence
  Oligonucleotide for detection of SNP TSC0013691
gtttttatttagg

SEQ ID NO: 47770 - DNA, 13 bp, Artificial Sequence
  Oligonucleotide for detection of SNP TSC0013691
cctaaataaaaac

SEQ ID NO: 47771 - DNA, 13 bp, Artificial Sequence
  Oligonucleotide for detection of SNP TSC0013691
gtttttgtttagg

SEQ ID NO: 47772 - DNA, 13 bp, Artificial Sequence
  Oligonucleotide for detection of SNP TSC0013691
cctaaacaaaaac

SEQ ID NO: 47773 - DNA, 13 bp, Artificial Sequence
  Oligonucleotide for detection of SNP TSC0013691
gttttcgtttagg

SEQ ID NO: 47774 - DNA, 13 bp, Artificial Sequence
  Oligonucleotide for detection of SNP TSC0013691
cctaaacgaaaac

SEQ ID NO: 47775 - DNA, 13 bp, Artificial Sequence
  Oligonucleotide for detection of SNP TSC0013691
tttaggtggggay

SEQ ID NO: 47776 - DNA, 13 bp, Artificial Sequence
  Oligonucleotide for detection of SNP TSC0013691
rtccccacctaaa

SEQ ID NO: 47777 - DNA, 13 bp, Artificial Sequence
  Oligonucleotide for detection of SNP TSC0013691
tttaggcggggay

SEQ ID NO: 47778 - DNA, 13 bp, Artificial Sequence
  Oligonucleotide for detection of SNP TSC0013691
rtccccgcctaaa

SEQ ID NO: 47779 - DNA, 13 bp, Artificial Sequence
  Oligonucleotide for detection of SNP TSC0013693
atttaggtaggta

SEQ ID NO: 47780 - DNA, 13 bp, Artificial Sequence
  Oligonucleotide for detection of SNP TSC0013693
tacctacctaaat

SEQ ID NO: 47781 - DNA, 13 bp, Artificial Sequence
  Oligonucleotide for detection of SNP TSC0013693
atttagttaggta

SEQ ID NO: 47782 - DNA, 13 bp, Artificial Sequence
  Oligonucleotide for detection of SNP TSC0013693
tacctaactaaat

SEQ ID NO: 47783 - DNA, 13 bp, Artificial Sequence
  Oligonucleotide for detection of SNP TSC0013693
tatttgtttagat

SEQ ID NO: 47784 - DNA, 13 bp, Artificial Sequence
  Oligonucleotide for detection of SNP TSC0013693
atctaaacaaata

SEQ ID NO: 47785 - DNA, 13 bp, Artificial Sequence
  Oligonucleotide for detection of SNP TSC0013693
tatttgattagat

SEQ ID NO: 47786 - DNA, 13 bp, Artificial Sequence
  Oligonucleotide for detection of SNP TSC0013693
atctaatcaaata

SEQ ID NO: 47787 - DNA, 13 bp, Artificial Sequence
  Oligonucleotide for detection of SNP TSC0013694
tattagtgtttgt

SEQ ID NO: 47788 - DNA, 13 bp, Artificial Sequence
  Oligonucleotide for detection of SNP TSC0013694
acaaacactaata

SEQ ID NO: 47789 - DNA, 13 bp, Artificial Sequence
  Oligonucleotide for detection of SNP TSC0013694
tattagcgtttgt

SEQ ID NO: 47790 - DNA, 13 bp, Artificial Sequence
  Oligonucleotide for detection of SNP TSC0013694
acaaacgctaata

SEQ ID NO: 47791 - DNA, 13 bp, Artificial Sequence
  Oligonucleotide for detection of SNP TSC0013694
atagatgttgatg

SEQ ID NO: 47792 - DNA, 13 bp, Artificial Sequence
  Oligonucleotide for detection of SNP TSC0013694
catcaacatctat

SEQ ID NO: 47793 - DNA, 13 bp, Artificial Sequence
  Oligonucleotide for detection of SNP TSC0013694
atagatattgatg

SEQ ID NO: 47794 - DNA, 13 bp, Artificial Sequence
  Oligonucleotide for detection of SNP TSC0013694
catcaatatctat

SEQ ID NO: 47795 - DNA, 13 bp, Artificial Sequence
  Oligonucleotide for detection of SNP TSC0013694
atagacgttgatg

SEQ ID NO: 47796 - DNA, 13 bp, Artificial Sequence
  Oligonucleotide for detection of SNP TSC0013694
catcaacgtctat

SEQ ID NO: 47797 - DNA, 13 bp, Artificial Sequence
  Oligonucleotide for detection of SNP TSC0013695
tgaataaataaaa

SEQ ID NO: 47798 - DNA, 13 bp, Artificial Sequence
  Oligonucleotide for detection of SNP TSC0013695
ttttatttattca

SEQ ID NO: 47799 - DNA, 13 bp, Artificial Sequence
  Oligonucleotide for detection of SNP TSC0013695
tgaatagataaaa

SEQ ID NO: 47800 - DNA, 13 bp, Artificial Sequence
  Oligonucleotide for detection of SNP TSC0013695
ttttatctattca

SEQ ID NO: 47801 - DNA, 13 bp, Artificial Sequence
  Oligonucleotide for detection of SNP TSC0013696
aaggtaaataaat

SEQ ID NO: 47802 - DNA, 13 bp, Artificial Sequence
  Oligonucleotide for detection of SNP TSC0013696
atttatttacctt

SEQ ID NO: 47803 - DNA, 13 bp, Artificial Sequence
  Oligonucleotide for detection of SNP TSC0013696
aaggtagataaat

SEQ ID NO: 47804 - DNA, 13 bp, Artificial Sequence
  Oligonucleotide for detection of SNP TSC0013696
atttatctacctt

SEQ ID NO: 47805 - DNA, 13 bp, Artificial Sequence
  Oligonucleotide for detection of SNP TSC0013697
attatagtatgtt

SEQ ID NO: 47806 - DNA, 13 bp, Artificial Sequence
  Oligonucleotide for detection of SNP TSC0013697
aacatactataat

SEQ ID NO: 47807 - DNA, 13 bp, Artificial Sequence
  Oligonucleotide for detection of SNP TSC0013697
attatattatgtt

SEQ ID NO: 47808 - DNA, 13 bp, Artificial Sequence
  Oligonucleotide for detection of SNP TSC0013697
aacataatataat

SEQ ID NO: 47809 - DNA, 13 bp, Artificial Sequence
  Oligonucleotide for detection of SNP TSC0013697
aatatattgtgat

SEQ ID NO: 47810 - DNA, 13 bp, Artificial Sequence
  Oligonucleotide for detection of SNP TSC0013697
atcacaatatatt

SEQ ID NO: 47811 - DNA, 13 bp, Artificial Sequence
  Oligonucleotide for detection of SNP TSC0013697
aatataatgtgat

SEQ ID NO: 47812 - DNA, 13 bp, Artificial Sequence
  Oligonucleotide for detection of SNP TSC0013697
atcacattatatt

SEQ ID NO: 47813 - DNA, 13 bp, Artificial Sequence
  Oligonucleotide for detection of SNP TSC0013698
tgtaagaaggaaa

SEQ ID NO: 47814 - DNA, 13 bp, Artificial Sequence
  Oligonucleotide for detection of SNP TSC0013698
tttccttcttaca

SEQ ID NO: 47815 - DNA, 13 bp, Artificial Sequence
  Oligonucleotide for detection of SNP TSC0013698
tgtaaggaggaaa

SEQ ID NO: 47816 - DNA, 13 bp, Artificial Sequence
  Oligonucleotide for detection of SNP TSC0013698
tttcctccttaca

SEQ ID NO: 47817 - DNA, 13 bp, Artificial Sequence
  Oligonucleotide for detection of SNP TSC0013698
cgtaagaaggaaa

SEQ ID NO: 47818 - DNA, 13 bp, Artificial Sequence
  Oligonucleotide for detection of SNP TSC0013698
tttccttcttacg

SEQ ID NO: 47819 - DNA, 13 bp, Artificial Sequence
  Oligonucleotide for detection of SNP TSC0013698
cgtaaggaggaaa

SEQ ID NO: 47820 - DNA, 13 bp, Artificial Sequence
  Oligonucleotide for detection of SNP TSC0013698
tttcctccttacg

SEQ ID NO: 47821 - DNA, 13 bp, Artificial Sequence
  Oligonucleotide for detection of SNP TSC0013699
aggattgggtatg

SEQ ID NO: 47822 - DNA, 13 bp, Artificial Sequence
  Oligonucleotide for detection of SNP TSC0013699
catacccaatcct

SEQ ID NO: 47823 - DNA, 13 bp, Artificial Sequence
  Oligonucleotide for detection of SNP TSC0013699
aggattaggtatg

SEQ ID NO: 47824 - DNA, 13 bp, Artificial Sequence
  Oligonucleotide for detection of SNP TSC0013699
catacctaatcct

SEQ ID NO: 47825 - DNA, 13 bp, Artificial Sequence
  Oligonucleotide for detection of SNP TSC0013700
ttttgggtgtggg

SEQ ID NO: 47826 - DNA, 13 bp, Artificial Sequence
  Oligonucleotide for detection of SNP TSC0013700
cccacacccaaaa

SEQ ID NO: 47827 - DNA, 13 bp, Artificial Sequence
  Oligonucleotide for detection of SNP TSC0013700
ttttggatgtggg

SEQ ID NO: 47828 - DNA, 13 bp, Artificial Sequence
  Oligonucleotide for detection of SNP TSC0013700
cccacatccaaaa

SEQ ID NO: 47829 - DNA, 13 bp, Artificial Sequence
  Oligonucleotide for detection of SNP TSC0013703
tttaagattgtay

SEQ ID NO: 47830 - DNA, 13 bp, Artificial Sequence
  Oligonucleotide for detection of SNP TSC0013703
rtacaatcttaaa

SEQ ID NO: 47831 - DNA, 13 bp, Artificial Sequence
  Oligonucleotide for detection of SNP TSC0013703
tttaaggttgtay

SEQ ID NO: 47832 - DNA, 13 bp, Artificial Sequence
  Oligonucleotide for detection of SNP TSC0013703
rtacaaccttaaa

SEQ ID NO: 47833 - DNA, 13 bp, Artificial Sequence
  Oligonucleotide for detection of SNP TSC0013704
tgttaaattagay

SEQ ID NO: 47834 - DNA, 13 bp, Artificial Sequence
  Oligonucleotide for detection of SNP TSC0013704
rtctaatttaaca

SEQ ID NO: 47835 - DNA, 13 bp, Artificial Sequence
  Oligonucleotide for detection of SNP TSC0013704
tgttaagttagay

SEQ ID NO: 47836 - DNA, 13 bp, Artificial Sequence
  Oligonucleotide for detection of SNP TSC0013704
rtctaacttaaca

SEQ ID NO: 47837 - DNA, 13 bp, Artificial Sequence
  Oligonucleotide for detection of SNP TSC0013705
taattagttaatt

SEQ ID NO: 47838 - DNA, 13 bp, Artificial Sequence
  Oligonucleotide for detection of SNP TSC0013705
aattaactaatta

SEQ ID NO: 47839 - DNA, 13 bp, Artificial Sequence
  Oligonucleotide for detection of SNP TSC0013705
aattaattgatta

SEQ ID NO: 47840 - DNA, 13 bp, Artificial Sequence
  Oligonucleotide for detection of SNP TSC0013705
taatcaattaatt

SEQ ID NO: 47841 - DNA, 13 bp, Artificial Sequence
  Oligonucleotide for detection of SNP TSC0013705
aattaaatgatta

SEQ ID NO: 47842 - DNA, 13 bp, Artificial Sequence
  Oligonucleotide for detection of SNP TSC0013705
taatcatttaatt

SEQ ID NO: 47843 - DNA, 13 bp, Artificial Sequence
  Oligonucleotide for detection of SNP TSC0013706
gaatttggttatg

SEQ ID NO: 47844 - DNA, 13 bp, Artificial Sequence
  Oligonucleotide for detection of SNP TSC0013706
cataaccaaattc

SEQ ID NO: 47845 - DNA, 13 bp, Artificial Sequence
  Oligonucleotide for detection of SNP TSC0013706
gaattttgttatg

SEQ ID NO: 47846 - DNA, 13 bp, Artificial Sequence
  Oligonucleotide for detection of SNP TSC0013706
cataacaaaattc

SEQ ID NO: 47847 - DNA, 13 bp, Artificial Sequence
  Oligonucleotide for detection of SNP TSC0013706
gaatttggttacg

SEQ ID NO: 47848 - DNA, 13 bp, Artificial Sequence
  Oligonucleotide for detection of SNP TSC0013706
cgtaaccaaattc

SEQ ID NO: 47849 - DNA, 13 bp, Artificial Sequence
  Oligonucleotide for detection of SNP TSC0013706
gaattttgttacg

SEQ ID NO: 47850 - DNA, 13 bp, Artificial Sequence
  Oligonucleotide for detection of SNP TSC0013706
cgtaacaaaattc

SEQ ID NO: 47851 - DNA, 13 bp, Artificial Sequence
  Oligonucleotide for detection of SNP TSC0013706
tgtagttaggtty

SEQ ID NO: 47852 - DNA, 13 bp, Artificial Sequence
  Oligonucleotide for detection of SNP TSC0013706
raacctaactaca

SEQ ID NO: 47853 - DNA, 13 bp, Artificial Sequence
  Oligonucleotide for detection of SNP TSC0013706
tgtagtaaggtty

SEQ ID NO: 47854 - DNA, 13 bp, Artificial Sequence
  Oligonucleotide for detection of SNP TSC0013706
raaccttactaca

SEQ ID NO: 47855 - DNA, 13 bp, Artificial Sequence
  Oligonucleotide for detection of SNP TSC0013706
cgtagttaggtty

SEQ ID NO: 47856 - DNA, 13 bp, Artificial Sequence
  Oligonucleotide for detection of SNP TSC0013706
raacctaactacg

SEQ ID NO: 47857 - DNA, 13 bp, Artificial Sequence
  Oligonucleotide for detection of SNP TSC0013706
cgtagtaaggtty

SEQ ID NO: 47858 - DNA, 13 bp, Artificial Sequence
  Oligonucleotide for detection of SNP TSC0013706
raaccttactacg

SEQ ID NO: 47859 - DNA, 13 bp, Artificial Sequence
  Oligonucleotide for detection of SNP TSC0013707
atggattggttay

SEQ ID NO: 47860 - DNA, 13 bp, Artificial Sequence
  Oligonucleotide for detection of SNP TSC0013707
rtaaccaatccat

SEQ ID NO: 47861 - DNA, 13 bp, Artificial Sequence
  Oligonucleotide for detection of SNP TSC0013707
atggatcggttay

SEQ ID NO: 47862 - DNA, 13 bp, Artificial Sequence
  Oligonucleotide for detection of SNP TSC0013707
rtaaccgatccat

SEQ ID NO: 47863 - DNA, 13 bp, Artificial Sequence
  Oligonucleotide for detection of SNP TSC0013707
gtagttggtttat

SEQ ID NO: 47864 - DNA, 13 bp, Artificial Sequence
  Oligonucleotide for detection of SNP TSC0013707
ataaaccaactac

SEQ ID NO: 47865 - DNA, 13 bp, Artificial Sequence
  Oligonucleotide for detection of SNP TSC0013707
gtagttagtttat

SEQ ID NO: 47866 - DNA, 13 bp, Artificial Sequence
  Oligonucleotide for detection of SNP TSC0013707
ataaactaactac

SEQ ID NO: 47867 - DNA, 13 bp, Artificial Sequence
  Oligonucleotide for detection of SNP TSC0013707
gtagtcggtttat

SEQ ID NO: 47868 - DNA, 13 bp, Artificial Sequence
  Oligonucleotide for detection of SNP TSC0013707
ataaaccgactac

SEQ ID NO: 47869 - DNA, 13 bp, Artificial Sequence
  Oligonucleotide for detection of SNP TSC0013710
gttgtgggtttga

SEQ ID NO: 47870 - DNA, 13 bp, Artificial Sequence
  Oligonucleotide for detection of SNP TSC0013710
tcaaacccacaac

SEQ ID NO: 47871 - DNA, 13 bp, Artificial Sequence
  Oligonucleotide for detection of SNP TSC0013710
gttgtgtgtttga

SEQ ID NO: 47872 - DNA, 13 bp, Artificial Sequence
  Oligonucleotide for detection of SNP TSC0013710
tcaaacacacaac

SEQ ID NO: 47873 - DNA, 13 bp, Artificial Sequence
  Oligonucleotide for detection of SNP TSC0013710
gtcgtgggtttga

SEQ ID NO: 47874 - DNA, 13 bp, Artificial Sequence
  Oligonucleotide for detection of SNP TSC0013710
tcaaacccacgac

SEQ ID NO: 47875 - DNA, 13 bp, Artificial Sequence
  Oligonucleotide for detection of SNP TSC0013710
gtcgtgtgtttga

SEQ ID NO: 47876 - DNA, 13 bp, Artificial Sequence
  Oligonucleotide for detection of SNP TSC0013710
tcaaacacacgac

SEQ ID NO: 47877 - DNA, 13 bp, Artificial Sequence
  Oligonucleotide for detection of SNP TSC0013710
ttaggtttatgay

SEQ ID NO: 47878 - DNA, 13 bp, Artificial Sequence
  Oligonucleotide for detection of SNP TSC0013710
rtcataaacctaa

SEQ ID NO: 47879 - DNA, 13 bp, Artificial Sequence
  Oligonucleotide for detection of SNP TSC0013710
ttaggtatatgay

SEQ ID NO: 47880 - DNA, 13 bp, Artificial Sequence
  Oligonucleotide for detection of SNP TSC0013710
rtcatatacctaa

SEQ ID NO: 47881 - DNA, 13 bp, Artificial Sequence
  Oligonucleotide for detection of SNP TSC0013710
ttaggtttacgay

SEQ ID NO: 47882 - DNA, 13 bp, Artificial Sequence
  Oligonucleotide for detection of SNP TSC0013710
rtcgtaaacctaa

SEQ ID NO: 47883 - DNA, 13 bp, Artificial Sequence
  Oligonucleotide for detection of SNP TSC0013710
ttaggtatacgay

SEQ ID NO: 47884 - DNA, 13 bp, Artificial Sequence
  Oligonucleotide for detection of SNP TSC0013710
rtcgtatacctaa

SEQ ID NO: 47885 - DNA, 13 bp, Artificial Sequence
  Oligonucleotide for detection of SNP TSC0013711
gtaataatttaaa

SEQ ID NO: 47886 - DNA, 13 bp, Artificial Sequence
  Oligonucleotide for detection of SNP TSC0013711
tttaaattattac

SEQ ID NO: 47887 - DNA, 13 bp, Artificial Sequence
  Oligonucleotide for detection of SNP TSC0013711
gtaatagtttaaa

SEQ ID NO: 47888 - DNA, 13 bp, Artificial Sequence
  Oligonucleotide for detection of SNP TSC0013711
tttaaactattac

SEQ ID NO: 47889 - DNA, 13 bp, Artificial Sequence
  Oligonucleotide for detection of SNP TSC0013712
aggataggtttta

SEQ ID NO: 47890 - DNA, 13 bp, Artificial Sequence
  Oligonucleotide for detection of SNP TSC0013712
taaaacctatcct

SEQ ID NO: 47891 - DNA, 13 bp, Artificial Sequence
  Oligonucleotide for detection of SNP TSC0013712
aggataagtttta

SEQ ID NO: 47892 - DNA, 13 bp, Artificial Sequence
  Oligonucleotide for detection of SNP TSC0013712
taaaacttatcct

SEQ ID NO: 47893 - DNA, 13 bp, Artificial Sequence
  Oligonucleotide for detection of SNP TSC0013713
gttttttggaaty

SEQ ID NO: 47894 - DNA, 13 bp, Artificial Sequence
  Oligonucleotide for detection of SNP TSC0013713
rattccaaaaaac

SEQ ID NO: 47895 - DNA, 13 bp, Artificial Sequence
  Oligonucleotide for detection of SNP TSC0013713
gtttttcggaaty

SEQ ID NO: 47896 - DNA, 13 bp, Artificial Sequence
  Oligonucleotide for detection of SNP TSC0013713
rattccgaaaaac

SEQ ID NO: 47897 - DNA, 13 bp, Artificial Sequence
  Oligonucleotide for detection of SNP TSC0013714
gttttaataggtt

SEQ ID NO: 47898 - DNA, 13 bp, Artificial Sequence
  Oligonucleotide for detection of SNP TSC0013714
aacctattaaaac

SEQ ID NO: 47899 - DNA, 13 bp, Artificial Sequence
  Oligonucleotide for detection of SNP TSC0013714
gttttagtaggtt

SEQ ID NO: 47900 - DNA, 13 bp, Artificial Sequence
  Oligonucleotide for detection of SNP TSC0013714
aacctactaaaac

SEQ ID NO: 47901 - DNA, 13 bp, Artificial Sequence
  Oligonucleotide for detection of SNP TSC0013715
ttgtttttattaa

SEQ ID NO: 47902 - DNA, 13 bp, Artificial Sequence
  Oligonucleotide for detection of SNP TSC0013715
ttaataaaaacaa

SEQ ID NO: 47903 - DNA, 13 bp, Artificial Sequence
  Oligonucleotide for detection of SNP TSC0013715
tcgtttatattaa

SEQ ID NO: 47904 - DNA, 13 bp, Artificial Sequence
  Oligonucleotide for detection of SNP TSC0013715
ttaatataaacga

SEQ ID NO: 47905 - DNA, 13 bp, Artificial Sequence
  Oligonucleotide for detection of SNP TSC0013715
tcgtttttattaa

SEQ ID NO: 47906 - DNA, 13 bp, Artificial Sequence
  Oligonucleotide for detection of SNP TSC0013715
ttaataaaaacga

SEQ ID NO: 47907 - DNA, 13 bp, Artificial Sequence
  Oligonucleotide for detection of SNP TSC0013715
ttgatataggtgg

SEQ ID NO: 47908 - DNA, 13 bp, Artificial Sequence
  Oligonucleotide for detection of SNP TSC0013715
ccacctatatcaa

SEQ ID NO: 47909 - DNA, 13 bp, Artificial Sequence
  Oligonucleotide for detection of SNP TSC0013715
ttgataaaggtgg

SEQ ID NO: 47910 - DNA, 13 bp, Artificial Sequence
  Oligonucleotide for detection of SNP TSC0013715
ccacctttatcaa

SEQ ID NO: 47911 - DNA, 13 bp, Artificial Sequence
  Oligonucleotide for detection of SNP TSC0013715
ttgatataggcgg

SEQ ID NO: 47912 - DNA, 13 bp, Artificial Sequence
  Oligonucleotide for detection of SNP TSC0013715
ccgcctatatcaa

SEQ ID NO: 47913 - DNA, 13 bp, Artificial Sequence
  Oligonucleotide for detection of SNP TSC0013715
ttgataaaggcgg

SEQ ID NO: 47914 - DNA, 13 bp, Artificial Sequence
  Oligonucleotide for detection of SNP TSC0013715
ccgcctttatcaa

SEQ ID NO: 47915 - DNA, 13 bp, Artificial Sequence
  Oligonucleotide for detection of SNP TSC0013716
tttattttaggag

SEQ ID NO: 47916 - DNA, 13 bp, Artificial Sequence
  Oligonucleotide for detection of SNP TSC0013716
ctcctaaaataaa

SEQ ID NO: 47917 - DNA, 13 bp, Artificial Sequence
  Oligonucleotide for detection of SNP TSC0013716
tttattgtaggag

SEQ ID NO: 47918 - DNA, 13 bp, Artificial Sequence
  Oligonucleotide for detection of SNP TSC0013716
ctcctacaataaa

SEQ ID NO: 47919 - DNA, 13 bp, Artificial Sequence
  Oligonucleotide for detection of SNP TSC0013716
tttttagagtgag

SEQ ID NO: 47920 - DNA, 13 bp, Artificial Sequence
  Oligonucleotide for detection of SNP TSC0013716
ctcactctaaaaa

SEQ ID NO: 47921 - DNA, 13 bp, Artificial Sequence
  Oligonucleotide for detection of SNP TSC0013716
tttttatagtgag

SEQ ID NO: 47922 - DNA, 13 bp, Artificial Sequence
  Oligonucleotide for detection of SNP TSC0013716
ctcactataaaaa

SEQ ID NO: 47923 - DNA, 13 bp, Artificial Sequence
  Oligonucleotide for detection of SNP TSC0013717
aggagaagaaatg

SEQ ID NO: 47924 - DNA, 13 bp, Artificial Sequence
  Oligonucleotide for detection of SNP TSC0013717
catttcttctcct

SEQ ID NO: 47925 - DNA, 13 bp, Artificial Sequence
  Oligonucleotide for detection of SNP TSC0013717
aggagaggaaatg

SEQ ID NO: 47926 - DNA, 13 bp, Artificial Sequence
  Oligonucleotide for detection of SNP TSC0013717
catttcctctcct

SEQ ID NO: 47927 - DNA, 13 bp, Artificial Sequence
  Oligonucleotide for detection of SNP TSC0013721
ttttgtggttttt

SEQ ID NO: 47928 - DNA, 13 bp, Artificial Sequence
  Oligonucleotide for detection of SNP TSC0013721
aaaaaccacaaaa

SEQ ID NO: 47929 - DNA, 13 bp, Artificial Sequence
  Oligonucleotide for detection of SNP TSC0013721
ttttgtagttttt

SEQ ID NO: 47930 - DNA, 13 bp, Artificial Sequence
  Oligonucleotide for detection of SNP TSC0013721
aaaaactacaaaa

SEQ ID NO: 47931 - DNA, 13 bp, Artificial Sequence
  Oligonucleotide for detection of SNP TSC0013722
tttatatagagag

SEQ ID NO: 47932 - DNA, 13 bp, Artificial Sequence
  Oligonucleotide for detection of SNP TSC0013722
ctctctatataaa

SEQ ID NO: 47933 - DNA, 13 bp, Artificial Sequence
  Oligonucleotide for detection of SNP TSC0013722
tttatagagagag

SEQ ID NO: 47934 - DNA, 13 bp, Artificial Sequence
  Oligonucleotide for detection of SNP TSC0013722
ctctctctataaa

SEQ ID NO: 47935 - DNA, 13 bp, Artificial Sequence
  Oligonucleotide for detection of SNP TSC0013722
ttttttgtgtgag

SEQ ID NO: 47936 - DNA, 13 bp, Artificial Sequence
  Oligonucleotide for detection of SNP TSC0013722
ctcacacaaaaaa

SEQ ID NO: 47937 - DNA, 13 bp, Artificial Sequence
  Oligonucleotide for detection of SNP TSC0013722
ttttttttgtgag

SEQ ID NO: 47938 - DNA, 13 bp, Artificial Sequence
  Oligonucleotide for detection of SNP TSC0013722
ctcacaaaaaaaa

SEQ ID NO: 47939 - DNA, 13 bp, Artificial Sequence
  Oligonucleotide for detection of SNP TSC0013725
gtaagaaggatgy

SEQ ID NO: 47940 - DNA, 13 bp, Artificial Sequence
  Oligonucleotide for detection of SNP TSC0013725
rcatccttcttac

SEQ ID NO: 47941 - DNA, 13 bp, Artificial Sequence
  Oligonucleotide for detection of SNP TSC0013725
gtaagatggatgy

SEQ ID NO: 47942 - DNA, 13 bp, Artificial Sequence
  Oligonucleotide for detection of SNP TSC0013725
rcatccatcttac

SEQ ID NO: 47943 - DNA, 13 bp, Artificial Sequence
  Oligonucleotide for detection of SNP TSC0013725
gtaagacggatgy

SEQ ID NO: 47944 - DNA, 13 bp, Artificial Sequence
  Oligonucleotide for detection of SNP TSC0013725
rcatccgtcttac

SEQ ID NO: 47945 - DNA, 13 bp, Artificial Sequence
  Oligonucleotide for detection of SNP TSC0013725
gtattttttttgy

SEQ ID NO: 47946 - DNA, 13 bp, Artificial Sequence
  Oligonucleotide for detection of SNP TSC0013725
rcaaaaaaaatac

SEQ ID NO: 47947 - DNA, 13 bp, Artificial Sequence
  Oligonucleotide for detection of SNP TSC0013725
gtatttgttttgy

SEQ ID NO: 47948 - DNA, 13 bp, Artificial Sequence
  Oligonucleotide for detection of SNP TSC0013725
rcaaaacaaatac

SEQ ID NO: 47949 - DNA, 13 bp, Artificial Sequence
  Oligonucleotide for detection of SNP TSC0013725
gtattcgttttgy

SEQ ID NO: 47950 - DNA, 13 bp, Artificial Sequence
  Oligonucleotide for detection of SNP TSC0013725
rcaaaacgaatac

SEQ ID NO: 47951 - DNA, 13 bp, Artificial Sequence
  Oligonucleotide for detection of SNP TSC0013726
atgtttagttaat

SEQ ID NO: 47952 - DNA, 13 bp, Artificial Sequence
  Oligonucleotide for detection of SNP TSC0013726
attaactaaacat

SEQ ID NO: 47953 - DNA, 13 bp, Artificial Sequence
  Oligonucleotide for detection of SNP TSC0013726
atgtttggttaat

SEQ ID NO: 47954 - DNA, 13 bp, Artificial Sequence
  Oligonucleotide for detection of SNP TSC0013726
attaaccaaacat

SEQ ID NO: 47955 - DNA, 13 bp, Artificial Sequence
  Oligonucleotide for detection of SNP TSC0013726
atgttcggttaat

SEQ ID NO: 47956 - DNA, 13 bp, Artificial Sequence
  Oligonucleotide for detection of SNP TSC0013726
attaaccgaacat

SEQ ID NO: 47957 - DNA, 13 bp, Artificial Sequence
  Oligonucleotide for detection of SNP TSC0013726
attagttgggtat

SEQ ID NO: 47958 - DNA, 13 bp, Artificial Sequence
  Oligonucleotide for detection of SNP TSC0013726
atacccaactaat

SEQ ID NO: 47959 - DNA, 13 bp, Artificial Sequence
  Oligonucleotide for detection of SNP TSC0013726
attagtcgggtat

SEQ ID NO: 47960 - DNA, 13 bp, Artificial Sequence
  Oligonucleotide for detection of SNP TSC0013726
atacccgactaat

SEQ ID NO: 47961 - DNA, 13 bp, Artificial Sequence
  Oligonucleotide for detection of SNP TSC0013727
tgtttttggttta

SEQ ID NO: 47962 - DNA, 13 bp, Artificial Sequence
  Oligonucleotide for detection of SNP TSC0013727
taaaccaaaaaca

SEQ ID NO: 47963 - DNA, 13 bp, Artificial Sequence
  Oligonucleotide for detection of SNP TSC0013727
tgttttcggttta

SEQ ID NO: 47964 - DNA, 13 bp, Artificial Sequence
  Oligonucleotide for detection of SNP TSC0013727
taaaccgaaaaca

SEQ ID NO: 47965 - DNA, 13 bp, Artificial Sequence
  Oligonucleotide for detection of SNP TSC0013727
tgggttgggagta

SEQ ID NO: 47966 - DNA, 13 bp, Artificial Sequence
  Oligonucleotide for detection of SNP TSC0013727
tactcccaaccca

SEQ ID NO: 47967 - DNA, 13 bp, Artificial Sequence
  Oligonucleotide for detection of SNP TSC0013727
tgggttaggagta

SEQ ID NO: 47968 - DNA, 13 bp, Artificial Sequence
  Oligonucleotide for detection of SNP TSC0013727
tactcctaaccca

SEQ ID NO: 47969 - DNA, 13 bp, Artificial Sequence
  Oligonucleotide for detection of SNP TSC0013727
tgggtcgggagta

SEQ ID NO: 47970 - DNA, 13 bp, Artificial Sequence
  Oligonucleotide for detection of SNP TSC0013727
tactcccgaccca

SEQ ID NO: 47971 - DNA, 13 bp, Artificial Sequence
  Oligonucleotide for detection of SNP TSC0013728
gttaaatgtttty

SEQ ID NO: 47972 - DNA, 13 bp, Artificial Sequence
  Oligonucleotide for detection of SNP TSC0013728
raaaacatttaac

SEQ ID NO: 47973 - DNA, 13 bp, Artificial Sequence
  Oligonucleotide for detection of SNP TSC0013728
gttaaacgtttty

SEQ ID NO: 47974 - DNA, 13 bp, Artificial Sequence
  Oligonucleotide for detection of SNP TSC0013728
raaaacgtttaac

SEQ ID NO: 47975 - DNA, 13 bp, Artificial Sequence
  Oligonucleotide for detection of SNP TSC0013728
ggaagtgtttggy

SEQ ID NO: 47976 - DNA, 13 bp, Artificial Sequence
  Oligonucleotide for detection of SNP TSC0013728
rccaaacacttcc

SEQ ID NO: 47977 - DNA, 13 bp, Artificial Sequence
  Oligonucleotide for detection of SNP TSC0013728
ggaagtatttggy

SEQ ID NO: 47978 - DNA, 13 bp, Artificial Sequence
  Oligonucleotide for detection of SNP TSC0013728
rccaaatacttcc

SEQ ID NO: 47979 - DNA, 13 bp, Artificial Sequence
  Oligonucleotide for detection of SNP TSC0013728
ggaagcgtttggy

SEQ ID NO: 47980 - DNA, 13 bp, Artificial Sequence
  Oligonucleotide for detection of SNP TSC0013728
rccaaacgcttcc

SEQ ID NO: 47981 - DNA, 13 bp, Artificial Sequence
  Oligonucleotide for detection of SNP TSC0013729
ttatatagtttty

SEQ ID NO: 47982 - DNA, 13 bp, Artificial Sequence
  Oligonucleotide for detection of SNP TSC0013729
raaaactatataa

SEQ ID NO: 47983 - DNA, 13 bp, Artificial Sequence
  Oligonucleotide for detection of SNP TSC0013729
ttatattgtttty

SEQ ID NO: 47984 - DNA, 13 bp, Artificial Sequence
  Oligonucleotide for detection of SNP TSC0013729
raaaacaatataa

SEQ ID NO: 47985 - DNA, 13 bp, Artificial Sequence
  Oligonucleotide for detection of SNP TSC0013729
ttatatcgtttty

SEQ ID NO: 47986 - DNA, 13 bp, Artificial Sequence
  Oligonucleotide for detection of SNP TSC0013729
raaaacgatataa

SEQ ID NO: 47987 - DNA, 13 bp, Artificial Sequence
  Oligonucleotide for detection of SNP TSC0013729
gaaaattgtgtga

SEQ ID NO: 47988 - DNA, 13 bp, Artificial Sequence
  Oligonucleotide for detection of SNP TSC0013729
tcacacaattttc

SEQ ID NO: 47989 - DNA, 13 bp, Artificial Sequence
  Oligonucleotide for detection of SNP TSC0013729
gaaaatggtgtga

SEQ ID NO: 47990 - DNA, 13 bp, Artificial Sequence
  Oligonucleotide for detection of SNP TSC0013729
tcacaccattttc

SEQ ID NO: 47991 - DNA, 13 bp, Artificial Sequence
  Oligonucleotide for detection of SNP TSC0013729
gaaaacggtgtga

SEQ ID NO: 47992 - DNA, 13 bp, Artificial Sequence
  Oligonucleotide for detection of SNP TSC0013729
tcacaccgttttc

SEQ ID NO: 47993 - DNA, 13 bp, Artificial Sequence
  Oligonucleotide for detection of SNP TSC0013731
ggttatggtttay

SEQ ID NO: 47994 - DNA, 13 bp, Artificial Sequence
  Oligonucleotide for detection of SNP TSC0013731
rtaaaccataacc

SEQ ID NO: 47995 - DNA, 13 bp, Artificial Sequence
  Oligonucleotide for detection of SNP TSC0013731
ggttatagtttay

SEQ ID NO: 47996 - DNA, 13 bp, Artificial Sequence
  Oligonucleotide for detection of SNP TSC0013731
rtaaactataacc

SEQ ID NO: 47997 - DNA, 13 bp, Artificial Sequence
  Oligonucleotide for detection of SNP TSC0013734
atgagatggtgag

SEQ ID NO: 47998 - DNA, 13 bp, Artificial Sequence
  Oligonucleotide for detection of SNP TSC0013734
ctcaccatctcat

SEQ ID NO: 47999 - DNA, 13 bp, Artificial Sequence
  Oligonucleotide for detection of SNP TSC0013734
atgagacggtgag

SEQ ID NO: 48000 - DNA, 13 bp, Artificial Sequence
  Oligonucleotide for detection of SNP TSC0013734
ctcaccgtctcat

SEQ ID NO: 48001 - DNA, 13 bp, Artificial Sequence
  Oligonucleotide for detection of SNP TSC0013735
ttgtttattggtg

SEQ ID NO: 48002 - DNA, 13 bp, Artificial Sequence
  Oligonucleotide for detection of SNP TSC0013735
caccaataaacaa

SEQ ID NO: 48003 - DNA, 13 bp, Artificial Sequence
  Oligonucleotide for detection of SNP TSC0013735
ttgtttgttggtg

SEQ ID NO: 48004 - DNA, 13 bp, Artificial Sequence
  Oligonucleotide for detection of SNP TSC0013735
caccaacaaacaa

SEQ ID NO: 48005 - DNA, 13 bp, Artificial Sequence
  Oligonucleotide for detection of SNP TSC0013735
ttgttcgttggtg

SEQ ID NO: 48006 - DNA, 13 bp, Artificial Sequence
  Oligonucleotide for detection of SNP TSC0013735
caccaacgaacaa

SEQ ID NO: 48007 - DNA, 13 bp, Artificial Sequence
  Oligonucleotide for detection of SNP TSC0013735
tattaatgggtag

SEQ ID NO: 48008 - DNA, 13 bp, Artificial Sequence
  Oligonucleotide for detection of SNP TSC0013735
ctacccattaata

SEQ ID NO: 48009 - DNA, 13 bp, Artificial Sequence
  Oligonucleotide for detection of SNP TSC0013735
tattaacgggtag

SEQ ID NO: 48010 - DNA, 13 bp, Artificial Sequence
  Oligonucleotide for detection of SNP TSC0013735
ctacccgttaata

SEQ ID NO: 48011 - DNA, 13 bp, Artificial Sequence
  Oligonucleotide for detection of SNP TSC0013737
gtattatggttgt

SEQ ID NO: 48012 - DNA, 13 bp, Artificial Sequence
  Oligonucleotide for detection of SNP TSC0013737
acaaccataatac

SEQ ID NO: 48013 - DNA, 13 bp, Artificial Sequence
  Oligonucleotide for detection of SNP TSC0013737
gtattacggttgt

SEQ ID NO: 48014 - DNA, 13 bp, Artificial Sequence
  Oligonucleotide for detection of SNP TSC0013737
acaaccgtaatac

SEQ ID NO: 48015 - DNA, 13 bp, Artificial Sequence
  Oligonucleotide for detection of SNP TSC0013737
atagttgtggtgy

SEQ ID NO: 48016 - DNA, 13 bp, Artificial Sequence
  Oligonucleotide for detection of SNP TSC0013737
rcaccacaactat

SEQ ID NO: 48017 - DNA, 13 bp, Artificial Sequence
  Oligonucleotide for detection of SNP TSC0013737
atagttatggtgy

SEQ ID NO: 48018 - DNA, 13 bp, Artificial Sequence
  Oligonucleotide for detection of SNP TSC0013737
rcaccataactat

SEQ ID NO: 48019 - DNA, 13 bp, Artificial Sequence
  Oligonucleotide for detection of SNP TSC0013737
atagtcgtggtgy

SEQ ID NO: 48020 - DNA, 13 bp, Artificial Sequence
  Oligonucleotide for detection of SNP TSC0013737
rcaccacgactat

SEQ ID NO: 48021 - DNA, 13 bp, Artificial Sequence
  Oligonucleotide for detection of SNP TSC0013738
atagtatttatta

SEQ ID NO: 48022 - DNA, 13 bp, Artificial Sequence
  Oligonucleotide for detection of SNP TSC0013738
taataaatactat

SEQ ID NO: 48023 - DNA, 13 bp, Artificial Sequence
  Oligonucleotide for detection of SNP TSC0013738
atagtagttatta

SEQ ID NO: 48024 - DNA, 13 bp, Artificial Sequence
  Oligonucleotide for detection of SNP TSC0013738
taataactactat

SEQ ID NO: 48025 - DNA, 13 bp, Artificial Sequence
  Oligonucleotide for detection of SNP TSC0013738
taataagtattat

SEQ ID NO: 48026 - DNA, 13 bp, Artificial Sequence
  Oligonucleotide for detection of SNP TSC0013738
ataatacttatta

SEQ ID NO: 48027 - DNA, 13 bp, Artificial Sequence
  Oligonucleotide for detection of SNP TSC0013738
taataattattat

SEQ ID NO: 48028 - DNA, 13 bp, Artificial Sequence
  Oligonucleotide for detection of SNP TSC0013738
ataataattatta

SEQ ID NO: 48029 - DNA, 13 bp, Artificial Sequence
  Oligonucleotide for detection of SNP TSC0013739
taattgtgtaagt

SEQ ID NO: 48030 - DNA, 13 bp, Artificial Sequence
  Oligonucleotide for detection of SNP TSC0013739
acttacacaatta

SEQ ID NO: 48031 - DNA, 13 bp, Artificial Sequence
  Oligonucleotide for detection of SNP TSC0013739
taattgcgtaagt

SEQ ID NO: 48032 - DNA, 13 bp, Artificial Sequence
  Oligonucleotide for detection of SNP TSC0013739
acttacgcaatta

SEQ ID NO: 48033 - DNA, 13 bp, Artificial Sequence
  Oligonucleotide for detection of SNP TSC0013739
atttatgtaattg

SEQ ID NO: 48034 - DNA, 13 bp, Artificial Sequence
  Oligonucleotide for detection of SNP TSC0013739
caattacataaat

SEQ ID NO: 48035 - DNA, 13 bp, Artificial Sequence
  Oligonucleotide for detection of SNP TSC0013739
atttatataattg

SEQ ID NO: 48036 - DNA, 13 bp, Artificial Sequence
  Oligonucleotide for detection of SNP TSC0013739
caattatataaat

SEQ ID NO: 48037 - DNA, 13 bp, Artificial Sequence
  Oligonucleotide for detection of SNP TSC0013739
atttacgtaattg

SEQ ID NO: 48038 - DNA, 13 bp, Artificial Sequence
  Oligonucleotide for detection of SNP TSC0013739
caattacgtaaat

SEQ ID NO: 48039 - DNA, 13 bp, Artificial Sequence
  Oligonucleotide for detection of SNP TSC0013740
tggggtatattty

SEQ ID NO: 48040 - DNA, 13 bp, Artificial Sequence
  Oligonucleotide for detection of SNP TSC0013740
raaatatacccca

SEQ ID NO: 48041 - DNA, 13 bp, Artificial Sequence
  Oligonucleotide for detection of SNP TSC0013740
tggggtgtattty

SEQ ID NO: 48042 - DNA, 13 bp, Artificial Sequence
  Oligonucleotide for detection of SNP TSC0013740
raaatacacccca

SEQ ID NO: 48043 - DNA, 13 bp, Artificial Sequence
  Oligonucleotide for detection of SNP TSC0013740
tggggcgtattty

SEQ ID NO: 48044 - DNA, 13 bp, Artificial Sequence
  Oligonucleotide for detection of SNP TSC0013740
raaatacgcccca

SEQ ID NO: 48045 - DNA, 13 bp, Artificial Sequence
  Oligonucleotide for detection of SNP TSC0013740
ggaatatgtttta

SEQ ID NO: 48046 - DNA, 13 bp, Artificial Sequence
  Oligonucleotide for detection of SNP TSC0013740
taaaacatattcc

SEQ ID NO: 48047 - DNA, 13 bp, Artificial Sequence
  Oligonucleotide for detection of SNP TSC0013740
ggaatacgtttta

SEQ ID NO: 48048 - DNA, 13 bp, Artificial Sequence
  Oligonucleotide for detection of SNP TSC0013740
taaaacgtattcc

SEQ ID NO: 48049 - DNA, 13 bp, Artificial Sequence
  Oligonucleotide for detection of SNP TSC0013741
ttaaatattggtt

SEQ ID NO: 48050 - DNA, 13 bp, Artificial Sequence
  Oligonucleotide for detection of SNP TSC0013741
aaccaatatttaa

SEQ ID NO: 48051 - DNA, 13 bp, Artificial Sequence
  Oligonucleotide for detection of SNP TSC0013741
ttaaatgttggtt

SEQ ID NO: 48052 - DNA, 13 bp, Artificial Sequence
  Oligonucleotide for detection of SNP TSC0013741
aaccaacatttaa

SEQ ID NO: 48053 - DNA, 13 bp, Artificial Sequence
  Oligonucleotide for detection of SNP TSC0013741
ttaaacgttggtt

SEQ ID NO: 48054 - DNA, 13 bp, Artificial Sequence
  Oligonucleotide for detection of SNP TSC0013741
aaccaacgtttaa

SEQ ID NO: 48055 - DNA, 13 bp, Artificial Sequence
  Oligonucleotide for detection of SNP TSC0013741
agttaatgtttaa

SEQ ID NO: 48056 - DNA, 13 bp, Artificial Sequence
  Oligonucleotide for detection of SNP TSC0013741
ttaaacattaact

SEQ ID NO: 48057 - DNA, 13 bp, Artificial Sequence
  Oligonucleotide for detection of SNP TSC0013741
agttaacgtttaa

SEQ ID NO: 48058 - DNA, 13 bp, Artificial Sequence
  Oligonucleotide for detection of SNP TSC0013741
ttaaacgttaact

SEQ ID NO: 48059 - DNA, 13 bp, Artificial Sequence
  Oligonucleotide for detection of SNP TSC0013742
tttagtattttgy

SEQ ID NO: 48060 - DNA, 13 bp, Artificial Sequence
  Oligonucleotide for detection of SNP TSC0013742
rcaaaatactaaa

SEQ ID NO: 48061 - DNA, 13 bp, Artificial Sequence
  Oligonucleotide for detection of SNP TSC0013742
tttagtgttttgy

SEQ ID NO: 48062 - DNA, 13 bp, Artificial Sequence
  Oligonucleotide for detection of SNP TSC0013742
rcaaaacactaaa

SEQ ID NO: 48063 - DNA, 13 bp, Artificial Sequence
  Oligonucleotide for detection of SNP TSC0013742
tttagcgttttgy

SEQ ID NO: 48064 - DNA, 13 bp, Artificial Sequence
  Oligonucleotide for detection of SNP TSC0013742
rcaaaacgctaaa

SEQ ID NO: 48065 - DNA, 13 bp, Artificial Sequence
  Oligonucleotide for detection of SNP TSC0013742
gtaaaatgttgaa

SEQ ID NO: 48066 - DNA, 13 bp, Artificial Sequence
  Oligonucleotide for detection of SNP TSC0013742
ttcaacattttac

SEQ ID NO: 48067 - DNA, 13 bp, Artificial Sequence
  Oligonucleotide for detection of SNP TSC0013742
gtaaaacgttgaa

SEQ ID NO: 48068 - DNA, 13 bp, Artificial Sequence
  Oligonucleotide for detection of SNP TSC0013742
ttcaacgttttac

SEQ ID NO: 48069 - DNA, 13 bp, Artificial Sequence
  Oligonucleotide for detection of SNP TSC0013745
tagtttgtaaagt

SEQ ID NO: 48070 - DNA, 13 bp, Artificial Sequence
  Oligonucleotide for detection of SNP TSC0013745
actttacaaacta

SEQ ID NO: 48071 - DNA, 13 bp, Artificial Sequence
  Oligonucleotide for detection of SNP TSC0013745
tagtttttaaagt

SEQ ID NO: 48072 - DNA, 13 bp, Artificial Sequence
  Oligonucleotide for detection of SNP TSC0013745
actttaaaaacta

SEQ ID NO: 48073 - DNA, 13 bp, Artificial Sequence
  Oligonucleotide for detection of SNP TSC0013745
tagttcgtaaagt

SEQ ID NO: 48074 - DNA, 13 bp, Artificial Sequence
  Oligonucleotide for detection of SNP TSC0013745
actttacgaacta

SEQ ID NO: 48075 - DNA, 13 bp, Artificial Sequence
  Oligonucleotide for detection of SNP TSC0013745
attttatgggtta

SEQ ID NO: 48076 - DNA, 13 bp, Artificial Sequence
  Oligonucleotide for detection of SNP TSC0013745
taacccataaaat

SEQ ID NO: 48077 - DNA, 13 bp, Artificial Sequence
  Oligonucleotide for detection of SNP TSC0013745
attttaagggtta

SEQ ID NO: 48078 - DNA, 13 bp, Artificial Sequence
  Oligonucleotide for detection of SNP TSC0013745
taacccttaaaat

SEQ ID NO: 48079 - DNA, 13 bp, Artificial Sequence
  Oligonucleotide for detection of SNP TSC0013745
attttacgggtta

SEQ ID NO: 48080 - DNA, 13 bp, Artificial Sequence
  Oligonucleotide for detection of SNP TSC0013745
taacccgtaaaat

SEQ ID NO: 48081 - DNA, 13 bp, Artificial Sequence
  Oligonucleotide for detection of SNP TSC0013746
ggtattatttaga

SEQ ID NO: 48082 - DNA, 13 bp, Artificial Sequence
  Oligonucleotide for detection of SNP TSC0013746
tctaaataatacc

SEQ ID NO: 48083 - DNA, 13 bp, Artificial Sequence
  Oligonucleotide for detection of SNP TSC0013746
ggtattgtttaga

SEQ ID NO: 48084 - DNA, 13 bp, Artificial Sequence
  Oligonucleotide for detection of SNP TSC0013746
tctaaacaatacc

SEQ ID NO: 48085 - DNA, 13 bp, Artificial Sequence
  Oligonucleotide for detection of SNP TSC0013746
ggtatcgtttaga

SEQ ID NO: 48086 - DNA, 13 bp, Artificial Sequence
  Oligonucleotide for detection of SNP TSC0013746
tctaaacgatacc

SEQ ID NO: 48087 - DNA, 13 bp, Artificial Sequence
  Oligonucleotide for detection of SNP TSC0013746
tttaaatgatgty

SEQ ID NO: 48088 - DNA, 13 bp, Artificial Sequence
  Oligonucleotide for detection of SNP TSC0013746
racatcatttaaa

SEQ ID NO: 48089 - DNA, 13 bp, Artificial Sequence
  Oligonucleotide for detection of SNP TSC0013746
tttaaacgatgty

SEQ ID NO: 48090 - DNA, 13 bp, Artificial Sequence
  Oligonucleotide for detection of SNP TSC0013746
racatcgtttaaa

SEQ ID NO: 48091 - DNA, 13 bp, Artificial Sequence
  Oligonucleotide for detection of SNP TSC0013747
agagaagtgttaa

SEQ ID NO: 48092 - DNA, 13 bp, Artificial Sequence
  Oligonucleotide for detection of SNP TSC0013747
ttaacacttctct

SEQ ID NO: 48093 - DNA, 13 bp, Artificial Sequence
  Oligonucleotide for detection of SNP TSC0013747
agagaattgttaa

SEQ ID NO: 48094 - DNA, 13 bp, Artificial Sequence
  Oligonucleotide for detection of SNP TSC0013747
ttaacaattctct

SEQ ID NO: 48095 - DNA, 13 bp, Artificial Sequence
  Oligonucleotide for detection of SNP TSC0013747
ttagtattttttt

SEQ ID NO: 48096 - DNA, 13 bp, Artificial Sequence
  Oligonucleotide for detection of SNP TSC0013747
aaaaaaatactaa

SEQ ID NO: 48097 - DNA, 13 bp, Artificial Sequence
  Oligonucleotide for detection of SNP TSC0013747
ttagtaatttttt

SEQ ID NO: 48098 - DNA, 13 bp, Artificial Sequence
  Oligonucleotide for detection of SNP TSC0013747
aaaaaattactaa

SEQ ID NO: 48099 - DNA, 13 bp, Artificial Sequence
  Oligonucleotide for detection of SNP TSC0013749
attgttttagatt

SEQ ID NO: 48100 - DNA, 13 bp, Artificial Sequence
  Oligonucleotide for detection of SNP TSC0013749
aatctaaaacaat

SEQ ID NO: 48101 - DNA, 13 bp, Artificial Sequence
  Oligonucleotide for detection of SNP TSC0013749
agtttggaatagt

SEQ ID NO: 48102 - DNA, 13 bp, Artificial Sequence
  Oligonucleotide for detection of SNP TSC0013749
actattccaaact

SEQ ID NO: 48103 - DNA, 13 bp, Artificial Sequence
  Oligonucleotide for detection of SNP TSC0013749
agtttgtaatagt

SEQ ID NO: 48104 - DNA, 13 bp, Artificial Sequence
  Oligonucleotide for detection of SNP TSC0013749
actattacaaact

SEQ ID NO: 48105 - DNA, 13 bp, Artificial Sequence
  Oligonucleotide for detection of SNP TSC0013750
tttatgttttttt

SEQ ID NO: 48106 - DNA, 13 bp, Artificial Sequence
  Oligonucleotide for detection of SNP TSC0013750
aaaaaaacataaa

SEQ ID NO: 48107 - DNA, 13 bp, Artificial Sequence
  Oligonucleotide for detection of SNP TSC0013750
aagagattatgag

SEQ ID NO: 48108 - DNA, 13 bp, Artificial Sequence
  Oligonucleotide for detection of SNP TSC0013750
ctcataatctctt

SEQ ID NO: 48109 - DNA, 13 bp, Artificial Sequence
  Oligonucleotide for detection of SNP TSC0013750
aagagagtatgag

SEQ ID NO: 48110 - DNA, 13 bp, Artificial Sequence
  Oligonucleotide for detection of SNP TSC0013750
ctcatactctctt

SEQ ID NO: 48111 - DNA, 13 bp, Artificial Sequence
  Oligonucleotide for detection of SNP TSC0013751
agtattgagttag

SEQ ID NO: 48112 - DNA, 13 bp, Artificial Sequence
  Oligonucleotide for detection of SNP TSC0013751
ctaactcaatact

SEQ ID NO: 48113 - DNA, 13 bp, Artificial Sequence
  Oligonucleotide for detection of SNP TSC0013751
agtattaagttag

SEQ ID NO: 48114 - DNA, 13 bp, Artificial Sequence
  Oligonucleotide for detection of SNP TSC0013751
ctaacttaatact

SEQ ID NO: 48115 - DNA, 13 bp, Artificial Sequence
  Oligonucleotide for detection of SNP TSC0013754
aaaaaaatttata

SEQ ID NO: 48116 - DNA, 13 bp, Artificial Sequence
  Oligonucleotide for detection of SNP TSC0013754
tataaattttttt

SEQ ID NO: 48117 - DNA, 13 bp, Artificial Sequence
  Oligonucleotide for detection of SNP TSC0013754
aaaaaattttata

SEQ ID NO: 48118 - DNA, 13 bp, Artificial Sequence
  Oligonucleotide for detection of SNP TSC0013754
tataaaatttttt

SEQ ID NO: 48119 - DNA, 13 bp, Artificial Sequence
  Oligonucleotide for detection of SNP TSC0013754
tgtaggttttttt

SEQ ID NO: 48120 - DNA, 13 bp, Artificial Sequence
  Oligonucleotide for detection of SNP TSC0013754
aaaaaaacctaca

SEQ ID NO: 48121 - DNA, 13 bp, Artificial Sequence
  Oligonucleotide for detection of SNP TSC0013754
tgtagggtttttt

SEQ ID NO: 48122 - DNA, 13 bp, Artificial Sequence
  Oligonucleotide for detection of SNP TSC0013754
aaaaaaccctaca

SEQ ID NO: 48123 - DNA, 13 bp, Artificial Sequence
  Oligonucleotide for detection of SNP TSC0013755
agattttgttgtt

SEQ ID NO: 48124 - DNA, 13 bp, Artificial Sequence
  Oligonucleotide for detection of SNP TSC0013755
aacaacaaaatct

SEQ ID NO: 48125 - DNA, 13 bp, Artificial Sequence
  Oligonucleotide for detection of SNP TSC0013755
agatttcgttgtt

SEQ ID NO: 48126 - DNA, 13 bp, Artificial Sequence
  Oligonucleotide for detection of SNP TSC0013755
aacaacgaaatct

SEQ ID NO: 48127 - DNA, 13 bp, Artificial Sequence
  Oligonucleotide for detection of SNP TSC0013755
agtaatgagattt

SEQ ID NO: 48128 - DNA, 13 bp, Artificial Sequence
  Oligonucleotide for detection of SNP TSC0013755
aaatctcattact

SEQ ID NO: 48129 - DNA, 13 bp, Artificial Sequence
  Oligonucleotide for detection of SNP TSC0013755
agtaataagattt

SEQ ID NO: 48130 - DNA, 13 bp, Artificial Sequence
  Oligonucleotide for detection of SNP TSC0013755
aaatcttattact

SEQ ID NO: 48131 - DNA, 13 bp, Artificial Sequence
  Oligonucleotide for detection of SNP TSC0013755
agtaacgagattt

SEQ ID NO: 48132 - DNA, 13 bp, Artificial Sequence
  Oligonucleotide for detection of SNP TSC0013755
aaatctcgttact

SEQ ID NO: 48133 - DNA, 13 bp, Artificial Sequence
  Oligonucleotide for detection of SNP TSC0013756
aaaatttggttty

SEQ ID NO: 48134 - DNA, 13 bp, Artificial Sequence
  Oligonucleotide for detection of SNP TSC0013756
raaaccaaatttt

SEQ ID NO: 48135 - DNA, 13 bp, Artificial Sequence
  Oligonucleotide for detection of SNP TSC0013756
aaaattcggttty

SEQ ID NO: 48136 - DNA, 13 bp, Artificial Sequence
  Oligonucleotide for detection of SNP TSC0013756
raaaccgaatttt

SEQ ID NO: 48137 - DNA, 13 bp, Artificial Sequence
  Oligonucleotide for detection of SNP TSC0013756
gagattgggtttt

SEQ ID NO: 48138 - DNA, 13 bp, Artificial Sequence
  Oligonucleotide for detection of SNP TSC0013756
aaaacccaatctc

SEQ ID NO: 48139 - DNA, 13 bp, Artificial Sequence
  Oligonucleotide for detection of SNP TSC0013756
gagattaggtttt

SEQ ID NO: 48140 - DNA, 13 bp, Artificial Sequence
  Oligonucleotide for detection of SNP TSC0013756
aaaacctaatctc

SEQ ID NO: 48141 - DNA, 13 bp, Artificial Sequence
  Oligonucleotide for detection of SNP TSC0013756
gagatcgggtttt

SEQ ID NO: 48142 - DNA, 13 bp, Artificial Sequence
  Oligonucleotide for detection of SNP TSC0013756
aaaacccgatctc

SEQ ID NO: 48143 - DNA, 13 bp, Artificial Sequence
  Oligonucleotide for detection of SNP TSC0013757
ttatttgtttgay

SEQ ID NO: 48144 - DNA, 13 bp, Artificial Sequence
  Oligonucleotide for detection of SNP TSC0013757
rtcaaacaaataa

SEQ ID NO: 48145 - DNA, 13 bp, Artificial Sequence
  Oligonucleotide for detection of SNP TSC0013757
ttatttatttgay

SEQ ID NO: 48146 - DNA, 13 bp, Artificial Sequence
  Oligonucleotide for detection of SNP TSC0013757
rtcaaataaataa

SEQ ID NO: 48147 - DNA, 13 bp, Artificial Sequence
  Oligonucleotide for detection of SNP TSC0013759
agatgaaaaatay

SEQ ID NO: 48148 - DNA, 13 bp, Artificial Sequence
  Oligonucleotide for detection of SNP TSC0013759
rtatttttcatct

SEQ ID NO: 48149 - DNA, 13 bp, Artificial Sequence
  Oligonucleotide for detection of SNP TSC0013759
agatgataaatay

SEQ ID NO: 48150 - DNA, 13 bp, Artificial Sequence
  Oligonucleotide for detection of SNP TSC0013759
rtatttatcatct

SEQ ID NO: 48151 - DNA, 13 bp, Artificial Sequence
  Oligonucleotide for detection of SNP TSC0013759
gtattttttattt

SEQ ID NO: 48152 - DNA, 13 bp, Artificial Sequence
  Oligonucleotide for detection of SNP TSC0013759
aaataaaaaatac

SEQ ID NO: 48153 - DNA, 13 bp, Artificial Sequence
  Oligonucleotide for detection of SNP TSC0013760
gtagattgtggty

SEQ ID NO: 48154 - DNA, 13 bp, Artificial Sequence
  Oligonucleotide for detection of SNP TSC0013760
raccacaatctac

SEQ ID NO: 48155 - DNA, 13 bp, Artificial Sequence
  Oligonucleotide for detection of SNP TSC0013760
gtagatcgtggty

SEQ ID NO: 48156 - DNA, 13 bp, Artificial Sequence
  Oligonucleotide for detection of SNP TSC0013760
raccacgatctac

SEQ ID NO: 48157 - DNA, 13 bp, Artificial Sequence
  Oligonucleotide for detection of SNP TSC0013760
gattatggtttgy

SEQ ID NO: 48158 - DNA, 13 bp, Artificial Sequence
  Oligonucleotide for detection of SNP TSC0013760
rcaaaccataatc

SEQ ID NO: 48159 - DNA, 13 bp, Artificial Sequence
  Oligonucleotide for detection of SNP TSC0013760
gattatagtttgy

SEQ ID NO: 48160 - DNA, 13 bp, Artificial Sequence
  Oligonucleotide for detection of SNP TSC0013760
rcaaactataatc

SEQ ID NO: 48161 - DNA, 13 bp, Artificial Sequence
  Oligonucleotide for detection of SNP TSC0013760
gattacggtttgy

SEQ ID NO: 48162 - DNA, 13 bp, Artificial Sequence
  Oligonucleotide for detection of SNP TSC0013760
rcaaaccgtaatc

SEQ ID NO: 48163 - DNA, 13 bp, Artificial Sequence
  Oligonucleotide for detection of SNP TSC0013761
ttttaggggatag

SEQ ID NO: 48164 - DNA, 13 bp, Artificial Sequence
  Oligonucleotide for detection of SNP TSC0013761
ctatcccctaaaa

SEQ ID NO: 48165 - DNA, 13 bp, Artificial Sequence
  Oligonucleotide for detection of SNP TSC0013761
ttttagaggatag

SEQ ID NO: 48166 - DNA, 13 bp, Artificial Sequence
  Oligonucleotide for detection of SNP TSC0013761
ctatcctctaaaa

SEQ ID NO: 48167 - DNA, 13 bp, Artificial Sequence
  Oligonucleotide for detection of SNP TSC0013762
aggtgtatgttay

SEQ ID NO: 48168 - DNA, 13 bp, Artificial Sequence
  Oligonucleotide for detection of SNP TSC0013762
rtaacatacacct

SEQ ID NO: 48169 - DNA, 13 bp, Artificial Sequence
  Oligonucleotide for detection of SNP TSC0013762
aggtgtgtgttay

SEQ ID NO: 48170 - DNA, 13 bp, Artificial Sequence
  Oligonucleotide for detection of SNP TSC0013762
rtaacacacacct

SEQ ID NO: 48171 - DNA, 13 bp, Artificial Sequence
  Oligonucleotide for detection of SNP TSC0013762
aggcgtatgttay

SEQ ID NO: 48172 - DNA, 13 bp, Artificial Sequence
  Oligonucleotide for detection of SNP TSC0013762
rtaacatacgcct

SEQ ID NO: 48173 - DNA, 13 bp, Artificial Sequence
  Oligonucleotide for detection of SNP TSC0013762
aggcgtgtgttay

SEQ ID NO: 48174 - DNA, 13 bp, Artificial Sequence
  Oligonucleotide for detection of SNP TSC0013762
rtaacacacgcct

SEQ ID NO: 48175 - DNA, 13 bp, Artificial Sequence
  Oligonucleotide for detection of SNP TSC0013762
aggtgtacgttay

SEQ ID NO: 48176 - DNA, 13 bp, Artificial Sequence
  Oligonucleotide for detection of SNP TSC0013762
rtaacgtacacct

SEQ ID NO: 48177 - DNA, 13 bp, Artificial Sequence
  Oligonucleotide for detection of SNP TSC0013762
aggtgcgtgttay

SEQ ID NO: 48178 - DNA, 13 bp, Artificial Sequence
  Oligonucleotide for detection of SNP TSC0013762
rtaacacgcacct

SEQ ID NO: 48179 - DNA, 13 bp, Artificial Sequence
  Oligonucleotide for detection of SNP TSC0013762
aggcgtacgttay

SEQ ID NO: 48180 - DNA, 13 bp, Artificial Sequence
  Oligonucleotide for detection of SNP TSC0013762
rtaacgtacgcct

SEQ ID NO: 48181 - DNA, 13 bp, Artificial Sequence
  Oligonucleotide for detection of SNP TSC0013762
aggtgtgcgttay

SEQ ID NO: 48182 - DNA, 13 bp, Artificial Sequence
  Oligonucleotide for detection of SNP TSC0013762
rtaacgcacacct

SEQ ID NO: 48183 - DNA, 13 bp, Artificial Sequence
  Oligonucleotide for detection of SNP TSC0013762
aggcgcgtgttay

SEQ ID NO: 48184 - DNA, 13 bp, Artificial Sequence
  Oligonucleotide for detection of SNP TSC0013762
rtaacacgcgcct

SEQ ID NO: 48185 - DNA, 13 bp, Artificial Sequence
  Oligonucleotide for detection of SNP TSC0013762
aggcgtgcgttay

SEQ ID NO: 48186 - DNA, 13 bp, Artificial Sequence
  Oligonucleotide for detection of SNP TSC0013762
rtaacgcacgcct

SEQ ID NO: 48187 - DNA, 13 bp, Artificial Sequence
  Oligonucleotide for detection of SNP TSC0013762
aggtgcgcgttay

SEQ ID NO: 48188 - DNA, 13 bp, Artificial Sequence
  Oligonucleotide for detection of SNP TSC0013762
rtaacgcgcacct

SEQ ID NO: 48189 - DNA, 13 bp, Artificial Sequence
  Oligonucleotide for detection of SNP TSC0013762
aggcgcgcgttay

SEQ ID NO: 48190 - DNA, 13 bp, Artificial Sequence
  Oligonucleotide for detection of SNP TSC0013762
rtaacgcgcgcct

SEQ ID NO: 48191 - DNA, 13 bp, Artificial Sequence
  Oligonucleotide for detection of SNP TSC0013762
gtggtgtgcgttt

SEQ ID NO: 48192 - DNA, 13 bp, Artificial Sequence
  Oligonucleotide for detection of SNP TSC0013762
aaacgcacaccac

SEQ ID NO: 48193 - DNA, 13 bp, Artificial Sequence
  Oligonucleotide for detection of SNP TSC0013762
gtggcgtgcgttt

SEQ ID NO: 48194 - DNA, 13 bp, Artificial Sequence
  Oligonucleotide for detection of SNP TSC0013762
aaacgcacgccac

SEQ ID NO: 48195 - DNA, 13 bp, Artificial Sequence
  Oligonucleotide for detection of SNP TSC0013762
gtggtgcgcgttt

SEQ ID NO: 48196 - DNA, 13 bp, Artificial Sequence
  Oligonucleotide for detection of SNP TSC0013762
aaacgcgcaccac

SEQ ID NO: 48197 - DNA, 13 bp, Artificial Sequence
  Oligonucleotide for detection of SNP TSC0013762
gtggcgcgcgttt

SEQ ID NO: 48198 - DNA, 13 bp, Artificial Sequence
  Oligonucleotide for detection of SNP TSC0013762
aaacgcgcgccac

SEQ ID NO: 48199 - DNA, 13 bp, Artificial Sequence
  Oligonucleotide for detection of SNP TSC0013763
aatgtgattttty

SEQ ID NO: 48200 - DNA, 13 bp, Artificial Sequence
  Oligonucleotide for detection of SNP TSC0013763
raaaaatcacatt

SEQ ID NO: 48201 - DNA, 13 bp, Artificial Sequence
  Oligonucleotide for detection of SNP TSC0013763
aatgtgtttttty

SEQ ID NO: 48202 - DNA, 13 bp, Artificial Sequence
  Oligonucleotide for detection of SNP TSC0013763
raaaaaacacatt

SEQ ID NO: 48203 - DNA, 13 bp, Artificial Sequence
  Oligonucleotide for detection of SNP TSC0013763
ggaaaattatatt

SEQ ID NO: 48204 - DNA, 13 bp, Artificial Sequence
  Oligonucleotide for detection of SNP TSC0013763
aatataattttcc

SEQ ID NO: 48205 - DNA, 13 bp, Artificial Sequence
  Oligonucleotide for detection of SNP TSC0013763
ggaaaaatatatt

SEQ ID NO: 48206 - DNA, 13 bp, Artificial Sequence
  Oligonucleotide for detection of SNP TSC0013763
aatatatttttcc

SEQ ID NO: 48207 - DNA, 13 bp, Artificial Sequence
  Oligonucleotide for detection of SNP TSC0013764
tttattgtggtgg

SEQ ID NO: 48208 - DNA, 13 bp, Artificial Sequence
  Oligonucleotide for detection of SNP TSC0013764
ccaccacaataaa

SEQ ID NO: 48209 - DNA, 13 bp, Artificial Sequence
  Oligonucleotide for detection of SNP TSC0013764
tttattatggtgg

SEQ ID NO: 48210 - DNA, 13 bp, Artificial Sequence
  Oligonucleotide for detection of SNP TSC0013764
ccaccataataaa

SEQ ID NO: 48211 - DNA, 13 bp, Artificial Sequence
  Oligonucleotide for detection of SNP TSC0013764
tttattgtggcgg

SEQ ID NO: 48212 - DNA, 13 bp, Artificial Sequence
  Oligonucleotide for detection of SNP TSC0013764
ccgccacaataaa

SEQ ID NO: 48213 - DNA, 13 bp, Artificial Sequence
  Oligonucleotide for detection of SNP TSC0013764
tttattatggcgg

SEQ ID NO: 48214 - DNA, 13 bp, Artificial Sequence
  Oligonucleotide for detection of SNP TSC0013764
ccgccataataaa

SEQ ID NO: 48215 - DNA, 13 bp, Artificial Sequence
  Oligonucleotide for detection of SNP TSC0013765
agtgaaaaagaaa

SEQ ID NO: 48216 - DNA, 13 bp, Artificial Sequence
  Oligonucleotide for detection of SNP TSC0013765
tttctttttcact

SEQ ID NO: 48217 - DNA, 13 bp, Artificial Sequence
  Oligonucleotide for detection of SNP TSC0013765
agtgaataagaaa

SEQ ID NO: 48218 - DNA, 13 bp, Artificial Sequence
  Oligonucleotide for detection of SNP TSC0013765
tttcttattcact

SEQ ID NO: 48219 - DNA, 13 bp, Artificial Sequence
  Oligonucleotide for detection of SNP TSC0013768
aggggtagatgta

SEQ ID NO: 48220 - DNA, 13 bp, Artificial Sequence
  Oligonucleotide for detection of SNP TSC0013768
tacatctacccct

SEQ ID NO: 48221 - DNA, 13 bp, Artificial Sequence
  Oligonucleotide for detection of SNP TSC0013768
aggggttgatgta

SEQ ID NO: 48222 - DNA, 13 bp, Artificial Sequence
  Oligonucleotide for detection of SNP TSC0013768
tacatcaacccct

SEQ ID NO: 48223 - DNA, 13 bp, Artificial Sequence
  Oligonucleotide for detection of SNP TSC0013768
tgtattagttttt

SEQ ID NO: 48224 - DNA, 13 bp, Artificial Sequence
  Oligonucleotide for detection of SNP TSC0013768
aaaaactaataca

SEQ ID NO: 48225 - DNA, 13 bp, Artificial Sequence
  Oligonucleotide for detection of SNP TSC0013769
gtaggtataattt

SEQ ID NO: 48226 - DNA, 13 bp, Artificial Sequence
  Oligonucleotide for detection of SNP TSC0013769
aaattatacctac

SEQ ID NO: 48227 - DNA, 13 bp, Artificial Sequence
  Oligonucleotide for detection of SNP TSC0013769
gtaggtgtaattt

SEQ ID NO: 48228 - DNA, 13 bp, Artificial Sequence
  Oligonucleotide for detection of SNP TSC0013769
aaattacacctac

SEQ ID NO: 48229 - DNA, 13 bp, Artificial Sequence
  Oligonucleotide for detection of SNP TSC0013769
gtaggcgtaattt

SEQ ID NO: 48230 - DNA, 13 bp, Artificial Sequence
  Oligonucleotide for detection of SNP TSC0013769
aaattacgcctac

SEQ ID NO: 48231 - DNA, 13 bp, Artificial Sequence
  Oligonucleotide for detection of SNP TSC0013769
agattgtgtttgy

SEQ ID NO: 48232 - DNA, 13 bp, Artificial Sequence
  Oligonucleotide for detection of SNP TSC0013769
rcaaacacaatct

SEQ ID NO: 48233 - DNA, 13 bp, Artificial Sequence
  Oligonucleotide for detection of SNP TSC0013769
agattgcgtttgy

SEQ ID NO: 48234 - DNA, 13 bp, Artificial Sequence
  Oligonucleotide for detection of SNP TSC0013769
rcaaacgcaatct

SEQ ID NO: 48235 - DNA, 13 bp, Artificial Sequence
  Oligonucleotide for detection of SNP TSC0013770
gaaaggtggttty

SEQ ID NO: 48236 - DNA, 13 bp, Artificial Sequence
  Oligonucleotide for detection of SNP TSC0013770
raaaccacctttc

SEQ ID NO: 48237 - DNA, 13 bp, Artificial Sequence
  Oligonucleotide for detection of SNP TSC0013770
gaaaggcggttty

SEQ ID NO: 48238 - DNA, 13 bp, Artificial Sequence
  Oligonucleotide for detection of SNP TSC0013770
raaaccgcctttc

SEQ ID NO: 48239 - DNA, 13 bp, Artificial Sequence
  Oligonucleotide for detection of SNP TSC0013770
gaggttgttttty

SEQ ID NO: 48240 - DNA, 13 bp, Artificial Sequence
  Oligonucleotide for detection of SNP TSC0013770
raaaaacaacctc

SEQ ID NO: 48241 - DNA, 13 bp, Artificial Sequence
  Oligonucleotide for detection of SNP TSC0013770
gaggttattttty

SEQ ID NO: 48242 - DNA, 13 bp, Artificial Sequence
  Oligonucleotide for detection of SNP TSC0013770
raaaaataacctc

SEQ ID NO: 48243 - DNA, 13 bp, Artificial Sequence
  Oligonucleotide for detection of SNP TSC0013770
gaggtcgttttty

SEQ ID NO: 48244 - DNA, 13 bp, Artificial Sequence
  Oligonucleotide for detection of SNP TSC0013770
raaaaacgacctc

SEQ ID NO: 48245 - DNA, 13 bp, Artificial Sequence
  Oligonucleotide for detection of SNP TSC0013771
tagtttagtgtag

SEQ ID NO: 48246 - DNA, 13 bp, Artificial Sequence
  Oligonucleotide for detection of SNP TSC0013771
ctacactaaacta

SEQ ID NO: 48247 - DNA, 13 bp, Artificial Sequence
  Oligonucleotide for detection of SNP TSC0013771
tagtttggtgtag

SEQ ID NO: 48248 - DNA, 13 bp, Artificial Sequence
  Oligonucleotide for detection of SNP TSC0013771
ctacaccaaacta

SEQ ID NO: 48249 - DNA, 13 bp, Artificial Sequence
  Oligonucleotide for detection of SNP TSC0013771
tagttcggtgtag

SEQ ID NO: 48250 - DNA, 13 bp, Artificial Sequence
  Oligonucleotide for detection of SNP TSC0013771
ctacaccgaacta

SEQ ID NO: 48251 - DNA, 13 bp, Artificial Sequence
  Oligonucleotide for detection of SNP TSC0013771
ttatattgggttg

SEQ ID NO: 48252 - DNA, 13 bp, Artificial Sequence
  Oligonucleotide for detection of SNP TSC0013771
caacccaatataa

SEQ ID NO: 48253 - DNA, 13 bp, Artificial Sequence
  Oligonucleotide for detection of SNP TSC0013771
ttatatcgggttg

SEQ ID NO: 48254 - DNA, 13 bp, Artificial Sequence
  Oligonucleotide for detection of SNP TSC0013771
caacccgatataa

SEQ ID NO: 48255 - DNA, 13 bp, Artificial Sequence
  Oligonucleotide for detection of SNP TSC0013773
taggttataagty

SEQ ID NO: 48256 - DNA, 13 bp, Artificial Sequence
  Oligonucleotide for detection of SNP TSC0013773
racttataaccta

SEQ ID NO: 48257 - DNA, 13 bp, Artificial Sequence
  Oligonucleotide for detection of SNP TSC0013773
taggttgtaagty

SEQ ID NO: 48258 - DNA, 13 bp, Artificial Sequence
  Oligonucleotide for detection of SNP TSC0013773
racttacaaccta

SEQ ID NO: 48259 - DNA, 13 bp, Artificial Sequence
  Oligonucleotide for detection of SNP TSC0013773
taggtcgtaagty

SEQ ID NO: 48260 - DNA, 13 bp, Artificial Sequence
  Oligonucleotide for detection of SNP TSC0013773
racttacgaccta

SEQ ID NO: 48261 - DNA, 13 bp, Artificial Sequence
  Oligonucleotide for detection of SNP TSC0013773
ggtttatggttta

SEQ ID NO: 48262 - DNA, 13 bp, Artificial Sequence
  Oligonucleotide for detection of SNP TSC0013773
taaaccataaacc

SEQ ID NO: 48263 - DNA, 13 bp, Artificial Sequence
  Oligonucleotide for detection of SNP TSC0013773
ggtttacggttta

SEQ ID NO: 48264 - DNA, 13 bp, Artificial Sequence
  Oligonucleotide for detection of SNP TSC0013773
taaaccgtaaacc

SEQ ID NO: 48265 - DNA, 13 bp, Artificial Sequence
  Oligonucleotide for detection of SNP TSC0013774
aggataatttaga

SEQ ID NO: 48266 - DNA, 13 bp, Artificial Sequence
  Oligonucleotide for detection of SNP TSC0013774
tctaaattatcct

SEQ ID NO: 48267 - DNA, 13 bp, Artificial Sequence
  Oligonucleotide for detection of SNP TSC0013774
aggatagtttaga

SEQ ID NO: 48268 - DNA, 13 bp, Artificial Sequence
  Oligonucleotide for detection of SNP TSC0013774
tctaaactatcct

SEQ ID NO: 48269 - DNA, 13 bp, Artificial Sequence
  Oligonucleotide for detection of SNP TSC0013775
aggataattatgy

SEQ ID NO: 48270 - DNA, 13 bp, Artificial Sequence
  Oligonucleotide for detection of SNP TSC0013775
rcataattatcct

SEQ ID NO: 48271 - DNA, 13 bp, Artificial Sequence
  Oligonucleotide for detection of SNP TSC0013775
aggatagttatgy

SEQ ID NO: 48272 - DNA, 13 bp, Artificial Sequence
  Oligonucleotide for detection of SNP TSC0013775
rcataactatcct

SEQ ID NO: 48273 - DNA, 13 bp, Artificial Sequence
  Oligonucleotide for detection of SNP TSC0013776
agagttgtatgtt

SEQ ID NO: 48274 - DNA, 13 bp, Artificial Sequence
  Oligonucleotide for detection of SNP TSC0013776
aacatacaactct

SEQ ID NO: 48275 - DNA, 13 bp, Artificial Sequence
  Oligonucleotide for detection of SNP TSC0013776
agagttatatgtt

SEQ ID NO: 48276 - DNA, 13 bp, Artificial Sequence
  Oligonucleotide for detection of SNP TSC0013776
aacatataactct

SEQ ID NO: 48277 - DNA, 13 bp, Artificial Sequence
  Oligonucleotide for detection of SNP TSC0013778
atgtttggagata

SEQ ID NO: 48278 - DNA, 13 bp, Artificial Sequence
  Oligonucleotide for detection of SNP TSC0013778
tatctccaaacat

SEQ ID NO: 48279 - DNA, 13 bp, Artificial Sequence
  Oligonucleotide for detection of SNP TSC0013778
atgtttagagata

SEQ ID NO: 48280 - DNA, 13 bp, Artificial Sequence
  Oligonucleotide for detection of SNP TSC0013778
tatctctaaacat

SEQ ID NO: 48281 - DNA, 13 bp, Artificial Sequence
  Oligonucleotide for detection of SNP TSC0013778
atgttcggagata

SEQ ID NO: 48282 - DNA, 13 bp, Artificial Sequence
  Oligonucleotide for detection of SNP TSC0013778
tatctccgaacat

SEQ ID NO: 48283 - DNA, 13 bp, Artificial Sequence
  Oligonucleotide for detection of SNP TSC0013780
ttggatattgata

SEQ ID NO: 48284 - DNA, 13 bp, Artificial Sequence
  Oligonucleotide for detection of SNP TSC0013780
tatcaatatccaa

SEQ ID NO: 48285 - DNA, 13 bp, Artificial Sequence
  Oligonucleotide for detection of SNP TSC0013780
ttggatgttgata

SEQ ID NO: 48286 - DNA, 13 bp, Artificial Sequence
  Oligonucleotide for detection of SNP TSC0013780
tatcaacatccaa

SEQ ID NO: 48287 - DNA, 13 bp, Artificial Sequence
  Oligonucleotide for detection of SNP TSC0013780
tcggatattgata

SEQ ID NO: 48288 - DNA, 13 bp, Artificial Sequence
  Oligonucleotide for detection of SNP TSC0013780
tatcaatatccga

SEQ ID NO: 48289 - DNA, 13 bp, Artificial Sequence
  Oligonucleotide for detection of SNP TSC0013780
tcggatgttgata

SEQ ID NO: 48290 - DNA, 13 bp, Artificial Sequence
  Oligonucleotide for detection of SNP TSC0013780
tatcaacatccga

SEQ ID NO: 48291 - DNA, 13 bp, Artificial Sequence
  Oligonucleotide for detection of SNP TSC0013780
ttggatatcgata

SEQ ID NO: 48292 - DNA, 13 bp, Artificial Sequence
  Oligonucleotide for detection of SNP TSC0013780
tatcgatatccaa

SEQ ID NO: 48293 - DNA, 13 bp, Artificial Sequence
  Oligonucleotide for detection of SNP TSC0013780
ttggatgtcgata

SEQ ID NO: 48294 - DNA, 13 bp, Artificial Sequence
  Oligonucleotide for detection of SNP TSC0013780
tatcgacatccaa

SEQ ID NO: 48295 - DNA, 13 bp, Artificial Sequence
  Oligonucleotide for detection of SNP TSC0013780
tcggatatcgata

SEQ ID NO: 48296 - DNA, 13 bp, Artificial Sequence
  Oligonucleotide for detection of SNP TSC0013780
tatcgatatccga

SEQ ID NO: 48297 - DNA, 13 bp, Artificial Sequence
  Oligonucleotide for detection of SNP TSC0013780
tcggatgtcgata

SEQ ID NO: 48298 - DNA, 13 bp, Artificial Sequence
  Oligonucleotide for detection of SNP TSC0013780
tatcgacatccga

SEQ ID NO: 48299 - DNA, 13 bp, Artificial Sequence
  Oligonucleotide for detection of SNP TSC0013783
aagggtatatatg

SEQ ID NO: 48300 - DNA, 13 bp, Artificial Sequence
  Oligonucleotide for detection of SNP TSC0013783
catatataccctt

SEQ ID NO: 48301 - DNA, 13 bp, Artificial Sequence
  Oligonucleotide for detection of SNP TSC0013783
aagggtgtatatg

SEQ ID NO: 48302 - DNA, 13 bp, Artificial Sequence
  Oligonucleotide for detection of SNP TSC0013783
catatacaccctt

SEQ ID NO: 48303 - DNA, 13 bp, Artificial Sequence
  Oligonucleotide for detection of SNP TSC0013784
ttgagtatttatt

SEQ ID NO: 48304 - DNA, 13 bp, Artificial Sequence
  Oligonucleotide for detection of SNP TSC0013784
aataaatactcaa

SEQ ID NO: 48305 - DNA, 13 bp, Artificial Sequence
  Oligonucleotide for detection of SNP TSC0013784
ttgagtgtttatt

SEQ ID NO: 48306 - DNA, 13 bp, Artificial Sequence
  Oligonucleotide for detection of SNP TSC0013784
aataaacactcaa

SEQ ID NO: 48307 - DNA, 13 bp, Artificial Sequence
  Oligonucleotide for detection of SNP TSC0013784
ttgagcgtttatt

SEQ ID NO: 48308 - DNA, 13 bp, Artificial Sequence
  Oligonucleotide for detection of SNP TSC0013784
aataaacgctcaa

SEQ ID NO: 48309 - DNA, 13 bp, Artificial Sequence
  Oligonucleotide for detection of SNP TSC0013784
agtaaatgtttag

SEQ ID NO: 48310 - DNA, 13 bp, Artificial Sequence
  Oligonucleotide for detection of SNP TSC0013784
ctaaacatttact

SEQ ID NO: 48311 - DNA, 13 bp, Artificial Sequence
  Oligonucleotide for detection of SNP TSC0013784
agtaaacgtttag

SEQ ID NO: 48312 - DNA, 13 bp, Artificial Sequence
  Oligonucleotide for detection of SNP TSC0013784
ctaaacgtttact

SEQ ID NO: 48313 - DNA, 13 bp, Artificial Sequence
  Oligonucleotide for detection of SNP TSC0013785
ggaaaggatgggg

SEQ ID NO: 48314 - DNA, 13 bp, Artificial Sequence
  Oligonucleotide for detection of SNP TSC0013785
ccccatcctttcc

SEQ ID NO: 48315 - DNA, 13 bp, Artificial Sequence
  Oligonucleotide for detection of SNP TSC0013785
ggaaagaatgggg

SEQ ID NO: 48316 - DNA, 13 bp, Artificial Sequence
  Oligonucleotide for detection of SNP TSC0013785
ccccattctttcc

SEQ ID NO: 48317 - DNA, 13 bp, Artificial Sequence
  Oligonucleotide for detection of SNP TSC0013787
ttgttttgtgggg

SEQ ID NO: 48318 - DNA, 13 bp, Artificial Sequence
  Oligonucleotide for detection of SNP TSC0013787
ccccacaaaacaa

SEQ ID NO: 48319 - DNA, 13 bp, Artificial Sequence
  Oligonucleotide for detection of SNP TSC0013787
tcgttttgtgggg

SEQ ID NO: 48320 - DNA, 13 bp, Artificial Sequence
  Oligonucleotide for detection of SNP TSC0013787
ccccacaaaacga

SEQ ID NO: 48321 - DNA, 13 bp, Artificial Sequence
  Oligonucleotide for detection of SNP TSC0013787
ttgtttcgtgggg

SEQ ID NO: 48322 - DNA, 13 bp, Artificial Sequence
  Oligonucleotide for detection of SNP TSC0013787
ccccacgaaacaa

SEQ ID NO: 48323 - DNA, 13 bp, Artificial Sequence
  Oligonucleotide for detection of SNP TSC0013787
tcgtttcgtgggg

SEQ ID NO: 48324 - DNA, 13 bp, Artificial Sequence
  Oligonucleotide for detection of SNP TSC0013787
ccccacgaaacga

SEQ ID NO: 48325 - DNA, 13 bp, Artificial Sequence
  Oligonucleotide for detection of SNP TSC0013787
ttttatgaggtgg

SEQ ID NO: 48326 - DNA, 13 bp, Artificial Sequence
  Oligonucleotide for detection of SNP TSC0013787
ccacctcataaaa

SEQ ID NO: 48327 - DNA, 13 bp, Artificial Sequence
  Oligonucleotide for detection of SNP TSC0013787
ttttataaggtgg

SEQ ID NO: 48328 - DNA, 13 bp, Artificial Sequence
  Oligonucleotide for detection of SNP TSC0013787
ccaccttataaaa

SEQ ID NO: 48329 - DNA, 13 bp, Artificial Sequence
  Oligonucleotide for detection of SNP TSC0013787
ttttacgaggtgg

SEQ ID NO: 48330 - DNA, 13 bp, Artificial Sequence
  Oligonucleotide for detection of SNP TSC0013787
ccacctcgtaaaa

SEQ ID NO: 48331 - DNA, 13 bp, Artificial Sequence
  Oligonucleotide for detection of SNP TSC0013787
ttttataaggcgg

SEQ ID NO: 48332 - DNA, 13 bp, Artificial Sequence
  Oligonucleotide for detection of SNP TSC0013787
ccgccttataaaa

SEQ ID NO: 48333 - DNA, 13 bp, Artificial Sequence
  Oligonucleotide for detection of SNP TSC0013787
ttttatgaggcgg

SEQ ID NO: 48334 - DNA, 13 bp, Artificial Sequence
  Oligonucleotide for detection of SNP TSC0013787
ccgcctcataaaa

SEQ ID NO: 48335 - DNA, 13 bp, Artificial Sequence
  Oligonucleotide for detection of SNP TSC0013787
ttttacgaggcgg

SEQ ID NO: 48336 - DNA, 13 bp, Artificial Sequence
  Oligonucleotide for detection of SNP TSC0013787
ccgcctcgtaaaa

SEQ ID NO: 48337 - DNA, 13 bp, Artificial Sequence
  Oligonucleotide for detection of SNP TSC0013788
attaggaagaata

SEQ ID NO: 48338 - DNA, 13 bp, Artificial Sequence
  Oligonucleotide for detection of SNP TSC0013788
tattcttcctaat

SEQ ID NO: 48339 - DNA, 13 bp, Artificial Sequence
  Oligonucleotide for detection of SNP TSC0013788
attagggagaata

SEQ ID NO: 48340 - DNA, 13 bp, Artificial Sequence
  Oligonucleotide for detection of SNP TSC0013788
tattctccctaat

SEQ ID NO: 48341 - DNA, 13 bp, Artificial Sequence
  Oligonucleotide for detection of SNP TSC0013789
gaggatgatatta

SEQ ID NO: 48342 - DNA, 13 bp, Artificial Sequence
  Oligonucleotide for detection of SNP TSC0013789
taatatcatcctc

SEQ ID NO: 48343 - DNA, 13 bp, Artificial Sequence
  Oligonucleotide for detection of SNP TSC0013789
gaggataatatta

SEQ ID NO: 48344 - DNA, 13 bp, Artificial Sequence
  Oligonucleotide for detection of SNP TSC0013789
taatattatcctc

SEQ ID NO: 48345 - DNA, 13 bp, Artificial Sequence
  Oligonucleotide for detection of SNP TSC0013790
taatggagatgty

SEQ ID NO: 48346 - DNA, 13 bp, Artificial Sequence
  Oligonucleotide for detection of SNP TSC0013790
racatctccatta

SEQ ID NO: 48347 - DNA, 13 bp, Artificial Sequence
  Oligonucleotide for detection of SNP TSC0013790
taatggtgatgty

SEQ ID NO: 48348 - DNA, 13 bp, Artificial Sequence
  Oligonucleotide for detection of SNP TSC0013790
racatcaccatta

SEQ ID NO: 48349 - DNA, 13 bp, Artificial Sequence
  Oligonucleotide for detection of SNP TSC0013790
taacggagatgty

SEQ ID NO: 48350 - DNA, 13 bp, Artificial Sequence
  Oligonucleotide for detection of SNP TSC0013790
racatctccgtta

SEQ ID NO: 48351 - DNA, 13 bp, Artificial Sequence
  Oligonucleotide for detection of SNP TSC0013790
taacggtgatgty

SEQ ID NO: 48352 - DNA, 13 bp, Artificial Sequence
  Oligonucleotide for detection of SNP TSC0013790
racatcaccgtta

SEQ ID NO: 48353 - DNA, 13 bp, Artificial Sequence
  Oligonucleotide for detection of SNP TSC0013790
gatatttttgtta

SEQ ID NO: 48354 - DNA, 13 bp, Artificial Sequence
  Oligonucleotide for detection of SNP TSC0013790
taacaaaaatatc

SEQ ID NO: 48355 - DNA, 13 bp, Artificial Sequence
  Oligonucleotide for detection of SNP TSC0013790
gatattattgtta

SEQ ID NO: 48356 - DNA, 13 bp, Artificial Sequence
  Oligonucleotide for detection of SNP TSC0013790
taacaataatatc

SEQ ID NO: 48357 - DNA, 13 bp, Artificial Sequence
  Oligonucleotide for detection of SNP TSC0013790
gatattttcgtta

SEQ ID NO: 48358 - DNA, 13 bp, Artificial Sequence
  Oligonucleotide for detection of SNP TSC0013790
taacgaaaatatc

SEQ ID NO: 48359 - DNA, 13 bp, Artificial Sequence
  Oligonucleotide for detection of SNP TSC0013790
gatattatcgtta

SEQ ID NO: 48360 - DNA, 13 bp, Artificial Sequence
  Oligonucleotide for detection of SNP TSC0013790
taacgataatatc

SEQ ID NO: 48361 - DNA, 13 bp, Artificial Sequence
  Oligonucleotide for detection of SNP TSC0013794
ttagatgatttty

SEQ ID NO: 48362 - DNA, 13 bp, Artificial Sequence
  Oligonucleotide for detection of SNP TSC0013794
raaaatcatctaa

SEQ ID NO: 48363 - DNA, 13 bp, Artificial Sequence
  Oligonucleotide for detection of SNP TSC0013794
ttagataatttty

SEQ ID NO: 48364 - DNA, 13 bp, Artificial Sequence
  Oligonucleotide for detection of SNP TSC0013794
raaaattatctaa

SEQ ID NO: 48365 - DNA, 13 bp, Artificial Sequence
  Oligonucleotide for detection of SNP TSC0013795
agaatgattttat

SEQ ID NO: 48366 - DNA, 13 bp, Artificial Sequence
  Oligonucleotide for detection of SNP TSC0013795
ataaaatcattct

SEQ ID NO: 48367 - DNA, 13 bp, Artificial Sequence
  Oligonucleotide for detection of SNP TSC0013795
agaatggttttat

SEQ ID NO: 48368 - DNA, 13 bp, Artificial Sequence
  Oligonucleotide for detection of SNP TSC0013795
ataaaaccattct

SEQ ID NO: 48369 - DNA, 13 bp, Artificial Sequence
  Oligonucleotide for detection of SNP TSC0013796
tagtttaaagagg

SEQ ID NO: 48370 - DNA, 13 bp, Artificial Sequence
  Oligonucleotide for detection of SNP TSC0013796
cctctttaaacta

SEQ ID NO: 48371 - DNA, 13 bp, Artificial Sequence
  Oligonucleotide for detection of SNP TSC0013796
tagtttgaagagg

SEQ ID NO: 48372 - DNA, 13 bp, Artificial Sequence
  Oligonucleotide for detection of SNP TSC0013796
cctcttcaaacta

SEQ ID NO: 48373 - DNA, 13 bp, Artificial Sequence
  Oligonucleotide for detection of SNP TSC0013797
atttagaattaty

SEQ ID NO: 48374 - DNA, 13 bp, Artificial Sequence
  Oligonucleotide for detection of SNP TSC0013797
rataattctaaat

SEQ ID NO: 48375 - DNA, 13 bp, Artificial Sequence
  Oligonucleotide for detection of SNP TSC0013797
atttagtattaty

SEQ ID NO: 48376 - DNA, 13 bp, Artificial Sequence
  Oligonucleotide for detection of SNP TSC0013797
rataatactaaat

SEQ ID NO: 48377 - DNA, 13 bp, Artificial Sequence
  Oligonucleotide for detection of SNP TSC0013797
ggtgattttggat

SEQ ID NO: 48378 - DNA, 13 bp, Artificial Sequence
  Oligonucleotide for detection of SNP TSC0013797
atccaaaatcacc

SEQ ID NO: 48379 - DNA, 13 bp, Artificial Sequence
  Oligonucleotide for detection of SNP TSC0013797
ggtgatattggat

SEQ ID NO: 48380 - DNA, 13 bp, Artificial Sequence
  Oligonucleotide for detection of SNP TSC0013797
atccaatatcacc

SEQ ID NO: 48381 - DNA, 13 bp, Artificial Sequence
  Oligonucleotide for detection of SNP TSC0013798
tgtttttgggtty

SEQ ID NO: 48382 - DNA, 13 bp, Artificial Sequence
  Oligonucleotide for detection of SNP TSC0013798
raacccaaaaaca

SEQ ID NO: 48383 - DNA, 13 bp, Artificial Sequence
  Oligonucleotide for detection of SNP TSC0013798
tgttttcgggtty

SEQ ID NO: 48384 - DNA, 13 bp, Artificial Sequence
  Oligonucleotide for detection of SNP TSC0013798
raacccgaaaaca

SEQ ID NO: 48385 - DNA, 13 bp, Artificial Sequence
  Oligonucleotide for detection of SNP TSC0013798
gaatttggagata

SEQ ID NO: 48386 - DNA, 13 bp, Artificial Sequence
  Oligonucleotide for detection of SNP TSC0013798
tatctccaaattc

SEQ ID NO: 48387 - DNA, 13 bp, Artificial Sequence
  Oligonucleotide for detection of SNP TSC0013798
gaatttagagata

SEQ ID NO: 48388 - DNA, 13 bp, Artificial Sequence
  Oligonucleotide for detection of SNP TSC0013798
tatctctaaattc

SEQ ID NO: 48389 - DNA, 13 bp, Artificial Sequence
  Oligonucleotide for detection of SNP TSC0013798
gaattcggagata

SEQ ID NO: 48390 - DNA, 13 bp, Artificial Sequence
  Oligonucleotide for detection of SNP TSC0013798
tatctccgaattc

SEQ ID NO: 48391 - DNA, 13 bp, Artificial Sequence
  Oligonucleotide for detection of SNP TSC0013799
tgagaatgagtgt

SEQ ID NO: 48392 - DNA, 13 bp, Artificial Sequence
  Oligonucleotide for detection of SNP TSC0013799
acactcattctca

SEQ ID NO: 48393 - DNA, 13 bp, Artificial Sequence
  Oligonucleotide for detection of SNP TSC0013799
tgagaacgagtgt

SEQ ID NO: 48394 - DNA, 13 bp, Artificial Sequence
  Oligonucleotide for detection of SNP TSC0013799
acactcgttctca

SEQ ID NO: 48395 - DNA, 13 bp, Artificial Sequence
  Oligonucleotide for detection of SNP TSC0013799
atattcgttttta

SEQ ID NO: 48396 - DNA, 13 bp, Artificial Sequence
  Oligonucleotide for detection of SNP TSC0013799
taaaaacgaatat

SEQ ID NO: 48397 - DNA, 13 bp, Artificial Sequence
  Oligonucleotide for detection of SNP TSC0013800
gtagtagtgtggg

SEQ ID NO: 48398 - DNA, 13 bp, Artificial Sequence
  Oligonucleotide for detection of SNP TSC0013800
cccacactactac

SEQ ID NO: 48399 - DNA, 13 bp, Artificial Sequence
  Oligonucleotide for detection of SNP TSC0013800
gtagtaatgtggg

SEQ ID NO: 48400 - DNA, 13 bp, Artificial Sequence
  Oligonucleotide for detection of SNP TSC0013800
cccacattactac

SEQ ID NO: 48401 - DNA, 13 bp, Artificial Sequence
  Oligonucleotide for detection of SNP TSC0013800
gtagtagcgtggg

SEQ ID NO: 48402 - DNA, 13 bp, Artificial Sequence
  Oligonucleotide for detection of SNP TSC0013800
cccacgctactac

SEQ ID NO: 48403 - DNA, 13 bp, Artificial Sequence
  Oligonucleotide for detection of SNP TSC0013800
gtagtaacgtggg

SEQ ID NO: 48404 - DNA, 13 bp, Artificial Sequence
  Oligonucleotide for detection of SNP TSC0013800
cccacgttactac

SEQ ID NO: 48405 - DNA, 13 bp, Artificial Sequence
  Oligonucleotide for detection of SNP TSC0013800
gtagtagtgcggg

SEQ ID NO: 48406 - DNA, 13 bp, Artificial Sequence
  Oligonucleotide for detection of SNP TSC0013800
cccgcactactac

SEQ ID NO: 48407 - DNA, 13 bp, Artificial Sequence
  Oligonucleotide for detection of SNP TSC0013800
gtagtaatgcggg

SEQ ID NO: 48408 - DNA, 13 bp, Artificial Sequence
  Oligonucleotide for detection of SNP TSC0013800
cccgcattactac

SEQ ID NO: 48409 - DNA, 13 bp, Artificial Sequence
  Oligonucleotide for detection of SNP TSC0013800
gtagtagcgcggg

SEQ ID NO: 48410 - DNA, 13 bp, Artificial Sequence
  Oligonucleotide for detection of SNP TSC0013800
cccgcgctactac

SEQ ID NO: 48411 - DNA, 13 bp, Artificial Sequence
  Oligonucleotide for detection of SNP TSC0013800
gtagtaacgcggg

SEQ ID NO: 48412 - DNA, 13 bp, Artificial Sequence
  Oligonucleotide for detection of SNP TSC0013800
cccgcgttactac

SEQ ID NO: 48413 - DNA, 13 bp, Artificial Sequence
  Oligonucleotide for detection of SNP TSC0013802
attattattggag

SEQ ID NO: 48414 - DNA, 13 bp, Artificial Sequence
  Oligonucleotide for detection of SNP TSC0013802
ctccaataataat

SEQ ID NO: 48415 - DNA, 13 bp, Artificial Sequence
  Oligonucleotide for detection of SNP TSC0013802
attatttttggag

SEQ ID NO: 48416 - DNA, 13 bp, Artificial Sequence
  Oligonucleotide for detection of SNP TSC0013802
ctccaaaaataat

SEQ ID NO: 48417 - DNA, 13 bp, Artificial Sequence
  Oligonucleotide for detection of SNP TSC0013802
ttttagtgatggt

SEQ ID NO: 48418 - DNA, 13 bp, Artificial Sequence
  Oligonucleotide for detection of SNP TSC0013802
accatcactaaaa

SEQ ID NO: 48419 - DNA, 13 bp, Artificial Sequence
  Oligonucleotide for detection of SNP TSC0013802
ttttagagatggt

SEQ ID NO: 48420 - DNA, 13 bp, Artificial Sequence
  Oligonucleotide for detection of SNP TSC0013802
accatctctaaaa

SEQ ID NO: 48421 - DNA, 13 bp, Artificial Sequence
  Oligonucleotide for detection of SNP TSC0013803
gttgttttttttt

SEQ ID NO: 48422 - DNA, 13 bp, Artificial Sequence
  Oligonucleotide for detection of SNP TSC0013803
aaaaaaaaacaac

SEQ ID NO: 48423 - DNA, 13 bp, Artificial Sequence
  Oligonucleotide for detection of SNP TSC0013803
gttgttgtttttt

SEQ ID NO: 48424 - DNA, 13 bp, Artificial Sequence
  Oligonucleotide for detection of SNP TSC0013803
aaaaaacaacaac

SEQ ID NO: 48425 - DNA, 13 bp, Artificial Sequence
  Oligonucleotide for detection of SNP TSC0013803
gtcgttttttttt

SEQ ID NO: 48426 - DNA, 13 bp, Artificial Sequence
  Oligonucleotide for detection of SNP TSC0013803
aaaaaaaaacgac

SEQ ID NO: 48427 - DNA, 13 bp, Artificial Sequence
  Oligonucleotide for detection of SNP TSC0013803
gtcgttgtttttt

SEQ ID NO: 48428 - DNA, 13 bp, Artificial Sequence
  Oligonucleotide for detection of SNP TSC0013803
aaaaaacaacgac

SEQ ID NO: 48429 - DNA, 13 bp, Artificial Sequence
  Oligonucleotide for detection of SNP TSC0013803
aagagggaatgay

SEQ ID NO: 48430 - DNA, 13 bp, Artificial Sequence
  Oligonucleotide for detection of SNP TSC0013803
rtcattccctctt

SEQ ID NO: 48431 - DNA, 13 bp, Artificial Sequence
  Oligonucleotide for detection of SNP TSC0013803
aagaggtaatgay

SEQ ID NO: 48432 - DNA, 13 bp, Artificial Sequence
  Oligonucleotide for detection of SNP TSC0013803
rtcattacctctt

SEQ ID NO: 48433 - DNA, 13 bp, Artificial Sequence
  Oligonucleotide for detection of SNP TSC0013803
aagagggaacgay

SEQ ID NO: 48434 - DNA, 13 bp, Artificial Sequence
  Oligonucleotide for detection of SNP TSC0013803
rtcgttccctctt

SEQ ID NO: 48435 - DNA, 13 bp, Artificial Sequence
  Oligonucleotide for detection of SNP TSC0013803
aagaggtaacgay

SEQ ID NO: 48436 - DNA, 13 bp, Artificial Sequence
  Oligonucleotide for detection of SNP TSC0013803
rtcgttacctctt

SEQ ID NO: 48437 - DNA, 13 bp, Artificial Sequence
  Oligonucleotide for detection of SNP TSC0013804
aaaaaagagggaa

SEQ ID NO: 48438 - DNA, 13 bp, Artificial Sequence
  Oligonucleotide for detection of SNP TSC0013804
ttccctctttttt

SEQ ID NO: 48439 - DNA, 13 bp, Artificial Sequence
  Oligonucleotide for detection of SNP TSC0013804
aaaaaatagggaa

SEQ ID NO: 48440 - DNA, 13 bp, Artificial Sequence
  Oligonucleotide for detection of SNP TSC0013804
ttccctatttttt

SEQ ID NO: 48441 - DNA, 13 bp, Artificial Sequence
  Oligonucleotide for detection of SNP TSC0013805
gaaagtaattata

SEQ ID NO: 48442 - DNA, 13 bp, Artificial Sequence
  Oligonucleotide for detection of SNP TSC0013805
tataattactttc

SEQ ID NO: 48443 - DNA, 13 bp, Artificial Sequence
  Oligonucleotide for detection of SNP TSC0013805
gaaagttattata

SEQ ID NO: 48444 - DNA, 13 bp, Artificial Sequence
  Oligonucleotide for detection of SNP TSC0013805
tataataactttc

SEQ ID NO: 48445 - DNA, 13 bp, Artificial Sequence
  Oligonucleotide for detection of SNP TSC0013805
tataattatttty

SEQ ID NO: 48446 - DNA, 13 bp, Artificial Sequence
  Oligonucleotide for detection of SNP TSC0013805
raaaataattata

SEQ ID NO: 48447 - DNA, 13 bp, Artificial Sequence
  Oligonucleotide for detection of SNP TSC0013805
tataataatttty

SEQ ID NO: 48448 - DNA, 13 bp, Artificial Sequence
  Oligonucleotide for detection of SNP TSC0013805
raaaattattata

SEQ ID NO: 48449 - DNA, 13 bp, Artificial Sequence
  Oligonucleotide for detection of SNP TSC0013809
aataaagtgattt

SEQ ID NO: 48450 - DNA, 13 bp, Artificial Sequence
  Oligonucleotide for detection of SNP TSC0013809
aaatcactttatt

SEQ ID NO: 48451 - DNA, 13 bp, Artificial Sequence
  Oligonucleotide for detection of SNP TSC0013809
aataaaatgattt

SEQ ID NO: 48452 - DNA, 13 bp, Artificial Sequence
  Oligonucleotide for detection of SNP TSC0013809
aaatcattttatt

SEQ ID NO: 48453 - DNA, 13 bp, Artificial Sequence
  Oligonucleotide for detection of SNP TSC0013810
ttttatagtattt

SEQ ID NO: 48454 - DNA, 13 bp, Artificial Sequence
  Oligonucleotide for detection of SNP TSC0013810
aaatactataaaa

SEQ ID NO: 48455 - DNA, 13 bp, Artificial Sequence
  Oligonucleotide for detection of SNP TSC0013810
ttttattgtattt

SEQ ID NO: 48456 - DNA, 13 bp, Artificial Sequence
  Oligonucleotide for detection of SNP TSC0013810
aaatacaataaaa

SEQ ID NO: 48457 - DNA, 13 bp, Artificial Sequence
  Oligonucleotide for detection of SNP TSC0013810
aagtattgtaaga

SEQ ID NO: 48458 - DNA, 13 bp, Artificial Sequence
  Oligonucleotide for detection of SNP TSC0013810
tcttacaatactt

SEQ ID NO: 48459 - DNA, 13 bp, Artificial Sequence
  Oligonucleotide for detection of SNP TSC0013810
aagtatagtaaga

SEQ ID NO: 48460 - DNA, 13 bp, Artificial Sequence
  Oligonucleotide for detection of SNP TSC0013810
tcttactatactt

SEQ ID NO: 48461 - DNA, 13 bp, Artificial Sequence
  Oligonucleotide for detection of SNP TSC0013811
agattatgaattt

SEQ ID NO: 48462 - DNA, 13 bp, Artificial Sequence
  Oligonucleotide for detection of SNP TSC0013811
aaattcataatct

SEQ ID NO: 48463 - DNA, 13 bp, Artificial Sequence
  Oligonucleotide for detection of SNP TSC0013811
agattacgaattt

SEQ ID NO: 48464 - DNA, 13 bp, Artificial Sequence
  Oligonucleotide for detection of SNP TSC0013811
aaattcgtaatct

SEQ ID NO: 48465 - DNA, 13 bp, Artificial Sequence
  Oligonucleotide for detection of SNP TSC0013811
aaatttgtaattt

SEQ ID NO: 48466 - DNA, 13 bp, Artificial Sequence
  Oligonucleotide for detection of SNP TSC0013811
aaattacaaattt

SEQ ID NO: 48467 - DNA, 13 bp, Artificial Sequence
  Oligonucleotide for detection of SNP TSC0013811
aaatttataattt

SEQ ID NO: 48468 - DNA, 13 bp, Artificial Sequence
  Oligonucleotide for detection of SNP TSC0013811
aaattataaattt

SEQ ID NO: 48469 - DNA, 13 bp, Artificial Sequence
  Oligonucleotide for detection of SNP TSC0013812
aatattaaaagay

SEQ ID NO: 48470 - DNA, 13 bp, Artificial Sequence
  Oligonucleotide for detection of SNP TSC0013812
rtcttttaatatt

SEQ ID NO: 48471 - DNA, 13 bp, Artificial Sequence
  Oligonucleotide for detection of SNP TSC0013812
aatattgaaagay

SEQ ID NO: 48472 - DNA, 13 bp, Artificial Sequence
  Oligonucleotide for detection of SNP TSC0013812
rtctttcaatatt

SEQ ID NO: 48473 - DNA, 13 bp, Artificial Sequence
  Oligonucleotide for detection of SNP TSC0013814
gaaaatggaatgy

SEQ ID NO: 48474 - DNA, 13 bp, Artificial Sequence
  Oligonucleotide for detection of SNP TSC0013814
rcattccattttc

SEQ ID NO: 48475 - DNA, 13 bp, Artificial Sequence
  Oligonucleotide for detection of SNP TSC0013814
gaaaatagaatgy

SEQ ID NO: 48476 - DNA, 13 bp, Artificial Sequence
  Oligonucleotide for detection of SNP TSC0013814
rcattctattttc

SEQ ID NO: 48477 - DNA, 13 bp, Artificial Sequence
  Oligonucleotide for detection of SNP TSC0013815
tatagtatgtagg

SEQ ID NO: 48478 - DNA, 13 bp, Artificial Sequence
  Oligonucleotide for detection of SNP TSC0013815
cctacatactata

SEQ ID NO: 48479 - DNA, 13 bp, Artificial Sequence
  Oligonucleotide for detection of SNP TSC0013815
tatagtgtgtagg

SEQ ID NO: 48480 - DNA, 13 bp, Artificial Sequence
  Oligonucleotide for detection of SNP TSC0013815
cctacacactata

SEQ ID NO: 48481 - DNA, 13 bp, Artificial Sequence
  Oligonucleotide for detection of SNP TSC0013816
attggtgaatttt

SEQ ID NO: 48482 - DNA, 13 bp, Artificial Sequence
  Oligonucleotide for detection of SNP TSC0013816
aaaattcaccaat

SEQ ID NO: 48483 - DNA, 13 bp, Artificial Sequence
  Oligonucleotide for detection of SNP TSC0013816
attggtaaatttt

SEQ ID NO: 48484 - DNA, 13 bp, Artificial Sequence
  Oligonucleotide for detection of SNP TSC0013816
aaaatttaccaat

SEQ ID NO: 48485 - DNA, 13 bp, Artificial Sequence
  Oligonucleotide for detection of SNP TSC0013818
ttagtatgttatg

SEQ ID NO: 48486 - DNA, 13 bp, Artificial Sequence
  Oligonucleotide for detection of SNP TSC0013818
cataacatactaa

SEQ ID NO: 48487 - DNA, 13 bp, Artificial Sequence
  Oligonucleotide for detection of SNP TSC0013818
ttagtacgttatg

SEQ ID NO: 48488 - DNA, 13 bp, Artificial Sequence
  Oligonucleotide for detection of SNP TSC0013818
cataacgtactaa

SEQ ID NO: 48489 - DNA, 13 bp, Artificial Sequence
  Oligonucleotide for detection of SNP TSC0013818
tatggtgtgttgg

SEQ ID NO: 48490 - DNA, 13 bp, Artificial Sequence
  Oligonucleotide for detection of SNP TSC0013818
ccaacacaccata

SEQ ID NO: 48491 - DNA, 13 bp, Artificial Sequence
  Oligonucleotide for detection of SNP TSC0013818
tatggtatgttgg

SEQ ID NO: 48492 - DNA, 13 bp, Artificial Sequence
  Oligonucleotide for detection of SNP TSC0013818
ccaacataccata

SEQ ID NO: 48493 - DNA, 13 bp, Artificial Sequence
  Oligonucleotide for detection of SNP TSC0013818
tatggcgtgttgg

SEQ ID NO: 48494 - DNA, 13 bp, Artificial Sequence
  Oligonucleotide for detection of SNP TSC0013818
ccaacacgccata

SEQ ID NO: 48495 - DNA, 13 bp, Artificial Sequence
  Oligonucleotide for detection of SNP TSC0013819
ttttgaaatgatt

SEQ ID NO: 48496 - DNA, 13 bp, Artificial Sequence
  Oligonucleotide for detection of SNP TSC0013819
aatcatttcaaaa

SEQ ID NO: 48497 - DNA, 13 bp, Artificial Sequence
  Oligonucleotide for detection of SNP TSC0013819
ttttgatatgatt

SEQ ID NO: 48498 - DNA, 13 bp, Artificial Sequence
  Oligonucleotide for detection of SNP TSC0013819
aatcatatcaaaa

SEQ ID NO: 48499 - DNA, 13 bp, Artificial Sequence
  Oligonucleotide for detection of SNP TSC0013819
agttattttagaa

SEQ ID NO: 48500 - DNA, 13 bp, Artificial Sequence
  Oligonucleotide for detection of SNP TSC0013819
ttctaaaataact

SEQ ID NO: 48501 - DNA, 13 bp, Artificial Sequence
  Oligonucleotide for detection of SNP TSC0013819
agttatgttagaa

SEQ ID NO: 48502 - DNA, 13 bp, Artificial Sequence
  Oligonucleotide for detection of SNP TSC0013819
ttctaacataact

SEQ ID NO: 48503 - DNA, 13 bp, Artificial Sequence
  Oligonucleotide for detection of SNP TSC0013820
tattttaggtaay

SEQ ID NO: 48504 - DNA, 13 bp, Artificial Sequence
  Oligonucleotide for detection of SNP TSC0013820
rttacctaaaata

SEQ ID NO: 48505 - DNA, 13 bp, Artificial Sequence
  Oligonucleotide for detection of SNP TSC0013820
tattttgggtaay

SEQ ID NO: 48506 - DNA, 13 bp, Artificial Sequence
  Oligonucleotide for detection of SNP TSC0013820
rttacccaaaata

SEQ ID NO: 48507 - DNA, 13 bp, Artificial Sequence
  Oligonucleotide for detection of SNP TSC0013820
tatttcgggtaay

SEQ ID NO: 48508 - DNA, 13 bp, Artificial Sequence
  Oligonucleotide for detection of SNP TSC0013820
rttacccgaaata

SEQ ID NO: 48509 - DNA, 13 bp, Artificial Sequence
  Oligonucleotide for detection of SNP TSC0013820
gttgtttgaagta

SEQ ID NO: 48510 - DNA, 13 bp, Artificial Sequence
  Oligonucleotide for detection of SNP TSC0013820
tacttcaaacaac

SEQ ID NO: 48511 - DNA, 13 bp, Artificial Sequence
  Oligonucleotide for detection of SNP TSC0013820
gttgttcgaagta

SEQ ID NO: 48512 - DNA, 13 bp, Artificial Sequence
  Oligonucleotide for detection of SNP TSC0013820
tacttcgaacaac

SEQ ID NO: 48513 - DNA, 13 bp, Artificial Sequence
  Oligonucleotide for detection of SNP TSC0013821
attaggtttgttt

SEQ ID NO: 48514 - DNA, 13 bp, Artificial Sequence
  Oligonucleotide for detection of SNP TSC0013821
aaacaaacctaat

SEQ ID NO: 48515 - DNA, 13 bp, Artificial Sequence
  Oligonucleotide for detection of SNP TSC0013821
attagggttgttt

SEQ ID NO: 48516 - DNA, 13 bp, Artificial Sequence
  Oligonucleotide for detection of SNP TSC0013821
aaacaaccctaat

SEQ ID NO: 48517 - DNA, 13 bp, Artificial Sequence
  Oligonucleotide for detection of SNP TSC0013822
agtagaaatatat

SEQ ID NO: 48518 - DNA, 13 bp, Artificial Sequence
  Oligonucleotide for detection of SNP TSC0013822
atatatttctact

SEQ ID NO: 48519 - DNA, 13 bp, Artificial Sequence
  Oligonucleotide for detection of SNP TSC0013822
agtagatatatat

SEQ ID NO: 48520 - DNA, 13 bp, Artificial Sequence
  Oligonucleotide for detection of SNP TSC0013822
atatatatctact

SEQ ID NO: 48521 - DNA, 13 bp, Artificial Sequence
  Oligonucleotide for detection of SNP TSC0013822
atatatttttatt

SEQ ID NO: 48522 - DNA, 13 bp, Artificial Sequence
  Oligonucleotide for detection of SNP TSC0013822
aataaaaatatat

SEQ ID NO: 48523 - DNA, 13 bp, Artificial Sequence
  Oligonucleotide for detection of SNP TSC0013822
atatatatttatt

SEQ ID NO: 48524 - DNA, 13 bp, Artificial Sequence
  Oligonucleotide for detection of SNP TSC0013822
aataaatatatat

SEQ ID NO: 48525 - DNA, 13 bp, Artificial Sequence
  Oligonucleotide for detection of SNP TSC0013823
ggttggaaagaaa

SEQ ID NO: 48526 - DNA, 13 bp, Artificial Sequence
  Oligonucleotide for detection of SNP TSC0013823
tttctttccaacc

SEQ ID NO: 48527 - DNA, 13 bp, Artificial Sequence
  Oligonucleotide for detection of SNP TSC0013823
ggttgggaagaaa

SEQ ID NO: 48528 - DNA, 13 bp, Artificial Sequence
  Oligonucleotide for detection of SNP TSC0013823
tttcttcccaacc

SEQ ID NO: 48529 - DNA, 13 bp, Artificial Sequence
  Oligonucleotide for detection of SNP TSC0013824
ttttagggaggga

SEQ ID NO: 48530 - DNA, 13 bp, Artificial Sequence
  Oligonucleotide for detection of SNP TSC0013824
tccctccctaaaa

SEQ ID NO: 48531 - DNA, 13 bp, Artificial Sequence
  Oligonucleotide for detection of SNP TSC0013824
ttttagagaggga

SEQ ID NO: 48532 - DNA, 13 bp, Artificial Sequence
  Oligonucleotide for detection of SNP TSC0013824
tccctctctaaaa

SEQ ID NO: 48533 - DNA, 13 bp, Artificial Sequence
  Oligonucleotide for detection of SNP TSC0013826
taatgaattttty

SEQ ID NO: 48534 - DNA, 13 bp, Artificial Sequence
  Oligonucleotide for detection of SNP TSC0013826
raaaaattcatta

SEQ ID NO: 48535 - DNA, 13 bp, Artificial Sequence
  Oligonucleotide for detection of SNP TSC0013826
taatgatttttty

SEQ ID NO: 48536 - DNA, 13 bp, Artificial Sequence
  Oligonucleotide for detection of SNP TSC0013826
raaaaaatcatta

SEQ ID NO: 48537 - DNA, 13 bp, Artificial Sequence
  Oligonucleotide for detection of SNP TSC0013826
ggggggtttatta

SEQ ID NO: 48538 - DNA, 13 bp, Artificial Sequence
  Oligonucleotide for detection of SNP TSC0013826
taataaacccccc

SEQ ID NO: 48539 - DNA, 13 bp, Artificial Sequence
  Oligonucleotide for detection of SNP TSC0013826
gggggggttatta

SEQ ID NO: 48540 - DNA, 13 bp, Artificial Sequence
  Oligonucleotide for detection of SNP TSC0013826
taataaccccccc

SEQ ID NO: 48541 - DNA, 13 bp, Artificial Sequence
  Oligonucleotide for detection of SNP TSC0013827
tgtgtgtgggggg

SEQ ID NO: 48542 - DNA, 13 bp, Artificial Sequence
  Oligonucleotide for detection of SNP TSC0013827
ccccccacacaca

SEQ ID NO: 48543 - DNA, 13 bp, Artificial Sequence
  Oligonucleotide for detection of SNP TSC0013827
tgtgtgggggggg

SEQ ID NO: 48544 - DNA, 13 bp, Artificial Sequence
  Oligonucleotide for detection of SNP TSC0013827
ccccccccacaca

SEQ ID NO: 48545 - DNA, 13 bp, Artificial Sequence
  Oligonucleotide for detection of SNP TSC0013828
tgggtgtgttgtg

SEQ ID NO: 48546 - DNA, 13 bp, Artificial Sequence
  Oligonucleotide for detection of SNP TSC0013828
cacaacacaccca

SEQ ID NO: 48547 - DNA, 13 bp, Artificial Sequence
  Oligonucleotide for detection of SNP TSC0013828
cgggtgtgttgtg

SEQ ID NO: 48548 - DNA, 13 bp, Artificial Sequence
  Oligonucleotide for detection of SNP TSC0013828
cacaacacacccg

SEQ ID NO: 48549 - DNA, 13 bp, Artificial Sequence
  Oligonucleotide for detection of SNP TSC0013828
tgggtgcgttgtg

SEQ ID NO: 48550 - DNA, 13 bp, Artificial Sequence
  Oligonucleotide for detection of SNP TSC0013828
cacaacgcaccca

SEQ ID NO: 48551 - DNA, 13 bp, Artificial Sequence
  Oligonucleotide for detection of SNP TSC0013828
tgggtgtgttgcg

SEQ ID NO: 48552 - DNA, 13 bp, Artificial Sequence
  Oligonucleotide for detection of SNP TSC0013828
cgcaacacaccca

SEQ ID NO: 48553 - DNA, 13 bp, Artificial Sequence
  Oligonucleotide for detection of SNP TSC0013828
cgggtgtgttgcg

SEQ ID NO: 48554 - DNA, 13 bp, Artificial Sequence
  Oligonucleotide for detection of SNP TSC0013828
cgcaacacacccg

SEQ ID NO: 48555 - DNA, 13 bp, Artificial Sequence
  Oligonucleotide for detection of SNP TSC0013828
cgggtgcgttgtg

SEQ ID NO: 48556 - DNA, 13 bp, Artificial Sequence
  Oligonucleotide for detection of SNP TSC0013828
cacaacgcacccg

SEQ ID NO: 48557 - DNA, 13 bp, Artificial Sequence
  Oligonucleotide for detection of SNP TSC0013828
tgggtgcgttgcg

SEQ ID NO: 48558 - DNA, 13 bp, Artificial Sequence
  Oligonucleotide for detection of SNP TSC0013828
cgcaacgcaccca

SEQ ID NO: 48559 - DNA, 13 bp, Artificial Sequence
  Oligonucleotide for detection of SNP TSC0013828
cgggtgcgttgcg

SEQ ID NO: 48560 - DNA, 13 bp, Artificial Sequence
  Oligonucleotide for detection of SNP TSC0013828
cgcaacgcacccg

SEQ ID NO: 48561 - DNA, 13 bp, Artificial Sequence
  Oligonucleotide for detection of SNP TSC0013828
tgtagtgtatttg

SEQ ID NO: 48562 - DNA, 13 bp, Artificial Sequence
  Oligonucleotide for detection of SNP TSC0013828
caaatacactaca

SEQ ID NO: 48563 - DNA, 13 bp, Artificial Sequence
  Oligonucleotide for detection of SNP TSC0013828
tgtagtatatttg

SEQ ID NO: 48564 - DNA, 13 bp, Artificial Sequence
  Oligonucleotide for detection of SNP TSC0013828
caaatatactaca

SEQ ID NO: 48565 - DNA, 13 bp, Artificial Sequence
  Oligonucleotide for detection of SNP TSC0013828
cgtagtgtatttg

SEQ ID NO: 48566 - DNA, 13 bp, Artificial Sequence
  Oligonucleotide for detection of SNP TSC0013828
caaatacactacg

SEQ ID NO: 48567 - DNA, 13 bp, Artificial Sequence
  Oligonucleotide for detection of SNP TSC0013828
cgtagtatatttg

SEQ ID NO: 48568 - DNA, 13 bp, Artificial Sequence
  Oligonucleotide for detection of SNP TSC0013828
caaatatactacg

SEQ ID NO: 48569 - DNA, 13 bp, Artificial Sequence
  Oligonucleotide for detection of SNP TSC0013828
tgtagcgtatttg

SEQ ID NO: 48570 - DNA, 13 bp, Artificial Sequence
  Oligonucleotide for detection of SNP TSC0013828
caaatacgctaca

SEQ ID NO: 48571 - DNA, 13 bp, Artificial Sequence
  Oligonucleotide for detection of SNP TSC0013828
tgtagtatattcg

SEQ ID NO: 48572 - DNA, 13 bp, Artificial Sequence
  Oligonucleotide for detection of SNP TSC0013828
cgaatatactaca

SEQ ID NO: 48573 - DNA, 13 bp, Artificial Sequence
  Oligonucleotide for detection of SNP TSC0013828
tgtagtgtattcg

SEQ ID NO: 48574 - DNA, 13 bp, Artificial Sequence
  Oligonucleotide for detection of SNP TSC0013828
cgaatacactaca

SEQ ID NO: 48575 - DNA, 13 bp, Artificial Sequence
  Oligonucleotide for detection of SNP TSC0013828
cgtagtatattcg

SEQ ID NO: 48576 - DNA, 13 bp, Artificial Sequence
  Oligonucleotide for detection of SNP TSC0013828
cgaatatactacg

SEQ ID NO: 48577 - DNA, 13 bp, Artificial Sequence
  Oligonucleotide for detection of SNP TSC0013828
cgtagcgtatttg

SEQ ID NO: 48578 - DNA, 13 bp, Artificial Sequence
  Oligonucleotide for detection of SNP TSC0013828
caaatacgctacg

SEQ ID NO: 48579 - DNA, 13 bp, Artificial Sequence
  Oligonucleotide for detection of SNP TSC0013828
cgtagtgtattcg

SEQ ID NO: 48580 - DNA, 13 bp, Artificial Sequence
  Oligonucleotide for detection of SNP TSC0013828
cgaatacactacg

SEQ ID NO: 48581 - DNA, 13 bp, Artificial Sequence
  Oligonucleotide for detection of SNP TSC0013828
tgtagcgtattcg

SEQ ID NO: 48582 - DNA, 13 bp, Artificial Sequence
  Oligonucleotide for detection of SNP TSC0013828
cgaatacgctaca

SEQ ID NO: 48583 - DNA, 13 bp, Artificial Sequence
  Oligonucleotide for detection of SNP TSC0013828
cgtagcgtattcg

SEQ ID NO: 48584 - DNA, 13 bp, Artificial Sequence
  Oligonucleotide for detection of SNP TSC0013828
cgaatacgctacg

SEQ ID NO: 48585 - DNA, 13 bp, Artificial Sequence
  Oligonucleotide for detection of SNP TSC0013829
ttgtgttggggty

SEQ ID NO: 48586 - DNA, 13 bp, Artificial Sequence
  Oligonucleotide for detection of SNP TSC0013829
raccccaacacaa

SEQ ID NO: 48587 - DNA, 13 bp, Artificial Sequence
  Oligonucleotide for detection of SNP TSC0013829
tcgtgttggggty

SEQ ID NO: 48588 - DNA, 13 bp, Artificial Sequence
  Oligonucleotide for detection of SNP TSC0013829
raccccaacacga

SEQ ID NO: 48589 - DNA, 13 bp, Artificial Sequence
  Oligonucleotide for detection of SNP TSC0013829
ttgcgttggggty

SEQ ID NO: 48590 - DNA, 13 bp, Artificial Sequence
  Oligonucleotide for detection of SNP TSC0013829
raccccaacgcaa

SEQ ID NO: 48591 - DNA, 13 bp, Artificial Sequence
  Oligonucleotide for detection of SNP TSC0013829
ttgtgtcggggty

SEQ ID NO: 48592 - DNA, 13 bp, Artificial Sequence
  Oligonucleotide for detection of SNP TSC0013829
raccccgacacaa

SEQ ID NO: 48593 - DNA, 13 bp, Artificial Sequence
  Oligonucleotide for detection of SNP TSC0013829
tcgcgttggggty

SEQ ID NO: 48594 - DNA, 13 bp, Artificial Sequence
  Oligonucleotide for detection of SNP TSC0013829
raccccaacgcga

SEQ ID NO: 48595 - DNA, 13 bp, Artificial Sequence
  Oligonucleotide for detection of SNP TSC0013829
tcgtgtcggggty

SEQ ID NO: 48596 - DNA, 13 bp, Artificial Sequence
  Oligonucleotide for detection of SNP TSC0013829
raccccgacacga

SEQ ID NO: 48597 - DNA, 13 bp, Artificial Sequence
  Oligonucleotide for detection of SNP TSC0013829
ttgcgtcggggty

SEQ ID NO: 48598 - DNA, 13 bp, Artificial Sequence
  Oligonucleotide for detection of SNP TSC0013829
raccccgacgcaa

SEQ ID NO: 48599 - DNA, 13 bp, Artificial Sequence
  Oligonucleotide for detection of SNP TSC0013829
tcgcgtcggggty

SEQ ID NO: 48600 - DNA, 13 bp, Artificial Sequence
  Oligonucleotide for detection of SNP TSC0013829
raccccgacgcga

SEQ ID NO: 48601 - DNA, 13 bp, Artificial Sequence
  Oligonucleotide for detection of SNP TSC0013829
gattttggtgtgg

SEQ ID NO: 48602 - DNA, 13 bp, Artificial Sequence
  Oligonucleotide for detection of SNP TSC0013829
ccacaccaaaatc

SEQ ID NO: 48603 - DNA, 13 bp, Artificial Sequence
  Oligonucleotide for detection of SNP TSC0013829
gattttagtgtgg

SEQ ID NO: 48604 - DNA, 13 bp, Artificial Sequence
  Oligonucleotide for detection of SNP TSC0013829
ccacactaaaatc

SEQ ID NO: 48605 - DNA, 13 bp, Artificial Sequence
  Oligonucleotide for detection of SNP TSC0013829
gatttcggtgtgg

SEQ ID NO: 48606 - DNA, 13 bp, Artificial Sequence
  Oligonucleotide for detection of SNP TSC0013829
ccacaccgaaatc

SEQ ID NO: 48607 - DNA, 13 bp, Artificial Sequence
  Oligonucleotide for detection of SNP TSC0013829
gattttagcgtgg

SEQ ID NO: 48608 - DNA, 13 bp, Artificial Sequence
  Oligonucleotide for detection of SNP TSC0013829
ccacgctaaaatc

SEQ ID NO: 48609 - DNA, 13 bp, Artificial Sequence
  Oligonucleotide for detection of SNP TSC0013829
gattttggcgtgg

SEQ ID NO: 48610 - DNA, 13 bp, Artificial Sequence
  Oligonucleotide for detection of SNP TSC0013829
ccacgccaaaatc

SEQ ID NO: 48611 - DNA, 13 bp, Artificial Sequence
  Oligonucleotide for detection of SNP TSC0013829
gattttagtgcgg

SEQ ID NO: 48612 - DNA, 13 bp, Artificial Sequence
  Oligonucleotide for detection of SNP TSC0013829
ccgcactaaaatc

SEQ ID NO: 48613 - DNA, 13 bp, Artificial Sequence
  Oligonucleotide for detection of SNP TSC0013829
gattttggtgcgg

SEQ ID NO: 48614 - DNA, 13 bp, Artificial Sequence
  Oligonucleotide for detection of SNP TSC0013829
ccgcaccaaaatc

SEQ ID NO: 48615 - DNA, 13 bp, Artificial Sequence
  Oligonucleotide for detection of SNP TSC0013829
gattttagcgcgg

SEQ ID NO: 48616 - DNA, 13 bp, Artificial Sequence
  Oligonucleotide for detection of SNP TSC0013829
ccgcgctaaaatc

SEQ ID NO: 48617 - DNA, 13 bp, Artificial Sequence
  Oligonucleotide for detection of SNP TSC0013829
gatttcggcgtgg

SEQ ID NO: 48618 - DNA, 13 bp, Artificial Sequence
  Oligonucleotide for detection of SNP TSC0013829
ccacgccgaaatc

SEQ ID NO: 48619 - DNA, 13 bp, Artificial Sequence
  Oligonucleotide for detection of SNP TSC0013829
gatttcggtgcgg

SEQ ID NO: 48620 - DNA, 13 bp, Artificial Sequence
  Oligonucleotide for detection of SNP TSC0013829
ccgcaccgaaatc

SEQ ID NO: 48621 - DNA, 13 bp, Artificial Sequence
  Oligonucleotide for detection of SNP TSC0013829
gattttggcgcgg

SEQ ID NO: 48622 - DNA, 13 bp, Artificial Sequence
  Oligonucleotide for detection of SNP TSC0013829
ccgcgccaaaatc

SEQ ID NO: 48623 - DNA, 13 bp, Artificial Sequence
  Oligonucleotide for detection of SNP TSC0013829
gatttcggcgcgg

SEQ ID NO: 48624 - DNA, 13 bp, Artificial Sequence
  Oligonucleotide for detection of SNP TSC0013829
ccgcgccgaaatc

SEQ ID NO: 48625 - DNA, 13 bp, Artificial Sequence
  Oligonucleotide for detection of SNP TSC0013830
ttagtaattttty

SEQ ID NO: 48626 - DNA, 13 bp, Artificial Sequence
  Oligonucleotide for detection of SNP TSC0013830
raaaaattactaa

SEQ ID NO: 48627 - DNA, 13 bp, Artificial Sequence
  Oligonucleotide for detection of SNP TSC0013830
ttagtatttttty

SEQ ID NO: 48628 - DNA, 13 bp, Artificial Sequence
  Oligonucleotide for detection of SNP TSC0013830
raaaaaatactaa

SEQ ID NO: 48629 - DNA, 13 bp, Artificial Sequence
  Oligonucleotide for detection of SNP TSC0013830
gaagaattgttgg

SEQ ID NO: 48630 - DNA, 13 bp, Artificial Sequence
  Oligonucleotide for detection of SNP TSC0013830
ccaacaattcttc

SEQ ID NO: 48631 - DNA, 13 bp, Artificial Sequence
  Oligonucleotide for detection of SNP TSC0013830
gaagaagtgttgg

SEQ ID NO: 48632 - DNA, 13 bp, Artificial Sequence
  Oligonucleotide for detection of SNP TSC0013830
ccaacacttcttc

SEQ ID NO: 48633 - DNA, 13 bp, Artificial Sequence
  Oligonucleotide for detection of SNP TSC0013831
atgtgtgggtagy

SEQ ID NO: 48634 - DNA, 13 bp, Artificial Sequence
  Oligonucleotide for detection of SNP TSC0013831
rctacccacacat

SEQ ID NO: 48635 - DNA, 13 bp, Artificial Sequence
  Oligonucleotide for detection of SNP TSC0013831
atgtgtaggtagy

SEQ ID NO: 48636 - DNA, 13 bp, Artificial Sequence
  Oligonucleotide for detection of SNP TSC0013831
rctacctacacat

SEQ ID NO: 48637 - DNA, 13 bp, Artificial Sequence
  Oligonucleotide for detection of SNP TSC0013832
ataagggttttaa

SEQ ID NO: 48638 - DNA, 13 bp, Artificial Sequence
  Oligonucleotide for detection of SNP TSC0013832
ttaaaacccttat

SEQ ID NO: 48639 - DNA, 13 bp, Artificial Sequence
  Oligonucleotide for detection of SNP TSC0013832
ataaggattttaa

SEQ ID NO: 48640 - DNA, 13 bp, Artificial Sequence
  Oligonucleotide for detection of SNP TSC0013832
ttaaaatccttat

SEQ ID NO: 48641 - DNA, 13 bp, Artificial Sequence
  Oligonucleotide for detection of SNP TSC0013833
ttggaaatattgg

SEQ ID NO: 48642 - DNA, 13 bp, Artificial Sequence
  Oligonucleotide for detection of SNP TSC0013833
ccaatatttccaa

SEQ ID NO: 48643 - DNA, 13 bp, Artificial Sequence
  Oligonucleotide for detection of SNP TSC0013833
ttggaagtattgg

SEQ ID NO: 48644 - DNA, 13 bp, Artificial Sequence
  Oligonucleotide for detection of SNP TSC0013833
ccaatacttccaa

SEQ ID NO: 48645 - DNA, 13 bp, Artificial Sequence
  Oligonucleotide for detection of SNP TSC0013834
gttgtgaggttaa

SEQ ID NO: 48646 - DNA, 13 bp, Artificial Sequence
  Oligonucleotide for detection of SNP TSC0013834
ttaacctcacaac

SEQ ID NO: 48647 - DNA, 13 bp, Artificial Sequence
  Oligonucleotide for detection of SNP TSC0013834
gttgtgtggttaa

SEQ ID NO: 48648 - DNA, 13 bp, Artificial Sequence
  Oligonucleotide for detection of SNP TSC0013834
ttaaccacacaac

SEQ ID NO: 48649 - DNA, 13 bp, Artificial Sequence
  Oligonucleotide for detection of SNP TSC0013834
ttggttttatagy

SEQ ID NO: 48650 - DNA, 13 bp, Artificial Sequence
  Oligonucleotide for detection of SNP TSC0013834
rctataaaaccaa

SEQ ID NO: 48651 - DNA, 13 bp, Artificial Sequence
  Oligonucleotide for detection of SNP TSC0013834
ttggttatatagy

SEQ ID NO: 48652 - DNA, 13 bp, Artificial Sequence
  Oligonucleotide for detection of SNP TSC0013834
rctatataaccaa

SEQ ID NO: 48653 - DNA, 13 bp, Artificial Sequence
  Oligonucleotide for detection of SNP TSC0013835
tcgggaagttgag

SEQ ID NO: 48654 - DNA, 13 bp, Artificial Sequence
  Oligonucleotide for detection of SNP TSC0013835
ctcaacttcccga

SEQ ID NO: 48655 - DNA, 13 bp, Artificial Sequence
  Oligonucleotide for detection of SNP TSC0013835
tcgggaggttgag

SEQ ID NO: 48656 - DNA, 13 bp, Artificial Sequence
  Oligonucleotide for detection of SNP TSC0013835
ctcaacctcccga

SEQ ID NO: 48657 - DNA, 13 bp, Artificial Sequence
  Oligonucleotide for detection of SNP TSC0013839
ttttgggtagaag

SEQ ID NO: 48658 - DNA, 13 bp, Artificial Sequence
  Oligonucleotide for detection of SNP TSC0013839
cttctacccaaaa

SEQ ID NO: 48659 - DNA, 13 bp, Artificial Sequence
  Oligonucleotide for detection of SNP TSC0013839
ttttggatagaag

SEQ ID NO: 48660 - DNA, 13 bp, Artificial Sequence
  Oligonucleotide for detection of SNP TSC0013839
cttctatccaaaa

SEQ ID NO: 48661 - DNA, 13 bp, Artificial Sequence
  Oligonucleotide for detection of SNP TSC0013839
tttcgggtagaag

SEQ ID NO: 48662 - DNA, 13 bp, Artificial Sequence
  Oligonucleotide for detection of SNP TSC0013839
cttctacccgaaa

SEQ ID NO: 48663 - DNA, 13 bp, Artificial Sequence
  Oligonucleotide for detection of SNP TSC0013839
tttcggatagaag

SEQ ID NO: 48664 - DNA, 13 bp, Artificial Sequence
  Oligonucleotide for detection of SNP TSC0013839
cttctatccgaaa

SEQ ID NO: 48665 - DNA, 13 bp, Artificial Sequence
  Oligonucleotide for detection of SNP TSC0013840
ttttgggtaattt

SEQ ID NO: 48666 - DNA, 13 bp, Artificial Sequence
  Oligonucleotide for detection of SNP TSC0013840
aaattacccaaaa

SEQ ID NO: 48667 - DNA, 13 bp, Artificial Sequence
  Oligonucleotide for detection of SNP TSC0013840
ttttggataattt

SEQ ID NO: 48668 - DNA, 13 bp, Artificial Sequence
  Oligonucleotide for detection of SNP TSC0013840
aaattatccaaaa

SEQ ID NO: 48669 - DNA, 13 bp, Artificial Sequence
  Oligonucleotide for detection of SNP TSC0013841
gttgttgtgtaaa

SEQ ID NO: 48670 - DNA, 13 bp, Artificial Sequence
  Oligonucleotide for detection of SNP TSC0013841
tttacacaacaac

SEQ ID NO: 48671 - DNA, 13 bp, Artificial Sequence
  Oligonucleotide for detection of SNP TSC0013841
gttgttttgtaaa

SEQ ID NO: 48672 - DNA, 13 bp, Artificial Sequence
  Oligonucleotide for detection of SNP TSC0013841
tttacaaaacaac

SEQ ID NO: 48673 - DNA, 13 bp, Artificial Sequence
  Oligonucleotide for detection of SNP TSC0013841
tttgtatagtagy

SEQ ID NO: 48674 - DNA, 13 bp, Artificial Sequence
  Oligonucleotide for detection of SNP TSC0013841
rctactatacaaa

SEQ ID NO: 48675 - DNA, 13 bp, Artificial Sequence
  Oligonucleotide for detection of SNP TSC0013841
tttgtaaagtagy

SEQ ID NO: 48676 - DNA, 13 bp, Artificial Sequence
  Oligonucleotide for detection of SNP TSC0013841
rctactttacaaa

SEQ ID NO: 48677 - DNA, 13 bp, Artificial Sequence
  Oligonucleotide for detection of SNP TSC0013842
aattaggtgtggt

SEQ ID NO: 48678 - DNA, 13 bp, Artificial Sequence
  Oligonucleotide for detection of SNP TSC0013842
accacacctaatt

SEQ ID NO: 48679 - DNA, 13 bp, Artificial Sequence
  Oligonucleotide for detection of SNP TSC0013842
aattagatgtggt

SEQ ID NO: 48680 - DNA, 13 bp, Artificial Sequence
  Oligonucleotide for detection of SNP TSC0013842
accacatctaatt

SEQ ID NO: 48681 - DNA, 13 bp, Artificial Sequence
  Oligonucleotide for detection of SNP TSC0013842
aattaggcgtggt

SEQ ID NO: 48682 - DNA, 13 bp, Artificial Sequence
  Oligonucleotide for detection of SNP TSC0013842
accacgcctaatt

SEQ ID NO: 48683 - DNA, 13 bp, Artificial Sequence
  Oligonucleotide for detection of SNP TSC0013842
aattagacgtggt

SEQ ID NO: 48684 - DNA, 13 bp, Artificial Sequence
  Oligonucleotide for detection of SNP TSC0013842
accacgtctaatt

SEQ ID NO: 48685 - DNA, 13 bp, Artificial Sequence
  Oligonucleotide for detection of SNP TSC0013843
gggaggtggaggy

SEQ ID NO: 48686 - DNA, 13 bp, Artificial Sequence
  Oligonucleotide for detection of SNP TSC0013843
rcctccacctccc

SEQ ID NO: 48687 - DNA, 13 bp, Artificial Sequence
  Oligonucleotide for detection of SNP TSC0013843
gggagggggaggy

SEQ ID NO: 48688 - DNA, 13 bp, Artificial Sequence
  Oligonucleotide for detection of SNP TSC0013843
rcctccccctccc

SEQ ID NO: 48689 - DNA, 13 bp, Artificial Sequence
  Oligonucleotide for detection of SNP TSC0013844
tgtgtaatattat

SEQ ID NO: 48690 - DNA, 13 bp, Artificial Sequence
  Oligonucleotide for detection of SNP TSC0013844
ataatattacaca

SEQ ID NO: 48691 - DNA, 13 bp, Artificial Sequence
  Oligonucleotide for detection of SNP TSC0013844
tgtgtattattat

SEQ ID NO: 48692 - DNA, 13 bp, Artificial Sequence
  Oligonucleotide for detection of SNP TSC0013844
ataataatacaca

SEQ ID NO: 48693 - DNA, 13 bp, Artificial Sequence
  Oligonucleotide for detection of SNP TSC0013844
atggtgttgtata

SEQ ID NO: 48694 - DNA, 13 bp, Artificial Sequence
  Oligonucleotide for detection of SNP TSC0013844
tatacaacaccat

SEQ ID NO: 48695 - DNA, 13 bp, Artificial Sequence
  Oligonucleotide for detection of SNP TSC0013844
atggtggtgtata

SEQ ID NO: 48696 - DNA, 13 bp, Artificial Sequence
  Oligonucleotide for detection of SNP TSC0013844
tatacaccaccat

SEQ ID NO: 48697 - DNA, 13 bp, Artificial Sequence
  Oligonucleotide for detection of SNP TSC0013845
aatattattgtay

SEQ ID NO: 48698 - DNA, 13 bp, Artificial Sequence
  Oligonucleotide for detection of SNP TSC0013845
rtacaataatatt

SEQ ID NO: 48699 - DNA, 13 bp, Artificial Sequence
  Oligonucleotide for detection of SNP TSC0013845
aatattgttgtay

SEQ ID NO: 48700 - DNA, 13 bp, Artificial Sequence
  Oligonucleotide for detection of SNP TSC0013845
rtacaacaatatt

SEQ ID NO: 48701 - DNA, 13 bp, Artificial Sequence
  Oligonucleotide for detection of SNP TSC0013845
aatattatcgtay

SEQ ID NO: 48702 - DNA, 13 bp, Artificial Sequence
  Oligonucleotide for detection of SNP TSC0013845
rtacgataatatt

SEQ ID NO: 48703 - DNA, 13 bp, Artificial Sequence
  Oligonucleotide for detection of SNP TSC0013845
aatattgtcgtay

SEQ ID NO: 48704 - DNA, 13 bp, Artificial Sequence
  Oligonucleotide for detection of SNP TSC0013845
rtacgacaatatt

SEQ ID NO: 48705 - DNA, 13 bp, Artificial Sequence
  Oligonucleotide for detection of SNP TSC0013846
ttttatgttaata

SEQ ID NO: 48706 - DNA, 13 bp, Artificial Sequence
  Oligonucleotide for detection of SNP TSC0013846
tattaacataaaa

SEQ ID NO: 48707 - DNA, 13 bp, Artificial Sequence
  Oligonucleotide for detection of SNP TSC0013846
ttttatattaata

SEQ ID NO: 48708 - DNA, 13 bp, Artificial Sequence
  Oligonucleotide for detection of SNP TSC0013846
tattaatataaaa

SEQ ID NO: 48709 - DNA, 13 bp, Artificial Sequence
  Oligonucleotide for detection of SNP TSC0013847
taatttattttay

SEQ ID NO: 48710 - DNA, 13 bp, Artificial Sequence
  Oligonucleotide for detection of SNP TSC0013847
rtaaaataaatta

SEQ ID NO: 48711 - DNA, 13 bp, Artificial Sequence
  Oligonucleotide for detection of SNP TSC0013847
taatttgttttay

SEQ ID NO: 48712 - DNA, 13 bp, Artificial Sequence
  Oligonucleotide for detection of SNP TSC0013847
rtaaaacaaatta

SEQ ID NO: 48713 - DNA, 13 bp, Artificial Sequence
  Oligonucleotide for detection of SNP TSC0013847
taattcgttttay

SEQ ID NO: 48714 - DNA, 13 bp, Artificial Sequence
  Oligonucleotide for detection of SNP TSC0013847
rtaaaacgaatta

SEQ ID NO: 48715 - DNA, 13 bp, Artificial Sequence
  Oligonucleotide for detection of SNP TSC0013847
gtgggatggatta

SEQ ID NO: 48716 - DNA, 13 bp, Artificial Sequence
  Oligonucleotide for detection of SNP TSC0013847
taatccatcccac

SEQ ID NO: 48717 - DNA, 13 bp, Artificial Sequence
  Oligonucleotide for detection of SNP TSC0013847
gtgggacggatta

SEQ ID NO: 48718 - DNA, 13 bp, Artificial Sequence
  Oligonucleotide for detection of SNP TSC0013847
taatccgtcccac

SEQ ID NO: 48719 - DNA, 13 bp, Artificial Sequence
  Oligonucleotide for detection of SNP TSC0013848
atgataattttay

SEQ ID NO: 48720 - DNA, 13 bp, Artificial Sequence
  Oligonucleotide for detection of SNP TSC0013848
rtaaaattatcat

SEQ ID NO: 48721 - DNA, 13 bp, Artificial Sequence
  Oligonucleotide for detection of SNP TSC0013848
atgatagttttay

SEQ ID NO: 48722 - DNA, 13 bp, Artificial Sequence
  Oligonucleotide for detection of SNP TSC0013848
rtaaaactatcat

SEQ ID NO: 48723 - DNA, 13 bp, Artificial Sequence
  Oligonucleotide for detection of SNP TSC0013849
atatttatggtay

SEQ ID NO: 48724 - DNA, 13 bp, Artificial Sequence
  Oligonucleotide for detection of SNP TSC0013849
rtaccataaatat

SEQ ID NO: 48725 - DNA, 13 bp, Artificial Sequence
  Oligonucleotide for detection of SNP TSC0013849
atatttgtggtay

SEQ ID NO: 48726 - DNA, 13 bp, Artificial Sequence
  Oligonucleotide for detection of SNP TSC0013849
rtaccacaaatat

SEQ ID NO: 48727 - DNA, 13 bp, Artificial Sequence
  Oligonucleotide for detection of SNP TSC0013849
atatttacggtay

SEQ ID NO: 48728 - DNA, 13 bp, Artificial Sequence
  Oligonucleotide for detection of SNP TSC0013849
rtaccgtaaatat

SEQ ID NO: 48729 - DNA, 13 bp, Artificial Sequence
  Oligonucleotide for detection of SNP TSC0013849
atatttgcggtay

SEQ ID NO: 48730 - DNA, 13 bp, Artificial Sequence
  Oligonucleotide for detection of SNP TSC0013849
rtaccgcaaatat

SEQ ID NO: 48731 - DNA, 13 bp, Artificial Sequence
  Oligonucleotide for detection of SNP TSC0013850
gaataagtgaatt

SEQ ID NO: 48732 - DNA, 13 bp, Artificial Sequence
  Oligonucleotide for detection of SNP TSC0013850
aattcacttattc

SEQ ID NO: 48733 - DNA, 13 bp, Artificial Sequence
  Oligonucleotide for detection of SNP TSC0013850
gaataaatgaatt

SEQ ID NO: 48734 - DNA, 13 bp, Artificial Sequence
  Oligonucleotide for detection of SNP TSC0013850
aattcatttattc

SEQ ID NO: 48735 - DNA, 13 bp, Artificial Sequence
  Oligonucleotide for detection of SNP TSC0013851
tttatttggtgay

SEQ ID NO: 48736 - DNA, 13 bp, Artificial Sequence
  Oligonucleotide for detection of SNP TSC0013851
rtcaccaaataaa

SEQ ID NO: 48737 - DNA, 13 bp, Artificial Sequence
  Oligonucleotide for detection of SNP TSC0013851
tttattcggtgay

SEQ ID NO: 48738 - DNA, 13 bp, Artificial Sequence
  Oligonucleotide for detection of SNP TSC0013851
rtcaccgaataaa

SEQ ID NO: 48739 - DNA, 13 bp, Artificial Sequence
  Oligonucleotide for detection of SNP TSC0013851
gttattgaataga

SEQ ID NO: 48740 - DNA, 13 bp, Artificial Sequence
  Oligonucleotide for detection of SNP TSC0013851
tctattcaataac

SEQ ID NO: 48741 - DNA, 13 bp, Artificial Sequence
  Oligonucleotide for detection of SNP TSC0013851
gttattaaataga

SEQ ID NO: 48742 - DNA, 13 bp, Artificial Sequence
  Oligonucleotide for detection of SNP TSC0013851
tctatttaataac

SEQ ID NO: 48743 - DNA, 13 bp, Artificial Sequence
  Oligonucleotide for detection of SNP TSC0013851
gttatcgaataga

SEQ ID NO: 48744 - DNA, 13 bp, Artificial Sequence
  Oligonucleotide for detection of SNP TSC0013851
tctattcgataac

SEQ ID NO: 48745 - DNA, 13 bp, Artificial Sequence
  Oligonucleotide for detection of SNP TSC0013853
gagttttttatty

SEQ ID NO: 48746 - DNA, 13 bp, Artificial Sequence
  Oligonucleotide for detection of SNP TSC0013853
raataaaaaactc

SEQ ID NO: 48747 - DNA, 13 bp, Artificial Sequence
  Oligonucleotide for detection of SNP TSC0013853
gagtttgttatty

SEQ ID NO: 48748 - DNA, 13 bp, Artificial Sequence
  Oligonucleotide for detection of SNP TSC0013853
raataacaaactc

SEQ ID NO: 48749 - DNA, 13 bp, Artificial Sequence
  Oligonucleotide for detection of SNP TSC0013853
gagttcgttatty

SEQ ID NO: 48750 - DNA, 13 bp, Artificial Sequence
  Oligonucleotide for detection of SNP TSC0013853
raataacgaactc

SEQ ID NO: 48751 - DNA, 13 bp, Artificial Sequence
  Oligonucleotide for detection of SNP TSC0013853
gggtgagggatty

SEQ ID NO: 48752 - DNA, 13 bp, Artificial Sequence
  Oligonucleotide for detection of SNP TSC0013853
raatccctcaccc

SEQ ID NO: 48753 - DNA, 13 bp, Artificial Sequence
  Oligonucleotide for detection of SNP TSC0013853
gggtgatggatty

SEQ ID NO: 48754 - DNA, 13 bp, Artificial Sequence
  Oligonucleotide for detection of SNP TSC0013853
raatccatcaccc

SEQ ID NO: 48755 - DNA, 13 bp, Artificial Sequence
  Oligonucleotide for detection of SNP TSC0013853
gggtgacggatty

SEQ ID NO: 48756 - DNA, 13 bp, Artificial Sequence
  Oligonucleotide for detection of SNP TSC0013853
raatccgtcaccc

SEQ ID NO: 48757 - DNA, 13 bp, Artificial Sequence
  Oligonucleotide for detection of SNP TSC0013854
aaaataaaataga

SEQ ID NO: 48758 - DNA, 13 bp, Artificial Sequence
  Oligonucleotide for detection of SNP TSC0013854
tctattttatttt

SEQ ID NO: 48759 - DNA, 13 bp, Artificial Sequence
  Oligonucleotide for detection of SNP TSC0013854
aaaatagaataga

SEQ ID NO: 48760 - DNA, 13 bp, Artificial Sequence
  Oligonucleotide for detection of SNP TSC0013854
tctattctatttt

SEQ ID NO: 48761 - DNA, 13 bp, Artificial Sequence
  Oligonucleotide for detection of SNP TSC0013856
aatgttaaataay

SEQ ID NO: 48762 - DNA, 13 bp, Artificial Sequence
  Oligonucleotide for detection of SNP TSC0013856
rttatttaacatt

SEQ ID NO: 48763 - DNA, 13 bp, Artificial Sequence
  Oligonucleotide for detection of SNP TSC0013856
aatgttgaataay

SEQ ID NO: 48764 - DNA, 13 bp, Artificial Sequence
  Oligonucleotide for detection of SNP TSC0013856
rttattcaacatt

SEQ ID NO: 48765 - DNA, 13 bp, Artificial Sequence
  Oligonucleotide for detection of SNP TSC0013857
agatttagttttt

SEQ ID NO: 48766 - DNA, 13 bp, Artificial Sequence
  Oligonucleotide for detection of SNP TSC0013857
aaaaactaaatct

SEQ ID NO: 48767 - DNA, 13 bp, Artificial Sequence
  Oligonucleotide for detection of SNP TSC0013857
agatttggttttt

SEQ ID NO: 48768 - DNA, 13 bp, Artificial Sequence
  Oligonucleotide for detection of SNP TSC0013857
aaaaaccaaatct

SEQ ID NO: 48769 - DNA, 13 bp, Artificial Sequence
  Oligonucleotide for detection of SNP TSC0013858
agggatgagatgt

SEQ ID NO: 48770 - DNA, 13 bp, Artificial Sequence
  Oligonucleotide for detection of SNP TSC0013858
acatctcatccct

SEQ ID NO: 48771 - DNA, 13 bp, Artificial Sequence
  Oligonucleotide for detection of SNP TSC0013858
agggataagatgt

SEQ ID NO: 48772 - DNA, 13 bp, Artificial Sequence
  Oligonucleotide for detection of SNP TSC0013858
acatcttatccct

SEQ ID NO: 48773 - DNA, 13 bp, Artificial Sequence
  Oligonucleotide for detection of SNP TSC0013859
atatatattttat

SEQ ID NO: 48774 - DNA, 13 bp, Artificial Sequence
  Oligonucleotide for detection of SNP TSC0013859
ataaaatatatat

SEQ ID NO: 48775 - DNA, 13 bp, Artificial Sequence
  Oligonucleotide for detection of SNP TSC0013859
atatattttttat

SEQ ID NO: 48776 - DNA, 13 bp, Artificial Sequence
  Oligonucleotide for detection of SNP TSC0013859
ataaaaaatatat

SEQ ID NO: 48777 - DNA, 13 bp, Artificial Sequence
  Oligonucleotide for detection of SNP TSC0013859
atgagatatgtat

SEQ ID NO: 48778 - DNA, 13 bp, Artificial Sequence
  Oligonucleotide for detection of SNP TSC0013859
atacatatctcat

SEQ ID NO: 48779 - DNA, 13 bp, Artificial Sequence
  Oligonucleotide for detection of SNP TSC0013859
atgagaaatgtat

SEQ ID NO: 48780 - DNA, 13 bp, Artificial Sequence
  Oligonucleotide for detection of SNP TSC0013859
atacatttctcat

SEQ ID NO: 48781 - DNA, 13 bp, Artificial Sequence
  Oligonucleotide for detection of SNP TSC0013860
agaatatgatatt

SEQ ID NO: 48782 - DNA, 13 bp, Artificial Sequence
  Oligonucleotide for detection of SNP TSC0013860
aatatcatattct

SEQ ID NO: 48783 - DNA, 13 bp, Artificial Sequence
  Oligonucleotide for detection of SNP TSC0013860
agaatacgatatt

SEQ ID NO: 48784 - DNA, 13 bp, Artificial Sequence
  Oligonucleotide for detection of SNP TSC0013860
aatatcgtattct

SEQ ID NO: 48785 - DNA, 13 bp, Artificial Sequence
  Oligonucleotide for detection of SNP TSC0013860
agtgttgtatttt

SEQ ID NO: 48786 - DNA, 13 bp, Artificial Sequence
  Oligonucleotide for detection of SNP TSC0013860
aaaatacaacact

SEQ ID NO: 48787 - DNA, 13 bp, Artificial Sequence
  Oligonucleotide for detection of SNP TSC0013860
agtgttatatttt

SEQ ID NO: 48788 - DNA, 13 bp, Artificial Sequence
  Oligonucleotide for detection of SNP TSC0013860
aaaatataacact

SEQ ID NO: 48789 - DNA, 13 bp, Artificial Sequence
  Oligonucleotide for detection of SNP TSC0013860
agtgtcgtatttt

SEQ ID NO: 48790 - DNA, 13 bp, Artificial Sequence
  Oligonucleotide for detection of SNP TSC0013860
aaaatacgacact

SEQ ID NO: 48791 - DNA, 13 bp, Artificial Sequence
  Oligonucleotide for detection of SNP TSC0013862
tatttgatagaaa

SEQ ID NO: 48792 - DNA, 13 bp, Artificial Sequence
  Oligonucleotide for detection of SNP TSC0013862
tttctatcaaata

SEQ ID NO: 48793 - DNA, 13 bp, Artificial Sequence
  Oligonucleotide for detection of SNP TSC0013862
tatttggtagaaa

SEQ ID NO: 48794 - DNA, 13 bp, Artificial Sequence
  Oligonucleotide for detection of SNP TSC0013862
tttctaccaaata

SEQ ID NO: 48795 - DNA, 13 bp, Artificial Sequence
  Oligonucleotide for detection of SNP TSC0013865
aatagaatttgtt

SEQ ID NO: 48796 - DNA, 13 bp, Artificial Sequence
  Oligonucleotide for detection of SNP TSC0013865
aacaaattctatt

SEQ ID NO: 48797 - DNA, 13 bp, Artificial Sequence
  Oligonucleotide for detection of SNP TSC0013865
aatagattttgtt

SEQ ID NO: 48798 - DNA, 13 bp, Artificial Sequence
  Oligonucleotide for detection of SNP TSC0013865
aacaaaatctatt

SEQ ID NO: 48799 - DNA, 13 bp, Artificial Sequence
  Oligonucleotide for detection of SNP TSC0013865
aataggttttgtt

SEQ ID NO: 48800 - DNA, 13 bp, Artificial Sequence
  Oligonucleotide for detection of SNP TSC0013865
aacaaaacctatt

SEQ ID NO: 48801 - DNA, 13 bp, Artificial Sequence
  Oligonucleotide for detection of SNP TSC0013865
aatagggtttgtt

SEQ ID NO: 48802 - DNA, 13 bp, Artificial Sequence
  Oligonucleotide for detection of SNP TSC0013865
aacaaaccctatt

SEQ ID NO: 48803 - DNA, 13 bp, Artificial Sequence
  Oligonucleotide for detection of SNP TSC0013866
tgttagtaatttt

SEQ ID NO: 48804 - DNA, 13 bp, Artificial Sequence
  Oligonucleotide for detection of SNP TSC0013866
aaaattactaaca

SEQ ID NO: 48805 - DNA, 13 bp, Artificial Sequence
  Oligonucleotide for detection of SNP TSC0013866
tgttaggaatttt

SEQ ID NO: 48806 - DNA, 13 bp, Artificial Sequence
  Oligonucleotide for detection of SNP TSC0013866
aaaattcctaaca

SEQ ID NO: 48807 - DNA, 13 bp, Artificial Sequence
  Oligonucleotide for detection of SNP TSC0013866
aagattgttaata

SEQ ID NO: 48808 - DNA, 13 bp, Artificial Sequence
  Oligonucleotide for detection of SNP TSC0013866
tattaacaatctt

SEQ ID NO: 48809 - DNA, 13 bp, Artificial Sequence
  Oligonucleotide for detection of SNP TSC0013866
aagatttttaata

SEQ ID NO: 48810 - DNA, 13 bp, Artificial Sequence
  Oligonucleotide for detection of SNP TSC0013866
tattaaaaatctt

SEQ ID NO: 48811 - DNA, 13 bp, Artificial Sequence
  Oligonucleotide for detection of SNP TSC0013867
taggttagtatta

SEQ ID NO: 48812 - DNA, 13 bp, Artificial Sequence
  Oligonucleotide for detection of SNP TSC0013867
taatactaaccta

SEQ ID NO: 48813 - DNA, 13 bp, Artificial Sequence
  Oligonucleotide for detection of SNP TSC0013867
taggttggtatta

SEQ ID NO: 48814 - DNA, 13 bp, Artificial Sequence
  Oligonucleotide for detection of SNP TSC0013867
taataccaaccta

SEQ ID NO: 48815 - DNA, 13 bp, Artificial Sequence
  Oligonucleotide for detection of SNP TSC0013868
aaaaaaatattag

SEQ ID NO: 48816 - DNA, 13 bp, Artificial Sequence
  Oligonucleotide for detection of SNP TSC0013868
ctaatattttttt

SEQ ID NO: 48817 - DNA, 13 bp, Artificial Sequence
  Oligonucleotide for detection of SNP TSC0013868
aaaaaagtattag

SEQ ID NO: 48818 - DNA, 13 bp, Artificial Sequence
  Oligonucleotide for detection of SNP TSC0013868
ctaatactttttt

SEQ ID NO: 48819 - DNA, 13 bp, Artificial Sequence
  Oligonucleotide for detection of SNP TSC0013869
agttgtgatggtt

SEQ ID NO: 48820 - DNA, 13 bp, Artificial Sequence
  Oligonucleotide for detection of SNP TSC0013869
aaccatcacaact

SEQ ID NO: 48821 - DNA, 13 bp, Artificial Sequence
  Oligonucleotide for detection of SNP TSC0013869
agttgttatggtt

SEQ ID NO: 48822 - DNA, 13 bp, Artificial Sequence
  Oligonucleotide for detection of SNP TSC0013869
aaccataacaact

SEQ ID NO: 48823 - DNA, 13 bp, Artificial Sequence
  Oligonucleotide for detection of SNP TSC0013869
aattattatagtt

SEQ ID NO: 48824 - DNA, 13 bp, Artificial Sequence
  Oligonucleotide for detection of SNP TSC0013869
aactataataatt

SEQ ID NO: 48825 - DNA, 13 bp, Artificial Sequence
  Oligonucleotide for detection of SNP TSC0013869
aattataatagtt

SEQ ID NO: 48826 - DNA, 13 bp, Artificial Sequence
  Oligonucleotide for detection of SNP TSC0013869
aactattataatt

SEQ ID NO: 48827 - DNA, 13 bp, Artificial Sequence
  Oligonucleotide for detection of SNP TSC0013870
ttatttaataggy

SEQ ID NO: 48828 - DNA, 13 bp, Artificial Sequence
  Oligonucleotide for detection of SNP TSC0013870
rcctattaaataa

SEQ ID NO: 48829 - DNA, 13 bp, Artificial Sequence
  Oligonucleotide for detection of SNP TSC0013870
ttatttgataggy

SEQ ID NO: 48830 - DNA, 13 bp, Artificial Sequence
  Oligonucleotide for detection of SNP TSC0013870
rcctatcaaataa

SEQ ID NO: 48831 - DNA, 13 bp, Artificial Sequence
  Oligonucleotide for detection of SNP TSC0013870
ttattcgataggy

SEQ ID NO: 48832 - DNA, 13 bp, Artificial Sequence
  Oligonucleotide for detection of SNP TSC0013870
rcctatcgaataa

SEQ ID NO: 48833 - DNA, 13 bp, Artificial Sequence
  Oligonucleotide for detection of SNP TSC0013870
gtttattggatgg

SEQ ID NO: 48834 - DNA, 13 bp, Artificial Sequence
  Oligonucleotide for detection of SNP TSC0013870
ccatccaataaac

SEQ ID NO: 48835 - DNA, 13 bp, Artificial Sequence
  Oligonucleotide for detection of SNP TSC0013870
gtttatcggatgg

SEQ ID NO: 48836 - DNA, 13 bp, Artificial Sequence
  Oligonucleotide for detection of SNP TSC0013870
ccatccgataaac

SEQ ID NO: 48837 - DNA, 13 bp, Artificial Sequence
  Oligonucleotide for detection of SNP TSC0013873
agttttgttttgt

SEQ ID NO: 48838 - DNA, 13 bp, Artificial Sequence
  Oligonucleotide for detection of SNP TSC0013873
acaaaacaaaact

SEQ ID NO: 48839 - DNA, 13 bp, Artificial Sequence
  Oligonucleotide for detection of SNP TSC0013873
agtttttttttgt

SEQ ID NO: 48840 - DNA, 13 bp, Artificial Sequence
  Oligonucleotide for detection of SNP TSC0013873
acaaaaaaaaact

SEQ ID NO: 48841 - DNA, 13 bp, Artificial Sequence
  Oligonucleotide for detection of SNP TSC0013873
atagaatagagtt

SEQ ID NO: 48842 - DNA, 13 bp, Artificial Sequence
  Oligonucleotide for detection of SNP TSC0013873
aactctattctat

SEQ ID NO: 48843 - DNA, 13 bp, Artificial Sequence
  Oligonucleotide for detection of SNP TSC0013873
atagaaaagagtt

SEQ ID NO: 48844 - DNA, 13 bp, Artificial Sequence
  Oligonucleotide for detection of SNP TSC0013873
aactcttttctat

SEQ ID NO: 48845 - DNA, 13 bp, Artificial Sequence
  Oligonucleotide for detection of SNP TSC0013874
tgtttaatttatg

SEQ ID NO: 48846 - DNA, 13 bp, Artificial Sequence
  Oligonucleotide for detection of SNP TSC0013874
cataaattaaaca

SEQ ID NO: 48847 - DNA, 13 bp, Artificial Sequence
  Oligonucleotide for detection of SNP TSC0013874
tgtttagtttatg

SEQ ID NO: 48848 - DNA, 13 bp, Artificial Sequence
  Oligonucleotide for detection of SNP TSC0013874
cataaactaaaca

SEQ ID NO: 48849 - DNA, 13 bp, Artificial Sequence
  Oligonucleotide for detection of SNP TSC0013875
ttgatggtgatgg

SEQ ID NO: 48850 - DNA, 13 bp, Artificial Sequence
  Oligonucleotide for detection of SNP TSC0013875
ccatcaccatcaa

SEQ ID NO: 48851 - DNA, 13 bp, Artificial Sequence
  Oligonucleotide for detection of SNP TSC0013875
ttgatgatgatgg

SEQ ID NO: 48852 - DNA, 13 bp, Artificial Sequence
  Oligonucleotide for detection of SNP TSC0013875
ccatcatcatcaa

SEQ ID NO: 48853 - DNA, 13 bp, Artificial Sequence
  Oligonucleotide for detection of SNP TSC0013875
tcgatggtgatgg

SEQ ID NO: 48854 - DNA, 13 bp, Artificial Sequence
  Oligonucleotide for detection of SNP TSC0013875
ccatcaccatcga

SEQ ID NO: 48855 - DNA, 13 bp, Artificial Sequence
  Oligonucleotide for detection of SNP TSC0013875
tcgatgatgatgg

SEQ ID NO: 48856 - DNA, 13 bp, Artificial Sequence
  Oligonucleotide for detection of SNP TSC0013875
ccatcatcatcga

SEQ ID NO: 48857 - DNA, 13 bp, Artificial Sequence
  Oligonucleotide for detection of SNP TSC0013875
ttgatggtgacgg

SEQ ID NO: 48858 - DNA, 13 bp, Artificial Sequence
  Oligonucleotide for detection of SNP TSC0013875
ccgtcaccatcaa

SEQ ID NO: 48859 - DNA, 13 bp, Artificial Sequence
  Oligonucleotide for detection of SNP TSC0013875
ttgatgatgacgg

SEQ ID NO: 48860 - DNA, 13 bp, Artificial Sequence
  Oligonucleotide for detection of SNP TSC0013875
ccgtcatcatcaa

SEQ ID NO: 48861 - DNA, 13 bp, Artificial Sequence
  Oligonucleotide for detection of SNP TSC0013875
tcgatggtgacgg

SEQ ID NO: 48862 - DNA, 13 bp, Artificial Sequence
  Oligonucleotide for detection of SNP TSC0013875
ccgtcaccatcga

SEQ ID NO: 48863 - DNA, 13 bp, Artificial Sequence
  Oligonucleotide for detection of SNP TSC0013875
tcgatgatgacgg

SEQ ID NO: 48864 - DNA, 13 bp, Artificial Sequence
  Oligonucleotide for detection of SNP TSC0013875
ccgtcatcatcga

SEQ ID NO: 48865 - DNA, 13 bp, Artificial Sequence
  Oligonucleotide for detection of SNP TSC0013876
atatatgtatgta

SEQ ID NO: 48866 - DNA, 13 bp, Artificial Sequence
  Oligonucleotide for detection of SNP TSC0013876
tacatacatatat

SEQ ID NO: 48867 - DNA, 13 bp, Artificial Sequence
  Oligonucleotide for detection of SNP TSC0013877
gttttgaggtaaa

SEQ ID NO: 48868 - DNA, 13 bp, Artificial Sequence
  Oligonucleotide for detection of SNP TSC0013877
tttacctcaaaac

SEQ ID NO: 48869 - DNA, 13 bp, Artificial Sequence
  Oligonucleotide for detection of SNP TSC0013877
gttttggggtaaa

SEQ ID NO: 48870 - DNA, 13 bp, Artificial Sequence
  Oligonucleotide for detection of SNP TSC0013877
tttaccccaaaac

SEQ ID NO: 48871 - DNA, 13 bp, Artificial Sequence
  Oligonucleotide for detection of SNP TSC0013878
agatggattttty

SEQ ID NO: 48872 - DNA, 13 bp, Artificial Sequence
  Oligonucleotide for detection of SNP TSC0013878
raaaaatccatct

SEQ ID NO: 48873 - DNA, 13 bp, Artificial Sequence
  Oligonucleotide for detection of SNP TSC0013878
agatgggttttty

SEQ ID NO: 48874 - DNA, 13 bp, Artificial Sequence
  Oligonucleotide for detection of SNP TSC0013878
raaaaacccatct

SEQ ID NO: 48875 - DNA, 13 bp, Artificial Sequence
  Oligonucleotide for detection of SNP TSC0013879
gataaatggtata

SEQ ID NO: 48876 - DNA, 13 bp, Artificial Sequence
  Oligonucleotide for detection of SNP TSC0013879
tataccatttatc

SEQ ID NO: 48877 - DNA, 13 bp, Artificial Sequence
  Oligonucleotide for detection of SNP TSC0013879
gataaacggtata

SEQ ID NO: 48878 - DNA, 13 bp, Artificial Sequence
  Oligonucleotide for detection of SNP TSC0013879
tataccgtttatc

SEQ ID NO: 48879 - DNA, 13 bp, Artificial Sequence
  Oligonucleotide for detection of SNP TSC0013879
tatattgtttaty

SEQ ID NO: 48880 - DNA, 13 bp, Artificial Sequence
  Oligonucleotide for detection of SNP TSC0013879
rataaacaatata

SEQ ID NO: 48881 - DNA, 13 bp, Artificial Sequence
  Oligonucleotide for detection of SNP TSC0013879
tatattatttaty

SEQ ID NO: 48882 - DNA, 13 bp, Artificial Sequence
  Oligonucleotide for detection of SNP TSC0013879
rataaataatata

SEQ ID NO: 48883 - DNA, 13 bp, Artificial Sequence
  Oligonucleotide for detection of SNP TSC0013879
tatatcgtttaty

SEQ ID NO: 48884 - DNA, 13 bp, Artificial Sequence
  Oligonucleotide for detection of SNP TSC0013879
rataaacgatata

SEQ ID NO: 48885 - DNA, 13 bp, Artificial Sequence
  Oligonucleotide for detection of SNP TSC0013880
tttgagattttta

SEQ ID NO: 48886 - DNA, 13 bp, Artificial Sequence
  Oligonucleotide for detection of SNP TSC0013880
taaaaatctcaaa

SEQ ID NO: 48887 - DNA, 13 bp, Artificial Sequence
  Oligonucleotide for detection of SNP TSC0013880
tttgagtttttta

SEQ ID NO: 48888 - DNA, 13 bp, Artificial Sequence
  Oligonucleotide for detection of SNP TSC0013880
taaaaaactcaaa

SEQ ID NO: 48889 - DNA, 13 bp, Artificial Sequence
  Oligonucleotide for detection of SNP TSC0013880
tagagattttaga

SEQ ID NO: 48890 - DNA, 13 bp, Artificial Sequence
  Oligonucleotide for detection of SNP TSC0013880
tctaaaatctcta

SEQ ID NO: 48891 - DNA, 13 bp, Artificial Sequence
  Oligonucleotide for detection of SNP TSC0013880
tagagagtttaga

SEQ ID NO: 48892 - DNA, 13 bp, Artificial Sequence
  Oligonucleotide for detection of SNP TSC0013880
tctaaactctcta

SEQ ID NO: 48893 - DNA, 13 bp, Artificial Sequence
  Oligonucleotide for detection of SNP TSC0013881
tggtaggtattgy

SEQ ID NO: 48894 - DNA, 13 bp, Artificial Sequence
  Oligonucleotide for detection of SNP TSC0013881
rcaatacctacca

SEQ ID NO: 48895 - DNA, 13 bp, Artificial Sequence
  Oligonucleotide for detection of SNP TSC0013881
tggtagttattgy

SEQ ID NO: 48896 - DNA, 13 bp, Artificial Sequence
  Oligonucleotide for detection of SNP TSC0013881
rcaataactacca

SEQ ID NO: 48897 - DNA, 13 bp, Artificial Sequence
  Oligonucleotide for detection of SNP TSC0013881
gtagtgtttgtta

SEQ ID NO: 48898 - DNA, 13 bp, Artificial Sequence
  Oligonucleotide for detection of SNP TSC0013881
taacaaacactac

SEQ ID NO: 48899 - DNA, 13 bp, Artificial Sequence
  Oligonucleotide for detection of SNP TSC0013881
gtagtgattgtta

SEQ ID NO: 48900 - DNA, 13 bp, Artificial Sequence
  Oligonucleotide for detection of SNP TSC0013881
taacaatcactac

SEQ ID NO: 48901 - DNA, 13 bp, Artificial Sequence
  Oligonucleotide for detection of SNP TSC0013882
agtttggggattg

SEQ ID NO: 48902 - DNA, 13 bp, Artificial Sequence
  Oligonucleotide for detection of SNP TSC0013882
caatccccaaact

SEQ ID NO: 48903 - DNA, 13 bp, Artificial Sequence
  Oligonucleotide for detection of SNP TSC0013882
agtttgaggattg

SEQ ID NO: 48904 - DNA, 13 bp, Artificial Sequence
  Oligonucleotide for detection of SNP TSC0013882
caatcctcaaact

SEQ ID NO: 48905 - DNA, 13 bp, Artificial Sequence
  Oligonucleotide for detection of SNP TSC0013882
agtttggggatcg

SEQ ID NO: 48906 - DNA, 13 bp, Artificial Sequence
  Oligonucleotide for detection of SNP TSC0013882
cgatccccaaact

SEQ ID NO: 48907 - DNA, 13 bp, Artificial Sequence
  Oligonucleotide for detection of SNP TSC0013882
agtttgaggatcg

SEQ ID NO: 48908 - DNA, 13 bp, Artificial Sequence
  Oligonucleotide for detection of SNP TSC0013882
cgatcctcaaact

SEQ ID NO: 48909 - DNA, 13 bp, Artificial Sequence
  Oligonucleotide for detection of SNP TSC0013886
atttatatttgty

SEQ ID NO: 48910 - DNA, 13 bp, Artificial Sequence
  Oligonucleotide for detection of SNP TSC0013886
racaaatataaat

SEQ ID NO: 48911 - DNA, 13 bp, Artificial Sequence
  Oligonucleotide for detection of SNP TSC0013886
atttatgtttgty

SEQ ID NO: 48912 - DNA, 13 bp, Artificial Sequence
  Oligonucleotide for detection of SNP TSC0013886
racaaacataaat

SEQ ID NO: 48913 - DNA, 13 bp, Artificial Sequence
  Oligonucleotide for detection of SNP TSC0013886
atttacgtttgty

SEQ ID NO: 48914 - DNA, 13 bp, Artificial Sequence
  Oligonucleotide for detection of SNP TSC0013886
racaaacgtaaat

SEQ ID NO: 48915 - DNA, 13 bp, Artificial Sequence
  Oligonucleotide for detection of SNP TSC0013886
ggtagatgtaaat

SEQ ID NO: 48916 - DNA, 13 bp, Artificial Sequence
  Oligonucleotide for detection of SNP TSC0013886
atttacatctacc

SEQ ID NO: 48917 - DNA, 13 bp, Artificial Sequence
  Oligonucleotide for detection of SNP TSC0013886
ggtagacgtaaat

SEQ ID NO: 48918 - DNA, 13 bp, Artificial Sequence
  Oligonucleotide for detection of SNP TSC0013886
atttacgtctacc

SEQ ID NO: 48919 - DNA, 13 bp, Artificial Sequence
  Oligonucleotide for detection of SNP TSC0013887
aaatttattaata

SEQ ID NO: 48920 - DNA, 13 bp, Artificial Sequence
  Oligonucleotide for detection of SNP TSC0013887
tattaataaattt

SEQ ID NO: 48921 - DNA, 13 bp, Artificial Sequence
  Oligonucleotide for detection of SNP TSC0013887
aaatttgttaata

SEQ ID NO: 48922 - DNA, 13 bp, Artificial Sequence
  Oligonucleotide for detection of SNP TSC0013887
tattaacaaattt

SEQ ID NO: 48923 - DNA, 13 bp, Artificial Sequence
  Oligonucleotide for detection of SNP TSC0013887
aaattcgttaata

SEQ ID NO: 48924 - DNA, 13 bp, Artificial Sequence
  Oligonucleotide for detection of SNP TSC0013887
tattaacgaattt

SEQ ID NO: 48925 - DNA, 13 bp, Artificial Sequence
  Oligonucleotide for detection of SNP TSC0013887
tgttgatgaattt

SEQ ID NO: 48926 - DNA, 13 bp, Artificial Sequence
  Oligonucleotide for detection of SNP TSC0013887
aaattcatcaaca

SEQ ID NO: 48927 - DNA, 13 bp, Artificial Sequence
  Oligonucleotide for detection of SNP TSC0013887
tgttgacgaattt

SEQ ID NO: 48928 - DNA, 13 bp, Artificial Sequence
  Oligonucleotide for detection of SNP TSC0013887
aaattcgtcaaca

SEQ ID NO: 48929 - DNA, 13 bp, Artificial Sequence
  Oligonucleotide for detection of SNP TSC0013890
ttaagaaagttta

SEQ ID NO: 48930 - DNA, 13 bp, Artificial Sequence
  Oligonucleotide for detection of SNP TSC0013890
taaactttcttaa

SEQ ID NO: 48931 - DNA, 13 bp, Artificial Sequence
  Oligonucleotide for detection of SNP TSC0013890
ttaagagagttta

SEQ ID NO: 48932 - DNA, 13 bp, Artificial Sequence
  Oligonucleotide for detection of SNP TSC0013890
taaactctcttaa

SEQ ID NO: 48933 - DNA, 13 bp, Artificial Sequence
  Oligonucleotide for detection of SNP TSC0013891
gttaagattgtga

SEQ ID NO: 48934 - DNA, 13 bp, Artificial Sequence
  Oligonucleotide for detection of SNP TSC0013891
tcacaatcttaac

SEQ ID NO: 48935 - DNA, 13 bp, Artificial Sequence
  Oligonucleotide for detection of SNP TSC0013891
gttaaggttgtga

SEQ ID NO: 48936 - DNA, 13 bp, Artificial Sequence
  Oligonucleotide for detection of SNP TSC0013891
tcacaaccttaac

SEQ ID NO: 48937 - DNA, 13 bp, Artificial Sequence
  Oligonucleotide for detection of SNP TSC0013891
gttaagatcgtga

SEQ ID NO: 48938 - DNA, 13 bp, Artificial Sequence
  Oligonucleotide for detection of SNP TSC0013891
tcacgatcttaac

SEQ ID NO: 48939 - DNA, 13 bp, Artificial Sequence
  Oligonucleotide for detection of SNP TSC0013891
gttaaggtcgtga

SEQ ID NO: 48940 - DNA, 13 bp, Artificial Sequence
  Oligonucleotide for detection of SNP TSC0013891
tcacgaccttaac

SEQ ID NO: 48941 - DNA, 13 bp, Artificial Sequence
  Oligonucleotide for detection of SNP TSC0013892
aataaggttgtat

SEQ ID NO: 48942 - DNA, 13 bp, Artificial Sequence
  Oligonucleotide for detection of SNP TSC0013892
atacaaccttatt

SEQ ID NO: 48943 - DNA, 13 bp, Artificial Sequence
  Oligonucleotide for detection of SNP TSC0013893
ttttatgtttaaa

SEQ ID NO: 48944 - DNA, 13 bp, Artificial Sequence
  Oligonucleotide for detection of SNP TSC0013893
tttaaacataaaa

SEQ ID NO: 48945 - DNA, 13 bp, Artificial Sequence
  Oligonucleotide for detection of SNP TSC0013893
ttttatatttaaa

SEQ ID NO: 48946 - DNA, 13 bp, Artificial Sequence
  Oligonucleotide for detection of SNP TSC0013893
tttaaatataaaa

SEQ ID NO: 48947 - DNA, 13 bp, Artificial Sequence
  Oligonucleotide for detection of SNP TSC0013894
atgtttattatag

SEQ ID NO: 48948 - DNA, 13 bp, Artificial Sequence
  Oligonucleotide for detection of SNP TSC0013894
ctataataaacat

SEQ ID NO: 48949 - DNA, 13 bp, Artificial Sequence
  Oligonucleotide for detection of SNP TSC0013894
atgtttgttatag

SEQ ID NO: 48950 - DNA, 13 bp, Artificial Sequence
  Oligonucleotide for detection of SNP TSC0013894
ctataacaaacat

SEQ ID NO: 48951 - DNA, 13 bp, Artificial Sequence
  Oligonucleotide for detection of SNP TSC0013895
agatgtagatgta

SEQ ID NO: 48952 - DNA, 13 bp, Artificial Sequence
  Oligonucleotide for detection of SNP TSC0013895
tacatctacatct

SEQ ID NO: 48953 - DNA, 13 bp, Artificial Sequence
  Oligonucleotide for detection of SNP TSC0013895
agatgtggatgta

SEQ ID NO: 48954 - DNA, 13 bp, Artificial Sequence
  Oligonucleotide for detection of SNP TSC0013895
tacatccacatct

SEQ ID NO: 48955 - DNA, 13 bp, Artificial Sequence
  Oligonucleotide for detection of SNP TSC0013895
agacgtagatgta

SEQ ID NO: 48956 - DNA, 13 bp, Artificial Sequence
  Oligonucleotide for detection of SNP TSC0013895
tacatctacgtct

SEQ ID NO: 48957 - DNA, 13 bp, Artificial Sequence
  Oligonucleotide for detection of SNP TSC0013895
agacgtggatgta

SEQ ID NO: 48958 - DNA, 13 bp, Artificial Sequence
  Oligonucleotide for detection of SNP TSC0013895
tacatccacgtct

SEQ ID NO: 48959 - DNA, 13 bp, Artificial Sequence
  Oligonucleotide for detection of SNP TSC0013896
tttagattgtggy

SEQ ID NO: 48960 - DNA, 13 bp, Artificial Sequence
  Oligonucleotide for detection of SNP TSC0013896
rccacaatctaaa

SEQ ID NO: 48961 - DNA, 13 bp, Artificial Sequence
  Oligonucleotide for detection of SNP TSC0013896
tttagagtgtggy

SEQ ID NO: 48962 - DNA, 13 bp, Artificial Sequence
  Oligonucleotide for detection of SNP TSC0013896
rccacactctaaa

SEQ ID NO: 48963 - DNA, 13 bp, Artificial Sequence
  Oligonucleotide for detection of SNP TSC0013896
gttatagtttaga

SEQ ID NO: 48964 - DNA, 13 bp, Artificial Sequence
  Oligonucleotide for detection of SNP TSC0013896
tctaaactataac

SEQ ID NO: 48965 - DNA, 13 bp, Artificial Sequence
  Oligonucleotide for detection of SNP TSC0013896
gttatattttaga

SEQ ID NO: 48966 - DNA, 13 bp, Artificial Sequence
  Oligonucleotide for detection of SNP TSC0013896
tctaaaatataac

SEQ ID NO: 48967 - DNA, 13 bp, Artificial Sequence
  Oligonucleotide for detection of SNP TSC0013898
gagaaaaggtatg

SEQ ID NO: 48968 - DNA, 13 bp, Artificial Sequence
  Oligonucleotide for detection of SNP TSC0013898
cataccttttctc

SEQ ID NO: 48969 - DNA, 13 bp, Artificial Sequence
  Oligonucleotide for detection of SNP TSC0013898
gagaaatggtatg

SEQ ID NO: 48970 - DNA, 13 bp, Artificial Sequence
  Oligonucleotide for detection of SNP TSC0013898
cataccatttctc

SEQ ID NO: 48971 - DNA, 13 bp, Artificial Sequence
  Oligonucleotide for detection of SNP TSC0013898
gagaaaaggtacg

SEQ ID NO: 48972 - DNA, 13 bp, Artificial Sequence
  Oligonucleotide for detection of SNP TSC0013898
cgtaccttttctc

SEQ ID NO: 48973 - DNA, 13 bp, Artificial Sequence
  Oligonucleotide for detection of SNP TSC0013898
gagaaacggtatg

SEQ ID NO: 48974 - DNA, 13 bp, Artificial Sequence
  Oligonucleotide for detection of SNP TSC0013898
cataccgtttctc

SEQ ID NO: 48975 - DNA, 13 bp, Artificial Sequence
  Oligonucleotide for detection of SNP TSC0013898
gagaaatggtacg

SEQ ID NO: 48976 - DNA, 13 bp, Artificial Sequence
  Oligonucleotide for detection of SNP TSC0013898
cgtaccatttctc

SEQ ID NO: 48977 - DNA, 13 bp, Artificial Sequence
  Oligonucleotide for detection of SNP TSC0013898
gagaaacggtacg

SEQ ID NO: 48978 - DNA, 13 bp, Artificial Sequence
  Oligonucleotide for detection of SNP TSC0013898
cgtaccgtttctc

SEQ ID NO: 48979 - DNA, 13 bp, Artificial Sequence
  Oligonucleotide for detection of SNP TSC0013898
tgtatttttttty

SEQ ID NO: 48980 - DNA, 13 bp, Artificial Sequence
  Oligonucleotide for detection of SNP TSC0013898
raaaaaaaataca

SEQ ID NO: 48981 - DNA, 13 bp, Artificial Sequence
  Oligonucleotide for detection of SNP TSC0013898
tgtattgttttty

SEQ ID NO: 48982 - DNA, 13 bp, Artificial Sequence
  Oligonucleotide for detection of SNP TSC0013898
raaaaacaataca

SEQ ID NO: 48983 - DNA, 13 bp, Artificial Sequence
  Oligonucleotide for detection of SNP TSC0013898
cgtatttttttty

SEQ ID NO: 48984 - DNA, 13 bp, Artificial Sequence
  Oligonucleotide for detection of SNP TSC0013898
raaaaaaaatacg

SEQ ID NO: 48985 - DNA, 13 bp, Artificial Sequence
  Oligonucleotide for detection of SNP TSC0013898
cgtattgttttty

SEQ ID NO: 48986 - DNA, 13 bp, Artificial Sequence
  Oligonucleotide for detection of SNP TSC0013898
raaaaacaatacg

SEQ ID NO: 48987 - DNA, 13 bp, Artificial Sequence
  Oligonucleotide for detection of SNP TSC0013898
tgtatcgttttty

SEQ ID NO: 48988 - DNA, 13 bp, Artificial Sequence
  Oligonucleotide for detection of SNP TSC0013898
raaaaacgataca

SEQ ID NO: 48989 - DNA, 13 bp, Artificial Sequence
  Oligonucleotide for detection of SNP TSC0013898
cgtatcgttttty

SEQ ID NO: 48990 - DNA, 13 bp, Artificial Sequence
  Oligonucleotide for detection of SNP TSC0013898
raaaaacgatacg

SEQ ID NO: 48991 - DNA, 13 bp, Artificial Sequence
  Oligonucleotide for detection of SNP TSC0013902
aaagaagtagaga

SEQ ID NO: 48992 - DNA, 13 bp, Artificial Sequence
  Oligonucleotide for detection of SNP TSC0013902
tctctacttcttt

SEQ ID NO: 48993 - DNA, 13 bp, Artificial Sequence
  Oligonucleotide for detection of SNP TSC0013902
aaagaaatagaga

SEQ ID NO: 48994 - DNA, 13 bp, Artificial Sequence
  Oligonucleotide for detection of SNP TSC0013902
tctctatttcttt

SEQ ID NO: 48995 - DNA, 13 bp, Artificial Sequence
  Oligonucleotide for detection of SNP TSC0013903
ttttttttattag

SEQ ID NO: 48996 - DNA, 13 bp, Artificial Sequence
  Oligonucleotide for detection of SNP TSC0013903
ctaataaaaaaaa

SEQ ID NO: 48997 - DNA, 13 bp, Artificial Sequence
  Oligonucleotide for detection of SNP TSC0013903
ttgatggagagga

SEQ ID NO: 48998 - DNA, 13 bp, Artificial Sequence
  Oligonucleotide for detection of SNP TSC0013903
tcctctccatcaa

SEQ ID NO: 48999 - DNA, 13 bp, Artificial Sequence
  Oligonucleotide for detection of SNP TSC0013903
ttgatgtagagga

SEQ ID NO: 49000 - DNA, 13 bp, Artificial Sequence
  Oligonucleotide for detection of SNP TSC0013903
tcctctacatcaa

SEQ ID NO: 49001 - DNA, 13 bp, Artificial Sequence
  Oligonucleotide for detection of SNP TSC0013904
gttgatggagagg

SEQ ID NO: 49002 - DNA, 13 bp, Artificial Sequence
  Oligonucleotide for detection of SNP TSC0013904
cctctccatcaac

SEQ ID NO: 49003 - DNA, 13 bp, Artificial Sequence
  Oligonucleotide for detection of SNP TSC0013904
gttgatagagagg

SEQ ID NO: 49004 - DNA, 13 bp, Artificial Sequence
  Oligonucleotide for detection of SNP TSC0013904
cctctctatcaac

SEQ ID NO: 49005 - DNA, 13 bp, Artificial Sequence
  Oligonucleotide for detection of SNP TSC0013905
taggggattgtgg

SEQ ID NO: 49006 - DNA, 13 bp, Artificial Sequence
  Oligonucleotide for detection of SNP TSC0013905
ccacaatccccta

SEQ ID NO: 49007 - DNA, 13 bp, Artificial Sequence
  Oligonucleotide for detection of SNP TSC0013905
taggggtttgtgg

SEQ ID NO: 49008 - DNA, 13 bp, Artificial Sequence
  Oligonucleotide for detection of SNP TSC0013905
ccacaaaccccta

SEQ ID NO: 49009 - DNA, 13 bp, Artificial Sequence
  Oligonucleotide for detection of SNP TSC0013905
taggggatcgtgg

SEQ ID NO: 49010 - DNA, 13 bp, Artificial Sequence
  Oligonucleotide for detection of SNP TSC0013905
ccacgatccccta

SEQ ID NO: 49011 - DNA, 13 bp, Artificial Sequence
  Oligonucleotide for detection of SNP TSC0013905
taggggttcgtgg

SEQ ID NO: 49012 - DNA, 13 bp, Artificial Sequence
  Oligonucleotide for detection of SNP TSC0013905
ccacgaaccccta

SEQ ID NO: 49013 - DNA, 13 bp, Artificial Sequence
  Oligonucleotide for detection of SNP TSC0013905
ttatgattttttg

SEQ ID NO: 49014 - DNA, 13 bp, Artificial Sequence
  Oligonucleotide for detection of SNP TSC0013905
caaaaaatcataa

SEQ ID NO: 49015 - DNA, 13 bp, Artificial Sequence
  Oligonucleotide for detection of SNP TSC0013905
ttatgagtttttg

SEQ ID NO: 49016 - DNA, 13 bp, Artificial Sequence
  Oligonucleotide for detection of SNP TSC0013905
caaaaactcataa

SEQ ID NO: 49017 - DNA, 13 bp, Artificial Sequence
  Oligonucleotide for detection of SNP TSC0013905
ttacgattttttg

SEQ ID NO: 49018 - DNA, 13 bp, Artificial Sequence
  Oligonucleotide for detection of SNP TSC0013905
caaaaaatcgtaa

SEQ ID NO: 49019 - DNA, 13 bp, Artificial Sequence
  Oligonucleotide for detection of SNP TSC0013905
ttacgagtttttg

SEQ ID NO: 49020 - DNA, 13 bp, Artificial Sequence
  Oligonucleotide for detection of SNP TSC0013905
caaaaactcgtaa

SEQ ID NO: 49021 - DNA, 13 bp, Artificial Sequence
  Oligonucleotide for detection of SNP TSC0013907
ataggtagttaty

SEQ ID NO: 49022 - DNA, 13 bp, Artificial Sequence
  Oligonucleotide for detection of SNP TSC0013907
rataactacctat

SEQ ID NO: 49023 - DNA, 13 bp, Artificial Sequence
  Oligonucleotide for detection of SNP TSC0013907
ataggtggttaty

SEQ ID NO: 49024 - DNA, 13 bp, Artificial Sequence
  Oligonucleotide for detection of SNP TSC0013907
rataaccacctat

SEQ ID NO: 49025 - DNA, 13 bp, Artificial Sequence
  Oligonucleotide for detection of SNP TSC0013907
ataggcggttaty

SEQ ID NO: 49026 - DNA, 13 bp, Artificial Sequence
  Oligonucleotide for detection of SNP TSC0013907
rataaccgcctat

SEQ ID NO: 49027 - DNA, 13 bp, Artificial Sequence
  Oligonucleotide for detection of SNP TSC0013907
ggtgattgtttat

SEQ ID NO: 49028 - DNA, 13 bp, Artificial Sequence
  Oligonucleotide for detection of SNP TSC0013907
ataaacaatcacc

SEQ ID NO: 49029 - DNA, 13 bp, Artificial Sequence
  Oligonucleotide for detection of SNP TSC0013907
ggtgatcgtttat

SEQ ID NO: 49030 - DNA, 13 bp, Artificial Sequence
  Oligonucleotide for detection of SNP TSC0013907
ataaacgatcacc

SEQ ID NO: 49031 - DNA, 13 bp, Artificial Sequence
  Oligonucleotide for detection of SNP TSC0013908
tagttaagtgtgg

SEQ ID NO: 49032 - DNA, 13 bp, Artificial Sequence
  Oligonucleotide for detection of SNP TSC0013908
ccacacttaacta

SEQ ID NO: 49033 - DNA, 13 bp, Artificial Sequence
  Oligonucleotide for detection of SNP TSC0013908
tagttaggtgtgg

SEQ ID NO: 49034 - DNA, 13 bp, Artificial Sequence
  Oligonucleotide for detection of SNP TSC0013908
ccacacctaacta

SEQ ID NO: 49035 - DNA, 13 bp, Artificial Sequence
  Oligonucleotide for detection of SNP TSC0013909
taaaatgttttgg

SEQ ID NO: 49036 - DNA, 13 bp, Artificial Sequence
  Oligonucleotide for detection of SNP TSC0013909
ccaaaacatttta

SEQ ID NO: 49037 - DNA, 13 bp, Artificial Sequence
  Oligonucleotide for detection of SNP TSC0013909
taaaatattttgg

SEQ ID NO: 49038 - DNA, 13 bp, Artificial Sequence
  Oligonucleotide for detection of SNP TSC0013909
ccaaaatatttta

SEQ ID NO: 49039 - DNA, 13 bp, Artificial Sequence
  Oligonucleotide for detection of SNP TSC0013910
aaagtatgagaat

SEQ ID NO: 49040 - DNA, 13 bp, Artificial Sequence
  Oligonucleotide for detection of SNP TSC0013910
attctcatacttt

SEQ ID NO: 49041 - DNA, 13 bp, Artificial Sequence
  Oligonucleotide for detection of SNP TSC0013910
aaagtacgagaat

SEQ ID NO: 49042 - DNA, 13 bp, Artificial Sequence
  Oligonucleotide for detection of SNP TSC0013910
attctcgtacttt

SEQ ID NO: 49043 - DNA, 13 bp, Artificial Sequence
  Oligonucleotide for detection of SNP TSC0013912
gatttgaaaaata

SEQ ID NO: 49044 - DNA, 13 bp, Artificial Sequence
  Oligonucleotide for detection of SNP TSC0013912
tatttttcaaatc

SEQ ID NO: 49045 - DNA, 13 bp, Artificial Sequence
  Oligonucleotide for detection of SNP TSC0013912
gatttgtaaaata

SEQ ID NO: 49046 - DNA, 13 bp, Artificial Sequence
  Oligonucleotide for detection of SNP TSC0013912
tattttacaaatc

SEQ ID NO: 49047 - DNA, 13 bp, Artificial Sequence
  Oligonucleotide for detection of SNP TSC0013912
tattttttagaty

SEQ ID NO: 49048 - DNA, 13 bp, Artificial Sequence
  Oligonucleotide for detection of SNP TSC0013912
ratctaaaaaata

SEQ ID NO: 49049 - DNA, 13 bp, Artificial Sequence
  Oligonucleotide for detection of SNP TSC0013912
tattttatagaty

SEQ ID NO: 49050 - DNA, 13 bp, Artificial Sequence
  Oligonucleotide for detection of SNP TSC0013912
ratctataaaata

SEQ ID NO: 49051 - DNA, 13 bp, Artificial Sequence
  Oligonucleotide for detection of SNP TSC0013913
agatgaagaattg

SEQ ID NO: 49052 - DNA, 13 bp, Artificial Sequence
  Oligonucleotide for detection of SNP TSC0013913
caattcttcatct

SEQ ID NO: 49053 - DNA, 13 bp, Artificial Sequence
  Oligonucleotide for detection of SNP TSC0013913
agatgaggaattg

SEQ ID NO: 49054 - DNA, 13 bp, Artificial Sequence
  Oligonucleotide for detection of SNP TSC0013913
caattcctcatct

SEQ ID NO: 49055 - DNA, 13 bp, Artificial Sequence
  Oligonucleotide for detection of SNP TSC0013914
gttttaattatty

SEQ ID NO: 49056 - DNA, 13 bp, Artificial Sequence
  Oligonucleotide for detection of SNP TSC0013914
raataattaaaac

SEQ ID NO: 49057 - DNA, 13 bp, Artificial Sequence
  Oligonucleotide for detection of SNP TSC0013914
gttttatttatty

SEQ ID NO: 49058 - DNA, 13 bp, Artificial Sequence
  Oligonucleotide for detection of SNP TSC0013914
raataaataaaac

SEQ ID NO: 49059 - DNA, 13 bp, Artificial Sequence
  Oligonucleotide for detection of SNP TSC0013914
gaatgattgagay

SEQ ID NO: 49060 - DNA, 13 bp, Artificial Sequence
  Oligonucleotide for detection of SNP TSC0013914
rtctcaatcattc

SEQ ID NO: 49061 - DNA, 13 bp, Artificial Sequence
  Oligonucleotide for detection of SNP TSC0013914
gaatgaatgagay

SEQ ID NO: 49062 - DNA, 13 bp, Artificial Sequence
  Oligonucleotide for detection of SNP TSC0013914
rtctcattcattc

SEQ ID NO: 49063 - DNA, 13 bp, Artificial Sequence
  Oligonucleotide for detection of SNP TSC0013919
ttaaggttgttty

SEQ ID NO: 49064 - DNA, 13 bp, Artificial Sequence
  Oligonucleotide for detection of SNP TSC0013919
raaacaaccttaa

SEQ ID NO: 49065 - DNA, 13 bp, Artificial Sequence
  Oligonucleotide for detection of SNP TSC0013919
ttaagggtgttty

SEQ ID NO: 49066 - DNA, 13 bp, Artificial Sequence
  Oligonucleotide for detection of SNP TSC0013919
raaacacccttaa

SEQ ID NO: 49067 - DNA, 13 bp, Artificial Sequence
  Oligonucleotide for detection of SNP TSC0013919
gggatagttttgg

SEQ ID NO: 49068 - DNA, 13 bp, Artificial Sequence
  Oligonucleotide for detection of SNP TSC0013919
ccaaaactatccc

SEQ ID NO: 49069 - DNA, 13 bp, Artificial Sequence
  Oligonucleotide for detection of SNP TSC0013919
gggatatttttgg

SEQ ID NO: 49070 - DNA, 13 bp, Artificial Sequence
  Oligonucleotide for detection of SNP TSC0013919
ccaaaaatatccc

SEQ ID NO: 49071 - DNA, 13 bp, Artificial Sequence
  Oligonucleotide for detection of SNP TSC0013920
tttggggttttta

SEQ ID NO: 49072 - DNA, 13 bp, Artificial Sequence
  Oligonucleotide for detection of SNP TSC0013920
taaaaaccccaaa

SEQ ID NO: 49073 - DNA, 13 bp, Artificial Sequence
  Oligonucleotide for detection of SNP TSC0013920
tttgggattttta

SEQ ID NO: 49074 - DNA, 13 bp, Artificial Sequence
  Oligonucleotide for detection of SNP TSC0013920
taaaaatcccaaa

SEQ ID NO: 49075 - DNA, 13 bp, Artificial Sequence
  Oligonucleotide for detection of SNP TSC0013921
gttaatagtttaa

SEQ ID NO: 49076 - DNA, 13 bp, Artificial Sequence
  Oligonucleotide for detection of SNP TSC0013921
ttaaactattaac

SEQ ID NO: 49077 - DNA, 13 bp, Artificial Sequence
  Oligonucleotide for detection of SNP TSC0013921
gttaatggtttaa

SEQ ID NO: 49078 - DNA, 13 bp, Artificial Sequence
  Oligonucleotide for detection of SNP TSC0013921
ttaaaccattaac

SEQ ID NO: 49079 - DNA, 13 bp, Artificial Sequence
  Oligonucleotide for detection of SNP TSC0013921
gttaacggtttaa

SEQ ID NO: 49080 - DNA, 13 bp, Artificial Sequence
  Oligonucleotide for detection of SNP TSC0013921
ttaaaccgttaac

SEQ ID NO: 49081 - DNA, 13 bp, Artificial Sequence
  Oligonucleotide for detection of SNP TSC0013921
ttgagttgttaay

SEQ ID NO: 49082 - DNA, 13 bp, Artificial Sequence
  Oligonucleotide for detection of SNP TSC0013921
rttaacaactcaa

SEQ ID NO: 49083 - DNA, 13 bp, Artificial Sequence
  Oligonucleotide for detection of SNP TSC0013921
ttgagtcgttaay

SEQ ID NO: 49084 - DNA, 13 bp, Artificial Sequence
  Oligonucleotide for detection of SNP TSC0013921
rttaacgactcaa

SEQ ID NO: 49085 - DNA, 13 bp, Artificial Sequence
  Oligonucleotide for detection of SNP TSC0013922
taagggagaaagg

SEQ ID NO: 49086 - DNA, 13 bp, Artificial Sequence
  Oligonucleotide for detection of SNP TSC0013922
cctttctccctta

SEQ ID NO: 49087 - DNA, 13 bp, Artificial Sequence
  Oligonucleotide for detection of SNP TSC0013922
taagggggaaagg

SEQ ID NO: 49088 - DNA, 13 bp, Artificial Sequence
  Oligonucleotide for detection of SNP TSC0013922
cctttccccctta

SEQ ID NO: 49089 - DNA, 13 bp, Artificial Sequence
  Oligonucleotide for detection of SNP TSC0013923
atataagttgaga

SEQ ID NO: 49090 - DNA, 13 bp, Artificial Sequence
  Oligonucleotide for detection of SNP TSC0013923
tctcaacttatat

SEQ ID NO: 49091 - DNA, 13 bp, Artificial Sequence
  Oligonucleotide for detection of SNP TSC0013923
atataaattgaga

SEQ ID NO: 49092 - DNA, 13 bp, Artificial Sequence
  Oligonucleotide for detection of SNP TSC0013923
tctcaatttatat

SEQ ID NO: 49093 - DNA, 13 bp, Artificial Sequence
  Oligonucleotide for detection of SNP TSC0013924
aatattgtattay

SEQ ID NO: 49094 - DNA, 13 bp, Artificial Sequence
  Oligonucleotide for detection of SNP TSC0013924
rtaatacaatatt

SEQ ID NO: 49095 - DNA, 13 bp, Artificial Sequence
  Oligonucleotide for detection of SNP TSC0013924
aatattatattay

SEQ ID NO: 49096 - DNA, 13 bp, Artificial Sequence
  Oligonucleotide for detection of SNP TSC0013924
rtaatataatatt

SEQ ID NO: 49097 - DNA, 13 bp, Artificial Sequence
  Oligonucleotide for detection of SNP TSC0013926
aagtgtattttta

SEQ ID NO: 49098 - DNA, 13 bp, Artificial Sequence
  Oligonucleotide for detection of SNP TSC0013926
taaaaatacactt

SEQ ID NO: 49099 - DNA, 13 bp, Artificial Sequence
  Oligonucleotide for detection of SNP TSC0013926
aagtgtgttttta

SEQ ID NO: 49100 - DNA, 13 bp, Artificial Sequence
  Oligonucleotide for detection of SNP TSC0013926
taaaaacacactt

SEQ ID NO: 49101 - DNA, 13 bp, Artificial Sequence
  Oligonucleotide for detection of SNP TSC0013927
tagtaagtggaga

SEQ ID NO: 49102 - DNA, 13 bp, Artificial Sequence
  Oligonucleotide for detection of SNP TSC0013927
tctccacttacta

SEQ ID NO: 49103 - DNA, 13 bp, Artificial Sequence
  Oligonucleotide for detection of SNP TSC0013927
tagtaattggaga

SEQ ID NO: 49104 - DNA, 13 bp, Artificial Sequence
  Oligonucleotide for detection of SNP TSC0013927
tctccaattacta

SEQ ID NO: 49105 - DNA, 13 bp, Artificial Sequence
  Oligonucleotide for detection of SNP TSC0013927
tttttatttgttg

SEQ ID NO: 49106 - DNA, 13 bp, Artificial Sequence
  Oligonucleotide for detection of SNP TSC0013927
caacaaataaaaa

SEQ ID NO: 49107 - DNA, 13 bp, Artificial Sequence
  Oligonucleotide for detection of SNP TSC0013927
tttttaattgttg

SEQ ID NO: 49108 - DNA, 13 bp, Artificial Sequence
  Oligonucleotide for detection of SNP TSC0013927
caacaattaaaaa

SEQ ID NO: 49109 - DNA, 13 bp, Artificial Sequence
  Oligonucleotide for detection of SNP TSC0013928
atattggggttga

SEQ ID NO: 49110 - DNA, 13 bp, Artificial Sequence
  Oligonucleotide for detection of SNP TSC0013928
tcaaccccaatat

SEQ ID NO: 49111 - DNA, 13 bp, Artificial Sequence
  Oligonucleotide for detection of SNP TSC0013928
atattgaggttga

SEQ ID NO: 49112 - DNA, 13 bp, Artificial Sequence
  Oligonucleotide for detection of SNP TSC0013928
tcaacctcaatat

SEQ ID NO: 49113 - DNA, 13 bp, Artificial Sequence
  Oligonucleotide for detection of SNP TSC0013929
gtttttggggtty

SEQ ID NO: 49114 - DNA, 13 bp, Artificial Sequence
  Oligonucleotide for detection of SNP TSC0013929
raaccccaaaaac

SEQ ID NO: 49115 - DNA, 13 bp, Artificial Sequence
  Oligonucleotide for detection of SNP TSC0013929
gttttcggggtty

SEQ ID NO: 49116 - DNA, 13 bp, Artificial Sequence
  Oligonucleotide for detection of SNP TSC0013929
raaccccgaaaac

SEQ ID NO: 49117 - DNA, 13 bp, Artificial Sequence
  Oligonucleotide for detection of SNP TSC0013929
ggatttggggggy

SEQ ID NO: 49118 - DNA, 13 bp, Artificial Sequence
  Oligonucleotide for detection of SNP TSC0013929
rccccccaaatcc

SEQ ID NO: 49119 - DNA, 13 bp, Artificial Sequence
  Oligonucleotide for detection of SNP TSC0013929
ggattttgggggy

SEQ ID NO: 49120 - DNA, 13 bp, Artificial Sequence
  Oligonucleotide for detection of SNP TSC0013929
rcccccaaaatcc

SEQ ID NO: 49121 - DNA, 13 bp, Artificial Sequence
  Oligonucleotide for detection of SNP TSC0013929
ggattcggggggy

SEQ ID NO: 49122 - DNA, 13 bp, Artificial Sequence
  Oligonucleotide for detection of SNP TSC0013929
rccccccgaatcc

SEQ ID NO: 49123 - DNA, 13 bp, Artificial Sequence
  Oligonucleotide for detection of SNP TSC0013929
ggatttcgggggy

SEQ ID NO: 49124 - DNA, 13 bp, Artificial Sequence
  Oligonucleotide for detection of SNP TSC0013929
rcccccgaaatcc

SEQ ID NO: 49125 - DNA, 13 bp, Artificial Sequence
  Oligonucleotide for detection of SNP TSC0013930
aagatgggagtag

SEQ ID NO: 49126 - DNA, 13 bp, Artificial Sequence
  Oligonucleotide for detection of SNP TSC0013930
ctactcccatctt

SEQ ID NO: 49127 - DNA, 13 bp, Artificial Sequence
  Oligonucleotide for detection of SNP TSC0013930
aagatgagagtag

SEQ ID NO: 49128 - DNA, 13 bp, Artificial Sequence
  Oligonucleotide for detection of SNP TSC0013930
ctactctcatctt

SEQ ID NO: 49129 - DNA, 13 bp, Artificial Sequence
  Oligonucleotide for detection of SNP TSC0013931
tttattataggty

SEQ ID NO: 49130 - DNA, 13 bp, Artificial Sequence
  Oligonucleotide for detection of SNP TSC0013931
racctataataaa

SEQ ID NO: 49131 - DNA, 13 bp, Artificial Sequence
  Oligonucleotide for detection of SNP TSC0013931
tttattgtaggty

SEQ ID NO: 49132 - DNA, 13 bp, Artificial Sequence
  Oligonucleotide for detection of SNP TSC0013931
racctacaataaa

SEQ ID NO: 49133 - DNA, 13 bp, Artificial Sequence
  Oligonucleotide for detection of SNP TSC0013931
tttatcgtaggty

SEQ ID NO: 49134 - DNA, 13 bp, Artificial Sequence
  Oligonucleotide for detection of SNP TSC0013931
racctacgataaa

SEQ ID NO: 49135 - DNA, 13 bp, Artificial Sequence
  Oligonucleotide for detection of SNP TSC0013931
gatttgtgatggg

SEQ ID NO: 49136 - DNA, 13 bp, Artificial Sequence
  Oligonucleotide for detection of SNP TSC0013931
cccatcacaaatc

SEQ ID NO: 49137 - DNA, 13 bp, Artificial Sequence
  Oligonucleotide for detection of SNP TSC0013931
gatttgcgatggg

SEQ ID NO: 49138 - DNA, 13 bp, Artificial Sequence
  Oligonucleotide for detection of SNP TSC0013931
cccatcgcaaatc

SEQ ID NO: 49139 - DNA, 13 bp, Artificial Sequence
  Oligonucleotide for detection of SNP TSC0013932
taattaagtttga

SEQ ID NO: 49140 - DNA, 13 bp, Artificial Sequence
  Oligonucleotide for detection of SNP TSC0013932
tcaaacttaatta

SEQ ID NO: 49141 - DNA, 13 bp, Artificial Sequence
  Oligonucleotide for detection of SNP TSC0013932
taattatgtttga

SEQ ID NO: 49142 - DNA, 13 bp, Artificial Sequence
  Oligonucleotide for detection of SNP TSC0013932
tcaaacataatta

SEQ ID NO: 49143 - DNA, 13 bp, Artificial Sequence
  Oligonucleotide for detection of SNP TSC0013932
taattacgtttga

SEQ ID NO: 49144 - DNA, 13 bp, Artificial Sequence
  Oligonucleotide for detection of SNP TSC0013932
tcaaacgtaatta

SEQ ID NO: 49145 - DNA, 13 bp, Artificial Sequence
  Oligonucleotide for detection of SNP TSC0013932
ttaaatttgatta

SEQ ID NO: 49146 - DNA, 13 bp, Artificial Sequence
  Oligonucleotide for detection of SNP TSC0013932
taatcaaatttaa

SEQ ID NO: 49147 - DNA, 13 bp, Artificial Sequence
  Oligonucleotide for detection of SNP TSC0013932
ttaaatgtgatta

SEQ ID NO: 49148 - DNA, 13 bp, Artificial Sequence
  Oligonucleotide for detection of SNP TSC0013932
taatcacatttaa

SEQ ID NO: 49149 - DNA, 13 bp, Artificial Sequence
  Oligonucleotide for detection of SNP TSC0013932
ttaaacgtgatta

SEQ ID NO: 49150 - DNA, 13 bp, Artificial Sequence
  Oligonucleotide for detection of SNP TSC0013932
taatcacgtttaa

SEQ ID NO: 49151 - DNA, 13 bp, Artificial Sequence
  Oligonucleotide for detection of SNP TSC0013933
tttgagttaatta

SEQ ID NO: 49152 - DNA, 13 bp, Artificial Sequence
  Oligonucleotide for detection of SNP TSC0013933
taattaactcaaa

SEQ ID NO: 49153 - DNA, 13 bp, Artificial Sequence
  Oligonucleotide for detection of SNP TSC0013933
tttgaggtaatta

SEQ ID NO: 49154 - DNA, 13 bp, Artificial Sequence
  Oligonucleotide for detection of SNP TSC0013933
taattacctcaaa

SEQ ID NO: 49155 - DNA, 13 bp, Artificial Sequence
  Oligonucleotide for detection of SNP TSC0013933
tgattagtttagg

SEQ ID NO: 49156 - DNA, 13 bp, Artificial Sequence
  Oligonucleotide for detection of SNP TSC0013933
cctaaactaatca

SEQ ID NO: 49157 - DNA, 13 bp, Artificial Sequence
  Oligonucleotide for detection of SNP TSC0013933
tgattattttagg

SEQ ID NO: 49158 - DNA, 13 bp, Artificial Sequence
  Oligonucleotide for detection of SNP TSC0013933
cctaaaataatca

SEQ ID NO: 49159 - DNA, 13 bp, Artificial Sequence
  Oligonucleotide for detection of SNP TSC0013937
tttttaaaaaagt

SEQ ID NO: 49160 - DNA, 13 bp, Artificial Sequence
  Oligonucleotide for detection of SNP TSC0013937
acttttttaaaaa

SEQ ID NO: 49161 - DNA, 13 bp, Artificial Sequence
  Oligonucleotide for detection of SNP TSC0013937
tttttagaaaagt

SEQ ID NO: 49162 - DNA, 13 bp, Artificial Sequence
  Oligonucleotide for detection of SNP TSC0013937
acttttctaaaaa

SEQ ID NO: 49163 - DNA, 13 bp, Artificial Sequence
  Oligonucleotide for detection of SNP TSC0013938
aatgtaattagga

SEQ ID NO: 49164 - DNA, 13 bp, Artificial Sequence
  Oligonucleotide for detection of SNP TSC0013938
tcctaattacatt

SEQ ID NO: 49165 - DNA, 13 bp, Artificial Sequence
  Oligonucleotide for detection of SNP TSC0013938
aatgtagttagga

SEQ ID NO: 49166 - DNA, 13 bp, Artificial Sequence
  Oligonucleotide for detection of SNP TSC0013938
tcctaactacatt

SEQ ID NO: 49167 - DNA, 13 bp, Artificial Sequence
  Oligonucleotide for detection of SNP TSC0013939
gttttttaagtty

SEQ ID NO: 49168 - DNA, 13 bp, Artificial Sequence
  Oligonucleotide for detection of SNP TSC0013939
raacttaaaaaac

SEQ ID NO: 49169 - DNA, 13 bp, Artificial Sequence
  Oligonucleotide for detection of SNP TSC0013939
gagttttgaggay

SEQ ID NO: 49170 - DNA, 13 bp, Artificial Sequence
  Oligonucleotide for detection of SNP TSC0013939
rtcctcaaaactc

SEQ ID NO: 49171 - DNA, 13 bp, Artificial Sequence
  Oligonucleotide for detection of SNP TSC0013939
gagtttggaggay

SEQ ID NO: 49172 - DNA, 13 bp, Artificial Sequence
  Oligonucleotide for detection of SNP TSC0013939
rtcctccaaactc

SEQ ID NO: 49173 - DNA, 13 bp, Artificial Sequence
  Oligonucleotide for detection of SNP TSC0013940
tagggagttatat

SEQ ID NO: 49174 - DNA, 13 bp, Artificial Sequence
  Oligonucleotide for detection of SNP TSC0013940
atataactcccta

SEQ ID NO: 49175 - DNA, 13 bp, Artificial Sequence
  Oligonucleotide for detection of SNP TSC0013940
tagggaattatat

SEQ ID NO: 49176 - DNA, 13 bp, Artificial Sequence
  Oligonucleotide for detection of SNP TSC0013940
atataattcccta

SEQ ID NO: 49177 - DNA, 13 bp, Artificial Sequence
  Oligonucleotide for detection of SNP TSC0013941
aattgagatgttt

SEQ ID NO: 49178 - DNA, 13 bp, Artificial Sequence
  Oligonucleotide for detection of SNP TSC0013941
aaacatctcaatt

SEQ ID NO: 49179 - DNA, 13 bp, Artificial Sequence
  Oligonucleotide for detection of SNP TSC0013941
aattgaaatgttt

SEQ ID NO: 49180 - DNA, 13 bp, Artificial Sequence
  Oligonucleotide for detection of SNP TSC0013941
aaacatttcaatt

SEQ ID NO: 49181 - DNA, 13 bp, Artificial Sequence
  Oligonucleotide for detection of SNP TSC0013942
attaatgataagy

SEQ ID NO: 49182 - DNA, 13 bp, Artificial Sequence
  Oligonucleotide for detection of SNP TSC0013942
rcttatcattaat

SEQ ID NO: 49183 - DNA, 13 bp, Artificial Sequence
  Oligonucleotide for detection of SNP TSC0013942
attaattataagy

SEQ ID NO: 49184 - DNA, 13 bp, Artificial Sequence
  Oligonucleotide for detection of SNP TSC0013942
rcttataattaat

SEQ ID NO: 49185 - DNA, 13 bp, Artificial Sequence
  Oligonucleotide for detection of SNP TSC0013942
gtttattattaat

SEQ ID NO: 49186 - DNA, 13 bp, Artificial Sequence
  Oligonucleotide for detection of SNP TSC0013942
attaataataaac

SEQ ID NO: 49187 - DNA, 13 bp, Artificial Sequence
  Oligonucleotide for detection of SNP TSC0013942
gtttataattaat

SEQ ID NO: 49188 - DNA, 13 bp, Artificial Sequence
  Oligonucleotide for detection of SNP TSC0013942
attaattataaac

SEQ ID NO: 49189 - DNA, 13 bp, Artificial Sequence
  Oligonucleotide for detection of SNP TSC0013944
tttaatataaaaa

SEQ ID NO: 49190 - DNA, 13 bp, Artificial Sequence
  Oligonucleotide for detection of SNP TSC0013944
tttttatattaaa

SEQ ID NO: 49191 - DNA, 13 bp, Artificial Sequence
  Oligonucleotide for detection of SNP TSC0013944
tttaatgtaaaaa

SEQ ID NO: 49192 - DNA, 13 bp, Artificial Sequence
  Oligonucleotide for detection of SNP TSC0013944
tttttacattaaa

SEQ ID NO: 49193 - DNA, 13 bp, Artificial Sequence
  Oligonucleotide for detection of SNP TSC0013944
tttaacgtaaaaa

SEQ ID NO: 49194 - DNA, 13 bp, Artificial Sequence
  Oligonucleotide for detection of SNP TSC0013944
tttttacgttaaa

SEQ ID NO: 49195 - DNA, 13 bp, Artificial Sequence
  Oligonucleotide for detection of SNP TSC0013944
tttttatgttaaa

SEQ ID NO: 49196 - DNA, 13 bp, Artificial Sequence
  Oligonucleotide for detection of SNP TSC0013944
tttaacataaaaa

SEQ ID NO: 49197 - DNA, 13 bp, Artificial Sequence
  Oligonucleotide for detection of SNP TSC0013945
aattagagtggta

SEQ ID NO: 49198 - DNA, 13 bp, Artificial Sequence
  Oligonucleotide for detection of SNP TSC0013945
taccactctaatt

SEQ ID NO: 49199 - DNA, 13 bp, Artificial Sequence
  Oligonucleotide for detection of SNP TSC0013945
aattagggtggta

SEQ ID NO: 49200 - DNA, 13 bp, Artificial Sequence
  Oligonucleotide for detection of SNP TSC0013945
taccaccctaatt

SEQ ID NO: 49201 - DNA, 13 bp, Artificial Sequence
  Oligonucleotide for detection of SNP TSC0013945
aattagagcggta

SEQ ID NO: 49202 - DNA, 13 bp, Artificial Sequence
  Oligonucleotide for detection of SNP TSC0013945
taccgctctaatt

SEQ ID NO: 49203 - DNA, 13 bp, Artificial Sequence
  Oligonucleotide for detection of SNP TSC0013945
aattagggcggta

SEQ ID NO: 49204 - DNA, 13 bp, Artificial Sequence
  Oligonucleotide for detection of SNP TSC0013945
taccgccctaatt

SEQ ID NO: 49205 - DNA, 13 bp, Artificial Sequence
  Oligonucleotide for detection of SNP TSC0013946
aatttaaatagay

SEQ ID NO: 49206 - DNA, 13 bp, Artificial Sequence
  Oligonucleotide for detection of SNP TSC0013946
rtctatttaaatt

SEQ ID NO: 49207 - DNA, 13 bp, Artificial Sequence
  Oligonucleotide for detection of SNP TSC0013946
aatttagatagay

SEQ ID NO: 49208 - DNA, 13 bp, Artificial Sequence
  Oligonucleotide for detection of SNP TSC0013946
rtctatctaaatt

SEQ ID NO: 49209 - DNA, 13 bp, Artificial Sequence
  Oligonucleotide for detection of SNP TSC0013947
tgagagagttgaa

SEQ ID NO: 49210 - DNA, 13 bp, Artificial Sequence
  Oligonucleotide for detection of SNP TSC0013947
ttcaactctctca

SEQ ID NO: 49211 - DNA, 13 bp, Artificial Sequence
  Oligonucleotide for detection of SNP TSC0013947
tgagagtgttgaa

SEQ ID NO: 49212 - DNA, 13 bp, Artificial Sequence
  Oligonucleotide for detection of SNP TSC0013947
ttcaacactctca

SEQ ID NO: 49213 - DNA, 13 bp, Artificial Sequence
  Oligonucleotide for detection of SNP TSC0013947
tttagttttttta

SEQ ID NO: 49214 - DNA, 13 bp, Artificial Sequence
  Oligonucleotide for detection of SNP TSC0013947
taaaaaaactaaa

SEQ ID NO: 49215 - DNA, 13 bp, Artificial Sequence
  Oligonucleotide for detection of SNP TSC0013947
tttagtattttta

SEQ ID NO: 49216 - DNA, 13 bp, Artificial Sequence
  Oligonucleotide for detection of SNP TSC0013947
taaaaatactaaa

SEQ ID NO: 49217 - DNA, 13 bp, Artificial Sequence
  Oligonucleotide for detection of SNP TSC0013948
gatgtggaagtty

SEQ ID NO: 49218 - DNA, 13 bp, Artificial Sequence
  Oligonucleotide for detection of SNP TSC0013948
raacttccacatc

SEQ ID NO: 49219 - DNA, 13 bp, Artificial Sequence
  Oligonucleotide for detection of SNP TSC0013948
gatgtgaaagtty

SEQ ID NO: 49220 - DNA, 13 bp, Artificial Sequence
  Oligonucleotide for detection of SNP TSC0013948
raactttcacatc

SEQ ID NO: 49221 - DNA, 13 bp, Artificial Sequence
  Oligonucleotide for detection of SNP TSC0013949
ttataaatgtttt

SEQ ID NO: 49222 - DNA, 13 bp, Artificial Sequence
  Oligonucleotide for detection of SNP TSC0013949
aaaacatttataa

SEQ ID NO: 49223 - DNA, 13 bp, Artificial Sequence
  Oligonucleotide for detection of SNP TSC0013949
ttataattgtttt

SEQ ID NO: 49224 - DNA, 13 bp, Artificial Sequence
  Oligonucleotide for detection of SNP TSC0013949
aaaacaattataa

SEQ ID NO: 49225 - DNA, 13 bp, Artificial Sequence
  Oligonucleotide for detection of SNP TSC0013949
agagtatttgtgg

SEQ ID NO: 49226 - DNA, 13 bp, Artificial Sequence
  Oligonucleotide for detection of SNP TSC0013949
ccacaaatactct

SEQ ID NO: 49227 - DNA, 13 bp, Artificial Sequence
  Oligonucleotide for detection of SNP TSC0013949
agagtagttgtgg

SEQ ID NO: 49228 - DNA, 13 bp, Artificial Sequence
  Oligonucleotide for detection of SNP TSC0013949
ccacaactactct

SEQ ID NO: 49229 - DNA, 13 bp, Artificial Sequence
  Oligonucleotide for detection of SNP TSC0013951
ttaggttgtggay

SEQ ID NO: 49230 - DNA, 13 bp, Artificial Sequence
  Oligonucleotide for detection of SNP TSC0013951
rtccacaacctaa

SEQ ID NO: 49231 - DNA, 13 bp, Artificial Sequence
  Oligonucleotide for detection of SNP TSC0013951
ttaggtcgtggay

SEQ ID NO: 49232 - DNA, 13 bp, Artificial Sequence
  Oligonucleotide for detection of SNP TSC0013951
rtccacgacctaa

SEQ ID NO: 49233 - DNA, 13 bp, Artificial Sequence
  Oligonucleotide for detection of SNP TSC0013951
gtttatggtttgg

SEQ ID NO: 49234 - DNA, 13 bp, Artificial Sequence
  Oligonucleotide for detection of SNP TSC0013951
ccaaaccataaac

SEQ ID NO: 49235 - DNA, 13 bp, Artificial Sequence
  Oligonucleotide for detection of SNP TSC0013951
gtttatagtttgg

SEQ ID NO: 49236 - DNA, 13 bp, Artificial Sequence
  Oligonucleotide for detection of SNP TSC0013951
ccaaactataaac

SEQ ID NO: 49237 - DNA, 13 bp, Artificial Sequence
  Oligonucleotide for detection of SNP TSC0013951
gtttacggtttgg

SEQ ID NO: 49238 - DNA, 13 bp, Artificial Sequence
  Oligonucleotide for detection of SNP TSC0013951
ccaaaccgtaaac

SEQ ID NO: 49239 - DNA, 13 bp, Artificial Sequence
  Oligonucleotide for detection of SNP TSC0013952
ttttagaatttty

SEQ ID NO: 49240 - DNA, 13 bp, Artificial Sequence
  Oligonucleotide for detection of SNP TSC0013952
raaaattctaaaa

SEQ ID NO: 49241 - DNA, 13 bp, Artificial Sequence
  Oligonucleotide for detection of SNP TSC0013952
ttttagtatttty

SEQ ID NO: 49242 - DNA, 13 bp, Artificial Sequence
  Oligonucleotide for detection of SNP TSC0013952
raaaatactaaaa

SEQ ID NO: 49243 - DNA, 13 bp, Artificial Sequence
  Oligonucleotide for detection of SNP TSC0013952
gggagttttagaa

SEQ ID NO: 49244 - DNA, 13 bp, Artificial Sequence
  Oligonucleotide for detection of SNP TSC0013952
ttctaaaactccc

SEQ ID NO: 49245 - DNA, 13 bp, Artificial Sequence
  Oligonucleotide for detection of SNP TSC0013952
gggagtattagaa

SEQ ID NO: 49246 - DNA, 13 bp, Artificial Sequence
  Oligonucleotide for detection of SNP TSC0013952
ttctaatactccc

SEQ ID NO: 49247 - DNA, 13 bp, Artificial Sequence
  Oligonucleotide for detection of SNP TSC0013953
tttggtaagttty

SEQ ID NO: 49248 - DNA, 13 bp, Artificial Sequence
  Oligonucleotide for detection of SNP TSC0013953
raaacttaccaaa

SEQ ID NO: 49249 - DNA, 13 bp, Artificial Sequence
  Oligonucleotide for detection of SNP TSC0013953
tttggtgagttty

SEQ ID NO: 49250 - DNA, 13 bp, Artificial Sequence
  Oligonucleotide for detection of SNP TSC0013953
raaactcaccaaa

SEQ ID NO: 49251 - DNA, 13 bp, Artificial Sequence
  Oligonucleotide for detection of SNP TSC0013953
tttggcgagttty

SEQ ID NO: 49252 - DNA, 13 bp, Artificial Sequence
  Oligonucleotide for detection of SNP TSC0013953
raaactcgccaaa

SEQ ID NO: 49253 - DNA, 13 bp, Artificial Sequence
  Oligonucleotide for detection of SNP TSC0013953
ggggtttgttagg

SEQ ID NO: 49254 - DNA, 13 bp, Artificial Sequence
  Oligonucleotide for detection of SNP TSC0013953
cctaacaaacccc

SEQ ID NO: 49255 - DNA, 13 bp, Artificial Sequence
  Oligonucleotide for detection of SNP TSC0013953
ggggttcgttagg

SEQ ID NO: 49256 - DNA, 13 bp, Artificial Sequence
  Oligonucleotide for detection of SNP TSC0013953
cctaacgaacccc

SEQ ID NO: 49257 - DNA, 13 bp, Artificial Sequence
  Oligonucleotide for detection of SNP TSC0013954
gattatttgttty

SEQ ID NO: 49258 - DNA, 13 bp, Artificial Sequence
  Oligonucleotide for detection of SNP TSC0013954
raaacaaataatc

SEQ ID NO: 49259 - DNA, 13 bp, Artificial Sequence
  Oligonucleotide for detection of SNP TSC0013954
gattatgtgttty

SEQ ID NO: 49260 - DNA, 13 bp, Artificial Sequence
  Oligonucleotide for detection of SNP TSC0013954
raaacacataatc

SEQ ID NO: 49261 - DNA, 13 bp, Artificial Sequence
  Oligonucleotide for detection of SNP TSC0013954
gattacgtgttty

SEQ ID NO: 49262 - DNA, 13 bp, Artificial Sequence
  Oligonucleotide for detection of SNP TSC0013954
raaacacgtaatc

SEQ ID NO: 49263 - DNA, 13 bp, Artificial Sequence
  Oligonucleotide for detection of SNP TSC0013954
gagataggtggty

SEQ ID NO: 49264 - DNA, 13 bp, Artificial Sequence
  Oligonucleotide for detection of SNP TSC0013954
raccacctatctc

SEQ ID NO: 49265 - DNA, 13 bp, Artificial Sequence
  Oligonucleotide for detection of SNP TSC0013954
gagatatgtggty

SEQ ID NO: 49266 - DNA, 13 bp, Artificial Sequence
  Oligonucleotide for detection of SNP TSC0013954
raccacatatctc

SEQ ID NO: 49267 - DNA, 13 bp, Artificial Sequence
  Oligonucleotide for detection of SNP TSC0013954
gagatacgtggty

SEQ ID NO: 49268 - DNA, 13 bp, Artificial Sequence
  Oligonucleotide for detection of SNP TSC0013954
raccacgtatctc

SEQ ID NO: 49269 - DNA, 13 bp, Artificial Sequence
  Oligonucleotide for detection of SNP TSC0013955
atatatatttttt

SEQ ID NO: 49270 - DNA, 13 bp, Artificial Sequence
  Oligonucleotide for detection of SNP TSC0013955
aaaaaatatatat

SEQ ID NO: 49271 - DNA, 13 bp, Artificial Sequence
  Oligonucleotide for detection of SNP TSC0013955
atatatttttttt

SEQ ID NO: 49272 - DNA, 13 bp, Artificial Sequence
  Oligonucleotide for detection of SNP TSC0013955
aaaaaaaatatat

SEQ ID NO: 49273 - DNA, 13 bp, Artificial Sequence
  Oligonucleotide for detection of SNP TSC0013958
taaaatattaatt

SEQ ID NO: 49274 - DNA, 13 bp, Artificial Sequence
  Oligonucleotide for detection of SNP TSC0013958
aattaatatttta

SEQ ID NO: 49275 - DNA, 13 bp, Artificial Sequence
  Oligonucleotide for detection of SNP TSC0013958
taaaatgttaatt

SEQ ID NO: 49276 - DNA, 13 bp, Artificial Sequence
  Oligonucleotide for detection of SNP TSC0013958
aattaacatttta

SEQ ID NO: 49277 - DNA, 13 bp, Artificial Sequence
  Oligonucleotide for detection of SNP TSC0013959
tttagtggggata

SEQ ID NO: 49278 - DNA, 13 bp, Artificial Sequence
  Oligonucleotide for detection of SNP TSC0013959
tatccccactaaa

SEQ ID NO: 49279 - DNA, 13 bp, Artificial Sequence
  Oligonucleotide for detection of SNP TSC0013959
tttagtagggata

SEQ ID NO: 49280 - DNA, 13 bp, Artificial Sequence
  Oligonucleotide for detection of SNP TSC0013959
tatccctactaaa

SEQ ID NO: 49281 - DNA, 13 bp, Artificial Sequence
  Oligonucleotide for detection of SNP TSC0013960
ttgggtagtatta

SEQ ID NO: 49282 - DNA, 13 bp, Artificial Sequence
  Oligonucleotide for detection of SNP TSC0013960
taatactacccaa

SEQ ID NO: 49283 - DNA, 13 bp, Artificial Sequence
  Oligonucleotide for detection of SNP TSC0013960
ttgggtggtatta

SEQ ID NO: 49284 - DNA, 13 bp, Artificial Sequence
  Oligonucleotide for detection of SNP TSC0013960
taataccacccaa

SEQ ID NO: 49285 - DNA, 13 bp, Artificial Sequence
  Oligonucleotide for detection of SNP TSC0013960
ttgggcggtatta

SEQ ID NO: 49286 - DNA, 13 bp, Artificial Sequence
  Oligonucleotide for detection of SNP TSC0013960
taataccgcccaa

SEQ ID NO: 49287 - DNA, 13 bp, Artificial Sequence
  Oligonucleotide for detection of SNP TSC0013960
taatgttgtttag

SEQ ID NO: 49288 - DNA, 13 bp, Artificial Sequence
  Oligonucleotide for detection of SNP TSC0013960
ctaaacaacatta

SEQ ID NO: 49289 - DNA, 13 bp, Artificial Sequence
  Oligonucleotide for detection of SNP TSC0013960
taatgtcgtttag

SEQ ID NO: 49290 - DNA, 13 bp, Artificial Sequence
  Oligonucleotide for detection of SNP TSC0013960
ctaaacgacatta

SEQ ID NO: 49291 - DNA, 13 bp, Artificial Sequence
  Oligonucleotide for detection of SNP TSC0013961
tggaagtgtatag

SEQ ID NO: 49292 - DNA, 13 bp, Artificial Sequence
  Oligonucleotide for detection of SNP TSC0013961
ctatacacttcca

SEQ ID NO: 49293 - DNA, 13 bp, Artificial Sequence
  Oligonucleotide for detection of SNP TSC0013961
tggaagggtatag

SEQ ID NO: 49294 - DNA, 13 bp, Artificial Sequence
  Oligonucleotide for detection of SNP TSC0013961
ctatacccttcca

SEQ ID NO: 49295 - DNA, 13 bp, Artificial Sequence
  Oligonucleotide for detection of SNP TSC0013961
tggaagcgtatag

SEQ ID NO: 49296 - DNA, 13 bp, Artificial Sequence
  Oligonucleotide for detection of SNP TSC0013961
ctatacgcttcca

SEQ ID NO: 49297 - DNA, 13 bp, Artificial Sequence
  Oligonucleotide for detection of SNP TSC0013961
ttgtatgttttta

SEQ ID NO: 49298 - DNA, 13 bp, Artificial Sequence
  Oligonucleotide for detection of SNP TSC0013961
taaaaacatacaa

SEQ ID NO: 49299 - DNA, 13 bp, Artificial Sequence
  Oligonucleotide for detection of SNP TSC0013961
ttgtattttttta

SEQ ID NO: 49300 - DNA, 13 bp, Artificial Sequence
  Oligonucleotide for detection of SNP TSC0013961
taaaaaaatacaa

SEQ ID NO: 49301 - DNA, 13 bp, Artificial Sequence
  Oligonucleotide for detection of SNP TSC0013961
ttgtacgttttta

SEQ ID NO: 49302 - DNA, 13 bp, Artificial Sequence
  Oligonucleotide for detection of SNP TSC0013961
taaaaacgtacaa

SEQ ID NO: 49303 - DNA, 13 bp, Artificial Sequence
  Oligonucleotide for detection of SNP TSC0013965
tttttgggtttaa

SEQ ID NO: 49304 - DNA, 13 bp, Artificial Sequence
  Oligonucleotide for detection of SNP TSC0013965
ttaaacccaaaaa

SEQ ID NO: 49305 - DNA, 13 bp, Artificial Sequence
  Oligonucleotide for detection of SNP TSC0013965
tttttgagtttaa

SEQ ID NO: 49306 - DNA, 13 bp, Artificial Sequence
  Oligonucleotide for detection of SNP TSC0013965
ttaaactcaaaaa

SEQ ID NO: 49307 - DNA, 13 bp, Artificial Sequence
  Oligonucleotide for detection of SNP TSC0013966
ggttagattgggy

SEQ ID NO: 49308 - DNA, 13 bp, Artificial Sequence
  Oligonucleotide for detection of SNP TSC0013966
rcccaatctaacc

SEQ ID NO: 49309 - DNA, 13 bp, Artificial Sequence
  Oligonucleotide for detection of SNP TSC0013966
ggttagtttgggy

SEQ ID NO: 49310 - DNA, 13 bp, Artificial Sequence
  Oligonucleotide for detection of SNP TSC0013966
rcccaaactaacc

SEQ ID NO: 49311 - DNA, 13 bp, Artificial Sequence
  Oligonucleotide for detection of SNP TSC0013966
gtttagtttagty

SEQ ID NO: 49312 - DNA, 13 bp, Artificial Sequence
  Oligonucleotide for detection of SNP TSC0013966
ractaaactaaac

SEQ ID NO: 49313 - DNA, 13 bp, Artificial Sequence
  Oligonucleotide for detection of SNP TSC0013966
gtttagattagty

SEQ ID NO: 49314 - DNA, 13 bp, Artificial Sequence
  Oligonucleotide for detection of SNP TSC0013966
ractaatctaaac

SEQ ID NO: 49315 - DNA, 13 bp, Artificial Sequence
  Oligonucleotide for detection of SNP TSC0013967
agatttgtagttt

SEQ ID NO: 49316 - DNA, 13 bp, Artificial Sequence
  Oligonucleotide for detection of SNP TSC0013967
aaactacaaatct

SEQ ID NO: 49317 - DNA, 13 bp, Artificial Sequence
  Oligonucleotide for detection of SNP TSC0013967
agatttatagttt

SEQ ID NO: 49318 - DNA, 13 bp, Artificial Sequence
  Oligonucleotide for detection of SNP TSC0013967
aaactataaatct

SEQ ID NO: 49319 - DNA, 13 bp, Artificial Sequence
  Oligonucleotide for detection of SNP TSC0013968
aggttagtttttg

SEQ ID NO: 49320 - DNA, 13 bp, Artificial Sequence
  Oligonucleotide for detection of SNP TSC0013968
caaaaactaacct

SEQ ID NO: 49321 - DNA, 13 bp, Artificial Sequence
  Oligonucleotide for detection of SNP TSC0013968
aggttattttttg

SEQ ID NO: 49322 - DNA, 13 bp, Artificial Sequence
  Oligonucleotide for detection of SNP TSC0013968
caaaaaataacct

SEQ ID NO: 49323 - DNA, 13 bp, Artificial Sequence
  Oligonucleotide for detection of SNP TSC0013968
aggttagttttcg

SEQ ID NO: 49324 - DNA, 13 bp, Artificial Sequence
  Oligonucleotide for detection of SNP TSC0013968
cgaaaactaacct

SEQ ID NO: 49325 - DNA, 13 bp, Artificial Sequence
  Oligonucleotide for detection of SNP TSC0013968
aggttatttttcg

SEQ ID NO: 49326 - DNA, 13 bp, Artificial Sequence
  Oligonucleotide for detection of SNP TSC0013968
cgaaaaataacct

SEQ ID NO: 49327 - DNA, 13 bp, Artificial Sequence
  Oligonucleotide for detection of SNP TSC0013968
tggggattggttt

SEQ ID NO: 49328 - DNA, 13 bp, Artificial Sequence
  Oligonucleotide for detection of SNP TSC0013968
aaaccaatcccca

SEQ ID NO: 49329 - DNA, 13 bp, Artificial Sequence
  Oligonucleotide for detection of SNP TSC0013968
tggggaatggttt

SEQ ID NO: 49330 - DNA, 13 bp, Artificial Sequence
  Oligonucleotide for detection of SNP TSC0013968
aaaccattcccca

SEQ ID NO: 49331 - DNA, 13 bp, Artificial Sequence
  Oligonucleotide for detection of SNP TSC0013968
cggggattggttt

SEQ ID NO: 49332 - DNA, 13 bp, Artificial Sequence
  Oligonucleotide for detection of SNP TSC0013968
aaaccaatccccg

SEQ ID NO: 49333 - DNA, 13 bp, Artificial Sequence
  Oligonucleotide for detection of SNP TSC0013968
cggggaatggttt

SEQ ID NO: 49334 - DNA, 13 bp, Artificial Sequence
  Oligonucleotide for detection of SNP TSC0013968
aaaccattccccg

SEQ ID NO: 49335 - DNA, 13 bp, Artificial Sequence
  Oligonucleotide for detection of SNP TSC0013969
attgtgagttttt

SEQ ID NO: 49336 - DNA, 13 bp, Artificial Sequence
  Oligonucleotide for detection of SNP TSC0013969
aaaaactcacaat

SEQ ID NO: 49337 - DNA, 13 bp, Artificial Sequence
  Oligonucleotide for detection of SNP TSC0013969
attgtgggttttt

SEQ ID NO: 49338 - DNA, 13 bp, Artificial Sequence
  Oligonucleotide for detection of SNP TSC0013969
aaaaacccacaat

SEQ ID NO: 49339 - DNA, 13 bp, Artificial Sequence
  Oligonucleotide for detection of SNP TSC0013969
atcgtgagttttt

SEQ ID NO: 49340 - DNA, 13 bp, Artificial Sequence
  Oligonucleotide for detection of SNP TSC0013969
aaaaactcacgat

SEQ ID NO: 49341 - DNA, 13 bp, Artificial Sequence
  Oligonucleotide for detection of SNP TSC0013969
atcgtgggttttt

SEQ ID NO: 49342 - DNA, 13 bp, Artificial Sequence
  Oligonucleotide for detection of SNP TSC0013969
aaaaacccacgat

SEQ ID NO: 49343 - DNA, 13 bp, Artificial Sequence
  Oligonucleotide for detection of SNP TSC0013970
agagaatgaggag

SEQ ID NO: 49344 - DNA, 13 bp, Artificial Sequence
  Oligonucleotide for detection of SNP TSC0013970
ctcctcattctct

SEQ ID NO: 49345 - DNA, 13 bp, Artificial Sequence
  Oligonucleotide for detection of SNP TSC0013970
agagaaggaggag

SEQ ID NO: 49346 - DNA, 13 bp, Artificial Sequence
  Oligonucleotide for detection of SNP TSC0013970
ctcctccttctct

SEQ ID NO: 49347 - DNA, 13 bp, Artificial Sequence
  Oligonucleotide for detection of SNP TSC0013970
agagaacgaggag

SEQ ID NO: 49348 - DNA, 13 bp, Artificial Sequence
  Oligonucleotide for detection of SNP TSC0013970
ctcctcgttctct

SEQ ID NO: 49349 - DNA, 13 bp, Artificial Sequence
  Oligonucleotide for detection of SNP TSC0013971
agagataggttty

SEQ ID NO: 49350 - DNA, 13 bp, Artificial Sequence
  Oligonucleotide for detection of SNP TSC0013971
raaacctatctct

SEQ ID NO: 49351 - DNA, 13 bp, Artificial Sequence
  Oligonucleotide for detection of SNP TSC0013971
agagatgggttty

SEQ ID NO: 49352 - DNA, 13 bp, Artificial Sequence
  Oligonucleotide for detection of SNP TSC0013971
raaacccatctct

SEQ ID NO: 49353 - DNA, 13 bp, Artificial Sequence
  Oligonucleotide for detection of SNP TSC0013971
agagacgggttty

SEQ ID NO: 49354 - DNA, 13 bp, Artificial Sequence
  Oligonucleotide for detection of SNP TSC0013971
raaacccgtctct

SEQ ID NO: 49355 - DNA, 13 bp, Artificial Sequence
  Oligonucleotide for detection of SNP TSC0013971
gaaatttgttttt

SEQ ID NO: 49356 - DNA, 13 bp, Artificial Sequence
  Oligonucleotide for detection of SNP TSC0013971
aaaaacaaatttc

SEQ ID NO: 49357 - DNA, 13 bp, Artificial Sequence
  Oligonucleotide for detection of SNP TSC0013971
gaaattcgttttt

SEQ ID NO: 49358 - DNA, 13 bp, Artificial Sequence
  Oligonucleotide for detection of SNP TSC0013971
aaaaacgaatttc

SEQ ID NO: 49359 - DNA, 13 bp, Artificial Sequence
  Oligonucleotide for detection of SNP TSC0013972
tttggtgtttgay

SEQ ID NO: 49360 - DNA, 13 bp, Artificial Sequence
  Oligonucleotide for detection of SNP TSC0013972
rtcaaacaccaaa

SEQ ID NO: 49361 - DNA, 13 bp, Artificial Sequence
  Oligonucleotide for detection of SNP TSC0013972
tttggtttttgay

SEQ ID NO: 49362 - DNA, 13 bp, Artificial Sequence
  Oligonucleotide for detection of SNP TSC0013972
rtcaaaaaccaaa

SEQ ID NO: 49363 - DNA, 13 bp, Artificial Sequence
  Oligonucleotide for detection of SNP TSC0013972
ttcggtgtttgay

SEQ ID NO: 49364 - DNA, 13 bp, Artificial Sequence
  Oligonucleotide for detection of SNP TSC0013972
rtcaaacaccgaa

SEQ ID NO: 49365 - DNA, 13 bp, Artificial Sequence
  Oligonucleotide for detection of SNP TSC0013972
ttcggtttttgay

SEQ ID NO: 49366 - DNA, 13 bp, Artificial Sequence
  Oligonucleotide for detection of SNP TSC0013972
rtcaaaaaccgaa

SEQ ID NO: 49367 - DNA, 13 bp, Artificial Sequence
  Oligonucleotide for detection of SNP TSC0013972
tttggcgtttgay

SEQ ID NO: 49368 - DNA, 13 bp, Artificial Sequence
  Oligonucleotide for detection of SNP TSC0013972
rtcaaacgccaaa

SEQ ID NO: 49369 - DNA, 13 bp, Artificial Sequence
  Oligonucleotide for detection of SNP TSC0013972
ttcggcgtttgay

SEQ ID NO: 49370 - DNA, 13 bp, Artificial Sequence
  Oligonucleotide for detection of SNP TSC0013972
rtcaaacgccgaa

SEQ ID NO: 49371 - DNA, 13 bp, Artificial Sequence
  Oligonucleotide for detection of SNP TSC0013972
gttaagtgttgga

SEQ ID NO: 49372 - DNA, 13 bp, Artificial Sequence
  Oligonucleotide for detection of SNP TSC0013972
tccaacacttaac

SEQ ID NO: 49373 - DNA, 13 bp, Artificial Sequence
  Oligonucleotide for detection of SNP TSC0013972
gttaagagttgga

SEQ ID NO: 49374 - DNA, 13 bp, Artificial Sequence
  Oligonucleotide for detection of SNP TSC0013972
tccaactcttaac

SEQ ID NO: 49375 - DNA, 13 bp, Artificial Sequence
  Oligonucleotide for detection of SNP TSC0013972
gttaagcgttgga

SEQ ID NO: 49376 - DNA, 13 bp, Artificial Sequence
  Oligonucleotide for detection of SNP TSC0013972
tccaacgcttaac

SEQ ID NO: 49377 - DNA, 13 bp, Artificial Sequence
  Oligonucleotide for detection of SNP TSC0013972
gttaagagtcgga

SEQ ID NO: 49378 - DNA, 13 bp, Artificial Sequence
  Oligonucleotide for detection of SNP TSC0013972
tccgactcttaac

SEQ ID NO: 49379 - DNA, 13 bp, Artificial Sequence
  Oligonucleotide for detection of SNP TSC0013972
gttaagtgtcgga

SEQ ID NO: 49380 - DNA, 13 bp, Artificial Sequence
  Oligonucleotide for detection of SNP TSC0013972
tccgacacttaac

SEQ ID NO: 49381 - DNA, 13 bp, Artificial Sequence
  Oligonucleotide for detection of SNP TSC0013972
gttaagcgtcgga

SEQ ID NO: 49382 - DNA, 13 bp, Artificial Sequence
  Oligonucleotide for detection of SNP TSC0013972
tccgacgcttaac

SEQ ID NO: 49383 - DNA, 13 bp, Artificial Sequence
  Oligonucleotide for detection of SNP TSC0013973
agttatatgtgtt

SEQ ID NO: 49384 - DNA, 13 bp, Artificial Sequence
  Oligonucleotide for detection of SNP TSC0013973
aacacatataact

SEQ ID NO: 49385 - DNA, 13 bp, Artificial Sequence
  Oligonucleotide for detection of SNP TSC0013973
agttatttgtgtt

SEQ ID NO: 49386 - DNA, 13 bp, Artificial Sequence
  Oligonucleotide for detection of SNP TSC0013973
aacacaaataact

SEQ ID NO: 49387 - DNA, 13 bp, Artificial Sequence
  Oligonucleotide for detection of SNP TSC0013973
aatatatataatt

SEQ ID NO: 49388 - DNA, 13 bp, Artificial Sequence
  Oligonucleotide for detection of SNP TSC0013973
aattatatatatt

SEQ ID NO: 49389 - DNA, 13 bp, Artificial Sequence
  Oligonucleotide for detection of SNP TSC0013973
aatataaataatt

SEQ ID NO: 49390 - DNA, 13 bp, Artificial Sequence
  Oligonucleotide for detection of SNP TSC0013973
aattatttatatt

SEQ ID NO: 49391 - DNA, 13 bp, Artificial Sequence
  Oligonucleotide for detection of SNP TSC0013974
taattttataata

SEQ ID NO: 49392 - DNA, 13 bp, Artificial Sequence
  Oligonucleotide for detection of SNP TSC0013974
tattataaaatta

SEQ ID NO: 49393 - DNA, 13 bp, Artificial Sequence
  Oligonucleotide for detection of SNP TSC0013974
taatttgataata

SEQ ID NO: 49394 - DNA, 13 bp, Artificial Sequence
  Oligonucleotide for detection of SNP TSC0013974
tattatcaaatta

SEQ ID NO: 49395 - DNA, 13 bp, Artificial Sequence
  Oligonucleotide for detection of SNP TSC0013974
tattgtgaaattg

SEQ ID NO: 49396 - DNA, 13 bp, Artificial Sequence
  Oligonucleotide for detection of SNP TSC0013974
caatttcacaata

SEQ ID NO: 49397 - DNA, 13 bp, Artificial Sequence
  Oligonucleotide for detection of SNP TSC0013974
tattgttaaattg

SEQ ID NO: 49398 - DNA, 13 bp, Artificial Sequence
  Oligonucleotide for detection of SNP TSC0013974
caatttaacaata

SEQ ID NO: 49399 - DNA, 13 bp, Artificial Sequence
  Oligonucleotide for detection of SNP TSC0013976
tggagaattttat

SEQ ID NO: 49400 - DNA, 13 bp, Artificial Sequence
  Oligonucleotide for detection of SNP TSC0013976
ataaaattctcca

SEQ ID NO: 49401 - DNA, 13 bp, Artificial Sequence
  Oligonucleotide for detection of SNP TSC0013976
tggagatttttat

SEQ ID NO: 49402 - DNA, 13 bp, Artificial Sequence
  Oligonucleotide for detection of SNP TSC0013976
ataaaaatctcca

SEQ ID NO: 49403 - DNA, 13 bp, Artificial Sequence
  Oligonucleotide for detection of SNP TSC0013976
ataaaatttttta

SEQ ID NO: 49404 - DNA, 13 bp, Artificial Sequence
  Oligonucleotide for detection of SNP TSC0013976
taaaaaattttat

SEQ ID NO: 49405 - DNA, 13 bp, Artificial Sequence
  Oligonucleotide for detection of SNP TSC0013976
ataaaaattttta

SEQ ID NO: 49406 - DNA, 13 bp, Artificial Sequence
  Oligonucleotide for detection of SNP TSC0013976
taaaaatttttat

SEQ ID NO: 49407 - DNA, 13 bp, Artificial Sequence
  Oligonucleotide for detection of SNP TSC0013977
gagagtaaaaggt

SEQ ID NO: 49408 - DNA, 13 bp, Artificial Sequence
  Oligonucleotide for detection of SNP TSC0013977
accttttactctc

SEQ ID NO: 49409 - DNA, 13 bp, Artificial Sequence
  Oligonucleotide for detection of SNP TSC0013977
gagagtgaaaggt

SEQ ID NO: 49410 - DNA, 13 bp, Artificial Sequence
  Oligonucleotide for detection of SNP TSC0013977
acctttcactctc

SEQ ID NO: 49411 - DNA, 13 bp, Artificial Sequence
  Oligonucleotide for detection of SNP TSC0013977
gagagcgaaaggt

SEQ ID NO: 49412 - DNA, 13 bp, Artificial Sequence
  Oligonucleotide for detection of SNP TSC0013977
acctttcgctctc

SEQ ID NO: 49413 - DNA, 13 bp, Artificial Sequence
  Oligonucleotide for detection of SNP TSC0013977
attttttgtttty

SEQ ID NO: 49414 - DNA, 13 bp, Artificial Sequence
  Oligonucleotide for detection of SNP TSC0013977
raaaacaaaaaat

SEQ ID NO: 49415 - DNA, 13 bp, Artificial Sequence
  Oligonucleotide for detection of SNP TSC0013977
atttttcgtttty

SEQ ID NO: 49416 - DNA, 13 bp, Artificial Sequence
  Oligonucleotide for detection of SNP TSC0013977
raaaacgaaaaat

SEQ ID NO: 49417 - DNA, 13 bp, Artificial Sequence
  Oligonucleotide for detection of SNP TSC0013982
tgtagtataaata

SEQ ID NO: 49418 - DNA, 13 bp, Artificial Sequence
  Oligonucleotide for detection of SNP TSC0013982
tatttatactaca

SEQ ID NO: 49419 - DNA, 13 bp, Artificial Sequence
  Oligonucleotide for detection of SNP TSC0013982
tgtagtgtaaata

SEQ ID NO: 49420 - DNA, 13 bp, Artificial Sequence
  Oligonucleotide for detection of SNP TSC0013982
tatttacactaca

SEQ ID NO: 49421 - DNA, 13 bp, Artificial Sequence
  Oligonucleotide for detection of SNP TSC0013982
cgtagtataaata

SEQ ID NO: 49422 - DNA, 13 bp, Artificial Sequence
  Oligonucleotide for detection of SNP TSC0013982
tatttatactacg

SEQ ID NO: 49423 - DNA, 13 bp, Artificial Sequence
  Oligonucleotide for detection of SNP TSC0013982
cgtagtgtaaata

SEQ ID NO: 49424 - DNA, 13 bp, Artificial Sequence
  Oligonucleotide for detection of SNP TSC0013982
tatttacactacg

SEQ ID NO: 49425 - DNA, 13 bp, Artificial Sequence
  Oligonucleotide for detection of SNP TSC0013982
tgtagcgtaaata

SEQ ID NO: 49426 - DNA, 13 bp, Artificial Sequence
  Oligonucleotide for detection of SNP TSC0013982
tatttacgctaca

SEQ ID NO: 49427 - DNA, 13 bp, Artificial Sequence
  Oligonucleotide for detection of SNP TSC0013982
cgtagcgtaaata

SEQ ID NO: 49428 - DNA, 13 bp, Artificial Sequence
  Oligonucleotide for detection of SNP TSC0013982
tatttacgctacg

SEQ ID NO: 49429 - DNA, 13 bp, Artificial Sequence
  Oligonucleotide for detection of SNP TSC0013982
tgtttatgttgtg

SEQ ID NO: 49430 - DNA, 13 bp, Artificial Sequence
  Oligonucleotide for detection of SNP TSC0013982
cacaacataaaca

SEQ ID NO: 49431 - DNA, 13 bp, Artificial Sequence
  Oligonucleotide for detection of SNP TSC0013982
tgtttatgttgcg

SEQ ID NO: 49432 - DNA, 13 bp, Artificial Sequence
  Oligonucleotide for detection of SNP TSC0013982
cgcaacataaaca

SEQ ID NO: 49433 - DNA, 13 bp, Artificial Sequence
  Oligonucleotide for detection of SNP TSC0013982
tgtttacgttgtg

SEQ ID NO: 49434 - DNA, 13 bp, Artificial Sequence
  Oligonucleotide for detection of SNP TSC0013982
cacaacgtaaaca

SEQ ID NO: 49435 - DNA, 13 bp, Artificial Sequence
  Oligonucleotide for detection of SNP TSC0013982
tgtttacgttgcg

SEQ ID NO: 49436 - DNA, 13 bp, Artificial Sequence
  Oligonucleotide for detection of SNP TSC0013982
cgcaacgtaaaca

SEQ ID NO: 49437 - DNA, 13 bp, Artificial Sequence
  Oligonucleotide for detection of SNP TSC0013983
ttggtttgatatg

SEQ ID NO: 49438 - DNA, 13 bp, Artificial Sequence
  Oligonucleotide for detection of SNP TSC0013983
catatcaaaccaa

SEQ ID NO: 49439 - DNA, 13 bp, Artificial Sequence
  Oligonucleotide for detection of SNP TSC0013983
ttggttcgatatg

SEQ ID NO: 49440 - DNA, 13 bp, Artificial Sequence
  Oligonucleotide for detection of SNP TSC0013983
catatcgaaccaa

SEQ ID NO: 49441 - DNA, 13 bp, Artificial Sequence
  Oligonucleotide for detection of SNP TSC0013983
ttggtttgatacg

SEQ ID NO: 49442 - DNA, 13 bp, Artificial Sequence
  Oligonucleotide for detection of SNP TSC0013983
cgtatcaaaccaa

SEQ ID NO: 49443 - DNA, 13 bp, Artificial Sequence
  Oligonucleotide for detection of SNP TSC0013983
ttggttcgatacg

SEQ ID NO: 49444 - DNA, 13 bp, Artificial Sequence
  Oligonucleotide for detection of SNP TSC0013983
cgtatcgaaccaa

SEQ ID NO: 49445 - DNA, 13 bp, Artificial Sequence
  Oligonucleotide for detection of SNP TSC0013983
tgtgttgggttag

SEQ ID NO: 49446 - DNA, 13 bp, Artificial Sequence
  Oligonucleotide for detection of SNP TSC0013983
ctaacccaacaca

SEQ ID NO: 49447 - DNA, 13 bp, Artificial Sequence
  Oligonucleotide for detection of SNP TSC0013983
tgtgttaggttag

SEQ ID NO: 49448 - DNA, 13 bp, Artificial Sequence
  Oligonucleotide for detection of SNP TSC0013983
ctaacctaacaca

SEQ ID NO: 49449 - DNA, 13 bp, Artificial Sequence
  Oligonucleotide for detection of SNP TSC0013983
cgtgttgggttag

SEQ ID NO: 49450 - DNA, 13 bp, Artificial Sequence
  Oligonucleotide for detection of SNP TSC0013983
ctaacccaacacg

SEQ ID NO: 49451 - DNA, 13 bp, Artificial Sequence
  Oligonucleotide for detection of SNP TSC0013983
cgtgttaggttag

SEQ ID NO: 49452 - DNA, 13 bp, Artificial Sequence
  Oligonucleotide for detection of SNP TSC0013983
ctaacctaacacg

SEQ ID NO: 49453 - DNA, 13 bp, Artificial Sequence
  Oligonucleotide for detection of SNP TSC0013983
tgtgtcgggttag

SEQ ID NO: 49454 - DNA, 13 bp, Artificial Sequence
  Oligonucleotide for detection of SNP TSC0013983
ctaacccgacaca

SEQ ID NO: 49455 - DNA, 13 bp, Artificial Sequence
  Oligonucleotide for detection of SNP TSC0013983
cgtgtcgggttag

SEQ ID NO: 49456 - DNA, 13 bp, Artificial Sequence
  Oligonucleotide for detection of SNP TSC0013983
ctaacccgacacg

SEQ ID NO: 49457 - DNA, 13 bp, Artificial Sequence
  Oligonucleotide for detection of SNP TSC0013987
tattaatggtaga

SEQ ID NO: 49458 - DNA, 13 bp, Artificial Sequence
  Oligonucleotide for detection of SNP TSC0013987
tctaccattaata

SEQ ID NO: 49459 - DNA, 13 bp, Artificial Sequence
  Oligonucleotide for detection of SNP TSC0013987
tattaacggtaga

SEQ ID NO: 49460 - DNA, 13 bp, Artificial Sequence
  Oligonucleotide for detection of SNP TSC0013987
tctaccgttaata

SEQ ID NO: 49461 - DNA, 13 bp, Artificial Sequence
  Oligonucleotide for detection of SNP TSC0013987
tttgttgttgatg

SEQ ID NO: 49462 - DNA, 13 bp, Artificial Sequence
  Oligonucleotide for detection of SNP TSC0013987
catcaacaacaaa

SEQ ID NO: 49463 - DNA, 13 bp, Artificial Sequence
  Oligonucleotide for detection of SNP TSC0013987
tttgttattgatg

SEQ ID NO: 49464 - DNA, 13 bp, Artificial Sequence
  Oligonucleotide for detection of SNP TSC0013987
catcaataacaaa

SEQ ID NO: 49465 - DNA, 13 bp, Artificial Sequence
  Oligonucleotide for detection of SNP TSC0013987
tttgtcgttgatg

SEQ ID NO: 49466 - DNA, 13 bp, Artificial Sequence
  Oligonucleotide for detection of SNP TSC0013987
catcaacgacaaa

SEQ ID NO: 49467 - DNA, 13 bp, Artificial Sequence
  Oligonucleotide for detection of SNP TSC0013988
attttttggtgtg

SEQ ID NO: 49468 - DNA, 13 bp, Artificial Sequence
  Oligonucleotide for detection of SNP TSC0013988
cacaccaaaaaat

SEQ ID NO: 49469 - DNA, 13 bp, Artificial Sequence
  Oligonucleotide for detection of SNP TSC0013988
atttttcggtgtg

SEQ ID NO: 49470 - DNA, 13 bp, Artificial Sequence
  Oligonucleotide for detection of SNP TSC0013988
cacaccgaaaaat

SEQ ID NO: 49471 - DNA, 13 bp, Artificial Sequence
  Oligonucleotide for detection of SNP TSC0013988
tatattggggagt

SEQ ID NO: 49472 - DNA, 13 bp, Artificial Sequence
  Oligonucleotide for detection of SNP TSC0013988
actccccaatata

SEQ ID NO: 49473 - DNA, 13 bp, Artificial Sequence
  Oligonucleotide for detection of SNP TSC0013988
tatattagggagt

SEQ ID NO: 49474 - DNA, 13 bp, Artificial Sequence
  Oligonucleotide for detection of SNP TSC0013988
actccctaatata

SEQ ID NO: 49475 - DNA, 13 bp, Artificial Sequence
  Oligonucleotide for detection of SNP TSC0013988
tatatcggggagt

SEQ ID NO: 49476 - DNA, 13 bp, Artificial Sequence
  Oligonucleotide for detection of SNP TSC0013988
actccccgatata

SEQ ID NO: 49477 - DNA, 13 bp, Artificial Sequence
  Oligonucleotide for detection of SNP TSC0013989
ttatatagtagtt

SEQ ID NO: 49478 - DNA, 13 bp, Artificial Sequence
  Oligonucleotide for detection of SNP TSC0013989
aactactatataa

SEQ ID NO: 49479 - DNA, 13 bp, Artificial Sequence
  Oligonucleotide for detection of SNP TSC0013989
ttatatggtagtt

SEQ ID NO: 49480 - DNA, 13 bp, Artificial Sequence
  Oligonucleotide for detection of SNP TSC0013989
aactaccatataa

SEQ ID NO: 49481 - DNA, 13 bp, Artificial Sequence
  Oligonucleotide for detection of SNP TSC0013989
ttatacggtagtt

SEQ ID NO: 49482 - DNA, 13 bp, Artificial Sequence
  Oligonucleotide for detection of SNP TSC0013989
aactaccgtataa

SEQ ID NO: 49483 - DNA, 13 bp, Artificial Sequence
  Oligonucleotide for detection of SNP TSC0013989
aattgttgtgtga

SEQ ID NO: 49484 - DNA, 13 bp, Artificial Sequence
  Oligonucleotide for detection of SNP TSC0013989
tcacacaacaatt

SEQ ID NO: 49485 - DNA, 13 bp, Artificial Sequence
  Oligonucleotide for detection of SNP TSC0013989
aattgtcgtgtga

SEQ ID NO: 49486 - DNA, 13 bp, Artificial Sequence
  Oligonucleotide for detection of SNP TSC0013989
tcacacgacaatt

SEQ ID NO: 49487 - DNA, 13 bp, Artificial Sequence
  Oligonucleotide for detection of SNP TSC0013990
gggtataggttag

SEQ ID NO: 49488 - DNA, 13 bp, Artificial Sequence
  Oligonucleotide for detection of SNP TSC0013990
ctaacctataccc

SEQ ID NO: 49489 - DNA, 13 bp, Artificial Sequence
  Oligonucleotide for detection of SNP TSC0013990
gggtatgggttag

SEQ ID NO: 49490 - DNA, 13 bp, Artificial Sequence
  Oligonucleotide for detection of SNP TSC0013990
ctaacccataccc

SEQ ID NO: 49491 - DNA, 13 bp, Artificial Sequence
  Oligonucleotide for detection of SNP TSC0013990
gggtacgggttag

SEQ ID NO: 49492 - DNA, 13 bp, Artificial Sequence
  Oligonucleotide for detection of SNP TSC0013990
ctaacccgtaccc

SEQ ID NO: 49493 - DNA, 13 bp, Artificial Sequence
  Oligonucleotide for detection of SNP TSC0013990
ttggtttgtgtty

SEQ ID NO: 49494 - DNA, 13 bp, Artificial Sequence
  Oligonucleotide for detection of SNP TSC0013990
raacacaaaccaa

SEQ ID NO: 49495 - DNA, 13 bp, Artificial Sequence
  Oligonucleotide for detection of SNP TSC0013990
ttggttcgtgtty

SEQ ID NO: 49496 - DNA, 13 bp, Artificial Sequence
  Oligonucleotide for detection of SNP TSC0013990
raacacgaaccaa

SEQ ID NO: 49497 - DNA, 13 bp, Artificial Sequence
  Oligonucleotide for detection of SNP TSC0013991
agtgtgagtggtt

SEQ ID NO: 49498 - DNA, 13 bp, Artificial Sequence
  Oligonucleotide for detection of SNP TSC0013991
aaccactcacact

SEQ ID NO: 49499 - DNA, 13 bp, Artificial Sequence
  Oligonucleotide for detection of SNP TSC0013991
agtgtgtgtggtt

SEQ ID NO: 49500 - DNA, 13 bp, Artificial Sequence
  Oligonucleotide for detection of SNP TSC0013991
aaccacacacact

SEQ ID NO: 49501 - DNA, 13 bp, Artificial Sequence
  Oligonucleotide for detection of SNP TSC0013991
agcgtgagtggtt

SEQ ID NO: 49502 - DNA, 13 bp, Artificial Sequence
  Oligonucleotide for detection of SNP TSC0013991
aaccactcacgct

SEQ ID NO: 49503 - DNA, 13 bp, Artificial Sequence
  Oligonucleotide for detection of SNP TSC0013991
agcgtgtgtggtt

SEQ ID NO: 49504 - DNA, 13 bp, Artificial Sequence
  Oligonucleotide for detection of SNP TSC0013991
aaccacacacgct

SEQ ID NO: 49505 - DNA, 13 bp, Artificial Sequence
  Oligonucleotide for detection of SNP TSC0013991
agtgtgcgtggtt

SEQ ID NO: 49506 - DNA, 13 bp, Artificial Sequence
  Oligonucleotide for detection of SNP TSC0013991
aaccacgcacact

SEQ ID NO: 49507 - DNA, 13 bp, Artificial Sequence
  Oligonucleotide for detection of SNP TSC0013991
agcgtgcgtggtt

SEQ ID NO: 49508 - DNA, 13 bp, Artificial Sequence
  Oligonucleotide for detection of SNP TSC0013991
aaccacgcacgct

SEQ ID NO: 49509 - DNA, 13 bp, Artificial Sequence
  Oligonucleotide for detection of SNP TSC0013991
agttatttatgtt

SEQ ID NO: 49510 - DNA, 13 bp, Artificial Sequence
  Oligonucleotide for detection of SNP TSC0013991
aacataaataact

SEQ ID NO: 49511 - DNA, 13 bp, Artificial Sequence
  Oligonucleotide for detection of SNP TSC0013991
agttatgtatgtt

SEQ ID NO: 49512 - DNA, 13 bp, Artificial Sequence
  Oligonucleotide for detection of SNP TSC0013991
aacatacataact

SEQ ID NO: 49513 - DNA, 13 bp, Artificial Sequence
  Oligonucleotide for detection of SNP TSC0013991
agttatttacgtt

SEQ ID NO: 49514 - DNA, 13 bp, Artificial Sequence
  Oligonucleotide for detection of SNP TSC0013991
aacgtaaataact

SEQ ID NO: 49515 - DNA, 13 bp, Artificial Sequence
  Oligonucleotide for detection of SNP TSC0013991
agttacgtatgtt

SEQ ID NO: 49516 - DNA, 13 bp, Artificial Sequence
  Oligonucleotide for detection of SNP TSC0013991
aacatacgtaact

SEQ ID NO: 49517 - DNA, 13 bp, Artificial Sequence
  Oligonucleotide for detection of SNP TSC0013991
agttatgtacgtt

SEQ ID NO: 49518 - DNA, 13 bp, Artificial Sequence
  Oligonucleotide for detection of SNP TSC0013991
aacgtacataact

SEQ ID NO: 49519 - DNA, 13 bp, Artificial Sequence
  Oligonucleotide for detection of SNP TSC0013991
agttacgtacgtt

SEQ ID NO: 49520 - DNA, 13 bp, Artificial Sequence
  Oligonucleotide for detection of SNP TSC0013991
aacgtacgtaact

SEQ ID NO: 49521 - DNA, 13 bp, Artificial Sequence
  Oligonucleotide for detection of SNP TSC0013992
attggtatgtggg

SEQ ID NO: 49522 - DNA, 13 bp, Artificial Sequence
  Oligonucleotide for detection of SNP TSC0013992
cccacataccaat

SEQ ID NO: 49523 - DNA, 13 bp, Artificial Sequence
  Oligonucleotide for detection of SNP TSC0013992
attggtgtgtggg

SEQ ID NO: 49524 - DNA, 13 bp, Artificial Sequence
  Oligonucleotide for detection of SNP TSC0013992
cccacacaccaat

SEQ ID NO: 49525 - DNA, 13 bp, Artificial Sequence
  Oligonucleotide for detection of SNP TSC0013992
attggtacgtggg

SEQ ID NO: 49526 - DNA, 13 bp, Artificial Sequence
  Oligonucleotide for detection of SNP TSC0013992
cccacgtaccaat

SEQ ID NO: 49527 - DNA, 13 bp, Artificial Sequence
  Oligonucleotide for detection of SNP TSC0013992
attggcgtgtggg

SEQ ID NO: 49528 - DNA, 13 bp, Artificial Sequence
  Oligonucleotide for detection of SNP TSC0013992
cccacacgccaat

SEQ ID NO: 49529 - DNA, 13 bp, Artificial Sequence
  Oligonucleotide for detection of SNP TSC0013992
attggtgcgtggg

SEQ ID NO: 49530 - DNA, 13 bp, Artificial Sequence
  Oligonucleotide for detection of SNP TSC0013992
cccacgcaccaat

SEQ ID NO: 49531 - DNA, 13 bp, Artificial Sequence
  Oligonucleotide for detection of SNP TSC0013992
attggcgcgtggg

SEQ ID NO: 49532 - DNA, 13 bp, Artificial Sequence
  Oligonucleotide for detection of SNP TSC0013992
cccacgcgccaat

SEQ ID NO: 49533 - DNA, 13 bp, Artificial Sequence
  Oligonucleotide for detection of SNP TSC0013992
tttatgtgttagt

SEQ ID NO: 49534 - DNA, 13 bp, Artificial Sequence
  Oligonucleotide for detection of SNP TSC0013992
actaacacataaa

SEQ ID NO: 49535 - DNA, 13 bp, Artificial Sequence
  Oligonucleotide for detection of SNP TSC0013992
tttacgtgttagt

SEQ ID NO: 49536 - DNA, 13 bp, Artificial Sequence
  Oligonucleotide for detection of SNP TSC0013992
actaacacgtaaa

SEQ ID NO: 49537 - DNA, 13 bp, Artificial Sequence
  Oligonucleotide for detection of SNP TSC0013992
tttatgcgttagt

SEQ ID NO: 49538 - DNA, 13 bp, Artificial Sequence
  Oligonucleotide for detection of SNP TSC0013992
actaacgcataaa

SEQ ID NO: 49539 - DNA, 13 bp, Artificial Sequence
  Oligonucleotide for detection of SNP TSC0013992
tttacgcgttagt

SEQ ID NO: 49540 - DNA, 13 bp, Artificial Sequence
  Oligonucleotide for detection of SNP TSC0013992
actaacgcgtaaa

SEQ ID NO: 49541 - DNA, 13 bp, Artificial Sequence
  Oligonucleotide for detection of SNP TSC0013993
taaagtagttgay

SEQ ID NO: 49542 - DNA, 13 bp, Artificial Sequence
  Oligonucleotide for detection of SNP TSC0013993
rtcaactacttta

SEQ ID NO: 49543 - DNA, 13 bp, Artificial Sequence
  Oligonucleotide for detection of SNP TSC0013993
taaagtggttgay

SEQ ID NO: 49544 - DNA, 13 bp, Artificial Sequence
  Oligonucleotide for detection of SNP TSC0013993
rtcaaccacttta

SEQ ID NO: 49545 - DNA, 13 bp, Artificial Sequence
  Oligonucleotide for detection of SNP TSC0013993
taaagtagtcgay

SEQ ID NO: 49546 - DNA, 13 bp, Artificial Sequence
  Oligonucleotide for detection of SNP TSC0013993
rtcgactacttta

SEQ ID NO: 49547 - DNA, 13 bp, Artificial Sequence
  Oligonucleotide for detection of SNP TSC0013993
taaagcggttgay

SEQ ID NO: 49548 - DNA, 13 bp, Artificial Sequence
  Oligonucleotide for detection of SNP TSC0013993
rtcaaccgcttta

SEQ ID NO: 49549 - DNA, 13 bp, Artificial Sequence
  Oligonucleotide for detection of SNP TSC0013993
taaagtggtcgay

SEQ ID NO: 49550 - DNA, 13 bp, Artificial Sequence
  Oligonucleotide for detection of SNP TSC0013993
rtcgaccacttta

SEQ ID NO: 49551 - DNA, 13 bp, Artificial Sequence
  Oligonucleotide for detection of SNP TSC0013993
taaagcggtcgay

SEQ ID NO: 49552 - DNA, 13 bp, Artificial Sequence
  Oligonucleotide for detection of SNP TSC0013993
rtcgaccgcttta

SEQ ID NO: 49553 - DNA, 13 bp, Artificial Sequence
  Oligonucleotide for detection of SNP TSC0013993
gttggttgttttg

SEQ ID NO: 49554 - DNA, 13 bp, Artificial Sequence
  Oligonucleotide for detection of SNP TSC0013993
caaaacaaccaac

SEQ ID NO: 49555 - DNA, 13 bp, Artificial Sequence
  Oligonucleotide for detection of SNP TSC0013993
gtcggttgttttg

SEQ ID NO: 49556 - DNA, 13 bp, Artificial Sequence
  Oligonucleotide for detection of SNP TSC0013993
caaaacaaccgac

SEQ ID NO: 49557 - DNA, 13 bp, Artificial Sequence
  Oligonucleotide for detection of SNP TSC0013993
gttggtcgttttg

SEQ ID NO: 49558 - DNA, 13 bp, Artificial Sequence
  Oligonucleotide for detection of SNP TSC0013993
caaaacgaccaac

SEQ ID NO: 49559 - DNA, 13 bp, Artificial Sequence
  Oligonucleotide for detection of SNP TSC0013993
gtcggtcgttttg

SEQ ID NO: 49560 - DNA, 13 bp, Artificial Sequence
  Oligonucleotide for detection of SNP TSC0013993
caaaacgaccgac

SEQ ID NO: 49561 - DNA, 13 bp, Artificial Sequence
  Oligonucleotide for detection of SNP TSC0013998
gtttttagggtty

SEQ ID NO: 49562 - DNA, 13 bp, Artificial Sequence
  Oligonucleotide for detection of SNP TSC0013998
raaccctaaaaac

SEQ ID NO: 49563 - DNA, 13 bp, Artificial Sequence
  Oligonucleotide for detection of SNP TSC0013998
gagttttggaggy

SEQ ID NO: 49564 - DNA, 13 bp, Artificial Sequence
  Oligonucleotide for detection of SNP TSC0013998
rcctccaaaactc

SEQ ID NO: 49565 - DNA, 13 bp, Artificial Sequence
  Oligonucleotide for detection of SNP TSC0013998
gagtttcggaggy

SEQ ID NO: 49566 - DNA, 13 bp, Artificial Sequence
  Oligonucleotide for detection of SNP TSC0013998
rcctccgaaactc

SEQ ID NO: 49567 - DNA, 13 bp, Artificial Sequence
  Oligonucleotide for detection of SNP TSC0013999
gttttgagattta

SEQ ID NO: 49568 - DNA, 13 bp, Artificial Sequence
  Oligonucleotide for detection of SNP TSC0013999
taaatctcaaaac

SEQ ID NO: 49569 - DNA, 13 bp, Artificial Sequence
  Oligonucleotide for detection of SNP TSC0013999
gttttgtgattta

SEQ ID NO: 49570 - DNA, 13 bp, Artificial Sequence
  Oligonucleotide for detection of SNP TSC0013999
taaatcacaaaac

SEQ ID NO: 49571 - DNA, 13 bp, Artificial Sequence
  Oligonucleotide for detection of SNP TSC0013999
taaattttaaaay

SEQ ID NO: 49572 - DNA, 13 bp, Artificial Sequence
  Oligonucleotide for detection of SNP TSC0013999
rttttaaaattta

SEQ ID NO: 49573 - DNA, 13 bp, Artificial Sequence
  Oligonucleotide for detection of SNP TSC0013999
taaattataaaay

SEQ ID NO: 49574 - DNA, 13 bp, Artificial Sequence
  Oligonucleotide for detection of SNP TSC0013999
rttttataattta

SEQ ID NO: 49575 - DNA, 13 bp, Artificial Sequence
  Oligonucleotide for detection of SNP TSC0014000
tatgtaatatatt

SEQ ID NO: 49576 - DNA, 13 bp, Artificial Sequence
  Oligonucleotide for detection of SNP TSC0014000
aatatattacata

SEQ ID NO: 49577 - DNA, 13 bp, Artificial Sequence
  Oligonucleotide for detection of SNP TSC0014000
tatgtagtatatt

SEQ ID NO: 49578 - DNA, 13 bp, Artificial Sequence
  Oligonucleotide for detection of SNP TSC0014000
aatatactacata

SEQ ID NO: 49579 - DNA, 13 bp, Artificial Sequence
  Oligonucleotide for detection of SNP TSC0014004
ttgtgtgtgtttt

SEQ ID NO: 49580 - DNA, 13 bp, Artificial Sequence
  Oligonucleotide for detection of SNP TSC0014004
aaaacacacacaa

SEQ ID NO: 49581 - DNA, 13 bp, Artificial Sequence
  Oligonucleotide for detection of SNP TSC0014004
ttgtgtatgtttt

SEQ ID NO: 49582 - DNA, 13 bp, Artificial Sequence
  Oligonucleotide for detection of SNP TSC0014004
aaaacatacacaa

SEQ ID NO: 49583 - DNA, 13 bp, Artificial Sequence
  Oligonucleotide for detection of SNP TSC0014008
ttttatatagtgt

SEQ ID NO: 49584 - DNA, 13 bp, Artificial Sequence
  Oligonucleotide for detection of SNP TSC0014008
acactatataaaa

SEQ ID NO: 49585 - DNA, 13 bp, Artificial Sequence
  Oligonucleotide for detection of SNP TSC0014008
ttttatgtagtgt

SEQ ID NO: 49586 - DNA, 13 bp, Artificial Sequence
  Oligonucleotide for detection of SNP TSC0014008
acactacataaaa

SEQ ID NO: 49587 - DNA, 13 bp, Artificial Sequence
  Oligonucleotide for detection of SNP TSC0014009
tttgaaaggaagg

SEQ ID NO: 49588 - DNA, 13 bp, Artificial Sequence
  Oligonucleotide for detection of SNP TSC0014009
ccttcctttcaaa

SEQ ID NO: 49589 - DNA, 13 bp, Artificial Sequence
  Oligonucleotide for detection of SNP TSC0014009
tttgaagggaagg

SEQ ID NO: 49590 - DNA, 13 bp, Artificial Sequence
  Oligonucleotide for detection of SNP TSC0014009
ccttcccttcaaa

SEQ ID NO: 49591 - DNA, 13 bp, Artificial Sequence
  Oligonucleotide for detection of SNP TSC0014010
gggaaagggagga

SEQ ID NO: 49592 - DNA, 13 bp, Artificial Sequence
  Oligonucleotide for detection of SNP TSC0014010
tcctccctttccc

SEQ ID NO: 49593 - DNA, 13 bp, Artificial Sequence
  Oligonucleotide for detection of SNP TSC0014010
gggaaaaggagga

SEQ ID NO: 49594 - DNA, 13 bp, Artificial Sequence
  Oligonucleotide for detection of SNP TSC0014010
tcctccttttccc

SEQ ID NO: 49595 - DNA, 13 bp, Artificial Sequence
  Oligonucleotide for detection of SNP TSC0014012
atatttgtttgty

SEQ ID NO: 49596 - DNA, 13 bp, Artificial Sequence
  Oligonucleotide for detection of SNP TSC0014012
racaaacaaatat

SEQ ID NO: 49597 - DNA, 13 bp, Artificial Sequence
  Oligonucleotide for detection of SNP TSC0014012
atatttatttgty

SEQ ID NO: 49598 - DNA, 13 bp, Artificial Sequence
  Oligonucleotide for detection of SNP TSC0014012
racaaataaatat

SEQ ID NO: 49599 - DNA, 13 bp, Artificial Sequence
  Oligonucleotide for detection of SNP TSC0014013
aaatttatatgty

SEQ ID NO: 49600 - DNA, 13 bp, Artificial Sequence
  Oligonucleotide for detection of SNP TSC0014013
racatataaattt

SEQ ID NO: 49601 - DNA, 13 bp, Artificial Sequence
  Oligonucleotide for detection of SNP TSC0014013
aaatttttatgty

SEQ ID NO: 49602 - DNA, 13 bp, Artificial Sequence
  Oligonucleotide for detection of SNP TSC0014013
racataaaaattt

SEQ ID NO: 49603 - DNA, 13 bp, Artificial Sequence
  Oligonucleotide for detection of SNP TSC0014013
gatatgtgaattt

SEQ ID NO: 49604 - DNA, 13 bp, Artificial Sequence
  Oligonucleotide for detection of SNP TSC0014013
aaattcacatatc

SEQ ID NO: 49605 - DNA, 13 bp, Artificial Sequence
  Oligonucleotide for detection of SNP TSC0014013
gatatgagaattt

SEQ ID NO: 49606 - DNA, 13 bp, Artificial Sequence
  Oligonucleotide for detection of SNP TSC0014013
aaattctcatatc

SEQ ID NO: 49607 - DNA, 13 bp, Artificial Sequence
  Oligonucleotide for detection of SNP TSC0014014
taggatagagagg

SEQ ID NO: 49608 - DNA, 13 bp, Artificial Sequence
  Oligonucleotide for detection of SNP TSC0014014
cctctctatccta

SEQ ID NO: 49609 - DNA, 13 bp, Artificial Sequence
  Oligonucleotide for detection of SNP TSC0014014
taggatggagagg

SEQ ID NO: 49610 - DNA, 13 bp, Artificial Sequence
  Oligonucleotide for detection of SNP TSC0014014
cctctccatccta

SEQ ID NO: 49611 - DNA, 13 bp, Artificial Sequence
  Oligonucleotide for detection of SNP TSC0014014
taggacggagagg

SEQ ID NO: 49612 - DNA, 13 bp, Artificial Sequence
  Oligonucleotide for detection of SNP TSC0014014
cctctccgtccta

SEQ ID NO: 49613 - DNA, 13 bp, Artificial Sequence
  Oligonucleotide for detection of SNP TSC0014015
attttttgattta

SEQ ID NO: 49614 - DNA, 13 bp, Artificial Sequence
  Oligonucleotide for detection of SNP TSC0014015
taaatcaaaaaat

SEQ ID NO: 49615 - DNA, 13 bp, Artificial Sequence
  Oligonucleotide for detection of SNP TSC0014015
atttttcgattta

SEQ ID NO: 49616 - DNA, 13 bp, Artificial Sequence
  Oligonucleotide for detection of SNP TSC0014015
taaatcgaaaaat

SEQ ID NO: 49617 - DNA, 13 bp, Artificial Sequence
  Oligonucleotide for detection of SNP TSC0014015
tgagttgggaagt

SEQ ID NO: 49618 - DNA, 13 bp, Artificial Sequence
  Oligonucleotide for detection of SNP TSC0014015
acttcccaactca

SEQ ID NO: 49619 - DNA, 13 bp, Artificial Sequence
  Oligonucleotide for detection of SNP TSC0014015
tgagttaggaagt

SEQ ID NO: 49620 - DNA, 13 bp, Artificial Sequence
  Oligonucleotide for detection of SNP TSC0014015
acttcctaactca

SEQ ID NO: 49621 - DNA, 13 bp, Artificial Sequence
  Oligonucleotide for detection of SNP TSC0014015
tgagtcgggaagt

SEQ ID NO: 49622 - DNA, 13 bp, Artificial Sequence
  Oligonucleotide for detection of SNP TSC0014015
acttcccgactca

SEQ ID NO: 49623 - DNA, 13 bp, Artificial Sequence
  Oligonucleotide for detection of SNP TSC0014016
tattgtaagtggg

SEQ ID NO: 49624 - DNA, 13 bp, Artificial Sequence
  Oligonucleotide for detection of SNP TSC0014016
cccacttacaata

SEQ ID NO: 49625 - DNA, 13 bp, Artificial Sequence
  Oligonucleotide for detection of SNP TSC0014016
tattgtgagtggg

SEQ ID NO: 49626 - DNA, 13 bp, Artificial Sequence
  Oligonucleotide for detection of SNP TSC0014016
cccactcacaata

SEQ ID NO: 49627 - DNA, 13 bp, Artificial Sequence
  Oligonucleotide for detection of SNP TSC0014017
aaattatgtatay

SEQ ID NO: 49628 - DNA, 13 bp, Artificial Sequence
  Oligonucleotide for detection of SNP TSC0014017
rtatacataattt

SEQ ID NO: 49629 - DNA, 13 bp, Artificial Sequence
  Oligonucleotide for detection of SNP TSC0014017
aaattacgtatay

SEQ ID NO: 49630 - DNA, 13 bp, Artificial Sequence
  Oligonucleotide for detection of SNP TSC0014017
rtatacgtaattt

SEQ ID NO: 49631 - DNA, 13 bp, Artificial Sequence
  Oligonucleotide for detection of SNP TSC0014017
gtatatgtggttt

SEQ ID NO: 49632 - DNA, 13 bp, Artificial Sequence
  Oligonucleotide for detection of SNP TSC0014017
aaaccacatatac

SEQ ID NO: 49633 - DNA, 13 bp, Artificial Sequence
  Oligonucleotide for detection of SNP TSC0014017
gtatatatggttt

SEQ ID NO: 49634 - DNA, 13 bp, Artificial Sequence
  Oligonucleotide for detection of SNP TSC0014017
aaaccatatatac

SEQ ID NO: 49635 - DNA, 13 bp, Artificial Sequence
  Oligonucleotide for detection of SNP TSC0014017
gtatacgtggttt

SEQ ID NO: 49636 - DNA, 13 bp, Artificial Sequence
  Oligonucleotide for detection of SNP TSC0014017
aaaccacgtatac

SEQ ID NO: 49637 - DNA, 13 bp, Artificial Sequence
  Oligonucleotide for detection of SNP TSC0014018
aaaaaaaagaaag

SEQ ID NO: 49638 - DNA, 13 bp, Artificial Sequence
  Oligonucleotide for detection of SNP TSC0014018
ctttctttttttt

SEQ ID NO: 49639 - DNA, 13 bp, Artificial Sequence
  Oligonucleotide for detection of SNP TSC0014018
aaaaaagagaaag

SEQ ID NO: 49640 - DNA, 13 bp, Artificial Sequence
  Oligonucleotide for detection of SNP TSC0014018
ctttctctttttt

SEQ ID NO: 49641 - DNA, 13 bp, Artificial Sequence
  Oligonucleotide for detection of SNP TSC0014019
gtttttagtgtgg

SEQ ID NO: 49642 - DNA, 13 bp, Artificial Sequence
  Oligonucleotide for detection of SNP TSC0014019
ccacactaaaaac

SEQ ID NO: 49643 - DNA, 13 bp, Artificial Sequence
  Oligonucleotide for detection of SNP TSC0014019
gtttttggtgtgg

SEQ ID NO: 49644 - DNA, 13 bp, Artificial Sequence
  Oligonucleotide for detection of SNP TSC0014019
ccacaccaaaaac

SEQ ID NO: 49645 - DNA, 13 bp, Artificial Sequence
  Oligonucleotide for detection of SNP TSC0014019
gttttcggtgtgg

SEQ ID NO: 49646 - DNA, 13 bp, Artificial Sequence
  Oligonucleotide for detection of SNP TSC0014019
ccacaccgaaaac

SEQ ID NO: 49647 - DNA, 13 bp, Artificial Sequence
  Oligonucleotide for detection of SNP TSC0014019
ttatattggagay

SEQ ID NO: 49648 - DNA, 13 bp, Artificial Sequence
  Oligonucleotide for detection of SNP TSC0014019
rtctccaatataa

SEQ ID NO: 49649 - DNA, 13 bp, Artificial Sequence
  Oligonucleotide for detection of SNP TSC0014019
ttatatcggagay

SEQ ID NO: 49650 - DNA, 13 bp, Artificial Sequence
  Oligonucleotide for detection of SNP TSC0014019
rtctccgatataa

SEQ ID NO: 49651 - DNA, 13 bp, Artificial Sequence
  Oligonucleotide for detection of SNP TSC0014020
ttttttgttattg

SEQ ID NO: 49652 - DNA, 13 bp, Artificial Sequence
  Oligonucleotide for detection of SNP TSC0014020
caataacaaaaaa

SEQ ID NO: 49653 - DNA, 13 bp, Artificial Sequence
  Oligonucleotide for detection of SNP TSC0014020
ttttttattattg

SEQ ID NO: 49654 - DNA, 13 bp, Artificial Sequence
  Oligonucleotide for detection of SNP TSC0014020
caataataaaaaa

SEQ ID NO: 49655 - DNA, 13 bp, Artificial Sequence
  Oligonucleotide for detection of SNP TSC0014021
agtttttgttagy

SEQ ID NO: 49656 - DNA, 13 bp, Artificial Sequence
  Oligonucleotide for detection of SNP TSC0014021
rctaacaaaaact

SEQ ID NO: 49657 - DNA, 13 bp, Artificial Sequence
  Oligonucleotide for detection of SNP TSC0014021
agttttcgttagy

SEQ ID NO: 49658 - DNA, 13 bp, Artificial Sequence
  Oligonucleotide for detection of SNP TSC0014021
rctaacgaaaact

SEQ ID NO: 49659 - DNA, 13 bp, Artificial Sequence
  Oligonucleotide for detection of SNP TSC0014021
gttggtgggggtt

SEQ ID NO: 49660 - DNA, 13 bp, Artificial Sequence
  Oligonucleotide for detection of SNP TSC0014021
aacccccaccaac

SEQ ID NO: 49661 - DNA, 13 bp, Artificial Sequence
  Oligonucleotide for detection of SNP TSC0014021
gttggtaggggtt

SEQ ID NO: 49662 - DNA, 13 bp, Artificial Sequence
  Oligonucleotide for detection of SNP TSC0014021
aacccctaccaac

SEQ ID NO: 49663 - DNA, 13 bp, Artificial Sequence
  Oligonucleotide for detection of SNP TSC0014021
gttggcgggggtt

SEQ ID NO: 49664 - DNA, 13 bp, Artificial Sequence
  Oligonucleotide for detection of SNP TSC0014021
aacccccgccaac

SEQ ID NO: 49665 - DNA, 13 bp, Artificial Sequence
  Oligonucleotide for detection of SNP TSC0014024
tgtaattggttta

SEQ ID NO: 49666 - DNA, 13 bp, Artificial Sequence
  Oligonucleotide for detection of SNP TSC0014024
taaaccaattaca

SEQ ID NO: 49667 - DNA, 13 bp, Artificial Sequence
  Oligonucleotide for detection of SNP TSC0014024
tgtaatcggttta

SEQ ID NO: 49668 - DNA, 13 bp, Artificial Sequence
  Oligonucleotide for detection of SNP TSC0014024
taaaccgattaca

SEQ ID NO: 49669 - DNA, 13 bp, Artificial Sequence
  Oligonucleotide for detection of SNP TSC0014024
tgagttggttgta

SEQ ID NO: 49670 - DNA, 13 bp, Artificial Sequence
  Oligonucleotide for detection of SNP TSC0014024
tacaaccaactca

SEQ ID NO: 49671 - DNA, 13 bp, Artificial Sequence
  Oligonucleotide for detection of SNP TSC0014024
tgagttagttgta

SEQ ID NO: 49672 - DNA, 13 bp, Artificial Sequence
  Oligonucleotide for detection of SNP TSC0014024
tacaactaactca

SEQ ID NO: 49673 - DNA, 13 bp, Artificial Sequence
  Oligonucleotide for detection of SNP TSC0014024
tgagtcggttgta

SEQ ID NO: 49674 - DNA, 13 bp, Artificial Sequence
  Oligonucleotide for detection of SNP TSC0014024
tacaaccgactca

SEQ ID NO: 49675 - DNA, 13 bp, Artificial Sequence
  Oligonucleotide for detection of SNP TSC0014025
ggatatataggga

SEQ ID NO: 49676 - DNA, 13 bp, Artificial Sequence
  Oligonucleotide for detection of SNP TSC0014025
tccctatatatcc

SEQ ID NO: 49677 - DNA, 13 bp, Artificial Sequence
  Oligonucleotide for detection of SNP TSC0014025
ggatatttaggga

SEQ ID NO: 49678 - DNA, 13 bp, Artificial Sequence
  Oligonucleotide for detection of SNP TSC0014025
tccctaaatatcc

SEQ ID NO: 49679 - DNA, 13 bp, Artificial Sequence
  Oligonucleotide for detection of SNP TSC0014025
tttttgtgtgtty

SEQ ID NO: 49680 - DNA, 13 bp, Artificial Sequence
  Oligonucleotide for detection of SNP TSC0014025
raacacacaaaaa

SEQ ID NO: 49681 - DNA, 13 bp, Artificial Sequence
  Oligonucleotide for detection of SNP TSC0014025
tttttgagtgtty

SEQ ID NO: 49682 - DNA, 13 bp, Artificial Sequence
  Oligonucleotide for detection of SNP TSC0014025
raacactcaaaaa

SEQ ID NO: 49683 - DNA, 13 bp, Artificial Sequence
  Oligonucleotide for detection of SNP TSC0014026
gggatagtgattt

SEQ ID NO: 49684 - DNA, 13 bp, Artificial Sequence
  Oligonucleotide for detection of SNP TSC0014026
aaatcactatccc

SEQ ID NO: 49685 - DNA, 13 bp, Artificial Sequence
  Oligonucleotide for detection of SNP TSC0014026
gggataatgattt

SEQ ID NO: 49686 - DNA, 13 bp, Artificial Sequence
  Oligonucleotide for detection of SNP TSC0014026
aaatcattatccc

SEQ ID NO: 49687 - DNA, 13 bp, Artificial Sequence
  Oligonucleotide for detection of SNP TSC0014027
agtattaggttty

SEQ ID NO: 49688 - DNA, 13 bp, Artificial Sequence
  Oligonucleotide for detection of SNP TSC0014027
raaacctaatact

SEQ ID NO: 49689 - DNA, 13 bp, Artificial Sequence
  Oligonucleotide for detection of SNP TSC0014027
agtattgggttty

SEQ ID NO: 49690 - DNA, 13 bp, Artificial Sequence
  Oligonucleotide for detection of SNP TSC0014027
raaacccaatact

SEQ ID NO: 49691 - DNA, 13 bp, Artificial Sequence
  Oligonucleotide for detection of SNP TSC0014028
agataagttttgg

SEQ ID NO: 49692 - DNA, 13 bp, Artificial Sequence
  Oligonucleotide for detection of SNP TSC0014028
ccaaaacttatct

SEQ ID NO: 49693 - DNA, 13 bp, Artificial Sequence
  Oligonucleotide for detection of SNP TSC0014028
agataaattttgg

SEQ ID NO: 49694 - DNA, 13 bp, Artificial Sequence
  Oligonucleotide for detection of SNP TSC0014028
ccaaaatttatct

SEQ ID NO: 49695 - DNA, 13 bp, Artificial Sequence
  Oligonucleotide for detection of SNP TSC0014029
gattatggtaagy

SEQ ID NO: 49696 - DNA, 13 bp, Artificial Sequence
  Oligonucleotide for detection of SNP TSC0014029
rcttaccataatc

SEQ ID NO: 49697 - DNA, 13 bp, Artificial Sequence
  Oligonucleotide for detection of SNP TSC0014029
gattattgtaagy

SEQ ID NO: 49698 - DNA, 13 bp, Artificial Sequence
  Oligonucleotide for detection of SNP TSC0014029
rcttacaataatc

SEQ ID NO: 49699 - DNA, 13 bp, Artificial Sequence
  Oligonucleotide for detection of SNP TSC0014029
gattacggtaagy

SEQ ID NO: 49700 - DNA, 13 bp, Artificial Sequence
  Oligonucleotide for detection of SNP TSC0014029
rcttaccgtaatc

SEQ ID NO: 49701 - DNA, 13 bp, Artificial Sequence
  Oligonucleotide for detection of SNP TSC0014029
gtttgttgtgaty

SEQ ID NO: 49702 - DNA, 13 bp, Artificial Sequence
  Oligonucleotide for detection of SNP TSC0014029
ratcacaacaaac

SEQ ID NO: 49703 - DNA, 13 bp, Artificial Sequence
  Oligonucleotide for detection of SNP TSC0014029
gtttgtagtgaty

SEQ ID NO: 49704 - DNA, 13 bp, Artificial Sequence
  Oligonucleotide for detection of SNP TSC0014029
ratcactacaaac

SEQ ID NO: 49705 - DNA, 13 bp, Artificial Sequence
  Oligonucleotide for detection of SNP TSC0014029
gtttgtcgtgaty

SEQ ID NO: 49706 - DNA, 13 bp, Artificial Sequence
  Oligonucleotide for detection of SNP TSC0014029
ratcacgacaaac

SEQ ID NO: 49707 - DNA, 13 bp, Artificial Sequence
  Oligonucleotide for detection of SNP TSC0014030
tgttatggtttty

SEQ ID NO: 49708 - DNA, 13 bp, Artificial Sequence
  Oligonucleotide for detection of SNP TSC0014030
raaaaccataaca

SEQ ID NO: 49709 - DNA, 13 bp, Artificial Sequence
  Oligonucleotide for detection of SNP TSC0014030
tgttattgtttty

SEQ ID NO: 49710 - DNA, 13 bp, Artificial Sequence
  Oligonucleotide for detection of SNP TSC0014030
raaaacaataaca

SEQ ID NO: 49711 - DNA, 13 bp, Artificial Sequence
  Oligonucleotide for detection of SNP TSC0014030
gagagttatggta

SEQ ID NO: 49712 - DNA, 13 bp, Artificial Sequence
  Oligonucleotide for detection of SNP TSC0014030
taccataactctc

SEQ ID NO: 49713 - DNA, 13 bp, Artificial Sequence
  Oligonucleotide for detection of SNP TSC0014030
gagagtaatggta

SEQ ID NO: 49714 - DNA, 13 bp, Artificial Sequence
  Oligonucleotide for detection of SNP TSC0014030
taccattactctc

SEQ ID NO: 49715 - DNA, 13 bp, Artificial Sequence
  Oligonucleotide for detection of SNP TSC0014031
gtttttaatattg

SEQ ID NO: 49716 - DNA, 13 bp, Artificial Sequence
  Oligonucleotide for detection of SNP TSC0014031
caatattaaaaac

SEQ ID NO: 49717 - DNA, 13 bp, Artificial Sequence
  Oligonucleotide for detection of SNP TSC0014031
gtttttgatattg

SEQ ID NO: 49718 - DNA, 13 bp, Artificial Sequence
  Oligonucleotide for detection of SNP TSC0014031
caatatcaaaaac

SEQ ID NO: 49719 - DNA, 13 bp, Artificial Sequence
  Oligonucleotide for detection of SNP TSC0014031
gttttcgatattg

SEQ ID NO: 49720 - DNA, 13 bp, Artificial Sequence
  Oligonucleotide for detection of SNP TSC0014031
caatatcgaaaac

SEQ ID NO: 49721 - DNA, 13 bp, Artificial Sequence
  Oligonucleotide for detection of SNP TSC0014031
tagtgttgagagy

SEQ ID NO: 49722 - DNA, 13 bp, Artificial Sequence
  Oligonucleotide for detection of SNP TSC0014031
rctctcaacacta

SEQ ID NO: 49723 - DNA, 13 bp, Artificial Sequence
  Oligonucleotide for detection of SNP TSC0014031
tagtgtcgagagy

SEQ ID NO: 49724 - DNA, 13 bp, Artificial Sequence
  Oligonucleotide for detection of SNP TSC0014031
rctctcgacacta

SEQ ID NO: 49725 - DNA, 13 bp, Artificial Sequence
  Oligonucleotide for detection of SNP TSC0014032
ttaaagagattag

SEQ ID NO: 49726 - DNA, 13 bp, Artificial Sequence
  Oligonucleotide for detection of SNP TSC0014032
ctaatctctttaa

SEQ ID NO: 49727 - DNA, 13 bp, Artificial Sequence
  Oligonucleotide for detection of SNP TSC0014032
ttaaagggattag

SEQ ID NO: 49728 - DNA, 13 bp, Artificial Sequence
  Oligonucleotide for detection of SNP TSC0014032
ctaatccctttaa

SEQ ID NO: 49729 - DNA, 13 bp, Artificial Sequence
  Oligonucleotide for detection of SNP TSC0014035
tataggatataga

SEQ ID NO: 49730 - DNA, 13 bp, Artificial Sequence
  Oligonucleotide for detection of SNP TSC0014035
tctatatcctata

SEQ ID NO: 49731 - DNA, 13 bp, Artificial Sequence
  Oligonucleotide for detection of SNP TSC0014035
tataggttataga

SEQ ID NO: 49732 - DNA, 13 bp, Artificial Sequence
  Oligonucleotide for detection of SNP TSC0014035
tctataacctata

SEQ ID NO: 49733 - DNA, 13 bp, Artificial Sequence
  Oligonucleotide for detection of SNP TSC0014035
tttatgttttgtg

SEQ ID NO: 49734 - DNA, 13 bp, Artificial Sequence
  Oligonucleotide for detection of SNP TSC0014035
cacaaaacataaa

SEQ ID NO: 49735 - DNA, 13 bp, Artificial Sequence
  Oligonucleotide for detection of SNP TSC0014035
tttatgatttgtg

SEQ ID NO: 49736 - DNA, 13 bp, Artificial Sequence
  Oligonucleotide for detection of SNP TSC0014035
cacaaatcataaa

SEQ ID NO: 49737 - DNA, 13 bp, Artificial Sequence
  Oligonucleotide for detection of SNP TSC0014036
ttatttaaaggaa

SEQ ID NO: 49738 - DNA, 13 bp, Artificial Sequence
  Oligonucleotide for detection of SNP TSC0014036
ttcctttaaataa

SEQ ID NO: 49739 - DNA, 13 bp, Artificial Sequence
  Oligonucleotide for detection of SNP TSC0014036
ttatttgaaggaa

SEQ ID NO: 49740 - DNA, 13 bp, Artificial Sequence
  Oligonucleotide for detection of SNP TSC0014036
ttccttcaaataa

SEQ ID NO: 49741 - DNA, 13 bp, Artificial Sequence
  Oligonucleotide for detection of SNP TSC0014037
tgttttattttag

SEQ ID NO: 49742 - DNA, 13 bp, Artificial Sequence
  Oligonucleotide for detection of SNP TSC0014037
ctaaaataaaaca

SEQ ID NO: 49743 - DNA, 13 bp, Artificial Sequence
  Oligonucleotide for detection of SNP TSC0014037
tgttttgttttag

SEQ ID NO: 49744 - DNA, 13 bp, Artificial Sequence
  Oligonucleotide for detection of SNP TSC0014037
ctaaaacaaaaca

SEQ ID NO: 49745 - DNA, 13 bp, Artificial Sequence
  Oligonucleotide for detection of SNP TSC0014037
tgtttcgttttag

SEQ ID NO: 49746 - DNA, 13 bp, Artificial Sequence
  Oligonucleotide for detection of SNP TSC0014037
ctaaaacgaaaca

SEQ ID NO: 49747 - DNA, 13 bp, Artificial Sequence
  Oligonucleotide for detection of SNP TSC0014037
ttaagatgggata

SEQ ID NO: 49748 - DNA, 13 bp, Artificial Sequence
  Oligonucleotide for detection of SNP TSC0014037
tatcccatcttaa

SEQ ID NO: 49749 - DNA, 13 bp, Artificial Sequence
  Oligonucleotide for detection of SNP TSC0014037
ttaagacgggata

SEQ ID NO: 49750 - DNA, 13 bp, Artificial Sequence
  Oligonucleotide for detection of SNP TSC0014037
tatcccgtcttaa

SEQ ID NO: 49751 - DNA, 13 bp, Artificial Sequence
  Oligonucleotide for detection of SNP TSC0014038
tattttgttggty

SEQ ID NO: 49752 - DNA, 13 bp, Artificial Sequence
  Oligonucleotide for detection of SNP TSC0014038
raccaacaaaata

SEQ ID NO: 49753 - DNA, 13 bp, Artificial Sequence
  Oligonucleotide for detection of SNP TSC0014038
tattttattggty

SEQ ID NO: 49754 - DNA, 13 bp, Artificial Sequence
  Oligonucleotide for detection of SNP TSC0014038
raccaataaaata

SEQ ID NO: 49755 - DNA, 13 bp, Artificial Sequence
  Oligonucleotide for detection of SNP TSC0014040
tttagtattggtg

SEQ ID NO: 49756 - DNA, 13 bp, Artificial Sequence
  Oligonucleotide for detection of SNP TSC0014040
caccaatactaaa

SEQ ID NO: 49757 - DNA, 13 bp, Artificial Sequence
  Oligonucleotide for detection of SNP TSC0014040
tttagtgttggtg

SEQ ID NO: 49758 - DNA, 13 bp, Artificial Sequence
  Oligonucleotide for detection of SNP TSC0014040
caccaacactaaa

SEQ ID NO: 49759 - DNA, 13 bp, Artificial Sequence
  Oligonucleotide for detection of SNP TSC0014041
aggtgttgtgggy

SEQ ID NO: 49760 - DNA, 13 bp, Artificial Sequence
  Oligonucleotide for detection of SNP TSC0014041
rcccacaacacct

SEQ ID NO: 49761 - DNA, 13 bp, Artificial Sequence
  Oligonucleotide for detection of SNP TSC0014041
aggtgtcgtgggy

SEQ ID NO: 49762 - DNA, 13 bp, Artificial Sequence
  Oligonucleotide for detection of SNP TSC0014041
rcccacgacacct

SEQ ID NO: 49763 - DNA, 13 bp, Artificial Sequence
  Oligonucleotide for detection of SNP TSC0014041
gtttatggtattt

SEQ ID NO: 49764 - DNA, 13 bp, Artificial Sequence
  Oligonucleotide for detection of SNP TSC0014041
aaataccataaac

SEQ ID NO: 49765 - DNA, 13 bp, Artificial Sequence
  Oligonucleotide for detection of SNP TSC0014041
gtttatagtattt

SEQ ID NO: 49766 - DNA, 13 bp, Artificial Sequence
  Oligonucleotide for detection of SNP TSC0014041
aaatactataaac

SEQ ID NO: 49767 - DNA, 13 bp, Artificial Sequence
  Oligonucleotide for detection of SNP TSC0014041
gtttacggtattt

SEQ ID NO: 49768 - DNA, 13 bp, Artificial Sequence
  Oligonucleotide for detection of SNP TSC0014041
aaataccgtaaac

SEQ ID NO: 49769 - DNA, 13 bp, Artificial Sequence
  Oligonucleotide for detection of SNP TSC0014042
tataatattatgt

SEQ ID NO: 49770 - DNA, 13 bp, Artificial Sequence
  Oligonucleotide for detection of SNP TSC0014042
acataatattata

SEQ ID NO: 49771 - DNA, 13 bp, Artificial Sequence
  Oligonucleotide for detection of SNP TSC0014042
tataatgttatgt

SEQ ID NO: 49772 - DNA, 13 bp, Artificial Sequence
  Oligonucleotide for detection of SNP TSC0014042
acataacattata

SEQ ID NO: 49773 - DNA, 13 bp, Artificial Sequence
  Oligonucleotide for detection of SNP TSC0014042
tataacgttatgt

SEQ ID NO: 49774 - DNA, 13 bp, Artificial Sequence
  Oligonucleotide for detection of SNP TSC0014042
acataacgttata

SEQ ID NO: 49775 - DNA, 13 bp, Artificial Sequence
  Oligonucleotide for detection of SNP TSC0014042
atatagtgttatg

SEQ ID NO: 49776 - DNA, 13 bp, Artificial Sequence
  Oligonucleotide for detection of SNP TSC0014042
cataacactatat

SEQ ID NO: 49777 - DNA, 13 bp, Artificial Sequence
  Oligonucleotide for detection of SNP TSC0014042
atatagcgttatg

SEQ ID NO: 49778 - DNA, 13 bp, Artificial Sequence
  Oligonucleotide for detection of SNP TSC0014042
cataacgctatat

SEQ ID NO: 49779 - DNA, 13 bp, Artificial Sequence
  Oligonucleotide for detection of SNP TSC0014043
aaagagggagaat

SEQ ID NO: 49780 - DNA, 13 bp, Artificial Sequence
  Oligonucleotide for detection of SNP TSC0014043
attctccctcttt

SEQ ID NO: 49781 - DNA, 13 bp, Artificial Sequence
  Oligonucleotide for detection of SNP TSC0014043
aaagagtgagaat

SEQ ID NO: 49782 - DNA, 13 bp, Artificial Sequence
  Oligonucleotide for detection of SNP TSC0014043
attctcactcttt

SEQ ID NO: 49783 - DNA, 13 bp, Artificial Sequence
  Oligonucleotide for detection of SNP TSC0014049
ttttgtagttttg

SEQ ID NO: 49784 - DNA, 13 bp, Artificial Sequence
  Oligonucleotide for detection of SNP TSC0014049
caaaactacaaaa

SEQ ID NO: 49785 - DNA, 13 bp, Artificial Sequence
  Oligonucleotide for detection of SNP TSC0014049
ttttgttgttttg

SEQ ID NO: 49786 - DNA, 13 bp, Artificial Sequence
  Oligonucleotide for detection of SNP TSC0014049
caaaacaacaaaa

SEQ ID NO: 49787 - DNA, 13 bp, Artificial Sequence
  Oligonucleotide for detection of SNP TSC0014049
tagagttgtaaag

SEQ ID NO: 49788 - DNA, 13 bp, Artificial Sequence
  Oligonucleotide for detection of SNP TSC0014049
ctttacaactcta

SEQ ID NO: 49789 - DNA, 13 bp, Artificial Sequence
  Oligonucleotide for detection of SNP TSC0014049
tagagtagtaaag

SEQ ID NO: 49790 - DNA, 13 bp, Artificial Sequence
  Oligonucleotide for detection of SNP TSC0014049
ctttactactcta

SEQ ID NO: 49791 - DNA, 13 bp, Artificial Sequence
  Oligonucleotide for detection of SNP TSC0014050
aaagataattata

SEQ ID NO: 49792 - DNA, 13 bp, Artificial Sequence
  Oligonucleotide for detection of SNP TSC0014050
tataattatcttt

SEQ ID NO: 49793 - DNA, 13 bp, Artificial Sequence
  Oligonucleotide for detection of SNP TSC0014050
aaagattattata

SEQ ID NO: 49794 - DNA, 13 bp, Artificial Sequence
  Oligonucleotide for detection of SNP TSC0014050
tataataatcttt

SEQ ID NO: 49795 - DNA, 13 bp, Artificial Sequence
  Oligonucleotide for detection of SNP TSC0014050
tgtaattgttttt

SEQ ID NO: 49796 - DNA, 13 bp, Artificial Sequence
  Oligonucleotide for detection of SNP TSC0014050
aaaaacaattaca

SEQ ID NO: 49797 - DNA, 13 bp, Artificial Sequence
  Oligonucleotide for detection of SNP TSC0014050
tgtaatagttttt

SEQ ID NO: 49798 - DNA, 13 bp, Artificial Sequence
  Oligonucleotide for detection of SNP TSC0014050
aaaaactattaca

SEQ ID NO: 49799 - DNA, 13 bp, Artificial Sequence
  Oligonucleotide for detection of SNP TSC0014051
gaggaggtagtta

SEQ ID NO: 49800 - DNA, 13 bp, Artificial Sequence
  Oligonucleotide for detection of SNP TSC0014051
taactacctcctc

SEQ ID NO: 49801 - DNA, 13 bp, Artificial Sequence
  Oligonucleotide for detection of SNP TSC0014051
gaggagatagtta

SEQ ID NO: 49802 - DNA, 13 bp, Artificial Sequence
  Oligonucleotide for detection of SNP TSC0014051
taactatctcctc

SEQ ID NO: 49803 - DNA, 13 bp, Artificial Sequence
  Oligonucleotide for detection of SNP TSC0014052
ggttggggtatty

SEQ ID NO: 49804 - DNA, 13 bp, Artificial Sequence
  Oligonucleotide for detection of SNP TSC0014052
raataccccaacc

SEQ ID NO: 49805 - DNA, 13 bp, Artificial Sequence
  Oligonucleotide for detection of SNP TSC0014052
ggttggagtatty

SEQ ID NO: 49806 - DNA, 13 bp, Artificial Sequence
  Oligonucleotide for detection of SNP TSC0014052
raatactccaacc

SEQ ID NO: 49807 - DNA, 13 bp, Artificial Sequence
  Oligonucleotide for detection of SNP TSC0014053
gtatatacgtgta

SEQ ID NO: 49808 - DNA, 13 bp, Artificial Sequence
  Oligonucleotide for detection of SNP TSC0014053
tacacgtatatac

SEQ ID NO: 49809 - DNA, 13 bp, Artificial Sequence
  Oligonucleotide for detection of SNP TSC0014053
gtatacgtgtgta

SEQ ID NO: 49810 - DNA, 13 bp, Artificial Sequence
  Oligonucleotide for detection of SNP TSC0014053
tacacacgtatac

SEQ ID NO: 49811 - DNA, 13 bp, Artificial Sequence
  Oligonucleotide for detection of SNP TSC0014053
gtatatgcgtgta

SEQ ID NO: 49812 - DNA, 13 bp, Artificial Sequence
  Oligonucleotide for detection of SNP TSC0014053
tacacgcatatac

SEQ ID NO: 49813 - DNA, 13 bp, Artificial Sequence
  Oligonucleotide for detection of SNP TSC0014053
gtatacgcgtgta

SEQ ID NO: 49814 - DNA, 13 bp, Artificial Sequence
  Oligonucleotide for detection of SNP TSC0014053
tacacgcgtatac

SEQ ID NO: 49815 - DNA, 13 bp, Artificial Sequence
  Oligonucleotide for detection of SNP TSC0014053
tgtatgtgtatgy

SEQ ID NO: 49816 - DNA, 13 bp, Artificial Sequence
  Oligonucleotide for detection of SNP TSC0014053
rcatacacataca

SEQ ID NO: 49817 - DNA, 13 bp, Artificial Sequence
  Oligonucleotide for detection of SNP TSC0014053
tgtacgtgtatgy

SEQ ID NO: 49818 - DNA, 13 bp, Artificial Sequence
  Oligonucleotide for detection of SNP TSC0014053
rcatacacgtaca

SEQ ID NO: 49819 - DNA, 13 bp, Artificial Sequence
  Oligonucleotide for detection of SNP TSC0014053
tgtatgcgtatgy

SEQ ID NO: 49820 - DNA, 13 bp, Artificial Sequence
  Oligonucleotide for detection of SNP TSC0014053
rcatacgcataca

SEQ ID NO: 49821 - DNA, 13 bp, Artificial Sequence
  Oligonucleotide for detection of SNP TSC0014053
tgtacgcgtatgy

SEQ ID NO: 49822 - DNA, 13 bp, Artificial Sequence
  Oligonucleotide for detection of SNP TSC0014053
rcatacgcgtaca

SEQ ID NO: 49823 - DNA, 13 bp, Artificial Sequence
  Oligonucleotide for detection of SNP TSC0014055
atattttttgtgt

SEQ ID NO: 49824 - DNA, 13 bp, Artificial Sequence
  Oligonucleotide for detection of SNP TSC0014055
acacaaaaaatat

SEQ ID NO: 49825 - DNA, 13 bp, Artificial Sequence
  Oligonucleotide for detection of SNP TSC0014055
atatttgttgtgt

SEQ ID NO: 49826 - DNA, 13 bp, Artificial Sequence
  Oligonucleotide for detection of SNP TSC0014055
acacaacaaatat

SEQ ID NO: 49827 - DNA, 13 bp, Artificial Sequence
  Oligonucleotide for detection of SNP TSC0014055
atataggagatgt

SEQ ID NO: 49828 - DNA, 13 bp, Artificial Sequence
  Oligonucleotide for detection of SNP TSC0014055
acatctcctatat

SEQ ID NO: 49829 - DNA, 13 bp, Artificial Sequence
  Oligonucleotide for detection of SNP TSC0014055
atatagtagatgt

SEQ ID NO: 49830 - DNA, 13 bp, Artificial Sequence
  Oligonucleotide for detection of SNP TSC0014055
acatctactatat

SEQ ID NO: 49831 - DNA, 13 bp, Artificial Sequence
  Oligonucleotide for detection of SNP TSC0014057
agaaagatatgtt

SEQ ID NO: 49832 - DNA, 13 bp, Artificial Sequence
  Oligonucleotide for detection of SNP TSC0014057
aacatatctttct

SEQ ID NO: 49833 - DNA, 13 bp, Artificial Sequence
  Oligonucleotide for detection of SNP TSC0014057
agaaaggtatgtt

SEQ ID NO: 49834 - DNA, 13 bp, Artificial Sequence
  Oligonucleotide for detection of SNP TSC0014057
aacatacctttct

SEQ ID NO: 49835 - DNA, 13 bp, Artificial Sequence
  Oligonucleotide for detection of SNP TSC0014059
tatatgtgtagtt

SEQ ID NO: 49836 - DNA, 13 bp, Artificial Sequence
  Oligonucleotide for detection of SNP TSC0014059
aactacacatata

SEQ ID NO: 49837 - DNA, 13 bp, Artificial Sequence
  Oligonucleotide for detection of SNP TSC0014059
tatatgcgtagtt

SEQ ID NO: 49838 - DNA, 13 bp, Artificial Sequence
  Oligonucleotide for detection of SNP TSC0014059
aactacgcatata

SEQ ID NO: 49839 - DNA, 13 bp, Artificial Sequence
  Oligonucleotide for detection of SNP TSC0014059
aattgtgtatgtg

SEQ ID NO: 49840 - DNA, 13 bp, Artificial Sequence
  Oligonucleotide for detection of SNP TSC0014059
cacatacacaatt

SEQ ID NO: 49841 - DNA, 13 bp, Artificial Sequence
  Oligonucleotide for detection of SNP TSC0014059
aattgtatatgtg

SEQ ID NO: 49842 - DNA, 13 bp, Artificial Sequence
  Oligonucleotide for detection of SNP TSC0014059
cacatatacaatt

SEQ ID NO: 49843 - DNA, 13 bp, Artificial Sequence
  Oligonucleotide for detection of SNP TSC0014059
aattgcgtatgtg

SEQ ID NO: 49844 - DNA, 13 bp, Artificial Sequence
  Oligonucleotide for detection of SNP TSC0014059
cacatacgcaatt

SEQ ID NO: 49845 - DNA, 13 bp, Artificial Sequence
  Oligonucleotide for detection of SNP TSC0014060
gttgtaaaaaaaa

SEQ ID NO: 49846 - DNA, 13 bp, Artificial Sequence
  Oligonucleotide for detection of SNP TSC0014060
ttttttttacaac

SEQ ID NO: 49847 - DNA, 13 bp, Artificial Sequence
  Oligonucleotide for detection of SNP TSC0014060
gttgtataaaaaa

SEQ ID NO: 49848 - DNA, 13 bp, Artificial Sequence
  Oligonucleotide for detection of SNP TSC0014060
ttttttatacaac

SEQ ID NO: 49849 - DNA, 13 bp, Artificial Sequence
  Oligonucleotide for detection of SNP TSC0014060
ttttttttatagy

SEQ ID NO: 49850 - DNA, 13 bp, Artificial Sequence
  Oligonucleotide for detection of SNP TSC0014060
rctataaaaaaaa

SEQ ID NO: 49851 - DNA, 13 bp, Artificial Sequence
  Oligonucleotide for detection of SNP TSC0014061
taaaaaaaattty

SEQ ID NO: 49852 - DNA, 13 bp, Artificial Sequence
  Oligonucleotide for detection of SNP TSC0014061
raaatttttttta

SEQ ID NO: 49853 - DNA, 13 bp, Artificial Sequence
  Oligonucleotide for detection of SNP TSC0014061
taaaaagaattty

SEQ ID NO: 49854 - DNA, 13 bp, Artificial Sequence
  Oligonucleotide for detection of SNP TSC0014061
raaattcttttta

SEQ ID NO: 49855 - DNA, 13 bp, Artificial Sequence
  Oligonucleotide for detection of SNP TSC0014062
tttattaggagga

SEQ ID NO: 49856 - DNA, 13 bp, Artificial Sequence
  Oligonucleotide for detection of SNP TSC0014062
tcctcctaataaa

SEQ ID NO: 49857 - DNA, 13 bp, Artificial Sequence
  Oligonucleotide for detection of SNP TSC0014062
tttattgggagga

SEQ ID NO: 49858 - DNA, 13 bp, Artificial Sequence
  Oligonucleotide for detection of SNP TSC0014062
tcctcccaataaa

SEQ ID NO: 49859 - DNA, 13 bp, Artificial Sequence
  Oligonucleotide for detection of SNP TSC0014062
tttatcgggagga

SEQ ID NO: 49860 - DNA, 13 bp, Artificial Sequence
  Oligonucleotide for detection of SNP TSC0014062
tcctcccgataaa

SEQ ID NO: 49861 - DNA, 13 bp, Artificial Sequence
  Oligonucleotide for detection of SNP TSC0014062
tttttttgatggg

SEQ ID NO: 49862 - DNA, 13 bp, Artificial Sequence
  Oligonucleotide for detection of SNP TSC0014062
cccatcaaaaaaa

SEQ ID NO: 49863 - DNA, 13 bp, Artificial Sequence
  Oligonucleotide for detection of SNP TSC0014062
ttttttcgatggg

SEQ ID NO: 49864 - DNA, 13 bp, Artificial Sequence
  Oligonucleotide for detection of SNP TSC0014062
cccatcgaaaaaa

SEQ ID NO: 49865 - DNA, 13 bp, Artificial Sequence
  Oligonucleotide for detection of SNP TSC0014063
tagggagtgagtg

SEQ ID NO: 49866 - DNA, 13 bp, Artificial Sequence
  Oligonucleotide for detection of SNP TSC0014063
cactcactcccta

SEQ ID NO: 49867 - DNA, 13 bp, Artificial Sequence
  Oligonucleotide for detection of SNP TSC0014063
tagggaatgagtg

SEQ ID NO: 49868 - DNA, 13 bp, Artificial Sequence
  Oligonucleotide for detection of SNP TSC0014063
cactcattcccta

SEQ ID NO: 49869 - DNA, 13 bp, Artificial Sequence
  Oligonucleotide for detection of SNP TSC0014064
ttaggggtatagg

SEQ ID NO: 49870 - DNA, 13 bp, Artificial Sequence
  Oligonucleotide for detection of SNP TSC0014064
cctatacccctaa

SEQ ID NO: 49871 - DNA, 13 bp, Artificial Sequence
  Oligonucleotide for detection of SNP TSC0014064
ttagggttatagg

SEQ ID NO: 49872 - DNA, 13 bp, Artificial Sequence
  Oligonucleotide for detection of SNP TSC0014064
cctataaccctaa

SEQ ID NO: 49873 - DNA, 13 bp, Artificial Sequence
  Oligonucleotide for detection of SNP TSC0014064
tttgtatttttga

SEQ ID NO: 49874 - DNA, 13 bp, Artificial Sequence
  Oligonucleotide for detection of SNP TSC0014064
tcaaaaatacaaa

SEQ ID NO: 49875 - DNA, 13 bp, Artificial Sequence
  Oligonucleotide for detection of SNP TSC0014064
tttgtaattttga

SEQ ID NO: 49876 - DNA, 13 bp, Artificial Sequence
  Oligonucleotide for detection of SNP TSC0014064
tcaaaattacaaa

SEQ ID NO: 49877 - DNA, 13 bp, Artificial Sequence
  Oligonucleotide for detection of SNP TSC0014065
tagaagtgagaty

SEQ ID NO: 49878 - DNA, 13 bp, Artificial Sequence
  Oligonucleotide for detection of SNP TSC0014065
ratctcacttcta

SEQ ID NO: 49879 - DNA, 13 bp, Artificial Sequence
  Oligonucleotide for detection of SNP TSC0014065
tagaagcgagaty

SEQ ID NO: 49880 - DNA, 13 bp, Artificial Sequence
  Oligonucleotide for detection of SNP TSC0014065
ratctcgcttcta

SEQ ID NO: 49881 - DNA, 13 bp, Artificial Sequence
  Oligonucleotide for detection of SNP TSC0014068
taatgtattatat

SEQ ID NO: 49882 - DNA, 13 bp, Artificial Sequence
  Oligonucleotide for detection of SNP TSC0014068
atataatacatta

SEQ ID NO: 49883 - DNA, 13 bp, Artificial Sequence
  Oligonucleotide for detection of SNP TSC0014068
taatgtgttatat

SEQ ID NO: 49884 - DNA, 13 bp, Artificial Sequence
  Oligonucleotide for detection of SNP TSC0014068
atataacacatta

SEQ ID NO: 49885 - DNA, 13 bp, Artificial Sequence
  Oligonucleotide for detection of SNP TSC0014069
tataagattatag

SEQ ID NO: 49886 - DNA, 13 bp, Artificial Sequence
  Oligonucleotide for detection of SNP TSC0014069
ctataatcttata

SEQ ID NO: 49887 - DNA, 13 bp, Artificial Sequence
  Oligonucleotide for detection of SNP TSC0014069
tataaggttatag

SEQ ID NO: 49888 - DNA, 13 bp, Artificial Sequence
  Oligonucleotide for detection of SNP TSC0014069
ctataaccttata

SEQ ID NO: 49889 - DNA, 13 bp, Artificial Sequence
  Oligonucleotide for detection of SNP TSC0014070
aatgaggtgtaga

SEQ ID NO: 49890 - DNA, 13 bp, Artificial Sequence
  Oligonucleotide for detection of SNP TSC0014070
tctacacctcatt

SEQ ID NO: 49891 - DNA, 13 bp, Artificial Sequence
  Oligonucleotide for detection of SNP TSC0014070
aatgagttgtaga

SEQ ID NO: 49892 - DNA, 13 bp, Artificial Sequence
  Oligonucleotide for detection of SNP TSC0014070
tctacaactcatt

SEQ ID NO: 49893 - DNA, 13 bp, Artificial Sequence
  Oligonucleotide for detection of SNP TSC0014070
tttgtattttatt

SEQ ID NO: 49894 - DNA, 13 bp, Artificial Sequence
  Oligonucleotide for detection of SNP TSC0014070
aataaaatacaaa

SEQ ID NO: 49895 - DNA, 13 bp, Artificial Sequence
  Oligonucleotide for detection of SNP TSC0014070
tttgtaatttatt

SEQ ID NO: 49896 - DNA, 13 bp, Artificial Sequence
  Oligonucleotide for detection of SNP TSC0014070
aataaattacaaa

SEQ ID NO: 49897 - DNA, 13 bp, Artificial Sequence
  Oligonucleotide for detection of SNP TSC0014071
ttttttgagtata

SEQ ID NO: 49898 - DNA, 13 bp, Artificial Sequence
  Oligonucleotide for detection of SNP TSC0014071
tatactcaaaaaa

SEQ ID NO: 49899 - DNA, 13 bp, Artificial Sequence
  Oligonucleotide for detection of SNP TSC0014071
ttttttaagtata

SEQ ID NO: 49900 - DNA, 13 bp, Artificial Sequence
  Oligonucleotide for detection of SNP TSC0014071
tatacttaaaaaa

SEQ ID NO: 49901 - DNA, 13 bp, Artificial Sequence
  Oligonucleotide for detection of SNP TSC0014073
ataaattgataty

SEQ ID NO: 49902 - DNA, 13 bp, Artificial Sequence
  Oligonucleotide for detection of SNP TSC0014073
ratatcaatttat

SEQ ID NO: 49903 - DNA, 13 bp, Artificial Sequence
  Oligonucleotide for detection of SNP TSC0014073
ataaatcgataty

SEQ ID NO: 49904 - DNA, 13 bp, Artificial Sequence
  Oligonucleotide for detection of SNP TSC0014073
ratatcgatttat

SEQ ID NO: 49905 - DNA, 13 bp, Artificial Sequence
  Oligonucleotide for detection of SNP TSC0014073
gatgttggtttat

SEQ ID NO: 49906 - DNA, 13 bp, Artificial Sequence
  Oligonucleotide for detection of SNP TSC0014073
ataaaccaacatc

SEQ ID NO: 49907 - DNA, 13 bp, Artificial Sequence
  Oligonucleotide for detection of SNP TSC0014073
gatgttagtttat

SEQ ID NO: 49908 - DNA, 13 bp, Artificial Sequence
  Oligonucleotide for detection of SNP TSC0014073
ataaactaacatc

SEQ ID NO: 49909 - DNA, 13 bp, Artificial Sequence
  Oligonucleotide for detection of SNP TSC0014073
gatgtcggtttat

SEQ ID NO: 49910 - DNA, 13 bp, Artificial Sequence
  Oligonucleotide for detection of SNP TSC0014073
ataaaccgacatc

SEQ ID NO: 49911 - DNA, 13 bp, Artificial Sequence
  Oligonucleotide for detection of SNP TSC0014076
tatttgggttagt

SEQ ID NO: 49912 - DNA, 13 bp, Artificial Sequence
  Oligonucleotide for detection of SNP TSC0014076
actaacccaaata

SEQ ID NO: 49913 - DNA, 13 bp, Artificial Sequence
  Oligonucleotide for detection of SNP TSC0014076
tatttgtgttagt

SEQ ID NO: 49914 - DNA, 13 bp, Artificial Sequence
  Oligonucleotide for detection of SNP TSC0014076
actaacacaaata

SEQ ID NO: 49915 - DNA, 13 bp, Artificial Sequence
  Oligonucleotide for detection of SNP TSC0014076
attaatttaagta

SEQ ID NO: 49916 - DNA, 13 bp, Artificial Sequence
  Oligonucleotide for detection of SNP TSC0014076
tacttaaattaat

SEQ ID NO: 49917 - DNA, 13 bp, Artificial Sequence
  Oligonucleotide for detection of SNP TSC0014076
attaatataagta

SEQ ID NO: 49918 - DNA, 13 bp, Artificial Sequence
  Oligonucleotide for detection of SNP TSC0014076
tacttatattaat

SEQ ID NO: 49919 - DNA, 13 bp, Artificial Sequence
  Oligonucleotide for detection of SNP TSC0014077
ttgttattggatg

SEQ ID NO: 49920 - DNA, 13 bp, Artificial Sequence
  Oligonucleotide for detection of SNP TSC0014077
catccaataacaa

SEQ ID NO: 49921 - DNA, 13 bp, Artificial Sequence
  Oligonucleotide for detection of SNP TSC0014077
ttgttagtggatg

SEQ ID NO: 49922 - DNA, 13 bp, Artificial Sequence
  Oligonucleotide for detection of SNP TSC0014077
catccactaacaa

SEQ ID NO: 49923 - DNA, 13 bp, Artificial Sequence
  Oligonucleotide for detection of SNP TSC0014077
tatttagtgatag

SEQ ID NO: 49924 - DNA, 13 bp, Artificial Sequence
  Oligonucleotide for detection of SNP TSC0014077
ctatcactaaata

SEQ ID NO: 49925 - DNA, 13 bp, Artificial Sequence
  Oligonucleotide for detection of SNP TSC0014077
tatttattgatag

SEQ ID NO: 49926 - DNA, 13 bp, Artificial Sequence
  Oligonucleotide for detection of SNP TSC0014077
ctatcaataaata

SEQ ID NO: 49927 - DNA, 13 bp, Artificial Sequence
  Oligonucleotide for detection of SNP TSC0014078
gagattgtgtgag

SEQ ID NO: 49928 - DNA, 13 bp, Artificial Sequence
  Oligonucleotide for detection of SNP TSC0014078
ctcacacaatctc

SEQ ID NO: 49929 - DNA, 13 bp, Artificial Sequence
  Oligonucleotide for detection of SNP TSC0014078
gagattatgtgag

SEQ ID NO: 49930 - DNA, 13 bp, Artificial Sequence
  Oligonucleotide for detection of SNP TSC0014078
ctcacataatctc

SEQ ID NO: 49931 - DNA, 13 bp, Artificial Sequence
  Oligonucleotide for detection of SNP TSC0014078
gagattgtgcgag

SEQ ID NO: 49932 - DNA, 13 bp, Artificial Sequence
  Oligonucleotide for detection of SNP TSC0014078
ctcgcacaatctc

SEQ ID NO: 49933 - DNA, 13 bp, Artificial Sequence
  Oligonucleotide for detection of SNP TSC0014078
gagattatgcgag

SEQ ID NO: 49934 - DNA, 13 bp, Artificial Sequence
  Oligonucleotide for detection of SNP TSC0014078
ctcgcataatctc

SEQ ID NO: 49935 - DNA, 13 bp, Artificial Sequence
  Oligonucleotide for detection of SNP TSC0014079
atgttttgagttg

SEQ ID NO: 49936 - DNA, 13 bp, Artificial Sequence
  Oligonucleotide for detection of SNP TSC0014079
caactcaaaacat

SEQ ID NO: 49937 - DNA, 13 bp, Artificial Sequence
  Oligonucleotide for detection of SNP TSC0014079
atgtttcgagttg

SEQ ID NO: 49938 - DNA, 13 bp, Artificial Sequence
  Oligonucleotide for detection of SNP TSC0014079
caactcgaaacat

SEQ ID NO: 49939 - DNA, 13 bp, Artificial Sequence
  Oligonucleotide for detection of SNP TSC0014079
atgttttgagtcg

SEQ ID NO: 49940 - DNA, 13 bp, Artificial Sequence
  Oligonucleotide for detection of SNP TSC0014079
cgactcaaaacat

SEQ ID NO: 49941 - DNA, 13 bp, Artificial Sequence
  Oligonucleotide for detection of SNP TSC0014079
atgtttcgagtcg

SEQ ID NO: 49942 - DNA, 13 bp, Artificial Sequence
  Oligonucleotide for detection of SNP TSC0014079
cgactcgaaacat

SEQ ID NO: 49943 - DNA, 13 bp, Artificial Sequence
  Oligonucleotide for detection of SNP TSC0014079
tggtttggggtat

SEQ ID NO: 49944 - DNA, 13 bp, Artificial Sequence
  Oligonucleotide for detection of SNP TSC0014079
ataccccaaacca

SEQ ID NO: 49945 - DNA, 13 bp, Artificial Sequence
  Oligonucleotide for detection of SNP TSC0014079
tggtttagggtat

SEQ ID NO: 49946 - DNA, 13 bp, Artificial Sequence
  Oligonucleotide for detection of SNP TSC0014079
ataccctaaacca

SEQ ID NO: 49947 - DNA, 13 bp, Artificial Sequence
  Oligonucleotide for detection of SNP TSC0014079
cggtttggggtat

SEQ ID NO: 49948 - DNA, 13 bp, Artificial Sequence
  Oligonucleotide for detection of SNP TSC0014079
ataccccaaaccg

SEQ ID NO: 49949 - DNA, 13 bp, Artificial Sequence
  Oligonucleotide for detection of SNP TSC0014079
cggtttagggtat

SEQ ID NO: 49950 - DNA, 13 bp, Artificial Sequence
  Oligonucleotide for detection of SNP TSC0014079
ataccctaaaccg

SEQ ID NO: 49951 - DNA, 13 bp, Artificial Sequence
  Oligonucleotide for detection of SNP TSC0014079
tggttcggggtat

SEQ ID NO: 49952 - DNA, 13 bp, Artificial Sequence
  Oligonucleotide for detection of SNP TSC0014079
ataccccgaacca

SEQ ID NO: 49953 - DNA, 13 bp, Artificial Sequence
  Oligonucleotide for detection of SNP TSC0014079
cggttcggggtat

SEQ ID NO: 49954 - DNA, 13 bp, Artificial Sequence
  Oligonucleotide for detection of SNP TSC0014079
ataccccgaaccg

SEQ ID NO: 49955 - DNA, 13 bp, Artificial Sequence
  Oligonucleotide for detection of SNP TSC0014082
tgtatatggatta

SEQ ID NO: 49956 - DNA, 13 bp, Artificial Sequence
  Oligonucleotide for detection of SNP TSC0014082
taatccatataca

SEQ ID NO: 49957 - DNA, 13 bp, Artificial Sequence
  Oligonucleotide for detection of SNP TSC0014082
tgtatacggatta

SEQ ID NO: 49958 - DNA, 13 bp, Artificial Sequence
  Oligonucleotide for detection of SNP TSC0014082
taatccgtataca

SEQ ID NO: 49959 - DNA, 13 bp, Artificial Sequence
  Oligonucleotide for detection of SNP TSC0014082
tgatttatatata

SEQ ID NO: 49960 - DNA, 13 bp, Artificial Sequence
  Oligonucleotide for detection of SNP TSC0014082
tatatataaatca

SEQ ID NO: 49961 - DNA, 13 bp, Artificial Sequence
  Oligonucleotide for detection of SNP TSC0014082
tgattcgtatata

SEQ ID NO: 49962 - DNA, 13 bp, Artificial Sequence
  Oligonucleotide for detection of SNP TSC0014082
tatatacgaatca

SEQ ID NO: 49963 - DNA, 13 bp, Artificial Sequence
  Oligonucleotide for detection of SNP TSC0014083
gaatagttggaaa

SEQ ID NO: 49964 - DNA, 13 bp, Artificial Sequence
  Oligonucleotide for detection of SNP TSC0014083
tttccaactattc

SEQ ID NO: 49965 - DNA, 13 bp, Artificial Sequence
  Oligonucleotide for detection of SNP TSC0014083
gaataggtggaaa

SEQ ID NO: 49966 - DNA, 13 bp, Artificial Sequence
  Oligonucleotide for detection of SNP TSC0014083
tttccacctattc

SEQ ID NO: 49967 - DNA, 13 bp, Artificial Sequence
  Oligonucleotide for detection of SNP TSC0014083
tttttagttgtty

SEQ ID NO: 49968 - DNA, 13 bp, Artificial Sequence
  Oligonucleotide for detection of SNP TSC0014083
raacaactaaaaa

SEQ ID NO: 49969 - DNA, 13 bp, Artificial Sequence
  Oligonucleotide for detection of SNP TSC0014083
tttttatttgtty

SEQ ID NO: 49970 - DNA, 13 bp, Artificial Sequence
  Oligonucleotide for detection of SNP TSC0014083
raacaaataaaaa

SEQ ID NO: 49971 - DNA, 13 bp, Artificial Sequence
  Oligonucleotide for detection of SNP TSC0014084
tttatttttattg

SEQ ID NO: 49972 - DNA, 13 bp, Artificial Sequence
  Oligonucleotide for detection of SNP TSC0014084
caataaaaataaa

SEQ ID NO: 49973 - DNA, 13 bp, Artificial Sequence
  Oligonucleotide for detection of SNP TSC0014084
taatgataatgga

SEQ ID NO: 49974 - DNA, 13 bp, Artificial Sequence
  Oligonucleotide for detection of SNP TSC0014084
tccattatcatta

SEQ ID NO: 49975 - DNA, 13 bp, Artificial Sequence
  Oligonucleotide for detection of SNP TSC0014084
taatgaaaatgga

SEQ ID NO: 49976 - DNA, 13 bp, Artificial Sequence
  Oligonucleotide for detection of SNP TSC0014084
tccattttcatta

SEQ ID NO: 49977 - DNA, 13 bp, Artificial Sequence
  Oligonucleotide for detection of SNP TSC0014085
ttttaaaaatttt

SEQ ID NO: 49978 - DNA, 13 bp, Artificial Sequence
  Oligonucleotide for detection of SNP TSC0014085
aaaatttttaaaa

SEQ ID NO: 49979 - DNA, 13 bp, Artificial Sequence
  Oligonucleotide for detection of SNP TSC0014085
aaggtttttgaga

SEQ ID NO: 49980 - DNA, 13 bp, Artificial Sequence
  Oligonucleotide for detection of SNP TSC0014085
tctcaaaaacctt

SEQ ID NO: 49981 - DNA, 13 bp, Artificial Sequence
  Oligonucleotide for detection of SNP TSC0014085
aaggttgttgaga

SEQ ID NO: 49982 - DNA, 13 bp, Artificial Sequence
  Oligonucleotide for detection of SNP TSC0014085
tctcaacaacctt

SEQ ID NO: 49983 - DNA, 13 bp, Artificial Sequence
  Oligonucleotide for detection of SNP TSC0014086
tgttttgtattay

SEQ ID NO: 49984 - DNA, 13 bp, Artificial Sequence
  Oligonucleotide for detection of SNP TSC0014086
rtaatacaaaaca

SEQ ID NO: 49985 - DNA, 13 bp, Artificial Sequence
  Oligonucleotide for detection of SNP TSC0014086
tgttttatattay

SEQ ID NO: 49986 - DNA, 13 bp, Artificial Sequence
  Oligonucleotide for detection of SNP TSC0014086
rtaatataaaaca

SEQ ID NO: 49987 - DNA, 13 bp, Artificial Sequence
  Oligonucleotide for detection of SNP TSC0014087
tttttaatttgtt

SEQ ID NO: 49988 - DNA, 13 bp, Artificial Sequence
  Oligonucleotide for detection of SNP TSC0014087
aacaaattaaaaa

SEQ ID NO: 49989 - DNA, 13 bp, Artificial Sequence
  Oligonucleotide for detection of SNP TSC0014087
tttttattttgtt

SEQ ID NO: 49990 - DNA, 13 bp, Artificial Sequence
  Oligonucleotide for detection of SNP TSC0014087
aacaaaataaaaa

SEQ ID NO: 49991 - DNA, 13 bp, Artificial Sequence
  Oligonucleotide for detection of SNP TSC0014087
agtaaattgaaga

SEQ ID NO: 49992 - DNA, 13 bp, Artificial Sequence
  Oligonucleotide for detection of SNP TSC0014087
tcttcaatttact

SEQ ID NO: 49993 - DNA, 13 bp, Artificial Sequence
  Oligonucleotide for detection of SNP TSC0014087
agtaaagtgaaga

SEQ ID NO: 49994 - DNA, 13 bp, Artificial Sequence
  Oligonucleotide for detection of SNP TSC0014087
tcttcactttact

SEQ ID NO: 49995 - DNA, 13 bp, Artificial Sequence
  Oligonucleotide for detection of SNP TSC0014088
attttatgttatt

SEQ ID NO: 49996 - DNA, 13 bp, Artificial Sequence
  Oligonucleotide for detection of SNP TSC0014088
aataacataaaat

SEQ ID NO: 49997 - DNA, 13 bp, Artificial Sequence
  Oligonucleotide for detection of SNP TSC0014088
attttacgttatt

SEQ ID NO: 49998 - DNA, 13 bp, Artificial Sequence
  Oligonucleotide for detection of SNP TSC0014088
aataacgtaaaat

SEQ ID NO: 49999 - DNA, 13 bp, Artificial Sequence
  Oligonucleotide for detection of SNP TSC0014088
aatgatgtaaaat

SEQ ID NO: 50000 - DNA, 13 bp, Artificial Sequence
  Oligonucleotide for detection of SNP TSC0014088
attttacatcatt

SEQ ID NO: 50001 - DNA, 13 bp, Artificial Sequence
  Oligonucleotide for detection of SNP TSC0014088
aatgatataaaat

SEQ ID NO: 50002 - DNA, 13 bp, Artificial Sequence
  Oligonucleotide for detection of SNP TSC0014088
attttatatcatt

SEQ ID NO: 50003 - DNA, 13 bp, Artificial Sequence
  Oligonucleotide for detection of SNP TSC0014088
aatgacgtaaaat

SEQ ID NO: 50004 - DNA, 13 bp, Artificial Sequence
  Oligonucleotide for detection of SNP TSC0014088
attttacgtcatt

SEQ ID NO: 50005 - DNA, 13 bp, Artificial Sequence
  Oligonucleotide for detection of SNP TSC0014089
tttattatataty

SEQ ID NO: 50006 - DNA, 13 bp, Artificial Sequence
  Oligonucleotide for detection of SNP TSC0014089
ratatataataaa

SEQ ID NO: 50007 - DNA, 13 bp, Artificial Sequence
  Oligonucleotide for detection of SNP TSC0014089
tttattttataty

SEQ ID NO: 50008 - DNA, 13 bp, Artificial Sequence
  Oligonucleotide for detection of SNP TSC0014089
ratataaaataaa

SEQ ID NO: 50009 - DNA, 13 bp, Artificial Sequence
  Oligonucleotide for detection of SNP TSC0014089
ggtatatgataga

SEQ ID NO: 50010 - DNA, 13 bp, Artificial Sequence
  Oligonucleotide for detection of SNP TSC0014089
tctatcatatacc

SEQ ID NO: 50011 - DNA, 13 bp, Artificial Sequence
  Oligonucleotide for detection of SNP TSC0014089
ggtataggataga

SEQ ID NO: 50012 - DNA, 13 bp, Artificial Sequence
  Oligonucleotide for detection of SNP TSC0014089
tctatcctatacc

SEQ ID NO: 50013 - DNA, 13 bp, Artificial Sequence
  Oligonucleotide for detection of SNP TSC0014091
tattttattaggt

SEQ ID NO: 50014 - DNA, 13 bp, Artificial Sequence
  Oligonucleotide for detection of SNP TSC0014091
acctaataaaata

SEQ ID NO: 50015 - DNA, 13 bp, Artificial Sequence
  Oligonucleotide for detection of SNP TSC0014091
atttagtggaatg

SEQ ID NO: 50016 - DNA, 13 bp, Artificial Sequence
  Oligonucleotide for detection of SNP TSC0014091
cattccactaaat

SEQ ID NO: 50017 - DNA, 13 bp, Artificial Sequence
  Oligonucleotide for detection of SNP TSC0014091
atttagaggaatg

SEQ ID NO: 50018 - DNA, 13 bp, Artificial Sequence
  Oligonucleotide for detection of SNP TSC0014091
cattcctctaaat

SEQ ID NO: 50019 - DNA, 13 bp, Artificial Sequence
  Oligonucleotide for detection of SNP TSC0014093
taattagttttay

SEQ ID NO: 50020 - DNA, 13 bp, Artificial Sequence
  Oligonucleotide for detection of SNP TSC0014093
rtaaaactaatta

SEQ ID NO: 50021 - DNA, 13 bp, Artificial Sequence
  Oligonucleotide for detection of SNP TSC0014093
taattaattttay

SEQ ID NO: 50022 - DNA, 13 bp, Artificial Sequence
  Oligonucleotide for detection of SNP TSC0014093
rtaaaattaatta

SEQ ID NO: 50023 - DNA, 13 bp, Artificial Sequence
  Oligonucleotide for detection of SNP TSC0014094
gagtgtatgttgt

SEQ ID NO: 50024 - DNA, 13 bp, Artificial Sequence
  Oligonucleotide for detection of SNP TSC0014094
acaacatacactc

SEQ ID NO: 50025 - DNA, 13 bp, Artificial Sequence
  Oligonucleotide for detection of SNP TSC0014094
gagtgtgtgttgt

SEQ ID NO: 50026 - DNA, 13 bp, Artificial Sequence
  Oligonucleotide for detection of SNP TSC0014094
acaacacacactc

SEQ ID NO: 50027 - DNA, 13 bp, Artificial Sequence
  Oligonucleotide for detection of SNP TSC0014094
gagtgcgtgttgt

SEQ ID NO: 50028 - DNA, 13 bp, Artificial Sequence
  Oligonucleotide for detection of SNP TSC0014094
acaacacgcactc

SEQ ID NO: 50029 - DNA, 13 bp, Artificial Sequence
  Oligonucleotide for detection of SNP TSC0014094
atagtatgtatty

SEQ ID NO: 50030 - DNA, 13 bp, Artificial Sequence
  Oligonucleotide for detection of SNP TSC0014094
raatacatactat

SEQ ID NO: 50031 - DNA, 13 bp, Artificial Sequence
  Oligonucleotide for detection of SNP TSC0014094
atagtacgtatty

SEQ ID NO: 50032 - DNA, 13 bp, Artificial Sequence
  Oligonucleotide for detection of SNP TSC0014094
raatacgtactat

SEQ ID NO: 50033 - DNA, 13 bp, Artificial Sequence
  Oligonucleotide for detection of SNP TSC0014095
attgaggttttag

SEQ ID NO: 50034 - DNA, 13 bp, Artificial Sequence
  Oligonucleotide for detection of SNP TSC0014095
ctaaaacctcaat

SEQ ID NO: 50035 - DNA, 13 bp, Artificial Sequence
  Oligonucleotide for detection of SNP TSC0014095
attgagattttag

SEQ ID NO: 50036 - DNA, 13 bp, Artificial Sequence
  Oligonucleotide for detection of SNP TSC0014095
ctaaaatctcaat

SEQ ID NO: 50037 - DNA, 13 bp, Artificial Sequence
  Oligonucleotide for detection of SNP TSC0014096
gaaagaggaattt

SEQ ID NO: 50038 - DNA, 13 bp, Artificial Sequence
  Oligonucleotide for detection of SNP TSC0014096
aaattcctctttc

SEQ ID NO: 50039 - DNA, 13 bp, Artificial Sequence
  Oligonucleotide for detection of SNP TSC0014096
gaaagaagaattt

SEQ ID NO: 50040 - DNA, 13 bp, Artificial Sequence
  Oligonucleotide for detection of SNP TSC0014096
aaattcttctttc

SEQ ID NO: 50041 - DNA, 13 bp, Artificial Sequence
  Oligonucleotide for detection of SNP TSC0014097
ttttttattttgy

SEQ ID NO: 50042 - DNA, 13 bp, Artificial Sequence
  Oligonucleotide for detection of SNP TSC0014097
rcaaaataaaaaa

SEQ ID NO: 50043 - DNA, 13 bp, Artificial Sequence
  Oligonucleotide for detection of SNP TSC0014097
ttttttgttttgy

SEQ ID NO: 50044 - DNA, 13 bp, Artificial Sequence
  Oligonucleotide for detection of SNP TSC0014097
rcaaaacaaaaaa

SEQ ID NO: 50045 - DNA, 13 bp, Artificial Sequence
  Oligonucleotide for detection of SNP TSC0014098
ggttttatatttg

SEQ ID NO: 50046 - DNA, 13 bp, Artificial Sequence
  Oligonucleotide for detection of SNP TSC0014098
caaatataaaacc

SEQ ID NO: 50047 - DNA, 13 bp, Artificial Sequence
  Oligonucleotide for detection of SNP TSC0014098
ggttttgtatttg

SEQ ID NO: 50048 - DNA, 13 bp, Artificial Sequence
  Oligonucleotide for detection of SNP TSC0014098
caaatacaaaacc

SEQ ID NO: 50049 - DNA, 13 bp, Artificial Sequence
  Oligonucleotide for detection of SNP TSC0014098
ggtttcgtatttg

SEQ ID NO: 50050 - DNA, 13 bp, Artificial Sequence
  Oligonucleotide for detection of SNP TSC0014098
caaatacgaaacc

SEQ ID NO: 50051 - DNA, 13 bp, Artificial Sequence
  Oligonucleotide for detection of SNP TSC0014098
taagtgtgaaaty

SEQ ID NO: 50052 - DNA, 13 bp, Artificial Sequence
  Oligonucleotide for detection of SNP TSC0014098
ratttcacactta

SEQ ID NO: 50053 - DNA, 13 bp, Artificial Sequence
  Oligonucleotide for detection of SNP TSC0014098
taagtgcgaaaty

SEQ ID NO: 50054 - DNA, 13 bp, Artificial Sequence
  Oligonucleotide for detection of SNP TSC0014098
ratttcgcactta

SEQ ID NO: 50055 - DNA, 13 bp, Artificial Sequence
  Oligonucleotide for detection of SNP TSC0014099
gggtggattaggg

SEQ ID NO: 50056 - DNA, 13 bp, Artificial Sequence
  Oligonucleotide for detection of SNP TSC0014099
ccctaatccaccc

SEQ ID NO: 50057 - DNA, 13 bp, Artificial Sequence
  Oligonucleotide for detection of SNP TSC0014099
gggtgggttaggg

SEQ ID NO: 50058 - DNA, 13 bp, Artificial Sequence
  Oligonucleotide for detection of SNP TSC0014099
ccctaacccaccc

SEQ ID NO: 50059 - DNA, 13 bp, Artificial Sequence
  Oligonucleotide for detection of SNP TSC0014103
tagaagtgggaay

SEQ ID NO: 50060 - DNA, 13 bp, Artificial Sequence
  Oligonucleotide for detection of SNP TSC0014103
rttcccacttcta

SEQ ID NO: 50061 - DNA, 13 bp, Artificial Sequence
  Oligonucleotide for detection of SNP TSC0014103
tagaagcgggaay

SEQ ID NO: 50062 - DNA, 13 bp, Artificial Sequence
  Oligonucleotide for detection of SNP TSC0014103
rttcccgcttcta

SEQ ID NO: 50063 - DNA, 13 bp, Artificial Sequence
  Oligonucleotide for detection of SNP TSC0014104
ttttagaattatt

SEQ ID NO: 50064 - DNA, 13 bp, Artificial Sequence
  Oligonucleotide for detection of SNP TSC0014104
aataattctaaaa

SEQ ID NO: 50065 - DNA, 13 bp, Artificial Sequence
  Oligonucleotide for detection of SNP TSC0014104
ttttaggattatt

SEQ ID NO: 50066 - DNA, 13 bp, Artificial Sequence
  Oligonucleotide for detection of SNP TSC0014104
aataatcctaaaa

SEQ ID NO: 50067 - DNA, 13 bp, Artificial Sequence
  Oligonucleotide for detection of SNP TSC0014105
ttaataattgggt

SEQ ID NO: 50068 - DNA, 13 bp, Artificial Sequence
  Oligonucleotide for detection of SNP TSC0014105
acccaattattaa

SEQ ID NO: 50069 - DNA, 13 bp, Artificial Sequence
  Oligonucleotide for detection of SNP TSC0014105
ttaatatttgggt

SEQ ID NO: 50070 - DNA, 13 bp, Artificial Sequence
  Oligonucleotide for detection of SNP TSC0014105
acccaaatattaa

SEQ ID NO: 50071 - DNA, 13 bp, Artificial Sequence
  Oligonucleotide for detection of SNP TSC0014105
atttagttgttgg

SEQ ID NO: 50072 - DNA, 13 bp, Artificial Sequence
  Oligonucleotide for detection of SNP TSC0014105
ccaacaactaaat

SEQ ID NO: 50073 - DNA, 13 bp, Artificial Sequence
  Oligonucleotide for detection of SNP TSC0014105
atttagatgttgg

SEQ ID NO: 50074 - DNA, 13 bp, Artificial Sequence
  Oligonucleotide for detection of SNP TSC0014105
ccaacatctaaat

SEQ ID NO: 50075 - DNA, 13 bp, Artificial Sequence
  Oligonucleotide for detection of SNP TSC0014107
taatttgtagtag

SEQ ID NO: 50076 - DNA, 13 bp, Artificial Sequence
  Oligonucleotide for detection of SNP TSC0014107
ctactacaaatta

SEQ ID NO: 50077 - DNA, 13 bp, Artificial Sequence
  Oligonucleotide for detection of SNP TSC0014107
taatttttagtag

SEQ ID NO: 50078 - DNA, 13 bp, Artificial Sequence
  Oligonucleotide for detection of SNP TSC0014107
ctactaaaaatta

SEQ ID NO: 50079 - DNA, 13 bp, Artificial Sequence
  Oligonucleotide for detection of SNP TSC0014107
taattcgtagtag

SEQ ID NO: 50080 - DNA, 13 bp, Artificial Sequence
  Oligonucleotide for detection of SNP TSC0014107
ctactacgaatta

SEQ ID NO: 50081 - DNA, 13 bp, Artificial Sequence
  Oligonucleotide for detection of SNP TSC0014107
ttgttgtgggttg

SEQ ID NO: 50082 - DNA, 13 bp, Artificial Sequence
  Oligonucleotide for detection of SNP TSC0014107
caacccacaacaa

SEQ ID NO: 50083 - DNA, 13 bp, Artificial Sequence
  Oligonucleotide for detection of SNP TSC0014107
ttgttgagggttg

SEQ ID NO: 50084 - DNA, 13 bp, Artificial Sequence
  Oligonucleotide for detection of SNP TSC0014107
caaccctcaacaa

SEQ ID NO: 50085 - DNA, 13 bp, Artificial Sequence
  Oligonucleotide for detection of SNP TSC0014107
ttgttgcgggttg

SEQ ID NO: 50086 - DNA, 13 bp, Artificial Sequence
  Oligonucleotide for detection of SNP TSC0014107
caacccgcaacaa

SEQ ID NO: 50087 - DNA, 13 bp, Artificial Sequence
  Oligonucleotide for detection of SNP TSC0014110
tagaatatgattt

SEQ ID NO: 50088 - DNA, 13 bp, Artificial Sequence
  Oligonucleotide for detection of SNP TSC0014110
aaatcatattcta

SEQ ID NO: 50089 - DNA, 13 bp, Artificial Sequence
  Oligonucleotide for detection of SNP TSC0014110
tagaatttgattt

SEQ ID NO: 50090 - DNA, 13 bp, Artificial Sequence
  Oligonucleotide for detection of SNP TSC0014110
aaatcaaattcta

SEQ ID NO: 50091 - DNA, 13 bp, Artificial Sequence
  Oligonucleotide for detection of SNP TSC0014110
aaattatgttttg

SEQ ID NO: 50092 - DNA, 13 bp, Artificial Sequence
  Oligonucleotide for detection of SNP TSC0014110
caaaacataattt

SEQ ID NO: 50093 - DNA, 13 bp, Artificial Sequence
  Oligonucleotide for detection of SNP TSC0014110
aaattaagttttg

SEQ ID NO: 50094 - DNA, 13 bp, Artificial Sequence
  Oligonucleotide for detection of SNP TSC0014110
caaaacttaattt

SEQ ID NO: 50095 - DNA, 13 bp, Artificial Sequence
  Oligonucleotide for detection of SNP TSC0014111
ttgttaaagttat

SEQ ID NO: 50096 - DNA, 13 bp, Artificial Sequence
  Oligonucleotide for detection of SNP TSC0014111
ataactttaacaa

SEQ ID NO: 50097 - DNA, 13 bp, Artificial Sequence
  Oligonucleotide for detection of SNP TSC0014111
ttgttatagttat

SEQ ID NO: 50098 - DNA, 13 bp, Artificial Sequence
  Oligonucleotide for detection of SNP TSC0014111
ataactataacaa

SEQ ID NO: 50099 - DNA, 13 bp, Artificial Sequence
  Oligonucleotide for detection of SNP TSC0014111
atggttttgatag

SEQ ID NO: 50100 - DNA, 13 bp, Artificial Sequence
  Oligonucleotide for detection of SNP TSC0014111
ctatcaaaaccat

SEQ ID NO: 50101 - DNA, 13 bp, Artificial Sequence
  Oligonucleotide for detection of SNP TSC0014111
atggttatgatag

SEQ ID NO: 50102 - DNA, 13 bp, Artificial Sequence
  Oligonucleotide for detection of SNP TSC0014111
ctatcataaccat

SEQ ID NO: 50103 - DNA, 13 bp, Artificial Sequence
  Oligonucleotide for detection of SNP TSC0014115
aggatatttttty

SEQ ID NO: 50104 - DNA, 13 bp, Artificial Sequence
  Oligonucleotide for detection of SNP TSC0014115
raaaaaatatcct

SEQ ID NO: 50105 - DNA, 13 bp, Artificial Sequence
  Oligonucleotide for detection of SNP TSC0014115
aggatagttttty

SEQ ID NO: 50106 - DNA, 13 bp, Artificial Sequence
  Oligonucleotide for detection of SNP TSC0014115
raaaaactatcct

SEQ ID NO: 50107 - DNA, 13 bp, Artificial Sequence
  Oligonucleotide for detection of SNP TSC0014115
gaagaagtgtttt

SEQ ID NO: 50108 - DNA, 13 bp, Artificial Sequence
  Oligonucleotide for detection of SNP TSC0014115
aaaacacttcttc

SEQ ID NO: 50109 - DNA, 13 bp, Artificial Sequence
  Oligonucleotide for detection of SNP TSC0014115
gaagaattgtttt

SEQ ID NO: 50110 - DNA, 13 bp, Artificial Sequence
  Oligonucleotide for detection of SNP TSC0014115
aaaacaattcttc

SEQ ID NO: 50111 - DNA, 13 bp, Artificial Sequence
  Oligonucleotide for detection of SNP TSC0014116
tgttgtaatattt

SEQ ID NO: 50112 - DNA, 13 bp, Artificial Sequence
  Oligonucleotide for detection of SNP TSC0014116
aaatattacaaca

SEQ ID NO: 50113 - DNA, 13 bp, Artificial Sequence
  Oligonucleotide for detection of SNP TSC0014116
tgttgttatattt

SEQ ID NO: 50114 - DNA, 13 bp, Artificial Sequence
  Oligonucleotide for detection of SNP TSC0014116
aaatataacaaca

SEQ ID NO: 50115 - DNA, 13 bp, Artificial Sequence
  Oligonucleotide for detection of SNP TSC0014116
cgttgtaatattt

SEQ ID NO: 50116 - DNA, 13 bp, Artificial Sequence
  Oligonucleotide for detection of SNP TSC0014116
aaatattacaacg

SEQ ID NO: 50117 - DNA, 13 bp, Artificial Sequence
  Oligonucleotide for detection of SNP TSC0014116
cgttgttatattt

SEQ ID NO: 50118 - DNA, 13 bp, Artificial Sequence
  Oligonucleotide for detection of SNP TSC0014116
aaatataacaacg

SEQ ID NO: 50119 - DNA, 13 bp, Artificial Sequence
  Oligonucleotide for detection of SNP TSC0014116
tgtcgtaatattt

SEQ ID NO: 50120 - DNA, 13 bp, Artificial Sequence
  Oligonucleotide for detection of SNP TSC0014116
aaatattacgaca

SEQ ID NO: 50121 - DNA, 13 bp, Artificial Sequence
  Oligonucleotide for detection of SNP TSC0014116
tgtcgttatattt

SEQ ID NO: 50122 - DNA, 13 bp, Artificial Sequence
  Oligonucleotide for detection of SNP TSC0014116
aaatataacgaca

SEQ ID NO: 50123 - DNA, 13 bp, Artificial Sequence
  Oligonucleotide for detection of SNP TSC0014116
cgtcgtaatattt

SEQ ID NO: 50124 - DNA, 13 bp, Artificial Sequence
  Oligonucleotide for detection of SNP TSC0014116
aaatattacgacg

SEQ ID NO: 50125 - DNA, 13 bp, Artificial Sequence
  Oligonucleotide for detection of SNP TSC0014116
cgtcgttatattt

SEQ ID NO: 50126 - DNA, 13 bp, Artificial Sequence
  Oligonucleotide for detection of SNP TSC0014116
aaatataacgacg

SEQ ID NO: 50127 - DNA, 13 bp, Artificial Sequence
  Oligonucleotide for detection of SNP TSC0014116
aggtgttgtggtg

SEQ ID NO: 50128 - DNA, 13 bp, Artificial Sequence
  Oligonucleotide for detection of SNP TSC0014116
caccacaacacct

SEQ ID NO: 50129 - DNA, 13 bp, Artificial Sequence
  Oligonucleotide for detection of SNP TSC0014116
aggtgtggtggtg

SEQ ID NO: 50130 - DNA, 13 bp, Artificial Sequence
  Oligonucleotide for detection of SNP TSC0014116
caccaccacacct

SEQ ID NO: 50131 - DNA, 13 bp, Artificial Sequence
  Oligonucleotide for detection of SNP TSC0014116
aggtgttgcggtg

SEQ ID NO: 50132 - DNA, 13 bp, Artificial Sequence
  Oligonucleotide for detection of SNP TSC0014116
caccgcaacacct

SEQ ID NO: 50133 - DNA, 13 bp, Artificial Sequence
  Oligonucleotide for detection of SNP TSC0014116
aggtgtggcggtg

SEQ ID NO: 50134 - DNA, 13 bp, Artificial Sequence
  Oligonucleotide for detection of SNP TSC0014116
caccgccacacct

SEQ ID NO: 50135 - DNA, 13 bp, Artificial Sequence
  Oligonucleotide for detection of SNP TSC0014116
aggtgttgtggcg

SEQ ID NO: 50136 - DNA, 13 bp, Artificial Sequence
  Oligonucleotide for detection of SNP TSC0014116
cgccacaacacct

SEQ ID NO: 50137 - DNA, 13 bp, Artificial Sequence
  Oligonucleotide for detection of SNP TSC0014116
aggtgtggtggcg

SEQ ID NO: 50138 - DNA, 13 bp, Artificial Sequence
  Oligonucleotide for detection of SNP TSC0014116
cgccaccacacct

SEQ ID NO: 50139 - DNA, 13 bp, Artificial Sequence
  Oligonucleotide for detection of SNP TSC0014116
aggtgttgcggcg

SEQ ID NO: 50140 - DNA, 13 bp, Artificial Sequence
  Oligonucleotide for detection of SNP TSC0014116
cgccgcaacacct

SEQ ID NO: 50141 - DNA, 13 bp, Artificial Sequence
  Oligonucleotide for detection of SNP TSC0014116
aggtgtggcggcg

SEQ ID NO: 50142 - DNA, 13 bp, Artificial Sequence
  Oligonucleotide for detection of SNP TSC0014116
cgccgccacacct

SEQ ID NO: 50143 - DNA, 13 bp, Artificial Sequence
  Oligonucleotide for detection of SNP TSC0014117
ttgtttaggaaty

SEQ ID NO: 50144 - DNA, 13 bp, Artificial Sequence
  Oligonucleotide for detection of SNP TSC0014117
rattcctaaacaa

SEQ ID NO: 50145 - DNA, 13 bp, Artificial Sequence
  Oligonucleotide for detection of SNP TSC0014117
ttgttttggaaty

SEQ ID NO: 50146 - DNA, 13 bp, Artificial Sequence
  Oligonucleotide for detection of SNP TSC0014117
rattccaaaacaa

SEQ ID NO: 50147 - DNA, 13 bp, Artificial Sequence
  Oligonucleotide for detection of SNP TSC0014117
ttgtttcggaaty

SEQ ID NO: 50148 - DNA, 13 bp, Artificial Sequence
  Oligonucleotide for detection of SNP TSC0014117
rattccgaaacaa

SEQ ID NO: 50149 - DNA, 13 bp, Artificial Sequence
  Oligonucleotide for detection of SNP TSC0014117
ggtttttaaatag

SEQ ID NO: 50150 - DNA, 13 bp, Artificial Sequence
  Oligonucleotide for detection of SNP TSC0014117
ctatttaaaaacc

SEQ ID NO: 50151 - DNA, 13 bp, Artificial Sequence
  Oligonucleotide for detection of SNP TSC0014117
ggttttgaaatag

SEQ ID NO: 50152 - DNA, 13 bp, Artificial Sequence
  Oligonucleotide for detection of SNP TSC0014117
ctatttcaaaacc

SEQ ID NO: 50153 - DNA, 13 bp, Artificial Sequence
  Oligonucleotide for detection of SNP TSC0014117
ggtttcgaaatag

SEQ ID NO: 50154 - DNA, 13 bp, Artificial Sequence
  Oligonucleotide for detection of SNP TSC0014117
ctatttcgaaacc

SEQ ID NO: 50155 - DNA, 13 bp, Artificial Sequence
  Oligonucleotide for detection of SNP TSC0014119
gttataataaata

SEQ ID NO: 50156 - DNA, 13 bp, Artificial Sequence
  Oligonucleotide for detection of SNP TSC0014119
tatttattataac

SEQ ID NO: 50157 - DNA, 13 bp, Artificial Sequence
  Oligonucleotide for detection of SNP TSC0014119
gttatattaaata

SEQ ID NO: 50158 - DNA, 13 bp, Artificial Sequence
  Oligonucleotide for detection of SNP TSC0014119
tatttaatataac

SEQ ID NO: 50159 - DNA, 13 bp, Artificial Sequence
  Oligonucleotide for detection of SNP TSC0014119
tgtttattatggy

SEQ ID NO: 50160 - DNA, 13 bp, Artificial Sequence
  Oligonucleotide for detection of SNP TSC0014119
rccataataaaca

SEQ ID NO: 50161 - DNA, 13 bp, Artificial Sequence
  Oligonucleotide for detection of SNP TSC0014119
tgtttaatatggy

SEQ ID NO: 50162 - DNA, 13 bp, Artificial Sequence
  Oligonucleotide for detection of SNP TSC0014119
rccatattaaaca

SEQ ID NO: 50163 - DNA, 13 bp, Artificial Sequence
  Oligonucleotide for detection of SNP TSC0014120
tatttagtatttg

SEQ ID NO: 50164 - DNA, 13 bp, Artificial Sequence
  Oligonucleotide for detection of SNP TSC0014120
caaatactaaata

SEQ ID NO: 50165 - DNA, 13 bp, Artificial Sequence
  Oligonucleotide for detection of SNP TSC0014120
tatttaatatttg

SEQ ID NO: 50166 - DNA, 13 bp, Artificial Sequence
  Oligonucleotide for detection of SNP TSC0014120
caaatattaaata

SEQ ID NO: 50167 - DNA, 13 bp, Artificial Sequence
  Oligonucleotide for detection of SNP TSC0014121
ggaaggtgttggg

SEQ ID NO: 50168 - DNA, 13 bp, Artificial Sequence
  Oligonucleotide for detection of SNP TSC0014121
cccaacaccttcc

SEQ ID NO: 50169 - DNA, 13 bp, Artificial Sequence
  Oligonucleotide for detection of SNP TSC0014121
ggaaggcgttggg

SEQ ID NO: 50170 - DNA, 13 bp, Artificial Sequence
  Oligonucleotide for detection of SNP TSC0014121
cccaacgccttcc

SEQ ID NO: 50171 - DNA, 13 bp, Artificial Sequence
  Oligonucleotide for detection of SNP TSC0014121
ggaaggtgtcggg

SEQ ID NO: 50172 - DNA, 13 bp, Artificial Sequence
  Oligonucleotide for detection of SNP TSC0014121
cccgacaccttcc

SEQ ID NO: 50173 - DNA, 13 bp, Artificial Sequence
  Oligonucleotide for detection of SNP TSC0014121
ggaaggcgtcggg

SEQ ID NO: 50174 - DNA, 13 bp, Artificial Sequence
  Oligonucleotide for detection of SNP TSC0014121
cccgacgccttcc

SEQ ID NO: 50175 - DNA, 13 bp, Artificial Sequence
  Oligonucleotide for detection of SNP TSC0014121
tttggtgttttty

SEQ ID NO: 50176 - DNA, 13 bp, Artificial Sequence
  Oligonucleotide for detection of SNP TSC0014121
raaaaacaccaaa

SEQ ID NO: 50177 - DNA, 13 bp, Artificial Sequence
  Oligonucleotide for detection of SNP TSC0014121
tttggtattttty

SEQ ID NO: 50178 - DNA, 13 bp, Artificial Sequence
  Oligonucleotide for detection of SNP TSC0014121
raaaaataccaaa

SEQ ID NO: 50179 - DNA, 13 bp, Artificial Sequence
  Oligonucleotide for detection of SNP TSC0014121
ttcggtgttttty

SEQ ID NO: 50180 - DNA, 13 bp, Artificial Sequence
  Oligonucleotide for detection of SNP TSC0014121
raaaaacaccgaa

SEQ ID NO: 50181 - DNA, 13 bp, Artificial Sequence
  Oligonucleotide for detection of SNP TSC0014121
ttcggtattttty

SEQ ID NO: 50182 - DNA, 13 bp, Artificial Sequence
  Oligonucleotide for detection of SNP TSC0014121
raaaaataccgaa

SEQ ID NO: 50183 - DNA, 13 bp, Artificial Sequence
  Oligonucleotide for detection of SNP TSC0014121
tttggcgttttty

SEQ ID NO: 50184 - DNA, 13 bp, Artificial Sequence
  Oligonucleotide for detection of SNP TSC0014121
raaaaacgccaaa

SEQ ID NO: 50185 - DNA, 13 bp, Artificial Sequence
  Oligonucleotide for detection of SNP TSC0014121
ttcggcgttttty

SEQ ID NO: 50186 - DNA, 13 bp, Artificial Sequence
  Oligonucleotide for detection of SNP TSC0014121
raaaaacgccgaa

SEQ ID NO: 50187 - DNA, 13 bp, Artificial Sequence
  Oligonucleotide for detection of SNP TSC0014122
tttttttggagga

SEQ ID NO: 50188 - DNA, 13 bp, Artificial Sequence
  Oligonucleotide for detection of SNP TSC0014122
tcctccaaaaaaa

SEQ ID NO: 50189 - DNA, 13 bp, Artificial Sequence
  Oligonucleotide for detection of SNP TSC0014122
ttttttcggagga

SEQ ID NO: 50190 - DNA, 13 bp, Artificial Sequence
  Oligonucleotide for detection of SNP TSC0014122
tcctccgaaaaaa

SEQ ID NO: 50191 - DNA, 13 bp, Artificial Sequence
  Oligonucleotide for detection of SNP TSC0014122
ttttttggaagga

SEQ ID NO: 50192 - DNA, 13 bp, Artificial Sequence
  Oligonucleotide for detection of SNP TSC0014122
tccttccaaaaaa

SEQ ID NO: 50193 - DNA, 13 bp, Artificial Sequence
  Oligonucleotide for detection of SNP TSC0014122
ttttttagaagga

SEQ ID NO: 50194 - DNA, 13 bp, Artificial Sequence
  Oligonucleotide for detection of SNP TSC0014122
tccttctaaaaaa

SEQ ID NO: 50195 - DNA, 13 bp, Artificial Sequence
  Oligonucleotide for detection of SNP TSC0014122
tttttcggaagga

SEQ ID NO: 50196 - DNA, 13 bp, Artificial Sequence
  Oligonucleotide for detection of SNP TSC0014122
tccttccgaaaaa

SEQ ID NO: 50197 - DNA, 13 bp, Artificial Sequence
  Oligonucleotide for detection of SNP TSC0014123
taatataattgat

SEQ ID NO: 50198 - DNA, 13 bp, Artificial Sequence
  Oligonucleotide for detection of SNP TSC0014123
atcaattatatta

SEQ ID NO: 50199 - DNA, 13 bp, Artificial Sequence
  Oligonucleotide for detection of SNP TSC0014123
taatattattgat

SEQ ID NO: 50200 - DNA, 13 bp, Artificial Sequence
  Oligonucleotide for detection of SNP TSC0014123
atcaataatatta

SEQ ID NO: 50201 - DNA, 13 bp, Artificial Sequence
  Oligonucleotide for detection of SNP TSC0014125
tgtttatgattgy

SEQ ID NO: 50202 - DNA, 13 bp, Artificial Sequence
  Oligonucleotide for detection of SNP TSC0014125
rcaatcataaaca

SEQ ID NO: 50203 - DNA, 13 bp, Artificial Sequence
  Oligonucleotide for detection of SNP TSC0014125
tgtttacgattgy

SEQ ID NO: 50204 - DNA, 13 bp, Artificial Sequence
  Oligonucleotide for detection of SNP TSC0014125
rcaatcgtaaaca

SEQ ID NO: 50205 - DNA, 13 bp, Artificial Sequence
  Oligonucleotide for detection of SNP TSC0014125
gtagttgtaggta

SEQ ID NO: 50206 - DNA, 13 bp, Artificial Sequence
  Oligonucleotide for detection of SNP TSC0014125
tacctacaactac

SEQ ID NO: 50207 - DNA, 13 bp, Artificial Sequence
  Oligonucleotide for detection of SNP TSC0014125
gtagttataggta

SEQ ID NO: 50208 - DNA, 13 bp, Artificial Sequence
  Oligonucleotide for detection of SNP TSC0014125
tacctataactac

SEQ ID NO: 50209 - DNA, 13 bp, Artificial Sequence
  Oligonucleotide for detection of SNP TSC0014125
gtagtcgtaggta

SEQ ID NO: 50210 - DNA, 13 bp, Artificial Sequence
  Oligonucleotide for detection of SNP TSC0014125
tacctacgactac

SEQ ID NO: 50211 - DNA, 13 bp, Artificial Sequence
  Oligonucleotide for detection of SNP TSC0014126
tttagtaatggaa

SEQ ID NO: 50212 - DNA, 13 bp, Artificial Sequence
  Oligonucleotide for detection of SNP TSC0014126
ttccattactaaa

SEQ ID NO: 50213 - DNA, 13 bp, Artificial Sequence
  Oligonucleotide for detection of SNP TSC0014126
tttagtgatggaa

SEQ ID NO: 50214 - DNA, 13 bp, Artificial Sequence
  Oligonucleotide for detection of SNP TSC0014126
ttccatcactaaa

SEQ ID NO: 50215 - DNA, 13 bp, Artificial Sequence
  Oligonucleotide for detection of SNP TSC0014127
ataaaaagaatta

SEQ ID NO: 50216 - DNA, 13 bp, Artificial Sequence
  Oligonucleotide for detection of SNP TSC0014127
taattctttttat

SEQ ID NO: 50217 - DNA, 13 bp, Artificial Sequence
  Oligonucleotide for detection of SNP TSC0014127
ataaaatgaatta

SEQ ID NO: 50218 - DNA, 13 bp, Artificial Sequence
  Oligonucleotide for detection of SNP TSC0014127
taattcattttat

SEQ ID NO: 50219 - DNA, 13 bp, Artificial Sequence
  Oligonucleotide for detection of SNP TSC0014127
ataaaacgaatta

SEQ ID NO: 50220 - DNA, 13 bp, Artificial Sequence
  Oligonucleotide for detection of SNP TSC0014127
taattcgttttat

SEQ ID NO: 50221 - DNA, 13 bp, Artificial Sequence
  Oligonucleotide for detection of SNP TSC0014127
tgattttttttat

SEQ ID NO: 50222 - DNA, 13 bp, Artificial Sequence
  Oligonucleotide for detection of SNP TSC0014127
ataaaaaaaatca

SEQ ID NO: 50223 - DNA, 13 bp, Artificial Sequence
  Oligonucleotide for detection of SNP TSC0014127
tgatttgttttat

SEQ ID NO: 50224 - DNA, 13 bp, Artificial Sequence
  Oligonucleotide for detection of SNP TSC0014127
ataaaacaaatca

SEQ ID NO: 50225 - DNA, 13 bp, Artificial Sequence
  Oligonucleotide for detection of SNP TSC0014127
tgattcgttttat

SEQ ID NO: 50226 - DNA, 13 bp, Artificial Sequence
  Oligonucleotide for detection of SNP TSC0014127
ataaaacgaatca

SEQ ID NO: 50227 - DNA, 13 bp, Artificial Sequence
  Oligonucleotide for detection of SNP TSC0014128
atagtagtttttt

SEQ ID NO: 50228 - DNA, 13 bp, Artificial Sequence
  Oligonucleotide for detection of SNP TSC0014128
aaaaaactactat

SEQ ID NO: 50229 - DNA, 13 bp, Artificial Sequence
  Oligonucleotide for detection of SNP TSC0014128
atagtaatttttt

SEQ ID NO: 50230 - DNA, 13 bp, Artificial Sequence
  Oligonucleotide for detection of SNP TSC0014128
aaaaaattactat

SEQ ID NO: 50231 - DNA, 13 bp, Artificial Sequence
  Oligonucleotide for detection of SNP TSC0014133
gttgataggaggg

SEQ ID NO: 50232 - DNA, 13 bp, Artificial Sequence
  Oligonucleotide for detection of SNP TSC0014133
ccctcctatcaac

SEQ ID NO: 50233 - DNA, 13 bp, Artificial Sequence
  Oligonucleotide for detection of SNP TSC0014133
gttgatgggaggg

SEQ ID NO: 50234 - DNA, 13 bp, Artificial Sequence
  Oligonucleotide for detection of SNP TSC0014133
ccctcccatcaac

SEQ ID NO: 50235 - DNA, 13 bp, Artificial Sequence
  Oligonucleotide for detection of SNP TSC0014134
tatatagttttag

SEQ ID NO: 50236 - DNA, 13 bp, Artificial Sequence
  Oligonucleotide for detection of SNP TSC0014134
ctaaaactatata

SEQ ID NO: 50237 - DNA, 13 bp, Artificial Sequence
  Oligonucleotide for detection of SNP TSC0014134
tatataattttag

SEQ ID NO: 50238 - DNA, 13 bp, Artificial Sequence
  Oligonucleotide for detection of SNP TSC0014134
ctaaaattatata

SEQ ID NO: 50239 - DNA, 13 bp, Artificial Sequence
  Oligonucleotide for detection of SNP TSC0014135
taaggtaggtaag

SEQ ID NO: 50240 - DNA, 13 bp, Artificial Sequence
  Oligonucleotide for detection of SNP TSC0014135
cttacctacctta

SEQ ID NO: 50241 - DNA, 13 bp, Artificial Sequence
  Oligonucleotide for detection of SNP TSC0014135
taaggtgggtaag

SEQ ID NO: 50242 - DNA, 13 bp, Artificial Sequence
  Oligonucleotide for detection of SNP TSC0014135
cttacccacctta

SEQ ID NO: 50243 - DNA, 13 bp, Artificial Sequence
  Oligonucleotide for detection of SNP TSC0014135
taaggcgggtaag

SEQ ID NO: 50244 - DNA, 13 bp, Artificial Sequence
  Oligonucleotide for detection of SNP TSC0014135
cttacccgcctta

SEQ ID NO: 50245 - DNA, 13 bp, Artificial Sequence
  Oligonucleotide for detection of SNP TSC0014136
aggtttgatttat

SEQ ID NO: 50246 - DNA, 13 bp, Artificial Sequence
  Oligonucleotide for detection of SNP TSC0014136
ataaatcaaacct

SEQ ID NO: 50247 - DNA, 13 bp, Artificial Sequence
  Oligonucleotide for detection of SNP TSC0014136
aggtttaatttat

SEQ ID NO: 50248 - DNA, 13 bp, Artificial Sequence
  Oligonucleotide for detection of SNP TSC0014136
ataaattaaacct

SEQ ID NO: 50249 - DNA, 13 bp, Artificial Sequence
  Oligonucleotide for detection of SNP TSC0014137
taaattaagtttg

SEQ ID NO: 50250 - DNA, 13 bp, Artificial Sequence
  Oligonucleotide for detection of SNP TSC0014137
caaacttaattta

SEQ ID NO: 50251 - DNA, 13 bp, Artificial Sequence
  Oligonucleotide for detection of SNP TSC0014137
taaattgagtttg

SEQ ID NO: 50252 - DNA, 13 bp, Artificial Sequence
  Oligonucleotide for detection of SNP TSC0014137
caaactcaattta

SEQ ID NO: 50253 - DNA, 13 bp, Artificial Sequence
  Oligonucleotide for detection of SNP TSC0014137
taaatcgagtttg

SEQ ID NO: 50254 - DNA, 13 bp, Artificial Sequence
  Oligonucleotide for detection of SNP TSC0014137
caaactcgattta

SEQ ID NO: 50255 - DNA, 13 bp, Artificial Sequence
  Oligonucleotide for detection of SNP TSC0014137
taggtttgattta

SEQ ID NO: 50256 - DNA, 13 bp, Artificial Sequence
  Oligonucleotide for detection of SNP TSC0014137
taaatcaaaccta

SEQ ID NO: 50257 - DNA, 13 bp, Artificial Sequence
  Oligonucleotide for detection of SNP TSC0014137
taggttcgattta

SEQ ID NO: 50258 - DNA, 13 bp, Artificial Sequence
  Oligonucleotide for detection of SNP TSC0014137
taaatcgaaccta

SEQ ID NO: 50259 - DNA, 13 bp, Artificial Sequence
  Oligonucleotide for detection of SNP TSC0014141
gaaagtgtaggat

SEQ ID NO: 50260 - DNA, 13 bp, Artificial Sequence
  Oligonucleotide for detection of SNP TSC0014141
atcctacactttc

SEQ ID NO: 50261 - DNA, 13 bp, Artificial Sequence
  Oligonucleotide for detection of SNP TSC0014141
gaaagtataggat

SEQ ID NO: 50262 - DNA, 13 bp, Artificial Sequence
  Oligonucleotide for detection of SNP TSC0014141
atcctatactttc

SEQ ID NO: 50263 - DNA, 13 bp, Artificial Sequence
  Oligonucleotide for detection of SNP TSC0014145
aataaagttttty

SEQ ID NO: 50264 - DNA, 13 bp, Artificial Sequence
  Oligonucleotide for detection of SNP TSC0014145
raaaaactttatt

SEQ ID NO: 50265 - DNA, 13 bp, Artificial Sequence
  Oligonucleotide for detection of SNP TSC0014145
aataaaattttty

SEQ ID NO: 50266 - DNA, 13 bp, Artificial Sequence
  Oligonucleotide for detection of SNP TSC0014145
raaaaattttatt

SEQ ID NO: 50267 - DNA, 13 bp, Artificial Sequence
  Oligonucleotide for detection of SNP TSC0014146
ttatatattgtay

SEQ ID NO: 50268 - DNA, 13 bp, Artificial Sequence
  Oligonucleotide for detection of SNP TSC0014146
rtacaatatataa

SEQ ID NO: 50269 - DNA, 13 bp, Artificial Sequence
  Oligonucleotide for detection of SNP TSC0014146
ttatatgttgtay

SEQ ID NO: 50270 - DNA, 13 bp, Artificial Sequence
  Oligonucleotide for detection of SNP TSC0014146
rtacaacatataa

SEQ ID NO: 50271 - DNA, 13 bp, Artificial Sequence
  Oligonucleotide for detection of SNP TSC0014146
ttatatatcgtay

SEQ ID NO: 50272 - DNA, 13 bp, Artificial Sequence
  Oligonucleotide for detection of SNP TSC0014146
rtacgatatataa

SEQ ID NO: 50273 - DNA, 13 bp, Artificial Sequence
  Oligonucleotide for detection of SNP TSC0014146
ttatacgttgtay

SEQ ID NO: 50274 - DNA, 13 bp, Artificial Sequence
  Oligonucleotide for detection of SNP TSC0014146
rtacaacgtataa

SEQ ID NO: 50275 - DNA, 13 bp, Artificial Sequence
  Oligonucleotide for detection of SNP TSC0014146
ttatatgtcgtay

SEQ ID NO: 50276 - DNA, 13 bp, Artificial Sequence
  Oligonucleotide for detection of SNP TSC0014146
rtacgacatataa

SEQ ID NO: 50277 - DNA, 13 bp, Artificial Sequence
  Oligonucleotide for detection of SNP TSC0014146
ttatacgtcgtay

SEQ ID NO: 50278 - DNA, 13 bp, Artificial Sequence
  Oligonucleotide for detection of SNP TSC0014146
rtacgacgtataa

SEQ ID NO: 50279 - DNA, 13 bp, Artificial Sequence
  Oligonucleotide for detection of SNP TSC0014146
gtgtgatgtgtgg

SEQ ID NO: 50280 - DNA, 13 bp, Artificial Sequence
  Oligonucleotide for detection of SNP TSC0014146
ccacacatcacac

SEQ ID NO: 50281 - DNA, 13 bp, Artificial Sequence
  Oligonucleotide for detection of SNP TSC0014146
gtgcgatgtgtgg

SEQ ID NO: 50282 - DNA, 13 bp, Artificial Sequence
  Oligonucleotide for detection of SNP TSC0014146
ccacacatcgcac

SEQ ID NO: 50283 - DNA, 13 bp, Artificial Sequence
  Oligonucleotide for detection of SNP TSC0014146
gtgtgacgtgtgg

SEQ ID NO: 50284 - DNA, 13 bp, Artificial Sequence
  Oligonucleotide for detection of SNP TSC0014146
ccacacgtcacac

SEQ ID NO: 50285 - DNA, 13 bp, Artificial Sequence
  Oligonucleotide for detection of SNP TSC0014146
gtgcgacgtgtgg

SEQ ID NO: 50286 - DNA, 13 bp, Artificial Sequence
  Oligonucleotide for detection of SNP TSC0014146
ccacacgtcgcac

SEQ ID NO: 50287 - DNA, 13 bp, Artificial Sequence
  Oligonucleotide for detection of SNP TSC0014147
atatgagtttgaa

SEQ ID NO: 50288 - DNA, 13 bp, Artificial Sequence
  Oligonucleotide for detection of SNP TSC0014147
ttcaaactcatat

SEQ ID NO: 50289 - DNA, 13 bp, Artificial Sequence
  Oligonucleotide for detection of SNP TSC0014147
atatgattttgaa

SEQ ID NO: 50290 - DNA, 13 bp, Artificial Sequence
  Oligonucleotide for detection of SNP TSC0014147
ttcaaaatcatat

SEQ ID NO: 50291 - DNA, 13 bp, Artificial Sequence
  Oligonucleotide for detection of SNP TSC0014147
tttagatttatgt

SEQ ID NO: 50292 - DNA, 13 bp, Artificial Sequence
  Oligonucleotide for detection of SNP TSC0014147
acataaatctaaa

SEQ ID NO: 50293 - DNA, 13 bp, Artificial Sequence
  Oligonucleotide for detection of SNP TSC0014147
tttagaattatgt

SEQ ID NO: 50294 - DNA, 13 bp, Artificial Sequence
  Oligonucleotide for detection of SNP TSC0014147
acataattctaaa

SEQ ID NO: 50295 - DNA, 13 bp, Artificial Sequence
  Oligonucleotide for detection of SNP TSC0014148
ttttttagttgty

SEQ ID NO: 50296 - DNA, 13 bp, Artificial Sequence
  Oligonucleotide for detection of SNP TSC0014148
racaactaaaaaa

SEQ ID NO: 50297 - DNA, 13 bp, Artificial Sequence
  Oligonucleotide for detection of SNP TSC0014148
ttttttggttgty

SEQ ID NO: 50298 - DNA, 13 bp, Artificial Sequence
  Oligonucleotide for detection of SNP TSC0014148
racaaccaaaaaa

SEQ ID NO: 50299 - DNA, 13 bp, Artificial Sequence
  Oligonucleotide for detection of SNP TSC0014148
tttttcggttgty

SEQ ID NO: 50300 - DNA, 13 bp, Artificial Sequence
  Oligonucleotide for detection of SNP TSC0014148
racaaccgaaaaa

SEQ ID NO: 50301 - DNA, 13 bp, Artificial Sequence
  Oligonucleotide for detection of SNP TSC0014148
gataattgagaga

SEQ ID NO: 50302 - DNA, 13 bp, Artificial Sequence
  Oligonucleotide for detection of SNP TSC0014148
tctctcaattatc

SEQ ID NO: 50303 - DNA, 13 bp, Artificial Sequence
  Oligonucleotide for detection of SNP TSC0014148
gataatcgagaga

SEQ ID NO: 50304 - DNA, 13 bp, Artificial Sequence
  Oligonucleotide for detection of SNP TSC0014148
tctctcgattatc

SEQ ID NO: 50305 - DNA, 13 bp, Artificial Sequence
  Oligonucleotide for detection of SNP TSC0014149
ttttaagtttttg

SEQ ID NO: 50306 - DNA, 13 bp, Artificial Sequence
  Oligonucleotide for detection of SNP TSC0014149
caaaaacttaaaa

SEQ ID NO: 50307 - DNA, 13 bp, Artificial Sequence
  Oligonucleotide for detection of SNP TSC0014150
gagggtatgatgg

SEQ ID NO: 50308 - DNA, 13 bp, Artificial Sequence
  Oligonucleotide for detection of SNP TSC0014150
ccatcataccctc

SEQ ID NO: 50309 - DNA, 13 bp, Artificial Sequence
  Oligonucleotide for detection of SNP TSC0014150
gagggtgtgatgg

SEQ ID NO: 50310 - DNA, 13 bp, Artificial Sequence
  Oligonucleotide for detection of SNP TSC0014150
ccatcacaccctc

SEQ ID NO: 50311 - DNA, 13 bp, Artificial Sequence
  Oligonucleotide for detection of SNP TSC0014150
gagggcgtgatgg

SEQ ID NO: 50312 - DNA, 13 bp, Artificial Sequence
  Oligonucleotide for detection of SNP TSC0014150
ccatcacgccctc

SEQ ID NO: 50313 - DNA, 13 bp, Artificial Sequence
  Oligonucleotide for detection of SNP TSC0014150
ttattatgtttty

SEQ ID NO: 50314 - DNA, 13 bp, Artificial Sequence
  Oligonucleotide for detection of SNP TSC0014150
raaaacataataa

SEQ ID NO: 50315 - DNA, 13 bp, Artificial Sequence
  Oligonucleotide for detection of SNP TSC0014150
ttattacgtttty

SEQ ID NO: 50316 - DNA, 13 bp, Artificial Sequence
  Oligonucleotide for detection of SNP TSC0014150
raaaacgtaataa

SEQ ID NO: 50317 - DNA, 13 bp, Artificial Sequence
  Oligonucleotide for detection of SNP TSC0014151
ttggagttttttt

SEQ ID NO: 50318 - DNA, 13 bp, Artificial Sequence
  Oligonucleotide for detection of SNP TSC0014151
aaaaaaactccaa

SEQ ID NO: 50319 - DNA, 13 bp, Artificial Sequence
  Oligonucleotide for detection of SNP TSC0014151
aggaaatttttaa

SEQ ID NO: 50320 - DNA, 13 bp, Artificial Sequence
  Oligonucleotide for detection of SNP TSC0014151
ttaaaaatttcct

SEQ ID NO: 50321 - DNA, 13 bp, Artificial Sequence
  Oligonucleotide for detection of SNP TSC0014151
aggaaaattttaa

SEQ ID NO: 50322 - DNA, 13 bp, Artificial Sequence
  Oligonucleotide for detection of SNP TSC0014151
ttaaaattttcct

SEQ ID NO: 50323 - DNA, 13 bp, Artificial Sequence
  Oligonucleotide for detection of SNP TSC0014153
atggttaatttgy

SEQ ID NO: 50324 - DNA, 13 bp, Artificial Sequence
  Oligonucleotide for detection of SNP TSC0014153
rcaaattaaccat

SEQ ID NO: 50325 - DNA, 13 bp, Artificial Sequence
  Oligonucleotide for detection of SNP TSC0014153
atggtttatttgy

SEQ ID NO: 50326 - DNA, 13 bp, Artificial Sequence
  Oligonucleotide for detection of SNP TSC0014153
rcaaataaaccat

SEQ ID NO: 50327 - DNA, 13 bp, Artificial Sequence
  Oligonucleotide for detection of SNP TSC0014153
gtagattagttat

SEQ ID NO: 50328 - DNA, 13 bp, Artificial Sequence
  Oligonucleotide for detection of SNP TSC0014153
ataactaatctac

SEQ ID NO: 50329 - DNA, 13 bp, Artificial Sequence
  Oligonucleotide for detection of SNP TSC0014153
gtagatgagttat

SEQ ID NO: 50330 - DNA, 13 bp, Artificial Sequence
  Oligonucleotide for detection of SNP TSC0014153
ataactcatctac

SEQ ID NO: 50331 - DNA, 13 bp, Artificial Sequence
  Oligonucleotide for detection of SNP TSC0014155
agatggattaaag

SEQ ID NO: 50332 - DNA, 13 bp, Artificial Sequence
  Oligonucleotide for detection of SNP TSC0014155
ctttaatccatct

SEQ ID NO: 50333 - DNA, 13 bp, Artificial Sequence
  Oligonucleotide for detection of SNP TSC0014155
agatgggttaaag

SEQ ID NO: 50334 - DNA, 13 bp, Artificial Sequence
  Oligonucleotide for detection of SNP TSC0014155
ctttaacccatct

SEQ ID NO: 50335 - DNA, 13 bp, Artificial Sequence
  Oligonucleotide for detection of SNP TSC0014156
attatgtttttta

SEQ ID NO: 50336 - DNA, 13 bp, Artificial Sequence
  Oligonucleotide for detection of SNP TSC0014156
taaaaaacataat

SEQ ID NO: 50337 - DNA, 13 bp, Artificial Sequence
  Oligonucleotide for detection of SNP TSC0014156
attatggttttta

SEQ ID NO: 50338 - DNA, 13 bp, Artificial Sequence
  Oligonucleotide for detection of SNP TSC0014156
taaaaaccataat

SEQ ID NO: 50339 - DNA, 13 bp, Artificial Sequence
  Oligonucleotide for detection of SNP TSC0014156
taaaaagtatggt

SEQ ID NO: 50340 - DNA, 13 bp, Artificial Sequence
  Oligonucleotide for detection of SNP TSC0014156
accatacttttta

SEQ ID NO: 50341 - DNA, 13 bp, Artificial Sequence
  Oligonucleotide for detection of SNP TSC0014156
taaaaattatggt

SEQ ID NO: 50342 - DNA, 13 bp, Artificial Sequence
  Oligonucleotide for detection of SNP TSC0014156
accataattttta

SEQ ID NO: 50343 - DNA, 13 bp, Artificial Sequence
  Oligonucleotide for detection of SNP TSC0014158
gaagttttttttt

SEQ ID NO: 50344 - DNA, 13 bp, Artificial Sequence
  Oligonucleotide for detection of SNP TSC0014158
aaaaaaaaacttc

SEQ ID NO: 50345 - DNA, 13 bp, Artificial Sequence
  Oligonucleotide for detection of SNP TSC0014158
gaagttgtttttt

SEQ ID NO: 50346 - DNA, 13 bp, Artificial Sequence
  Oligonucleotide for detection of SNP TSC0014158
aaaaaacaacttc

SEQ ID NO: 50347 - DNA, 13 bp, Artificial Sequence
  Oligonucleotide for detection of SNP TSC0014158
gaagtcgtttttt

SEQ ID NO: 50348 - DNA, 13 bp, Artificial Sequence
  Oligonucleotide for detection of SNP TSC0014158
aaaaaacgacttc

SEQ ID NO: 50349 - DNA, 13 bp, Artificial Sequence
  Oligonucleotide for detection of SNP TSC0014158
agagagggattty

SEQ ID NO: 50350 - DNA, 13 bp, Artificial Sequence
  Oligonucleotide for detection of SNP TSC0014158
raaatccctctct

SEQ ID NO: 50351 - DNA, 13 bp, Artificial Sequence
  Oligonucleotide for detection of SNP TSC0014158
agagagtgattty

SEQ ID NO: 50352 - DNA, 13 bp, Artificial Sequence
  Oligonucleotide for detection of SNP TSC0014158
raaatcactctct

SEQ ID NO: 50353 - DNA, 13 bp, Artificial Sequence
  Oligonucleotide for detection of SNP TSC0014158
agagagcgattty

SEQ ID NO: 50354 - DNA, 13 bp, Artificial Sequence
  Oligonucleotide for detection of SNP TSC0014158
raaatcgctctct

SEQ ID NO: 50355 - DNA, 13 bp, Artificial Sequence
  Oligonucleotide for detection of SNP TSC0014159
taggtaatttttg

SEQ ID NO: 50356 - DNA, 13 bp, Artificial Sequence
  Oligonucleotide for detection of SNP TSC0014159
caaaaattaccta

SEQ ID NO: 50357 - DNA, 13 bp, Artificial Sequence
  Oligonucleotide for detection of SNP TSC0014159
taggtagtttttg

SEQ ID NO: 50358 - DNA, 13 bp, Artificial Sequence
  Oligonucleotide for detection of SNP TSC0014159
caaaaactaccta

SEQ ID NO: 50359 - DNA, 13 bp, Artificial Sequence
  Oligonucleotide for detection of SNP TSC0014161
aaatgtgttttga

SEQ ID NO: 50360 - DNA, 13 bp, Artificial Sequence
  Oligonucleotide for detection of SNP TSC0014161
tcaaaacacattt

SEQ ID NO: 50361 - DNA, 13 bp, Artificial Sequence
  Oligonucleotide for detection of SNP TSC0014161
aaatgtattttga

SEQ ID NO: 50362 - DNA, 13 bp, Artificial Sequence
  Oligonucleotide for detection of SNP TSC0014161
tcaaaatacattt

SEQ ID NO: 50363 - DNA, 13 bp, Artificial Sequence
  Oligonucleotide for detection of SNP TSC0014163
ggtaagggtgtta

SEQ ID NO: 50364 - DNA, 13 bp, Artificial Sequence
  Oligonucleotide for detection of SNP TSC0014163
taacacccttacc

SEQ ID NO: 50365 - DNA, 13 bp, Artificial Sequence
  Oligonucleotide for detection of SNP TSC0014163
ggtaagtgtgtta

SEQ ID NO: 50366 - DNA, 13 bp, Artificial Sequence
  Oligonucleotide for detection of SNP TSC0014163
taacacacttacc

SEQ ID NO: 50367 - DNA, 13 bp, Artificial Sequence
  Oligonucleotide for detection of SNP TSC0014163
tggtatttttgty

SEQ ID NO: 50368 - DNA, 13 bp, Artificial Sequence
  Oligonucleotide for detection of SNP TSC0014163
racaaaaatacca

SEQ ID NO: 50369 - DNA, 13 bp, Artificial Sequence
  Oligonucleotide for detection of SNP TSC0014163
tggtatatttgty

SEQ ID NO: 50370 - DNA, 13 bp, Artificial Sequence
  Oligonucleotide for detection of SNP TSC0014163
racaaatatacca

SEQ ID NO: 50371 - DNA, 13 bp, Artificial Sequence
  Oligonucleotide for detection of SNP TSC0014164
gatatttatgatg

SEQ ID NO: 50372 - DNA, 13 bp, Artificial Sequence
  Oligonucleotide for detection of SNP TSC0014164
catcataaatatc

SEQ ID NO: 50373 - DNA, 13 bp, Artificial Sequence
  Oligonucleotide for detection of SNP TSC0014164
gatattgatgatg

SEQ ID NO: 50374 - DNA, 13 bp, Artificial Sequence
  Oligonucleotide for detection of SNP TSC0014164
catcatcaatatc

SEQ ID NO: 50375 - DNA, 13 bp, Artificial Sequence
  Oligonucleotide for detection of SNP TSC0014164
gatatcgatgatg

SEQ ID NO: 50376 - DNA, 13 bp, Artificial Sequence
  Oligonucleotide for detection of SNP TSC0014164
catcatcgatatc

SEQ ID NO: 50377 - DNA, 13 bp, Artificial Sequence
  Oligonucleotide for detection of SNP TSC0014164
tattatgggtgty

SEQ ID NO: 50378 - DNA, 13 bp, Artificial Sequence
  Oligonucleotide for detection of SNP TSC0014164
racacccataata

SEQ ID NO: 50379 - DNA, 13 bp, Artificial Sequence
  Oligonucleotide for detection of SNP TSC0014164
tattattggtgty

SEQ ID NO: 50380 - DNA, 13 bp, Artificial Sequence
  Oligonucleotide for detection of SNP TSC0014164
racaccaataata

SEQ ID NO: 50381 - DNA, 13 bp, Artificial Sequence
  Oligonucleotide for detection of SNP TSC0014164
tattatcggtgty

SEQ ID NO: 50382 - DNA, 13 bp, Artificial Sequence
  Oligonucleotide for detection of SNP TSC0014164
racaccgataata

SEQ ID NO: 50383 - DNA, 13 bp, Artificial Sequence
  Oligonucleotide for detection of SNP TSC0014165
ggagggagaggaa

SEQ ID NO: 50384 - DNA, 13 bp, Artificial Sequence
  Oligonucleotide for detection of SNP TSC0014165
ttcctctccctcc

SEQ ID NO: 50385 - DNA, 13 bp, Artificial Sequence
  Oligonucleotide for detection of SNP TSC0014165
ggagggggaggaa

SEQ ID NO: 50386 - DNA, 13 bp, Artificial Sequence
  Oligonucleotide for detection of SNP TSC0014165
ttcctccccctcc

SEQ ID NO: 50387 - DNA, 13 bp, Artificial Sequence
  Oligonucleotide for detection of SNP TSC0014168
ttttaggtttgty

SEQ ID NO: 50388 - DNA, 13 bp, Artificial Sequence
  Oligonucleotide for detection of SNP TSC0014168
racaaacctaaaa

SEQ ID NO: 50389 - DNA, 13 bp, Artificial Sequence
  Oligonucleotide for detection of SNP TSC0014168
ttttagttttgty

SEQ ID NO: 50390 - DNA, 13 bp, Artificial Sequence
  Oligonucleotide for detection of SNP TSC0014168
racaaaactaaaa

SEQ ID NO: 50391 - DNA, 13 bp, Artificial Sequence
  Oligonucleotide for detection of SNP TSC0014168
gatagatttgagg

SEQ ID NO: 50392 - DNA, 13 bp, Artificial Sequence
  Oligonucleotide for detection of SNP TSC0014168
cctcaaatctatc

SEQ ID NO: 50393 - DNA, 13 bp, Artificial Sequence
  Oligonucleotide for detection of SNP TSC0014168
gatagaattgagg

SEQ ID NO: 50394 - DNA, 13 bp, Artificial Sequence
  Oligonucleotide for detection of SNP TSC0014168
cctcaattctatc

SEQ ID NO: 50395 - DNA, 13 bp, Artificial Sequence
  Oligonucleotide for detection of SNP TSC0014170
tggtagaaagttt

SEQ ID NO: 50396 - DNA, 13 bp, Artificial Sequence
  Oligonucleotide for detection of SNP TSC0014170
aaactttctacca

SEQ ID NO: 50397 - DNA, 13 bp, Artificial Sequence
  Oligonucleotide for detection of SNP TSC0014170
tggtaggaagttt

SEQ ID NO: 50398 - DNA, 13 bp, Artificial Sequence
  Oligonucleotide for detection of SNP TSC0014170
aaacttcctacca

SEQ ID NO: 50399 - DNA, 13 bp, Artificial Sequence
  Oligonucleotide for detection of SNP TSC0014171
tttttgtgagagt

SEQ ID NO: 50400 - DNA, 13 bp, Artificial Sequence
  Oligonucleotide for detection of SNP TSC0014171
actctcacaaaaa

SEQ ID NO: 50401 - DNA, 13 bp, Artificial Sequence
  Oligonucleotide for detection of SNP TSC0014171
tttttgggagagt

SEQ ID NO: 50402 - DNA, 13 bp, Artificial Sequence
  Oligonucleotide for detection of SNP TSC0014171
actctcccaaaaa

SEQ ID NO: 50403 - DNA, 13 bp, Artificial Sequence
  Oligonucleotide for detection of SNP TSC0014171
tttttgcgagagt

SEQ ID NO: 50404 - DNA, 13 bp, Artificial Sequence
  Oligonucleotide for detection of SNP TSC0014171
actctcgcaaaaa

SEQ ID NO: 50405 - DNA, 13 bp, Artificial Sequence
  Oligonucleotide for detection of SNP TSC0014171
atttttgtagagg

SEQ ID NO: 50406 - DNA, 13 bp, Artificial Sequence
  Oligonucleotide for detection of SNP TSC0014171
cctctacaaaaat

SEQ ID NO: 50407 - DNA, 13 bp, Artificial Sequence
  Oligonucleotide for detection of SNP TSC0014171
attttcgtagagg

SEQ ID NO: 50408 - DNA, 13 bp, Artificial Sequence
  Oligonucleotide for detection of SNP TSC0014171
cctctacgaaaat

SEQ ID NO: 50409 - DNA, 13 bp, Artificial Sequence
  Oligonucleotide for detection of SNP TSC0014172
gtaggagttgtgt

SEQ ID NO: 50410 - DNA, 13 bp, Artificial Sequence
  Oligonucleotide for detection of SNP TSC0014172
acacaactcctac

SEQ ID NO: 50411 - DNA, 13 bp, Artificial Sequence
  Oligonucleotide for detection of SNP TSC0014172
gtaggaattgtgt

SEQ ID NO: 50412 - DNA, 13 bp, Artificial Sequence
  Oligonucleotide for detection of SNP TSC0014172
acacaattcctac

SEQ ID NO: 50413 - DNA, 13 bp, Artificial Sequence
  Oligonucleotide for detection of SNP TSC0014174
tgttttatttggt

SEQ ID NO: 50414 - DNA, 13 bp, Artificial Sequence
  Oligonucleotide for detection of SNP TSC0014174
accaaataaaaca

SEQ ID NO: 50415 - DNA, 13 bp, Artificial Sequence
  Oligonucleotide for detection of SNP TSC0014174
tgttttttttggt

SEQ ID NO: 50416 - DNA, 13 bp, Artificial Sequence
  Oligonucleotide for detection of SNP TSC0014174
accaaaaaaaaca

SEQ ID NO: 50417 - DNA, 13 bp, Artificial Sequence
  Oligonucleotide for detection of SNP TSC0014174
tgttttgtttggt

SEQ ID NO: 50418 - DNA, 13 bp, Artificial Sequence
  Oligonucleotide for detection of SNP TSC0014174
accaaacaaaaca

SEQ ID NO: 50419 - DNA, 13 bp, Artificial Sequence
  Oligonucleotide for detection of SNP TSC0014174
tgtttcgtttggt

SEQ ID NO: 50420 - DNA, 13 bp, Artificial Sequence
  Oligonucleotide for detection of SNP TSC0014174
accaaacgaaaca

SEQ ID NO: 50421 - DNA, 13 bp, Artificial Sequence
  Oligonucleotide for detection of SNP TSC0014174
attagatgggata

SEQ ID NO: 50422 - DNA, 13 bp, Artificial Sequence
  Oligonucleotide for detection of SNP TSC0014174
tatcccatctaat

SEQ ID NO: 50423 - DNA, 13 bp, Artificial Sequence
  Oligonucleotide for detection of SNP TSC0014174
attagaggggata

SEQ ID NO: 50424 - DNA, 13 bp, Artificial Sequence
  Oligonucleotide for detection of SNP TSC0014174
tatcccctctaat

SEQ ID NO: 50425 - DNA, 13 bp, Artificial Sequence
  Oligonucleotide for detection of SNP TSC0014174
attagacgggata

SEQ ID NO: 50426 - DNA, 13 bp, Artificial Sequence
  Oligonucleotide for detection of SNP TSC0014174
tatcccgtctaat

SEQ ID NO: 50427 - DNA, 13 bp, Artificial Sequence
  Oligonucleotide for detection of SNP TSC0014175
taaggtatagtat

SEQ ID NO: 50428 - DNA, 13 bp, Artificial Sequence
  Oligonucleotide for detection of SNP TSC0014175
atactatacctta

SEQ ID NO: 50429 - DNA, 13 bp, Artificial Sequence
  Oligonucleotide for detection of SNP TSC0014175
taaggtgtagtat

SEQ ID NO: 50430 - DNA, 13 bp, Artificial Sequence
  Oligonucleotide for detection of SNP TSC0014175
atactacacctta

SEQ ID NO: 50431 - DNA, 13 bp, Artificial Sequence
  Oligonucleotide for detection of SNP TSC0014175
taaggcgtagtat

SEQ ID NO: 50432 - DNA, 13 bp, Artificial Sequence
  Oligonucleotide for detection of SNP TSC0014175
atactacgcctta

SEQ ID NO: 50433 - DNA, 13 bp, Artificial Sequence
  Oligonucleotide for detection of SNP TSC0014175
atattgtgttttg

SEQ ID NO: 50434 - DNA, 13 bp, Artificial Sequence
  Oligonucleotide for detection of SNP TSC0014175
caaaacacaatat

SEQ ID NO: 50435 - DNA, 13 bp, Artificial Sequence
  Oligonucleotide for detection of SNP TSC0014175
atattgcgttttg

SEQ ID NO: 50436 - DNA, 13 bp, Artificial Sequence
  Oligonucleotide for detection of SNP TSC0014175
caaaacgcaatat

SEQ ID NO: 50437 - DNA, 13 bp, Artificial Sequence
  Oligonucleotide for detection of SNP TSC0014176
gtgtttagttttg

SEQ ID NO: 50438 - DNA, 13 bp, Artificial Sequence
  Oligonucleotide for detection of SNP TSC0014176
caaaactaaacac

SEQ ID NO: 50439 - DNA, 13 bp, Artificial Sequence
  Oligonucleotide for detection of SNP TSC0014176
gtgttttgttttg

SEQ ID NO: 50440 - DNA, 13 bp, Artificial Sequence
  Oligonucleotide for detection of SNP TSC0014176
caaaacaaaacac

SEQ ID NO: 50441 - DNA, 13 bp, Artificial Sequence
  Oligonucleotide for detection of SNP TSC0014176
tagggttgagtay

SEQ ID NO: 50442 - DNA, 13 bp, Artificial Sequence
  Oligonucleotide for detection of SNP TSC0014176
rtactcaacccta

SEQ ID NO: 50443 - DNA, 13 bp, Artificial Sequence
  Oligonucleotide for detection of SNP TSC0014176
tagggtagagtay

SEQ ID NO: 50444 - DNA, 13 bp, Artificial Sequence
  Oligonucleotide for detection of SNP TSC0014176
rtactctacccta

SEQ ID NO: 50445 - DNA, 13 bp, Artificial Sequence
  Oligonucleotide for detection of SNP TSC0014178
tttagggtataaa

SEQ ID NO: 50446 - DNA, 13 bp, Artificial Sequence
  Oligonucleotide for detection of SNP TSC0014178
tttataccctaaa

SEQ ID NO: 50447 - DNA, 13 bp, Artificial Sequence
  Oligonucleotide for detection of SNP TSC0014178
tttaggatataaa

SEQ ID NO: 50448 - DNA, 13 bp, Artificial Sequence
  Oligonucleotide for detection of SNP TSC0014178
tttatatcctaaa

SEQ ID NO: 50449 - DNA, 13 bp, Artificial Sequence
  Oligonucleotide for detection of SNP TSC0014179
aaggtaatagagy

SEQ ID NO: 50450 - DNA, 13 bp, Artificial Sequence
  Oligonucleotide for detection of SNP TSC0014179
rctctattacctt

SEQ ID NO: 50451 - DNA, 13 bp, Artificial Sequence
  Oligonucleotide for detection of SNP TSC0014179
aaggtagtagagy

SEQ ID NO: 50452 - DNA, 13 bp, Artificial Sequence
  Oligonucleotide for detection of SNP TSC0014179
rctctactacctt

SEQ ID NO: 50453 - DNA, 13 bp, Artificial Sequence
  Oligonucleotide for detection of SNP TSC0014180
tgggtggggtggy

SEQ ID NO: 50454 - DNA, 13 bp, Artificial Sequence
  Oligonucleotide for detection of SNP TSC0014180
rccaccccaccca

SEQ ID NO: 50455 - DNA, 13 bp, Artificial Sequence
  Oligonucleotide for detection of SNP TSC0014180
tgggtgtggtggy

SEQ ID NO: 50456 - DNA, 13 bp, Artificial Sequence
  Oligonucleotide for detection of SNP TSC0014180
rccaccacaccca

SEQ ID NO: 50457 - DNA, 13 bp, Artificial Sequence
  Oligonucleotide for detection of SNP TSC0014180
cgggtggggtggy

SEQ ID NO: 50458 - DNA, 13 bp, Artificial Sequence
  Oligonucleotide for detection of SNP TSC0014180
rccaccccacccg

SEQ ID NO: 50459 - DNA, 13 bp, Artificial Sequence
  Oligonucleotide for detection of SNP TSC0014180
cgggtgtggtggy

SEQ ID NO: 50460 - DNA, 13 bp, Artificial Sequence
  Oligonucleotide for detection of SNP TSC0014180
rccaccacacccg

SEQ ID NO: 50461 - DNA, 13 bp, Artificial Sequence
  Oligonucleotide for detection of SNP TSC0014180
gttattttatttg

SEQ ID NO: 50462 - DNA, 13 bp, Artificial Sequence
  Oligonucleotide for detection of SNP TSC0014180
caaataaaataac

SEQ ID NO: 50463 - DNA, 13 bp, Artificial Sequence
  Oligonucleotide for detection of SNP TSC0014180
gttattttattcg

SEQ ID NO: 50464 - DNA, 13 bp, Artificial Sequence
  Oligonucleotide for detection of SNP TSC0014180
cgaataaaataac

SEQ ID NO: 50465 - DNA, 13 bp, Artificial Sequence
  Oligonucleotide for detection of SNP TSC0014180
gttattatattcg

SEQ ID NO: 50466 - DNA, 13 bp, Artificial Sequence
  Oligonucleotide for detection of SNP TSC0014180
cgaatataataac

SEQ ID NO: 50467 - DNA, 13 bp, Artificial Sequence
  Oligonucleotide for detection of SNP TSC0014181
gatgatgtaatta

SEQ ID NO: 50468 - DNA, 13 bp, Artificial Sequence
  Oligonucleotide for detection of SNP TSC0014181
taattacatcatc

SEQ ID NO: 50469 - DNA, 13 bp, Artificial Sequence
  Oligonucleotide for detection of SNP TSC0014181
gatgatataatta

SEQ ID NO: 50470 - DNA, 13 bp, Artificial Sequence
  Oligonucleotide for detection of SNP TSC0014181
taattatatcatc

SEQ ID NO: 50471 - DNA, 13 bp, Artificial Sequence
  Oligonucleotide for detection of SNP TSC0014182
tttatataggtag

SEQ ID NO: 50472 - DNA, 13 bp, Artificial Sequence
  Oligonucleotide for detection of SNP TSC0014182
ctacctatataaa

SEQ ID NO: 50473 - DNA, 13 bp, Artificial Sequence
  Oligonucleotide for detection of SNP TSC0014182
tttatagaggtag

SEQ ID NO: 50474 - DNA, 13 bp, Artificial Sequence
  Oligonucleotide for detection of SNP TSC0014182
ctacctctataaa

SEQ ID NO: 50475 - DNA, 13 bp, Artificial Sequence
  Oligonucleotide for detection of SNP TSC0014182
ttgtttgtgtggg

SEQ ID NO: 50476 - DNA, 13 bp, Artificial Sequence
  Oligonucleotide for detection of SNP TSC0014182
cccacacaaacaa

SEQ ID NO: 50477 - DNA, 13 bp, Artificial Sequence
  Oligonucleotide for detection of SNP TSC0014182
ttgtttttgtggg

SEQ ID NO: 50478 - DNA, 13 bp, Artificial Sequence
  Oligonucleotide for detection of SNP TSC0014182
cccacaaaaacaa

SEQ ID NO: 50479 - DNA, 13 bp, Artificial Sequence
  Oligonucleotide for detection of SNP TSC0014184
aggtttagttatt

SEQ ID NO: 50480 - DNA, 13 bp, Artificial Sequence
  Oligonucleotide for detection of SNP TSC0014184
aataactaaacct

SEQ ID NO: 50481 - DNA, 13 bp, Artificial Sequence
  Oligonucleotide for detection of SNP TSC0014184
aggtttggttatt

SEQ ID NO: 50482 - DNA, 13 bp, Artificial Sequence
  Oligonucleotide for detection of SNP TSC0014184
aataaccaaacct

SEQ ID NO: 50483 - DNA, 13 bp, Artificial Sequence
  Oligonucleotide for detection of SNP TSC0014184
aggttcggttatt

SEQ ID NO: 50484 - DNA, 13 bp, Artificial Sequence
  Oligonucleotide for detection of SNP TSC0014184
aataaccgaacct

SEQ ID NO: 50485 - DNA, 13 bp, Artificial Sequence
  Oligonucleotide for detection of SNP TSC0014184
aatagttgggttt

SEQ ID NO: 50486 - DNA, 13 bp, Artificial Sequence
  Oligonucleotide for detection of SNP TSC0014184
aaacccaactatt

SEQ ID NO: 50487 - DNA, 13 bp, Artificial Sequence
  Oligonucleotide for detection of SNP TSC0014184
aatagtcgggttt

SEQ ID NO: 50488 - DNA, 13 bp, Artificial Sequence
  Oligonucleotide for detection of SNP TSC0014184
aaacccgactatt

SEQ ID NO: 50489 - DNA, 13 bp, Artificial Sequence
  Oligonucleotide for detection of SNP TSC0014185
aaataggtgtata

SEQ ID NO: 50490 - DNA, 13 bp, Artificial Sequence
  Oligonucleotide for detection of SNP TSC0014185
tatacacctattt

SEQ ID NO: 50491 - DNA, 13 bp, Artificial Sequence
  Oligonucleotide for detection of SNP TSC0014185
aaatagatgtata

SEQ ID NO: 50492 - DNA, 13 bp, Artificial Sequence
  Oligonucleotide for detection of SNP TSC0014185
tatacatctattt

SEQ ID NO: 50493 - DNA, 13 bp, Artificial Sequence
  Oligonucleotide for detection of SNP TSC0014186
gtaaggtgagtaa

SEQ ID NO: 50494 - DNA, 13 bp, Artificial Sequence
  Oligonucleotide for detection of SNP TSC0014186
ttactcaccttac

SEQ ID NO: 50495 - DNA, 13 bp, Artificial Sequence
  Oligonucleotide for detection of SNP TSC0014186
gtaaggcgagtaa

SEQ ID NO: 50496 - DNA, 13 bp, Artificial Sequence
  Oligonucleotide for detection of SNP TSC0014186
ttactcgccttac

SEQ ID NO: 50497 - DNA, 13 bp, Artificial Sequence
  Oligonucleotide for detection of SNP TSC0014187
ttgtatatatttt

SEQ ID NO: 50498 - DNA, 13 bp, Artificial Sequence
  Oligonucleotide for detection of SNP TSC0014187
aaaatatatacaa

SEQ ID NO: 50499 - DNA, 13 bp, Artificial Sequence
  Oligonucleotide for detection of SNP TSC0014187
ttgtatgtatttt

SEQ ID NO: 50500 - DNA, 13 bp, Artificial Sequence
  Oligonucleotide for detection of SNP TSC0014187
aaaatacatacaa

SEQ ID NO: 50501 - DNA, 13 bp, Artificial Sequence
  Oligonucleotide for detection of SNP TSC0014187
tcgtatatatttt

SEQ ID NO: 50502 - DNA, 13 bp, Artificial Sequence
  Oligonucleotide for detection of SNP TSC0014187
aaaatatatacga

SEQ ID NO: 50503 - DNA, 13 bp, Artificial Sequence
  Oligonucleotide for detection of SNP TSC0014187
tcgtatgtatttt

SEQ ID NO: 50504 - DNA, 13 bp, Artificial Sequence
  Oligonucleotide for detection of SNP TSC0014187
aaaatacatacga

SEQ ID NO: 50505 - DNA, 13 bp, Artificial Sequence
  Oligonucleotide for detection of SNP TSC0014187
ttgtacgtatttt

SEQ ID NO: 50506 - DNA, 13 bp, Artificial Sequence
  Oligonucleotide for detection of SNP TSC0014187
aaaatacgtacaa

SEQ ID NO: 50507 - DNA, 13 bp, Artificial Sequence
  Oligonucleotide for detection of SNP TSC0014187
tcgtacgtatttt

SEQ ID NO: 50508 - DNA, 13 bp, Artificial Sequence
  Oligonucleotide for detection of SNP TSC0014187
aaaatacgtacga

SEQ ID NO: 50509 - DNA, 13 bp, Artificial Sequence
  Oligonucleotide for detection of SNP TSC0014187
agggtatgtgtgg

SEQ ID NO: 50510 - DNA, 13 bp, Artificial Sequence
  Oligonucleotide for detection of SNP TSC0014187
ccacacataccct

SEQ ID NO: 50511 - DNA, 13 bp, Artificial Sequence
  Oligonucleotide for detection of SNP TSC0014187
agggtatgtgcgg

SEQ ID NO: 50512 - DNA, 13 bp, Artificial Sequence
  Oligonucleotide for detection of SNP TSC0014187
ccgcacataccct

SEQ ID NO: 50513 - DNA, 13 bp, Artificial Sequence
  Oligonucleotide for detection of SNP TSC0014187
agggtacgtgtgg

SEQ ID NO: 50514 - DNA, 13 bp, Artificial Sequence
  Oligonucleotide for detection of SNP TSC0014187
ccacacgtaccct

SEQ ID NO: 50515 - DNA, 13 bp, Artificial Sequence
  Oligonucleotide for detection of SNP TSC0014187
agggtacgtgcgg

SEQ ID NO: 50516 - DNA, 13 bp, Artificial Sequence
  Oligonucleotide for detection of SNP TSC0014187
ccgcacgtaccct

SEQ ID NO: 50517 - DNA, 13 bp, Artificial Sequence
  Oligonucleotide for detection of SNP TSC0014188
agaaaagttgggg

SEQ ID NO: 50518 - DNA, 13 bp, Artificial Sequence
  Oligonucleotide for detection of SNP TSC0014188
ccccaacttttct

SEQ ID NO: 50519 - DNA, 13 bp, Artificial Sequence
  Oligonucleotide for detection of SNP TSC0014188
agaaaatttgggg

SEQ ID NO: 50520 - DNA, 13 bp, Artificial Sequence
  Oligonucleotide for detection of SNP TSC0014188
ccccaaattttct

SEQ ID NO: 50521 - DNA, 13 bp, Artificial Sequence
  Oligonucleotide for detection of SNP TSC0014189
gtaaagtggggay

SEQ ID NO: 50522 - DNA, 13 bp, Artificial Sequence
  Oligonucleotide for detection of SNP TSC0014189
rtccccactttac

SEQ ID NO: 50523 - DNA, 13 bp, Artificial Sequence
  Oligonucleotide for detection of SNP TSC0014189
gtaaaggggggay

SEQ ID NO: 50524 - DNA, 13 bp, Artificial Sequence
  Oligonucleotide for detection of SNP TSC0014189
rtcccccctttac

SEQ ID NO: 50525 - DNA, 13 bp, Artificial Sequence
  Oligonucleotide for detection of SNP TSC0014189
gtaaagcggggay

SEQ ID NO: 50526 - DNA, 13 bp, Artificial Sequence
  Oligonucleotide for detection of SNP TSC0014189
rtccccgctttac

SEQ ID NO: 50527 - DNA, 13 bp, Artificial Sequence
  Oligonucleotide for detection of SNP TSC0014189
gtttttgttttgy

SEQ ID NO: 50528 - DNA, 13 bp, Artificial Sequence
  Oligonucleotide for detection of SNP TSC0014189
rcaaaacaaaaac

SEQ ID NO: 50529 - DNA, 13 bp, Artificial Sequence
  Oligonucleotide for detection of SNP TSC0014189
gttttttttttgy

SEQ ID NO: 50530 - DNA, 13 bp, Artificial Sequence
  Oligonucleotide for detection of SNP TSC0014189
rcaaaaaaaaaac

SEQ ID NO: 50531 - DNA, 13 bp, Artificial Sequence
  Oligonucleotide for detection of SNP TSC0014189
gttttcgttttgy

SEQ ID NO: 50532 - DNA, 13 bp, Artificial Sequence
  Oligonucleotide for detection of SNP TSC0014189
rcaaaacgaaaac

SEQ ID NO: 50533 - DNA, 13 bp, Artificial Sequence
  Oligonucleotide for detection of SNP TSC0014190
aagtaaaattttg

SEQ ID NO: 50534 - DNA, 13 bp, Artificial Sequence
  Oligonucleotide for detection of SNP TSC0014190
caaaattttactt

SEQ ID NO: 50535 - DNA, 13 bp, Artificial Sequence
  Oligonucleotide for detection of SNP TSC0014190
aagtaagattttg

SEQ ID NO: 50536 - DNA, 13 bp, Artificial Sequence
  Oligonucleotide for detection of SNP TSC0014190
caaaatcttactt

SEQ ID NO: 50537 - DNA, 13 bp, Artificial Sequence
  Oligonucleotide for detection of SNP TSC0014192
ataggtagagtgg

SEQ ID NO: 50538 - DNA, 13 bp, Artificial Sequence
  Oligonucleotide for detection of SNP TSC0014192
ccactctacctat

SEQ ID NO: 50539 - DNA, 13 bp, Artificial Sequence
  Oligonucleotide for detection of SNP TSC0014192
ataggtggagtgg

SEQ ID NO: 50540 - DNA, 13 bp, Artificial Sequence
  Oligonucleotide for detection of SNP TSC0014192
ccactccacctat

SEQ ID NO: 50541 - DNA, 13 bp, Artificial Sequence
  Oligonucleotide for detection of SNP TSC0014192
ataggcggagtgg

SEQ ID NO: 50542 - DNA, 13 bp, Artificial Sequence
  Oligonucleotide for detection of SNP TSC0014192
ccactccgcctat

SEQ ID NO: 50543 - DNA, 13 bp, Artificial Sequence
  Oligonucleotide for detection of SNP TSC0014192
ttattttgtttgt

SEQ ID NO: 50544 - DNA, 13 bp, Artificial Sequence
  Oligonucleotide for detection of SNP TSC0014192
acaaacaaaataa

SEQ ID NO: 50545 - DNA, 13 bp, Artificial Sequence
  Oligonucleotide for detection of SNP TSC0014192
ttatttcgtttgt

SEQ ID NO: 50546 - DNA, 13 bp, Artificial Sequence
  Oligonucleotide for detection of SNP TSC0014192
acaaacgaaataa

SEQ ID NO: 50547 - DNA, 13 bp, Artificial Sequence
  Oligonucleotide for detection of SNP TSC0014193
attttgtttttta

SEQ ID NO: 50548 - DNA, 13 bp, Artificial Sequence
  Oligonucleotide for detection of SNP TSC0014193
taaaaaacaaaat

SEQ ID NO: 50549 - DNA, 13 bp, Artificial Sequence
  Oligonucleotide for detection of SNP TSC0014193
attttggttttta

SEQ ID NO: 50550 - DNA, 13 bp, Artificial Sequence
  Oligonucleotide for detection of SNP TSC0014193
taaaaaccaaaat

SEQ ID NO: 50551 - DNA, 13 bp, Artificial Sequence
  Oligonucleotide for detection of SNP TSC0014193
taagaagtagggt

SEQ ID NO: 50552 - DNA, 13 bp, Artificial Sequence
  Oligonucleotide for detection of SNP TSC0014193
accctacttctta

SEQ ID NO: 50553 - DNA, 13 bp, Artificial Sequence
  Oligonucleotide for detection of SNP TSC0014193
taagaattagggt

SEQ ID NO: 50554 - DNA, 13 bp, Artificial Sequence
  Oligonucleotide for detection of SNP TSC0014193
accctaattctta

SEQ ID NO: 50555 - DNA, 13 bp, Artificial Sequence
  Oligonucleotide for detection of SNP TSC0014197
gtttttaggatgy

SEQ ID NO: 50556 - DNA, 13 bp, Artificial Sequence
  Oligonucleotide for detection of SNP TSC0014197
rcatcctaaaaac

SEQ ID NO: 50557 - DNA, 13 bp, Artificial Sequence
  Oligonucleotide for detection of SNP TSC0014197
gtttttgggatgy

SEQ ID NO: 50558 - DNA, 13 bp, Artificial Sequence
  Oligonucleotide for detection of SNP TSC0014197
rcatcccaaaaac

SEQ ID NO: 50559 - DNA, 13 bp, Artificial Sequence
  Oligonucleotide for detection of SNP TSC0014197
gtttttaggacgy

SEQ ID NO: 50560 - DNA, 13 bp, Artificial Sequence
  Oligonucleotide for detection of SNP TSC0014197
rcgtcctaaaaac

SEQ ID NO: 50561 - DNA, 13 bp, Artificial Sequence
  Oligonucleotide for detection of SNP TSC0014197
gttttcgggatgy

SEQ ID NO: 50562 - DNA, 13 bp, Artificial Sequence
  Oligonucleotide for detection of SNP TSC0014197
rcatcccgaaaac

SEQ ID NO: 50563 - DNA, 13 bp, Artificial Sequence
  Oligonucleotide for detection of SNP TSC0014197
gtttttgggacgy

SEQ ID NO: 50564 - DNA, 13 bp, Artificial Sequence
  Oligonucleotide for detection of SNP TSC0014197
rcgtcccaaaaac

SEQ ID NO: 50565 - DNA, 13 bp, Artificial Sequence
  Oligonucleotide for detection of SNP TSC0014197
gttttcgggacgy

SEQ ID NO: 50566 - DNA, 13 bp, Artificial Sequence
  Oligonucleotide for detection of SNP TSC0014197
rcgtcccgaaaac

SEQ ID NO: 50567 - DNA, 13 bp, Artificial Sequence
  Oligonucleotide for detection of SNP TSC0014197
gtgttttgggagy

SEQ ID NO: 50568 - DNA, 13 bp, Artificial Sequence
  Oligonucleotide for detection of SNP TSC0014197
rctcccaaaacac

SEQ ID NO: 50569 - DNA, 13 bp, Artificial Sequence
  Oligonucleotide for detection of SNP TSC0014197
gcgttttgggagy

SEQ ID NO: 50570 - DNA, 13 bp, Artificial Sequence
  Oligonucleotide for detection of SNP TSC0014197
rctcccaaaacgc

SEQ ID NO: 50571 - DNA, 13 bp, Artificial Sequence
  Oligonucleotide for detection of SNP TSC0014197
gtgtttcgggagy

SEQ ID NO: 50572 - DNA, 13 bp, Artificial Sequence
  Oligonucleotide for detection of SNP TSC0014197
rctcccgaaacac

SEQ ID NO: 50573 - DNA, 13 bp, Artificial Sequence
  Oligonucleotide for detection of SNP TSC0014197
gcgtttcgggagy

SEQ ID NO: 50574 - DNA, 13 bp, Artificial Sequence
  Oligonucleotide for detection of SNP TSC0014197
rctcccgaaacgc

SEQ ID NO: 50575 - DNA, 13 bp, Artificial Sequence
  Oligonucleotide for detection of SNP TSC0014198
ttttgttgttatt

SEQ ID NO: 50576 - DNA, 13 bp, Artificial Sequence
  Oligonucleotide for detection of SNP TSC0014198
aataacaacaaaa

SEQ ID NO: 50577 - DNA, 13 bp, Artificial Sequence
  Oligonucleotide for detection of SNP TSC0014198
ttttgtcgttatt

SEQ ID NO: 50578 - DNA, 13 bp, Artificial Sequence
  Oligonucleotide for detection of SNP TSC0014198
aataacgacaaaa

SEQ ID NO: 50579 - DNA, 13 bp, Artificial Sequence
  Oligonucleotide for detection of SNP TSC0014198
aatggtgatagga

SEQ ID NO: 50580 - DNA, 13 bp, Artificial Sequence
  Oligonucleotide for detection of SNP TSC0014198
tcctatcaccatt

SEQ ID NO: 50581 - DNA, 13 bp, Artificial Sequence
  Oligonucleotide for detection of SNP TSC0014198
aatggtaatagga

SEQ ID NO: 50582 - DNA, 13 bp, Artificial Sequence
  Oligonucleotide for detection of SNP TSC0014198
tcctattaccatt

SEQ ID NO: 50583 - DNA, 13 bp, Artificial Sequence
  Oligonucleotide for detection of SNP TSC0014198
aatggcgatagga

SEQ ID NO: 50584 - DNA, 13 bp, Artificial Sequence
  Oligonucleotide for detection of SNP TSC0014198
tcctatcgccatt

SEQ ID NO: 50585 - DNA, 13 bp, Artificial Sequence
  Oligonucleotide for detection of SNP TSC0014200
ggggatggggtgt

SEQ ID NO: 50586 - DNA, 13 bp, Artificial Sequence
  Oligonucleotide for detection of SNP TSC0014200
acaccccatcccc

SEQ ID NO: 50587 - DNA, 13 bp, Artificial Sequence
  Oligonucleotide for detection of SNP TSC0014200
ggggatagggtgt

SEQ ID NO: 50588 - DNA, 13 bp, Artificial Sequence
  Oligonucleotide for detection of SNP TSC0014200
acaccctatcccc

SEQ ID NO: 50589 - DNA, 13 bp, Artificial Sequence
  Oligonucleotide for detection of SNP TSC0014201
tgttagaaatagt

SEQ ID NO: 50590 - DNA, 13 bp, Artificial Sequence
  Oligonucleotide for detection of SNP TSC0014201
actatttctaaca

SEQ ID NO: 50591 - DNA, 13 bp, Artificial Sequence
  Oligonucleotide for detection of SNP TSC0014201
tgttaggaatagt

SEQ ID NO: 50592 - DNA, 13 bp, Artificial Sequence
  Oligonucleotide for detection of SNP TSC0014201
actattcctaaca

SEQ ID NO: 50593 - DNA, 13 bp, Artificial Sequence
  Oligonucleotide for detection of SNP TSC0014203
tttaagagttata

SEQ ID NO: 50594 - DNA, 13 bp, Artificial Sequence
  Oligonucleotide for detection of SNP TSC0014203
tataactcttaaa

SEQ ID NO: 50595 - DNA, 13 bp, Artificial Sequence
  Oligonucleotide for detection of SNP TSC0014203
tttaagtgttata

SEQ ID NO: 50596 - DNA, 13 bp, Artificial Sequence
  Oligonucleotide for detection of SNP TSC0014203
tataacacttaaa

SEQ ID NO: 50597 - DNA, 13 bp, Artificial Sequence
  Oligonucleotide for detection of SNP TSC0014203
tttaagcgttata

SEQ ID NO: 50598 - DNA, 13 bp, Artificial Sequence
  Oligonucleotide for detection of SNP TSC0014203
tataacgcttaaa

SEQ ID NO: 50599 - DNA, 13 bp, Artificial Sequence
  Oligonucleotide for detection of SNP TSC0014203
tatagtttttgag

SEQ ID NO: 50600 - DNA, 13 bp, Artificial Sequence
  Oligonucleotide for detection of SNP TSC0014203
ctcaaaaactata

SEQ ID NO: 50601 - DNA, 13 bp, Artificial Sequence
  Oligonucleotide for detection of SNP TSC0014203
tatagtgtttgag

SEQ ID NO: 50602 - DNA, 13 bp, Artificial Sequence
  Oligonucleotide for detection of SNP TSC0014203
ctcaaacactata

SEQ ID NO: 50603 - DNA, 13 bp, Artificial Sequence
  Oligonucleotide for detection of SNP TSC0014203
tatagcgtttgag

SEQ ID NO: 50604 - DNA, 13 bp, Artificial Sequence
  Oligonucleotide for detection of SNP TSC0014203
ctcaaacgctata

SEQ ID NO: 50605 - DNA, 13 bp, Artificial Sequence
  Oligonucleotide for detection of SNP TSC0014204
gattttggtgttt

SEQ ID NO: 50606 - DNA, 13 bp, Artificial Sequence
  Oligonucleotide for detection of SNP TSC0014204
aaacaccaaaatc

SEQ ID NO: 50607 - DNA, 13 bp, Artificial Sequence
  Oligonucleotide for detection of SNP TSC0014204
gattttagtgttt

SEQ ID NO: 50608 - DNA, 13 bp, Artificial Sequence
  Oligonucleotide for detection of SNP TSC0014204
aaacactaaaatc

SEQ ID NO: 50609 - DNA, 13 bp, Artificial Sequence
  Oligonucleotide for detection of SNP TSC0014205
gttgggatttgta

SEQ ID NO: 50610 - DNA, 13 bp, Artificial Sequence
  Oligonucleotide for detection of SNP TSC0014205
tacaaatcccaac

SEQ ID NO: 50611 - DNA, 13 bp, Artificial Sequence
  Oligonucleotide for detection of SNP TSC0014205
gttggggtttgta

SEQ ID NO: 50612 - DNA, 13 bp, Artificial Sequence
  Oligonucleotide for detection of SNP TSC0014205
tacaaaccccaac

SEQ ID NO: 50613 - DNA, 13 bp, Artificial Sequence
  Oligonucleotide for detection of SNP TSC0014205
gtcgggatttgta

SEQ ID NO: 50614 - DNA, 13 bp, Artificial Sequence
  Oligonucleotide for detection of SNP TSC0014205
tacaaatcccgac

SEQ ID NO: 50615 - DNA, 13 bp, Artificial Sequence
  Oligonucleotide for detection of SNP TSC0014205
gtcggggtttgta

SEQ ID NO: 50616 - DNA, 13 bp, Artificial Sequence
  Oligonucleotide for detection of SNP TSC0014205
tacaaaccccgac

SEQ ID NO: 50617 - DNA, 13 bp, Artificial Sequence
  Oligonucleotide for detection of SNP TSC0014206
aaaaatattttag

SEQ ID NO: 50618 - DNA, 13 bp, Artificial Sequence
  Oligonucleotide for detection of SNP TSC0014206
ctaaaatattttt

SEQ ID NO: 50619 - DNA, 13 bp, Artificial Sequence
  Oligonucleotide for detection of SNP TSC0014206
aaaaatgttttag

SEQ ID NO: 50620 - DNA, 13 bp, Artificial Sequence
  Oligonucleotide for detection of SNP TSC0014206
ctaaaacattttt

SEQ ID NO: 50621 - DNA, 13 bp, Artificial Sequence
  Oligonucleotide for detection of SNP TSC0014206
aaaaacgttttag

SEQ ID NO: 50622 - DNA, 13 bp, Artificial Sequence
  Oligonucleotide for detection of SNP TSC0014206
ctaaaacgttttt

SEQ ID NO: 50623 - DNA, 13 bp, Artificial Sequence
  Oligonucleotide for detection of SNP TSC0014206
ttgaagtgttttt

SEQ ID NO: 50624 - DNA, 13 bp, Artificial Sequence
  Oligonucleotide for detection of SNP TSC0014206
aaaaacacttcaa

SEQ ID NO: 50625 - DNA, 13 bp, Artificial Sequence
  Oligonucleotide for detection of SNP TSC0014206
ttgaagcgttttt

SEQ ID NO: 50626 - DNA, 13 bp, Artificial Sequence
  Oligonucleotide for detection of SNP TSC0014206
aaaaacgcttcaa

SEQ ID NO: 50627 - DNA, 13 bp, Artificial Sequence
  Oligonucleotide for detection of SNP TSC0014207
ttaaatgttaaga

SEQ ID NO: 50628 - DNA, 13 bp, Artificial Sequence
  Oligonucleotide for detection of SNP TSC0014207
tcttaacatttaa

SEQ ID NO: 50629 - DNA, 13 bp, Artificial Sequence
  Oligonucleotide for detection of SNP TSC0014207
ttaaattttaaga

SEQ ID NO: 50630 - DNA, 13 bp, Artificial Sequence
  Oligonucleotide for detection of SNP TSC0014207
tcttaaaatttaa

SEQ ID NO: 50631 - DNA, 13 bp, Artificial Sequence
  Oligonucleotide for detection of SNP TSC0014207
ttaaacgttaaga

SEQ ID NO: 50632 - DNA, 13 bp, Artificial Sequence
  Oligonucleotide for detection of SNP TSC0014207
tcttaacgtttaa

SEQ ID NO: 50633 - DNA, 13 bp, Artificial Sequence
  Oligonucleotide for detection of SNP TSC0014207
ttttgatgtttaa

SEQ ID NO: 50634 - DNA, 13 bp, Artificial Sequence
  Oligonucleotide for detection of SNP TSC0014207
ttaaacatcaaaa

SEQ ID NO: 50635 - DNA, 13 bp, Artificial Sequence
  Oligonucleotide for detection of SNP TSC0014207
ttttgaagtttaa

SEQ ID NO: 50636 - DNA, 13 bp, Artificial Sequence
  Oligonucleotide for detection of SNP TSC0014207
ttaaacttcaaaa

SEQ ID NO: 50637 - DNA, 13 bp, Artificial Sequence
  Oligonucleotide for detection of SNP TSC0014207
ttttgacgtttaa

SEQ ID NO: 50638 - DNA, 13 bp, Artificial Sequence
  Oligonucleotide for detection of SNP TSC0014207
ttaaacgtcaaaa

SEQ ID NO: 50639 - DNA, 13 bp, Artificial Sequence
  Oligonucleotide for detection of SNP TSC0014208
aagaaatgttatt

SEQ ID NO: 50640 - DNA, 13 bp, Artificial Sequence
  Oligonucleotide for detection of SNP TSC0014208
aataacatttctt

SEQ ID NO: 50641 - DNA, 13 bp, Artificial Sequence
  Oligonucleotide for detection of SNP TSC0014208
aagaaacgttatt

SEQ ID NO: 50642 - DNA, 13 bp, Artificial Sequence
  Oligonucleotide for detection of SNP TSC0014208
aataacgtttctt

SEQ ID NO: 50643 - DNA, 13 bp, Artificial Sequence
  Oligonucleotide for detection of SNP TSC0014208
aataatgtttttt

SEQ ID NO: 50644 - DNA, 13 bp, Artificial Sequence
  Oligonucleotide for detection of SNP TSC0014208
aaaaaacattatt

SEQ ID NO: 50645 - DNA, 13 bp, Artificial Sequence
  Oligonucleotide for detection of SNP TSC0014208
aataatatttttt

SEQ ID NO: 50646 - DNA, 13 bp, Artificial Sequence
  Oligonucleotide for detection of SNP TSC0014208
aaaaaatattatt

SEQ ID NO: 50647 - DNA, 13 bp, Artificial Sequence
  Oligonucleotide for detection of SNP TSC0014208
aataacgtttttt

SEQ ID NO: 50648 - DNA, 13 bp, Artificial Sequence
  Oligonucleotide for detection of SNP TSC0014208
aaaaaacgttatt

SEQ ID NO: 50649 - DNA, 13 bp, Artificial Sequence
  Oligonucleotide for detection of SNP TSC0014210
ttatttgaggtta

SEQ ID NO: 50650 - DNA, 13 bp, Artificial Sequence
  Oligonucleotide for detection of SNP TSC0014210
taacctcaaataa

SEQ ID NO: 50651 - DNA, 13 bp, Artificial Sequence
  Oligonucleotide for detection of SNP TSC0014210
ttattttaggtta

SEQ ID NO: 50652 - DNA, 13 bp, Artificial Sequence
  Oligonucleotide for detection of SNP TSC0014210
taacctaaaataa

SEQ ID NO: 50653 - DNA, 13 bp, Artificial Sequence
  Oligonucleotide for detection of SNP TSC0014210
tgattttaagtga

SEQ ID NO: 50654 - DNA, 13 bp, Artificial Sequence
  Oligonucleotide for detection of SNP TSC0014210
tcacttaaaatca

SEQ ID NO: 50655 - DNA, 13 bp, Artificial Sequence
  Oligonucleotide for detection of SNP TSC0014210
tgatttaaagtga

SEQ ID NO: 50656 - DNA, 13 bp, Artificial Sequence
  Oligonucleotide for detection of SNP TSC0014210
tcactttaaatca

SEQ ID NO: 50657 - DNA, 13 bp, Artificial Sequence
  Oligonucleotide for detection of SNP TSC0014211
aagaatgtataaa

SEQ ID NO: 50658 - DNA, 13 bp, Artificial Sequence
  Oligonucleotide for detection of SNP TSC0014211
tttatacattctt

SEQ ID NO: 50659 - DNA, 13 bp, Artificial Sequence
  Oligonucleotide for detection of SNP TSC0014211
aagaatttataaa

SEQ ID NO: 50660 - DNA, 13 bp, Artificial Sequence
  Oligonucleotide for detection of SNP TSC0014211
tttataaattctt

SEQ ID NO: 50661 - DNA, 13 bp, Artificial Sequence
  Oligonucleotide for detection of SNP TSC0014211
tttataaattttt

SEQ ID NO: 50662 - DNA, 13 bp, Artificial Sequence
  Oligonucleotide for detection of SNP TSC0014211
aaaaatttataaa

SEQ ID NO: 50663 - DNA, 13 bp, Artificial Sequence
  Oligonucleotide for detection of SNP TSC0014212
tattaaaattgtt

SEQ ID NO: 50664 - DNA, 13 bp, Artificial Sequence
  Oligonucleotide for detection of SNP TSC0014212
aacaattttaata

SEQ ID NO: 50665 - DNA, 13 bp, Artificial Sequence
  Oligonucleotide for detection of SNP TSC0014212
tattaatattgtt

SEQ ID NO: 50666 - DNA, 13 bp, Artificial Sequence
  Oligonucleotide for detection of SNP TSC0014212
aacaatattaata

SEQ ID NO: 50667 - DNA, 13 bp, Artificial Sequence
  Oligonucleotide for detection of SNP TSC0014212
aataattttggta

SEQ ID NO: 50668 - DNA, 13 bp, Artificial Sequence
  Oligonucleotide for detection of SNP TSC0014212
taccaaaattatt

SEQ ID NO: 50669 - DNA, 13 bp, Artificial Sequence
  Oligonucleotide for detection of SNP TSC0014212
aataatgttggta

SEQ ID NO: 50670 - DNA, 13 bp, Artificial Sequence
  Oligonucleotide for detection of SNP TSC0014212
taccaacattatt

SEQ ID NO: 50671 - DNA, 13 bp, Artificial Sequence
  Oligonucleotide for detection of SNP TSC0014213
gtgtttgggtatt

SEQ ID NO: 50672 - DNA, 13 bp, Artificial Sequence
  Oligonucleotide for detection of SNP TSC0014213
aatacccaaacac

SEQ ID NO: 50673 - DNA, 13 bp, Artificial Sequence
  Oligonucleotide for detection of SNP TSC0014213
gtgttttggtatt

SEQ ID NO: 50674 - DNA, 13 bp, Artificial Sequence
  Oligonucleotide for detection of SNP TSC0014213
aataccaaaacac

SEQ ID NO: 50675 - DNA, 13 bp, Artificial Sequence
  Oligonucleotide for detection of SNP TSC0014213
gtgttcgggtatt

SEQ ID NO: 50676 - DNA, 13 bp, Artificial Sequence
  Oligonucleotide for detection of SNP TSC0014213
aatacccgaacac

SEQ ID NO: 50677 - DNA, 13 bp, Artificial Sequence
  Oligonucleotide for detection of SNP TSC0014213
agtatttggatay

SEQ ID NO: 50678 - DNA, 13 bp, Artificial Sequence
  Oligonucleotide for detection of SNP TSC0014213
rtatccaaatact

SEQ ID NO: 50679 - DNA, 13 bp, Artificial Sequence
  Oligonucleotide for detection of SNP TSC0014213
agtattaggatay

SEQ ID NO: 50680 - DNA, 13 bp, Artificial Sequence
  Oligonucleotide for detection of SNP TSC0014213
rtatcctaatact

SEQ ID NO: 50681 - DNA, 13 bp, Artificial Sequence
  Oligonucleotide for detection of SNP TSC0014213
agtattcggatay

SEQ ID NO: 50682 - DNA, 13 bp, Artificial Sequence
  Oligonucleotide for detection of SNP TSC0014213
rtatccgaatact

SEQ ID NO: 50683 - DNA, 13 bp, Artificial Sequence
  Oligonucleotide for detection of SNP TSC0014216
tttgaaagtttga

SEQ ID NO: 50684 - DNA, 13 bp, Artificial Sequence
  Oligonucleotide for detection of SNP TSC0014216
tcaaactttcaaa

SEQ ID NO: 50685 - DNA, 13 bp, Artificial Sequence
  Oligonucleotide for detection of SNP TSC0014216
tttgaatgtttga

SEQ ID NO: 50686 - DNA, 13 bp, Artificial Sequence
  Oligonucleotide for detection of SNP TSC0014216
tcaaacattcaaa

SEQ ID NO: 50687 - DNA, 13 bp, Artificial Sequence
  Oligonucleotide for detection of SNP TSC0014216
tttgaacgtttga

SEQ ID NO: 50688 - DNA, 13 bp, Artificial Sequence
  Oligonucleotide for detection of SNP TSC0014216
tcaaacgttcaaa

SEQ ID NO: 50689 - DNA, 13 bp, Artificial Sequence
  Oligonucleotide for detection of SNP TSC0014216
ttaagtttttaga

SEQ ID NO: 50690 - DNA, 13 bp, Artificial Sequence
  Oligonucleotide for detection of SNP TSC0014216
tctaaaaacttaa

SEQ ID NO: 50691 - DNA, 13 bp, Artificial Sequence
  Oligonucleotide for detection of SNP TSC0014216
ttaagtgtttaga

SEQ ID NO: 50692 - DNA, 13 bp, Artificial Sequence
  Oligonucleotide for detection of SNP TSC0014216
tctaaacacttaa

SEQ ID NO: 50693 - DNA, 13 bp, Artificial Sequence
  Oligonucleotide for detection of SNP TSC0014216
ttaagcgtttaga

SEQ ID NO: 50694 - DNA, 13 bp, Artificial Sequence
  Oligonucleotide for detection of SNP TSC0014216
tctaaacgcttaa

SEQ ID NO: 50695 - DNA, 13 bp, Artificial Sequence
  Oligonucleotide for detection of SNP TSC0014217
tgatggatttgty

SEQ ID NO: 50696 - DNA, 13 bp, Artificial Sequence
  Oligonucleotide for detection of SNP TSC0014217
racaaatccatca

SEQ ID NO: 50697 - DNA, 13 bp, Artificial Sequence
  Oligonucleotide for detection of SNP TSC0014217
tgatggttttgty

SEQ ID NO: 50698 - DNA, 13 bp, Artificial Sequence
  Oligonucleotide for detection of SNP TSC0014217
racaaaaccatca

SEQ ID NO: 50699 - DNA, 13 bp, Artificial Sequence
  Oligonucleotide for detection of SNP TSC0014217
cgatggatttgty

SEQ ID NO: 50700 - DNA, 13 bp, Artificial Sequence
  Oligonucleotide for detection of SNP TSC0014217
racaaatccatcg

SEQ ID NO: 50701 - DNA, 13 bp, Artificial Sequence
  Oligonucleotide for detection of SNP TSC0014217
cgatggttttgty

SEQ ID NO: 50702 - DNA, 13 bp, Artificial Sequence
  Oligonucleotide for detection of SNP TSC0014217
racaaaaccatcg

SEQ ID NO: 50703 - DNA, 13 bp, Artificial Sequence
  Oligonucleotide for detection of SNP TSC0014217
gatagatttattg

SEQ ID NO: 50704 - DNA, 13 bp, Artificial Sequence
  Oligonucleotide for detection of SNP TSC0014217
caataaatctatc

SEQ ID NO: 50705 - DNA, 13 bp, Artificial Sequence
  Oligonucleotide for detection of SNP TSC0014217
gatagaattattg

SEQ ID NO: 50706 - DNA, 13 bp, Artificial Sequence
  Oligonucleotide for detection of SNP TSC0014217
caataattctatc

SEQ ID NO: 50707 - DNA, 13 bp, Artificial Sequence
  Oligonucleotide for detection of SNP TSC0014217
gatagatttatcg

SEQ ID NO: 50708 - DNA, 13 bp, Artificial Sequence
  Oligonucleotide for detection of SNP TSC0014217
cgataaatctatc

SEQ ID NO: 50709 - DNA, 13 bp, Artificial Sequence
  Oligonucleotide for detection of SNP TSC0014217
gatagaattatcg

SEQ ID NO: 50710 - DNA, 13 bp, Artificial Sequence
  Oligonucleotide for detection of SNP TSC0014217
cgataattctatc

SEQ ID NO: 50711 - DNA, 13 bp, Artificial Sequence
  Oligonucleotide for detection of SNP TSC0014218
attttttgtgaag

SEQ ID NO: 50712 - DNA, 13 bp, Artificial Sequence
  Oligonucleotide for detection of SNP TSC0014218
cttcacaaaaaat

SEQ ID NO: 50713 - DNA, 13 bp, Artificial Sequence
  Oligonucleotide for detection of SNP TSC0014218
atttttcgtgaag

SEQ ID NO: 50714 - DNA, 13 bp, Artificial Sequence
  Oligonucleotide for detection of SNP TSC0014218
cttcacgaaaaat

SEQ ID NO: 50715 - DNA, 13 bp, Artificial Sequence
  Oligonucleotide for detection of SNP TSC0014218
ttttatggaagat

SEQ ID NO: 50716 - DNA, 13 bp, Artificial Sequence
  Oligonucleotide for detection of SNP TSC0014218
atcttccataaaa

SEQ ID NO: 50717 - DNA, 13 bp, Artificial Sequence
  Oligonucleotide for detection of SNP TSC0014218
ttttatagaagat

SEQ ID NO: 50718 - DNA, 13 bp, Artificial Sequence
  Oligonucleotide for detection of SNP TSC0014218
atcttctataaaa

SEQ ID NO: 50719 - DNA, 13 bp, Artificial Sequence
  Oligonucleotide for detection of SNP TSC0014218
ttttacggaagat

SEQ ID NO: 50720 - DNA, 13 bp, Artificial Sequence
  Oligonucleotide for detection of SNP TSC0014218
atcttccgtaaaa

SEQ ID NO: 50721 - DNA, 13 bp, Artificial Sequence
  Oligonucleotide for detection of SNP TSC0014219
taaattatatttt

SEQ ID NO: 50722 - DNA, 13 bp, Artificial Sequence
  Oligonucleotide for detection of SNP TSC0014219
aaaatataattta

SEQ ID NO: 50723 - DNA, 13 bp, Artificial Sequence
  Oligonucleotide for detection of SNP TSC0014219
taaattttatttt

SEQ ID NO: 50724 - DNA, 13 bp, Artificial Sequence
  Oligonucleotide for detection of SNP TSC0014219
aaaataaaattta

SEQ ID NO: 50725 - DNA, 13 bp, Artificial Sequence
  Oligonucleotide for detection of SNP TSC0014220
tttaaagaaaaaa

SEQ ID NO: 50726 - DNA, 13 bp, Artificial Sequence
  Oligonucleotide for detection of SNP TSC0014220
ttttttctttaaa

SEQ ID NO: 50727 - DNA, 13 bp, Artificial Sequence
  Oligonucleotide for detection of SNP TSC0014221
taatgtgtgaagg

SEQ ID NO: 50728 - DNA, 13 bp, Artificial Sequence
  Oligonucleotide for detection of SNP TSC0014221
ccttcacacatta

SEQ ID NO: 50729 - DNA, 13 bp, Artificial Sequence
  Oligonucleotide for detection of SNP TSC0014221
taatgtatgaagg

SEQ ID NO: 50730 - DNA, 13 bp, Artificial Sequence
  Oligonucleotide for detection of SNP TSC0014221
ccttcatacatta

SEQ ID NO: 50731 - DNA, 13 bp, Artificial Sequence
  Oligonucleotide for detection of SNP TSC0014224
tttttaattagaa

SEQ ID NO: 50732 - DNA, 13 bp, Artificial Sequence
  Oligonucleotide for detection of SNP TSC0014224
ttctaattaaaaa

SEQ ID NO: 50733 - DNA, 13 bp, Artificial Sequence
  Oligonucleotide for detection of SNP TSC0014224
tttttatttagaa

SEQ ID NO: 50734 - DNA, 13 bp, Artificial Sequence
  Oligonucleotide for detection of SNP TSC0014224
ttctaaataaaaa

SEQ ID NO: 50735 - DNA, 13 bp, Artificial Sequence
  Oligonucleotide for detection of SNP TSC0014224
ttttggttaaaaa

SEQ ID NO: 50736 - DNA, 13 bp, Artificial Sequence
  Oligonucleotide for detection of SNP TSC0014224
tttttaaccaaaa

SEQ ID NO: 50737 - DNA, 13 bp, Artificial Sequence
  Oligonucleotide for detection of SNP TSC0014224
ttttgggtaaaaa

SEQ ID NO: 50738 - DNA, 13 bp, Artificial Sequence
  Oligonucleotide for detection of SNP TSC0014224
tttttacccaaaa

SEQ ID NO: 50739 - DNA, 13 bp, Artificial Sequence
  Oligonucleotide for detection of SNP TSC0014227
agttagtgtagta

SEQ ID NO: 50740 - DNA, 13 bp, Artificial Sequence
  Oligonucleotide for detection of SNP TSC0014227
tactacactaact

SEQ ID NO: 50741 - DNA, 13 bp, Artificial Sequence
  Oligonucleotide for detection of SNP TSC0014227
agttagcgtagta

SEQ ID NO: 50742 - DNA, 13 bp, Artificial Sequence
  Oligonucleotide for detection of SNP TSC0014227
tactacgctaact

SEQ ID NO: 50743 - DNA, 13 bp, Artificial Sequence
  Oligonucleotide for detection of SNP TSC0014227
tattatgttgatt

SEQ ID NO: 50744 - DNA, 13 bp, Artificial Sequence
  Oligonucleotide for detection of SNP TSC0014227
aatcaacataata

SEQ ID NO: 50745 - DNA, 13 bp, Artificial Sequence
  Oligonucleotide for detection of SNP TSC0014227
tattatattgatt

SEQ ID NO: 50746 - DNA, 13 bp, Artificial Sequence
  Oligonucleotide for detection of SNP TSC0014227
aatcaatataata

SEQ ID NO: 50747 - DNA, 13 bp, Artificial Sequence
  Oligonucleotide for detection of SNP TSC0014227
tattacgttgatt

SEQ ID NO: 50748 - DNA, 13 bp, Artificial Sequence
  Oligonucleotide for detection of SNP TSC0014227
aatcaacgtaata

SEQ ID NO: 50749 - DNA, 13 bp, Artificial Sequence
  Oligonucleotide for detection of SNP TSC0014228
agttttaaggaag

SEQ ID NO: 50750 - DNA, 13 bp, Artificial Sequence
  Oligonucleotide for detection of SNP TSC0014228
cttccttaaaact

SEQ ID NO: 50751 - DNA, 13 bp, Artificial Sequence
  Oligonucleotide for detection of SNP TSC0014228
agttttgaggaag

SEQ ID NO: 50752 - DNA, 13 bp, Artificial Sequence
  Oligonucleotide for detection of SNP TSC0014228
cttcctcaaaact

SEQ ID NO: 50753 - DNA, 13 bp, Artificial Sequence
  Oligonucleotide for detection of SNP TSC0014228
agtttcgaggaag

SEQ ID NO: 50754 - DNA, 13 bp, Artificial Sequence
  Oligonucleotide for detection of SNP TSC0014228
cttcctcgaaact

SEQ ID NO: 50755 - DNA, 13 bp, Artificial Sequence
  Oligonucleotide for detection of SNP TSC0014229
gttttaataaaay

SEQ ID NO: 50756 - DNA, 13 bp, Artificial Sequence
  Oligonucleotide for detection of SNP TSC0014229
rttttattaaaac

SEQ ID NO: 50757 - DNA, 13 bp, Artificial Sequence
  Oligonucleotide for detection of SNP TSC0014229
gttttattaaaay

SEQ ID NO: 50758 - DNA, 13 bp, Artificial Sequence
  Oligonucleotide for detection of SNP TSC0014229
rttttaataaaac

SEQ ID NO: 50759 - DNA, 13 bp, Artificial Sequence
  Oligonucleotide for detection of SNP TSC0014229
gttttgttgaagy

SEQ ID NO: 50760 - DNA, 13 bp, Artificial Sequence
  Oligonucleotide for detection of SNP TSC0014229
rcttcaacaaaac

SEQ ID NO: 50761 - DNA, 13 bp, Artificial Sequence
  Oligonucleotide for detection of SNP TSC0014229
gttttgatgaagy

SEQ ID NO: 50762 - DNA, 13 bp, Artificial Sequence
  Oligonucleotide for detection of SNP TSC0014229
rcttcatcaaaac

SEQ ID NO: 50763 - DNA, 13 bp, Artificial Sequence
  Oligonucleotide for detection of SNP TSC0014230
atgataatttatt

SEQ ID NO: 50764 - DNA, 13 bp, Artificial Sequence
  Oligonucleotide for detection of SNP TSC0014230
aataaattatcat

SEQ ID NO: 50765 - DNA, 13 bp, Artificial Sequence
  Oligonucleotide for detection of SNP TSC0014230
atgatagtttatt

SEQ ID NO: 50766 - DNA, 13 bp, Artificial Sequence
  Oligonucleotide for detection of SNP TSC0014230
aataaactatcat

SEQ ID NO: 50767 - DNA, 13 bp, Artificial Sequence
  Oligonucleotide for detection of SNP TSC0014231
gagtaaatttttg

SEQ ID NO: 50768 - DNA, 13 bp, Artificial Sequence
  Oligonucleotide for detection of SNP TSC0014231
caaaaatttactc

SEQ ID NO: 50769 - DNA, 13 bp, Artificial Sequence
  Oligonucleotide for detection of SNP TSC0014231
gagtaagtttttg

SEQ ID NO: 50770 - DNA, 13 bp, Artificial Sequence
  Oligonucleotide for detection of SNP TSC0014231
caaaaacttactc

SEQ ID NO: 50771 - DNA, 13 bp, Artificial Sequence
  Oligonucleotide for detection of SNP TSC0014232
gataatatatttt

SEQ ID NO: 50772 - DNA, 13 bp, Artificial Sequence
  Oligonucleotide for detection of SNP TSC0014232
aaaatatattatc

SEQ ID NO: 50773 - DNA, 13 bp, Artificial Sequence
  Oligonucleotide for detection of SNP TSC0014232
gataatgtatttt

SEQ ID NO: 50774 - DNA, 13 bp, Artificial Sequence
  Oligonucleotide for detection of SNP TSC0014232
aaaatacattatc

SEQ ID NO: 50775 - DNA, 13 bp, Artificial Sequence
  Oligonucleotide for detection of SNP TSC0014233
aagttatatgtgt

SEQ ID NO: 50776 - DNA, 13 bp, Artificial Sequence
  Oligonucleotide for detection of SNP TSC0014233
acacatataactt

SEQ ID NO: 50777 - DNA, 13 bp, Artificial Sequence
  Oligonucleotide for detection of SNP TSC0014233
aagttagatgtgt

SEQ ID NO: 50778 - DNA, 13 bp, Artificial Sequence
  Oligonucleotide for detection of SNP TSC0014233
acacatctaactt

SEQ ID NO: 50779 - DNA, 13 bp, Artificial Sequence
  Oligonucleotide for detection of SNP TSC0014233
aagttatacgtgt

SEQ ID NO: 50780 - DNA, 13 bp, Artificial Sequence
  Oligonucleotide for detection of SNP TSC0014233
acacgtataactt

SEQ ID NO: 50781 - DNA, 13 bp, Artificial Sequence
  Oligonucleotide for detection of SNP TSC0014233
aagttagacgtgt

SEQ ID NO: 50782 - DNA, 13 bp, Artificial Sequence
  Oligonucleotide for detection of SNP TSC0014233
acacgtctaactt

SEQ ID NO: 50783 - DNA, 13 bp, Artificial Sequence
  Oligonucleotide for detection of SNP TSC0014233
atatgtgtgattt

SEQ ID NO: 50784 - DNA, 13 bp, Artificial Sequence
  Oligonucleotide for detection of SNP TSC0014233
aaatcacacatat

SEQ ID NO: 50785 - DNA, 13 bp, Artificial Sequence
  Oligonucleotide for detection of SNP TSC0014233
atatgtttgattt

SEQ ID NO: 50786 - DNA, 13 bp, Artificial Sequence
  Oligonucleotide for detection of SNP TSC0014233
aaatcaaacatat

SEQ ID NO: 50787 - DNA, 13 bp, Artificial Sequence
  Oligonucleotide for detection of SNP TSC0014233
atacgtgtgattt

SEQ ID NO: 50788 - DNA, 13 bp, Artificial Sequence
  Oligonucleotide for detection of SNP TSC0014233
aaatcacacgtat

SEQ ID NO: 50789 - DNA, 13 bp, Artificial Sequence
  Oligonucleotide for detection of SNP TSC0014233
atacgtttgattt

SEQ ID NO: 50790 - DNA, 13 bp, Artificial Sequence
  Oligonucleotide for detection of SNP TSC0014233
aaatcaaacgtat

SEQ ID NO: 50791 - DNA, 13 bp, Artificial Sequence
  Oligonucleotide for detection of SNP TSC0014234
atttttattgttg

SEQ ID NO: 50792 - DNA, 13 bp, Artificial Sequence
  Oligonucleotide for detection of SNP TSC0014234
caacaataaaaat

SEQ ID NO: 50793 - DNA, 13 bp, Artificial Sequence
  Oligonucleotide for detection of SNP TSC0014234
atttttgttgttg

SEQ ID NO: 50794 - DNA, 13 bp, Artificial Sequence
  Oligonucleotide for detection of SNP TSC0014234
caacaacaaaaat

SEQ ID NO: 50795 - DNA, 13 bp, Artificial Sequence
  Oligonucleotide for detection of SNP TSC0014235
gttgttgttataa

SEQ ID NO: 50796 - DNA, 13 bp, Artificial Sequence
  Oligonucleotide for detection of SNP TSC0014235
ttataacaacaac

SEQ ID NO: 50797 - DNA, 13 bp, Artificial Sequence
  Oligonucleotide for detection of SNP TSC0014235
gttgttattataa

SEQ ID NO: 50798 - DNA, 13 bp, Artificial Sequence
  Oligonucleotide for detection of SNP TSC0014235
ttataataacaac

SEQ ID NO: 50799 - DNA, 13 bp, Artificial Sequence
  Oligonucleotide for detection of SNP TSC0014236
atataatgattty

SEQ ID NO: 50800 - DNA, 13 bp, Artificial Sequence
  Oligonucleotide for detection of SNP TSC0014236
raaatcattatat

SEQ ID NO: 50801 - DNA, 13 bp, Artificial Sequence
  Oligonucleotide for detection of SNP TSC0014236
atataacgattty

SEQ ID NO: 50802 - DNA, 13 bp, Artificial Sequence
  Oligonucleotide for detection of SNP TSC0014236
raaatcgttatat

SEQ ID NO: 50803 - DNA, 13 bp, Artificial Sequence
  Oligonucleotide for detection of SNP TSC0014236
gggattgttgtgt

SEQ ID NO: 50804 - DNA, 13 bp, Artificial Sequence
  Oligonucleotide for detection of SNP TSC0014236
acacaacaatccc

SEQ ID NO: 50805 - DNA, 13 bp, Artificial Sequence
  Oligonucleotide for detection of SNP TSC0014236
gggattattgtgt

SEQ ID NO: 50806 - DNA, 13 bp, Artificial Sequence
  Oligonucleotide for detection of SNP TSC0014236
acacaataatccc

SEQ ID NO: 50807 - DNA, 13 bp, Artificial Sequence
  Oligonucleotide for detection of SNP TSC0014236
gggatcgttgtgt

SEQ ID NO: 50808 - DNA, 13 bp, Artificial Sequence
  Oligonucleotide for detection of SNP TSC0014236
acacaacgatccc

SEQ ID NO: 50809 - DNA, 13 bp, Artificial Sequence
  Oligonucleotide for detection of SNP TSC0014238
agttatagttgty

SEQ ID NO: 50810 - DNA, 13 bp, Artificial Sequence
  Oligonucleotide for detection of SNP TSC0014238
racaactataact

SEQ ID NO: 50811 - DNA, 13 bp, Artificial Sequence
  Oligonucleotide for detection of SNP TSC0014238
agttatggttgty

SEQ ID NO: 50812 - DNA, 13 bp, Artificial Sequence
  Oligonucleotide for detection of SNP TSC0014238
racaaccataact

SEQ ID NO: 50813 - DNA, 13 bp, Artificial Sequence
  Oligonucleotide for detection of SNP TSC0014238
agttatagtcgty

SEQ ID NO: 50814 - DNA, 13 bp, Artificial Sequence
  Oligonucleotide for detection of SNP TSC0014238
racgactataact

SEQ ID NO: 50815 - DNA, 13 bp, Artificial Sequence
  Oligonucleotide for detection of SNP TSC0014238
agttacggttgty

SEQ ID NO: 50816 - DNA, 13 bp, Artificial Sequence
  Oligonucleotide for detection of SNP TSC0014238
racaaccgtaact

SEQ ID NO: 50817 - DNA, 13 bp, Artificial Sequence
  Oligonucleotide for detection of SNP TSC0014238
agttatggtcgty

SEQ ID NO: 50818 - DNA, 13 bp, Artificial Sequence
  Oligonucleotide for detection of SNP TSC0014238
racgaccataact

SEQ ID NO: 50819 - DNA, 13 bp, Artificial Sequence
  Oligonucleotide for detection of SNP TSC0014238
agttacggtcgty

SEQ ID NO: 50820 - DNA, 13 bp, Artificial Sequence
  Oligonucleotide for detection of SNP TSC0014238
racgaccgtaact

SEQ ID NO: 50821 - DNA, 13 bp, Artificial Sequence
  Oligonucleotide for detection of SNP TSC0014238
ggtggttgtggtt

SEQ ID NO: 50822 - DNA, 13 bp, Artificial Sequence
  Oligonucleotide for detection of SNP TSC0014238
aaccacaaccacc

SEQ ID NO: 50823 - DNA, 13 bp, Artificial Sequence
  Oligonucleotide for detection of SNP TSC0014238
ggcggttgtggtt

SEQ ID NO: 50824 - DNA, 13 bp, Artificial Sequence
  Oligonucleotide for detection of SNP TSC0014238
aaccacaaccgcc

SEQ ID NO: 50825 - DNA, 13 bp, Artificial Sequence
  Oligonucleotide for detection of SNP TSC0014238
ggtggtcgtggtt

SEQ ID NO: 50826 - DNA, 13 bp, Artificial Sequence
  Oligonucleotide for detection of SNP TSC0014238
aaccacgaccacc

SEQ ID NO: 50827 - DNA, 13 bp, Artificial Sequence
  Oligonucleotide for detection of SNP TSC0014238
ggcggtcgtggtt

SEQ ID NO: 50828 - DNA, 13 bp, Artificial Sequence
  Oligonucleotide for detection of SNP TSC0014238
aaccacgaccgcc

SEQ ID NO: 50829 - DNA, 13 bp, Artificial Sequence
  Oligonucleotide for detection of SNP TSC0014241
atttttagggatt

SEQ ID NO: 50830 - DNA, 13 bp, Artificial Sequence
  Oligonucleotide for detection of SNP TSC0014241
aatccctaaaaat

SEQ ID NO: 50831 - DNA, 13 bp, Artificial Sequence
  Oligonucleotide for detection of SNP TSC0014241
attttttgggatt

SEQ ID NO: 50832 - DNA, 13 bp, Artificial Sequence
  Oligonucleotide for detection of SNP TSC0014241
aatcccaaaaaat

SEQ ID NO: 50833 - DNA, 13 bp, Artificial Sequence
  Oligonucleotide for detection of SNP TSC0014241
atttttcgggatt

SEQ ID NO: 50834 - DNA, 13 bp, Artificial Sequence
  Oligonucleotide for detection of SNP TSC0014241
aatcccgaaaaat

SEQ ID NO: 50835 - DNA, 13 bp, Artificial Sequence
  Oligonucleotide for detection of SNP TSC0014241
agtttttagggat

SEQ ID NO: 50836 - DNA, 13 bp, Artificial Sequence
  Oligonucleotide for detection of SNP TSC0014241
atccctaaaaact

SEQ ID NO: 50837 - DNA, 13 bp, Artificial Sequence
  Oligonucleotide for detection of SNP TSC0014241
agttttgagggat

SEQ ID NO: 50838 - DNA, 13 bp, Artificial Sequence
  Oligonucleotide for detection of SNP TSC0014241
atccctcaaaact

SEQ ID NO: 50839 - DNA, 13 bp, Artificial Sequence
  Oligonucleotide for detection of SNP TSC0014241
agtttcgagggat

SEQ ID NO: 50840 - DNA, 13 bp, Artificial Sequence
  Oligonucleotide for detection of SNP TSC0014241
atccctcgaaact

SEQ ID NO: 50841 - DNA, 13 bp, Artificial Sequence
  Oligonucleotide for detection of SNP TSC0014242
gttaatattggat

SEQ ID NO: 50842 - DNA, 13 bp, Artificial Sequence
  Oligonucleotide for detection of SNP TSC0014242
atccaatattaac

SEQ ID NO: 50843 - DNA, 13 bp, Artificial Sequence
  Oligonucleotide for detection of SNP TSC0014242
gttaatgttggat

SEQ ID NO: 50844 - DNA, 13 bp, Artificial Sequence
  Oligonucleotide for detection of SNP TSC0014242
atccaacattaac

SEQ ID NO: 50845 - DNA, 13 bp, Artificial Sequence
  Oligonucleotide for detection of SNP TSC0014243
atagggttagtga

SEQ ID NO: 50846 - DNA, 13 bp, Artificial Sequence
  Oligonucleotide for detection of SNP TSC0014243
tcactaaccctat

SEQ ID NO: 50847 - DNA, 13 bp, Artificial Sequence
  Oligonucleotide for detection of SNP TSC0014243
ataggggtagtga

SEQ ID NO: 50848 - DNA, 13 bp, Artificial Sequence
  Oligonucleotide for detection of SNP TSC0014243
tcactacccctat

SEQ ID NO: 50849 - DNA, 13 bp, Artificial Sequence
  Oligonucleotide for detection of SNP TSC0014243
ttattatttttat

SEQ ID NO: 50850 - DNA, 13 bp, Artificial Sequence
  Oligonucleotide for detection of SNP TSC0014243
ataaaaataataa

SEQ ID NO: 50851 - DNA, 13 bp, Artificial Sequence
  Oligonucleotide for detection of SNP TSC0014244
gtatatgggatga

SEQ ID NO: 50852 - DNA, 13 bp, Artificial Sequence
  Oligonucleotide for detection of SNP TSC0014244
tcatcccatatac

SEQ ID NO: 50853 - DNA, 13 bp, Artificial Sequence
  Oligonucleotide for detection of SNP TSC0014244
gtatataggatga

SEQ ID NO: 50854 - DNA, 13 bp, Artificial Sequence
  Oligonucleotide for detection of SNP TSC0014244
tcatcctatatac

SEQ ID NO: 50855 - DNA, 13 bp, Artificial Sequence
  Oligonucleotide for detection of SNP TSC0014246
attaagatatggg

SEQ ID NO: 50856 - DNA, 13 bp, Artificial Sequence
  Oligonucleotide for detection of SNP TSC0014246
cccatatcttaat

SEQ ID NO: 50857 - DNA, 13 bp, Artificial Sequence
  Oligonucleotide for detection of SNP TSC0014246
attaaggtatggg

SEQ ID NO: 50858 - DNA, 13 bp, Artificial Sequence
  Oligonucleotide for detection of SNP TSC0014246
cccataccttaat

SEQ ID NO: 50859 - DNA, 13 bp, Artificial Sequence
  Oligonucleotide for detection of SNP TSC0014246
attaagatacggg

SEQ ID NO: 50860 - DNA, 13 bp, Artificial Sequence
  Oligonucleotide for detection of SNP TSC0014246
cccgtatcttaat

SEQ ID NO: 50861 - DNA, 13 bp, Artificial Sequence
  Oligonucleotide for detection of SNP TSC0014246
attaaggtacggg

SEQ ID NO: 50862 - DNA, 13 bp, Artificial Sequence
  Oligonucleotide for detection of SNP TSC0014246
cccgtaccttaat

SEQ ID NO: 50863 - DNA, 13 bp, Artificial Sequence
  Oligonucleotide for detection of SNP TSC0014247
ttttgaattaggg

SEQ ID NO: 50864 - DNA, 13 bp, Artificial Sequence
  Oligonucleotide for detection of SNP TSC0014247
ccctaattcaaaa

SEQ ID NO: 50865 - DNA, 13 bp, Artificial Sequence
  Oligonucleotide for detection of SNP TSC0014247
ttttgatttaggg

SEQ ID NO: 50866 - DNA, 13 bp, Artificial Sequence
  Oligonucleotide for detection of SNP TSC0014247
ccctaaatcaaaa

SEQ ID NO: 50867 - DNA, 13 bp, Artificial Sequence
  Oligonucleotide for detection of SNP TSC0014247
tttcgaattaggg

SEQ ID NO: 50868 - DNA, 13 bp, Artificial Sequence
  Oligonucleotide for detection of SNP TSC0014247
ccctaattcgaaa

SEQ ID NO: 50869 - DNA, 13 bp, Artificial Sequence
  Oligonucleotide for detection of SNP TSC0014247
tttcgatttaggg

SEQ ID NO: 50870 - DNA, 13 bp, Artificial Sequence
  Oligonucleotide for detection of SNP TSC0014247
ccctaaatcgaaa

SEQ ID NO: 50871 - DNA, 13 bp, Artificial Sequence
  Oligonucleotide for detection of SNP TSC0014247
ttttagtttgggg

SEQ ID NO: 50872 - DNA, 13 bp, Artificial Sequence
  Oligonucleotide for detection of SNP TSC0014247
ccccaaactaaaa

SEQ ID NO: 50873 - DNA, 13 bp, Artificial Sequence
  Oligonucleotide for detection of SNP TSC0014247
ttttaggttgggg

SEQ ID NO: 50874 - DNA, 13 bp, Artificial Sequence
  Oligonucleotide for detection of SNP TSC0014247
ccccaacctaaaa

SEQ ID NO: 50875 - DNA, 13 bp, Artificial Sequence
  Oligonucleotide for detection of SNP TSC0014247
ttttagttcgggg

SEQ ID NO: 50876 - DNA, 13 bp, Artificial Sequence
  Oligonucleotide for detection of SNP TSC0014247
ccccgaactaaaa

SEQ ID NO: 50877 - DNA, 13 bp, Artificial Sequence
  Oligonucleotide for detection of SNP TSC0014247
ttttaggtcgggg

SEQ ID NO: 50878 - DNA, 13 bp, Artificial Sequence
  Oligonucleotide for detection of SNP TSC0014247
ccccgacctaaaa

SEQ ID NO: 50879 - DNA, 13 bp, Artificial Sequence
  Oligonucleotide for detection of SNP TSC0014248
agttttatgagta

SEQ ID NO: 50880 - DNA, 13 bp, Artificial Sequence
  Oligonucleotide for detection of SNP TSC0014248
tactcataaaact

SEQ ID NO: 50881 - DNA, 13 bp, Artificial Sequence
  Oligonucleotide for detection of SNP TSC0014248
agttttttgagta

SEQ ID NO: 50882 - DNA, 13 bp, Artificial Sequence
  Oligonucleotide for detection of SNP TSC0014248
tactcaaaaaact

SEQ ID NO: 50883 - DNA, 13 bp, Artificial Sequence
  Oligonucleotide for detection of SNP TSC0014248
tgtttatggagtt

SEQ ID NO: 50884 - DNA, 13 bp, Artificial Sequence
  Oligonucleotide for detection of SNP TSC0014248
aactccataaaca

SEQ ID NO: 50885 - DNA, 13 bp, Artificial Sequence
  Oligonucleotide for detection of SNP TSC0014248
tgtttagggagtt

SEQ ID NO: 50886 - DNA, 13 bp, Artificial Sequence
  Oligonucleotide for detection of SNP TSC0014248
aactccctaaaca

SEQ ID NO: 50887 - DNA, 13 bp, Artificial Sequence
  Oligonucleotide for detection of SNP TSC0014249
gagagattgtagg

SEQ ID NO: 50888 - DNA, 13 bp, Artificial Sequence
  Oligonucleotide for detection of SNP TSC0014249
cctacaatctctc

SEQ ID NO: 50889 - DNA, 13 bp, Artificial Sequence
  Oligonucleotide for detection of SNP TSC0014249
gagagagtgtagg

SEQ ID NO: 50890 - DNA, 13 bp, Artificial Sequence
  Oligonucleotide for detection of SNP TSC0014249
cctacactctctc

SEQ ID NO: 50891 - DNA, 13 bp, Artificial Sequence
  Oligonucleotide for detection of SNP TSC0014249
tttgtatttttty

SEQ ID NO: 50892 - DNA, 13 bp, Artificial Sequence
  Oligonucleotide for detection of SNP TSC0014249
raaaaaatacaaa

SEQ ID NO: 50893 - DNA, 13 bp, Artificial Sequence
  Oligonucleotide for detection of SNP TSC0014250
agttattgatatt

SEQ ID NO: 50894 - DNA, 13 bp, Artificial Sequence
  Oligonucleotide for detection of SNP TSC0014250
aatatcaataact

SEQ ID NO: 50895 - DNA, 13 bp, Artificial Sequence
  Oligonucleotide for detection of SNP TSC0014250
agttatcgatatt

SEQ ID NO: 50896 - DNA, 13 bp, Artificial Sequence
  Oligonucleotide for detection of SNP TSC0014250
aatatcgataact

SEQ ID NO: 50897 - DNA, 13 bp, Artificial Sequence
  Oligonucleotide for detection of SNP TSC0014250
agtgttggtgatt

SEQ ID NO: 50898 - DNA, 13 bp, Artificial Sequence
  Oligonucleotide for detection of SNP TSC0014250
aatcaccaacact

SEQ ID NO: 50899 - DNA, 13 bp, Artificial Sequence
  Oligonucleotide for detection of SNP TSC0014250
agtgttagtgatt

SEQ ID NO: 50900 - DNA, 13 bp, Artificial Sequence
  Oligonucleotide for detection of SNP TSC0014250
aatcactaacact

SEQ ID NO: 50901 - DNA, 13 bp, Artificial Sequence
  Oligonucleotide for detection of SNP TSC0014250
agtgtcggtgatt

SEQ ID NO: 50902 - DNA, 13 bp, Artificial Sequence
  Oligonucleotide for detection of SNP TSC0014250
aatcaccgacact

SEQ ID NO: 50903 - DNA, 13 bp, Artificial Sequence
  Oligonucleotide for detection of SNP TSC0014251
ataagtagtgtgy

SEQ ID NO: 50904 - DNA, 13 bp, Artificial Sequence
  Oligonucleotide for detection of SNP TSC0014251
rcacactacttat

SEQ ID NO: 50905 - DNA, 13 bp, Artificial Sequence
  Oligonucleotide for detection of SNP TSC0014251
ataagtggtgtgy

SEQ ID NO: 50906 - DNA, 13 bp, Artificial Sequence
  Oligonucleotide for detection of SNP TSC0014251
rcacaccacttat

SEQ ID NO: 50907 - DNA, 13 bp, Artificial Sequence
  Oligonucleotide for detection of SNP TSC0014251
ataagcggtgtgy

SEQ ID NO: 50908 - DNA, 13 bp, Artificial Sequence
  Oligonucleotide for detection of SNP TSC0014251
rcacaccgcttat

SEQ ID NO: 50909 - DNA, 13 bp, Artificial Sequence
  Oligonucleotide for detection of SNP TSC0014251
gtatattgtttgt

SEQ ID NO: 50910 - DNA, 13 bp, Artificial Sequence
  Oligonucleotide for detection of SNP TSC0014251
acaaacaatatac

SEQ ID NO: 50911 - DNA, 13 bp, Artificial Sequence
  Oligonucleotide for detection of SNP TSC0014251
gtatatcgtttgt

SEQ ID NO: 50912 - DNA, 13 bp, Artificial Sequence
  Oligonucleotide for detection of SNP TSC0014251
acaaacgatatac

SEQ ID NO: 50913 - DNA, 13 bp, Artificial Sequence
  Oligonucleotide for detection of SNP TSC0014256
atttgtattgaat

SEQ ID NO: 50914 - DNA, 13 bp, Artificial Sequence
  Oligonucleotide for detection of SNP TSC0014256
attcaatacaaat

SEQ ID NO: 50915 - DNA, 13 bp, Artificial Sequence
  Oligonucleotide for detection of SNP TSC0014256
atttgttttgaat

SEQ ID NO: 50916 - DNA, 13 bp, Artificial Sequence
  Oligonucleotide for detection of SNP TSC0014256
attcaaaacaaat

SEQ ID NO: 50917 - DNA, 13 bp, Artificial Sequence
  Oligonucleotide for detection of SNP TSC0014256
atttaatatagat

SEQ ID NO: 50918 - DNA, 13 bp, Artificial Sequence
  Oligonucleotide for detection of SNP TSC0014256
atctatattaaat

SEQ ID NO: 50919 - DNA, 13 bp, Artificial Sequence
  Oligonucleotide for detection of SNP TSC0014256
atttaagatagat

SEQ ID NO: 50920 - DNA, 13 bp, Artificial Sequence
  Oligonucleotide for detection of SNP TSC0014256
atctatcttaaat

SEQ ID NO: 50921 - DNA, 13 bp, Artificial Sequence
  Oligonucleotide for detection of SNP TSC0014257
ggttatgagttty

SEQ ID NO: 50922 - DNA, 13 bp, Artificial Sequence
  Oligonucleotide for detection of SNP TSC0014257
raaactcataacc

SEQ ID NO: 50923 - DNA, 13 bp, Artificial Sequence
  Oligonucleotide for detection of SNP TSC0014257
ggttataagttty

SEQ ID NO: 50924 - DNA, 13 bp, Artificial Sequence
  Oligonucleotide for detection of SNP TSC0014257
raaacttataacc

SEQ ID NO: 50925 - DNA, 13 bp, Artificial Sequence
  Oligonucleotide for detection of SNP TSC0014258
ttataggtttatg

SEQ ID NO: 50926 - DNA, 13 bp, Artificial Sequence
  Oligonucleotide for detection of SNP TSC0014258
cataaacctataa

SEQ ID NO: 50927 - DNA, 13 bp, Artificial Sequence
  Oligonucleotide for detection of SNP TSC0014258
ttatagttttatg

SEQ ID NO: 50928 - DNA, 13 bp, Artificial Sequence
  Oligonucleotide for detection of SNP TSC0014258
cataaaactataa

SEQ ID NO: 50929 - DNA, 13 bp, Artificial Sequence
  Oligonucleotide for detection of SNP TSC0014258
tatagatttatgg

SEQ ID NO: 50930 - DNA, 13 bp, Artificial Sequence
  Oligonucleotide for detection of SNP TSC0014258
ccataaatctata

SEQ ID NO: 50931 - DNA, 13 bp, Artificial Sequence
  Oligonucleotide for detection of SNP TSC0014258
tatagaattatgg

SEQ ID NO: 50932 - DNA, 13 bp, Artificial Sequence
  Oligonucleotide for detection of SNP TSC0014258
ccataattctata

SEQ ID NO: 50933 - DNA, 13 bp, Artificial Sequence
  Oligonucleotide for detection of SNP TSC0014259
gttttagataata

SEQ ID NO: 50934 - DNA, 13 bp, Artificial Sequence
  Oligonucleotide for detection of SNP TSC0014259
tattatctaaaac

SEQ ID NO: 50935 - DNA, 13 bp, Artificial Sequence
  Oligonucleotide for detection of SNP TSC0014259
gttttaaataata

SEQ ID NO: 50936 - DNA, 13 bp, Artificial Sequence
  Oligonucleotide for detection of SNP TSC0014259
tattatttaaaac

SEQ ID NO: 50937 - DNA, 13 bp, Artificial Sequence
  Oligonucleotide for detection of SNP TSC0014260
gatttttttttga

SEQ ID NO: 50938 - DNA, 13 bp, Artificial Sequence
  Oligonucleotide for detection of SNP TSC0014260
tcaaaaaaaaatc

SEQ ID NO: 50939 - DNA, 13 bp, Artificial Sequence
  Oligonucleotide for detection of SNP TSC0014260
gattttgttttga

SEQ ID NO: 50940 - DNA, 13 bp, Artificial Sequence
  Oligonucleotide for detection of SNP TSC0014260
tcaaaacaaaatc

SEQ ID NO: 50941 - DNA, 13 bp, Artificial Sequence
  Oligonucleotide for detection of SNP TSC0014260
ttagaagaaaaty

SEQ ID NO: 50942 - DNA, 13 bp, Artificial Sequence
  Oligonucleotide for detection of SNP TSC0014260
rattttcttctaa

SEQ ID NO: 50943 - DNA, 13 bp, Artificial Sequence
  Oligonucleotide for detection of SNP TSC0014260
ttagaataaaaty

SEQ ID NO: 50944 - DNA, 13 bp, Artificial Sequence
  Oligonucleotide for detection of SNP TSC0014260
rattttattctaa

SEQ ID NO: 50945 - DNA, 13 bp, Artificial Sequence
  Oligonucleotide for detection of SNP TSC0014261
tgagatattttay

SEQ ID NO: 50946 - DNA, 13 bp, Artificial Sequence
  Oligonucleotide for detection of SNP TSC0014261
rtaaaatatctca

SEQ ID NO: 50947 - DNA, 13 bp, Artificial Sequence
  Oligonucleotide for detection of SNP TSC0014261
tgagatgttttay

SEQ ID NO: 50948 - DNA, 13 bp, Artificial Sequence
  Oligonucleotide for detection of SNP TSC0014261
rtaaaacatctca

SEQ ID NO: 50949 - DNA, 13 bp, Artificial Sequence
  Oligonucleotide for detection of SNP TSC0014261
cgagatattttay

SEQ ID NO: 50950 - DNA, 13 bp, Artificial Sequence
  Oligonucleotide for detection of SNP TSC0014261
rtaaaatatctcg

SEQ ID NO: 50951 - DNA, 13 bp, Artificial Sequence
  Oligonucleotide for detection of SNP TSC0014261
cgagatgttttay

SEQ ID NO: 50952 - DNA, 13 bp, Artificial Sequence
  Oligonucleotide for detection of SNP TSC0014261
rtaaaacatctcg

SEQ ID NO: 50953 - DNA, 13 bp, Artificial Sequence
  Oligonucleotide for detection of SNP TSC0014262
ggtggtattttty

SEQ ID NO: 50954 - DNA, 13 bp, Artificial Sequence
  Oligonucleotide for detection of SNP TSC0014262
raaaaataccacc

SEQ ID NO: 50955 - DNA, 13 bp, Artificial Sequence
  Oligonucleotide for detection of SNP TSC0014262
ggtggtgttttty

SEQ ID NO: 50956 - DNA, 13 bp, Artificial Sequence
  Oligonucleotide for detection of SNP TSC0014262
raaaaacaccacc

SEQ ID NO: 50957 - DNA, 13 bp, Artificial Sequence
  Oligonucleotide for detection of SNP TSC0014262
ggtggcgttttty

SEQ ID NO: 50958 - DNA, 13 bp, Artificial Sequence
  Oligonucleotide for detection of SNP TSC0014262
raaaaacgccacc

SEQ ID NO: 50959 - DNA, 13 bp, Artificial Sequence
  Oligonucleotide for detection of SNP TSC0014262
gagggatgttaty

SEQ ID NO: 50960 - DNA, 13 bp, Artificial Sequence
  Oligonucleotide for detection of SNP TSC0014262
rataacatccctc

SEQ ID NO: 50961 - DNA, 13 bp, Artificial Sequence
  Oligonucleotide for detection of SNP TSC0014262
gagggacgttaty

SEQ ID NO: 50962 - DNA, 13 bp, Artificial Sequence
  Oligonucleotide for detection of SNP TSC0014262
rataacgtccctc

SEQ ID NO: 50963 - DNA, 13 bp, Artificial Sequence
  Oligonucleotide for detection of SNP TSC0014265
taatgtgtaattg

SEQ ID NO: 50964 - DNA, 13 bp, Artificial Sequence
  Oligonucleotide for detection of SNP TSC0014265
caattacacatta

SEQ ID NO: 50965 - DNA, 13 bp, Artificial Sequence
  Oligonucleotide for detection of SNP TSC0014265
taatgtttaattg

SEQ ID NO: 50966 - DNA, 13 bp, Artificial Sequence
  Oligonucleotide for detection of SNP TSC0014265
caattaaacatta

SEQ ID NO: 50967 - DNA, 13 bp, Artificial Sequence
  Oligonucleotide for detection of SNP TSC0014265
taattgtatatta

SEQ ID NO: 50968 - DNA, 13 bp, Artificial Sequence
  Oligonucleotide for detection of SNP TSC0014265
taatatacaatta

SEQ ID NO: 50969 - DNA, 13 bp, Artificial Sequence
  Oligonucleotide for detection of SNP TSC0014265
taattgaatatta

SEQ ID NO: 50970 - DNA, 13 bp, Artificial Sequence
  Oligonucleotide for detection of SNP TSC0014265
taatattcaatta

SEQ ID NO: 50971 - DNA, 13 bp, Artificial Sequence
  Oligonucleotide for detection of SNP TSC0014266
tatagaggtgagy

SEQ ID NO: 50972 - DNA, 13 bp, Artificial Sequence
  Oligonucleotide for detection of SNP TSC0014266
rctcacctctata

SEQ ID NO: 50973 - DNA, 13 bp, Artificial Sequence
  Oligonucleotide for detection of SNP TSC0014266
tatagaagtgagy

SEQ ID NO: 50974 - DNA, 13 bp, Artificial Sequence
  Oligonucleotide for detection of SNP TSC0014266
rctcacttctata

SEQ ID NO: 50975 - DNA, 13 bp, Artificial Sequence
  Oligonucleotide for detection of SNP TSC0014267
gtttatattgggy

SEQ ID NO: 50976 - DNA, 13 bp, Artificial Sequence
  Oligonucleotide for detection of SNP TSC0014267
rcccaatataaac

SEQ ID NO: 50977 - DNA, 13 bp, Artificial Sequence
  Oligonucleotide for detection of SNP TSC0014267
gtttatgttgggy

SEQ ID NO: 50978 - DNA, 13 bp, Artificial Sequence
  Oligonucleotide for detection of SNP TSC0014267
rcccaacataaac

SEQ ID NO: 50979 - DNA, 13 bp, Artificial Sequence
  Oligonucleotide for detection of SNP TSC0014267
gtttacgttgggy

SEQ ID NO: 50980 - DNA, 13 bp, Artificial Sequence
  Oligonucleotide for detection of SNP TSC0014267
rcccaacgtaaac

SEQ ID NO: 50981 - DNA, 13 bp, Artificial Sequence
  Oligonucleotide for detection of SNP TSC0014267
gtttaatgtaaay

SEQ ID NO: 50982 - DNA, 13 bp, Artificial Sequence
  Oligonucleotide for detection of SNP TSC0014267
rtttacattaaac

SEQ ID NO: 50983 - DNA, 13 bp, Artificial Sequence
  Oligonucleotide for detection of SNP TSC0014267
gtttaacgtaaay

SEQ ID NO: 50984 - DNA, 13 bp, Artificial Sequence
  Oligonucleotide for detection of SNP TSC0014267
rtttacgttaaac

SEQ ID NO: 50985 - DNA, 13 bp, Artificial Sequence
  Oligonucleotide for detection of SNP TSC0014268
aattgaatattat

SEQ ID NO: 50986 - DNA, 13 bp, Artificial Sequence
  Oligonucleotide for detection of SNP TSC0014268
ataatattcaatt

SEQ ID NO: 50987 - DNA, 13 bp, Artificial Sequence
  Oligonucleotide for detection of SNP TSC0014268
aattgagtattat

SEQ ID NO: 50988 - DNA, 13 bp, Artificial Sequence
  Oligonucleotide for detection of SNP TSC0014268
ataatactcaatt

SEQ ID NO: 50989 - DNA, 13 bp, Artificial Sequence
  Oligonucleotide for detection of SNP TSC0014269
tttttagggatta

SEQ ID NO: 50990 - DNA, 13 bp, Artificial Sequence
  Oligonucleotide for detection of SNP TSC0014269
taatccctaaaaa

SEQ ID NO: 50991 - DNA, 13 bp, Artificial Sequence
  Oligonucleotide for detection of SNP TSC0014270
gttttttggtaag

SEQ ID NO: 50992 - DNA, 13 bp, Artificial Sequence
  Oligonucleotide for detection of SNP TSC0014270
cttaccaaaaaac

SEQ ID NO: 50993 - DNA, 13 bp, Artificial Sequence
  Oligonucleotide for detection of SNP TSC0014270
gtttttcggtaag

SEQ ID NO: 50994 - DNA, 13 bp, Artificial Sequence
  Oligonucleotide for detection of SNP TSC0014270
cttaccgaaaaac

SEQ ID NO: 50995 - DNA, 13 bp, Artificial Sequence
  Oligonucleotide for detection of SNP TSC0014270
tttgttggagggy

SEQ ID NO: 50996 - DNA, 13 bp, Artificial Sequence
  Oligonucleotide for detection of SNP TSC0014270
rccctccaacaaa

SEQ ID NO: 50997 - DNA, 13 bp, Artificial Sequence
  Oligonucleotide for detection of SNP TSC0014270
tttgttagagggy

SEQ ID NO: 50998 - DNA, 13 bp, Artificial Sequence
  Oligonucleotide for detection of SNP TSC0014270
rccctctaacaaa

SEQ ID NO: 50999 - DNA, 13 bp, Artificial Sequence
  Oligonucleotide for detection of SNP TSC0014270
tttgtcggagggy

SEQ ID NO: 51000 - DNA, 13 bp, Artificial Sequence
  Oligonucleotide for detection of SNP TSC0014270
rccctccgacaaa

SEQ ID NO: 51001 - DNA, 13 bp, Artificial Sequence
  Oligonucleotide for detection of SNP TSC0014271
ggagggagtatty

SEQ ID NO: 51002 - DNA, 13 bp, Artificial Sequence
  Oligonucleotide for detection of SNP TSC0014271
raatactccctcc

SEQ ID NO: 51003 - DNA, 13 bp, Artificial Sequence
  Oligonucleotide for detection of SNP TSC0014271
ggagggggtatty

SEQ ID NO: 51004 - DNA, 13 bp, Artificial Sequence
  Oligonucleotide for detection of SNP TSC0014271
raataccccctcc

SEQ ID NO: 51005 - DNA, 13 bp, Artificial Sequence
  Oligonucleotide for detection of SNP TSC0014272
tatttgtggttty

SEQ ID NO: 51006 - DNA, 13 bp, Artificial Sequence
  Oligonucleotide for detection of SNP TSC0014272
raaaccacaaata

SEQ ID NO: 51007 - DNA, 13 bp, Artificial Sequence
  Oligonucleotide for detection of SNP TSC0014272
tatttgcggttty

SEQ ID NO: 51008 - DNA, 13 bp, Artificial Sequence
  Oligonucleotide for detection of SNP TSC0014272
raaaccgcaaata

SEQ ID NO: 51009 - DNA, 13 bp, Artificial Sequence
  Oligonucleotide for detection of SNP TSC0014272
ggggttgtaaata

SEQ ID NO: 51010 - DNA, 13 bp, Artificial Sequence
  Oligonucleotide for detection of SNP TSC0014272
tatttacaacccc

SEQ ID NO: 51011 - DNA, 13 bp, Artificial Sequence
  Oligonucleotide for detection of SNP TSC0014272
ggggttataaata

SEQ ID NO: 51012 - DNA, 13 bp, Artificial Sequence
  Oligonucleotide for detection of SNP TSC0014272
tatttataacccc

SEQ ID NO: 51013 - DNA, 13 bp, Artificial Sequence
  Oligonucleotide for detection of SNP TSC0014272
ggggtcgtaaata

SEQ ID NO: 51014 - DNA, 13 bp, Artificial Sequence
  Oligonucleotide for detection of SNP TSC0014272
tatttacgacccc

SEQ ID NO: 51015 - DNA, 13 bp, Artificial Sequence
  Oligonucleotide for detection of SNP TSC0014273
tagggttgggggy

SEQ ID NO: 51016 - DNA, 13 bp, Artificial Sequence
  Oligonucleotide for detection of SNP TSC0014273
rcccccaacccta

SEQ ID NO: 51017 - DNA, 13 bp, Artificial Sequence
  Oligonucleotide for detection of SNP TSC0014273
tagggtcgggggy

SEQ ID NO: 51018 - DNA, 13 bp, Artificial Sequence
  Oligonucleotide for detection of SNP TSC0014273
rcccccgacccta

SEQ ID NO: 51019 - DNA, 13 bp, Artificial Sequence
  Oligonucleotide for detection of SNP TSC0014273
gtttttggttttg

SEQ ID NO: 51020 - DNA, 13 bp, Artificial Sequence
  Oligonucleotide for detection of SNP TSC0014273
caaaaccaaaaac

SEQ ID NO: 51021 - DNA, 13 bp, Artificial Sequence
  Oligonucleotide for detection of SNP TSC0014273
gtttttagttttg

SEQ ID NO: 51022 - DNA, 13 bp, Artificial Sequence
  Oligonucleotide for detection of SNP TSC0014273
caaaactaaaaac

SEQ ID NO: 51023 - DNA, 13 bp, Artificial Sequence
  Oligonucleotide for detection of SNP TSC0014273
gttttcggttttg

SEQ ID NO: 51024 - DNA, 13 bp, Artificial Sequence
  Oligonucleotide for detection of SNP TSC0014273
caaaaccgaaaac

SEQ ID NO: 51025 - DNA, 13 bp, Artificial Sequence
  Oligonucleotide for detection of SNP TSC0014274
tttggagtagatg

SEQ ID NO: 51026 - DNA, 13 bp, Artificial Sequence
  Oligonucleotide for detection of SNP TSC0014274
catctactccaaa

SEQ ID NO: 51027 - DNA, 13 bp, Artificial Sequence
  Oligonucleotide for detection of SNP TSC0014274
tttggaatagatg

SEQ ID NO: 51028 - DNA, 13 bp, Artificial Sequence
  Oligonucleotide for detection of SNP TSC0014274
catctattccaaa

SEQ ID NO: 51029 - DNA, 13 bp, Artificial Sequence
  Oligonucleotide for detection of SNP TSC0014275
tgttggatattgt

SEQ ID NO: 51030 - DNA, 13 bp, Artificial Sequence
  Oligonucleotide for detection of SNP TSC0014275
acaatatccaaca

SEQ ID NO: 51031 - DNA, 13 bp, Artificial Sequence
  Oligonucleotide for detection of SNP TSC0014275
tgttgggtattgt

SEQ ID NO: 51032 - DNA, 13 bp, Artificial Sequence
  Oligonucleotide for detection of SNP TSC0014275
acaatacccaaca

SEQ ID NO: 51033 - DNA, 13 bp, Artificial Sequence
  Oligonucleotide for detection of SNP TSC0014276
ttaggaggggtag

SEQ ID NO: 51034 - DNA, 13 bp, Artificial Sequence
  Oligonucleotide for detection of SNP TSC0014276
ctacccctcctaa

SEQ ID NO: 51035 - DNA, 13 bp, Artificial Sequence
  Oligonucleotide for detection of SNP TSC0014276
ttaggaagggtag

SEQ ID NO: 51036 - DNA, 13 bp, Artificial Sequence
  Oligonucleotide for detection of SNP TSC0014276
ctacccttcctaa

SEQ ID NO: 51037 - DNA, 13 bp, Artificial Sequence
  Oligonucleotide for detection of SNP TSC0014277
tttttttgtttag

SEQ ID NO: 51038 - DNA, 13 bp, Artificial Sequence
  Oligonucleotide for detection of SNP TSC0014277
ctaaacaaaaaaa

SEQ ID NO: 51039 - DNA, 13 bp, Artificial Sequence
  Oligonucleotide for detection of SNP TSC0014277
ttttttcgtttag

SEQ ID NO: 51040 - DNA, 13 bp, Artificial Sequence
  Oligonucleotide for detection of SNP TSC0014277
ctaaacgaaaaaa

SEQ ID NO: 51041 - DNA, 13 bp, Artificial Sequence
  Oligonucleotide for detection of SNP TSC0014277
ttgagtggagggg

SEQ ID NO: 51042 - DNA, 13 bp, Artificial Sequence
  Oligonucleotide for detection of SNP TSC0014277
cccctccactcaa

SEQ ID NO: 51043 - DNA, 13 bp, Artificial Sequence
  Oligonucleotide for detection of SNP TSC0014277
ttgagtagagggg

SEQ ID NO: 51044 - DNA, 13 bp, Artificial Sequence
  Oligonucleotide for detection of SNP TSC0014277
cccctctactcaa

SEQ ID NO: 51045 - DNA, 13 bp, Artificial Sequence
  Oligonucleotide for detection of SNP TSC0014277
ttgagcggagggg

SEQ ID NO: 51046 - DNA, 13 bp, Artificial Sequence
  Oligonucleotide for detection of SNP TSC0014277
cccctccgctcaa

SEQ ID NO: 51047 - DNA, 13 bp, Artificial Sequence
  Oligonucleotide for detection of SNP TSC0014278
tagtgatttaaga

SEQ ID NO: 51048 - DNA, 13 bp, Artificial Sequence
  Oligonucleotide for detection of SNP TSC0014278
tcttaaatcacta

SEQ ID NO: 51049 - DNA, 13 bp, Artificial Sequence
  Oligonucleotide for detection of SNP TSC0014278
tagtgagttaaga

SEQ ID NO: 51050 - DNA, 13 bp, Artificial Sequence
  Oligonucleotide for detection of SNP TSC0014278
tcttaactcacta

SEQ ID NO: 51051 - DNA, 13 bp, Artificial Sequence
  Oligonucleotide for detection of SNP TSC0014278
ttttgggttattg

SEQ ID NO: 51052 - DNA, 13 bp, Artificial Sequence
  Oligonucleotide for detection of SNP TSC0014278
caataacccaaaa

SEQ ID NO: 51053 - DNA, 13 bp, Artificial Sequence
  Oligonucleotide for detection of SNP TSC0014278
ttttggtttattg

SEQ ID NO: 51054 - DNA, 13 bp, Artificial Sequence
  Oligonucleotide for detection of SNP TSC0014278
caataaaccaaaa

SEQ ID NO: 51055 - DNA, 13 bp, Artificial Sequence
  Oligonucleotide for detection of SNP TSC0014279
tttttagattatt

SEQ ID NO: 51056 - DNA, 13 bp, Artificial Sequence
  Oligonucleotide for detection of SNP TSC0014279
aataatctaaaaa

SEQ ID NO: 51057 - DNA, 13 bp, Artificial Sequence
  Oligonucleotide for detection of SNP TSC0014279
tttttatattatt

SEQ ID NO: 51058 - DNA, 13 bp, Artificial Sequence
  Oligonucleotide for detection of SNP TSC0014279
aataatataaaaa

SEQ ID NO: 51059 - DNA, 13 bp, Artificial Sequence
  Oligonucleotide for detection of SNP TSC0014279
agtgatttgaaaa

SEQ ID NO: 51060 - DNA, 13 bp, Artificial Sequence
  Oligonucleotide for detection of SNP TSC0014279
ttttcaaatcact

SEQ ID NO: 51061 - DNA, 13 bp, Artificial Sequence
  Oligonucleotide for detection of SNP TSC0014279
agtgatatgaaaa

SEQ ID NO: 51062 - DNA, 13 bp, Artificial Sequence
  Oligonucleotide for detection of SNP TSC0014279
ttttcatatcact

SEQ ID NO: 51063 - DNA, 13 bp, Artificial Sequence
  Oligonucleotide for detection of SNP TSC0014280
gtagtttatagaa

SEQ ID NO: 51064 - DNA, 13 bp, Artificial Sequence
  Oligonucleotide for detection of SNP TSC0014280
ttctataaactac

SEQ ID NO: 51065 - DNA, 13 bp, Artificial Sequence
  Oligonucleotide for detection of SNP TSC0014280
gtagttgatagaa

SEQ ID NO: 51066 - DNA, 13 bp, Artificial Sequence
  Oligonucleotide for detection of SNP TSC0014280
ttctatcaactac

SEQ ID NO: 51067 - DNA, 13 bp, Artificial Sequence
  Oligonucleotide for detection of SNP TSC0014280
ttttatgagttgy

SEQ ID NO: 51068 - DNA, 13 bp, Artificial Sequence
  Oligonucleotide for detection of SNP TSC0014280
rcaactcataaaa

SEQ ID NO: 51069 - DNA, 13 bp, Artificial Sequence
  Oligonucleotide for detection of SNP TSC0014280
ttttattagttgy

SEQ ID NO: 51070 - DNA, 13 bp, Artificial Sequence
  Oligonucleotide for detection of SNP TSC0014280
rcaactaataaaa

SEQ ID NO: 51071 - DNA, 13 bp, Artificial Sequence
  Oligonucleotide for detection of SNP TSC0014281
tagtgagatattg

SEQ ID NO: 51072 - DNA, 13 bp, Artificial Sequence
  Oligonucleotide for detection of SNP TSC0014281
caatatctcacta

SEQ ID NO: 51073 - DNA, 13 bp, Artificial Sequence
  Oligonucleotide for detection of SNP TSC0014281
tagtgaaatattg

SEQ ID NO: 51074 - DNA, 13 bp, Artificial Sequence
  Oligonucleotide for detection of SNP TSC0014281
caatatttcacta

SEQ ID NO: 51075 - DNA, 13 bp, Artificial Sequence
  Oligonucleotide for detection of SNP TSC0014282
tgtgagtgaagga

SEQ ID NO: 51076 - DNA, 13 bp, Artificial Sequence
  Oligonucleotide for detection of SNP TSC0014282
tccttcactcaca

SEQ ID NO: 51077 - DNA, 13 bp, Artificial Sequence
  Oligonucleotide for detection of SNP TSC0014282
tgtgagggaagga

SEQ ID NO: 51078 - DNA, 13 bp, Artificial Sequence
  Oligonucleotide for detection of SNP TSC0014282
tccttccctcaca

SEQ ID NO: 51079 - DNA, 13 bp, Artificial Sequence
  Oligonucleotide for detection of SNP TSC0014284
gaatttgggaatg

SEQ ID NO: 51080 - DNA, 13 bp, Artificial Sequence
  Oligonucleotide for detection of SNP TSC0014284
cattcccaaattc

SEQ ID NO: 51081 - DNA, 13 bp, Artificial Sequence
  Oligonucleotide for detection of SNP TSC0014284
gaatttaggaatg

SEQ ID NO: 51082 - DNA, 13 bp, Artificial Sequence
  Oligonucleotide for detection of SNP TSC0014284
cattcctaaattc

SEQ ID NO: 51083 - DNA, 13 bp, Artificial Sequence
  Oligonucleotide for detection of SNP TSC0014285
gttttgagttttt

SEQ ID NO: 51084 - DNA, 13 bp, Artificial Sequence
  Oligonucleotide for detection of SNP TSC0014285
aaaaactcaaaac

SEQ ID NO: 51085 - DNA, 13 bp, Artificial Sequence
  Oligonucleotide for detection of SNP TSC0014285
gttttgtgttttt

SEQ ID NO: 51086 - DNA, 13 bp, Artificial Sequence
  Oligonucleotide for detection of SNP TSC0014285
aaaaacacaaaac

SEQ ID NO: 51087 - DNA, 13 bp, Artificial Sequence
  Oligonucleotide for detection of SNP TSC0014285
aggggtttaaaay

SEQ ID NO: 51088 - DNA, 13 bp, Artificial Sequence
  Oligonucleotide for detection of SNP TSC0014285
rttttaaacccct

SEQ ID NO: 51089 - DNA, 13 bp, Artificial Sequence
  Oligonucleotide for detection of SNP TSC0014285
aggggtataaaay

SEQ ID NO: 51090 - DNA, 13 bp, Artificial Sequence
  Oligonucleotide for detection of SNP TSC0014285
rttttatacccct

SEQ ID NO: 51091 - DNA, 13 bp, Artificial Sequence
  Oligonucleotide for detection of SNP TSC0014287
aaatgaagggtga

SEQ ID NO: 51092 - DNA, 13 bp, Artificial Sequence
  Oligonucleotide for detection of SNP TSC0014287
tcacccttcattt

SEQ ID NO: 51093 - DNA, 13 bp, Artificial Sequence
  Oligonucleotide for detection of SNP TSC0014287
aaatgaggggtga

SEQ ID NO: 51094 - DNA, 13 bp, Artificial Sequence
  Oligonucleotide for detection of SNP TSC0014287
tcacccctcattt

SEQ ID NO: 51095 - DNA, 13 bp, Artificial Sequence
  Oligonucleotide for detection of SNP TSC0014288
ataaatatttaag

SEQ ID NO: 51096 - DNA, 13 bp, Artificial Sequence
  Oligonucleotide for detection of SNP TSC0014288
cttaaatatttat

SEQ ID NO: 51097 - DNA, 13 bp, Artificial Sequence
  Oligonucleotide for detection of SNP TSC0014288
ataaatgtttaag

SEQ ID NO: 51098 - DNA, 13 bp, Artificial Sequence
  Oligonucleotide for detection of SNP TSC0014288
cttaaacatttat

SEQ ID NO: 51099 - DNA, 13 bp, Artificial Sequence
  Oligonucleotide for detection of SNP TSC0014288
ataaacgtttaag

SEQ ID NO: 51100 - DNA, 13 bp, Artificial Sequence
  Oligonucleotide for detection of SNP TSC0014288
cttaaacgtttat

SEQ ID NO: 51101 - DNA, 13 bp, Artificial Sequence
  Oligonucleotide for detection of SNP TSC0014288
tttaaatgtttat

SEQ ID NO: 51102 - DNA, 13 bp, Artificial Sequence
  Oligonucleotide for detection of SNP TSC0014288
ataaacatttaaa

SEQ ID NO: 51103 - DNA, 13 bp, Artificial Sequence
  Oligonucleotide for detection of SNP TSC0014288
tttaaacgtttat

SEQ ID NO: 51104 - DNA, 13 bp, Artificial Sequence
  Oligonucleotide for detection of SNP TSC0014288
ataaacgtttaaa

SEQ ID NO: 51105 - DNA, 13 bp, Artificial Sequence
  Oligonucleotide for detection of SNP TSC0014289
gggttaggtgttg

SEQ ID NO: 51106 - DNA, 13 bp, Artificial Sequence
  Oligonucleotide for detection of SNP TSC0014289
caacacctaaccc

SEQ ID NO: 51107 - DNA, 13 bp, Artificial Sequence
  Oligonucleotide for detection of SNP TSC0014289
gggttaagtgttg

SEQ ID NO: 51108 - DNA, 13 bp, Artificial Sequence
  Oligonucleotide for detection of SNP TSC0014289
caacacttaaccc

SEQ ID NO: 51109 - DNA, 13 bp, Artificial Sequence
  Oligonucleotide for detection of SNP TSC0014295
tatttggggaaty

SEQ ID NO: 51110 - DNA, 13 bp, Artificial Sequence
  Oligonucleotide for detection of SNP TSC0014295
rattccccaaata

SEQ ID NO: 51111 - DNA, 13 bp, Artificial Sequence
  Oligonucleotide for detection of SNP TSC0014295
tatttgaggaaty

SEQ ID NO: 51112 - DNA, 13 bp, Artificial Sequence
  Oligonucleotide for detection of SNP TSC0014295
rattcctcaaata

SEQ ID NO: 51113 - DNA, 13 bp, Artificial Sequence
  Oligonucleotide for detection of SNP TSC0014296
aagatggggagay

SEQ ID NO: 51114 - DNA, 13 bp, Artificial Sequence
  Oligonucleotide for detection of SNP TSC0014296
rtctccccatctt

SEQ ID NO: 51115 - DNA, 13 bp, Artificial Sequence
  Oligonucleotide for detection of SNP TSC0014296
aagatgtggagay

SEQ ID NO: 51116 - DNA, 13 bp, Artificial Sequence
  Oligonucleotide for detection of SNP TSC0014296
rtctccacatctt

SEQ ID NO: 51117 - DNA, 13 bp, Artificial Sequence
  Oligonucleotide for detection of SNP TSC0014296
gtttttttatttt

SEQ ID NO: 51118 - DNA, 13 bp, Artificial Sequence
  Oligonucleotide for detection of SNP TSC0014296
aaaataaaaaaac

SEQ ID NO: 51119 - DNA, 13 bp, Artificial Sequence
  Oligonucleotide for detection of SNP TSC0014296
gtttttatatttt

SEQ ID NO: 51120 - DNA, 13 bp, Artificial Sequence
  Oligonucleotide for detection of SNP TSC0014296
aaaatataaaaac

SEQ ID NO: 51121 - DNA, 13 bp, Artificial Sequence
  Oligonucleotide for detection of SNP TSC0014297
taaggaatattgy

SEQ ID NO: 51122 - DNA, 13 bp, Artificial Sequence
  Oligonucleotide for detection of SNP TSC0014297
rcaatattcctta

SEQ ID NO: 51123 - DNA, 13 bp, Artificial Sequence
  Oligonucleotide for detection of SNP TSC0014297
taaggattattgy

SEQ ID NO: 51124 - DNA, 13 bp, Artificial Sequence
  Oligonucleotide for detection of SNP TSC0014297
rcaataatcctta

SEQ ID NO: 51125 - DNA, 13 bp, Artificial Sequence
  Oligonucleotide for detection of SNP TSC0014297
gtaatgttttttg

SEQ ID NO: 51126 - DNA, 13 bp, Artificial Sequence
  Oligonucleotide for detection of SNP TSC0014297
caaaaaacattac

SEQ ID NO: 51127 - DNA, 13 bp, Artificial Sequence
  Oligonucleotide for detection of SNP TSC0014297
gtaatggtttttg

SEQ ID NO: 51128 - DNA, 13 bp, Artificial Sequence
  Oligonucleotide for detection of SNP TSC0014297
caaaaaccattac

SEQ ID NO: 51129 - DNA, 13 bp, Artificial Sequence
  Oligonucleotide for detection of SNP TSC0014299
gttttgaggtata

SEQ ID NO: 51130 - DNA, 13 bp, Artificial Sequence
  Oligonucleotide for detection of SNP TSC0014299
tatacctcaaaac

SEQ ID NO: 51131 - DNA, 13 bp, Artificial Sequence
  Oligonucleotide for detection of SNP TSC0014299
gttttggggtata

SEQ ID NO: 51132 - DNA, 13 bp, Artificial Sequence
  Oligonucleotide for detection of SNP TSC0014299
tataccccaaaac

SEQ ID NO: 51133 - DNA, 13 bp, Artificial Sequence
  Oligonucleotide for detection of SNP TSC0014301
tatagagtgggga

SEQ ID NO: 51134 - DNA, 13 bp, Artificial Sequence
  Oligonucleotide for detection of SNP TSC0014301
tccccactctata

SEQ ID NO: 51135 - DNA, 13 bp, Artificial Sequence
  Oligonucleotide for detection of SNP TSC0014301
tatagaatgggga

SEQ ID NO: 51136 - DNA, 13 bp, Artificial Sequence
  Oligonucleotide for detection of SNP TSC0014301
tccccattctata

SEQ ID NO: 51137 - DNA, 13 bp, Artificial Sequence
  Oligonucleotide for detection of SNP TSC0014303
gaggtagtgtttt

SEQ ID NO: 51138 - DNA, 13 bp, Artificial Sequence
  Oligonucleotide for detection of SNP TSC0014303
aaaacactacctc

SEQ ID NO: 51139 - DNA, 13 bp, Artificial Sequence
  Oligonucleotide for detection of SNP TSC0014303
gaggtaatgtttt

SEQ ID NO: 51140 - DNA, 13 bp, Artificial Sequence
  Oligonucleotide for detection of SNP TSC0014303
aaaacattacctc

SEQ ID NO: 51141 - DNA, 13 bp, Artificial Sequence
  Oligonucleotide for detection of SNP TSC0014304
tagggaaaggttg

SEQ ID NO: 51142 - DNA, 13 bp, Artificial Sequence
  Oligonucleotide for detection of SNP TSC0014304
caacctttcccta

SEQ ID NO: 51143 - DNA, 13 bp, Artificial Sequence
  Oligonucleotide for detection of SNP TSC0014304
tagggagaggttg

SEQ ID NO: 51144 - DNA, 13 bp, Artificial Sequence
  Oligonucleotide for detection of SNP TSC0014304
caacctctcccta

SEQ ID NO: 51145 - DNA, 13 bp, Artificial Sequence
  Oligonucleotide for detection of SNP TSC0014311
gaaggggggttty

SEQ ID NO: 51146 - DNA, 13 bp, Artificial Sequence
  Oligonucleotide for detection of SNP TSC0014311
raaaccccccttc

SEQ ID NO: 51147 - DNA, 13 bp, Artificial Sequence
  Oligonucleotide for detection of SNP TSC0014311
gaagggaggttty

SEQ ID NO: 51148 - DNA, 13 bp, Artificial Sequence
  Oligonucleotide for detection of SNP TSC0014311
raaacctcccttc

SEQ ID NO: 51149 - DNA, 13 bp, Artificial Sequence
  Oligonucleotide for detection of SNP TSC0014317
gaaaataggtttg

SEQ ID NO: 51150 - DNA, 13 bp, Artificial Sequence
  Oligonucleotide for detection of SNP TSC0014317
caaacctattttc

SEQ ID NO: 51151 - DNA, 13 bp, Artificial Sequence
  Oligonucleotide for detection of SNP TSC0014317
gaaaatgggtttg

SEQ ID NO: 51152 - DNA, 13 bp, Artificial Sequence
  Oligonucleotide for detection of SNP TSC0014317
caaacccattttc

SEQ ID NO: 51153 - DNA, 13 bp, Artificial Sequence
  Oligonucleotide for detection of SNP TSC0014317
gaaaacgggtttg

SEQ ID NO: 51154 - DNA, 13 bp, Artificial Sequence
  Oligonucleotide for detection of SNP TSC0014317
caaacccgttttc

SEQ ID NO: 51155 - DNA, 13 bp, Artificial Sequence
  Oligonucleotide for detection of SNP TSC0014317
taggtttgtttty

SEQ ID NO: 51156 - DNA, 13 bp, Artificial Sequence
  Oligonucleotide for detection of SNP TSC0014317
raaaacaaaccta

SEQ ID NO: 51157 - DNA, 13 bp, Artificial Sequence
  Oligonucleotide for detection of SNP TSC0014317
taggttcgtttty

SEQ ID NO: 51158 - DNA, 13 bp, Artificial Sequence
  Oligonucleotide for detection of SNP TSC0014317
raaaacgaaccta

SEQ ID NO: 51159 - DNA, 13 bp, Artificial Sequence
  Oligonucleotide for detection of SNP TSC0014318
ggtgttttgtggg

SEQ ID NO: 51160 - DNA, 13 bp, Artificial Sequence
  Oligonucleotide for detection of SNP TSC0014318
cccacaaaacacc

SEQ ID NO: 51161 - DNA, 13 bp, Artificial Sequence
  Oligonucleotide for detection of SNP TSC0014318
ggtgttgtgtggg

SEQ ID NO: 51162 - DNA, 13 bp, Artificial Sequence
  Oligonucleotide for detection of SNP TSC0014318
cccacacaacacc

SEQ ID NO: 51163 - DNA, 13 bp, Artificial Sequence
  Oligonucleotide for detection of SNP TSC0014318
ggcgttttgtggg

SEQ ID NO: 51164 - DNA, 13 bp, Artificial Sequence
  Oligonucleotide for detection of SNP TSC0014318
cccacaaaacgcc

SEQ ID NO: 51165 - DNA, 13 bp, Artificial Sequence
  Oligonucleotide for detection of SNP TSC0014318
ggcgttgtgtggg

SEQ ID NO: 51166 - DNA, 13 bp, Artificial Sequence
  Oligonucleotide for detection of SNP TSC0014318
cccacacaacgcc

SEQ ID NO: 51167 - DNA, 13 bp, Artificial Sequence
  Oligonucleotide for detection of SNP TSC0014318
ggtgtttcgtggg

SEQ ID NO: 51168 - DNA, 13 bp, Artificial Sequence
  Oligonucleotide for detection of SNP TSC0014318
cccacgaaacacc

SEQ ID NO: 51169 - DNA, 13 bp, Artificial Sequence
  Oligonucleotide for detection of SNP TSC0014318
ggtgtcgtgtggg

SEQ ID NO: 51170 - DNA, 13 bp, Artificial Sequence
  Oligonucleotide for detection of SNP TSC0014318
cccacacgacacc

SEQ ID NO: 51171 - DNA, 13 bp, Artificial Sequence
  Oligonucleotide for detection of SNP TSC0014318
ggtgttttgcggg

SEQ ID NO: 51172 - DNA, 13 bp, Artificial Sequence
  Oligonucleotide for detection of SNP TSC0014318
cccgcaaaacacc

SEQ ID NO: 51173 - DNA, 13 bp, Artificial Sequence
  Oligonucleotide for detection of SNP TSC0014318
ggtgttgcgtggg

SEQ ID NO: 51174 - DNA, 13 bp, Artificial Sequence
  Oligonucleotide for detection of SNP TSC0014318
cccacgcaacacc

SEQ ID NO: 51175 - DNA, 13 bp, Artificial Sequence
  Oligonucleotide for detection of SNP TSC0014318
ggcgtttcgtggg

SEQ ID NO: 51176 - DNA, 13 bp, Artificial Sequence
  Oligonucleotide for detection of SNP TSC0014318
cccacgaaacgcc

SEQ ID NO: 51177 - DNA, 13 bp, Artificial Sequence
  Oligonucleotide for detection of SNP TSC0014318
ggtgttgtgcggg

SEQ ID NO: 51178 - DNA, 13 bp, Artificial Sequence
  Oligonucleotide for detection of SNP TSC0014318
cccgcacaacacc

SEQ ID NO: 51179 - DNA, 13 bp, Artificial Sequence
  Oligonucleotide for detection of SNP TSC0014318
ggcgttttgcggg

SEQ ID NO: 51180 - DNA, 13 bp, Artificial Sequence
  Oligonucleotide for detection of SNP TSC0014318
cccgcaaaacgcc

SEQ ID NO: 51181 - DNA, 13 bp, Artificial Sequence
  Oligonucleotide for detection of SNP TSC0014318
ggcgtcgtgtggg

SEQ ID NO: 51182 - DNA, 13 bp, Artificial Sequence
  Oligonucleotide for detection of SNP TSC0014318
cccacacgacgcc

SEQ ID NO: 51183 - DNA, 13 bp, Artificial Sequence
  Oligonucleotide for detection of SNP TSC0014318
ggtgtttcgcggg

SEQ ID NO: 51184 - DNA, 13 bp, Artificial Sequence
  Oligonucleotide for detection of SNP TSC0014318
cccgcgaaacacc

SEQ ID NO: 51185 - DNA, 13 bp, Artificial Sequence
  Oligonucleotide for detection of SNP TSC0014318
ggcgttgcgtggg

SEQ ID NO: 51186 - DNA, 13 bp, Artificial Sequence
  Oligonucleotide for detection of SNP TSC0014318
cccacgcaacgcc

SEQ ID NO: 51187 - DNA, 13 bp, Artificial Sequence
  Oligonucleotide for detection of SNP TSC0014318
ggcgtttcgcggg

SEQ ID NO: 51188 - DNA, 13 bp, Artificial Sequence
  Oligonucleotide for detection of SNP TSC0014318
cccgcgaaacgcc

SEQ ID NO: 51189 - DNA, 13 bp, Artificial Sequence
  Oligonucleotide for detection of SNP TSC0014318
ggcgttgtgcggg

SEQ ID NO: 51190 - DNA, 13 bp, Artificial Sequence
  Oligonucleotide for detection of SNP TSC0014318
cccgcacaacgcc

SEQ ID NO: 51191 - DNA, 13 bp, Artificial Sequence
  Oligonucleotide for detection of SNP TSC0014318
ggtgtcgcgtggg

SEQ ID NO: 51192 - DNA, 13 bp, Artificial Sequence
  Oligonucleotide for detection of SNP TSC0014318
cccacgcgacacc

SEQ ID NO: 51193 - DNA, 13 bp, Artificial Sequence
  Oligonucleotide for detection of SNP TSC0014318
ggtgtcgtgcggg

SEQ ID NO: 51194 - DNA, 13 bp, Artificial Sequence
  Oligonucleotide for detection of SNP TSC0014318
cccgcacgacacc

SEQ ID NO: 51195 - DNA, 13 bp, Artificial Sequence
  Oligonucleotide for detection of SNP TSC0014318
ggtgttgcgcggg

SEQ ID NO: 51196 - DNA, 13 bp, Artificial Sequence
  Oligonucleotide for detection of SNP TSC0014318
cccgcgcaacacc

SEQ ID NO: 51197 - DNA, 13 bp, Artificial Sequence
  Oligonucleotide for detection of SNP TSC0014318
ggcgtcgcgtggg

SEQ ID NO: 51198 - DNA, 13 bp, Artificial Sequence
  Oligonucleotide for detection of SNP TSC0014318
cccacgcgacgcc

SEQ ID NO: 51199 - DNA, 13 bp, Artificial Sequence
  Oligonucleotide for detection of SNP TSC0014318
ggcgtcgtgcggg

SEQ ID NO: 51200 - DNA, 13 bp, Artificial Sequence
  Oligonucleotide for detection of SNP TSC0014318
cccgcacgacgcc

SEQ ID NO: 51201 - DNA, 13 bp, Artificial Sequence
  Oligonucleotide for detection of SNP TSC0014318
ggcgttgcgcggg

SEQ ID NO: 51202 - DNA, 13 bp, Artificial Sequence
  Oligonucleotide for detection of SNP TSC0014318
cccgcgcaacgcc

SEQ ID NO: 51203 - DNA, 13 bp, Artificial Sequence
  Oligonucleotide for detection of SNP TSC0014318
ggtgtcgcgcggg

SEQ ID NO: 51204 - DNA, 13 bp, Artificial Sequence
  Oligonucleotide for detection of SNP TSC0014318
cccgcgcgacacc

SEQ ID NO: 51205 - DNA, 13 bp, Artificial Sequence
  Oligonucleotide for detection of SNP TSC0014318
ggcgtcgcgcggg

SEQ ID NO: 51206 - DNA, 13 bp, Artificial Sequence
  Oligonucleotide for detection of SNP TSC0014318
cccgcgcgacgcc

SEQ ID NO: 51207 - DNA, 13 bp, Artificial Sequence
  Oligonucleotide for detection of SNP TSC0014318
tttgtggggtgty

SEQ ID NO: 51208 - DNA, 13 bp, Artificial Sequence
  Oligonucleotide for detection of SNP TSC0014318
racaccccacaaa

SEQ ID NO: 51209 - DNA, 13 bp, Artificial Sequence
  Oligonucleotide for detection of SNP TSC0014318
tttgtgtggtgty

SEQ ID NO: 51210 - DNA, 13 bp, Artificial Sequence
  Oligonucleotide for detection of SNP TSC0014318
racaccacacaaa

SEQ ID NO: 51211 - DNA, 13 bp, Artificial Sequence
  Oligonucleotide for detection of SNP TSC0014318
ttcgtggggtgty

SEQ ID NO: 51212 - DNA, 13 bp, Artificial Sequence
  Oligonucleotide for detection of SNP TSC0014318
racaccccacgaa

SEQ ID NO: 51213 - DNA, 13 bp, Artificial Sequence
  Oligonucleotide for detection of SNP TSC0014318
ttcgtgtggtgty

SEQ ID NO: 51214 - DNA, 13 bp, Artificial Sequence
  Oligonucleotide for detection of SNP TSC0014318
racaccacacgaa

SEQ ID NO: 51215 - DNA, 13 bp, Artificial Sequence
  Oligonucleotide for detection of SNP TSC0014318
tttgcggggtgty

SEQ ID NO: 51216 - DNA, 13 bp, Artificial Sequence
  Oligonucleotide for detection of SNP TSC0014318
racaccccgcaaa

SEQ ID NO: 51217 - DNA, 13 bp, Artificial Sequence
  Oligonucleotide for detection of SNP TSC0014318
tttgcgtggtgty

SEQ ID NO: 51218 - DNA, 13 bp, Artificial Sequence
  Oligonucleotide for detection of SNP TSC0014318
racaccacgcaaa

SEQ ID NO: 51219 - DNA, 13 bp, Artificial Sequence
  Oligonucleotide for detection of SNP TSC0014318
tttgtggggcgty

SEQ ID NO: 51220 - DNA, 13 bp, Artificial Sequence
  Oligonucleotide for detection of SNP TSC0014318
racgccccacaaa

SEQ ID NO: 51221 - DNA, 13 bp, Artificial Sequence
  Oligonucleotide for detection of SNP TSC0014318
tttgtgcggtgty

SEQ ID NO: 51222 - DNA, 13 bp, Artificial Sequence
  Oligonucleotide for detection of SNP TSC0014318
racaccgcacaaa

SEQ ID NO: 51223 - DNA, 13 bp, Artificial Sequence
  Oligonucleotide for detection of SNP TSC0014318
ttcgcggggtgty

SEQ ID NO: 51224 - DNA, 13 bp, Artificial Sequence
  Oligonucleotide for detection of SNP TSC0014318
racaccccgcgaa

SEQ ID NO: 51225 - DNA, 13 bp, Artificial Sequence
  Oligonucleotide for detection of SNP TSC0014318
tttgtgtggcgty

SEQ ID NO: 51226 - DNA, 13 bp, Artificial Sequence
  Oligonucleotide for detection of SNP TSC0014318
racgccacacaaa

SEQ ID NO: 51227 - DNA, 13 bp, Artificial Sequence
  Oligonucleotide for detection of SNP TSC0014318
ttcgtggggcgty

SEQ ID NO: 51228 - DNA, 13 bp, Artificial Sequence
  Oligonucleotide for detection of SNP TSC0014318
racgccccacgaa

SEQ ID NO: 51229 - DNA, 13 bp, Artificial Sequence
  Oligonucleotide for detection of SNP TSC0014318
ttcgcgtggtgty

SEQ ID NO: 51230 - DNA, 13 bp, Artificial Sequence
  Oligonucleotide for detection of SNP TSC0014318
racaccacgcgaa

SEQ ID NO: 51231 - DNA, 13 bp, Artificial Sequence
  Oligonucleotide for detection of SNP TSC0014318
tttgcggggcgty

SEQ ID NO: 51232 - DNA, 13 bp, Artificial Sequence
  Oligonucleotide for detection of SNP TSC0014318
racgccccgcaaa

SEQ ID NO: 51233 - DNA, 13 bp, Artificial Sequence
  Oligonucleotide for detection of SNP TSC0014318
ttcgtgcggtgty

SEQ ID NO: 51234 - DNA, 13 bp, Artificial Sequence
  Oligonucleotide for detection of SNP TSC0014318
racaccgcacgaa

SEQ ID NO: 51235 - DNA, 13 bp, Artificial Sequence
  Oligonucleotide for detection of SNP TSC0014318
ttcgcggggcgty

SEQ ID NO: 51236 - DNA, 13 bp, Artificial Sequence
  Oligonucleotide for detection of SNP TSC0014318
racgccccgcgaa

SEQ ID NO: 51237 - DNA, 13 bp, Artificial Sequence
  Oligonucleotide for detection of SNP TSC0014318
ttcgtgtggcgty

SEQ ID NO: 51238 - DNA, 13 bp, Artificial Sequence
  Oligonucleotide for detection of SNP TSC0014318
racgccacacgaa

SEQ ID NO: 51239 - DNA, 13 bp, Artificial Sequence
  Oligonucleotide for detection of SNP TSC0014318
tttgcgcggtgty

SEQ ID NO: 51240 - DNA, 13 bp, Artificial Sequence
  Oligonucleotide for detection of SNP TSC0014318
racaccgcgcaaa

SEQ ID NO: 51241 - DNA, 13 bp, Artificial Sequence
  Oligonucleotide for detection of SNP TSC0014318
tttgcgtggcgty

SEQ ID NO: 51242 - DNA, 13 bp, Artificial Sequence
  Oligonucleotide for detection of SNP TSC0014318
racgccacgcaaa

SEQ ID NO: 51243 - DNA, 13 bp, Artificial Sequence
  Oligonucleotide for detection of SNP TSC0014318
tttgtgcggcgty

SEQ ID NO: 51244 - DNA, 13 bp, Artificial Sequence
  Oligonucleotide for detection of SNP TSC0014318
racgccgcacaaa

SEQ ID NO: 51245 - DNA, 13 bp, Artificial Sequence
  Oligonucleotide for detection of SNP TSC0014318
ttcgcgcggtgty

SEQ ID NO: 51246 - DNA, 13 bp, Artificial Sequence
  Oligonucleotide for detection of SNP TSC0014318
racaccgcgcgaa

SEQ ID NO: 51247 - DNA, 13 bp, Artificial Sequence
  Oligonucleotide for detection of SNP TSC0014318
ttcgcgtggcgty

SEQ ID NO: 51248 - DNA, 13 bp, Artificial Sequence
  Oligonucleotide for detection of SNP TSC0014318
racgccacgcgaa

SEQ ID NO: 51249 - DNA, 13 bp, Artificial Sequence
  Oligonucleotide for detection of SNP TSC0014318
ttcgtgcggcgty

SEQ ID NO: 51250 - DNA, 13 bp, Artificial Sequence
  Oligonucleotide for detection of SNP TSC0014318
racgccgcacgaa

SEQ ID NO: 51251 - DNA, 13 bp, Artificial Sequence
  Oligonucleotide for detection of SNP TSC0014318
tttgcgcggcgty

SEQ ID NO: 51252 - DNA, 13 bp, Artificial Sequence
  Oligonucleotide for detection of SNP TSC0014318
racgccgcgcaaa

SEQ ID NO: 51253 - DNA, 13 bp, Artificial Sequence
  Oligonucleotide for detection of SNP TSC0014318
ttcgcgcggcgty

SEQ ID NO: 51254 - DNA, 13 bp, Artificial Sequence
  Oligonucleotide for detection of SNP TSC0014318
racgccgcgcgaa

SEQ ID NO: 51255 - DNA, 13 bp, Artificial Sequence
  Oligonucleotide for detection of SNP TSC0014319
ttgaaatgtgttt

SEQ ID NO: 51256 - DNA, 13 bp, Artificial Sequence
  Oligonucleotide for detection of SNP TSC0014319
aaacacatttcaa

SEQ ID NO: 51257 - DNA, 13 bp, Artificial Sequence
  Oligonucleotide for detection of SNP TSC0014319
ttgaaacgtgttt

SEQ ID NO: 51258 - DNA, 13 bp, Artificial Sequence
  Oligonucleotide for detection of SNP TSC0014319
aaacacgtttcaa

SEQ ID NO: 51259 - DNA, 13 bp, Artificial Sequence
  Oligonucleotide for detection of SNP TSC0014319
aggtatgttttag

SEQ ID NO: 51260 - DNA, 13 bp, Artificial Sequence
  Oligonucleotide for detection of SNP TSC0014319
ctaaaacatacct

SEQ ID NO: 51261 - DNA, 13 bp, Artificial Sequence
  Oligonucleotide for detection of SNP TSC0014319
aggtatattttag

SEQ ID NO: 51262 - DNA, 13 bp, Artificial Sequence
  Oligonucleotide for detection of SNP TSC0014319
ctaaaatatacct

SEQ ID NO: 51263 - DNA, 13 bp, Artificial Sequence
  Oligonucleotide for detection of SNP TSC0014319
aggtacgttttag

SEQ ID NO: 51264 - DNA, 13 bp, Artificial Sequence
  Oligonucleotide for detection of SNP TSC0014319
ctaaaacgtacct

SEQ ID NO: 51265 - DNA, 13 bp, Artificial Sequence
  Oligonucleotide for detection of SNP TSC0014322
tttgggagataga

SEQ ID NO: 51266 - DNA, 13 bp, Artificial Sequence
  Oligonucleotide for detection of SNP TSC0014322
tctatctcccaaa

SEQ ID NO: 51267 - DNA, 13 bp, Artificial Sequence
  Oligonucleotide for detection of SNP TSC0014322
tttgttttttagg

SEQ ID NO: 51268 - DNA, 13 bp, Artificial Sequence
  Oligonucleotide for detection of SNP TSC0014322
cctaaaaaacaaa

SEQ ID NO: 51269 - DNA, 13 bp, Artificial Sequence
  Oligonucleotide for detection of SNP TSC0014323
ttttgggattaty

SEQ ID NO: 51270 - DNA, 13 bp, Artificial Sequence
  Oligonucleotide for detection of SNP TSC0014323
rataatcccaaaa

SEQ ID NO: 51271 - DNA, 13 bp, Artificial Sequence
  Oligonucleotide for detection of SNP TSC0014323
ttttggaattaty

SEQ ID NO: 51272 - DNA, 13 bp, Artificial Sequence
  Oligonucleotide for detection of SNP TSC0014323
rataattccaaaa

SEQ ID NO: 51273 - DNA, 13 bp, Artificial Sequence
  Oligonucleotide for detection of SNP TSC0014324
aattaatgtattt

SEQ ID NO: 51274 - DNA, 13 bp, Artificial Sequence
  Oligonucleotide for detection of SNP TSC0014324
aaatacattaatt

SEQ ID NO: 51275 - DNA, 13 bp, Artificial Sequence
  Oligonucleotide for detection of SNP TSC0014324
aattaacgtattt

SEQ ID NO: 51276 - DNA, 13 bp, Artificial Sequence
  Oligonucleotide for detection of SNP TSC0014324
aaatacgttaatt

SEQ ID NO: 51277 - DNA, 13 bp, Artificial Sequence
  Oligonucleotide for detection of SNP TSC0014328
tttaggggtttta

SEQ ID NO: 51278 - DNA, 13 bp, Artificial Sequence
  Oligonucleotide for detection of SNP TSC0014328
taaaacccctaaa

SEQ ID NO: 51279 - DNA, 13 bp, Artificial Sequence
  Oligonucleotide for detection of SNP TSC0014328
tttaggagtttta

SEQ ID NO: 51280 - DNA, 13 bp, Artificial Sequence
  Oligonucleotide for detection of SNP TSC0014328
taaaactcctaaa

SEQ ID NO: 51281 - DNA, 13 bp, Artificial Sequence
  Oligonucleotide for detection of SNP TSC0014330
tacgtttggttaa

SEQ ID NO: 51282 - DNA, 13 bp, Artificial Sequence
  Oligonucleotide for detection of SNP TSC0014330
ttaaccaaacgta

SEQ ID NO: 51283 - DNA, 13 bp, Artificial Sequence
  Oligonucleotide for detection of SNP TSC0014330
tacgttcggttaa

SEQ ID NO: 51284 - DNA, 13 bp, Artificial Sequence
  Oligonucleotide for detection of SNP TSC0014330
ttaaccgaacgta

SEQ ID NO: 51285 - DNA, 13 bp, Artificial Sequence
  Oligonucleotide for detection of SNP TSC0014331
gaatggtgtgaay

SEQ ID NO: 51286 - DNA, 13 bp, Artificial Sequence
  Oligonucleotide for detection of SNP TSC0014331
rttcacaccattc

SEQ ID NO: 51287 - DNA, 13 bp, Artificial Sequence
  Oligonucleotide for detection of SNP TSC0014331
gaatggcgtgaay

SEQ ID NO: 51288 - DNA, 13 bp, Artificial Sequence
  Oligonucleotide for detection of SNP TSC0014331
rttcacgccattc

SEQ ID NO: 51289 - DNA, 13 bp, Artificial Sequence
  Oligonucleotide for detection of SNP TSC0014331
gtttatgttatty

SEQ ID NO: 51290 - DNA, 13 bp, Artificial Sequence
  Oligonucleotide for detection of SNP TSC0014331
raataacataaac

SEQ ID NO: 51291 - DNA, 13 bp, Artificial Sequence
  Oligonucleotide for detection of SNP TSC0014331
gtttatattatty

SEQ ID NO: 51292 - DNA, 13 bp, Artificial Sequence
  Oligonucleotide for detection of SNP TSC0014331
raataatataaac

SEQ ID NO: 51293 - DNA, 13 bp, Artificial Sequence
  Oligonucleotide for detection of SNP TSC0014331
gtttacgttatty

SEQ ID NO: 51294 - DNA, 13 bp, Artificial Sequence
  Oligonucleotide for detection of SNP TSC0014331
raataacgtaaac

SEQ ID NO: 51295 - DNA, 13 bp, Artificial Sequence
  Oligonucleotide for detection of SNP TSC0014332
attatgagtgggt

SEQ ID NO: 51296 - DNA, 13 bp, Artificial Sequence
  Oligonucleotide for detection of SNP TSC0014332
acccactcataat

SEQ ID NO: 51297 - DNA, 13 bp, Artificial Sequence
  Oligonucleotide for detection of SNP TSC0014332
attatgggtgggt

SEQ ID NO: 51298 - DNA, 13 bp, Artificial Sequence
  Oligonucleotide for detection of SNP TSC0014332
acccacccataat

SEQ ID NO: 51299 - DNA, 13 bp, Artificial Sequence
  Oligonucleotide for detection of SNP TSC0014332
attatgagcgggt

SEQ ID NO: 51300 - DNA, 13 bp, Artificial Sequence
  Oligonucleotide for detection of SNP TSC0014332
acccgctcataat

SEQ ID NO: 51301 - DNA, 13 bp, Artificial Sequence
  Oligonucleotide for detection of SNP TSC0014332
attatgggcgggt

SEQ ID NO: 51302 - DNA, 13 bp, Artificial Sequence
  Oligonucleotide for detection of SNP TSC0014332
acccgcccataat

SEQ ID NO: 51303 - DNA, 13 bp, Artificial Sequence
  Oligonucleotide for detection of SNP TSC0014333
ttagttattggat

SEQ ID NO: 51304 - DNA, 13 bp, Artificial Sequence
  Oligonucleotide for detection of SNP TSC0014333
atccaataactaa

SEQ ID NO: 51305 - DNA, 13 bp, Artificial Sequence
  Oligonucleotide for detection of SNP TSC0014333
ttagttgttggat

SEQ ID NO: 51306 - DNA, 13 bp, Artificial Sequence
  Oligonucleotide for detection of SNP TSC0014333
atccaacaactaa

SEQ ID NO: 51307 - DNA, 13 bp, Artificial Sequence
  Oligonucleotide for detection of SNP TSC0014333
ttagtcgttggat

SEQ ID NO: 51308 - DNA, 13 bp, Artificial Sequence
  Oligonucleotide for detection of SNP TSC0014333
atccaacgactaa

SEQ ID NO: 51309 - DNA, 13 bp, Artificial Sequence
  Oligonucleotide for detection of SNP TSC0014333
atttaatggttag

SEQ ID NO: 51310 - DNA, 13 bp, Artificial Sequence
  Oligonucleotide for detection of SNP TSC0014333
ctaaccattaaat

SEQ ID NO: 51311 - DNA, 13 bp, Artificial Sequence
  Oligonucleotide for detection of SNP TSC0014333
atttaacggttag

SEQ ID NO: 51312 - DNA, 13 bp, Artificial Sequence
  Oligonucleotide for detection of SNP TSC0014333
ctaaccgttaaat

SEQ ID NO: 51313 - DNA, 13 bp, Artificial Sequence
  Oligonucleotide for detection of SNP TSC0014334
attataatagaty

SEQ ID NO: 51314 - DNA, 13 bp, Artificial Sequence
  Oligonucleotide for detection of SNP TSC0014334
ratctattataat

SEQ ID NO: 51315 - DNA, 13 bp, Artificial Sequence
  Oligonucleotide for detection of SNP TSC0014334
attatattagaty

SEQ ID NO: 51316 - DNA, 13 bp, Artificial Sequence
  Oligonucleotide for detection of SNP TSC0014334
ratctaatataat

SEQ ID NO: 51317 - DNA, 13 bp, Artificial Sequence
  Oligonucleotide for detection of SNP TSC0014334
ggtttgttataat

SEQ ID NO: 51318 - DNA, 13 bp, Artificial Sequence
  Oligonucleotide for detection of SNP TSC0014334
attataacaaacc

SEQ ID NO: 51319 - DNA, 13 bp, Artificial Sequence
  Oligonucleotide for detection of SNP TSC0014334
ggtttgatataat

SEQ ID NO: 51320 - DNA, 13 bp, Artificial Sequence
  Oligonucleotide for detection of SNP TSC0014334
attatatcaaacc

SEQ ID NO: 51321 - DNA, 13 bp, Artificial Sequence
  Oligonucleotide for detection of SNP TSC0014336
ttttagggtatat

SEQ ID NO: 51322 - DNA, 13 bp, Artificial Sequence
  Oligonucleotide for detection of SNP TSC0014336
atataccctaaaa

SEQ ID NO: 51323 - DNA, 13 bp, Artificial Sequence
  Oligonucleotide for detection of SNP TSC0014336
ttttagagtatat

SEQ ID NO: 51324 - DNA, 13 bp, Artificial Sequence
  Oligonucleotide for detection of SNP TSC0014336
atatactctaaaa

SEQ ID NO: 51325 - DNA, 13 bp, Artificial Sequence
  Oligonucleotide for detection of SNP TSC0014337
tgatgagtgtttt

SEQ ID NO: 51326 - DNA, 13 bp, Artificial Sequence
  Oligonucleotide for detection of SNP TSC0014337
aaaacactcatca

SEQ ID NO: 51327 - DNA, 13 bp, Artificial Sequence
  Oligonucleotide for detection of SNP TSC0014337
tgatgaatgtttt

SEQ ID NO: 51328 - DNA, 13 bp, Artificial Sequence
  Oligonucleotide for detection of SNP TSC0014337
aaaacattcatca

SEQ ID NO: 51329 - DNA, 13 bp, Artificial Sequence
  Oligonucleotide for detection of SNP TSC0014338
tattttgaatgaa

SEQ ID NO: 51330 - DNA, 13 bp, Artificial Sequence
  Oligonucleotide for detection of SNP TSC0014338
ttcattcaaaata

SEQ ID NO: 51331 - DNA, 13 bp, Artificial Sequence
  Oligonucleotide for detection of SNP TSC0014338
tattttaaatgaa

SEQ ID NO: 51332 - DNA, 13 bp, Artificial Sequence
  Oligonucleotide for detection of SNP TSC0014338
ttcatttaaaata

SEQ ID NO: 51333 - DNA, 13 bp, Artificial Sequence
  Oligonucleotide for detection of SNP TSC0014339
atatgggtattag

SEQ ID NO: 51334 - DNA, 13 bp, Artificial Sequence
  Oligonucleotide for detection of SNP TSC0014339
ctaatacccatat

SEQ ID NO: 51335 - DNA, 13 bp, Artificial Sequence
  Oligonucleotide for detection of SNP TSC0014339
atatggatattag

SEQ ID NO: 51336 - DNA, 13 bp, Artificial Sequence
  Oligonucleotide for detection of SNP TSC0014339
ctaatatccatat

SEQ ID NO: 51337 - DNA, 13 bp, Artificial Sequence
  Oligonucleotide for detection of SNP TSC0014340
gggttttggttag

SEQ ID NO: 51338 - DNA, 13 bp, Artificial Sequence
  Oligonucleotide for detection of SNP TSC0014340
ctaaccaaaaccc

SEQ ID NO: 51339 - DNA, 13 bp, Artificial Sequence
  Oligonucleotide for detection of SNP TSC0014340
gggtttcggttag

SEQ ID NO: 51340 - DNA, 13 bp, Artificial Sequence
  Oligonucleotide for detection of SNP TSC0014340
ctaaccgaaaccc

SEQ ID NO: 51341 - DNA, 13 bp, Artificial Sequence
  Oligonucleotide for detection of SNP TSC0014340
ttggttgggatty

SEQ ID NO: 51342 - DNA, 13 bp, Artificial Sequence
  Oligonucleotide for detection of SNP TSC0014340
raatcccaaccaa

SEQ ID NO: 51343 - DNA, 13 bp, Artificial Sequence
  Oligonucleotide for detection of SNP TSC0014340
ttggttaggatty

SEQ ID NO: 51344 - DNA, 13 bp, Artificial Sequence
  Oligonucleotide for detection of SNP TSC0014340
raatcctaaccaa

SEQ ID NO: 51345 - DNA, 13 bp, Artificial Sequence
  Oligonucleotide for detection of SNP TSC0014340
ttggtcgggatty

SEQ ID NO: 51346 - DNA, 13 bp, Artificial Sequence
  Oligonucleotide for detection of SNP TSC0014340
raatcccgaccaa

SEQ ID NO: 51347 - DNA, 13 bp, Artificial Sequence
  Oligonucleotide for detection of SNP TSC0014341
tagtaatgttgat

SEQ ID NO: 51348 - DNA, 13 bp, Artificial Sequence
  Oligonucleotide for detection of SNP TSC0014341
atcaacattacta

SEQ ID NO: 51349 - DNA, 13 bp, Artificial Sequence
  Oligonucleotide for detection of SNP TSC0014341
tagtaacgttgat

SEQ ID NO: 51350 - DNA, 13 bp, Artificial Sequence
  Oligonucleotide for detection of SNP TSC0014341
atcaacgttacta

SEQ ID NO: 51351 - DNA, 13 bp, Artificial Sequence
  Oligonucleotide for detection of SNP TSC0014341
attaatgttgttg

SEQ ID NO: 51352 - DNA, 13 bp, Artificial Sequence
  Oligonucleotide for detection of SNP TSC0014341
caacaacattaat

SEQ ID NO: 51353 - DNA, 13 bp, Artificial Sequence
  Oligonucleotide for detection of SNP TSC0014341
attaatattgttg

SEQ ID NO: 51354 - DNA, 13 bp, Artificial Sequence
  Oligonucleotide for detection of SNP TSC0014341
caacaatattaat

SEQ ID NO: 51355 - DNA, 13 bp, Artificial Sequence
  Oligonucleotide for detection of SNP TSC0014341
attaacgttgttg

SEQ ID NO: 51356 - DNA, 13 bp, Artificial Sequence
  Oligonucleotide for detection of SNP TSC0014341
caacaacgttaat

SEQ ID NO: 51357 - DNA, 13 bp, Artificial Sequence
  Oligonucleotide for detection of SNP TSC0014342
gattggagttaat

SEQ ID NO: 51358 - DNA, 13 bp, Artificial Sequence
  Oligonucleotide for detection of SNP TSC0014342
attaactccaatc

SEQ ID NO: 51359 - DNA, 13 bp, Artificial Sequence
  Oligonucleotide for detection of SNP TSC0014342
gattggtgttaat

SEQ ID NO: 51360 - DNA, 13 bp, Artificial Sequence
  Oligonucleotide for detection of SNP TSC0014342
attaacaccaatc

SEQ ID NO: 51361 - DNA, 13 bp, Artificial Sequence
  Oligonucleotide for detection of SNP TSC0014342
attgattttagty

SEQ ID NO: 51362 - DNA, 13 bp, Artificial Sequence
  Oligonucleotide for detection of SNP TSC0014342
ractaaaatcaat

SEQ ID NO: 51363 - DNA, 13 bp, Artificial Sequence
  Oligonucleotide for detection of SNP TSC0014342
attgatattagty

SEQ ID NO: 51364 - DNA, 13 bp, Artificial Sequence
  Oligonucleotide for detection of SNP TSC0014342
ractaatatcaat

SEQ ID NO: 51365 - DNA, 13 bp, Artificial Sequence
  Oligonucleotide for detection of SNP TSC0014343
tggagaggtgaty

SEQ ID NO: 51366 - DNA, 13 bp, Artificial Sequence
  Oligonucleotide for detection of SNP TSC0014343
ratcacctctcca

SEQ ID NO: 51367 - DNA, 13 bp, Artificial Sequence
  Oligonucleotide for detection of SNP TSC0014343
tggagaagtgaty

SEQ ID NO: 51368 - DNA, 13 bp, Artificial Sequence
  Oligonucleotide for detection of SNP TSC0014343
ratcacttctcca

SEQ ID NO: 51369 - DNA, 13 bp, Artificial Sequence
  Oligonucleotide for detection of SNP TSC0014344
gatttatttttty

SEQ ID NO: 51370 - DNA, 13 bp, Artificial Sequence
  Oligonucleotide for detection of SNP TSC0014344
raaaaaataaatc

SEQ ID NO: 51371 - DNA, 13 bp, Artificial Sequence
  Oligonucleotide for detection of SNP TSC0014344
gatttagttttty

SEQ ID NO: 51372 - DNA, 13 bp, Artificial Sequence
  Oligonucleotide for detection of SNP TSC0014344
raaaaactaaatc

SEQ ID NO: 51373 - DNA, 13 bp, Artificial Sequence
  Oligonucleotide for detection of SNP TSC0014344
gaaggggtgaaty

SEQ ID NO: 51374 - DNA, 13 bp, Artificial Sequence
  Oligonucleotide for detection of SNP TSC0014344
rattcaccccttc

SEQ ID NO: 51375 - DNA, 13 bp, Artificial Sequence
  Oligonucleotide for detection of SNP TSC0014344
gaagggttgaaty

SEQ ID NO: 51376 - DNA, 13 bp, Artificial Sequence
  Oligonucleotide for detection of SNP TSC0014344
rattcaacccttc

SEQ ID NO: 51377 - DNA, 13 bp, Artificial Sequence
  Oligonucleotide for detection of SNP TSC0014345
taaaaagaagttt

SEQ ID NO: 51378 - DNA, 13 bp, Artificial Sequence
  Oligonucleotide for detection of SNP TSC0014345
aaacttcttttta

SEQ ID NO: 51379 - DNA, 13 bp, Artificial Sequence
  Oligonucleotide for detection of SNP TSC0014345
taaaaaaaagttt

SEQ ID NO: 51380 - DNA, 13 bp, Artificial Sequence
  Oligonucleotide for detection of SNP TSC0014345
aaactttttttta

SEQ ID NO: 51381 - DNA, 13 bp, Artificial Sequence
  Oligonucleotide for detection of SNP TSC0014346
tgtttttaaaaag

SEQ ID NO: 51382 - DNA, 13 bp, Artificial Sequence
  Oligonucleotide for detection of SNP TSC0014346
ctttttaaaaaca

SEQ ID NO: 51383 - DNA, 13 bp, Artificial Sequence
  Oligonucleotide for detection of SNP TSC0014346
tgttttaaaaaag

SEQ ID NO: 51384 - DNA, 13 bp, Artificial Sequence
  Oligonucleotide for detection of SNP TSC0014346
cttttttaaaaca

SEQ ID NO: 51385 - DNA, 13 bp, Artificial Sequence
  Oligonucleotide for detection of SNP TSC0014347
agtaatatgaaaa

SEQ ID NO: 51386 - DNA, 13 bp, Artificial Sequence
  Oligonucleotide for detection of SNP TSC0014347
ttttcatattact

SEQ ID NO: 51387 - DNA, 13 bp, Artificial Sequence
  Oligonucleotide for detection of SNP TSC0014347
agtaatgtgaaaa

SEQ ID NO: 51388 - DNA, 13 bp, Artificial Sequence
  Oligonucleotide for detection of SNP TSC0014347
ttttcacattact

SEQ ID NO: 51389 - DNA, 13 bp, Artificial Sequence
  Oligonucleotide for detection of SNP TSC0014347
agtaacgtgaaaa

SEQ ID NO: 51390 - DNA, 13 bp, Artificial Sequence
  Oligonucleotide for detection of SNP TSC0014347
ttttcacgttact

SEQ ID NO: 51391 - DNA, 13 bp, Artificial Sequence
  Oligonucleotide for detection of SNP TSC0014349
attaggaaggtty

SEQ ID NO: 51392 - DNA, 13 bp, Artificial Sequence
  Oligonucleotide for detection of SNP TSC0014349
raaccttcctaat

SEQ ID NO: 51393 - DNA, 13 bp, Artificial Sequence
  Oligonucleotide for detection of SNP TSC0014349
attagggaggtty

SEQ ID NO: 51394 - DNA, 13 bp, Artificial Sequence
  Oligonucleotide for detection of SNP TSC0014349
raacctccctaat

SEQ ID NO: 51395 - DNA, 13 bp, Artificial Sequence
  Oligonucleotide for detection of SNP TSC0014350
gttttaagaatty

SEQ ID NO: 51396 - DNA, 13 bp, Artificial Sequence
  Oligonucleotide for detection of SNP TSC0014350
raattcttaaaac

SEQ ID NO: 51397 - DNA, 13 bp, Artificial Sequence
  Oligonucleotide for detection of SNP TSC0014350
gttttatgaatty

SEQ ID NO: 51398 - DNA, 13 bp, Artificial Sequence
  Oligonucleotide for detection of SNP TSC0014350
raattcataaaac

SEQ ID NO: 51399 - DNA, 13 bp, Artificial Sequence
  Oligonucleotide for detection of SNP TSC0014350
ggatttttggggy

SEQ ID NO: 51400 - DNA, 13 bp, Artificial Sequence
  Oligonucleotide for detection of SNP TSC0014350
rccccaaaaatcc

SEQ ID NO: 51401 - DNA, 13 bp, Artificial Sequence
  Oligonucleotide for detection of SNP TSC0014350
ggatttatggggy

SEQ ID NO: 51402 - DNA, 13 bp, Artificial Sequence
  Oligonucleotide for detection of SNP TSC0014350
rccccataaatcc

SEQ ID NO: 51403 - DNA, 13 bp, Artificial Sequence
  Oligonucleotide for detection of SNP TSC0014351
ttgaatataaatg

SEQ ID NO: 51404 - DNA, 13 bp, Artificial Sequence
  Oligonucleotide for detection of SNP TSC0014351
catttatattcaa

SEQ ID NO: 51405 - DNA, 13 bp, Artificial Sequence
  Oligonucleotide for detection of SNP TSC0014351
ttgaatgtaaatg

SEQ ID NO: 51406 - DNA, 13 bp, Artificial Sequence
  Oligonucleotide for detection of SNP TSC0014351
catttacattcaa

SEQ ID NO: 51407 - DNA, 13 bp, Artificial Sequence
  Oligonucleotide for detection of SNP TSC0014351
ttgaacgtaaatg

SEQ ID NO: 51408 - DNA, 13 bp, Artificial Sequence
  Oligonucleotide for detection of SNP TSC0014351
catttacgttcaa

SEQ ID NO: 51409 - DNA, 13 bp, Artificial Sequence
  Oligonucleotide for detection of SNP TSC0014351
tatttgtgtttag

SEQ ID NO: 51410 - DNA, 13 bp, Artificial Sequence
  Oligonucleotide for detection of SNP TSC0014351
ctaaacacaaata

SEQ ID NO: 51411 - DNA, 13 bp, Artificial Sequence
  Oligonucleotide for detection of SNP TSC0014351
tatttgcgtttag

SEQ ID NO: 51412 - DNA, 13 bp, Artificial Sequence
  Oligonucleotide for detection of SNP TSC0014351
ctaaacgcaaata

SEQ ID NO: 51413 - DNA, 13 bp, Artificial Sequence
  Oligonucleotide for detection of SNP TSC0014352
ggtataaggagtt

SEQ ID NO: 51414 - DNA, 13 bp, Artificial Sequence
  Oligonucleotide for detection of SNP TSC0014352
aactccttatacc

SEQ ID NO: 51415 - DNA, 13 bp, Artificial Sequence
  Oligonucleotide for detection of SNP TSC0014352
ggtatagggagtt

SEQ ID NO: 51416 - DNA, 13 bp, Artificial Sequence
  Oligonucleotide for detection of SNP TSC0014352
aactccctatacc

SEQ ID NO: 51417 - DNA, 13 bp, Artificial Sequence
  Oligonucleotide for detection of SNP TSC0014353
ggaatgagtatta

SEQ ID NO: 51418 - DNA, 13 bp, Artificial Sequence
  Oligonucleotide for detection of SNP TSC0014353
taatactcattcc

SEQ ID NO: 51419 - DNA, 13 bp, Artificial Sequence
  Oligonucleotide for detection of SNP TSC0014353
ggaatgggtatta

SEQ ID NO: 51420 - DNA, 13 bp, Artificial Sequence
  Oligonucleotide for detection of SNP TSC0014353
taatacccattcc

SEQ ID NO: 51421 - DNA, 13 bp, Artificial Sequence
  Oligonucleotide for detection of SNP TSC0014354
ggattgatttagt

SEQ ID NO: 51422 - DNA, 13 bp, Artificial Sequence
  Oligonucleotide for detection of SNP TSC0014354
actaaatcaatcc

SEQ ID NO: 51423 - DNA, 13 bp, Artificial Sequence
  Oligonucleotide for detection of SNP TSC0014354
ggattggtttagt

SEQ ID NO: 51424 - DNA, 13 bp, Artificial Sequence
  Oligonucleotide for detection of SNP TSC0014354
actaaaccaatcc

SEQ ID NO: 51425 - DNA, 13 bp, Artificial Sequence
  Oligonucleotide for detection of SNP TSC0014356
attttggggtttg

SEQ ID NO: 51426 - DNA, 13 bp, Artificial Sequence
  Oligonucleotide for detection of SNP TSC0014356
caaaccccaaaat

SEQ ID NO: 51427 - DNA, 13 bp, Artificial Sequence
  Oligonucleotide for detection of SNP TSC0014356
attttgtggtttg

SEQ ID NO: 51428 - DNA, 13 bp, Artificial Sequence
  Oligonucleotide for detection of SNP TSC0014356
caaaccacaaaat

SEQ ID NO: 51429 - DNA, 13 bp, Artificial Sequence
  Oligonucleotide for detection of SNP TSC0014356
taaattttaaaat

SEQ ID NO: 51430 - DNA, 13 bp, Artificial Sequence
  Oligonucleotide for detection of SNP TSC0014356
attttaaaattta

SEQ ID NO: 51431 - DNA, 13 bp, Artificial Sequence
  Oligonucleotide for detection of SNP TSC0014356
taaattataaaat

SEQ ID NO: 51432 - DNA, 13 bp, Artificial Sequence
  Oligonucleotide for detection of SNP TSC0014356
attttataattta

SEQ ID NO: 51433 - DNA, 13 bp, Artificial Sequence
  Oligonucleotide for detection of SNP TSC0014360
attaatgtatggt

SEQ ID NO: 51434 - DNA, 13 bp, Artificial Sequence
  Oligonucleotide for detection of SNP TSC0014360
accatacattaat

SEQ ID NO: 51435 - DNA, 13 bp, Artificial Sequence
  Oligonucleotide for detection of SNP TSC0014360
attaatatatggt

SEQ ID NO: 51436 - DNA, 13 bp, Artificial Sequence
  Oligonucleotide for detection of SNP TSC0014360
accatatattaat

SEQ ID NO: 51437 - DNA, 13 bp, Artificial Sequence
  Oligonucleotide for detection of SNP TSC0014361
ttgttttgaaaaa

SEQ ID NO: 51438 - DNA, 13 bp, Artificial Sequence
  Oligonucleotide for detection of SNP TSC0014361
tttttcaaaacaa

SEQ ID NO: 51439 - DNA, 13 bp, Artificial Sequence
  Oligonucleotide for detection of SNP TSC0014361
ttgtttcgaaaaa

SEQ ID NO: 51440 - DNA, 13 bp, Artificial Sequence
  Oligonucleotide for detection of SNP TSC0014361
tttttcgaaacaa

SEQ ID NO: 51441 - DNA, 13 bp, Artificial Sequence
  Oligonucleotide for detection of SNP TSC0014361
ttttttgagatag

SEQ ID NO: 51442 - DNA, 13 bp, Artificial Sequence
  Oligonucleotide for detection of SNP TSC0014361
ctatctcaaaaaa

SEQ ID NO: 51443 - DNA, 13 bp, Artificial Sequence
  Oligonucleotide for detection of SNP TSC0014361
tttttcgagatag

SEQ ID NO: 51444 - DNA, 13 bp, Artificial Sequence
  Oligonucleotide for detection of SNP TSC0014361
ctatctcgaaaaa

SEQ ID NO: 51445 - DNA, 13 bp, Artificial Sequence
  Oligonucleotide for detection of SNP TSC0014362
gtagttatagtta

SEQ ID NO: 51446 - DNA, 13 bp, Artificial Sequence
  Oligonucleotide for detection of SNP TSC0014362
taactataactac

SEQ ID NO: 51447 - DNA, 13 bp, Artificial Sequence
  Oligonucleotide for detection of SNP TSC0014362
gtagttttagtta

SEQ ID NO: 51448 - DNA, 13 bp, Artificial Sequence
  Oligonucleotide for detection of SNP TSC0014362
taactaaaactac

SEQ ID NO: 51449 - DNA, 13 bp, Artificial Sequence
  Oligonucleotide for detection of SNP TSC0014362
tagttgtgattay

SEQ ID NO: 51450 - DNA, 13 bp, Artificial Sequence
  Oligonucleotide for detection of SNP TSC0014362
rtaatcacaacta

SEQ ID NO: 51451 - DNA, 13 bp, Artificial Sequence
  Oligonucleotide for detection of SNP TSC0014365
ggaaatgattagt

SEQ ID NO: 51452 - DNA, 13 bp, Artificial Sequence
  Oligonucleotide for detection of SNP TSC0014365
actaatcatttcc

SEQ ID NO: 51453 - DNA, 13 bp, Artificial Sequence
  Oligonucleotide for detection of SNP TSC0014365
ggaaataattagt

SEQ ID NO: 51454 - DNA, 13 bp, Artificial Sequence
  Oligonucleotide for detection of SNP TSC0014365
actaattatttcc

SEQ ID NO: 51455 - DNA, 13 bp, Artificial Sequence
  Oligonucleotide for detection of SNP TSC0014366
gaaaatatgttgt

SEQ ID NO: 51456 - DNA, 13 bp, Artificial Sequence
  Oligonucleotide for detection of SNP TSC0014366
acaacatattttc

SEQ ID NO: 51457 - DNA, 13 bp, Artificial Sequence
  Oligonucleotide for detection of SNP TSC0014366
gaaaatgtgttgt

SEQ ID NO: 51458 - DNA, 13 bp, Artificial Sequence
  Oligonucleotide for detection of SNP TSC0014366
acaacacattttc

SEQ ID NO: 51459 - DNA, 13 bp, Artificial Sequence
  Oligonucleotide for detection of SNP TSC0014367
tatatttgatatt

SEQ ID NO: 51460 - DNA, 13 bp, Artificial Sequence
  Oligonucleotide for detection of SNP TSC0014367
aatatcaaatata

SEQ ID NO: 51461 - DNA, 13 bp, Artificial Sequence
  Oligonucleotide for detection of SNP TSC0014367
tatattcgatatt

SEQ ID NO: 51462 - DNA, 13 bp, Artificial Sequence
  Oligonucleotide for detection of SNP TSC0014367
aatatcgaatata

SEQ ID NO: 51463 - DNA, 13 bp, Artificial Sequence
  Oligonucleotide for detection of SNP TSC0014367
aatgttggatata

SEQ ID NO: 51464 - DNA, 13 bp, Artificial Sequence
  Oligonucleotide for detection of SNP TSC0014367
tatatccaacatt

SEQ ID NO: 51465 - DNA, 13 bp, Artificial Sequence
  Oligonucleotide for detection of SNP TSC0014367
aatgttagatata

SEQ ID NO: 51466 - DNA, 13 bp, Artificial Sequence
  Oligonucleotide for detection of SNP TSC0014367
tatatctaacatt

SEQ ID NO: 51467 - DNA, 13 bp, Artificial Sequence
  Oligonucleotide for detection of SNP TSC0014367
aatgtcggatata

SEQ ID NO: 51468 - DNA, 13 bp, Artificial Sequence
  Oligonucleotide for detection of SNP TSC0014367
tatatccgacatt

SEQ ID NO: 51469 - DNA, 13 bp, Artificial Sequence
  Oligonucleotide for detection of SNP TSC0014368
ttttatgtttttg

SEQ ID NO: 51470 - DNA, 13 bp, Artificial Sequence
  Oligonucleotide for detection of SNP TSC0014368
caaaaacataaaa

SEQ ID NO: 51471 - DNA, 13 bp, Artificial Sequence
  Oligonucleotide for detection of SNP TSC0014369
tgatgatgtttag

SEQ ID NO: 51472 - DNA, 13 bp, Artificial Sequence
  Oligonucleotide for detection of SNP TSC0014369
ctaaacatcatca

SEQ ID NO: 51473 - DNA, 13 bp, Artificial Sequence
  Oligonucleotide for detection of SNP TSC0014369
tgatgacgtttag

SEQ ID NO: 51474 - DNA, 13 bp, Artificial Sequence
  Oligonucleotide for detection of SNP TSC0014369
ctaaacgtcatca

SEQ ID NO: 51475 - DNA, 13 bp, Artificial Sequence
  Oligonucleotide for detection of SNP TSC0014369
ttggatgttatta

SEQ ID NO: 51476 - DNA, 13 bp, Artificial Sequence
  Oligonucleotide for detection of SNP TSC0014369
taataacatccaa

SEQ ID NO: 51477 - DNA, 13 bp, Artificial Sequence
  Oligonucleotide for detection of SNP TSC0014369
ttggatattatta

SEQ ID NO: 51478 - DNA, 13 bp, Artificial Sequence
  Oligonucleotide for detection of SNP TSC0014369
taataatatccaa

SEQ ID NO: 51479 - DNA, 13 bp, Artificial Sequence
  Oligonucleotide for detection of SNP TSC0014369
ttggacgttatta

SEQ ID NO: 51480 - DNA, 13 bp, Artificial Sequence
  Oligonucleotide for detection of SNP TSC0014369
taataacgtccaa

SEQ ID NO: 51481 - DNA, 13 bp, Artificial Sequence
  Oligonucleotide for detection of SNP TSC0014372
aaatatgaaaaty

SEQ ID NO: 51482 - DNA, 13 bp, Artificial Sequence
  Oligonucleotide for detection of SNP TSC0014372
rattttcatattt

SEQ ID NO: 51483 - DNA, 13 bp, Artificial Sequence
  Oligonucleotide for detection of SNP TSC0014372
aaatataaaaaty

SEQ ID NO: 51484 - DNA, 13 bp, Artificial Sequence
  Oligonucleotide for detection of SNP TSC0014372
ratttttatattt

SEQ ID NO: 51485 - DNA, 13 bp, Artificial Sequence
  Oligonucleotide for detection of SNP TSC0014373
gtatgtataatta

SEQ ID NO: 51486 - DNA, 13 bp, Artificial Sequence
  Oligonucleotide for detection of SNP TSC0014373
taattatacatac

SEQ ID NO: 51487 - DNA, 13 bp, Artificial Sequence
  Oligonucleotide for detection of SNP TSC0014373
gtatgtgtaatta

SEQ ID NO: 51488 - DNA, 13 bp, Artificial Sequence
  Oligonucleotide for detection of SNP TSC0014373
taattacacatac

SEQ ID NO: 51489 - DNA, 13 bp, Artificial Sequence
  Oligonucleotide for detection of SNP TSC0014374
tagaatagtgggg

SEQ ID NO: 51490 - DNA, 13 bp, Artificial Sequence
  Oligonucleotide for detection of SNP TSC0014374
ccccactattcta

SEQ ID NO: 51491 - DNA, 13 bp, Artificial Sequence
  Oligonucleotide for detection of SNP TSC0014374
tagaatggtgggg

SEQ ID NO: 51492 - DNA, 13 bp, Artificial Sequence
  Oligonucleotide for detection of SNP TSC0014374
ccccaccattcta

SEQ ID NO: 51493 - DNA, 13 bp, Artificial Sequence
  Oligonucleotide for detection of SNP TSC0014375
ttatgttttgtty

SEQ ID NO: 51494 - DNA, 13 bp, Artificial Sequence
  Oligonucleotide for detection of SNP TSC0014375
raacaaaacataa

SEQ ID NO: 51495 - DNA, 13 bp, Artificial Sequence
  Oligonucleotide for detection of SNP TSC0014375
ttatgtgttgtty

SEQ ID NO: 51496 - DNA, 13 bp, Artificial Sequence
  Oligonucleotide for detection of SNP TSC0014375
raacaacacataa

SEQ ID NO: 51497 - DNA, 13 bp, Artificial Sequence
  Oligonucleotide for detection of SNP TSC0014375
ttacgttttgtty

SEQ ID NO: 51498 - DNA, 13 bp, Artificial Sequence
  Oligonucleotide for detection of SNP TSC0014375
raacaaaacgtaa

SEQ ID NO: 51499 - DNA, 13 bp, Artificial Sequence
  Oligonucleotide for detection of SNP TSC0014375
ttacgtgttgtty

SEQ ID NO: 51500 - DNA, 13 bp, Artificial Sequence
  Oligonucleotide for detection of SNP TSC0014375
raacaacacgtaa

SEQ ID NO: 51501 - DNA, 13 bp, Artificial Sequence
  Oligonucleotide for detection of SNP TSC0014375
gaataggatgtgg

SEQ ID NO: 51502 - DNA, 13 bp, Artificial Sequence
  Oligonucleotide for detection of SNP TSC0014375
ccacatcctattc

SEQ ID NO: 51503 - DNA, 13 bp, Artificial Sequence
  Oligonucleotide for detection of SNP TSC0014375
gaatagtatgtgg

SEQ ID NO: 51504 - DNA, 13 bp, Artificial Sequence
  Oligonucleotide for detection of SNP TSC0014375
ccacatactattc

SEQ ID NO: 51505 - DNA, 13 bp, Artificial Sequence
  Oligonucleotide for detection of SNP TSC0014375
gaataggacgtgg

SEQ ID NO: 51506 - DNA, 13 bp, Artificial Sequence
  Oligonucleotide for detection of SNP TSC0014375
ccacgtcctattc

SEQ ID NO: 51507 - DNA, 13 bp, Artificial Sequence
  Oligonucleotide for detection of SNP TSC0014375
gaatagtacgtgg

SEQ ID NO: 51508 - DNA, 13 bp, Artificial Sequence
  Oligonucleotide for detection of SNP TSC0014375
ccacgtactattc

SEQ ID NO: 51509 - DNA, 13 bp, Artificial Sequence
  Oligonucleotide for detection of SNP TSC0014377
tggatagttagtg

SEQ ID NO: 51510 - DNA, 13 bp, Artificial Sequence
  Oligonucleotide for detection of SNP TSC0014377
cactaactatcca

SEQ ID NO: 51511 - DNA, 13 bp, Artificial Sequence
  Oligonucleotide for detection of SNP TSC0014377
tggataattagtg

SEQ ID NO: 51512 - DNA, 13 bp, Artificial Sequence
  Oligonucleotide for detection of SNP TSC0014377
cactaattatcca

SEQ ID NO: 51513 - DNA, 13 bp, Artificial Sequence
  Oligonucleotide for detection of SNP TSC0014378
ttagtgtgtgata

SEQ ID NO: 51514 - DNA, 13 bp, Artificial Sequence
  Oligonucleotide for detection of SNP TSC0014378
tatcacacactaa

SEQ ID NO: 51515 - DNA, 13 bp, Artificial Sequence
  Oligonucleotide for detection of SNP TSC0014378
ttagtgggtgata

SEQ ID NO: 51516 - DNA, 13 bp, Artificial Sequence
  Oligonucleotide for detection of SNP TSC0014378
tatcacccactaa

SEQ ID NO: 51517 - DNA, 13 bp, Artificial Sequence
  Oligonucleotide for detection of SNP TSC0014378
ttagtgcgtgata

SEQ ID NO: 51518 - DNA, 13 bp, Artificial Sequence
  Oligonucleotide for detection of SNP TSC0014378
tatcacgcactaa

SEQ ID NO: 51519 - DNA, 13 bp, Artificial Sequence
  Oligonucleotide for detection of SNP TSC0014378
tattatgtattag

SEQ ID NO: 51520 - DNA, 13 bp, Artificial Sequence
  Oligonucleotide for detection of SNP TSC0014378
ctaatacataata

SEQ ID NO: 51521 - DNA, 13 bp, Artificial Sequence
  Oligonucleotide for detection of SNP TSC0014378
tattatttattag

SEQ ID NO: 51522 - DNA, 13 bp, Artificial Sequence
  Oligonucleotide for detection of SNP TSC0014378
ctaataaataata

SEQ ID NO: 51523 - DNA, 13 bp, Artificial Sequence
  Oligonucleotide for detection of SNP TSC0014378
tattacgtattag

SEQ ID NO: 51524 - DNA, 13 bp, Artificial Sequence
  Oligonucleotide for detection of SNP TSC0014378
ctaatacgtaata

SEQ ID NO: 51525 - DNA, 13 bp, Artificial Sequence
  Oligonucleotide for detection of SNP TSC0014379
taggttgggattt

SEQ ID NO: 51526 - DNA, 13 bp, Artificial Sequence
  Oligonucleotide for detection of SNP TSC0014379
aaatcccaaccta

SEQ ID NO: 51527 - DNA, 13 bp, Artificial Sequence
  Oligonucleotide for detection of SNP TSC0014379
taggtttggattt

SEQ ID NO: 51528 - DNA, 13 bp, Artificial Sequence
  Oligonucleotide for detection of SNP TSC0014379
aaatccaaaccta

SEQ ID NO: 51529 - DNA, 13 bp, Artificial Sequence
  Oligonucleotide for detection of SNP TSC0014379
agattttagtttg

SEQ ID NO: 51530 - DNA, 13 bp, Artificial Sequence
  Oligonucleotide for detection of SNP TSC0014379
caaactaaaatct

SEQ ID NO: 51531 - DNA, 13 bp, Artificial Sequence
  Oligonucleotide for detection of SNP TSC0014379
agatttaagtttg

SEQ ID NO: 51532 - DNA, 13 bp, Artificial Sequence
  Oligonucleotide for detection of SNP TSC0014379
caaacttaaatct

SEQ ID NO: 51533 - DNA, 13 bp, Artificial Sequence
  Oligonucleotide for detection of SNP TSC0014380
aagaaagatttgt

SEQ ID NO: 51534 - DNA, 13 bp, Artificial Sequence
  Oligonucleotide for detection of SNP TSC0014380
acaaatctttctt

SEQ ID NO: 51535 - DNA, 13 bp, Artificial Sequence
  Oligonucleotide for detection of SNP TSC0014380
aagaaaaatttgt

SEQ ID NO: 51536 - DNA, 13 bp, Artificial Sequence
  Oligonucleotide for detection of SNP TSC0014380
acaaatttttctt

SEQ ID NO: 51537 - DNA, 13 bp, Artificial Sequence
  Oligonucleotide for detection of SNP TSC0014380
aagaaagattcgt

SEQ ID NO: 51538 - DNA, 13 bp, Artificial Sequence
  Oligonucleotide for detection of SNP TSC0014380
acgaatctttctt

SEQ ID NO: 51539 - DNA, 13 bp, Artificial Sequence
  Oligonucleotide for detection of SNP TSC0014380
aagaaaaattcgt

SEQ ID NO: 51540 - DNA, 13 bp, Artificial Sequence
  Oligonucleotide for detection of SNP TSC0014380
acgaatttttctt

SEQ ID NO: 51541 - DNA, 13 bp, Artificial Sequence
  Oligonucleotide for detection of SNP TSC0014381
ttgttaaaaatty

SEQ ID NO: 51542 - DNA, 13 bp, Artificial Sequence
  Oligonucleotide for detection of SNP TSC0014381
raatttttaacaa

SEQ ID NO: 51543 - DNA, 13 bp, Artificial Sequence
  Oligonucleotide for detection of SNP TSC0014381
ttgttataaatty

SEQ ID NO: 51544 - DNA, 13 bp, Artificial Sequence
  Oligonucleotide for detection of SNP TSC0014381
raatttataacaa

SEQ ID NO: 51545 - DNA, 13 bp, Artificial Sequence
  Oligonucleotide for detection of SNP TSC0014381
gggtttttaatag

SEQ ID NO: 51546 - DNA, 13 bp, Artificial Sequence
  Oligonucleotide for detection of SNP TSC0014381
ctattaaaaaccc

SEQ ID NO: 51547 - DNA, 13 bp, Artificial Sequence
  Oligonucleotide for detection of SNP TSC0014381
gggtttgtaatag

SEQ ID NO: 51548 - DNA, 13 bp, Artificial Sequence
  Oligonucleotide for detection of SNP TSC0014381
ctattacaaaccc

SEQ ID NO: 51549 - DNA, 13 bp, Artificial Sequence
  Oligonucleotide for detection of SNP TSC0014382
tatgaggttgggg

SEQ ID NO: 51550 - DNA, 13 bp, Artificial Sequence
  Oligonucleotide for detection of SNP TSC0014382
ccccaacctcata

SEQ ID NO: 51551 - DNA, 13 bp, Artificial Sequence
  Oligonucleotide for detection of SNP TSC0014382
tatgagattgggg

SEQ ID NO: 51552 - DNA, 13 bp, Artificial Sequence
  Oligonucleotide for detection of SNP TSC0014382
ccccaatctcata

SEQ ID NO: 51553 - DNA, 13 bp, Artificial Sequence
  Oligonucleotide for detection of SNP TSC0014382
tacgaggttgggg

SEQ ID NO: 51554 - DNA, 13 bp, Artificial Sequence
  Oligonucleotide for detection of SNP TSC0014382
ccccaacctcgta

SEQ ID NO: 51555 - DNA, 13 bp, Artificial Sequence
  Oligonucleotide for detection of SNP TSC0014382
tacgagattgggg

SEQ ID NO: 51556 - DNA, 13 bp, Artificial Sequence
  Oligonucleotide for detection of SNP TSC0014382
ccccaatctcgta

SEQ ID NO: 51557 - DNA, 13 bp, Artificial Sequence
  Oligonucleotide for detection of SNP TSC0014383
gattttgtgtgtt

SEQ ID NO: 51558 - DNA, 13 bp, Artificial Sequence
  Oligonucleotide for detection of SNP TSC0014383
aacacacaaaatc

SEQ ID NO: 51559 - DNA, 13 bp, Artificial Sequence
  Oligonucleotide for detection of SNP TSC0014383
gattttttgtgtt

SEQ ID NO: 51560 - DNA, 13 bp, Artificial Sequence
  Oligonucleotide for detection of SNP TSC0014383
aacacaaaaaatc

SEQ ID NO: 51561 - DNA, 13 bp, Artificial Sequence
  Oligonucleotide for detection of SNP TSC0014383
aatatataaagty

SEQ ID NO: 51562 - DNA, 13 bp, Artificial Sequence
  Oligonucleotide for detection of SNP TSC0014383
ractttatatatt

SEQ ID NO: 51563 - DNA, 13 bp, Artificial Sequence
  Oligonucleotide for detection of SNP TSC0014383
aatataaaaagty

SEQ ID NO: 51564 - DNA, 13 bp, Artificial Sequence
  Oligonucleotide for detection of SNP TSC0014383
ractttttatatt

SEQ ID NO: 51565 - DNA, 13 bp, Artificial Sequence
  Oligonucleotide for detection of SNP TSC0014384
tgatgattattat

SEQ ID NO: 51566 - DNA, 13 bp, Artificial Sequence
  Oligonucleotide for detection of SNP TSC0014384
ataataatcatca

SEQ ID NO: 51567 - DNA, 13 bp, Artificial Sequence
  Oligonucleotide for detection of SNP TSC0014384
tgatgaatattat

SEQ ID NO: 51568 - DNA, 13 bp, Artificial Sequence
  Oligonucleotide for detection of SNP TSC0014384
ataatattcatca

SEQ ID NO: 51569 - DNA, 13 bp, Artificial Sequence
  Oligonucleotide for detection of SNP TSC0014385
tttttatgtgtat

SEQ ID NO: 51570 - DNA, 13 bp, Artificial Sequence
  Oligonucleotide for detection of SNP TSC0014385
atacacataaaaa

SEQ ID NO: 51571 - DNA, 13 bp, Artificial Sequence
  Oligonucleotide for detection of SNP TSC0014385
tttttaagtgtat

SEQ ID NO: 51572 - DNA, 13 bp, Artificial Sequence
  Oligonucleotide for detection of SNP TSC0014385
atacacttaaaaa

SEQ ID NO: 51573 - DNA, 13 bp, Artificial Sequence
  Oligonucleotide for detection of SNP TSC0014386
taatttatgttta

SEQ ID NO: 51574 - DNA, 13 bp, Artificial Sequence
  Oligonucleotide for detection of SNP TSC0014386
taaacataaatta

SEQ ID NO: 51575 - DNA, 13 bp, Artificial Sequence
  Oligonucleotide for detection of SNP TSC0014386
taatttgtgttta

SEQ ID NO: 51576 - DNA, 13 bp, Artificial Sequence
  Oligonucleotide for detection of SNP TSC0014386
taaacacaaatta

SEQ ID NO: 51577 - DNA, 13 bp, Artificial Sequence
  Oligonucleotide for detection of SNP TSC0014387
ggggttttgtata

SEQ ID NO: 51578 - DNA, 13 bp, Artificial Sequence
  Oligonucleotide for detection of SNP TSC0014387
tatacaaaacccc

SEQ ID NO: 51579 - DNA, 13 bp, Artificial Sequence
  Oligonucleotide for detection of SNP TSC0014387
ggggttgtgtata

SEQ ID NO: 51580 - DNA, 13 bp, Artificial Sequence
  Oligonucleotide for detection of SNP TSC0014387
tatacacaacccc

SEQ ID NO: 51581 - DNA, 13 bp, Artificial Sequence
  Oligonucleotide for detection of SNP TSC0014387
ggggtttcgtata

SEQ ID NO: 51582 - DNA, 13 bp, Artificial Sequence
  Oligonucleotide for detection of SNP TSC0014387
tatacgaaacccc

SEQ ID NO: 51583 - DNA, 13 bp, Artificial Sequence
  Oligonucleotide for detection of SNP TSC0014387
ggggttgcgtata

SEQ ID NO: 51584 - DNA, 13 bp, Artificial Sequence
  Oligonucleotide for detection of SNP TSC0014387
tatacgcaacccc

SEQ ID NO: 51585 - DNA, 13 bp, Artificial Sequence
  Oligonucleotide for detection of SNP TSC0014387
tatgtggaattty

SEQ ID NO: 51586 - DNA, 13 bp, Artificial Sequence
  Oligonucleotide for detection of SNP TSC0014387
raaattccacata

SEQ ID NO: 51587 - DNA, 13 bp, Artificial Sequence
  Oligonucleotide for detection of SNP TSC0014387
tatgtgtaattty

SEQ ID NO: 51588 - DNA, 13 bp, Artificial Sequence
  Oligonucleotide for detection of SNP TSC0014387
raaattacacata

SEQ ID NO: 51589 - DNA, 13 bp, Artificial Sequence
  Oligonucleotide for detection of SNP TSC0014387
tatgcggaattty

SEQ ID NO: 51590 - DNA, 13 bp, Artificial Sequence
  Oligonucleotide for detection of SNP TSC0014387
raaattccgcata

SEQ ID NO: 51591 - DNA, 13 bp, Artificial Sequence
  Oligonucleotide for detection of SNP TSC0014387
tatgcgtaattty

SEQ ID NO: 51592 - DNA, 13 bp, Artificial Sequence
  Oligonucleotide for detection of SNP TSC0014387
raaattacgcata

SEQ ID NO: 51593 - DNA, 13 bp, Artificial Sequence
  Oligonucleotide for detection of SNP TSC0014388
tttaaaaattagg

SEQ ID NO: 51594 - DNA, 13 bp, Artificial Sequence
  Oligonucleotide for detection of SNP TSC0014388
cctaatttttaaa

SEQ ID NO: 51595 - DNA, 13 bp, Artificial Sequence
  Oligonucleotide for detection of SNP TSC0014388
tttaaagattagg

SEQ ID NO: 51596 - DNA, 13 bp, Artificial Sequence
  Oligonucleotide for detection of SNP TSC0014388
cctaatctttaaa

SEQ ID NO: 51597 - DNA, 13 bp, Artificial Sequence
  Oligonucleotide for detection of SNP TSC0014389
ttgggaagttaag

SEQ ID NO: 51598 - DNA, 13 bp, Artificial Sequence
  Oligonucleotide for detection of SNP TSC0014389
cttaacttcccaa

SEQ ID NO: 51599 - DNA, 13 bp, Artificial Sequence
  Oligonucleotide for detection of SNP TSC0014389
ttgggaggttaag

SEQ ID NO: 51600 - DNA, 13 bp, Artificial Sequence
  Oligonucleotide for detection of SNP TSC0014389
cttaacctcccaa

SEQ ID NO: 51601 - DNA, 13 bp, Artificial Sequence
  Oligonucleotide for detection of SNP TSC0014390
tgttttgtgattt

SEQ ID NO: 51602 - DNA, 13 bp, Artificial Sequence
  Oligonucleotide for detection of SNP TSC0014390
aaatcacaaaaca

SEQ ID NO: 51603 - DNA, 13 bp, Artificial Sequence
  Oligonucleotide for detection of SNP TSC0014390
tgttttttgattt

SEQ ID NO: 51604 - DNA, 13 bp, Artificial Sequence
  Oligonucleotide for detection of SNP TSC0014390
aaatcaaaaaaca

SEQ ID NO: 51605 - DNA, 13 bp, Artificial Sequence
  Oligonucleotide for detection of SNP TSC0014390
agattataaggta

SEQ ID NO: 51606 - DNA, 13 bp, Artificial Sequence
  Oligonucleotide for detection of SNP TSC0014390
taccttataatct

SEQ ID NO: 51607 - DNA, 13 bp, Artificial Sequence
  Oligonucleotide for detection of SNP TSC0014390
agattaaaaggta

SEQ ID NO: 51608 - DNA, 13 bp, Artificial Sequence
  Oligonucleotide for detection of SNP TSC0014390
taccttttaatct

SEQ ID NO: 51609 - DNA, 13 bp, Artificial Sequence
  Oligonucleotide for detection of SNP TSC0014391
aagtatatgatty

SEQ ID NO: 51610 - DNA, 13 bp, Artificial Sequence
  Oligonucleotide for detection of SNP TSC0014391
raatcatatactt

SEQ ID NO: 51611 - DNA, 13 bp, Artificial Sequence
  Oligonucleotide for detection of SNP TSC0014391
aagtatgtgatty

SEQ ID NO: 51612 - DNA, 13 bp, Artificial Sequence
  Oligonucleotide for detection of SNP TSC0014391
raatcacatactt

SEQ ID NO: 51613 - DNA, 13 bp, Artificial Sequence
  Oligonucleotide for detection of SNP TSC0014391
aagtacgtgatty

SEQ ID NO: 51614 - DNA, 13 bp, Artificial Sequence
  Oligonucleotide for detection of SNP TSC0014391
raatcacgtactt

SEQ ID NO: 51615 - DNA, 13 bp, Artificial Sequence
  Oligonucleotide for detection of SNP TSC0014391
ggattatgtgttt

SEQ ID NO: 51616 - DNA, 13 bp, Artificial Sequence
  Oligonucleotide for detection of SNP TSC0014391
aaacacataatcc

SEQ ID NO: 51617 - DNA, 13 bp, Artificial Sequence
  Oligonucleotide for detection of SNP TSC0014391
ggattacgtgttt

SEQ ID NO: 51618 - DNA, 13 bp, Artificial Sequence
  Oligonucleotide for detection of SNP TSC0014391
aaacacgtaatcc

SEQ ID NO: 51619 - DNA, 13 bp, Artificial Sequence
  Oligonucleotide for detection of SNP TSC0014392
aattttatggttt

SEQ ID NO: 51620 - DNA, 13 bp, Artificial Sequence
  Oligonucleotide for detection of SNP TSC0014392
aaaccataaaatt

SEQ ID NO: 51621 - DNA, 13 bp, Artificial Sequence
  Oligonucleotide for detection of SNP TSC0014392
aattttgtggttt

SEQ ID NO: 51622 - DNA, 13 bp, Artificial Sequence
  Oligonucleotide for detection of SNP TSC0014392
aaaccacaaaatt

SEQ ID NO: 51623 - DNA, 13 bp, Artificial Sequence
  Oligonucleotide for detection of SNP TSC0014392
aatttcgtggttt

SEQ ID NO: 51624 - DNA, 13 bp, Artificial Sequence
  Oligonucleotide for detection of SNP TSC0014392
aaaccacgaaatt

SEQ ID NO: 51625 - DNA, 13 bp, Artificial Sequence
  Oligonucleotide for detection of SNP TSC0014392
aaattatgaagtt

SEQ ID NO: 51626 - DNA, 13 bp, Artificial Sequence
  Oligonucleotide for detection of SNP TSC0014392
aacttcataattt

SEQ ID NO: 51627 - DNA, 13 bp, Artificial Sequence
  Oligonucleotide for detection of SNP TSC0014392
aaattacgaagtt

SEQ ID NO: 51628 - DNA, 13 bp, Artificial Sequence
  Oligonucleotide for detection of SNP TSC0014392
aacttcgtaattt

SEQ ID NO: 51629 - DNA, 13 bp, Artificial Sequence
  Oligonucleotide for detection of SNP TSC0014397
gaagtttgggagg

SEQ ID NO: 51630 - DNA, 13 bp, Artificial Sequence
  Oligonucleotide for detection of SNP TSC0014397
cctcccaaacttc

SEQ ID NO: 51631 - DNA, 13 bp, Artificial Sequence
  Oligonucleotide for detection of SNP TSC0014397
gaagttcgggagg

SEQ ID NO: 51632 - DNA, 13 bp, Artificial Sequence
  Oligonucleotide for detection of SNP TSC0014397
cctcccgaacttc

SEQ ID NO: 51633 - DNA, 13 bp, Artificial Sequence
  Oligonucleotide for detection of SNP TSC0014397
ttttttgggttty

SEQ ID NO: 51634 - DNA, 13 bp, Artificial Sequence
  Oligonucleotide for detection of SNP TSC0014397
raaacccaaaaaa

SEQ ID NO: 51635 - DNA, 13 bp, Artificial Sequence
  Oligonucleotide for detection of SNP TSC0014397
ttttttaggttty

SEQ ID NO: 51636 - DNA, 13 bp, Artificial Sequence
  Oligonucleotide for detection of SNP TSC0014397
raaacctaaaaaa

SEQ ID NO: 51637 - DNA, 13 bp, Artificial Sequence
  Oligonucleotide for detection of SNP TSC0014397
tttttcgggttty

SEQ ID NO: 51638 - DNA, 13 bp, Artificial Sequence
  Oligonucleotide for detection of SNP TSC0014397
raaacccgaaaaa

SEQ ID NO: 51639 - DNA, 13 bp, Artificial Sequence
  Oligonucleotide for detection of SNP TSC0014402
taatttaattgga

SEQ ID NO: 51640 - DNA, 13 bp, Artificial Sequence
  Oligonucleotide for detection of SNP TSC0014402
tccaattaaatta

SEQ ID NO: 51641 - DNA, 13 bp, Artificial Sequence
  Oligonucleotide for detection of SNP TSC0014402
taattttattgga

SEQ ID NO: 51642 - DNA, 13 bp, Artificial Sequence
  Oligonucleotide for detection of SNP TSC0014402
tccaataaaatta

SEQ ID NO: 51643 - DNA, 13 bp, Artificial Sequence
  Oligonucleotide for detection of SNP TSC0014402
tttaattaagtta

SEQ ID NO: 51644 - DNA, 13 bp, Artificial Sequence
  Oligonucleotide for detection of SNP TSC0014402
taacttaattaaa

SEQ ID NO: 51645 - DNA, 13 bp, Artificial Sequence
  Oligonucleotide for detection of SNP TSC0014402
tttaataaagtta

SEQ ID NO: 51646 - DNA, 13 bp, Artificial Sequence
  Oligonucleotide for detection of SNP TSC0014402
taactttattaaa

SEQ ID NO: 51647 - DNA, 13 bp, Artificial Sequence
  Oligonucleotide for detection of SNP TSC0014406
tgaggtgtttgta

SEQ ID NO: 51648 - DNA, 13 bp, Artificial Sequence
  Oligonucleotide for detection of SNP TSC0014406
tacaaacacctca

SEQ ID NO: 51649 - DNA, 13 bp, Artificial Sequence
  Oligonucleotide for detection of SNP TSC0014406
tgaggtatttgta

SEQ ID NO: 51650 - DNA, 13 bp, Artificial Sequence
  Oligonucleotide for detection of SNP TSC0014406
tacaaatacctca

SEQ ID NO: 51651 - DNA, 13 bp, Artificial Sequence
  Oligonucleotide for detection of SNP TSC0014407
tttatagtgtttt

SEQ ID NO: 51652 - DNA, 13 bp, Artificial Sequence
  Oligonucleotide for detection of SNP TSC0014407
aaaacactataaa

SEQ ID NO: 51653 - DNA, 13 bp, Artificial Sequence
  Oligonucleotide for detection of SNP TSC0014407
tttataatgtttt

SEQ ID NO: 51654 - DNA, 13 bp, Artificial Sequence
  Oligonucleotide for detection of SNP TSC0014407
aaaacattataaa

SEQ ID NO: 51655 - DNA, 13 bp, Artificial Sequence
  Oligonucleotide for detection of SNP TSC0014408
agtggttggatty

SEQ ID NO: 51656 - DNA, 13 bp, Artificial Sequence
  Oligonucleotide for detection of SNP TSC0014408
raatccaaccact

SEQ ID NO: 51657 - DNA, 13 bp, Artificial Sequence
  Oligonucleotide for detection of SNP TSC0014408
agcggttggatty

SEQ ID NO: 51658 - DNA, 13 bp, Artificial Sequence
  Oligonucleotide for detection of SNP TSC0014408
raatccaaccgct

SEQ ID NO: 51659 - DNA, 13 bp, Artificial Sequence
  Oligonucleotide for detection of SNP TSC0014408
agtggtcggatty

SEQ ID NO: 51660 - DNA, 13 bp, Artificial Sequence
  Oligonucleotide for detection of SNP TSC0014408
raatccgaccact

SEQ ID NO: 51661 - DNA, 13 bp, Artificial Sequence
  Oligonucleotide for detection of SNP TSC0014408
agcggtcggatty

SEQ ID NO: 51662 - DNA, 13 bp, Artificial Sequence
  Oligonucleotide for detection of SNP TSC0014408
raatccgaccgct

SEQ ID NO: 51663 - DNA, 13 bp, Artificial Sequence
  Oligonucleotide for detection of SNP TSC0014408
gaatttggttgtt

SEQ ID NO: 51664 - DNA, 13 bp, Artificial Sequence
  Oligonucleotide for detection of SNP TSC0014408
aacaaccaaattc

SEQ ID NO: 51665 - DNA, 13 bp, Artificial Sequence
  Oligonucleotide for detection of SNP TSC0014408
gaatttagttgtt

SEQ ID NO: 51666 - DNA, 13 bp, Artificial Sequence
  Oligonucleotide for detection of SNP TSC0014408
aacaactaaattc

SEQ ID NO: 51667 - DNA, 13 bp, Artificial Sequence
  Oligonucleotide for detection of SNP TSC0014408
gaattcggttgtt

SEQ ID NO: 51668 - DNA, 13 bp, Artificial Sequence
  Oligonucleotide for detection of SNP TSC0014408
aacaaccgaattc

SEQ ID NO: 51669 - DNA, 13 bp, Artificial Sequence
  Oligonucleotide for detection of SNP TSC0014408
gaatttagtcgtt

SEQ ID NO: 51670 - DNA, 13 bp, Artificial Sequence
  Oligonucleotide for detection of SNP TSC0014408
aacgactaaattc

SEQ ID NO: 51671 - DNA, 13 bp, Artificial Sequence
  Oligonucleotide for detection of SNP TSC0014408
gaatttggtcgtt

SEQ ID NO: 51672 - DNA, 13 bp, Artificial Sequence
  Oligonucleotide for detection of SNP TSC0014408
aacgaccaaattc

SEQ ID NO: 51673 - DNA, 13 bp, Artificial Sequence
  Oligonucleotide for detection of SNP TSC0014408
gaattcggtcgtt

SEQ ID NO: 51674 - DNA, 13 bp, Artificial Sequence
  Oligonucleotide for detection of SNP TSC0014408
aacgaccgaattc

SEQ ID NO: 51675 - DNA, 13 bp, Artificial Sequence
  Oligonucleotide for detection of SNP TSC0014409
gagttaaggaggg

SEQ ID NO: 51676 - DNA, 13 bp, Artificial Sequence
  Oligonucleotide for detection of SNP TSC0014409
ccctccttaactc

SEQ ID NO: 51677 - DNA, 13 bp, Artificial Sequence
  Oligonucleotide for detection of SNP TSC0014409
gagttatggaggg

SEQ ID NO: 51678 - DNA, 13 bp, Artificial Sequence
  Oligonucleotide for detection of SNP TSC0014409
ccctccataactc

SEQ ID NO: 51679 - DNA, 13 bp, Artificial Sequence
  Oligonucleotide for detection of SNP TSC0014409
gagttacggaggg

SEQ ID NO: 51680 - DNA, 13 bp, Artificial Sequence
  Oligonucleotide for detection of SNP TSC0014409
ccctccgtaactc

SEQ ID NO: 51681 - DNA, 13 bp, Artificial Sequence
  Oligonucleotide for detection of SNP TSC0014409
ttttttttgatty

SEQ ID NO: 51682 - DNA, 13 bp, Artificial Sequence
  Oligonucleotide for detection of SNP TSC0014409
raatcaaaaaaaa

SEQ ID NO: 51683 - DNA, 13 bp, Artificial Sequence
  Oligonucleotide for detection of SNP TSC0014409
ttttttgtgatty

SEQ ID NO: 51684 - DNA, 13 bp, Artificial Sequence
  Oligonucleotide for detection of SNP TSC0014409
raatcacaaaaaa

SEQ ID NO: 51685 - DNA, 13 bp, Artificial Sequence
  Oligonucleotide for detection of SNP TSC0014409
tttttcgtgatty

SEQ ID NO: 51686 - DNA, 13 bp, Artificial Sequence
  Oligonucleotide for detection of SNP TSC0014409
raatcacgaaaaa

SEQ ID NO: 51687 - DNA, 13 bp, Artificial Sequence
  Oligonucleotide for detection of SNP TSC0014414
atttaggattaty

SEQ ID NO: 51688 - DNA, 13 bp, Artificial Sequence
  Oligonucleotide for detection of SNP TSC0014414
rataatcctaaat

SEQ ID NO: 51689 - DNA, 13 bp, Artificial Sequence
  Oligonucleotide for detection of SNP TSC0014417
gagtgtattttty

SEQ ID NO: 51690 - DNA, 13 bp, Artificial Sequence
  Oligonucleotide for detection of SNP TSC0014417
raaaaatacactc

SEQ ID NO: 51691 - DNA, 13 bp, Artificial Sequence
  Oligonucleotide for detection of SNP TSC0014417
gagtgtgttttty

SEQ ID NO: 51692 - DNA, 13 bp, Artificial Sequence
  Oligonucleotide for detection of SNP TSC0014417
raaaaacacactc

SEQ ID NO: 51693 - DNA, 13 bp, Artificial Sequence
  Oligonucleotide for detection of SNP TSC0014417
gagtgcgttttty

SEQ ID NO: 51694 - DNA, 13 bp, Artificial Sequence
  Oligonucleotide for detection of SNP TSC0014417
raaaaacgcactc

SEQ ID NO: 51695 - DNA, 13 bp, Artificial Sequence
  Oligonucleotide for detection of SNP TSC0014417
ggagaatgtatty

SEQ ID NO: 51696 - DNA, 13 bp, Artificial Sequence
  Oligonucleotide for detection of SNP TSC0014417
raatacattctcc

SEQ ID NO: 51697 - DNA, 13 bp, Artificial Sequence
  Oligonucleotide for detection of SNP TSC0014417
ggagaacgtatty

SEQ ID NO: 51698 - DNA, 13 bp, Artificial Sequence
  Oligonucleotide for detection of SNP TSC0014417
raatacgttctcc

SEQ ID NO: 51699 - DNA, 13 bp, Artificial Sequence
  Oligonucleotide for detection of SNP TSC0014420
ttggtaggtgtay

SEQ ID NO: 51700 - DNA, 13 bp, Artificial Sequence
  Oligonucleotide for detection of SNP TSC0014420
rtacacctaccaa

SEQ ID NO: 51701 - DNA, 13 bp, Artificial Sequence
  Oligonucleotide for detection of SNP TSC0014420
ttggtaagtgtay

SEQ ID NO: 51702 - DNA, 13 bp, Artificial Sequence
  Oligonucleotide for detection of SNP TSC0014420
rtacacttaccaa

SEQ ID NO: 51703 - DNA, 13 bp, Artificial Sequence
  Oligonucleotide for detection of SNP TSC0014420
tcggtaggtgtay

SEQ ID NO: 51704 - DNA, 13 bp, Artificial Sequence
  Oligonucleotide for detection of SNP TSC0014420
rtacacctaccga

SEQ ID NO: 51705 - DNA, 13 bp, Artificial Sequence
  Oligonucleotide for detection of SNP TSC0014420
tcggtaagtgtay

SEQ ID NO: 51706 - DNA, 13 bp, Artificial Sequence
  Oligonucleotide for detection of SNP TSC0014420
rtacacttaccga

SEQ ID NO: 51707 - DNA, 13 bp, Artificial Sequence
  Oligonucleotide for detection of SNP TSC0014421
ggaagatgttagt

SEQ ID NO: 51708 - DNA, 13 bp, Artificial Sequence
  Oligonucleotide for detection of SNP TSC0014421
actaacatcttcc

SEQ ID NO: 51709 - DNA, 13 bp, Artificial Sequence
  Oligonucleotide for detection of SNP TSC0014421
ggaagacgttagt

SEQ ID NO: 51710 - DNA, 13 bp, Artificial Sequence
  Oligonucleotide for detection of SNP TSC0014421
actaacgtcttcc

SEQ ID NO: 51711 - DNA, 13 bp, Artificial Sequence
  Oligonucleotide for detection of SNP TSC0014421
attggtgttttty

SEQ ID NO: 51712 - DNA, 13 bp, Artificial Sequence
  Oligonucleotide for detection of SNP TSC0014421
raaaaacaccaat

SEQ ID NO: 51713 - DNA, 13 bp, Artificial Sequence
  Oligonucleotide for detection of SNP TSC0014421
attggtattttty

SEQ ID NO: 51714 - DNA, 13 bp, Artificial Sequence
  Oligonucleotide for detection of SNP TSC0014421
raaaaataccaat

SEQ ID NO: 51715 - DNA, 13 bp, Artificial Sequence
  Oligonucleotide for detection of SNP TSC0014421
attggcgttttty

SEQ ID NO: 51716 - DNA, 13 bp, Artificial Sequence
  Oligonucleotide for detection of SNP TSC0014421
raaaaacgccaat

SEQ ID NO: 51717 - DNA, 13 bp, Artificial Sequence
  Oligonucleotide for detection of SNP TSC0014422
gtagttagaatty

SEQ ID NO: 51718 - DNA, 13 bp, Artificial Sequence
  Oligonucleotide for detection of SNP TSC0014422
raattctaactac

SEQ ID NO: 51719 - DNA, 13 bp, Artificial Sequence
  Oligonucleotide for detection of SNP TSC0014422
gtagttggaatty

SEQ ID NO: 51720 - DNA, 13 bp, Artificial Sequence
  Oligonucleotide for detection of SNP TSC0014422
raattccaactac

SEQ ID NO: 51721 - DNA, 13 bp, Artificial Sequence
  Oligonucleotide for detection of SNP TSC0014422
gtagtcggaatty

SEQ ID NO: 51722 - DNA, 13 bp, Artificial Sequence
  Oligonucleotide for detection of SNP TSC0014422
raattccgactac

SEQ ID NO: 51723 - DNA, 13 bp, Artificial Sequence
  Oligonucleotide for detection of SNP TSC0014422
ggattttggttay

SEQ ID NO: 51724 - DNA, 13 bp, Artificial Sequence
  Oligonucleotide for detection of SNP TSC0014422
rtaaccaaaatcc

SEQ ID NO: 51725 - DNA, 13 bp, Artificial Sequence
  Oligonucleotide for detection of SNP TSC0014422
ggatttcggttay

SEQ ID NO: 51726 - DNA, 13 bp, Artificial Sequence
  Oligonucleotide for detection of SNP TSC0014422
rtaaccgaaatcc

SEQ ID NO: 51727 - DNA, 13 bp, Artificial Sequence
  Oligonucleotide for detection of SNP TSC0014423
attatggtaatag

SEQ ID NO: 51728 - DNA, 13 bp, Artificial Sequence
  Oligonucleotide for detection of SNP TSC0014423
ctattaccataat

SEQ ID NO: 51729 - DNA, 13 bp, Artificial Sequence
  Oligonucleotide for detection of SNP TSC0014423
attatgataatag

SEQ ID NO: 51730 - DNA, 13 bp, Artificial Sequence
  Oligonucleotide for detection of SNP TSC0014423
ctattatcataat

SEQ ID NO: 51731 - DNA, 13 bp, Artificial Sequence
  Oligonucleotide for detection of SNP TSC0014426
ttttaggggggaa

SEQ ID NO: 51732 - DNA, 13 bp, Artificial Sequence
  Oligonucleotide for detection of SNP TSC0014426
ttcccccctaaaa

SEQ ID NO: 51733 - DNA, 13 bp, Artificial Sequence
  Oligonucleotide for detection of SNP TSC0014426
ttttagtggggaa

SEQ ID NO: 51734 - DNA, 13 bp, Artificial Sequence
  Oligonucleotide for detection of SNP TSC0014426
ttccccactaaaa

SEQ ID NO: 51735 - DNA, 13 bp, Artificial Sequence
  Oligonucleotide for detection of SNP TSC0014426
ttttttattaaaa

SEQ ID NO: 51736 - DNA, 13 bp, Artificial Sequence
  Oligonucleotide for detection of SNP TSC0014426
ttttaataaaaaa

SEQ ID NO: 51737 - DNA, 13 bp, Artificial Sequence
  Oligonucleotide for detection of SNP TSC0014427
gttgagtgttgtg

SEQ ID NO: 51738 - DNA, 13 bp, Artificial Sequence
  Oligonucleotide for detection of SNP TSC0014427
cacaacactcaac

SEQ ID NO: 51739 - DNA, 13 bp, Artificial Sequence
  Oligonucleotide for detection of SNP TSC0014427
gttgagggttgtg

SEQ ID NO: 51740 - DNA, 13 bp, Artificial Sequence
  Oligonucleotide for detection of SNP TSC0014427
cacaaccctcaac

SEQ ID NO: 51741 - DNA, 13 bp, Artificial Sequence
  Oligonucleotide for detection of SNP TSC0014427
gttgagcgttgtg

SEQ ID NO: 51742 - DNA, 13 bp, Artificial Sequence
  Oligonucleotide for detection of SNP TSC0014427
cacaacgctcaac

SEQ ID NO: 51743 - DNA, 13 bp, Artificial Sequence
  Oligonucleotide for detection of SNP TSC0014427
tataatgtttagy

SEQ ID NO: 51744 - DNA, 13 bp, Artificial Sequence
  Oligonucleotide for detection of SNP TSC0014427
rctaaacattata

SEQ ID NO: 51745 - DNA, 13 bp, Artificial Sequence
  Oligonucleotide for detection of SNP TSC0014427
tataatttttagy

SEQ ID NO: 51746 - DNA, 13 bp, Artificial Sequence
  Oligonucleotide for detection of SNP TSC0014427
rctaaaaattata

SEQ ID NO: 51747 - DNA, 13 bp, Artificial Sequence
  Oligonucleotide for detection of SNP TSC0014427
tataacgtttagy

SEQ ID NO: 51748 - DNA, 13 bp, Artificial Sequence
  Oligonucleotide for detection of SNP TSC0014427
rctaaacgttata

SEQ ID NO: 51749 - DNA, 13 bp, Artificial Sequence
  Oligonucleotide for detection of SNP TSC0014428
tttttgatatttt

SEQ ID NO: 51750 - DNA, 13 bp, Artificial Sequence
  Oligonucleotide for detection of SNP TSC0014428
aaaatatcaaaaa

SEQ ID NO: 51751 - DNA, 13 bp, Artificial Sequence
  Oligonucleotide for detection of SNP TSC0014428
tttttggtatttt

SEQ ID NO: 51752 - DNA, 13 bp, Artificial Sequence
  Oligonucleotide for detection of SNP TSC0014428
aaaataccaaaaa

SEQ ID NO: 51753 - DNA, 13 bp, Artificial Sequence
  Oligonucleotide for detection of SNP TSC0014430
gtagatgttttta

SEQ ID NO: 51754 - DNA, 13 bp, Artificial Sequence
  Oligonucleotide for detection of SNP TSC0014430
taaaaacatctac

SEQ ID NO: 51755 - DNA, 13 bp, Artificial Sequence
  Oligonucleotide for detection of SNP TSC0014430
tgagagtatttgy

SEQ ID NO: 51756 - DNA, 13 bp, Artificial Sequence
  Oligonucleotide for detection of SNP TSC0014430
rcaaatactctca

SEQ ID NO: 51757 - DNA, 13 bp, Artificial Sequence
  Oligonucleotide for detection of SNP TSC0014430
tgagagaatttgy

SEQ ID NO: 51758 - DNA, 13 bp, Artificial Sequence
  Oligonucleotide for detection of SNP TSC0014430
rcaaattctctca

SEQ ID NO: 51759 - DNA, 13 bp, Artificial Sequence
  Oligonucleotide for detection of SNP TSC0014431
attaatgaattaa

SEQ ID NO: 51760 - DNA, 13 bp, Artificial Sequence
  Oligonucleotide for detection of SNP TSC0014431
ttaattcattaat

SEQ ID NO: 51761 - DNA, 13 bp, Artificial Sequence
  Oligonucleotide for detection of SNP TSC0014431
attaattaattaa

SEQ ID NO: 51762 - DNA, 13 bp, Artificial Sequence
  Oligonucleotide for detection of SNP TSC0014431
ttaattaattaat

SEQ ID NO: 51763 - DNA, 13 bp, Artificial Sequence
  Oligonucleotide for detection of SNP TSC0014431
ttaatttattagt

SEQ ID NO: 51764 - DNA, 13 bp, Artificial Sequence
  Oligonucleotide for detection of SNP TSC0014431
actaataaattaa

SEQ ID NO: 51765 - DNA, 13 bp, Artificial Sequence
  Oligonucleotide for detection of SNP TSC0014431
ttaattaattagt

SEQ ID NO: 51766 - DNA, 13 bp, Artificial Sequence
  Oligonucleotide for detection of SNP TSC0014431
actaattaattaa

SEQ ID NO: 51767 - DNA, 13 bp, Artificial Sequence
  Oligonucleotide for detection of SNP TSC0014432
tataggaatgttg

SEQ ID NO: 51768 - DNA, 13 bp, Artificial Sequence
  Oligonucleotide for detection of SNP TSC0014432
caacattcctata

SEQ ID NO: 51769 - DNA, 13 bp, Artificial Sequence
  Oligonucleotide for detection of SNP TSC0014432
tataggtatgttg

SEQ ID NO: 51770 - DNA, 13 bp, Artificial Sequence
  Oligonucleotide for detection of SNP TSC0014432
caacatacctata

SEQ ID NO: 51771 - DNA, 13 bp, Artificial Sequence
  Oligonucleotide for detection of SNP TSC0014432
taatatttttgta

SEQ ID NO: 51772 - DNA, 13 bp, Artificial Sequence
  Oligonucleotide for detection of SNP TSC0014432
tacaaaaatatta

SEQ ID NO: 51773 - DNA, 13 bp, Artificial Sequence
  Oligonucleotide for detection of SNP TSC0014432
taatatgtttgta

SEQ ID NO: 51774 - DNA, 13 bp, Artificial Sequence
  Oligonucleotide for detection of SNP TSC0014432
tacaaacatatta

SEQ ID NO: 51775 - DNA, 13 bp, Artificial Sequence
  Oligonucleotide for detection of SNP TSC0014433
gagaagggagata

SEQ ID NO: 51776 - DNA, 13 bp, Artificial Sequence
  Oligonucleotide for detection of SNP TSC0014433
tatctcccttctc

SEQ ID NO: 51777 - DNA, 13 bp, Artificial Sequence
  Oligonucleotide for detection of SNP TSC0014433
gagaagtgagata

SEQ ID NO: 51778 - DNA, 13 bp, Artificial Sequence
  Oligonucleotide for detection of SNP TSC0014433
tatctcacttctc

SEQ ID NO: 51779 - DNA, 13 bp, Artificial Sequence
  Oligonucleotide for detection of SNP TSC0014434
gggaggtggagta

SEQ ID NO: 51780 - DNA, 13 bp, Artificial Sequence
  Oligonucleotide for detection of SNP TSC0014434
tactccacctccc

SEQ ID NO: 51781 - DNA, 13 bp, Artificial Sequence
  Oligonucleotide for detection of SNP TSC0014434
gggagggggagta

SEQ ID NO: 51782 - DNA, 13 bp, Artificial Sequence
  Oligonucleotide for detection of SNP TSC0014434
tactccccctccc

SEQ ID NO: 51783 - DNA, 13 bp, Artificial Sequence
  Oligonucleotide for detection of SNP TSC0014434
gggaggcggagta

SEQ ID NO: 51784 - DNA, 13 bp, Artificial Sequence
  Oligonucleotide for detection of SNP TSC0014434
tactccgcctccc

SEQ ID NO: 51785 - DNA, 13 bp, Artificial Sequence
  Oligonucleotide for detection of SNP TSC0014434
tgttttgttttty

SEQ ID NO: 51786 - DNA, 13 bp, Artificial Sequence
  Oligonucleotide for detection of SNP TSC0014434
raaaaacaaaaca

SEQ ID NO: 51787 - DNA, 13 bp, Artificial Sequence
  Oligonucleotide for detection of SNP TSC0014434
tgtttcgttttty

SEQ ID NO: 51788 - DNA, 13 bp, Artificial Sequence
  Oligonucleotide for detection of SNP TSC0014434
raaaaacgaaaca

SEQ ID NO: 51789 - DNA, 13 bp, Artificial Sequence
  Oligonucleotide for detection of SNP TSC0014435
ttgtgtgaggtty

SEQ ID NO: 51790 - DNA, 13 bp, Artificial Sequence
  Oligonucleotide for detection of SNP TSC0014435
raacctcacacaa

SEQ ID NO: 51791 - DNA, 13 bp, Artificial Sequence
  Oligonucleotide for detection of SNP TSC0014435
ttgtgtaaggtty

SEQ ID NO: 51792 - DNA, 13 bp, Artificial Sequence
  Oligonucleotide for detection of SNP TSC0014435
raaccttacacaa

SEQ ID NO: 51793 - DNA, 13 bp, Artificial Sequence
  Oligonucleotide for detection of SNP TSC0014435
tcgtgtgaggtty

SEQ ID NO: 51794 - DNA, 13 bp, Artificial Sequence
  Oligonucleotide for detection of SNP TSC0014435
raacctcacacga

SEQ ID NO: 51795 - DNA, 13 bp, Artificial Sequence
  Oligonucleotide for detection of SNP TSC0014435
tcgtgtaaggtty

SEQ ID NO: 51796 - DNA, 13 bp, Artificial Sequence
  Oligonucleotide for detection of SNP TSC0014435
raaccttacacga

SEQ ID NO: 51797 - DNA, 13 bp, Artificial Sequence
  Oligonucleotide for detection of SNP TSC0014435
ttgcgtgaggtty

SEQ ID NO: 51798 - DNA, 13 bp, Artificial Sequence
  Oligonucleotide for detection of SNP TSC0014435
raacctcacgcaa

SEQ ID NO: 51799 - DNA, 13 bp, Artificial Sequence
  Oligonucleotide for detection of SNP TSC0014435
ttgcgtaaggtty

SEQ ID NO: 51800 - DNA, 13 bp, Artificial Sequence
  Oligonucleotide for detection of SNP TSC0014435
raaccttacgcaa

SEQ ID NO: 51801 - DNA, 13 bp, Artificial Sequence
  Oligonucleotide for detection of SNP TSC0014435
tcgcgtgaggtty

SEQ ID NO: 51802 - DNA, 13 bp, Artificial Sequence
  Oligonucleotide for detection of SNP TSC0014435
raacctcacgcga

SEQ ID NO: 51803 - DNA, 13 bp, Artificial Sequence
  Oligonucleotide for detection of SNP TSC0014435
tcgcgtaaggtty

SEQ ID NO: 51804 - DNA, 13 bp, Artificial Sequence
  Oligonucleotide for detection of SNP TSC0014435
raaccttacgcga

SEQ ID NO: 51805 - DNA, 13 bp, Artificial Sequence
  Oligonucleotide for detection of SNP TSC0014436
atagaagtttaaa

SEQ ID NO: 51806 - DNA, 13 bp, Artificial Sequence
  Oligonucleotide for detection of SNP TSC0014436
tttaaacttctat

SEQ ID NO: 51807 - DNA, 13 bp, Artificial Sequence
  Oligonucleotide for detection of SNP TSC0014436
atagaaatttaaa

SEQ ID NO: 51808 - DNA, 13 bp, Artificial Sequence
  Oligonucleotide for detection of SNP TSC0014436
tttaaatttctat

SEQ ID NO: 51809 - DNA, 13 bp, Artificial Sequence
  Oligonucleotide for detection of SNP TSC0014442
aagtatatatagy

SEQ ID NO: 51810 - DNA, 13 bp, Artificial Sequence
  Oligonucleotide for detection of SNP TSC0014442
rctatatatactt

SEQ ID NO: 51811 - DNA, 13 bp, Artificial Sequence
  Oligonucleotide for detection of SNP TSC0014442
aagtatgtatagy

SEQ ID NO: 51812 - DNA, 13 bp, Artificial Sequence
  Oligonucleotide for detection of SNP TSC0014442
rctatacatactt

SEQ ID NO: 51813 - DNA, 13 bp, Artificial Sequence
  Oligonucleotide for detection of SNP TSC0014443
tttaataattttg

SEQ ID NO: 51814 - DNA, 13 bp, Artificial Sequence
  Oligonucleotide for detection of SNP TSC0014443
caaaattattaaa

SEQ ID NO: 51815 - DNA, 13 bp, Artificial Sequence
  Oligonucleotide for detection of SNP TSC0014443
tttaattattttg

SEQ ID NO: 51816 - DNA, 13 bp, Artificial Sequence
  Oligonucleotide for detection of SNP TSC0014443
caaaataattaaa

SEQ ID NO: 51817 - DNA, 13 bp, Artificial Sequence
  Oligonucleotide for detection of SNP TSC0014443
tagaattgttggg

SEQ ID NO: 51818 - DNA, 13 bp, Artificial Sequence
  Oligonucleotide for detection of SNP TSC0014443
cccaacaattcta

SEQ ID NO: 51819 - DNA, 13 bp, Artificial Sequence
  Oligonucleotide for detection of SNP TSC0014443
tagaatggttggg

SEQ ID NO: 51820 - DNA, 13 bp, Artificial Sequence
  Oligonucleotide for detection of SNP TSC0014443
cccaaccattcta

SEQ ID NO: 51821 - DNA, 13 bp, Artificial Sequence
  Oligonucleotide for detection of SNP TSC0014444
tttttgagtaagg

SEQ ID NO: 51822 - DNA, 13 bp, Artificial Sequence
  Oligonucleotide for detection of SNP TSC0014444
ccttactcaaaaa

SEQ ID NO: 51823 - DNA, 13 bp, Artificial Sequence
  Oligonucleotide for detection of SNP TSC0014444
tttttgggtaagg

SEQ ID NO: 51824 - DNA, 13 bp, Artificial Sequence
  Oligonucleotide for detection of SNP TSC0014444
ccttacccaaaaa

SEQ ID NO: 51825 - DNA, 13 bp, Artificial Sequence
  Oligonucleotide for detection of SNP TSC0014445
ataagttggagag

SEQ ID NO: 51826 - DNA, 13 bp, Artificial Sequence
  Oligonucleotide for detection of SNP TSC0014445
ctctccaacttat

SEQ ID NO: 51827 - DNA, 13 bp, Artificial Sequence
  Oligonucleotide for detection of SNP TSC0014445
ataagtcggagag

SEQ ID NO: 51828 - DNA, 13 bp, Artificial Sequence
  Oligonucleotide for detection of SNP TSC0014445
ctctccgacttat

SEQ ID NO: 51829 - DNA, 13 bp, Artificial Sequence
  Oligonucleotide for detection of SNP TSC0014445
ttttttggtttgt

SEQ ID NO: 51830 - DNA, 13 bp, Artificial Sequence
  Oligonucleotide for detection of SNP TSC0014445
acaaaccaaaaaa

SEQ ID NO: 51831 - DNA, 13 bp, Artificial Sequence
  Oligonucleotide for detection of SNP TSC0014445
tttttcggtttgt

SEQ ID NO: 51832 - DNA, 13 bp, Artificial Sequence
  Oligonucleotide for detection of SNP TSC0014445
acaaaccgaaaaa

SEQ ID NO: 51833 - DNA, 13 bp, Artificial Sequence
  Oligonucleotide for detection of SNP TSC0014446
gtttgtattagty

SEQ ID NO: 51834 - DNA, 13 bp, Artificial Sequence
  Oligonucleotide for detection of SNP TSC0014446
ractaatacaaac

SEQ ID NO: 51835 - DNA, 13 bp, Artificial Sequence
  Oligonucleotide for detection of SNP TSC0014446
gtttgtgttagty

SEQ ID NO: 51836 - DNA, 13 bp, Artificial Sequence
  Oligonucleotide for detection of SNP TSC0014446
ractaacacaaac

SEQ ID NO: 51837 - DNA, 13 bp, Artificial Sequence
  Oligonucleotide for detection of SNP TSC0014447
agtttttggtatt

SEQ ID NO: 51838 - DNA, 13 bp, Artificial Sequence
  Oligonucleotide for detection of SNP TSC0014447
aataccaaaaact

SEQ ID NO: 51839 - DNA, 13 bp, Artificial Sequence
  Oligonucleotide for detection of SNP TSC0014447
agttttcggtatt

SEQ ID NO: 51840 - DNA, 13 bp, Artificial Sequence
  Oligonucleotide for detection of SNP TSC0014447
aataccgaaaact

SEQ ID NO: 51841 - DNA, 13 bp, Artificial Sequence
  Oligonucleotide for detection of SNP TSC0014447
agtattgaaaatt

SEQ ID NO: 51842 - DNA, 13 bp, Artificial Sequence
  Oligonucleotide for detection of SNP TSC0014447
aattttcaatact

SEQ ID NO: 51843 - DNA, 13 bp, Artificial Sequence
  Oligonucleotide for detection of SNP TSC0014447
agtattaaaaatt

SEQ ID NO: 51844 - DNA, 13 bp, Artificial Sequence
  Oligonucleotide for detection of SNP TSC0014447
aatttttaatact

SEQ ID NO: 51845 - DNA, 13 bp, Artificial Sequence
  Oligonucleotide for detection of SNP TSC0014447
agtatcgaaaatt

SEQ ID NO: 51846 - DNA, 13 bp, Artificial Sequence
  Oligonucleotide for detection of SNP TSC0014447
aattttcgatact

SEQ ID NO: 51847 - DNA, 13 bp, Artificial Sequence
  Oligonucleotide for detection of SNP TSC0014448
aaagttataatat

SEQ ID NO: 51848 - DNA, 13 bp, Artificial Sequence
  Oligonucleotide for detection of SNP TSC0014448
atattataacttt

SEQ ID NO: 51849 - DNA, 13 bp, Artificial Sequence
  Oligonucleotide for detection of SNP TSC0014448
aaagttttaatat

SEQ ID NO: 51850 - DNA, 13 bp, Artificial Sequence
  Oligonucleotide for detection of SNP TSC0014448
atattaaaacttt

SEQ ID NO: 51851 - DNA, 13 bp, Artificial Sequence
  Oligonucleotide for detection of SNP TSC0014448
atattatgatttt

SEQ ID NO: 51852 - DNA, 13 bp, Artificial Sequence
  Oligonucleotide for detection of SNP TSC0014448
aaaatcataatat

SEQ ID NO: 51853 - DNA, 13 bp, Artificial Sequence
  Oligonucleotide for detection of SNP TSC0014448
atattaagatttt

SEQ ID NO: 51854 - DNA, 13 bp, Artificial Sequence
  Oligonucleotide for detection of SNP TSC0014448
aaaatcttaatat

SEQ ID NO: 51855 - DNA, 13 bp, Artificial Sequence
  Oligonucleotide for detection of SNP TSC0014449
tgaattgtgttty

SEQ ID NO: 51856 - DNA, 13 bp, Artificial Sequence
  Oligonucleotide for detection of SNP TSC0014449
raaacacaattca

SEQ ID NO: 51857 - DNA, 13 bp, Artificial Sequence
  Oligonucleotide for detection of SNP TSC0014449
tgaattatgttty

SEQ ID NO: 51858 - DNA, 13 bp, Artificial Sequence
  Oligonucleotide for detection of SNP TSC0014449
raaacataattca

SEQ ID NO: 51859 - DNA, 13 bp, Artificial Sequence
  Oligonucleotide for detection of SNP TSC0014450
attagagagatty

SEQ ID NO: 51860 - DNA, 13 bp, Artificial Sequence
  Oligonucleotide for detection of SNP TSC0014450
raatctctctaat

SEQ ID NO: 51861 - DNA, 13 bp, Artificial Sequence
  Oligonucleotide for detection of SNP TSC0014450
attagaaagatty

SEQ ID NO: 51862 - DNA, 13 bp, Artificial Sequence
  Oligonucleotide for detection of SNP TSC0014450
raatctttctaat

SEQ ID NO: 51863 - DNA, 13 bp, Artificial Sequence
  Oligonucleotide for detection of SNP TSC0014451
ttgatgaatgagg

SEQ ID NO: 51864 - DNA, 13 bp, Artificial Sequence
  Oligonucleotide for detection of SNP TSC0014451
cctcattcatcaa

SEQ ID NO: 51865 - DNA, 13 bp, Artificial Sequence
  Oligonucleotide for detection of SNP TSC0014451
ttgatggatgagg

SEQ ID NO: 51866 - DNA, 13 bp, Artificial Sequence
  Oligonucleotide for detection of SNP TSC0014451
cctcatccatcaa

SEQ ID NO: 51867 - DNA, 13 bp, Artificial Sequence
  Oligonucleotide for detection of SNP TSC0014452
tttttatgtttga

SEQ ID NO: 51868 - DNA, 13 bp, Artificial Sequence
  Oligonucleotide for detection of SNP TSC0014452
tcaaacataaaaa

SEQ ID NO: 51869 - DNA, 13 bp, Artificial Sequence
  Oligonucleotide for detection of SNP TSC0014452
tttttacgtttga

SEQ ID NO: 51870 - DNA, 13 bp, Artificial Sequence
  Oligonucleotide for detection of SNP TSC0014452
tcaaacgtaaaaa

SEQ ID NO: 51871 - DNA, 13 bp, Artificial Sequence
  Oligonucleotide for detection of SNP TSC0014452
tttttatgttcga

SEQ ID NO: 51872 - DNA, 13 bp, Artificial Sequence
  Oligonucleotide for detection of SNP TSC0014452
tcgaacataaaaa

SEQ ID NO: 51873 - DNA, 13 bp, Artificial Sequence
  Oligonucleotide for detection of SNP TSC0014452
tttttacgttcga

SEQ ID NO: 51874 - DNA, 13 bp, Artificial Sequence
  Oligonucleotide for detection of SNP TSC0014452
tcgaacgtaaaaa

SEQ ID NO: 51875 - DNA, 13 bp, Artificial Sequence
  Oligonucleotide for detection of SNP TSC0014452
ttgagtgtgaggg

SEQ ID NO: 51876 - DNA, 13 bp, Artificial Sequence
  Oligonucleotide for detection of SNP TSC0014452
ccctcacactcaa

SEQ ID NO: 51877 - DNA, 13 bp, Artificial Sequence
  Oligonucleotide for detection of SNP TSC0014452
ttgagtatgaggg

SEQ ID NO: 51878 - DNA, 13 bp, Artificial Sequence
  Oligonucleotide for detection of SNP TSC0014452
ccctcatactcaa

SEQ ID NO: 51879 - DNA, 13 bp, Artificial Sequence
  Oligonucleotide for detection of SNP TSC0014452
tcgagtgtgaggg

SEQ ID NO: 51880 - DNA, 13 bp, Artificial Sequence
  Oligonucleotide for detection of SNP TSC0014452
ccctcacactcga

SEQ ID NO: 51881 - DNA, 13 bp, Artificial Sequence
  Oligonucleotide for detection of SNP TSC0014452
tcgagtatgaggg

SEQ ID NO: 51882 - DNA, 13 bp, Artificial Sequence
  Oligonucleotide for detection of SNP TSC0014452
ccctcatactcga

SEQ ID NO: 51883 - DNA, 13 bp, Artificial Sequence
  Oligonucleotide for detection of SNP TSC0014452
ttgagcgtgaggg

SEQ ID NO: 51884 - DNA, 13 bp, Artificial Sequence
  Oligonucleotide for detection of SNP TSC0014452
ccctcacgctcaa

SEQ ID NO: 51885 - DNA, 13 bp, Artificial Sequence
  Oligonucleotide for detection of SNP TSC0014452
tcgagcgtgaggg

SEQ ID NO: 51886 - DNA, 13 bp, Artificial Sequence
  Oligonucleotide for detection of SNP TSC0014452
ccctcacgctcga

SEQ ID NO: 51887 - DNA, 13 bp, Artificial Sequence
  Oligonucleotide for detection of SNP TSC0014454
ggggtaattgtty

SEQ ID NO: 51888 - DNA, 13 bp, Artificial Sequence
  Oligonucleotide for detection of SNP TSC0014454
raacaattacccc

SEQ ID NO: 51889 - DNA, 13 bp, Artificial Sequence
  Oligonucleotide for detection of SNP TSC0014454
ggggtagttgtty

SEQ ID NO: 51890 - DNA, 13 bp, Artificial Sequence
  Oligonucleotide for detection of SNP TSC0014454
raacaactacccc

SEQ ID NO: 51891 - DNA, 13 bp, Artificial Sequence
  Oligonucleotide for detection of SNP TSC0014455
ttgaagaagttty

SEQ ID NO: 51892 - DNA, 13 bp, Artificial Sequence
  Oligonucleotide for detection of SNP TSC0014455
raaacttcttcaa

SEQ ID NO: 51893 - DNA, 13 bp, Artificial Sequence
  Oligonucleotide for detection of SNP TSC0014455
ttgaaggagttty

SEQ ID NO: 51894 - DNA, 13 bp, Artificial Sequence
  Oligonucleotide for detection of SNP TSC0014455
raaactccttcaa

SEQ ID NO: 51895 - DNA, 13 bp, Artificial Sequence
  Oligonucleotide for detection of SNP TSC0014459
tgttaggtggagy

SEQ ID NO: 51896 - DNA, 13 bp, Artificial Sequence
  Oligonucleotide for detection of SNP TSC0014459
rctccacctaaca

SEQ ID NO: 51897 - DNA, 13 bp, Artificial Sequence
  Oligonucleotide for detection of SNP TSC0014459
tgttagttggagy

SEQ ID NO: 51898 - DNA, 13 bp, Artificial Sequence
  Oligonucleotide for detection of SNP TSC0014459
rctccaactaaca

SEQ ID NO: 51899 - DNA, 13 bp, Artificial Sequence
  Oligonucleotide for detection of SNP TSC0014459
gttttatttaata

SEQ ID NO: 51900 - DNA, 13 bp, Artificial Sequence
  Oligonucleotide for detection of SNP TSC0014459
tattaaataaaac

SEQ ID NO: 51901 - DNA, 13 bp, Artificial Sequence
  Oligonucleotide for detection of SNP TSC0014459
gttttaattaata

SEQ ID NO: 51902 - DNA, 13 bp, Artificial Sequence
  Oligonucleotide for detection of SNP TSC0014459
tattaattaaaac

SEQ ID NO: 51903 - DNA, 13 bp, Artificial Sequence
  Oligonucleotide for detection of SNP TSC0014460
ttaggtggagtag

SEQ ID NO: 51904 - DNA, 13 bp, Artificial Sequence
  Oligonucleotide for detection of SNP TSC0014460
ctactccacctaa

SEQ ID NO: 51905 - DNA, 13 bp, Artificial Sequence
  Oligonucleotide for detection of SNP TSC0014460
ttaggttgagtag

SEQ ID NO: 51906 - DNA, 13 bp, Artificial Sequence
  Oligonucleotide for detection of SNP TSC0014460
ctactcaacctaa

SEQ ID NO: 51907 - DNA, 13 bp, Artificial Sequence
  Oligonucleotide for detection of SNP TSC0014460
ttgttttatttaa

SEQ ID NO: 51908 - DNA, 13 bp, Artificial Sequence
  Oligonucleotide for detection of SNP TSC0014460
ttaaataaaacaa

SEQ ID NO: 51909 - DNA, 13 bp, Artificial Sequence
  Oligonucleotide for detection of SNP TSC0014460
ttgtttaatttaa

SEQ ID NO: 51910 - DNA, 13 bp, Artificial Sequence
  Oligonucleotide for detection of SNP TSC0014460
ttaaattaaacaa

SEQ ID NO: 51911 - DNA, 13 bp, Artificial Sequence
  Oligonucleotide for detection of SNP TSC0014461
ggatggagaatay

SEQ ID NO: 51912 - DNA, 13 bp, Artificial Sequence
  Oligonucleotide for detection of SNP TSC0014461
rtattctccatcc

SEQ ID NO: 51913 - DNA, 13 bp, Artificial Sequence
  Oligonucleotide for detection of SNP TSC0014461
ggatggggaatay

SEQ ID NO: 51914 - DNA, 13 bp, Artificial Sequence
  Oligonucleotide for detection of SNP TSC0014461
rtattccccatcc

SEQ ID NO: 51915 - DNA, 13 bp, Artificial Sequence
  Oligonucleotide for detection of SNP TSC0014462
aattagatttaay

SEQ ID NO: 51916 - DNA, 13 bp, Artificial Sequence
  Oligonucleotide for detection of SNP TSC0014462
rttaaatctaatt

SEQ ID NO: 51917 - DNA, 13 bp, Artificial Sequence
  Oligonucleotide for detection of SNP TSC0014462
aattaggtttaay

SEQ ID NO: 51918 - DNA, 13 bp, Artificial Sequence
  Oligonucleotide for detection of SNP TSC0014462
rttaaacctaatt

SEQ ID NO: 51919 - DNA, 13 bp, Artificial Sequence
  Oligonucleotide for detection of SNP TSC0014463
ttgggaggtatta

SEQ ID NO: 51920 - DNA, 13 bp, Artificial Sequence
  Oligonucleotide for detection of SNP TSC0014463
taatacctcccaa

SEQ ID NO: 51921 - DNA, 13 bp, Artificial Sequence
  Oligonucleotide for detection of SNP TSC0014463
ttgggatgtatta

SEQ ID NO: 51922 - DNA, 13 bp, Artificial Sequence
  Oligonucleotide for detection of SNP TSC0014463
taatacatcccaa

SEQ ID NO: 51923 - DNA, 13 bp, Artificial Sequence
  Oligonucleotide for detection of SNP TSC0014463
tggtgttttttag

SEQ ID NO: 51924 - DNA, 13 bp, Artificial Sequence
  Oligonucleotide for detection of SNP TSC0014463
ctaaaaaacacca

SEQ ID NO: 51925 - DNA, 13 bp, Artificial Sequence
  Oligonucleotide for detection of SNP TSC0014463
tggtgtattttag

SEQ ID NO: 51926 - DNA, 13 bp, Artificial Sequence
  Oligonucleotide for detection of SNP TSC0014463
ctaaaatacacca

SEQ ID NO: 51927 - DNA, 13 bp, Artificial Sequence
  Oligonucleotide for detection of SNP TSC0014464
ttttggaggttat

SEQ ID NO: 51928 - DNA, 13 bp, Artificial Sequence
  Oligonucleotide for detection of SNP TSC0014464
ataacctccaaaa

SEQ ID NO: 51929 - DNA, 13 bp, Artificial Sequence
  Oligonucleotide for detection of SNP TSC0014464
ttttgggggttat

SEQ ID NO: 51930 - DNA, 13 bp, Artificial Sequence
  Oligonucleotide for detection of SNP TSC0014464
ataacccccaaaa

SEQ ID NO: 51931 - DNA, 13 bp, Artificial Sequence
  Oligonucleotide for detection of SNP TSC0014465
tttgttattttta

SEQ ID NO: 51932 - DNA, 13 bp, Artificial Sequence
  Oligonucleotide for detection of SNP TSC0014465
taaaaataacaaa

SEQ ID NO: 51933 - DNA, 13 bp, Artificial Sequence
  Oligonucleotide for detection of SNP TSC0014465
tttgttgttttta

SEQ ID NO: 51934 - DNA, 13 bp, Artificial Sequence
  Oligonucleotide for detection of SNP TSC0014465
taaaaacaacaaa

SEQ ID NO: 51935 - DNA, 13 bp, Artificial Sequence
  Oligonucleotide for detection of SNP TSC0014465
tttgtcgttttta

SEQ ID NO: 51936 - DNA, 13 bp, Artificial Sequence
  Oligonucleotide for detection of SNP TSC0014465
taaaaacgacaaa

SEQ ID NO: 51937 - DNA, 13 bp, Artificial Sequence
  Oligonucleotide for detection of SNP TSC0014465
tggagatggtagg

SEQ ID NO: 51938 - DNA, 13 bp, Artificial Sequence
  Oligonucleotide for detection of SNP TSC0014465
cctaccatctcca

SEQ ID NO: 51939 - DNA, 13 bp, Artificial Sequence
  Oligonucleotide for detection of SNP TSC0014465
tggagacggtagg

SEQ ID NO: 51940 - DNA, 13 bp, Artificial Sequence
  Oligonucleotide for detection of SNP TSC0014465
cctaccgtctcca

SEQ ID NO: 51941 - DNA, 13 bp, Artificial Sequence
  Oligonucleotide for detection of SNP TSC0014470
ggaaggtttatga

SEQ ID NO: 51942 - DNA, 13 bp, Artificial Sequence
  Oligonucleotide for detection of SNP TSC0014470
tcataaaccttcc

SEQ ID NO: 51943 - DNA, 13 bp, Artificial Sequence
  Oligonucleotide for detection of SNP TSC0014470
ggaagggttatga

SEQ ID NO: 51944 - DNA, 13 bp, Artificial Sequence
  Oligonucleotide for detection of SNP TSC0014470
tcataacccttcc

SEQ ID NO: 51945 - DNA, 13 bp, Artificial Sequence
  Oligonucleotide for detection of SNP TSC0014472
gtataggttttta

SEQ ID NO: 51946 - DNA, 13 bp, Artificial Sequence
  Oligonucleotide for detection of SNP TSC0014472
taaaaacctatac

SEQ ID NO: 51947 - DNA, 13 bp, Artificial Sequence
  Oligonucleotide for detection of SNP TSC0014472
gtatagattttta

SEQ ID NO: 51948 - DNA, 13 bp, Artificial Sequence
  Oligonucleotide for detection of SNP TSC0014472
taaaaatctatac

SEQ ID NO: 51949 - DNA, 13 bp, Artificial Sequence
  Oligonucleotide for detection of SNP TSC0014473
tttgaaattggty

SEQ ID NO: 51950 - DNA, 13 bp, Artificial Sequence
  Oligonucleotide for detection of SNP TSC0014473
raccaatttcaaa

SEQ ID NO: 51951 - DNA, 13 bp, Artificial Sequence
  Oligonucleotide for detection of SNP TSC0014473
tttgaagttggty

SEQ ID NO: 51952 - DNA, 13 bp, Artificial Sequence
  Oligonucleotide for detection of SNP TSC0014473
raccaacttcaaa

SEQ ID NO: 51953 - DNA, 13 bp, Artificial Sequence
  Oligonucleotide for detection of SNP TSC0014474
tattggtggtgtg

SEQ ID NO: 51954 - DNA, 13 bp, Artificial Sequence
  Oligonucleotide for detection of SNP TSC0014474
cacaccaccaata

SEQ ID NO: 51955 - DNA, 13 bp, Artificial Sequence
  Oligonucleotide for detection of SNP TSC0014474
tattggcggtgtg

SEQ ID NO: 51956 - DNA, 13 bp, Artificial Sequence
  Oligonucleotide for detection of SNP TSC0014474
cacaccgccaata

SEQ ID NO: 51957 - DNA, 13 bp, Artificial Sequence
  Oligonucleotide for detection of SNP TSC0014474
tatattgttaata

SEQ ID NO: 51958 - DNA, 13 bp, Artificial Sequence
  Oligonucleotide for detection of SNP TSC0014474
tattaacaatata

SEQ ID NO: 51959 - DNA, 13 bp, Artificial Sequence
  Oligonucleotide for detection of SNP TSC0014474
tatattattaata

SEQ ID NO: 51960 - DNA, 13 bp, Artificial Sequence
  Oligonucleotide for detection of SNP TSC0014474
tattaataatata

SEQ ID NO: 51961 - DNA, 13 bp, Artificial Sequence
  Oligonucleotide for detection of SNP TSC0014474
tatatcgttaata

SEQ ID NO: 51962 - DNA, 13 bp, Artificial Sequence
  Oligonucleotide for detection of SNP TSC0014474
tattaacgatata

SEQ ID NO: 51963 - DNA, 13 bp, Artificial Sequence
  Oligonucleotide for detection of SNP TSC0014475
ttgtgaagtagty

SEQ ID NO: 51964 - DNA, 13 bp, Artificial Sequence
  Oligonucleotide for detection of SNP TSC0014475
ractacttcacaa

SEQ ID NO: 51965 - DNA, 13 bp, Artificial Sequence
  Oligonucleotide for detection of SNP TSC0014475
ttgtgatgtagty

SEQ ID NO: 51966 - DNA, 13 bp, Artificial Sequence
  Oligonucleotide for detection of SNP TSC0014475
ractacatcacaa

SEQ ID NO: 51967 - DNA, 13 bp, Artificial Sequence
  Oligonucleotide for detection of SNP TSC0014475
ttgtgacgtagty

SEQ ID NO: 51968 - DNA, 13 bp, Artificial Sequence
  Oligonucleotide for detection of SNP TSC0014475
ractacgtcacaa

SEQ ID NO: 51969 - DNA, 13 bp, Artificial Sequence
  Oligonucleotide for detection of SNP TSC0014475
ggttgttttatag

SEQ ID NO: 51970 - DNA, 13 bp, Artificial Sequence
  Oligonucleotide for detection of SNP TSC0014475
ctataaaacaacc

SEQ ID NO: 51971 - DNA, 13 bp, Artificial Sequence
  Oligonucleotide for detection of SNP TSC0014475
ggttgtgttatag

SEQ ID NO: 51972 - DNA, 13 bp, Artificial Sequence
  Oligonucleotide for detection of SNP TSC0014475
ctataacacaacc

SEQ ID NO: 51973 - DNA, 13 bp, Artificial Sequence
  Oligonucleotide for detection of SNP TSC0014475
ggttgtattatag

SEQ ID NO: 51974 - DNA, 13 bp, Artificial Sequence
  Oligonucleotide for detection of SNP TSC0014475
ctataatacaacc

SEQ ID NO: 51975 - DNA, 13 bp, Artificial Sequence
  Oligonucleotide for detection of SNP TSC0014475
ggttgcgttatag

SEQ ID NO: 51976 - DNA, 13 bp, Artificial Sequence
  Oligonucleotide for detection of SNP TSC0014475
ctataacgcaacc

SEQ ID NO: 51977 - DNA, 13 bp, Artificial Sequence
  Oligonucleotide for detection of SNP TSC0014476
tgaggtgtgtaag

SEQ ID NO: 51978 - DNA, 13 bp, Artificial Sequence
  Oligonucleotide for detection of SNP TSC0014476
cttacacacctca

SEQ ID NO: 51979 - DNA, 13 bp, Artificial Sequence
  Oligonucleotide for detection of SNP TSC0014476
tgaggtatgtaag

SEQ ID NO: 51980 - DNA, 13 bp, Artificial Sequence
  Oligonucleotide for detection of SNP TSC0014476
cttacatacctca

SEQ ID NO: 51981 - DNA, 13 bp, Artificial Sequence
  Oligonucleotide for detection of SNP TSC0014478
attgaggtatttg

SEQ ID NO: 51982 - DNA, 13 bp, Artificial Sequence
  Oligonucleotide for detection of SNP TSC0014478
caaatacctcaat

SEQ ID NO: 51983 - DNA, 13 bp, Artificial Sequence
  Oligonucleotide for detection of SNP TSC0014478
attgagatatttg

SEQ ID NO: 51984 - DNA, 13 bp, Artificial Sequence
  Oligonucleotide for detection of SNP TSC0014478
caaatatctcaat

SEQ ID NO: 51985 - DNA, 13 bp, Artificial Sequence
  Oligonucleotide for detection of SNP TSC0014478
atcgaggtatttg

SEQ ID NO: 51986 - DNA, 13 bp, Artificial Sequence
  Oligonucleotide for detection of SNP TSC0014478
caaatacctcgat

SEQ ID NO: 51987 - DNA, 13 bp, Artificial Sequence
  Oligonucleotide for detection of SNP TSC0014478
atcgagatatttg

SEQ ID NO: 51988 - DNA, 13 bp, Artificial Sequence
  Oligonucleotide for detection of SNP TSC0014478
caaatatctcgat

SEQ ID NO: 51989 - DNA, 13 bp, Artificial Sequence
  Oligonucleotide for detection of SNP TSC0014480
ttattagttatga

SEQ ID NO: 51990 - DNA, 13 bp, Artificial Sequence
  Oligonucleotide for detection of SNP TSC0014480
tcataactaataa

SEQ ID NO: 51991 - DNA, 13 bp, Artificial Sequence
  Oligonucleotide for detection of SNP TSC0014480
ttattaattatga

SEQ ID NO: 51992 - DNA, 13 bp, Artificial Sequence
  Oligonucleotide for detection of SNP TSC0014480
tcataattaataa

SEQ ID NO: 51993 - DNA, 13 bp, Artificial Sequence
  Oligonucleotide for detection of SNP TSC0014481
tgatagtggaaaa

SEQ ID NO: 51994 - DNA, 13 bp, Artificial Sequence
  Oligonucleotide for detection of SNP TSC0014481
ttttccactatca

SEQ ID NO: 51995 - DNA, 13 bp, Artificial Sequence
  Oligonucleotide for detection of SNP TSC0014481
tgatagcggaaaa

SEQ ID NO: 51996 - DNA, 13 bp, Artificial Sequence
  Oligonucleotide for detection of SNP TSC0014481
ttttccgctatca

SEQ ID NO: 51997 - DNA, 13 bp, Artificial Sequence
  Oligonucleotide for detection of SNP TSC0014482
aggataaatagta

SEQ ID NO: 51998 - DNA, 13 bp, Artificial Sequence
  Oligonucleotide for detection of SNP TSC0014482
tactatttatcct

SEQ ID NO: 51999 - DNA, 13 bp, Artificial Sequence
  Oligonucleotide for detection of SNP TSC0014482
aggatagatagta

SEQ ID NO: 52000 - DNA, 13 bp, Artificial Sequence
  Oligonucleotide for detection of SNP TSC0014482
tactatctatcct

SEQ ID NO: 52001 - DNA, 13 bp, Artificial Sequence
  Oligonucleotide for detection of SNP TSC0014483
gagtttaagttag

SEQ ID NO: 52002 - DNA, 13 bp, Artificial Sequence
  Oligonucleotide for detection of SNP TSC0014483
ctaacttaaactc

SEQ ID NO: 52003 - DNA, 13 bp, Artificial Sequence
  Oligonucleotide for detection of SNP TSC0014483
gagtttgagttag

SEQ ID NO: 52004 - DNA, 13 bp, Artificial Sequence
  Oligonucleotide for detection of SNP TSC0014483
ctaactcaaactc

SEQ ID NO: 52005 - DNA, 13 bp, Artificial Sequence
  Oligonucleotide for detection of SNP TSC0014483
gagttcgagttag

SEQ ID NO: 52006 - DNA, 13 bp, Artificial Sequence
  Oligonucleotide for detection of SNP TSC0014483
ctaactcgaactc

SEQ ID NO: 52007 - DNA, 13 bp, Artificial Sequence
  Oligonucleotide for detection of SNP TSC0014483
ttggtttgggtty

SEQ ID NO: 52008 - DNA, 13 bp, Artificial Sequence
  Oligonucleotide for detection of SNP TSC0014483
raacccaaaccaa

SEQ ID NO: 52009 - DNA, 13 bp, Artificial Sequence
  Oligonucleotide for detection of SNP TSC0014483
ttggttcgggtty

SEQ ID NO: 52010 - DNA, 13 bp, Artificial Sequence
  Oligonucleotide for detection of SNP TSC0014483
raacccgaaccaa

SEQ ID NO: 52011 - DNA, 13 bp, Artificial Sequence
  Oligonucleotide for detection of SNP TSC0014486
aatagataaaaaa

SEQ ID NO: 52012 - DNA, 13 bp, Artificial Sequence
  Oligonucleotide for detection of SNP TSC0014486
ttttttatctatt

SEQ ID NO: 52013 - DNA, 13 bp, Artificial Sequence
  Oligonucleotide for detection of SNP TSC0014486
aatagagaaaaaa

SEQ ID NO: 52014 - DNA, 13 bp, Artificial Sequence
  Oligonucleotide for detection of SNP TSC0014486
ttttttctctatt

SEQ ID NO: 52015 - DNA, 13 bp, Artificial Sequence
  Oligonucleotide for detection of SNP TSC0014487
attgaagagttaa

SEQ ID NO: 52016 - DNA, 13 bp, Artificial Sequence
  Oligonucleotide for detection of SNP TSC0014487
ttaactcttcaat

SEQ ID NO: 52017 - DNA, 13 bp, Artificial Sequence
  Oligonucleotide for detection of SNP TSC0014487
attgaaaagttaa

SEQ ID NO: 52018 - DNA, 13 bp, Artificial Sequence
  Oligonucleotide for detection of SNP TSC0014487
ttaacttttcaat

SEQ ID NO: 52019 - DNA, 13 bp, Artificial Sequence
  Oligonucleotide for detection of SNP TSC0014488
ggtttaatttttt

SEQ ID NO: 52020 - DNA, 13 bp, Artificial Sequence
  Oligonucleotide for detection of SNP TSC0014488
aaaaaattaaacc

SEQ ID NO: 52021 - DNA, 13 bp, Artificial Sequence
  Oligonucleotide for detection of SNP TSC0014488
ggtttagtttttt

SEQ ID NO: 52022 - DNA, 13 bp, Artificial Sequence
  Oligonucleotide for detection of SNP TSC0014488
aaaaaactaaacc

SEQ ID NO: 52023 - DNA, 13 bp, Artificial Sequence
  Oligonucleotide for detection of SNP TSC0014489
ttggagtgtttgg

SEQ ID NO: 52024 - DNA, 13 bp, Artificial Sequence
  Oligonucleotide for detection of SNP TSC0014489
ccaaacactccaa

SEQ ID NO: 52025 - DNA, 13 bp, Artificial Sequence
  Oligonucleotide for detection of SNP TSC0014489
ttggagcgtttgg

SEQ ID NO: 52026 - DNA, 13 bp, Artificial Sequence
  Oligonucleotide for detection of SNP TSC0014489
ccaaacgctccaa

SEQ ID NO: 52027 - DNA, 13 bp, Artificial Sequence
  Oligonucleotide for detection of SNP TSC0014489
ttaggtgttttag

SEQ ID NO: 52028 - DNA, 13 bp, Artificial Sequence
  Oligonucleotide for detection of SNP TSC0014489
ctaaaacacctaa

SEQ ID NO: 52029 - DNA, 13 bp, Artificial Sequence
  Oligonucleotide for detection of SNP TSC0014489
ttaggtattttag

SEQ ID NO: 52030 - DNA, 13 bp, Artificial Sequence
  Oligonucleotide for detection of SNP TSC0014489
ctaaaatacctaa

SEQ ID NO: 52031 - DNA, 13 bp, Artificial Sequence
  Oligonucleotide for detection of SNP TSC0014489
ttaggcgttttag

SEQ ID NO: 52032 - DNA, 13 bp, Artificial Sequence
  Oligonucleotide for detection of SNP TSC0014489
ctaaaacgcctaa

SEQ ID NO: 52033 - DNA, 13 bp, Artificial Sequence
  Oligonucleotide for detection of SNP TSC0014491
ttgtttatttgga

SEQ ID NO: 52034 - DNA, 13 bp, Artificial Sequence
  Oligonucleotide for detection of SNP TSC0014491
tccaaataaacaa

SEQ ID NO: 52035 - DNA, 13 bp, Artificial Sequence
  Oligonucleotide for detection of SNP TSC0014491
ttgtttgtttgga

SEQ ID NO: 52036 - DNA, 13 bp, Artificial Sequence
  Oligonucleotide for detection of SNP TSC0014491
tccaaacaaacaa

SEQ ID NO: 52037 - DNA, 13 bp, Artificial Sequence
  Oligonucleotide for detection of SNP TSC0014491
tcgtttatttgga

SEQ ID NO: 52038 - DNA, 13 bp, Artificial Sequence
  Oligonucleotide for detection of SNP TSC0014491
tccaaataaacga

SEQ ID NO: 52039 - DNA, 13 bp, Artificial Sequence
  Oligonucleotide for detection of SNP TSC0014491
tcgtttgtttgga

SEQ ID NO: 52040 - DNA, 13 bp, Artificial Sequence
  Oligonucleotide for detection of SNP TSC0014491
tccaaacaaacga

SEQ ID NO: 52041 - DNA, 13 bp, Artificial Sequence
  Oligonucleotide for detection of SNP TSC0014491
ttgtttattcgga

SEQ ID NO: 52042 - DNA, 13 bp, Artificial Sequence
  Oligonucleotide for detection of SNP TSC0014491
tccgaataaacaa

SEQ ID NO: 52043 - DNA, 13 bp, Artificial Sequence
  Oligonucleotide for detection of SNP TSC0014491
ttgttcgtttgga

SEQ ID NO: 52044 - DNA, 13 bp, Artificial Sequence
  Oligonucleotide for detection of SNP TSC0014491
tccaaacgaacaa

SEQ ID NO: 52045 - DNA, 13 bp, Artificial Sequence
  Oligonucleotide for detection of SNP TSC0014491
tcgtttattcgga

SEQ ID NO: 52046 - DNA, 13 bp, Artificial Sequence
  Oligonucleotide for detection of SNP TSC0014491
tccgaataaacga

SEQ ID NO: 52047 - DNA, 13 bp, Artificial Sequence
  Oligonucleotide for detection of SNP TSC0014491
ttgtttgttcgga

SEQ ID NO: 52048 - DNA, 13 bp, Artificial Sequence
  Oligonucleotide for detection of SNP TSC0014491
tccgaacaaacaa

SEQ ID NO: 52049 - DNA, 13 bp, Artificial Sequence
  Oligonucleotide for detection of SNP TSC0014491
tcgttcgtttgga

SEQ ID NO: 52050 - DNA, 13 bp, Artificial Sequence
  Oligonucleotide for detection of SNP TSC0014491
tccaaacgaacga

SEQ ID NO: 52051 - DNA, 13 bp, Artificial Sequence
  Oligonucleotide for detection of SNP TSC0014491
tcgtttgttcgga

SEQ ID NO: 52052 - DNA, 13 bp, Artificial Sequence
  Oligonucleotide for detection of SNP TSC0014491
tccgaacaaacga

SEQ ID NO: 52053 - DNA, 13 bp, Artificial Sequence
  Oligonucleotide for detection of SNP TSC0014491
ttgttcgttcgga

SEQ ID NO: 52054 - DNA, 13 bp, Artificial Sequence
  Oligonucleotide for detection of SNP TSC0014491
tccgaacgaacaa

SEQ ID NO: 52055 - DNA, 13 bp, Artificial Sequence
  Oligonucleotide for detection of SNP TSC0014491
tcgttcgttcgga

SEQ ID NO: 52056 - DNA, 13 bp, Artificial Sequence
  Oligonucleotide for detection of SNP TSC0014491
tccgaacgaacga

SEQ ID NO: 52057 - DNA, 13 bp, Artificial Sequence
  Oligonucleotide for detection of SNP TSC0014491
tttgggtgaatgg

SEQ ID NO: 52058 - DNA, 13 bp, Artificial Sequence
  Oligonucleotide for detection of SNP TSC0014491
ccattcacccaaa

SEQ ID NO: 52059 - DNA, 13 bp, Artificial Sequence
  Oligonucleotide for detection of SNP TSC0014491
ttcgggtgaatgg

SEQ ID NO: 52060 - DNA, 13 bp, Artificial Sequence
  Oligonucleotide for detection of SNP TSC0014491
ccattcacccgaa

SEQ ID NO: 52061 - DNA, 13 bp, Artificial Sequence
  Oligonucleotide for detection of SNP TSC0014491
tttgggtgaacgg

SEQ ID NO: 52062 - DNA, 13 bp, Artificial Sequence
  Oligonucleotide for detection of SNP TSC0014491
ccgttcacccaaa

SEQ ID NO: 52063 - DNA, 13 bp, Artificial Sequence
  Oligonucleotide for detection of SNP TSC0014491
tttgggcgaatgg

SEQ ID NO: 52064 - DNA, 13 bp, Artificial Sequence
  Oligonucleotide for detection of SNP TSC0014491
ccattcgcccaaa

SEQ ID NO: 52065 - DNA, 13 bp, Artificial Sequence
  Oligonucleotide for detection of SNP TSC0014491
ttcgggtgaacgg

SEQ ID NO: 52066 - DNA, 13 bp, Artificial Sequence
  Oligonucleotide for detection of SNP TSC0014491
ccgttcacccgaa

SEQ ID NO: 52067 - DNA, 13 bp, Artificial Sequence
  Oligonucleotide for detection of SNP TSC0014491
ttcgggcgaatgg

SEQ ID NO: 52068 - DNA, 13 bp, Artificial Sequence
  Oligonucleotide for detection of SNP TSC0014491
ccattcgcccgaa

SEQ ID NO: 52069 - DNA, 13 bp, Artificial Sequence
  Oligonucleotide for detection of SNP TSC0014491
tttgggcgaacgg

SEQ ID NO: 52070 - DNA, 13 bp, Artificial Sequence
  Oligonucleotide for detection of SNP TSC0014491
ccgttcgcccaaa

SEQ ID NO: 52071 - DNA, 13 bp, Artificial Sequence
  Oligonucleotide for detection of SNP TSC0014491
ttcgggcgaacgg

SEQ ID NO: 52072 - DNA, 13 bp, Artificial Sequence
  Oligonucleotide for detection of SNP TSC0014491
ccgttcgcccgaa

SEQ ID NO: 52073 - DNA, 13 bp, Artificial Sequence
  Oligonucleotide for detection of SNP TSC0014492
aaaatagattaga

SEQ ID NO: 52074 - DNA, 13 bp, Artificial Sequence
  Oligonucleotide for detection of SNP TSC0014492
tctaatctatttt

SEQ ID NO: 52075 - DNA, 13 bp, Artificial Sequence
  Oligonucleotide for detection of SNP TSC0014492
aaaataaattaga

SEQ ID NO: 52076 - DNA, 13 bp, Artificial Sequence
  Oligonucleotide for detection of SNP TSC0014492
tctaatttatttt

SEQ ID NO: 52077 - DNA, 13 bp, Artificial Sequence
  Oligonucleotide for detection of SNP TSC0014493
aggaaatgttagy

SEQ ID NO: 52078 - DNA, 13 bp, Artificial Sequence
  Oligonucleotide for detection of SNP TSC0014493
rctaacatttcct

SEQ ID NO: 52079 - DNA, 13 bp, Artificial Sequence
  Oligonucleotide for detection of SNP TSC0014493
aggaaacgttagy

SEQ ID NO: 52080 - DNA, 13 bp, Artificial Sequence
  Oligonucleotide for detection of SNP TSC0014493
rctaacgtttcct

SEQ ID NO: 52081 - DNA, 13 bp, Artificial Sequence
  Oligonucleotide for detection of SNP TSC0014493
gttaatgtttttt

SEQ ID NO: 52082 - DNA, 13 bp, Artificial Sequence
  Oligonucleotide for detection of SNP TSC0014493
aaaaaacattaac

SEQ ID NO: 52083 - DNA, 13 bp, Artificial Sequence
  Oligonucleotide for detection of SNP TSC0014493
gttaacgtttttt

SEQ ID NO: 52084 - DNA, 13 bp, Artificial Sequence
  Oligonucleotide for detection of SNP TSC0014493
aaaaaacgttaac

SEQ ID NO: 52085 - DNA, 13 bp, Artificial Sequence
  Oligonucleotide for detection of SNP TSC0014494
gattttattagta

SEQ ID NO: 52086 - DNA, 13 bp, Artificial Sequence
  Oligonucleotide for detection of SNP TSC0014494
tactaataaaatc

SEQ ID NO: 52087 - DNA, 13 bp, Artificial Sequence
  Oligonucleotide for detection of SNP TSC0014494
gattttgttagta

SEQ ID NO: 52088 - DNA, 13 bp, Artificial Sequence
  Oligonucleotide for detection of SNP TSC0014494
tactaacaaaatc

SEQ ID NO: 52089 - DNA, 13 bp, Artificial Sequence
  Oligonucleotide for detection of SNP TSC0014494
gatttcgttagta

SEQ ID NO: 52090 - DNA, 13 bp, Artificial Sequence
  Oligonucleotide for detection of SNP TSC0014494
tactaacgaaatc

SEQ ID NO: 52091 - DNA, 13 bp, Artificial Sequence
  Oligonucleotide for detection of SNP TSC0014494
tgttgatggaaty

SEQ ID NO: 52092 - DNA, 13 bp, Artificial Sequence
  Oligonucleotide for detection of SNP TSC0014494
rattccatcaaca

SEQ ID NO: 52093 - DNA, 13 bp, Artificial Sequence
  Oligonucleotide for detection of SNP TSC0014494
tgttgacggaaty

SEQ ID NO: 52094 - DNA, 13 bp, Artificial Sequence
  Oligonucleotide for detection of SNP TSC0014494
rattccgtcaaca

SEQ ID NO: 52095 - DNA, 13 bp, Artificial Sequence
  Oligonucleotide for detection of SNP TSC0014495
ttattgagttatg

SEQ ID NO: 52096 - DNA, 13 bp, Artificial Sequence
  Oligonucleotide for detection of SNP TSC0014495
cataactcaataa

SEQ ID NO: 52097 - DNA, 13 bp, Artificial Sequence
  Oligonucleotide for detection of SNP TSC0014495
ttattgggttatg

SEQ ID NO: 52098 - DNA, 13 bp, Artificial Sequence
  Oligonucleotide for detection of SNP TSC0014495
cataacccaataa

SEQ ID NO: 52099 - DNA, 13 bp, Artificial Sequence
  Oligonucleotide for detection of SNP TSC0014496
aaatgaggagtag

SEQ ID NO: 52100 - DNA, 13 bp, Artificial Sequence
  Oligonucleotide for detection of SNP TSC0014496
ctactcctcattt

SEQ ID NO: 52101 - DNA, 13 bp, Artificial Sequence
  Oligonucleotide for detection of SNP TSC0014496
aaatgaagagtag

SEQ ID NO: 52102 - DNA, 13 bp, Artificial Sequence
  Oligonucleotide for detection of SNP TSC0014496
ctactcttcattt

SEQ ID NO: 52103 - DNA, 13 bp, Artificial Sequence
  Oligonucleotide for detection of SNP TSC0014497
tataaatgttttg

SEQ ID NO: 52104 - DNA, 13 bp, Artificial Sequence
  Oligonucleotide for detection of SNP TSC0014497
caaaacatttata

SEQ ID NO: 52105 - DNA, 13 bp, Artificial Sequence
  Oligonucleotide for detection of SNP TSC0014497
tataaacgttttg

SEQ ID NO: 52106 - DNA, 13 bp, Artificial Sequence
  Oligonucleotide for detection of SNP TSC0014497
caaaacgtttata

SEQ ID NO: 52107 - DNA, 13 bp, Artificial Sequence
  Oligonucleotide for detection of SNP TSC0014497
tagagtgtttatg

SEQ ID NO: 52108 - DNA, 13 bp, Artificial Sequence
  Oligonucleotide for detection of SNP TSC0014497
cataaacactcta

SEQ ID NO: 52109 - DNA, 13 bp, Artificial Sequence
  Oligonucleotide for detection of SNP TSC0014497
tagagtatttatg

SEQ ID NO: 52110 - DNA, 13 bp, Artificial Sequence
  Oligonucleotide for detection of SNP TSC0014497
cataaatactcta

SEQ ID NO: 52111 - DNA, 13 bp, Artificial Sequence
  Oligonucleotide for detection of SNP TSC0014497
tagagcgtttatg

SEQ ID NO: 52112 - DNA, 13 bp, Artificial Sequence
  Oligonucleotide for detection of SNP TSC0014497
cataaacgctcta

SEQ ID NO: 52113 - DNA, 13 bp, Artificial Sequence
  Oligonucleotide for detection of SNP TSC0014499
tttgttggtttgt

SEQ ID NO: 52114 - DNA, 13 bp, Artificial Sequence
  Oligonucleotide for detection of SNP TSC0014499
acaaaccaacaaa

SEQ ID NO: 52115 - DNA, 13 bp, Artificial Sequence
  Oligonucleotide for detection of SNP TSC0014499
tttgtttgtttgt

SEQ ID NO: 52116 - DNA, 13 bp, Artificial Sequence
  Oligonucleotide for detection of SNP TSC0014499
acaaacaaacaaa

SEQ ID NO: 52117 - DNA, 13 bp, Artificial Sequence
  Oligonucleotide for detection of SNP TSC0014499
atagattaataaa

SEQ ID NO: 52118 - DNA, 13 bp, Artificial Sequence
  Oligonucleotide for detection of SNP TSC0014499
tttattaatctat

SEQ ID NO: 52119 - DNA, 13 bp, Artificial Sequence
  Oligonucleotide for detection of SNP TSC0014499
atagataaataaa

SEQ ID NO: 52120 - DNA, 13 bp, Artificial Sequence
  Oligonucleotide for detection of SNP TSC0014499
tttatttatctat

SEQ ID NO: 52121 - DNA, 13 bp, Artificial Sequence
  Oligonucleotide for detection of SNP TSC0014500
atatttatggagy

SEQ ID NO: 52122 - DNA, 13 bp, Artificial Sequence
  Oligonucleotide for detection of SNP TSC0014500
rctccataaatat

SEQ ID NO: 52123 - DNA, 13 bp, Artificial Sequence
  Oligonucleotide for detection of SNP TSC0014500
atatttttggagy

SEQ ID NO: 52124 - DNA, 13 bp, Artificial Sequence
  Oligonucleotide for detection of SNP TSC0014500
rctccaaaaatat

SEQ ID NO: 52125 - DNA, 13 bp, Artificial Sequence
  Oligonucleotide for detection of SNP TSC0014500
atatttacggagy

SEQ ID NO: 52126 - DNA, 13 bp, Artificial Sequence
  Oligonucleotide for detection of SNP TSC0014500
rctccgtaaatat

SEQ ID NO: 52127 - DNA, 13 bp, Artificial Sequence
  Oligonucleotide for detection of SNP TSC0014500
atattttcggagy

SEQ ID NO: 52128 - DNA, 13 bp, Artificial Sequence
  Oligonucleotide for detection of SNP TSC0014500
rctccgaaaatat

SEQ ID NO: 52129 - DNA, 13 bp, Artificial Sequence
  Oligonucleotide for detection of SNP TSC0014500
gttttgtggatgt

SEQ ID NO: 52130 - DNA, 13 bp, Artificial Sequence
  Oligonucleotide for detection of SNP TSC0014500
acatccacaaaac

SEQ ID NO: 52131 - DNA, 13 bp, Artificial Sequence
  Oligonucleotide for detection of SNP TSC0014500
gttttggggatgt

SEQ ID NO: 52132 - DNA, 13 bp, Artificial Sequence
  Oligonucleotide for detection of SNP TSC0014500
acatccccaaaac

SEQ ID NO: 52133 - DNA, 13 bp, Artificial Sequence
  Oligonucleotide for detection of SNP TSC0014500
gtttcgtggatgt

SEQ ID NO: 52134 - DNA, 13 bp, Artificial Sequence
  Oligonucleotide for detection of SNP TSC0014500
acatccacgaaac

SEQ ID NO: 52135 - DNA, 13 bp, Artificial Sequence
  Oligonucleotide for detection of SNP TSC0014500
gtttcggggatgt

SEQ ID NO: 52136 - DNA, 13 bp, Artificial Sequence
  Oligonucleotide for detection of SNP TSC0014500
acatccccgaaac

SEQ ID NO: 52137 - DNA, 13 bp, Artificial Sequence
  Oligonucleotide for detection of SNP TSC0014501
agataagtaagaa

SEQ ID NO: 52138 - DNA, 13 bp, Artificial Sequence
  Oligonucleotide for detection of SNP TSC0014501
ttcttacttatct

SEQ ID NO: 52139 - DNA, 13 bp, Artificial Sequence
  Oligonucleotide for detection of SNP TSC0014501
agataaataagaa

SEQ ID NO: 52140 - DNA, 13 bp, Artificial Sequence
  Oligonucleotide for detection of SNP TSC0014501
ttcttatttatct

SEQ ID NO: 52141 - DNA, 13 bp, Artificial Sequence
  Oligonucleotide for detection of SNP TSC0014502
taaaaggtattat

SEQ ID NO: 52142 - DNA, 13 bp, Artificial Sequence
  Oligonucleotide for detection of SNP TSC0014502
ataatacctttta

SEQ ID NO: 52143 - DNA, 13 bp, Artificial Sequence
  Oligonucleotide for detection of SNP TSC0014502
taaaagatattat

SEQ ID NO: 52144 - DNA, 13 bp, Artificial Sequence
  Oligonucleotide for detection of SNP TSC0014502
ataatatctttta

SEQ ID NO: 52145 - DNA, 13 bp, Artificial Sequence
  Oligonucleotide for detection of SNP TSC0014504
ttttatatgaaaa

SEQ ID NO: 52146 - DNA, 13 bp, Artificial Sequence
  Oligonucleotide for detection of SNP TSC0014504
ttttcatataaaa

SEQ ID NO: 52147 - DNA, 13 bp, Artificial Sequence
  Oligonucleotide for detection of SNP TSC0014504
ttttatgtgaaaa

SEQ ID NO: 52148 - DNA, 13 bp, Artificial Sequence
  Oligonucleotide for detection of SNP TSC0014504
ttttcacataaaa

SEQ ID NO: 52149 - DNA, 13 bp, Artificial Sequence
  Oligonucleotide for detection of SNP TSC0014504
ttttacgtgaaaa

SEQ ID NO: 52150 - DNA, 13 bp, Artificial Sequence
  Oligonucleotide for detection of SNP TSC0014504
ttttcacgtaaaa

SEQ ID NO: 52151 - DNA, 13 bp, Artificial Sequence
  Oligonucleotide for detection of SNP TSC0014504
tttttatgtaaaa

SEQ ID NO: 52152 - DNA, 13 bp, Artificial Sequence
  Oligonucleotide for detection of SNP TSC0014504
ttttacataaaaa

SEQ ID NO: 52153 - DNA, 13 bp, Artificial Sequence
  Oligonucleotide for detection of SNP TSC0014504
tttttacgtaaaa

SEQ ID NO: 52154 - DNA, 13 bp, Artificial Sequence
  Oligonucleotide for detection of SNP TSC0014504
ttttacgtaaaaa

SEQ ID NO: 52155 - DNA, 13 bp, Artificial Sequence
  Oligonucleotide for detection of SNP TSC0014505
gattgtgttaatg

SEQ ID NO: 52156 - DNA, 13 bp, Artificial Sequence
  Oligonucleotide for detection of SNP TSC0014505
cattaacacaatc

SEQ ID NO: 52157 - DNA, 13 bp, Artificial Sequence
  Oligonucleotide for detection of SNP TSC0014505
gattgtattaatg

SEQ ID NO: 52158 - DNA, 13 bp, Artificial Sequence
  Oligonucleotide for detection of SNP TSC0014505
cattaatacaatc

SEQ ID NO: 52159 - DNA, 13 bp, Artificial Sequence
  Oligonucleotide for detection of SNP TSC0014506
tttttgatggttt

SEQ ID NO: 52160 - DNA, 13 bp, Artificial Sequence
  Oligonucleotide for detection of SNP TSC0014506
aaaccatcaaaaa

SEQ ID NO: 52161 - DNA, 13 bp, Artificial Sequence
  Oligonucleotide for detection of SNP TSC0014506
tttttggtggttt

SEQ ID NO: 52162 - DNA, 13 bp, Artificial Sequence
  Oligonucleotide for detection of SNP TSC0014506
aaaccaccaaaaa

SEQ ID NO: 52163 - DNA, 13 bp, Artificial Sequence
  Oligonucleotide for detection of SNP TSC0014507
tgagattggtgag

SEQ ID NO: 52164 - DNA, 13 bp, Artificial Sequence
  Oligonucleotide for detection of SNP TSC0014507
ctcaccaatctca

SEQ ID NO: 52165 - DNA, 13 bp, Artificial Sequence
  Oligonucleotide for detection of SNP TSC0014507
tgagatcggtgag

SEQ ID NO: 52166 - DNA, 13 bp, Artificial Sequence
  Oligonucleotide for detection of SNP TSC0014507
ctcaccgatctca

SEQ ID NO: 52167 - DNA, 13 bp, Artificial Sequence
  Oligonucleotide for detection of SNP TSC0014507
tttattagtttta

SEQ ID NO: 52168 - DNA, 13 bp, Artificial Sequence
  Oligonucleotide for detection of SNP TSC0014507
taaaactaataaa

SEQ ID NO: 52169 - DNA, 13 bp, Artificial Sequence
  Oligonucleotide for detection of SNP TSC0014508
ttttggattgtta

SEQ ID NO: 52170 - DNA, 13 bp, Artificial Sequence
  Oligonucleotide for detection of SNP TSC0014508
taacaatccaaaa

SEQ ID NO: 52171 - DNA, 13 bp, Artificial Sequence
  Oligonucleotide for detection of SNP TSC0014508
ttttgggttgtta

SEQ ID NO: 52172 - DNA, 13 bp, Artificial Sequence
  Oligonucleotide for detection of SNP TSC0014508
taacaacccaaaa

SEQ ID NO: 52173 - DNA, 13 bp, Artificial Sequence
  Oligonucleotide for detection of SNP TSC0014509
agatgaatataty

SEQ ID NO: 52174 - DNA, 13 bp, Artificial Sequence
  Oligonucleotide for detection of SNP TSC0014509
ratatattcatct

SEQ ID NO: 52175 - DNA, 13 bp, Artificial Sequence
  Oligonucleotide for detection of SNP TSC0014509
agatgagtataty

SEQ ID NO: 52176 - DNA, 13 bp, Artificial Sequence
  Oligonucleotide for detection of SNP TSC0014509
ratatactcatct

SEQ ID NO: 52177 - DNA, 13 bp, Artificial Sequence
  Oligonucleotide for detection of SNP TSC0014510
tgttaatgtagat

SEQ ID NO: 52178 - DNA, 13 bp, Artificial Sequence
  Oligonucleotide for detection of SNP TSC0014510
atctacattaaca

SEQ ID NO: 52179 - DNA, 13 bp, Artificial Sequence
  Oligonucleotide for detection of SNP TSC0014510
tgttaacgtagat

SEQ ID NO: 52180 - DNA, 13 bp, Artificial Sequence
  Oligonucleotide for detection of SNP TSC0014510
atctacgttaaca

SEQ ID NO: 52181 - DNA, 13 bp, Artificial Sequence
  Oligonucleotide for detection of SNP TSC0014510
atttgtgttaata

SEQ ID NO: 52182 - DNA, 13 bp, Artificial Sequence
  Oligonucleotide for detection of SNP TSC0014510
tattaacacaaat

SEQ ID NO: 52183 - DNA, 13 bp, Artificial Sequence
  Oligonucleotide for detection of SNP TSC0014510
atttgtattaata

SEQ ID NO: 52184 - DNA, 13 bp, Artificial Sequence
  Oligonucleotide for detection of SNP TSC0014510
tattaatacaaat

SEQ ID NO: 52185 - DNA, 13 bp, Artificial Sequence
  Oligonucleotide for detection of SNP TSC0014510
atttgcgttaata

SEQ ID NO: 52186 - DNA, 13 bp, Artificial Sequence
  Oligonucleotide for detection of SNP TSC0014510
tattaacgcaaat

SEQ ID NO: 52187 - DNA, 13 bp, Artificial Sequence
  Oligonucleotide for detection of SNP TSC0014511
ttatagatgtgag

SEQ ID NO: 52188 - DNA, 13 bp, Artificial Sequence
  Oligonucleotide for detection of SNP TSC0014511
ctcacatctataa

SEQ ID NO: 52189 - DNA, 13 bp, Artificial Sequence
  Oligonucleotide for detection of SNP TSC0014511
ttataggtgtgag

SEQ ID NO: 52190 - DNA, 13 bp, Artificial Sequence
  Oligonucleotide for detection of SNP TSC0014511
ctcacacctataa

SEQ ID NO: 52191 - DNA, 13 bp, Artificial Sequence
  Oligonucleotide for detection of SNP TSC0014512
agagttgtttaag

SEQ ID NO: 52192 - DNA, 13 bp, Artificial Sequence
  Oligonucleotide for detection of SNP TSC0014512
cttaaacaactct

SEQ ID NO: 52193 - DNA, 13 bp, Artificial Sequence
  Oligonucleotide for detection of SNP TSC0014512
agagttttttaag

SEQ ID NO: 52194 - DNA, 13 bp, Artificial Sequence
  Oligonucleotide for detection of SNP TSC0014512
cttaaaaaactct

SEQ ID NO: 52195 - DNA, 13 bp, Artificial Sequence
  Oligonucleotide for detection of SNP TSC0014512
tttagataatttt

SEQ ID NO: 52196 - DNA, 13 bp, Artificial Sequence
  Oligonucleotide for detection of SNP TSC0014512
aaaattatctaaa

SEQ ID NO: 52197 - DNA, 13 bp, Artificial Sequence
  Oligonucleotide for detection of SNP TSC0014512
tttagaaaatttt

SEQ ID NO: 52198 - DNA, 13 bp, Artificial Sequence
  Oligonucleotide for detection of SNP TSC0014512
aaaattttctaaa

SEQ ID NO: 52199 - DNA, 13 bp, Artificial Sequence
  Oligonucleotide for detection of SNP TSC0014513
tagggaggggaty

SEQ ID NO: 52200 - DNA, 13 bp, Artificial Sequence
  Oligonucleotide for detection of SNP TSC0014513
ratcccctcccta

SEQ ID NO: 52201 - DNA, 13 bp, Artificial Sequence
  Oligonucleotide for detection of SNP TSC0014513
tagggaagggaty

SEQ ID NO: 52202 - DNA, 13 bp, Artificial Sequence
  Oligonucleotide for detection of SNP TSC0014513
ratcccttcccta

SEQ ID NO: 52203 - DNA, 13 bp, Artificial Sequence
  Oligonucleotide for detection of SNP TSC0014514
gtaaaaagtaggy

SEQ ID NO: 52204 - DNA, 13 bp, Artificial Sequence
  Oligonucleotide for detection of SNP TSC0014514
rcctactttttac

SEQ ID NO: 52205 - DNA, 13 bp, Artificial Sequence
  Oligonucleotide for detection of SNP TSC0014514
gtaaaaggtaggy

SEQ ID NO: 52206 - DNA, 13 bp, Artificial Sequence
  Oligonucleotide for detection of SNP TSC0014514
rcctaccttttac

SEQ ID NO: 52207 - DNA, 13 bp, Artificial Sequence
  Oligonucleotide for detection of SNP TSC0014515
tggtgtgtttatt

SEQ ID NO: 52208 - DNA, 13 bp, Artificial Sequence
  Oligonucleotide for detection of SNP TSC0014515
aataaacacacca

SEQ ID NO: 52209 - DNA, 13 bp, Artificial Sequence
  Oligonucleotide for detection of SNP TSC0014515
tggtgtatttatt

SEQ ID NO: 52210 - DNA, 13 bp, Artificial Sequence
  Oligonucleotide for detection of SNP TSC0014515
aataaatacacca

SEQ ID NO: 52211 - DNA, 13 bp, Artificial Sequence
  Oligonucleotide for detection of SNP TSC0014516
ttgagtgtagaat

SEQ ID NO: 52212 - DNA, 13 bp, Artificial Sequence
  Oligonucleotide for detection of SNP TSC0014516
attctacactcaa

SEQ ID NO: 52213 - DNA, 13 bp, Artificial Sequence
  Oligonucleotide for detection of SNP TSC0014516
ttgagtatagaat

SEQ ID NO: 52214 - DNA, 13 bp, Artificial Sequence
  Oligonucleotide for detection of SNP TSC0014516
attctatactcaa

SEQ ID NO: 52215 - DNA, 13 bp, Artificial Sequence
  Oligonucleotide for detection of SNP TSC0014517
tttattagtagty

SEQ ID NO: 52216 - DNA, 13 bp, Artificial Sequence
  Oligonucleotide for detection of SNP TSC0014517
ractactaataaa

SEQ ID NO: 52217 - DNA, 13 bp, Artificial Sequence
  Oligonucleotide for detection of SNP TSC0014517
tttattggtagty

SEQ ID NO: 52218 - DNA, 13 bp, Artificial Sequence
  Oligonucleotide for detection of SNP TSC0014517
ractaccaataaa

SEQ ID NO: 52219 - DNA, 13 bp, Artificial Sequence
  Oligonucleotide for detection of SNP TSC0014517
tttatcggtagty

SEQ ID NO: 52220 - DNA, 13 bp, Artificial Sequence
  Oligonucleotide for detection of SNP TSC0014517
ractaccgataaa

SEQ ID NO: 52221 - DNA, 13 bp, Artificial Sequence
  Oligonucleotide for detection of SNP TSC0014517
ggttgttggtgaa

SEQ ID NO: 52222 - DNA, 13 bp, Artificial Sequence
  Oligonucleotide for detection of SNP TSC0014517
ttcaccaacaacc

SEQ ID NO: 52223 - DNA, 13 bp, Artificial Sequence
  Oligonucleotide for detection of SNP TSC0014517
ggttgtcggtgaa

SEQ ID NO: 52224 - DNA, 13 bp, Artificial Sequence
  Oligonucleotide for detection of SNP TSC0014517
ttcaccgacaacc

SEQ ID NO: 52225 - DNA, 13 bp, Artificial Sequence
  Oligonucleotide for detection of SNP TSC0014520
ttatttgtggaty

SEQ ID NO: 52226 - DNA, 13 bp, Artificial Sequence
  Oligonucleotide for detection of SNP TSC0014520
ratccacaaataa

SEQ ID NO: 52227 - DNA, 13 bp, Artificial Sequence
  Oligonucleotide for detection of SNP TSC0014520
ttatttatggaty

SEQ ID NO: 52228 - DNA, 13 bp, Artificial Sequence
  Oligonucleotide for detection of SNP TSC0014520
ratccataaataa

SEQ ID NO: 52229 - DNA, 13 bp, Artificial Sequence
  Oligonucleotide for detection of SNP TSC0014522
ggttatatagtga

SEQ ID NO: 52230 - DNA, 13 bp, Artificial Sequence
  Oligonucleotide for detection of SNP TSC0014522
tcactatataacc

SEQ ID NO: 52231 - DNA, 13 bp, Artificial Sequence
  Oligonucleotide for detection of SNP TSC0014522
ggttatgtagtga

SEQ ID NO: 52232 - DNA, 13 bp, Artificial Sequence
  Oligonucleotide for detection of SNP TSC0014522
tcactacataacc

SEQ ID NO: 52233 - DNA, 13 bp, Artificial Sequence
  Oligonucleotide for detection of SNP TSC0014522
ggttacgtagtga

SEQ ID NO: 52234 - DNA, 13 bp, Artificial Sequence
  Oligonucleotide for detection of SNP TSC0014522
tcactacgtaacc

SEQ ID NO: 52235 - DNA, 13 bp, Artificial Sequence
  Oligonucleotide for detection of SNP TSC0014522
ttattatgtggty

SEQ ID NO: 52236 - DNA, 13 bp, Artificial Sequence
  Oligonucleotide for detection of SNP TSC0014522
raccacataataa

SEQ ID NO: 52237 - DNA, 13 bp, Artificial Sequence
  Oligonucleotide for detection of SNP TSC0014522
ttattacgtggty

SEQ ID NO: 52238 - DNA, 13 bp, Artificial Sequence
  Oligonucleotide for detection of SNP TSC0014522
raccacgtaataa

SEQ ID NO: 52239 - DNA, 13 bp, Artificial Sequence
  Oligonucleotide for detection of SNP TSC0014523
tttattaggaagy

SEQ ID NO: 52240 - DNA, 13 bp, Artificial Sequence
  Oligonucleotide for detection of SNP TSC0014523
rcttcctaataaa

SEQ ID NO: 52241 - DNA, 13 bp, Artificial Sequence
  Oligonucleotide for detection of SNP TSC0014523
tttattgggaagy

SEQ ID NO: 52242 - DNA, 13 bp, Artificial Sequence
  Oligonucleotide for detection of SNP TSC0014523
rcttcccaataaa

SEQ ID NO: 52243 - DNA, 13 bp, Artificial Sequence
  Oligonucleotide for detection of SNP TSC0014523
tttatcgggaagy

SEQ ID NO: 52244 - DNA, 13 bp, Artificial Sequence
  Oligonucleotide for detection of SNP TSC0014523
rcttcccgataaa

SEQ ID NO: 52245 - DNA, 13 bp, Artificial Sequence
  Oligonucleotide for detection of SNP TSC0014523
gttttttggtgga

SEQ ID NO: 52246 - DNA, 13 bp, Artificial Sequence
  Oligonucleotide for detection of SNP TSC0014523
tccaccaaaaaac

SEQ ID NO: 52247 - DNA, 13 bp, Artificial Sequence
  Oligonucleotide for detection of SNP TSC0014523
gtttttcggtgga

SEQ ID NO: 52248 - DNA, 13 bp, Artificial Sequence
  Oligonucleotide for detection of SNP TSC0014523
tccaccgaaaaac

SEQ ID NO: 52249 - DNA, 13 bp, Artificial Sequence
  Oligonucleotide for detection of SNP TSC0014524
aggagagagaaaa

SEQ ID NO: 52250 - DNA, 13 bp, Artificial Sequence
  Oligonucleotide for detection of SNP TSC0014524
ttttctctctcct

SEQ ID NO: 52251 - DNA, 13 bp, Artificial Sequence
  Oligonucleotide for detection of SNP TSC0014524
aggagaaagaaaa

SEQ ID NO: 52252 - DNA, 13 bp, Artificial Sequence
  Oligonucleotide for detection of SNP TSC0014524
ttttctttctcct

SEQ ID NO: 52253 - DNA, 13 bp, Artificial Sequence
  Oligonucleotide for detection of SNP TSC0014525
attagtagggtgt

SEQ ID NO: 52254 - DNA, 13 bp, Artificial Sequence
  Oligonucleotide for detection of SNP TSC0014525
acaccctactaat

SEQ ID NO: 52255 - DNA, 13 bp, Artificial Sequence
  Oligonucleotide for detection of SNP TSC0014525
attagttgggtgt

SEQ ID NO: 52256 - DNA, 13 bp, Artificial Sequence
  Oligonucleotide for detection of SNP TSC0014525
acacccaactaat

SEQ ID NO: 52257 - DNA, 13 bp, Artificial Sequence
  Oligonucleotide for detection of SNP TSC0014525
attagtcgggtgt

SEQ ID NO: 52258 - DNA, 13 bp, Artificial Sequence
  Oligonucleotide for detection of SNP TSC0014525
acacccgactaat

SEQ ID NO: 52259 - DNA, 13 bp, Artificial Sequence
  Oligonucleotide for detection of SNP TSC0014525
atattttgttaat

SEQ ID NO: 52260 - DNA, 13 bp, Artificial Sequence
  Oligonucleotide for detection of SNP TSC0014525
attaacaaaatat

SEQ ID NO: 52261 - DNA, 13 bp, Artificial Sequence
  Oligonucleotide for detection of SNP TSC0014525
atatttggttaat

SEQ ID NO: 52262 - DNA, 13 bp, Artificial Sequence
  Oligonucleotide for detection of SNP TSC0014525
attaaccaaatat

SEQ ID NO: 52263 - DNA, 13 bp, Artificial Sequence
  Oligonucleotide for detection of SNP TSC0014525
atattcggttaat

SEQ ID NO: 52264 - DNA, 13 bp, Artificial Sequence
  Oligonucleotide for detection of SNP TSC0014525
attaaccgaatat

SEQ ID NO: 52265 - DNA, 13 bp, Artificial Sequence
  Oligonucleotide for detection of SNP TSC0014526
agttttataaata

SEQ ID NO: 52266 - DNA, 13 bp, Artificial Sequence
  Oligonucleotide for detection of SNP TSC0014526
tatttataaaact

SEQ ID NO: 52267 - DNA, 13 bp, Artificial Sequence
  Oligonucleotide for detection of SNP TSC0014526
agttttgtaaata

SEQ ID NO: 52268 - DNA, 13 bp, Artificial Sequence
  Oligonucleotide for detection of SNP TSC0014526
tatttacaaaact

SEQ ID NO: 52269 - DNA, 13 bp, Artificial Sequence
  Oligonucleotide for detection of SNP TSC0014526
agtttcgtaaata

SEQ ID NO: 52270 - DNA, 13 bp, Artificial Sequence
  Oligonucleotide for detection of SNP TSC0014526
tatttacgaaact

SEQ ID NO: 52271 - DNA, 13 bp, Artificial Sequence
  Oligonucleotide for detection of SNP TSC0014526
tatttatgggatt

SEQ ID NO: 52272 - DNA, 13 bp, Artificial Sequence
  Oligonucleotide for detection of SNP TSC0014526
aatcccataaata

SEQ ID NO: 52273 - DNA, 13 bp, Artificial Sequence
  Oligonucleotide for detection of SNP TSC0014526
tatttacgggatt

SEQ ID NO: 52274 - DNA, 13 bp, Artificial Sequence
  Oligonucleotide for detection of SNP TSC0014526
aatcccgtaaata

SEQ ID NO: 52275 - DNA, 13 bp, Artificial Sequence
  Oligonucleotide for detection of SNP TSC0014528
gagttagttgaay

SEQ ID NO: 52276 - DNA, 13 bp, Artificial Sequence
  Oligonucleotide for detection of SNP TSC0014528
rttcaactaactc

SEQ ID NO: 52277 - DNA, 13 bp, Artificial Sequence
  Oligonucleotide for detection of SNP TSC0014528
gagttaattgaay

SEQ ID NO: 52278 - DNA, 13 bp, Artificial Sequence
  Oligonucleotide for detection of SNP TSC0014528
rttcaattaactc

SEQ ID NO: 52279 - DNA, 13 bp, Artificial Sequence
  Oligonucleotide for detection of SNP TSC0014529
aagaaaatgatay

SEQ ID NO: 52280 - DNA, 13 bp, Artificial Sequence
  Oligonucleotide for detection of SNP TSC0014529
rtatcattttctt

SEQ ID NO: 52281 - DNA, 13 bp, Artificial Sequence
  Oligonucleotide for detection of SNP TSC0014529
aagaaagtgatay

SEQ ID NO: 52282 - DNA, 13 bp, Artificial Sequence
  Oligonucleotide for detection of SNP TSC0014529
rtatcactttctt

SEQ ID NO: 52283 - DNA, 13 bp, Artificial Sequence
  Oligonucleotide for detection of SNP TSC0014530
aaataaaattagg

SEQ ID NO: 52284 - DNA, 13 bp, Artificial Sequence
  Oligonucleotide for detection of SNP TSC0014530
cctaattttattt

SEQ ID NO: 52285 - DNA, 13 bp, Artificial Sequence
  Oligonucleotide for detection of SNP TSC0014530
aaataatattagg

SEQ ID NO: 52286 - DNA, 13 bp, Artificial Sequence
  Oligonucleotide for detection of SNP TSC0014530
cctaatattattt

SEQ ID NO: 52287 - DNA, 13 bp, Artificial Sequence
  Oligonucleotide for detection of SNP TSC0014530
tttgattttattt

SEQ ID NO: 52288 - DNA, 13 bp, Artificial Sequence
  Oligonucleotide for detection of SNP TSC0014530
aaataaaatcaaa

SEQ ID NO: 52289 - DNA, 13 bp, Artificial Sequence
  Oligonucleotide for detection of SNP TSC0014530
tttgatgttattt

SEQ ID NO: 52290 - DNA, 13 bp, Artificial Sequence
  Oligonucleotide for detection of SNP TSC0014530
aaataacatcaaa

SEQ ID NO: 52291 - DNA, 13 bp, Artificial Sequence
  Oligonucleotide for detection of SNP TSC0014531
ttttgtgtagaag

SEQ ID NO: 52292 - DNA, 13 bp, Artificial Sequence
  Oligonucleotide for detection of SNP TSC0014531
cttctacacaaaa

SEQ ID NO: 52293 - DNA, 13 bp, Artificial Sequence
  Oligonucleotide for detection of SNP TSC0014531
ttttgtatagaag

SEQ ID NO: 52294 - DNA, 13 bp, Artificial Sequence
  Oligonucleotide for detection of SNP TSC0014531
cttctatacaaaa

SEQ ID NO: 52295 - DNA, 13 bp, Artificial Sequence
  Oligonucleotide for detection of SNP TSC0014532
agttatttttaaa

SEQ ID NO: 52296 - DNA, 13 bp, Artificial Sequence
  Oligonucleotide for detection of SNP TSC0014532
tttaaaaataact

SEQ ID NO: 52297 - DNA, 13 bp, Artificial Sequence
  Oligonucleotide for detection of SNP TSC0014532
tttaagtataatt

SEQ ID NO: 52298 - DNA, 13 bp, Artificial Sequence
  Oligonucleotide for detection of SNP TSC0014532
aattatacttaaa

SEQ ID NO: 52299 - DNA, 13 bp, Artificial Sequence
  Oligonucleotide for detection of SNP TSC0014532
tttaagaataatt

SEQ ID NO: 52300 - DNA, 13 bp, Artificial Sequence
  Oligonucleotide for detection of SNP TSC0014532
aattattcttaaa

SEQ ID NO: 52301 - DNA, 13 bp, Artificial Sequence
  Oligonucleotide for detection of SNP TSC0014533
tattatattgata

SEQ ID NO: 52302 - DNA, 13 bp, Artificial Sequence
  Oligonucleotide for detection of SNP TSC0014533
tatcaatataata

SEQ ID NO: 52303 - DNA, 13 bp, Artificial Sequence
  Oligonucleotide for detection of SNP TSC0014533
tattatgttgata

SEQ ID NO: 52304 - DNA, 13 bp, Artificial Sequence
  Oligonucleotide for detection of SNP TSC0014533
tatcaacataata

SEQ ID NO: 52305 - DNA, 13 bp, Artificial Sequence
  Oligonucleotide for detection of SNP TSC0014534
gttgggagtaggt

SEQ ID NO: 52306 - DNA, 13 bp, Artificial Sequence
  Oligonucleotide for detection of SNP TSC0014534
acctactcccaac

SEQ ID NO: 52307 - DNA, 13 bp, Artificial Sequence
  Oligonucleotide for detection of SNP TSC0014534
gttgggggtaggt

SEQ ID NO: 52308 - DNA, 13 bp, Artificial Sequence
  Oligonucleotide for detection of SNP TSC0014534
acctacccccaac

SEQ ID NO: 52309 - DNA, 13 bp, Artificial Sequence
  Oligonucleotide for detection of SNP TSC0014535
ttgttgggtgtga

SEQ ID NO: 52310 - DNA, 13 bp, Artificial Sequence
  Oligonucleotide for detection of SNP TSC0014535
tcacacccaacaa

SEQ ID NO: 52311 - DNA, 13 bp, Artificial Sequence
  Oligonucleotide for detection of SNP TSC0014535
ttgttgagtgtga

SEQ ID NO: 52312 - DNA, 13 bp, Artificial Sequence
  Oligonucleotide for detection of SNP TSC0014535
tcacactcaacaa

SEQ ID NO: 52313 - DNA, 13 bp, Artificial Sequence
  Oligonucleotide for detection of SNP TSC0014536
atatttgatttgt

SEQ ID NO: 52314 - DNA, 13 bp, Artificial Sequence
  Oligonucleotide for detection of SNP TSC0014536
acaaatcaaatat

SEQ ID NO: 52315 - DNA, 13 bp, Artificial Sequence
  Oligonucleotide for detection of SNP TSC0014536
atattttatttgt

SEQ ID NO: 52316 - DNA, 13 bp, Artificial Sequence
  Oligonucleotide for detection of SNP TSC0014536
acaaataaaatat

SEQ ID NO: 52317 - DNA, 13 bp, Artificial Sequence
  Oligonucleotide for detection of SNP TSC0014536
atattcgatttgt

SEQ ID NO: 52318 - DNA, 13 bp, Artificial Sequence
  Oligonucleotide for detection of SNP TSC0014536
acaaatcgaatat

SEQ ID NO: 52319 - DNA, 13 bp, Artificial Sequence
  Oligonucleotide for detection of SNP TSC0014536
ataaattgagtgt

SEQ ID NO: 52320 - DNA, 13 bp, Artificial Sequence
  Oligonucleotide for detection of SNP TSC0014536
acactcaatttat

SEQ ID NO: 52321 - DNA, 13 bp, Artificial Sequence
  Oligonucleotide for detection of SNP TSC0014536
ataaatagagtgt

SEQ ID NO: 52322 - DNA, 13 bp, Artificial Sequence
  Oligonucleotide for detection of SNP TSC0014536
acactctatttat

SEQ ID NO: 52323 - DNA, 13 bp, Artificial Sequence
  Oligonucleotide for detection of SNP TSC0014536
ataaatcgagtgt

SEQ ID NO: 52324 - DNA, 13 bp, Artificial Sequence
  Oligonucleotide for detection of SNP TSC0014536
acactcgatttat

SEQ ID NO: 52325 - DNA, 13 bp, Artificial Sequence
  Oligonucleotide for detection of SNP TSC0014537
gttttgggagtty

SEQ ID NO: 52326 - DNA, 13 bp, Artificial Sequence
  Oligonucleotide for detection of SNP TSC0014537
raactcccaaaac

SEQ ID NO: 52327 - DNA, 13 bp, Artificial Sequence
  Oligonucleotide for detection of SNP TSC0014537
gttttgagagtty

SEQ ID NO: 52328 - DNA, 13 bp, Artificial Sequence
  Oligonucleotide for detection of SNP TSC0014537
raactctcaaaac

SEQ ID NO: 52329 - DNA, 13 bp, Artificial Sequence
  Oligonucleotide for detection of SNP TSC0014538
ttataatgtatty

SEQ ID NO: 52330 - DNA, 13 bp, Artificial Sequence
  Oligonucleotide for detection of SNP TSC0014538
raatacattataa

SEQ ID NO: 52331 - DNA, 13 bp, Artificial Sequence
  Oligonucleotide for detection of SNP TSC0014538
ttataacgtatty

SEQ ID NO: 52332 - DNA, 13 bp, Artificial Sequence
  Oligonucleotide for detection of SNP TSC0014538
raatacgttataa

SEQ ID NO: 52333 - DNA, 13 bp, Artificial Sequence
  Oligonucleotide for detection of SNP TSC0014538
gggtgtgttgtgg

SEQ ID NO: 52334 - DNA, 13 bp, Artificial Sequence
  Oligonucleotide for detection of SNP TSC0014538
ccacaacacaccc

SEQ ID NO: 52335 - DNA, 13 bp, Artificial Sequence
  Oligonucleotide for detection of SNP TSC0014538
gggtgtattgtgg

SEQ ID NO: 52336 - DNA, 13 bp, Artificial Sequence
  Oligonucleotide for detection of SNP TSC0014538
ccacaatacaccc

SEQ ID NO: 52337 - DNA, 13 bp, Artificial Sequence
  Oligonucleotide for detection of SNP TSC0014538
gggtgcgttgtgg

SEQ ID NO: 52338 - DNA, 13 bp, Artificial Sequence
  Oligonucleotide for detection of SNP TSC0014538
ccacaacgcaccc

SEQ ID NO: 52339 - DNA, 13 bp, Artificial Sequence
  Oligonucleotide for detection of SNP TSC0014539
aaataggggattt

SEQ ID NO: 52340 - DNA, 13 bp, Artificial Sequence
  Oligonucleotide for detection of SNP TSC0014539
aaatcccctattt

SEQ ID NO: 52341 - DNA, 13 bp, Artificial Sequence
  Oligonucleotide for detection of SNP TSC0014539
aaatagaggattt

SEQ ID NO: 52342 - DNA, 13 bp, Artificial Sequence
  Oligonucleotide for detection of SNP TSC0014539
aaatcctctattt

SEQ ID NO: 52343 - DNA, 13 bp, Artificial Sequence
  Oligonucleotide for detection of SNP TSC0014543
agtaggggggagt

SEQ ID NO: 52344 - DNA, 13 bp, Artificial Sequence
  Oligonucleotide for detection of SNP TSC0014543
actcccccctact

SEQ ID NO: 52345 - DNA, 13 bp, Artificial Sequence
  Oligonucleotide for detection of SNP TSC0014543
agtaggtgggagt

SEQ ID NO: 52346 - DNA, 13 bp, Artificial Sequence
  Oligonucleotide for detection of SNP TSC0014543
actcccacctact

SEQ ID NO: 52347 - DNA, 13 bp, Artificial Sequence
  Oligonucleotide for detection of SNP TSC0014543
atttttttttgtt

SEQ ID NO: 52348 - DNA, 13 bp, Artificial Sequence
  Oligonucleotide for detection of SNP TSC0014543
aacaaaaaaaaat

SEQ ID NO: 52349 - DNA, 13 bp, Artificial Sequence
  Oligonucleotide for detection of SNP TSC0014543
atttttatttgtt

SEQ ID NO: 52350 - DNA, 13 bp, Artificial Sequence
  Oligonucleotide for detection of SNP TSC0014543
aacaaataaaaat

SEQ ID NO: 52351 - DNA, 13 bp, Artificial Sequence
  Oligonucleotide for detection of SNP TSC0014544
agttgtatggaag

SEQ ID NO: 52352 - DNA, 13 bp, Artificial Sequence
  Oligonucleotide for detection of SNP TSC0014544
cttccatacaact

SEQ ID NO: 52353 - DNA, 13 bp, Artificial Sequence
  Oligonucleotide for detection of SNP TSC0014544
agttgtgtggaag

SEQ ID NO: 52354 - DNA, 13 bp, Artificial Sequence
  Oligonucleotide for detection of SNP TSC0014544
cttccacacaact

SEQ ID NO: 52355 - DNA, 13 bp, Artificial Sequence
  Oligonucleotide for detection of SNP TSC0014545
ttttatatttagy

SEQ ID NO: 52356 - DNA, 13 bp, Artificial Sequence
  Oligonucleotide for detection of SNP TSC0014545
rctaaatataaaa

SEQ ID NO: 52357 - DNA, 13 bp, Artificial Sequence
  Oligonucleotide for detection of SNP TSC0014545
ttttatgtttagy

SEQ ID NO: 52358 - DNA, 13 bp, Artificial Sequence
  Oligonucleotide for detection of SNP TSC0014545
rctaaacataaaa

SEQ ID NO: 52359 - DNA, 13 bp, Artificial Sequence
  Oligonucleotide for detection of SNP TSC0014545
ttttacgtttagy

SEQ ID NO: 52360 - DNA, 13 bp, Artificial Sequence
  Oligonucleotide for detection of SNP TSC0014545
rctaaacgtaaaa

SEQ ID NO: 52361 - DNA, 13 bp, Artificial Sequence
  Oligonucleotide for detection of SNP TSC0014545
gttagatgtggga

SEQ ID NO: 52362 - DNA, 13 bp, Artificial Sequence
  Oligonucleotide for detection of SNP TSC0014545
tcccacatctaac

SEQ ID NO: 52363 - DNA, 13 bp, Artificial Sequence
  Oligonucleotide for detection of SNP TSC0014545
gttagacgtggga

SEQ ID NO: 52364 - DNA, 13 bp, Artificial Sequence
  Oligonucleotide for detection of SNP TSC0014545
tcccacgtctaac

SEQ ID NO: 52365 - DNA, 13 bp, Artificial Sequence
  Oligonucleotide for detection of SNP TSC0014546
aaaaagagataat

SEQ ID NO: 52366 - DNA, 13 bp, Artificial Sequence
  Oligonucleotide for detection of SNP TSC0014546
attatctcttttt

SEQ ID NO: 52367 - DNA, 13 bp, Artificial Sequence
  Oligonucleotide for detection of SNP TSC0014546
aaaaagggataat

SEQ ID NO: 52368 - DNA, 13 bp, Artificial Sequence
  Oligonucleotide for detection of SNP TSC0014546
attatcccttttt

SEQ ID NO: 52369 - DNA, 13 bp, Artificial Sequence
  Oligonucleotide for detection of SNP TSC0014547
tttatagttagta

SEQ ID NO: 52370 - DNA, 13 bp, Artificial Sequence
  Oligonucleotide for detection of SNP TSC0014547
tactaactataaa

SEQ ID NO: 52371 - DNA, 13 bp, Artificial Sequence
  Oligonucleotide for detection of SNP TSC0014547
tttataattagta

SEQ ID NO: 52372 - DNA, 13 bp, Artificial Sequence
  Oligonucleotide for detection of SNP TSC0014547
tactaattataaa

SEQ ID NO: 52373 - DNA, 13 bp, Artificial Sequence
  Oligonucleotide for detection of SNP TSC0014548
tttagtattgtty

SEQ ID NO: 52374 - DNA, 13 bp, Artificial Sequence
  Oligonucleotide for detection of SNP TSC0014548
raacaatactaaa

SEQ ID NO: 52375 - DNA, 13 bp, Artificial Sequence
  Oligonucleotide for detection of SNP TSC0014548
tttagtgttgtty

SEQ ID NO: 52376 - DNA, 13 bp, Artificial Sequence
  Oligonucleotide for detection of SNP TSC0014548
raacaacactaaa

SEQ ID NO: 52377 - DNA, 13 bp, Artificial Sequence
  Oligonucleotide for detection of SNP TSC0014548
tttagcgttgtty

SEQ ID NO: 52378 - DNA, 13 bp, Artificial Sequence
  Oligonucleotide for detection of SNP TSC0014548
raacaacgctaaa

SEQ ID NO: 52379 - DNA, 13 bp, Artificial Sequence
  Oligonucleotide for detection of SNP TSC0014548
gaatagtgttggg

SEQ ID NO: 52380 - DNA, 13 bp, Artificial Sequence
  Oligonucleotide for detection of SNP TSC0014548
cccaacactattc

SEQ ID NO: 52381 - DNA, 13 bp, Artificial Sequence
  Oligonucleotide for detection of SNP TSC0014548
gaatagcgttggg

SEQ ID NO: 52382 - DNA, 13 bp, Artificial Sequence
  Oligonucleotide for detection of SNP TSC0014548
cccaacgctattc

SEQ ID NO: 52383 - DNA, 13 bp, Artificial Sequence
  Oligonucleotide for detection of SNP TSC0014549
tagttatggttty

SEQ ID NO: 52384 - DNA, 13 bp, Artificial Sequence
  Oligonucleotide for detection of SNP TSC0014549
raaaccataacta

SEQ ID NO: 52385 - DNA, 13 bp, Artificial Sequence
  Oligonucleotide for detection of SNP TSC0014549
tagttacggttty

SEQ ID NO: 52386 - DNA, 13 bp, Artificial Sequence
  Oligonucleotide for detection of SNP TSC0014549
raaaccgtaacta

SEQ ID NO: 52387 - DNA, 13 bp, Artificial Sequence
  Oligonucleotide for detection of SNP TSC0014549
ggggttgtgattg

SEQ ID NO: 52388 - DNA, 13 bp, Artificial Sequence
  Oligonucleotide for detection of SNP TSC0014549
caatcacaacccc

SEQ ID NO: 52389 - DNA, 13 bp, Artificial Sequence
  Oligonucleotide for detection of SNP TSC0014549
ggggttatgattg

SEQ ID NO: 52390 - DNA, 13 bp, Artificial Sequence
  Oligonucleotide for detection of SNP TSC0014549
caatcataacccc

SEQ ID NO: 52391 - DNA, 13 bp, Artificial Sequence
  Oligonucleotide for detection of SNP TSC0014549
ggggtcgtgattg

SEQ ID NO: 52392 - DNA, 13 bp, Artificial Sequence
  Oligonucleotide for detection of SNP TSC0014549
caatcacgacccc

SEQ ID NO: 52393 - DNA, 13 bp, Artificial Sequence
  Oligonucleotide for detection of SNP TSC0014550
ttttgtagtggtt

SEQ ID NO: 52394 - DNA, 13 bp, Artificial Sequence
  Oligonucleotide for detection of SNP TSC0014550
aaccactacaaaa

SEQ ID NO: 52395 - DNA, 13 bp, Artificial Sequence
  Oligonucleotide for detection of SNP TSC0014550
ttttgtggtggtt

SEQ ID NO: 52396 - DNA, 13 bp, Artificial Sequence
  Oligonucleotide for detection of SNP TSC0014550
aaccaccacaaaa

SEQ ID NO: 52397 - DNA, 13 bp, Artificial Sequence
  Oligonucleotide for detection of SNP TSC0014550
tttcgtagtggtt

SEQ ID NO: 52398 - DNA, 13 bp, Artificial Sequence
  Oligonucleotide for detection of SNP TSC0014550
aaccactacgaaa

SEQ ID NO: 52399 - DNA, 13 bp, Artificial Sequence
  Oligonucleotide for detection of SNP TSC0014550
tttcgtggtggtt

SEQ ID NO: 52400 - DNA, 13 bp, Artificial Sequence
  Oligonucleotide for detection of SNP TSC0014550
aaccaccacgaaa

SEQ ID NO: 52401 - DNA, 13 bp, Artificial Sequence
  Oligonucleotide for detection of SNP TSC0014553
gtttaggttatag

SEQ ID NO: 52402 - DNA, 13 bp, Artificial Sequence
  Oligonucleotide for detection of SNP TSC0014553
ctataacctaaac

SEQ ID NO: 52403 - DNA, 13 bp, Artificial Sequence
  Oligonucleotide for detection of SNP TSC0014553
gtttagattatag

SEQ ID NO: 52404 - DNA, 13 bp, Artificial Sequence
  Oligonucleotide for detection of SNP TSC0014553
ctataatctaaac

SEQ ID NO: 52405 - DNA, 13 bp, Artificial Sequence
  Oligonucleotide for detection of SNP TSC0014554
agaggaaagagty

SEQ ID NO: 52406 - DNA, 13 bp, Artificial Sequence
  Oligonucleotide for detection of SNP TSC0014554
ractctttcctct

SEQ ID NO: 52407 - DNA, 13 bp, Artificial Sequence
  Oligonucleotide for detection of SNP TSC0014554
agaggagagagty

SEQ ID NO: 52408 - DNA, 13 bp, Artificial Sequence
  Oligonucleotide for detection of SNP TSC0014554
ractctctcctct

SEQ ID NO: 52409 - DNA, 13 bp, Artificial Sequence
  Oligonucleotide for detection of SNP TSC0014555
agttatgtattay

SEQ ID NO: 52410 - DNA, 13 bp, Artificial Sequence
  Oligonucleotide for detection of SNP TSC0014555
rtaatacataact

SEQ ID NO: 52411 - DNA, 13 bp, Artificial Sequence
  Oligonucleotide for detection of SNP TSC0014555
agttatatattay

SEQ ID NO: 52412 - DNA, 13 bp, Artificial Sequence
  Oligonucleotide for detection of SNP TSC0014555
rtaatatataact

SEQ ID NO: 52413 - DNA, 13 bp, Artificial Sequence
  Oligonucleotide for detection of SNP TSC0014556
gagggagaaatat

SEQ ID NO: 52414 - DNA, 13 bp, Artificial Sequence
  Oligonucleotide for detection of SNP TSC0014556
atatttctccctc

SEQ ID NO: 52415 - DNA, 13 bp, Artificial Sequence
  Oligonucleotide for detection of SNP TSC0014556
gagggaaaaatat

SEQ ID NO: 52416 - DNA, 13 bp, Artificial Sequence
  Oligonucleotide for detection of SNP TSC0014556
atatttttccctc

SEQ ID NO: 52417 - DNA, 13 bp, Artificial Sequence
  Oligonucleotide for detection of SNP TSC0014557
ttagataattttt

SEQ ID NO: 52418 - DNA, 13 bp, Artificial Sequence
  Oligonucleotide for detection of SNP TSC0014557
aaaaattatctaa

SEQ ID NO: 52419 - DNA, 13 bp, Artificial Sequence
  Oligonucleotide for detection of SNP TSC0014557
ttagattattttt

SEQ ID NO: 52420 - DNA, 13 bp, Artificial Sequence
  Oligonucleotide for detection of SNP TSC0014557
aaaaataatctaa

SEQ ID NO: 52421 - DNA, 13 bp, Artificial Sequence
  Oligonucleotide for detection of SNP TSC0014557
aagaattatttaa

SEQ ID NO: 52422 - DNA, 13 bp, Artificial Sequence
  Oligonucleotide for detection of SNP TSC0014557
ttaaataattctt

SEQ ID NO: 52423 - DNA, 13 bp, Artificial Sequence
  Oligonucleotide for detection of SNP TSC0014557
aagaatgatttaa

SEQ ID NO: 52424 - DNA, 13 bp, Artificial Sequence
  Oligonucleotide for detection of SNP TSC0014557
ttaaatcattctt

SEQ ID NO: 52425 - DNA, 13 bp, Artificial Sequence
  Oligonucleotide for detection of SNP TSC0014559
tttttttgttgta

SEQ ID NO: 52426 - DNA, 13 bp, Artificial Sequence
  Oligonucleotide for detection of SNP TSC0014559
tacaacaaaaaaa

SEQ ID NO: 52427 - DNA, 13 bp, Artificial Sequence
  Oligonucleotide for detection of SNP TSC0014559
ttttttggttgta

SEQ ID NO: 52428 - DNA, 13 bp, Artificial Sequence
  Oligonucleotide for detection of SNP TSC0014559
tacaaccaaaaaa

SEQ ID NO: 52429 - DNA, 13 bp, Artificial Sequence
  Oligonucleotide for detection of SNP TSC0014559
ttttttcgttgta

SEQ ID NO: 52430 - DNA, 13 bp, Artificial Sequence
  Oligonucleotide for detection of SNP TSC0014559
tacaacgaaaaaa

SEQ ID NO: 52431 - DNA, 13 bp, Artificial Sequence
  Oligonucleotide for detection of SNP TSC0014559
tttttcggttgta

SEQ ID NO: 52432 - DNA, 13 bp, Artificial Sequence
  Oligonucleotide for detection of SNP TSC0014559
tacaaccgaaaaa

SEQ ID NO: 52433 - DNA, 13 bp, Artificial Sequence
  Oligonucleotide for detection of SNP TSC0014559
tgtagtggaagaa

SEQ ID NO: 52434 - DNA, 13 bp, Artificial Sequence
  Oligonucleotide for detection of SNP TSC0014559
ttcttccactaca

SEQ ID NO: 52435 - DNA, 13 bp, Artificial Sequence
  Oligonucleotide for detection of SNP TSC0014559
tgtagttgaagaa

SEQ ID NO: 52436 - DNA, 13 bp, Artificial Sequence
  Oligonucleotide for detection of SNP TSC0014559
ttcttcaactaca

SEQ ID NO: 52437 - DNA, 13 bp, Artificial Sequence
  Oligonucleotide for detection of SNP TSC0014559
tgtagcggaagaa

SEQ ID NO: 52438 - DNA, 13 bp, Artificial Sequence
  Oligonucleotide for detection of SNP TSC0014559
ttcttccgctaca

SEQ ID NO: 52439 - DNA, 13 bp, Artificial Sequence
  Oligonucleotide for detection of SNP TSC0014559
tgtagtcgaagaa

SEQ ID NO: 52440 - DNA, 13 bp, Artificial Sequence
  Oligonucleotide for detection of SNP TSC0014559
ttcttcgactaca

SEQ ID NO: 52441 - DNA, 13 bp, Artificial Sequence
  Oligonucleotide for detection of SNP TSC0014560
tttggagtattgy

SEQ ID NO: 52442 - DNA, 13 bp, Artificial Sequence
  Oligonucleotide for detection of SNP TSC0014560
rcaatactccaaa

SEQ ID NO: 52443 - DNA, 13 bp, Artificial Sequence
  Oligonucleotide for detection of SNP TSC0014560
tttggaatattgy

SEQ ID NO: 52444 - DNA, 13 bp, Artificial Sequence
  Oligonucleotide for detection of SNP TSC0014560
rcaatattccaaa

SEQ ID NO: 52445 - DNA, 13 bp, Artificial Sequence
  Oligonucleotide for detection of SNP TSC0014560
ttcggagtattgy

SEQ ID NO: 52446 - DNA, 13 bp, Artificial Sequence
  Oligonucleotide for detection of SNP TSC0014560
rcaatactccgaa

SEQ ID NO: 52447 - DNA, 13 bp, Artificial Sequence
  Oligonucleotide for detection of SNP TSC0014560
ttcggaatattgy

SEQ ID NO: 52448 - DNA, 13 bp, Artificial Sequence
  Oligonucleotide for detection of SNP TSC0014560
rcaatattccgaa

SEQ ID NO: 52449 - DNA, 13 bp, Artificial Sequence
  Oligonucleotide for detection of SNP TSC0014561
ttttttggtggaa

SEQ ID NO: 52450 - DNA, 13 bp, Artificial Sequence
  Oligonucleotide for detection of SNP TSC0014561
ttccaccaaaaaa

SEQ ID NO: 52451 - DNA, 13 bp, Artificial Sequence
  Oligonucleotide for detection of SNP TSC0014561
tttttttgtggaa

SEQ ID NO: 52452 - DNA, 13 bp, Artificial Sequence
  Oligonucleotide for detection of SNP TSC0014561
ttccacaaaaaaa

SEQ ID NO: 52453 - DNA, 13 bp, Artificial Sequence
  Oligonucleotide for detection of SNP TSC0014561
tttttcggtggaa

SEQ ID NO: 52454 - DNA, 13 bp, Artificial Sequence
  Oligonucleotide for detection of SNP TSC0014561
ttccaccgaaaaa

SEQ ID NO: 52455 - DNA, 13 bp, Artificial Sequence
  Oligonucleotide for detection of SNP TSC0014561
ttttattggaaaa

SEQ ID NO: 52456 - DNA, 13 bp, Artificial Sequence
  Oligonucleotide for detection of SNP TSC0014561
ttttccaataaaa

SEQ ID NO: 52457 - DNA, 13 bp, Artificial Sequence
  Oligonucleotide for detection of SNP TSC0014561
ttttataggaaaa

SEQ ID NO: 52458 - DNA, 13 bp, Artificial Sequence
  Oligonucleotide for detection of SNP TSC0014561
ttttcctataaaa

SEQ ID NO: 52459 - DNA, 13 bp, Artificial Sequence
  Oligonucleotide for detection of SNP TSC0014561
ttttatcggaaaa

SEQ ID NO: 52460 - DNA, 13 bp, Artificial Sequence
  Oligonucleotide for detection of SNP TSC0014561
ttttccgataaaa

SEQ ID NO: 52461 - DNA, 13 bp, Artificial Sequence
  Oligonucleotide for detection of SNP TSC0014564
ttatgttgattta

SEQ ID NO: 52462 - DNA, 13 bp, Artificial Sequence
  Oligonucleotide for detection of SNP TSC0014564
taaatcaacataa

SEQ ID NO: 52463 - DNA, 13 bp, Artificial Sequence
  Oligonucleotide for detection of SNP TSC0014564
ttatgtcgattta

SEQ ID NO: 52464 - DNA, 13 bp, Artificial Sequence
  Oligonucleotide for detection of SNP TSC0014564
taaatcgacataa

SEQ ID NO: 52465 - DNA, 13 bp, Artificial Sequence
  Oligonucleotide for detection of SNP TSC0014564
tggattgatatgg

SEQ ID NO: 52466 - DNA, 13 bp, Artificial Sequence
  Oligonucleotide for detection of SNP TSC0014564
ccatatcaatcca

SEQ ID NO: 52467 - DNA, 13 bp, Artificial Sequence
  Oligonucleotide for detection of SNP TSC0014564
tggattaatatgg

SEQ ID NO: 52468 - DNA, 13 bp, Artificial Sequence
  Oligonucleotide for detection of SNP TSC0014564
ccatattaatcca

SEQ ID NO: 52469 - DNA, 13 bp, Artificial Sequence
  Oligonucleotide for detection of SNP TSC0014564
tggatcgatatgg

SEQ ID NO: 52470 - DNA, 13 bp, Artificial Sequence
  Oligonucleotide for detection of SNP TSC0014564
ccatatcgatcca

SEQ ID NO: 52471 - DNA, 13 bp, Artificial Sequence
  Oligonucleotide for detection of SNP TSC0014565
gaatatgtataga

SEQ ID NO: 52472 - DNA, 13 bp, Artificial Sequence
  Oligonucleotide for detection of SNP TSC0014565
tctatacatattc

SEQ ID NO: 52473 - DNA, 13 bp, Artificial Sequence
  Oligonucleotide for detection of SNP TSC0014565
gaatatatataga

SEQ ID NO: 52474 - DNA, 13 bp, Artificial Sequence
  Oligonucleotide for detection of SNP TSC0014565
tctatatatattc

SEQ ID NO: 52475 - DNA, 13 bp, Artificial Sequence
  Oligonucleotide for detection of SNP TSC0014566
tttgggatatttt

SEQ ID NO: 52476 - DNA, 13 bp, Artificial Sequence
  Oligonucleotide for detection of SNP TSC0014566
aaaatatcccaaa

SEQ ID NO: 52477 - DNA, 13 bp, Artificial Sequence
  Oligonucleotide for detection of SNP TSC0014566
tttgggttatttt

SEQ ID NO: 52478 - DNA, 13 bp, Artificial Sequence
  Oligonucleotide for detection of SNP TSC0014566
aaaataacccaaa

SEQ ID NO: 52479 - DNA, 13 bp, Artificial Sequence
  Oligonucleotide for detection of SNP TSC0014566
aaggtattttagg

SEQ ID NO: 52480 - DNA, 13 bp, Artificial Sequence
  Oligonucleotide for detection of SNP TSC0014566
cctaaaatacctt

SEQ ID NO: 52481 - DNA, 13 bp, Artificial Sequence
  Oligonucleotide for detection of SNP TSC0014566
aaggtagtttagg

SEQ ID NO: 52482 - DNA, 13 bp, Artificial Sequence
  Oligonucleotide for detection of SNP TSC0014566
cctaaactacctt

SEQ ID NO: 52483 - DNA, 13 bp, Artificial Sequence
  Oligonucleotide for detection of SNP TSC0014569
aattgtagatatt

SEQ ID NO: 52484 - DNA, 13 bp, Artificial Sequence
  Oligonucleotide for detection of SNP TSC0014569
aatatctacaatt

SEQ ID NO: 52485 - DNA, 13 bp, Artificial Sequence
  Oligonucleotide for detection of SNP TSC0014569
aattgttgatatt

SEQ ID NO: 52486 - DNA, 13 bp, Artificial Sequence
  Oligonucleotide for detection of SNP TSC0014569
aatatcaacaatt

SEQ ID NO: 52487 - DNA, 13 bp, Artificial Sequence
  Oligonucleotide for detection of SNP TSC0014569
aatgtttgtaatt

SEQ ID NO: 52488 - DNA, 13 bp, Artificial Sequence
  Oligonucleotide for detection of SNP TSC0014569
aattacaaacatt

SEQ ID NO: 52489 - DNA, 13 bp, Artificial Sequence
  Oligonucleotide for detection of SNP TSC0014569
aatgttagtaatt

SEQ ID NO: 52490 - DNA, 13 bp, Artificial Sequence
  Oligonucleotide for detection of SNP TSC0014569
aattactaacatt

SEQ ID NO: 52491 - DNA, 13 bp, Artificial Sequence
  Oligonucleotide for detection of SNP TSC0014570
taggttgtgttgy

SEQ ID NO: 52492 - DNA, 13 bp, Artificial Sequence
  Oligonucleotide for detection of SNP TSC0014570
rcaacacaaccta

SEQ ID NO: 52493 - DNA, 13 bp, Artificial Sequence
  Oligonucleotide for detection of SNP TSC0014570
taggttttgttgy

SEQ ID NO: 52494 - DNA, 13 bp, Artificial Sequence
  Oligonucleotide for detection of SNP TSC0014570
rcaacaaaaccta

SEQ ID NO: 52495 - DNA, 13 bp, Artificial Sequence
  Oligonucleotide for detection of SNP TSC0014570
taggttgtgtcgy

SEQ ID NO: 52496 - DNA, 13 bp, Artificial Sequence
  Oligonucleotide for detection of SNP TSC0014570
rcgacacaaccta

SEQ ID NO: 52497 - DNA, 13 bp, Artificial Sequence
  Oligonucleotide for detection of SNP TSC0014570
taggttttgtcgy

SEQ ID NO: 52498 - DNA, 13 bp, Artificial Sequence
  Oligonucleotide for detection of SNP TSC0014570
rcgacaaaaccta

SEQ ID NO: 52499 - DNA, 13 bp, Artificial Sequence
  Oligonucleotide for detection of SNP TSC0014570
gtgatataatttg

SEQ ID NO: 52500 - DNA, 13 bp, Artificial Sequence
  Oligonucleotide for detection of SNP TSC0014570
caaattatatcac

SEQ ID NO: 52501 - DNA, 13 bp, Artificial Sequence
  Oligonucleotide for detection of SNP TSC0014570
gtgataaaatttg

SEQ ID NO: 52502 - DNA, 13 bp, Artificial Sequence
  Oligonucleotide for detection of SNP TSC0014570
caaattttatcac

SEQ ID NO: 52503 - DNA, 13 bp, Artificial Sequence
  Oligonucleotide for detection of SNP TSC0014570
gcgatataatttg

SEQ ID NO: 52504 - DNA, 13 bp, Artificial Sequence
  Oligonucleotide for detection of SNP TSC0014570
caaattatatcgc

SEQ ID NO: 52505 - DNA, 13 bp, Artificial Sequence
  Oligonucleotide for detection of SNP TSC0014570
gcgataaaatttg

SEQ ID NO: 52506 - DNA, 13 bp, Artificial Sequence
  Oligonucleotide for detection of SNP TSC0014570
caaattttatcgc

SEQ ID NO: 52507 - DNA, 13 bp, Artificial Sequence
  Oligonucleotide for detection of SNP TSC0014571
ttttatatgattt

SEQ ID NO: 52508 - DNA, 13 bp, Artificial Sequence
  Oligonucleotide for detection of SNP TSC0014571
aaatcatataaaa

SEQ ID NO: 52509 - DNA, 13 bp, Artificial Sequence
  Oligonucleotide for detection of SNP TSC0014571
ttttatttgattt

SEQ ID NO: 52510 - DNA, 13 bp, Artificial Sequence
  Oligonucleotide for detection of SNP TSC0014571
aaatcaaataaaa

SEQ ID NO: 52511 - DNA, 13 bp, Artificial Sequence
  Oligonucleotide for detection of SNP TSC0014571
aaattatgtagaa

SEQ ID NO: 52512 - DNA, 13 bp, Artificial Sequence
  Oligonucleotide for detection of SNP TSC0014571
ttctacataattt

SEQ ID NO: 52513 - DNA, 13 bp, Artificial Sequence
  Oligonucleotide for detection of SNP TSC0014571
aaattaggtagaa

SEQ ID NO: 52514 - DNA, 13 bp, Artificial Sequence
  Oligonucleotide for detection of SNP TSC0014571
ttctacctaattt

SEQ ID NO: 52515 - DNA, 13 bp, Artificial Sequence
  Oligonucleotide for detection of SNP TSC0014572
tagttaatttagy

SEQ ID NO: 52516 - DNA, 13 bp, Artificial Sequence
  Oligonucleotide for detection of SNP TSC0014572
rctaaattaacta

SEQ ID NO: 52517 - DNA, 13 bp, Artificial Sequence
  Oligonucleotide for detection of SNP TSC0014572
tagttattttagy

SEQ ID NO: 52518 - DNA, 13 bp, Artificial Sequence
  Oligonucleotide for detection of SNP TSC0014572
rctaaaataacta

SEQ ID NO: 52519 - DNA, 13 bp, Artificial Sequence
  Oligonucleotide for detection of SNP TSC0014572
gttgagttaattg

SEQ ID NO: 52520 - DNA, 13 bp, Artificial Sequence
  Oligonucleotide for detection of SNP TSC0014572
caattaactcaac

SEQ ID NO: 52521 - DNA, 13 bp, Artificial Sequence
  Oligonucleotide for detection of SNP TSC0014572
gttgaggtaattg

SEQ ID NO: 52522 - DNA, 13 bp, Artificial Sequence
  Oligonucleotide for detection of SNP TSC0014572
caattacctcaac

SEQ ID NO: 52523 - DNA, 13 bp, Artificial Sequence
  Oligonucleotide for detection of SNP TSC0014574
gtttagaattata

SEQ ID NO: 52524 - DNA, 13 bp, Artificial Sequence
  Oligonucleotide for detection of SNP TSC0014574
tataattctaaac

SEQ ID NO: 52525 - DNA, 13 bp, Artificial Sequence
  Oligonucleotide for detection of SNP TSC0014574
gtttaggattata

SEQ ID NO: 52526 - DNA, 13 bp, Artificial Sequence
  Oligonucleotide for detection of SNP TSC0014574
tataatcctaaac

SEQ ID NO: 52527 - DNA, 13 bp, Artificial Sequence
  Oligonucleotide for detection of SNP TSC0014576
tagggtatttttt

SEQ ID NO: 52528 - DNA, 13 bp, Artificial Sequence
  Oligonucleotide for detection of SNP TSC0014576
aaaaaatacccta

SEQ ID NO: 52529 - DNA, 13 bp, Artificial Sequence
  Oligonucleotide for detection of SNP TSC0014576
tagggtgtttttt

SEQ ID NO: 52530 - DNA, 13 bp, Artificial Sequence
  Oligonucleotide for detection of SNP TSC0014576
aaaaaacacccta

SEQ ID NO: 52531 - DNA, 13 bp, Artificial Sequence
  Oligonucleotide for detection of SNP TSC0014577
ttttttgttattt

SEQ ID NO: 52532 - DNA, 13 bp, Artificial Sequence
  Oligonucleotide for detection of SNP TSC0014577
aaataacaaaaaa

SEQ ID NO: 52533 - DNA, 13 bp, Artificial Sequence
  Oligonucleotide for detection of SNP TSC0014579
ttggagatgtttg

SEQ ID NO: 52534 - DNA, 13 bp, Artificial Sequence
  Oligonucleotide for detection of SNP TSC0014579
caaacatctccaa

SEQ ID NO: 52535 - DNA, 13 bp, Artificial Sequence
  Oligonucleotide for detection of SNP TSC0014579
ttggaggtgtttg

SEQ ID NO: 52536 - DNA, 13 bp, Artificial Sequence
  Oligonucleotide for detection of SNP TSC0014579
caaacacctccaa

SEQ ID NO: 52537 - DNA, 13 bp, Artificial Sequence
  Oligonucleotide for detection of SNP TSC0014581
atttaggtgggaa

SEQ ID NO: 52538 - DNA, 13 bp, Artificial Sequence
  Oligonucleotide for detection of SNP TSC0014581
ttcccacctaaat

SEQ ID NO: 52539 - DNA, 13 bp, Artificial Sequence
  Oligonucleotide for detection of SNP TSC0014581
atttagttgggaa

SEQ ID NO: 52540 - DNA, 13 bp, Artificial Sequence
  Oligonucleotide for detection of SNP TSC0014581
ttcccaactaaat

SEQ ID NO: 52541 - DNA, 13 bp, Artificial Sequence
  Oligonucleotide for detection of SNP TSC0014581
tttttatttaagt

SEQ ID NO: 52542 - DNA, 13 bp, Artificial Sequence
  Oligonucleotide for detection of SNP TSC0014581
acttaaataaaaa

SEQ ID NO: 52543 - DNA, 13 bp, Artificial Sequence
  Oligonucleotide for detection of SNP TSC0014581
tttttaattaagt

SEQ ID NO: 52544 - DNA, 13 bp, Artificial Sequence
  Oligonucleotide for detection of SNP TSC0014581
acttaattaaaaa

SEQ ID NO: 52545 - DNA, 13 bp, Artificial Sequence
  Oligonucleotide for detection of SNP TSC0014582
gcgtatatatata

SEQ ID NO: 52546 - DNA, 13 bp, Artificial Sequence
  Oligonucleotide for detection of SNP TSC0014582
tatatatatacgc

SEQ ID NO: 52547 - DNA, 13 bp, Artificial Sequence
  Oligonucleotide for detection of SNP TSC0014582
gcgtatgtatata

SEQ ID NO: 52548 - DNA, 13 bp, Artificial Sequence
  Oligonucleotide for detection of SNP TSC0014582
tatatacatacgc

SEQ ID NO: 52549 - DNA, 13 bp, Artificial Sequence
  Oligonucleotide for detection of SNP TSC0014582
gtgtacgtatata

SEQ ID NO: 52550 - DNA, 13 bp, Artificial Sequence
  Oligonucleotide for detection of SNP TSC0014582
tatatacgtacac

SEQ ID NO: 52551 - DNA, 13 bp, Artificial Sequence
  Oligonucleotide for detection of SNP TSC0014582
gcgtacgtatata

SEQ ID NO: 52552 - DNA, 13 bp, Artificial Sequence
  Oligonucleotide for detection of SNP TSC0014582
tatatacgtacgc

SEQ ID NO: 52553 - DNA, 13 bp, Artificial Sequence
  Oligonucleotide for detection of SNP TSC0014583
gggggggtgtgty

SEQ ID NO: 52554 - DNA, 13 bp, Artificial Sequence
  Oligonucleotide for detection of SNP TSC0014583
racacaccccccc

SEQ ID NO: 52555 - DNA, 13 bp, Artificial Sequence
  Oligonucleotide for detection of SNP TSC0014583
ggggggatgtgty

SEQ ID NO: 52556 - DNA, 13 bp, Artificial Sequence
  Oligonucleotide for detection of SNP TSC0014583
racacatcccccc

SEQ ID NO: 52557 - DNA, 13 bp, Artificial Sequence
  Oligonucleotide for detection of SNP TSC0014583
gggggggtgcgty

SEQ ID NO: 52558 - DNA, 13 bp, Artificial Sequence
  Oligonucleotide for detection of SNP TSC0014583
racgcaccccccc

SEQ ID NO: 52559 - DNA, 13 bp, Artificial Sequence
  Oligonucleotide for detection of SNP TSC0014583
ggggggatgcgty

SEQ ID NO: 52560 - DNA, 13 bp, Artificial Sequence
  Oligonucleotide for detection of SNP TSC0014583
racgcatcccccc

SEQ ID NO: 52561 - DNA, 13 bp, Artificial Sequence
  Oligonucleotide for detection of SNP TSC0014584
aattgttgggatg

SEQ ID NO: 52562 - DNA, 13 bp, Artificial Sequence
  Oligonucleotide for detection of SNP TSC0014584
catcccaacaatt

SEQ ID NO: 52563 - DNA, 13 bp, Artificial Sequence
  Oligonucleotide for detection of SNP TSC0014584
aatcgttgggatg

SEQ ID NO: 52564 - DNA, 13 bp, Artificial Sequence
  Oligonucleotide for detection of SNP TSC0014584
catcccaacgatt

SEQ ID NO: 52565 - DNA, 13 bp, Artificial Sequence
  Oligonucleotide for detection of SNP TSC0014584
aattgtcgggatg

SEQ ID NO: 52566 - DNA, 13 bp, Artificial Sequence
  Oligonucleotide for detection of SNP TSC0014584
catcccgacaatt

SEQ ID NO: 52567 - DNA, 13 bp, Artificial Sequence
  Oligonucleotide for detection of SNP TSC0014584
aattgttgggacg

SEQ ID NO: 52568 - DNA, 13 bp, Artificial Sequence
  Oligonucleotide for detection of SNP TSC0014584
cgtcccaacaatt

SEQ ID NO: 52569 - DNA, 13 bp, Artificial Sequence
  Oligonucleotide for detection of SNP TSC0014584
aatcgttgggacg

SEQ ID NO: 52570 - DNA, 13 bp, Artificial Sequence
  Oligonucleotide for detection of SNP TSC0014584
cgtcccaacgatt

SEQ ID NO: 52571 - DNA, 13 bp, Artificial Sequence
  Oligonucleotide for detection of SNP TSC0014584
aatcgtcgggatg

SEQ ID NO: 52572 - DNA, 13 bp, Artificial Sequence
  Oligonucleotide for detection of SNP TSC0014584
catcccgacgatt

SEQ ID NO: 52573 - DNA, 13 bp, Artificial Sequence
  Oligonucleotide for detection of SNP TSC0014584
aattgtcgggacg

SEQ ID NO: 52574 - DNA, 13 bp, Artificial Sequence
  Oligonucleotide for detection of SNP TSC0014584
cgtcccgacaatt

SEQ ID NO: 52575 - DNA, 13 bp, Artificial Sequence
  Oligonucleotide for detection of SNP TSC0014584
aatcgtcgggacg

SEQ ID NO: 52576 - DNA, 13 bp, Artificial Sequence
  Oligonucleotide for detection of SNP TSC0014584
cgtcccgacgatt

SEQ ID NO: 52577 - DNA, 13 bp, Artificial Sequence
  Oligonucleotide for detection of SNP TSC0014584
tgttttggtggtt

SEQ ID NO: 52578 - DNA, 13 bp, Artificial Sequence
  Oligonucleotide for detection of SNP TSC0014584
aaccaccaaaaca

SEQ ID NO: 52579 - DNA, 13 bp, Artificial Sequence
  Oligonucleotide for detection of SNP TSC0014584
tgttttagtggtt

SEQ ID NO: 52580 - DNA, 13 bp, Artificial Sequence
  Oligonucleotide for detection of SNP TSC0014584
aaccactaaaaca

SEQ ID NO: 52581 - DNA, 13 bp, Artificial Sequence
  Oligonucleotide for detection of SNP TSC0014584
cgttttggtggtt

SEQ ID NO: 52582 - DNA, 13 bp, Artificial Sequence
  Oligonucleotide for detection of SNP TSC0014584
aaccaccaaaacg

SEQ ID NO: 52583 - DNA, 13 bp, Artificial Sequence
  Oligonucleotide for detection of SNP TSC0014584
cgttttagtggtt

SEQ ID NO: 52584 - DNA, 13 bp, Artificial Sequence
  Oligonucleotide for detection of SNP TSC0014584
aaccactaaaacg

SEQ ID NO: 52585 - DNA, 13 bp, Artificial Sequence
  Oligonucleotide for detection of SNP TSC0014584
tgtttcggtggtt

SEQ ID NO: 52586 - DNA, 13 bp, Artificial Sequence
  Oligonucleotide for detection of SNP TSC0014584
aaccaccgaaaca

SEQ ID NO: 52587 - DNA, 13 bp, Artificial Sequence
  Oligonucleotide for detection of SNP TSC0014584
tgttttagcggtt

SEQ ID NO: 52588 - DNA, 13 bp, Artificial Sequence
  Oligonucleotide for detection of SNP TSC0014584
aaccgctaaaaca

SEQ ID NO: 52589 - DNA, 13 bp, Artificial Sequence
  Oligonucleotide for detection of SNP TSC0014584
tgttttggcggtt

SEQ ID NO: 52590 - DNA, 13 bp, Artificial Sequence
  Oligonucleotide for detection of SNP TSC0014584
aaccgccaaaaca

SEQ ID NO: 52591 - DNA, 13 bp, Artificial Sequence
  Oligonucleotide for detection of SNP TSC0014584
cgttttagcggtt

SEQ ID NO: 52592 - DNA, 13 bp, Artificial Sequence
  Oligonucleotide for detection of SNP TSC0014584
aaccgctaaaacg

SEQ ID NO: 52593 - DNA, 13 bp, Artificial Sequence
  Oligonucleotide for detection of SNP TSC0014584
cgtttcggtggtt

SEQ ID NO: 52594 - DNA, 13 bp, Artificial Sequence
  Oligonucleotide for detection of SNP TSC0014584
aaccaccgaaacg

SEQ ID NO: 52595 - DNA, 13 bp, Artificial Sequence
  Oligonucleotide for detection of SNP TSC0014584
cgttttggcggtt

SEQ ID NO: 52596 - DNA, 13 bp, Artificial Sequence
  Oligonucleotide for detection of SNP TSC0014584
aaccgccaaaacg

SEQ ID NO: 52597 - DNA, 13 bp, Artificial Sequence
  Oligonucleotide for detection of SNP TSC0014584
tgtttcggcggtt

SEQ ID NO: 52598 - DNA, 13 bp, Artificial Sequence
  Oligonucleotide for detection of SNP TSC0014584
aaccgccgaaaca

SEQ ID NO: 52599 - DNA, 13 bp, Artificial Sequence
  Oligonucleotide for detection of SNP TSC0014584
cgtttcggcggtt

SEQ ID NO: 52600 - DNA, 13 bp, Artificial Sequence
  Oligonucleotide for detection of SNP TSC0014584
aaccgccgaaacg

SEQ ID NO: 52601 - DNA, 13 bp, Artificial Sequence
  Oligonucleotide for detection of SNP TSC0014585
gggagatgttgay

SEQ ID NO: 52602 - DNA, 13 bp, Artificial Sequence
  Oligonucleotide for detection of SNP TSC0014585
rtcaacatctccc

SEQ ID NO: 52603 - DNA, 13 bp, Artificial Sequence
  Oligonucleotide for detection of SNP TSC0014585
gggagaggttgay

SEQ ID NO: 52604 - DNA, 13 bp, Artificial Sequence
  Oligonucleotide for detection of SNP TSC0014585
rtcaacctctccc

SEQ ID NO: 52605 - DNA, 13 bp, Artificial Sequence
  Oligonucleotide for detection of SNP TSC0014585
gggagacgttgay

SEQ ID NO: 52606 - DNA, 13 bp, Artificial Sequence
  Oligonucleotide for detection of SNP TSC0014585
rtcaacgtctccc

SEQ ID NO: 52607 - DNA, 13 bp, Artificial Sequence
  Oligonucleotide for detection of SNP TSC0014585
gttagttttttty

SEQ ID NO: 52608 - DNA, 13 bp, Artificial Sequence
  Oligonucleotide for detection of SNP TSC0014585
raaaaaaactaac

SEQ ID NO: 52609 - DNA, 13 bp, Artificial Sequence
  Oligonucleotide for detection of SNP TSC0014586
agagagagataga

SEQ ID NO: 52610 - DNA, 13 bp, Artificial Sequence
  Oligonucleotide for detection of SNP TSC0014586
tctatctctctct

SEQ ID NO: 52611 - DNA, 13 bp, Artificial Sequence
  Oligonucleotide for detection of SNP TSC0014586
agagagggataga

SEQ ID NO: 52612 - DNA, 13 bp, Artificial Sequence
  Oligonucleotide for detection of SNP TSC0014586
tctatccctctct

SEQ ID NO: 52613 - DNA, 13 bp, Artificial Sequence
  Oligonucleotide for detection of SNP TSC0014587
gagagatagagag

SEQ ID NO: 52614 - DNA, 13 bp, Artificial Sequence
  Oligonucleotide for detection of SNP TSC0014587
ctctctatctctc

SEQ ID NO: 52615 - DNA, 13 bp, Artificial Sequence
  Oligonucleotide for detection of SNP TSC0014588
tgagtagttggga

SEQ ID NO: 52616 - DNA, 13 bp, Artificial Sequence
  Oligonucleotide for detection of SNP TSC0014588
tcccaactactca

SEQ ID NO: 52617 - DNA, 13 bp, Artificial Sequence
  Oligonucleotide for detection of SNP TSC0014588
tgagtatttggga

SEQ ID NO: 52618 - DNA, 13 bp, Artificial Sequence
  Oligonucleotide for detection of SNP TSC0014588
tcccaaatactca

SEQ ID NO: 52619 - DNA, 13 bp, Artificial Sequence
  Oligonucleotide for detection of SNP TSC0014589
gaatgtatagtat

SEQ ID NO: 52620 - DNA, 13 bp, Artificial Sequence
  Oligonucleotide for detection of SNP TSC0014589
atactatacattc

SEQ ID NO: 52621 - DNA, 13 bp, Artificial Sequence
  Oligonucleotide for detection of SNP TSC0014589
gaatgtgtagtat

SEQ ID NO: 52622 - DNA, 13 bp, Artificial Sequence
  Oligonucleotide for detection of SNP TSC0014589
atactacacattc

SEQ ID NO: 52623 - DNA, 13 bp, Artificial Sequence
  Oligonucleotide for detection of SNP TSC0014589
gaatgcgtagtat

SEQ ID NO: 52624 - DNA, 13 bp, Artificial Sequence
  Oligonucleotide for detection of SNP TSC0014589
atactacgcattc

SEQ ID NO: 52625 - DNA, 13 bp, Artificial Sequence
  Oligonucleotide for detection of SNP TSC0014589
atattatgtatty

SEQ ID NO: 52626 - DNA, 13 bp, Artificial Sequence
  Oligonucleotide for detection of SNP TSC0014589
raatacataatat

SEQ ID NO: 52627 - DNA, 13 bp, Artificial Sequence
  Oligonucleotide for detection of SNP TSC0014589
atattacgtatty

SEQ ID NO: 52628 - DNA, 13 bp, Artificial Sequence
  Oligonucleotide for detection of SNP TSC0014589
raatacgtaatat

SEQ ID NO: 52629 - DNA, 13 bp, Artificial Sequence
  Oligonucleotide for detection of SNP TSC0014590
agaaagataataa

SEQ ID NO: 52630 - DNA, 13 bp, Artificial Sequence
  Oligonucleotide for detection of SNP TSC0014590
ttattatctttct

SEQ ID NO: 52631 - DNA, 13 bp, Artificial Sequence
  Oligonucleotide for detection of SNP TSC0014590
agaaagttaataa

SEQ ID NO: 52632 - DNA, 13 bp, Artificial Sequence
  Oligonucleotide for detection of SNP TSC0014590
ttattaactttct

SEQ ID NO: 52633 - DNA, 13 bp, Artificial Sequence
  Oligonucleotide for detection of SNP TSC0014590
ttattgttttttt

SEQ ID NO: 52634 - DNA, 13 bp, Artificial Sequence
  Oligonucleotide for detection of SNP TSC0014590
aaaaaaacaataa

SEQ ID NO: 52635 - DNA, 13 bp, Artificial Sequence
  Oligonucleotide for detection of SNP TSC0014590
ttattggtttttt

SEQ ID NO: 52636 - DNA, 13 bp, Artificial Sequence
  Oligonucleotide for detection of SNP TSC0014590
aaaaaaccaataa

SEQ ID NO: 52637 - DNA, 13 bp, Artificial Sequence
  Oligonucleotide for detection of SNP TSC0014591
tttagtttaggtg

SEQ ID NO: 52638 - DNA, 13 bp, Artificial Sequence
  Oligonucleotide for detection of SNP TSC0014591
cacctaaactaaa

SEQ ID NO: 52639 - DNA, 13 bp, Artificial Sequence
  Oligonucleotide for detection of SNP TSC0014591
tttagtgtaggtg

SEQ ID NO: 52640 - DNA, 13 bp, Artificial Sequence
  Oligonucleotide for detection of SNP TSC0014591
cacctacactaaa

SEQ ID NO: 52641 - DNA, 13 bp, Artificial Sequence
  Oligonucleotide for detection of SNP TSC0014591
tatttggattaga

SEQ ID NO: 52642 - DNA, 13 bp, Artificial Sequence
  Oligonucleotide for detection of SNP TSC0014591
tctaatccaaata

SEQ ID NO: 52643 - DNA, 13 bp, Artificial Sequence
  Oligonucleotide for detection of SNP TSC0014591
tatttgtattaga

SEQ ID NO: 52644 - DNA, 13 bp, Artificial Sequence
  Oligonucleotide for detection of SNP TSC0014591
tctaatacaaata

SEQ ID NO: 52645 - DNA, 13 bp, Artificial Sequence
  Oligonucleotide for detection of SNP TSC0014592
attattgttttta

SEQ ID NO: 52646 - DNA, 13 bp, Artificial Sequence
  Oligonucleotide for detection of SNP TSC0014592
taaaaacaataat

SEQ ID NO: 52647 - DNA, 13 bp, Artificial Sequence
  Oligonucleotide for detection of SNP TSC0014592
attatttttttta

SEQ ID NO: 52648 - DNA, 13 bp, Artificial Sequence
  Oligonucleotide for detection of SNP TSC0014592
taaaaaaaataat

SEQ ID NO: 52649 - DNA, 13 bp, Artificial Sequence
  Oligonucleotide for detection of SNP TSC0014592
attatcgttttta

SEQ ID NO: 52650 - DNA, 13 bp, Artificial Sequence
  Oligonucleotide for detection of SNP TSC0014592
taaaaacgataat

SEQ ID NO: 52651 - DNA, 13 bp, Artificial Sequence
  Oligonucleotide for detection of SNP TSC0014592
taaaaatgatgat

SEQ ID NO: 52652 - DNA, 13 bp, Artificial Sequence
  Oligonucleotide for detection of SNP TSC0014592
atcatcattttta

SEQ ID NO: 52653 - DNA, 13 bp, Artificial Sequence
  Oligonucleotide for detection of SNP TSC0014592
taaaaaagatgat

SEQ ID NO: 52654 - DNA, 13 bp, Artificial Sequence
  Oligonucleotide for detection of SNP TSC0014592
atcatctttttta

SEQ ID NO: 52655 - DNA, 13 bp, Artificial Sequence
  Oligonucleotide for detection of SNP TSC0014592
taaaaacgatgat

SEQ ID NO: 52656 - DNA, 13 bp, Artificial Sequence
  Oligonucleotide for detection of SNP TSC0014592
atcatcgttttta

SEQ ID NO: 52657 - DNA, 13 bp, Artificial Sequence
  Oligonucleotide for detection of SNP TSC0014593
tttattgtttggg

SEQ ID NO: 52658 - DNA, 13 bp, Artificial Sequence
  Oligonucleotide for detection of SNP TSC0014593
cccaaacaataaa

SEQ ID NO: 52659 - DNA, 13 bp, Artificial Sequence
  Oligonucleotide for detection of SNP TSC0014593
tttattttttggg

SEQ ID NO: 52660 - DNA, 13 bp, Artificial Sequence
  Oligonucleotide for detection of SNP TSC0014593
cccaaaaaataaa

SEQ ID NO: 52661 - DNA, 13 bp, Artificial Sequence
  Oligonucleotide for detection of SNP TSC0014593
tttatcgtttggg

SEQ ID NO: 52662 - DNA, 13 bp, Artificial Sequence
  Oligonucleotide for detection of SNP TSC0014593
cccaaacgataaa

SEQ ID NO: 52663 - DNA, 13 bp, Artificial Sequence
  Oligonucleotide for detection of SNP TSC0014593
tttaggtggtgga

SEQ ID NO: 52664 - DNA, 13 bp, Artificial Sequence
  Oligonucleotide for detection of SNP TSC0014593
tccaccacctaaa

SEQ ID NO: 52665 - DNA, 13 bp, Artificial Sequence
  Oligonucleotide for detection of SNP TSC0014593
tttaggaggtgga

SEQ ID NO: 52666 - DNA, 13 bp, Artificial Sequence
  Oligonucleotide for detection of SNP TSC0014593
tccacctcctaaa

SEQ ID NO: 52667 - DNA, 13 bp, Artificial Sequence
  Oligonucleotide for detection of SNP TSC0014593
tttaggcggtgga

SEQ ID NO: 52668 - DNA, 13 bp, Artificial Sequence
  Oligonucleotide for detection of SNP TSC0014593
tccaccgcctaaa

SEQ ID NO: 52669 - DNA, 13 bp, Artificial Sequence
  Oligonucleotide for detection of SNP TSC0014594
gagtttagtaaty

SEQ ID NO: 52670 - DNA, 13 bp, Artificial Sequence
  Oligonucleotide for detection of SNP TSC0014594
rattactaaactc

SEQ ID NO: 52671 - DNA, 13 bp, Artificial Sequence
  Oligonucleotide for detection of SNP TSC0014594
gagtttggtaaty

SEQ ID NO: 52672 - DNA, 13 bp, Artificial Sequence
  Oligonucleotide for detection of SNP TSC0014594
rattaccaaactc

SEQ ID NO: 52673 - DNA, 13 bp, Artificial Sequence
  Oligonucleotide for detection of SNP TSC0014594
gagttcggtaaty

SEQ ID NO: 52674 - DNA, 13 bp, Artificial Sequence
  Oligonucleotide for detection of SNP TSC0014594
rattaccgaactc

SEQ ID NO: 52675 - DNA, 13 bp, Artificial Sequence
  Oligonucleotide for detection of SNP TSC0014594
ggttattgggtty

SEQ ID NO: 52676 - DNA, 13 bp, Artificial Sequence
  Oligonucleotide for detection of SNP TSC0014594
raacccaataacc

SEQ ID NO: 52677 - DNA, 13 bp, Artificial Sequence
  Oligonucleotide for detection of SNP TSC0014594
ggttatcgggtty

SEQ ID NO: 52678 - DNA, 13 bp, Artificial Sequence
  Oligonucleotide for detection of SNP TSC0014594
raacccgataacc

SEQ ID NO: 52679 - DNA, 13 bp, Artificial Sequence
  Oligonucleotide for detection of SNP TSC0014595
tttttaatattay

SEQ ID NO: 52680 - DNA, 13 bp, Artificial Sequence
  Oligonucleotide for detection of SNP TSC0014595
rtaatattaaaaa

SEQ ID NO: 52681 - DNA, 13 bp, Artificial Sequence
  Oligonucleotide for detection of SNP TSC0014595
tttttagtattay

SEQ ID NO: 52682 - DNA, 13 bp, Artificial Sequence
  Oligonucleotide for detection of SNP TSC0014595
rtaatactaaaaa

SEQ ID NO: 52683 - DNA, 13 bp, Artificial Sequence
  Oligonucleotide for detection of SNP TSC0014596
atttggaagatag

SEQ ID NO: 52684 - DNA, 13 bp, Artificial Sequence
  Oligonucleotide for detection of SNP TSC0014596
ctatcttccaaat

SEQ ID NO: 52685 - DNA, 13 bp, Artificial Sequence
  Oligonucleotide for detection of SNP TSC0014596
atttgggagatag

SEQ ID NO: 52686 - DNA, 13 bp, Artificial Sequence
  Oligonucleotide for detection of SNP TSC0014596
ctatctcccaaat

SEQ ID NO: 52687 - DNA, 13 bp, Artificial Sequence
  Oligonucleotide for detection of SNP TSC0014597
gaaagagaagagg

SEQ ID NO: 52688 - DNA, 13 bp, Artificial Sequence
  Oligonucleotide for detection of SNP TSC0014597
cctcttctctttc

SEQ ID NO: 52689 - DNA, 13 bp, Artificial Sequence
  Oligonucleotide for detection of SNP TSC0014597
gaaagaaaagagg

SEQ ID NO: 52690 - DNA, 13 bp, Artificial Sequence
  Oligonucleotide for detection of SNP TSC0014597
cctcttttctttc

SEQ ID NO: 52691 - DNA, 13 bp, Artificial Sequence
  Oligonucleotide for detection of SNP TSC0014598
atatagtgagatt

SEQ ID NO: 52692 - DNA, 13 bp, Artificial Sequence
  Oligonucleotide for detection of SNP TSC0014598
aatctcactatat

SEQ ID NO: 52693 - DNA, 13 bp, Artificial Sequence
  Oligonucleotide for detection of SNP TSC0014598
atatagcgagatt

SEQ ID NO: 52694 - DNA, 13 bp, Artificial Sequence
  Oligonucleotide for detection of SNP TSC0014598
aatctcgctatat

SEQ ID NO: 52695 - DNA, 13 bp, Artificial Sequence
  Oligonucleotide for detection of SNP TSC0014598
agttttgttgtgt

SEQ ID NO: 52696 - DNA, 13 bp, Artificial Sequence
  Oligonucleotide for detection of SNP TSC0014598
acacaacaaaact

SEQ ID NO: 52697 - DNA, 13 bp, Artificial Sequence
  Oligonucleotide for detection of SNP TSC0014598
agttttattgtgt

SEQ ID NO: 52698 - DNA, 13 bp, Artificial Sequence
  Oligonucleotide for detection of SNP TSC0014598
acacaataaaact

SEQ ID NO: 52699 - DNA, 13 bp, Artificial Sequence
  Oligonucleotide for detection of SNP TSC0014598
agtttcgttgtgt

SEQ ID NO: 52700 - DNA, 13 bp, Artificial Sequence
  Oligonucleotide for detection of SNP TSC0014598
acacaacgaaact

SEQ ID NO: 52701 - DNA, 13 bp, Artificial Sequence
  Oligonucleotide for detection of SNP TSC0014599
ttataggggatat

SEQ ID NO: 52702 - DNA, 13 bp, Artificial Sequence
  Oligonucleotide for detection of SNP TSC0014599
atatcccctataa

SEQ ID NO: 52703 - DNA, 13 bp, Artificial Sequence
  Oligonucleotide for detection of SNP TSC0014599
ttatagtggatat

SEQ ID NO: 52704 - DNA, 13 bp, Artificial Sequence
  Oligonucleotide for detection of SNP TSC0014599
atatccactataa

SEQ ID NO: 52705 - DNA, 13 bp, Artificial Sequence
  Oligonucleotide for detection of SNP TSC0014599
atattttttatag

SEQ ID NO: 52706 - DNA, 13 bp, Artificial Sequence
  Oligonucleotide for detection of SNP TSC0014599
ctataaaaaatat

SEQ ID NO: 52707 - DNA, 13 bp, Artificial Sequence
  Oligonucleotide for detection of SNP TSC0014599
atatttattatag

SEQ ID NO: 52708 - DNA, 13 bp, Artificial Sequence
  Oligonucleotide for detection of SNP TSC0014599
ctataataaatat

SEQ ID NO: 52709 - DNA, 13 bp, Artificial Sequence
  Oligonucleotide for detection of SNP TSC0014600
gttaatattaagy

SEQ ID NO: 52710 - DNA, 13 bp, Artificial Sequence
  Oligonucleotide for detection of SNP TSC0014600
rcttaatattaac

SEQ ID NO: 52711 - DNA, 13 bp, Artificial Sequence
  Oligonucleotide for detection of SNP TSC0014600
gttaatgttaagy

SEQ ID NO: 52712 - DNA, 13 bp, Artificial Sequence
  Oligonucleotide for detection of SNP TSC0014600
rcttaacattaac

SEQ ID NO: 52713 - DNA, 13 bp, Artificial Sequence
  Oligonucleotide for detection of SNP TSC0014600
gttaacgttaagy

SEQ ID NO: 52714 - DNA, 13 bp, Artificial Sequence
  Oligonucleotide for detection of SNP TSC0014600
rcttaacgttaac

SEQ ID NO: 52715 - DNA, 13 bp, Artificial Sequence
  Oligonucleotide for detection of SNP TSC0014600
gtttaatgttaay

SEQ ID NO: 52716 - DNA, 13 bp, Artificial Sequence
  Oligonucleotide for detection of SNP TSC0014600
rttaacattaaac

SEQ ID NO: 52717 - DNA, 13 bp, Artificial Sequence
  Oligonucleotide for detection of SNP TSC0014600
gtttaacgttaay

SEQ ID NO: 52718 - DNA, 13 bp, Artificial Sequence
  Oligonucleotide for detection of SNP TSC0014600
rttaacgttaaac

SEQ ID NO: 52719 - DNA, 13 bp, Artificial Sequence
  Oligonucleotide for detection of SNP TSC0014601
taagtattttttt

SEQ ID NO: 52720 - DNA, 13 bp, Artificial Sequence
  Oligonucleotide for detection of SNP TSC0014601
aaaaaaatactta

SEQ ID NO: 52721 - DNA, 13 bp, Artificial Sequence
  Oligonucleotide for detection of SNP TSC0014601
taagtagtttttt

SEQ ID NO: 52722 - DNA, 13 bp, Artificial Sequence
  Oligonucleotide for detection of SNP TSC0014601
aaaaaactactta

SEQ ID NO: 52723 - DNA, 13 bp, Artificial Sequence
  Oligonucleotide for detection of SNP TSC0014601
aggggggtgttta

SEQ ID NO: 52724 - DNA, 13 bp, Artificial Sequence
  Oligonucleotide for detection of SNP TSC0014601
taaacacccccct

SEQ ID NO: 52725 - DNA, 13 bp, Artificial Sequence
  Oligonucleotide for detection of SNP TSC0014601
agggggttgttta

SEQ ID NO: 52726 - DNA, 13 bp, Artificial Sequence
  Oligonucleotide for detection of SNP TSC0014601
taaacaaccccct

SEQ ID NO: 52727 - DNA, 13 bp, Artificial Sequence
  Oligonucleotide for detection of SNP TSC0014602
agtattatttaty

SEQ ID NO: 52728 - DNA, 13 bp, Artificial Sequence
  Oligonucleotide for detection of SNP TSC0014602
rataaataatact

SEQ ID NO: 52729 - DNA, 13 bp, Artificial Sequence
  Oligonucleotide for detection of SNP TSC0014602
agtattgtttaty

SEQ ID NO: 52730 - DNA, 13 bp, Artificial Sequence
  Oligonucleotide for detection of SNP TSC0014602
rataaacaatact

SEQ ID NO: 52731 - DNA, 13 bp, Artificial Sequence
  Oligonucleotide for detection of SNP TSC0014602
agtatcgtttaty

SEQ ID NO: 52732 - DNA, 13 bp, Artificial Sequence
  Oligonucleotide for detection of SNP TSC0014602
rataaacgatact

SEQ ID NO: 52733 - DNA, 13 bp, Artificial Sequence
  Oligonucleotide for detection of SNP TSC0014602
ggtgggtggtgtt

SEQ ID NO: 52734 - DNA, 13 bp, Artificial Sequence
  Oligonucleotide for detection of SNP TSC0014602
aacaccacccacc

SEQ ID NO: 52735 - DNA, 13 bp, Artificial Sequence
  Oligonucleotide for detection of SNP TSC0014602
ggtgggcggtgtt

SEQ ID NO: 52736 - DNA, 13 bp, Artificial Sequence
  Oligonucleotide for detection of SNP TSC0014602
aacaccgcccacc

SEQ ID NO: 52737 - DNA, 13 bp, Artificial Sequence
  Oligonucleotide for detection of SNP TSC0014605
gttattgtttttg

SEQ ID NO: 52738 - DNA, 13 bp, Artificial Sequence
  Oligonucleotide for detection of SNP TSC0014605
caaaaacaataac

SEQ ID NO: 52739 - DNA, 13 bp, Artificial Sequence
  Oligonucleotide for detection of SNP TSC0014605
gttattttttttg

SEQ ID NO: 52740 - DNA, 13 bp, Artificial Sequence
  Oligonucleotide for detection of SNP TSC0014605
caaaaaaaataac

SEQ ID NO: 52741 - DNA, 13 bp, Artificial Sequence
  Oligonucleotide for detection of SNP TSC0014605
gttatcgtttttg

SEQ ID NO: 52742 - DNA, 13 bp, Artificial Sequence
  Oligonucleotide for detection of SNP TSC0014605
caaaaacgataac

SEQ ID NO: 52743 - DNA, 13 bp, Artificial Sequence
  Oligonucleotide for detection of SNP TSC0014605
tagaggtggtgay

SEQ ID NO: 52744 - DNA, 13 bp, Artificial Sequence
  Oligonucleotide for detection of SNP TSC0014605
rtcaccacctcta

SEQ ID NO: 52745 - DNA, 13 bp, Artificial Sequence
  Oligonucleotide for detection of SNP TSC0014605
tagaggaggtgay

SEQ ID NO: 52746 - DNA, 13 bp, Artificial Sequence
  Oligonucleotide for detection of SNP TSC0014605
rtcacctcctcta

SEQ ID NO: 52747 - DNA, 13 bp, Artificial Sequence
  Oligonucleotide for detection of SNP TSC0014605
tagaggcggtgay

SEQ ID NO: 52748 - DNA, 13 bp, Artificial Sequence
  Oligonucleotide for detection of SNP TSC0014605
rtcaccgcctcta

SEQ ID NO: 52749 - DNA, 13 bp, Artificial Sequence
  Oligonucleotide for detection of SNP TSC0014606
taaatgaaagatt

SEQ ID NO: 52750 - DNA, 13 bp, Artificial Sequence
  Oligonucleotide for detection of SNP TSC0014606
aatctttcattta

SEQ ID NO: 52751 - DNA, 13 bp, Artificial Sequence
  Oligonucleotide for detection of SNP TSC0014606
taaatggaagatt

SEQ ID NO: 52752 - DNA, 13 bp, Artificial Sequence
  Oligonucleotide for detection of SNP TSC0014606
aatcttccattta

SEQ ID NO: 52753 - DNA, 13 bp, Artificial Sequence
  Oligonucleotide for detection of SNP TSC0014606
taaacgaaagatt

SEQ ID NO: 52754 - DNA, 13 bp, Artificial Sequence
  Oligonucleotide for detection of SNP TSC0014606
aatctttcgttta

SEQ ID NO: 52755 - DNA, 13 bp, Artificial Sequence
  Oligonucleotide for detection of SNP TSC0014606
taaacggaagatt

SEQ ID NO: 52756 - DNA, 13 bp, Artificial Sequence
  Oligonucleotide for detection of SNP TSC0014606
aatcttccgttta

SEQ ID NO: 52757 - DNA, 13 bp, Artificial Sequence
  Oligonucleotide for detection of SNP TSC0014611
tatttaatgaggg

SEQ ID NO: 52758 - DNA, 13 bp, Artificial Sequence
  Oligonucleotide for detection of SNP TSC0014611
ccctcattaaata

SEQ ID NO: 52759 - DNA, 13 bp, Artificial Sequence
  Oligonucleotide for detection of SNP TSC0014611
tatttagtgaggg

SEQ ID NO: 52760 - DNA, 13 bp, Artificial Sequence
  Oligonucleotide for detection of SNP TSC0014611
ccctcactaaata

SEQ ID NO: 52761 - DNA, 13 bp, Artificial Sequence
  Oligonucleotide for detection of SNP TSC0014615
agaatgtgtttat

SEQ ID NO: 52762 - DNA, 13 bp, Artificial Sequence
  Oligonucleotide for detection of SNP TSC0014615
ataaacacattct

SEQ ID NO: 52763 - DNA, 13 bp, Artificial Sequence
  Oligonucleotide for detection of SNP TSC0014615
agaatgcgtttat

SEQ ID NO: 52764 - DNA, 13 bp, Artificial Sequence
  Oligonucleotide for detection of SNP TSC0014615
ataaacgcattct

SEQ ID NO: 52765 - DNA, 13 bp, Artificial Sequence
  Oligonucleotide for detection of SNP TSC0014615
ataaatgtatttt

SEQ ID NO: 52766 - DNA, 13 bp, Artificial Sequence
  Oligonucleotide for detection of SNP TSC0014615
aaaatacatttat

SEQ ID NO: 52767 - DNA, 13 bp, Artificial Sequence
  Oligonucleotide for detection of SNP TSC0014615
ataaatatatttt

SEQ ID NO: 52768 - DNA, 13 bp, Artificial Sequence
  Oligonucleotide for detection of SNP TSC0014615
aaaatatatttat

SEQ ID NO: 52769 - DNA, 13 bp, Artificial Sequence
  Oligonucleotide for detection of SNP TSC0014615
ataaacgtatttt

SEQ ID NO: 52770 - DNA, 13 bp, Artificial Sequence
  Oligonucleotide for detection of SNP TSC0014615
aaaatacgtttat

SEQ ID NO: 52771 - DNA, 13 bp, Artificial Sequence
  Oligonucleotide for detection of SNP TSC0014616
tgttgtagtttta

SEQ ID NO: 52772 - DNA, 13 bp, Artificial Sequence
  Oligonucleotide for detection of SNP TSC0014616
taaaactacaaca

SEQ ID NO: 52773 - DNA, 13 bp, Artificial Sequence
  Oligonucleotide for detection of SNP TSC0014616
tgttgtggtttta

SEQ ID NO: 52774 - DNA, 13 bp, Artificial Sequence
  Oligonucleotide for detection of SNP TSC0014616
taaaaccacaaca

SEQ ID NO: 52775 - DNA, 13 bp, Artificial Sequence
  Oligonucleotide for detection of SNP TSC0014616
tgttgcggtttta

SEQ ID NO: 52776 - DNA, 13 bp, Artificial Sequence
  Oligonucleotide for detection of SNP TSC0014616
taaaaccgcaaca

SEQ ID NO: 52777 - DNA, 13 bp, Artificial Sequence
  Oligonucleotide for detection of SNP TSC0014616
tgaagttgtagta

SEQ ID NO: 52778 - DNA, 13 bp, Artificial Sequence
  Oligonucleotide for detection of SNP TSC0014616
tactacaacttca

SEQ ID NO: 52779 - DNA, 13 bp, Artificial Sequence
  Oligonucleotide for detection of SNP TSC0014616
tgaagtcgtagta

SEQ ID NO: 52780 - DNA, 13 bp, Artificial Sequence
  Oligonucleotide for detection of SNP TSC0014616
tactacgacttca

SEQ ID NO: 52781 - DNA, 13 bp, Artificial Sequence
  Oligonucleotide for detection of SNP TSC0014617
tgaattaatttat

SEQ ID NO: 52782 - DNA, 13 bp, Artificial Sequence
  Oligonucleotide for detection of SNP TSC0014617
ataaattaattca

SEQ ID NO: 52783 - DNA, 13 bp, Artificial Sequence
  Oligonucleotide for detection of SNP TSC0014617
tgaattgatttat

SEQ ID NO: 52784 - DNA, 13 bp, Artificial Sequence
  Oligonucleotide for detection of SNP TSC0014617
ataaatcaattca

SEQ ID NO: 52785 - DNA, 13 bp, Artificial Sequence
  Oligonucleotide for detection of SNP TSC0014617
tgaatcgatttat

SEQ ID NO: 52786 - DNA, 13 bp, Artificial Sequence
  Oligonucleotide for detection of SNP TSC0014617
ataaatcgattca

SEQ ID NO: 52787 - DNA, 13 bp, Artificial Sequence
  Oligonucleotide for detection of SNP TSC0014617
atgaattgattta

SEQ ID NO: 52788 - DNA, 13 bp, Artificial Sequence
  Oligonucleotide for detection of SNP TSC0014617
taaatcaattcat

SEQ ID NO: 52789 - DNA, 13 bp, Artificial Sequence
  Oligonucleotide for detection of SNP TSC0014617
atgaatcgattta

SEQ ID NO: 52790 - DNA, 13 bp, Artificial Sequence
  Oligonucleotide for detection of SNP TSC0014617
taaatcgattcat

SEQ ID NO: 52791 - DNA, 13 bp, Artificial Sequence
  Oligonucleotide for detection of SNP TSC0014619
tatatagtttaat

SEQ ID NO: 52792 - DNA, 13 bp, Artificial Sequence
  Oligonucleotide for detection of SNP TSC0014619
attaaactatata

SEQ ID NO: 52793 - DNA, 13 bp, Artificial Sequence
  Oligonucleotide for detection of SNP TSC0014619
tatataatttaat

SEQ ID NO: 52794 - DNA, 13 bp, Artificial Sequence
  Oligonucleotide for detection of SNP TSC0014619
attaaattatata

SEQ ID NO: 52795 - DNA, 13 bp, Artificial Sequence
  Oligonucleotide for detection of SNP TSC0014620
gatattagggagg

SEQ ID NO: 52796 - DNA, 13 bp, Artificial Sequence
  Oligonucleotide for detection of SNP TSC0014620
cctccctaatatc

SEQ ID NO: 52797 - DNA, 13 bp, Artificial Sequence
  Oligonucleotide for detection of SNP TSC0014620
gatatttgggagg

SEQ ID NO: 52798 - DNA, 13 bp, Artificial Sequence
  Oligonucleotide for detection of SNP TSC0014620
cctcccaaatatc

SEQ ID NO: 52799 - DNA, 13 bp, Artificial Sequence
  Oligonucleotide for detection of SNP TSC0014620
gatattcgggagg

SEQ ID NO: 52800 - DNA, 13 bp, Artificial Sequence
  Oligonucleotide for detection of SNP TSC0014620
cctcccgaatatc

SEQ ID NO: 52801 - DNA, 13 bp, Artificial Sequence
  Oligonucleotide for detection of SNP TSC0014620
tttttttggtgty

SEQ ID NO: 52802 - DNA, 13 bp, Artificial Sequence
  Oligonucleotide for detection of SNP TSC0014620
racaccaaaaaaa

SEQ ID NO: 52803 - DNA, 13 bp, Artificial Sequence
  Oligonucleotide for detection of SNP TSC0014620
ttttttgggtgty

SEQ ID NO: 52804 - DNA, 13 bp, Artificial Sequence
  Oligonucleotide for detection of SNP TSC0014620
racacccaaaaaa

SEQ ID NO: 52805 - DNA, 13 bp, Artificial Sequence
  Oligonucleotide for detection of SNP TSC0014620
tttttcgggtgty

SEQ ID NO: 52806 - DNA, 13 bp, Artificial Sequence
  Oligonucleotide for detection of SNP TSC0014620
racacccgaaaaa

SEQ ID NO: 52807 - DNA, 13 bp, Artificial Sequence
  Oligonucleotide for detection of SNP TSC0014621
ggtgttattattg

SEQ ID NO: 52808 - DNA, 13 bp, Artificial Sequence
  Oligonucleotide for detection of SNP TSC0014621
caataataacacc

SEQ ID NO: 52809 - DNA, 13 bp, Artificial Sequence
  Oligonucleotide for detection of SNP TSC0014621
ggtgttgttattg

SEQ ID NO: 52810 - DNA, 13 bp, Artificial Sequence
  Oligonucleotide for detection of SNP TSC0014621
caataacaacacc

SEQ ID NO: 52811 - DNA, 13 bp, Artificial Sequence
  Oligonucleotide for detection of SNP TSC0014621
ggtgtcgttattg

SEQ ID NO: 52812 - DNA, 13 bp, Artificial Sequence
  Oligonucleotide for detection of SNP TSC0014621
caataacgacacc

SEQ ID NO: 52813 - DNA, 13 bp, Artificial Sequence
  Oligonucleotide for detection of SNP TSC0014621
taatgatgataty

SEQ ID NO: 52814 - DNA, 13 bp, Artificial Sequence
  Oligonucleotide for detection of SNP TSC0014621
ratatcatcatta

SEQ ID NO: 52815 - DNA, 13 bp, Artificial Sequence
  Oligonucleotide for detection of SNP TSC0014621
taatgacgataty

SEQ ID NO: 52816 - DNA, 13 bp, Artificial Sequence
  Oligonucleotide for detection of SNP TSC0014621
ratatcgtcatta

SEQ ID NO: 52817 - DNA, 13 bp, Artificial Sequence
  Oligonucleotide for detection of SNP TSC0014622
ggaagtatgtggt

SEQ ID NO: 52818 - DNA, 13 bp, Artificial Sequence
  Oligonucleotide for detection of SNP TSC0014622
accacatacttcc

SEQ ID NO: 52819 - DNA, 13 bp, Artificial Sequence
  Oligonucleotide for detection of SNP TSC0014622
ggaagtttgtggt

SEQ ID NO: 52820 - DNA, 13 bp, Artificial Sequence
  Oligonucleotide for detection of SNP TSC0014622
accacaaacttcc

SEQ ID NO: 52821 - DNA, 13 bp, Artificial Sequence
  Oligonucleotide for detection of SNP TSC0014622
ggaagtatgcggt

SEQ ID NO: 52822 - DNA, 13 bp, Artificial Sequence
  Oligonucleotide for detection of SNP TSC0014622
accgcatacttcc

SEQ ID NO: 52823 - DNA, 13 bp, Artificial Sequence
  Oligonucleotide for detection of SNP TSC0014622
ggaagtttgcggt

SEQ ID NO: 52824 - DNA, 13 bp, Artificial Sequence
  Oligonucleotide for detection of SNP TSC0014622
accgcaaacttcc

SEQ ID NO: 52825 - DNA, 13 bp, Artificial Sequence
  Oligonucleotide for detection of SNP TSC0014622
attgtatgtttty

SEQ ID NO: 52826 - DNA, 13 bp, Artificial Sequence
  Oligonucleotide for detection of SNP TSC0014622
raaaacatacaat

SEQ ID NO: 52827 - DNA, 13 bp, Artificial Sequence
  Oligonucleotide for detection of SNP TSC0014622
attgtaagtttty

SEQ ID NO: 52828 - DNA, 13 bp, Artificial Sequence
  Oligonucleotide for detection of SNP TSC0014622
raaaacttacaat

SEQ ID NO: 52829 - DNA, 13 bp, Artificial Sequence
  Oligonucleotide for detection of SNP TSC0014622
atcgtatgtttty

SEQ ID NO: 52830 - DNA, 13 bp, Artificial Sequence
  Oligonucleotide for detection of SNP TSC0014622
raaaacatacgat

SEQ ID NO: 52831 - DNA, 13 bp, Artificial Sequence
  Oligonucleotide for detection of SNP TSC0014622
atcgtaagtttty

SEQ ID NO: 52832 - DNA, 13 bp, Artificial Sequence
  Oligonucleotide for detection of SNP TSC0014622
raaaacttacgat

SEQ ID NO: 52833 - DNA, 13 bp, Artificial Sequence
  Oligonucleotide for detection of SNP TSC0014624
taagtatgggaat

SEQ ID NO: 52834 - DNA, 13 bp, Artificial Sequence
  Oligonucleotide for detection of SNP TSC0014624
attcccatactta

SEQ ID NO: 52835 - DNA, 13 bp, Artificial Sequence
  Oligonucleotide for detection of SNP TSC0014624
taagtacgggaat

SEQ ID NO: 52836 - DNA, 13 bp, Artificial Sequence
  Oligonucleotide for detection of SNP TSC0014624
attcccgtactta

SEQ ID NO: 52837 - DNA, 13 bp, Artificial Sequence
  Oligonucleotide for detection of SNP TSC0014624
atttttgtattta

SEQ ID NO: 52838 - DNA, 13 bp, Artificial Sequence
  Oligonucleotide for detection of SNP TSC0014624
taaatacaaaaat

SEQ ID NO: 52839 - DNA, 13 bp, Artificial Sequence
  Oligonucleotide for detection of SNP TSC0014624
atttttatattta

SEQ ID NO: 52840 - DNA, 13 bp, Artificial Sequence
  Oligonucleotide for detection of SNP TSC0014624
taaatataaaaat

SEQ ID NO: 52841 - DNA, 13 bp, Artificial Sequence
  Oligonucleotide for detection of SNP TSC0014624
attttcgtattta

SEQ ID NO: 52842 - DNA, 13 bp, Artificial Sequence
  Oligonucleotide for detection of SNP TSC0014624
taaatacgaaaat

SEQ ID NO: 52843 - DNA, 13 bp, Artificial Sequence
  Oligonucleotide for detection of SNP TSC0014625
aggttaagagtty

SEQ ID NO: 52844 - DNA, 13 bp, Artificial Sequence
  Oligonucleotide for detection of SNP TSC0014625
raactcttaacct

SEQ ID NO: 52845 - DNA, 13 bp, Artificial Sequence
  Oligonucleotide for detection of SNP TSC0014625
aggttaggagtty

SEQ ID NO: 52846 - DNA, 13 bp, Artificial Sequence
  Oligonucleotide for detection of SNP TSC0014625
raactcctaacct

SEQ ID NO: 52847 - DNA, 13 bp, Artificial Sequence
  Oligonucleotide for detection of SNP TSC0014626
aggtggggtagty

SEQ ID NO: 52848 - DNA, 13 bp, Artificial Sequence
  Oligonucleotide for detection of SNP TSC0014626
ractaccccacct

SEQ ID NO: 52849 - DNA, 13 bp, Artificial Sequence
  Oligonucleotide for detection of SNP TSC0014626
aggtggagtagty

SEQ ID NO: 52850 - DNA, 13 bp, Artificial Sequence
  Oligonucleotide for detection of SNP TSC0014626
ractactccacct

SEQ ID NO: 52851 - DNA, 13 bp, Artificial Sequence
  Oligonucleotide for detection of SNP TSC0014627
ttttataattgtg

SEQ ID NO: 52852 - DNA, 13 bp, Artificial Sequence
  Oligonucleotide for detection of SNP TSC0014627
cacaattataaaa

SEQ ID NO: 52853 - DNA, 13 bp, Artificial Sequence
  Oligonucleotide for detection of SNP TSC0014627
ttttatgattgtg

SEQ ID NO: 52854 - DNA, 13 bp, Artificial Sequence
  Oligonucleotide for detection of SNP TSC0014627
cacaatcataaaa

SEQ ID NO: 52855 - DNA, 13 bp, Artificial Sequence
  Oligonucleotide for detection of SNP TSC0014627
ttttacgattgtg

SEQ ID NO: 52856 - DNA, 13 bp, Artificial Sequence
  Oligonucleotide for detection of SNP TSC0014627
cacaatcgtaaaa

SEQ ID NO: 52857 - DNA, 13 bp, Artificial Sequence
  Oligonucleotide for detection of SNP TSC0014627
tatagttgtgaga

SEQ ID NO: 52858 - DNA, 13 bp, Artificial Sequence
  Oligonucleotide for detection of SNP TSC0014627
tctcacaactata

SEQ ID NO: 52859 - DNA, 13 bp, Artificial Sequence
  Oligonucleotide for detection of SNP TSC0014627
tatagtcgtgaga

SEQ ID NO: 52860 - DNA, 13 bp, Artificial Sequence
  Oligonucleotide for detection of SNP TSC0014627
tctcacgactata

SEQ ID NO: 52861 - DNA, 13 bp, Artificial Sequence
  Oligonucleotide for detection of SNP TSC0014628
atagatgagtata

SEQ ID NO: 52862 - DNA, 13 bp, Artificial Sequence
  Oligonucleotide for detection of SNP TSC0014628
tatactcatctat

SEQ ID NO: 52863 - DNA, 13 bp, Artificial Sequence
  Oligonucleotide for detection of SNP TSC0014628
atagataagtata

SEQ ID NO: 52864 - DNA, 13 bp, Artificial Sequence
  Oligonucleotide for detection of SNP TSC0014628
tatacttatctat

SEQ ID NO: 52865 - DNA, 13 bp, Artificial Sequence
  Oligonucleotide for detection of SNP TSC0014629
ttaagtaattagy

SEQ ID NO: 52866 - DNA, 13 bp, Artificial Sequence
  Oligonucleotide for detection of SNP TSC0014629
rctaattacttaa

SEQ ID NO: 52867 - DNA, 13 bp, Artificial Sequence
  Oligonucleotide for detection of SNP TSC0014629
ttaagtgattagy

SEQ ID NO: 52868 - DNA, 13 bp, Artificial Sequence
  Oligonucleotide for detection of SNP TSC0014629
rctaatcacttaa

SEQ ID NO: 52869 - DNA, 13 bp, Artificial Sequence
  Oligonucleotide for detection of SNP TSC0014630
gaaaaggtgatta

SEQ ID NO: 52870 - DNA, 13 bp, Artificial Sequence
  Oligonucleotide for detection of SNP TSC0014630
taatcaccttttc

SEQ ID NO: 52871 - DNA, 13 bp, Artificial Sequence
  Oligonucleotide for detection of SNP TSC0014630
gaaaagttgatta

SEQ ID NO: 52872 - DNA, 13 bp, Artificial Sequence
  Oligonucleotide for detection of SNP TSC0014630
taatcaacttttc

SEQ ID NO: 52873 - DNA, 13 bp, Artificial Sequence
  Oligonucleotide for detection of SNP TSC0014630
tggttatttttty

SEQ ID NO: 52874 - DNA, 13 bp, Artificial Sequence
  Oligonucleotide for detection of SNP TSC0014630
raaaaaataacca

SEQ ID NO: 52875 - DNA, 13 bp, Artificial Sequence
  Oligonucleotide for detection of SNP TSC0014630
tggttaattttty

SEQ ID NO: 52876 - DNA, 13 bp, Artificial Sequence
  Oligonucleotide for detection of SNP TSC0014630
raaaaattaacca

SEQ ID NO: 52877 - DNA, 13 bp, Artificial Sequence
  Oligonucleotide for detection of SNP TSC0014631
atgaagtggtagg

SEQ ID NO: 52878 - DNA, 13 bp, Artificial Sequence
  Oligonucleotide for detection of SNP TSC0014631
cctaccacttcat

SEQ ID NO: 52879 - DNA, 13 bp, Artificial Sequence
  Oligonucleotide for detection of SNP TSC0014631
atgaaggggtagg

SEQ ID NO: 52880 - DNA, 13 bp, Artificial Sequence
  Oligonucleotide for detection of SNP TSC0014631
cctaccccttcat

SEQ ID NO: 52881 - DNA, 13 bp, Artificial Sequence
  Oligonucleotide for detection of SNP TSC0014631
atgaagcggtagg

SEQ ID NO: 52882 - DNA, 13 bp, Artificial Sequence
  Oligonucleotide for detection of SNP TSC0014631
cctaccgcttcat

SEQ ID NO: 52883 - DNA, 13 bp, Artificial Sequence
  Oligonucleotide for detection of SNP TSC0014631
tttatttttttat

SEQ ID NO: 52884 - DNA, 13 bp, Artificial Sequence
  Oligonucleotide for detection of SNP TSC0014631
ataaaaaaataaa

SEQ ID NO: 52885 - DNA, 13 bp, Artificial Sequence
  Oligonucleotide for detection of SNP TSC0014632
atattaatagaga

SEQ ID NO: 52886 - DNA, 13 bp, Artificial Sequence
  Oligonucleotide for detection of SNP TSC0014632
tctctattaatat

SEQ ID NO: 52887 - DNA, 13 bp, Artificial Sequence
  Oligonucleotide for detection of SNP TSC0014632
atattattagaga

SEQ ID NO: 52888 - DNA, 13 bp, Artificial Sequence
  Oligonucleotide for detection of SNP TSC0014632
tctctaataatat

SEQ ID NO: 52889 - DNA, 13 bp, Artificial Sequence
  Oligonucleotide for detection of SNP TSC0014632
tttttattaatat

SEQ ID NO: 52890 - DNA, 13 bp, Artificial Sequence
  Oligonucleotide for detection of SNP TSC0014632
atattaataaaaa

SEQ ID NO: 52891 - DNA, 13 bp, Artificial Sequence
  Oligonucleotide for detection of SNP TSC0014632
tttttaataatat

SEQ ID NO: 52892 - DNA, 13 bp, Artificial Sequence
  Oligonucleotide for detection of SNP TSC0014632
atattattaaaaa

SEQ ID NO: 52893 - DNA, 13 bp, Artificial Sequence
  Oligonucleotide for detection of SNP TSC0014633
tgttgtaattaaa

SEQ ID NO: 52894 - DNA, 13 bp, Artificial Sequence
  Oligonucleotide for detection of SNP TSC0014633
tttaattacaaca

SEQ ID NO: 52895 - DNA, 13 bp, Artificial Sequence
  Oligonucleotide for detection of SNP TSC0014633
tgttgttattaaa

SEQ ID NO: 52896 - DNA, 13 bp, Artificial Sequence
  Oligonucleotide for detection of SNP TSC0014633
tttaataacaaca

SEQ ID NO: 52897 - DNA, 13 bp, Artificial Sequence
  Oligonucleotide for detection of SNP TSC0014633
tttggttatagta

SEQ ID NO: 52898 - DNA, 13 bp, Artificial Sequence
  Oligonucleotide for detection of SNP TSC0014633
tactataaccaaa

SEQ ID NO: 52899 - DNA, 13 bp, Artificial Sequence
  Oligonucleotide for detection of SNP TSC0014633
tttggtaatagta

SEQ ID NO: 52900 - DNA, 13 bp, Artificial Sequence
  Oligonucleotide for detection of SNP TSC0014633
tactattaccaaa

SEQ ID NO: 52901 - DNA, 13 bp, Artificial Sequence
  Oligonucleotide for detection of SNP TSC0014635
agggtaagttgtg

SEQ ID NO: 52902 - DNA, 13 bp, Artificial Sequence
  Oligonucleotide for detection of SNP TSC0014635
cacaacttaccct

SEQ ID NO: 52903 - DNA, 13 bp, Artificial Sequence
  Oligonucleotide for detection of SNP TSC0014635
agggtaggttgtg

SEQ ID NO: 52904 - DNA, 13 bp, Artificial Sequence
  Oligonucleotide for detection of SNP TSC0014635
cacaacctaccct

SEQ ID NO: 52905 - DNA, 13 bp, Artificial Sequence
  Oligonucleotide for detection of SNP TSC0014635
agggtaagttgcg

SEQ ID NO: 52906 - DNA, 13 bp, Artificial Sequence
  Oligonucleotide for detection of SNP TSC0014635
cgcaacttaccct

SEQ ID NO: 52907 - DNA, 13 bp, Artificial Sequence
  Oligonucleotide for detection of SNP TSC0014635
agggtaggttgcg

SEQ ID NO: 52908 - DNA, 13 bp, Artificial Sequence
  Oligonucleotide for detection of SNP TSC0014635
cgcaacctaccct

SEQ ID NO: 52909 - DNA, 13 bp, Artificial Sequence
  Oligonucleotide for detection of SNP TSC0014636
ttttggagaaaag

SEQ ID NO: 52910 - DNA, 13 bp, Artificial Sequence
  Oligonucleotide for detection of SNP TSC0014636
cttttctccaaaa

SEQ ID NO: 52911 - DNA, 13 bp, Artificial Sequence
  Oligonucleotide for detection of SNP TSC0014636
ttttggggaaaag

SEQ ID NO: 52912 - DNA, 13 bp, Artificial Sequence
  Oligonucleotide for detection of SNP TSC0014636
cttttccccaaaa

SEQ ID NO: 52913 - DNA, 13 bp, Artificial Sequence
  Oligonucleotide for detection of SNP TSC0014637
taatatggagtat

SEQ ID NO: 52914 - DNA, 13 bp, Artificial Sequence
  Oligonucleotide for detection of SNP TSC0014637
atactccatatta

SEQ ID NO: 52915 - DNA, 13 bp, Artificial Sequence
  Oligonucleotide for detection of SNP TSC0014637
taatattgagtat

SEQ ID NO: 52916 - DNA, 13 bp, Artificial Sequence
  Oligonucleotide for detection of SNP TSC0014637
atactcaatatta

SEQ ID NO: 52917 - DNA, 13 bp, Artificial Sequence
  Oligonucleotide for detection of SNP TSC0014637
taatacggagtat

SEQ ID NO: 52918 - DNA, 13 bp, Artificial Sequence
  Oligonucleotide for detection of SNP TSC0014637
atactccgtatta

SEQ ID NO: 52919 - DNA, 13 bp, Artificial Sequence
  Oligonucleotide for detection of SNP TSC0014637
atattttgtgttg

SEQ ID NO: 52920 - DNA, 13 bp, Artificial Sequence
  Oligonucleotide for detection of SNP TSC0014637
caacacaaaatat

SEQ ID NO: 52921 - DNA, 13 bp, Artificial Sequence
  Oligonucleotide for detection of SNP TSC0014637
atatttagtgttg

SEQ ID NO: 52922 - DNA, 13 bp, Artificial Sequence
  Oligonucleotide for detection of SNP TSC0014637
caacactaaatat

SEQ ID NO: 52923 - DNA, 13 bp, Artificial Sequence
  Oligonucleotide for detection of SNP TSC0014637
atatttcgtgttg

SEQ ID NO: 52924 - DNA, 13 bp, Artificial Sequence
  Oligonucleotide for detection of SNP TSC0014637
caacacgaaatat

SEQ ID NO: 52925 - DNA, 13 bp, Artificial Sequence
  Oligonucleotide for detection of SNP TSC0014641
gaagagggggaag

SEQ ID NO: 52926 - DNA, 13 bp, Artificial Sequence
  Oligonucleotide for detection of SNP TSC0014641
cttccccctcttc

SEQ ID NO: 52927 - DNA, 13 bp, Artificial Sequence
  Oligonucleotide for detection of SNP TSC0014641
gaagagtgggaag

SEQ ID NO: 52928 - DNA, 13 bp, Artificial Sequence
  Oligonucleotide for detection of SNP TSC0014641
cttcccactcttc

SEQ ID NO: 52929 - DNA, 13 bp, Artificial Sequence
  Oligonucleotide for detection of SNP TSC0014641
gaagagcgggaag

SEQ ID NO: 52930 - DNA, 13 bp, Artificial Sequence
  Oligonucleotide for detection of SNP TSC0014641
cttcccgctcttc

SEQ ID NO: 52931 - DNA, 13 bp, Artificial Sequence
  Oligonucleotide for detection of SNP TSC0014642
tttttgattaggg

SEQ ID NO: 52932 - DNA, 13 bp, Artificial Sequence
  Oligonucleotide for detection of SNP TSC0014642
ccctaatcaaaaa

SEQ ID NO: 52933 - DNA, 13 bp, Artificial Sequence
  Oligonucleotide for detection of SNP TSC0014642
tttttggttaggg

SEQ ID NO: 52934 - DNA, 13 bp, Artificial Sequence
  Oligonucleotide for detection of SNP TSC0014642
ccctaaccaaaaa

SEQ ID NO: 52935 - DNA, 13 bp, Artificial Sequence
  Oligonucleotide for detection of SNP TSC0014643
aggtggggtgtay

SEQ ID NO: 52936 - DNA, 13 bp, Artificial Sequence
  Oligonucleotide for detection of SNP TSC0014643
rtacaccccacct

SEQ ID NO: 52937 - DNA, 13 bp, Artificial Sequence
  Oligonucleotide for detection of SNP TSC0014643
aggtggagtgtay

SEQ ID NO: 52938 - DNA, 13 bp, Artificial Sequence
  Oligonucleotide for detection of SNP TSC0014643
rtacactccacct

SEQ ID NO: 52939 - DNA, 13 bp, Artificial Sequence
  Oligonucleotide for detection of SNP TSC0014644
tgggagaatttay

SEQ ID NO: 52940 - DNA, 13 bp, Artificial Sequence
  Oligonucleotide for detection of SNP TSC0014644
rtaaattctccca

SEQ ID NO: 52941 - DNA, 13 bp, Artificial Sequence
  Oligonucleotide for detection of SNP TSC0014644
tgggaggatttay

SEQ ID NO: 52942 - DNA, 13 bp, Artificial Sequence
  Oligonucleotide for detection of SNP TSC0014644
rtaaatcctccca

SEQ ID NO: 52943 - DNA, 13 bp, Artificial Sequence
  Oligonucleotide for detection of SNP TSC0014645
tttttgatggttg

SEQ ID NO: 52944 - DNA, 13 bp, Artificial Sequence
  Oligonucleotide for detection of SNP TSC0014645
caaccatcaaaaa

SEQ ID NO: 52945 - DNA, 13 bp, Artificial Sequence
  Oligonucleotide for detection of SNP TSC0014645
tttttgttggttg

SEQ ID NO: 52946 - DNA, 13 bp, Artificial Sequence
  Oligonucleotide for detection of SNP TSC0014645
caaccaacaaaaa

SEQ ID NO: 52947 - DNA, 13 bp, Artificial Sequence
  Oligonucleotide for detection of SNP TSC0014645
tttttgacggttg

SEQ ID NO: 52948 - DNA, 13 bp, Artificial Sequence
  Oligonucleotide for detection of SNP TSC0014645
caaccgtcaaaaa

SEQ ID NO: 52949 - DNA, 13 bp, Artificial Sequence
  Oligonucleotide for detection of SNP TSC0014645
tttttgtcggttg

SEQ ID NO: 52950 - DNA, 13 bp, Artificial Sequence
  Oligonucleotide for detection of SNP TSC0014645
caaccgacaaaaa

SEQ ID NO: 52951 - DNA, 13 bp, Artificial Sequence
  Oligonucleotide for detection of SNP TSC0014645
taattgttagggg

SEQ ID NO: 52952 - DNA, 13 bp, Artificial Sequence
  Oligonucleotide for detection of SNP TSC0014645
cccctaacaatta

SEQ ID NO: 52953 - DNA, 13 bp, Artificial Sequence
  Oligonucleotide for detection of SNP TSC0014645
taattggtagggg

SEQ ID NO: 52954 - DNA, 13 bp, Artificial Sequence
  Oligonucleotide for detection of SNP TSC0014645
cccctaccaatta

SEQ ID NO: 52955 - DNA, 13 bp, Artificial Sequence
  Oligonucleotide for detection of SNP TSC0014645
taatcgttagggg

SEQ ID NO: 52956 - DNA, 13 bp, Artificial Sequence
  Oligonucleotide for detection of SNP TSC0014645
cccctaacgatta

SEQ ID NO: 52957 - DNA, 13 bp, Artificial Sequence
  Oligonucleotide for detection of SNP TSC0014645
taatcggtagggg

SEQ ID NO: 52958 - DNA, 13 bp, Artificial Sequence
  Oligonucleotide for detection of SNP TSC0014645
cccctaccgatta

SEQ ID NO: 52959 - DNA, 13 bp, Artificial Sequence
  Oligonucleotide for detection of SNP TSC0014646
ttaaaagttattt

SEQ ID NO: 52960 - DNA, 13 bp, Artificial Sequence
  Oligonucleotide for detection of SNP TSC0014646
aaataacttttaa

SEQ ID NO: 52961 - DNA, 13 bp, Artificial Sequence
  Oligonucleotide for detection of SNP TSC0014646
ttaaaaattattt

SEQ ID NO: 52962 - DNA, 13 bp, Artificial Sequence
  Oligonucleotide for detection of SNP TSC0014646
aaataatttttaa

SEQ ID NO: 52963 - DNA, 13 bp, Artificial Sequence
  Oligonucleotide for detection of SNP TSC0014648
ttttaaaaattaa

SEQ ID NO: 52964 - DNA, 13 bp, Artificial Sequence
  Oligonucleotide for detection of SNP TSC0014648
ttaatttttaaaa

SEQ ID NO: 52965 - DNA, 13 bp, Artificial Sequence
  Oligonucleotide for detection of SNP TSC0014648
ttttaataattaa

SEQ ID NO: 52966 - DNA, 13 bp, Artificial Sequence
  Oligonucleotide for detection of SNP TSC0014648
ttaattattaaaa

SEQ ID NO: 52967 - DNA, 13 bp, Artificial Sequence
  Oligonucleotide for detection of SNP TSC0014649
ttattttttttay

SEQ ID NO: 52968 - DNA, 13 bp, Artificial Sequence
  Oligonucleotide for detection of SNP TSC0014649
rtaaaaaaaataa

SEQ ID NO: 52969 - DNA, 13 bp, Artificial Sequence
  Oligonucleotide for detection of SNP TSC0014649
gtggggggggtgg

SEQ ID NO: 52970 - DNA, 13 bp, Artificial Sequence
  Oligonucleotide for detection of SNP TSC0014649
ccaccccccccac

SEQ ID NO: 52971 - DNA, 13 bp, Artificial Sequence
  Oligonucleotide for detection of SNP TSC0014649
gtggggtgggtgg

SEQ ID NO: 52972 - DNA, 13 bp, Artificial Sequence
  Oligonucleotide for detection of SNP TSC0014649
ccacccaccccac

SEQ ID NO: 52973 - DNA, 13 bp, Artificial Sequence
  Oligonucleotide for detection of SNP TSC0014649
gtggggcgggtgg

SEQ ID NO: 52974 - DNA, 13 bp, Artificial Sequence
  Oligonucleotide for detection of SNP TSC0014649
ccacccgccccac

SEQ ID NO: 52975 - DNA, 13 bp, Artificial Sequence
  Oligonucleotide for detection of SNP TSC0014650
tgttttggttttg

SEQ ID NO: 52976 - DNA, 13 bp, Artificial Sequence
  Oligonucleotide for detection of SNP TSC0014650
caaaaccaaaaca

SEQ ID NO: 52977 - DNA, 13 bp, Artificial Sequence
  Oligonucleotide for detection of SNP TSC0014650
tgtttttgttttg

SEQ ID NO: 52978 - DNA, 13 bp, Artificial Sequence
  Oligonucleotide for detection of SNP TSC0014650
caaaacaaaaaca

SEQ ID NO: 52979 - DNA, 13 bp, Artificial Sequence
  Oligonucleotide for detection of SNP TSC0014650
tgttttggtttcg

SEQ ID NO: 52980 - DNA, 13 bp, Artificial Sequence
  Oligonucleotide for detection of SNP TSC0014650
cgaaaccaaaaca

SEQ ID NO: 52981 - DNA, 13 bp, Artificial Sequence
  Oligonucleotide for detection of SNP TSC0014650
tgtttttgtttcg

SEQ ID NO: 52982 - DNA, 13 bp, Artificial Sequence
  Oligonucleotide for detection of SNP TSC0014650
cgaaacaaaaaca

SEQ ID NO: 52983 - DNA, 13 bp, Artificial Sequence
  Oligonucleotide for detection of SNP TSC0014650
tgaggttaaggta

SEQ ID NO: 52984 - DNA, 13 bp, Artificial Sequence
  Oligonucleotide for detection of SNP TSC0014650
taccttaacctca

SEQ ID NO: 52985 - DNA, 13 bp, Artificial Sequence
  Oligonucleotide for detection of SNP TSC0014650
tgaggtaaaggta

SEQ ID NO: 52986 - DNA, 13 bp, Artificial Sequence
  Oligonucleotide for detection of SNP TSC0014650
tacctttacctca

SEQ ID NO: 52987 - DNA, 13 bp, Artificial Sequence
  Oligonucleotide for detection of SNP TSC0014650
cgaggttaaggta

SEQ ID NO: 52988 - DNA, 13 bp, Artificial Sequence
  Oligonucleotide for detection of SNP TSC0014650
taccttaacctcg

SEQ ID NO: 52989 - DNA, 13 bp, Artificial Sequence
  Oligonucleotide for detection of SNP TSC0014650
cgaggtaaaggta

SEQ ID NO: 52990 - DNA, 13 bp, Artificial Sequence
  Oligonucleotide for detection of SNP TSC0014650
tacctttacctcg

SEQ ID NO: 52991 - DNA, 13 bp, Artificial Sequence
  Oligonucleotide for detection of SNP TSC0014651
ttttaagattttt

SEQ ID NO: 52992 - DNA, 13 bp, Artificial Sequence
  Oligonucleotide for detection of SNP TSC0014651
aaaaatcttaaaa

SEQ ID NO: 52993 - DNA, 13 bp, Artificial Sequence
  Oligonucleotide for detection of SNP TSC0014651
ttttaaaattttt

SEQ ID NO: 52994 - DNA, 13 bp, Artificial Sequence
  Oligonucleotide for detection of SNP TSC0014651
aaaaattttaaaa

SEQ ID NO: 52995 - DNA, 13 bp, Artificial Sequence
  Oligonucleotide for detection of SNP TSC0014652
gagaataatgtaa

SEQ ID NO: 52996 - DNA, 13 bp, Artificial Sequence
  Oligonucleotide for detection of SNP TSC0014652
ttacattattctc

SEQ ID NO: 52997 - DNA, 13 bp, Artificial Sequence
  Oligonucleotide for detection of SNP TSC0014652
gagaatgatgtaa

SEQ ID NO: 52998 - DNA, 13 bp, Artificial Sequence
  Oligonucleotide for detection of SNP TSC0014652
ttacatcattctc

SEQ ID NO: 52999 - DNA, 13 bp, Artificial Sequence
  Oligonucleotide for detection of SNP TSC0014652
gagaacgatgtaa

SEQ ID NO: 53000 - DNA, 13 bp, Artificial Sequence
  Oligonucleotide for detection of SNP TSC0014652
ttacatcgttctc

SEQ ID NO: 53001 - DNA, 13 bp, Artificial Sequence
  Oligonucleotide for detection of SNP TSC0014652
ttgtattgtttty

SEQ ID NO: 53002 - DNA, 13 bp, Artificial Sequence
  Oligonucleotide for detection of SNP TSC0014652
raaaacaatacaa

SEQ ID NO: 53003 - DNA, 13 bp, Artificial Sequence
  Oligonucleotide for detection of SNP TSC0014652
ttgtatcgtttty

SEQ ID NO: 53004 - DNA, 13 bp, Artificial Sequence
  Oligonucleotide for detection of SNP TSC0014652
raaaacgatacaa

SEQ ID NO: 53005 - DNA, 13 bp, Artificial Sequence
  Oligonucleotide for detection of SNP TSC0014653
agttttgagttay

SEQ ID NO: 53006 - DNA, 13 bp, Artificial Sequence
  Oligonucleotide for detection of SNP TSC0014653
rtaactcaaaact

SEQ ID NO: 53007 - DNA, 13 bp, Artificial Sequence
  Oligonucleotide for detection of SNP TSC0014653
agttttaagttay

SEQ ID NO: 53008 - DNA, 13 bp, Artificial Sequence
  Oligonucleotide for detection of SNP TSC0014653
rtaacttaaaact

SEQ ID NO: 53009 - DNA, 13 bp, Artificial Sequence
  Oligonucleotide for detection of SNP TSC0014656
tttggttgtttgg

SEQ ID NO: 53010 - DNA, 13 bp, Artificial Sequence
  Oligonucleotide for detection of SNP TSC0014656
ccaaacaaccaaa

SEQ ID NO: 53011 - DNA, 13 bp, Artificial Sequence
  Oligonucleotide for detection of SNP TSC0014656
tttggtcgtttgg

SEQ ID NO: 53012 - DNA, 13 bp, Artificial Sequence
  Oligonucleotide for detection of SNP TSC0014656
ccaaacgaccaaa

SEQ ID NO: 53013 - DNA, 13 bp, Artificial Sequence
  Oligonucleotide for detection of SNP TSC0014656
ttaggtggttaaa

SEQ ID NO: 53014 - DNA, 13 bp, Artificial Sequence
  Oligonucleotide for detection of SNP TSC0014656
tttaaccacctaa

SEQ ID NO: 53015 - DNA, 13 bp, Artificial Sequence
  Oligonucleotide for detection of SNP TSC0014656
ttaggtagttaaa

SEQ ID NO: 53016 - DNA, 13 bp, Artificial Sequence
  Oligonucleotide for detection of SNP TSC0014656
tttaactacctaa

SEQ ID NO: 53017 - DNA, 13 bp, Artificial Sequence
  Oligonucleotide for detection of SNP TSC0014656
ttaggcggttaaa

SEQ ID NO: 53018 - DNA, 13 bp, Artificial Sequence
  Oligonucleotide for detection of SNP TSC0014656
tttaaccgcctaa

SEQ ID NO: 53019 - DNA, 13 bp, Artificial Sequence
  Oligonucleotide for detection of SNP TSC0014659
agagagtttggta

SEQ ID NO: 53020 - DNA, 13 bp, Artificial Sequence
  Oligonucleotide for detection of SNP TSC0014659
taccaaactctct

SEQ ID NO: 53021 - DNA, 13 bp, Artificial Sequence
  Oligonucleotide for detection of SNP TSC0014659
agagaggttggta

SEQ ID NO: 53022 - DNA, 13 bp, Artificial Sequence
  Oligonucleotide for detection of SNP TSC0014659
taccaacctctct

SEQ ID NO: 53023 - DNA, 13 bp, Artificial Sequence
  Oligonucleotide for detection of SNP TSC0014660
gtgtttataagtt

SEQ ID NO: 53024 - DNA, 13 bp, Artificial Sequence
  Oligonucleotide for detection of SNP TSC0014660
aacttataaacac

SEQ ID NO: 53025 - DNA, 13 bp, Artificial Sequence
  Oligonucleotide for detection of SNP TSC0014660
gtgtttgtaagtt

SEQ ID NO: 53026 - DNA, 13 bp, Artificial Sequence
  Oligonucleotide for detection of SNP TSC0014660
aacttacaaacac

SEQ ID NO: 53027 - DNA, 13 bp, Artificial Sequence
  Oligonucleotide for detection of SNP TSC0014660
gtgttcgtaagtt

SEQ ID NO: 53028 - DNA, 13 bp, Artificial Sequence
  Oligonucleotide for detection of SNP TSC0014660
aacttacgaacac

SEQ ID NO: 53029 - DNA, 13 bp, Artificial Sequence
  Oligonucleotide for detection of SNP TSC0014660
agtttgtggatay

SEQ ID NO: 53030 - DNA, 13 bp, Artificial Sequence
  Oligonucleotide for detection of SNP TSC0014660
rtatccacaaact

SEQ ID NO: 53031 - DNA, 13 bp, Artificial Sequence
  Oligonucleotide for detection of SNP TSC0014660
agtttgcggatay

SEQ ID NO: 53032 - DNA, 13 bp, Artificial Sequence
  Oligonucleotide for detection of SNP TSC0014660
rtatccgcaaact

SEQ ID NO: 53033 - DNA, 13 bp, Artificial Sequence
  Oligonucleotide for detection of SNP TSC0014661
ttaatagtggttt

SEQ ID NO: 53034 - DNA, 13 bp, Artificial Sequence
  Oligonucleotide for detection of SNP TSC0014661
aaaccactattaa

SEQ ID NO: 53035 - DNA, 13 bp, Artificial Sequence
  Oligonucleotide for detection of SNP TSC0014661
ttaataatggttt

SEQ ID NO: 53036 - DNA, 13 bp, Artificial Sequence
  Oligonucleotide for detection of SNP TSC0014661
aaaccattattaa

SEQ ID NO: 53037 - DNA, 13 bp, Artificial Sequence
  Oligonucleotide for detection of SNP TSC0014662
tatagggttgggt

SEQ ID NO: 53038 - DNA, 13 bp, Artificial Sequence
  Oligonucleotide for detection of SNP TSC0014662
acccaaccctata

SEQ ID NO: 53039 - DNA, 13 bp, Artificial Sequence
  Oligonucleotide for detection of SNP TSC0014662
tataggtttgggt

SEQ ID NO: 53040 - DNA, 13 bp, Artificial Sequence
  Oligonucleotide for detection of SNP TSC0014662
acccaaacctata

SEQ ID NO: 53041 - DNA, 13 bp, Artificial Sequence
  Oligonucleotide for detection of SNP TSC0014662
atttaattttgta

SEQ ID NO: 53042 - DNA, 13 bp, Artificial Sequence
  Oligonucleotide for detection of SNP TSC0014662
tacaaaattaaat

SEQ ID NO: 53043 - DNA, 13 bp, Artificial Sequence
  Oligonucleotide for detection of SNP TSC0014662
atttaaatttgta

SEQ ID NO: 53044 - DNA, 13 bp, Artificial Sequence
  Oligonucleotide for detection of SNP TSC0014662
tacaaatttaaat

SEQ ID NO: 53045 - DNA, 13 bp, Artificial Sequence
  Oligonucleotide for detection of SNP TSC0014663
aataggataataa

SEQ ID NO: 53046 - DNA, 13 bp, Artificial Sequence
  Oligonucleotide for detection of SNP TSC0014663
ttattatcctatt

SEQ ID NO: 53047 - DNA, 13 bp, Artificial Sequence
  Oligonucleotide for detection of SNP TSC0014663
aatagggtaataa

SEQ ID NO: 53048 - DNA, 13 bp, Artificial Sequence
  Oligonucleotide for detection of SNP TSC0014663
ttattaccctatt

SEQ ID NO: 53049 - DNA, 13 bp, Artificial Sequence
  Oligonucleotide for detection of SNP TSC0014665
ttttatatttatg

SEQ ID NO: 53050 - DNA, 13 bp, Artificial Sequence
  Oligonucleotide for detection of SNP TSC0014665
cataaatataaaa

SEQ ID NO: 53051 - DNA, 13 bp, Artificial Sequence
  Oligonucleotide for detection of SNP TSC0014665
ttttatgtttatg

SEQ ID NO: 53052 - DNA, 13 bp, Artificial Sequence
  Oligonucleotide for detection of SNP TSC0014665
cataaacataaaa

SEQ ID NO: 53053 - DNA, 13 bp, Artificial Sequence
  Oligonucleotide for detection of SNP TSC0014665
ttttacgtttatg

SEQ ID NO: 53054 - DNA, 13 bp, Artificial Sequence
  Oligonucleotide for detection of SNP TSC0014665
cataaacgtaaaa

SEQ ID NO: 53055 - DNA, 13 bp, Artificial Sequence
  Oligonucleotide for detection of SNP TSC0014665
tataaatgtgaaa

SEQ ID NO: 53056 - DNA, 13 bp, Artificial Sequence
  Oligonucleotide for detection of SNP TSC0014665
tttcacatttata

SEQ ID NO: 53057 - DNA, 13 bp, Artificial Sequence
  Oligonucleotide for detection of SNP TSC0014665
tataaacgtgaaa

SEQ ID NO: 53058 - DNA, 13 bp, Artificial Sequence
  Oligonucleotide for detection of SNP TSC0014665
tttcacgtttata

SEQ ID NO: 53059 - DNA, 13 bp, Artificial Sequence
  Oligonucleotide for detection of SNP TSC0014666
tttaggtgtgtgg

SEQ ID NO: 53060 - DNA, 13 bp, Artificial Sequence
  Oligonucleotide for detection of SNP TSC0014666
ccacacacctaaa

SEQ ID NO: 53061 - DNA, 13 bp, Artificial Sequence
  Oligonucleotide for detection of SNP TSC0014666
tttaggcgtgtgg

SEQ ID NO: 53062 - DNA, 13 bp, Artificial Sequence
  Oligonucleotide for detection of SNP TSC0014666
ccacacgcctaaa

SEQ ID NO: 53063 - DNA, 13 bp, Artificial Sequence
  Oligonucleotide for detection of SNP TSC0014667
aaaattattgtaa

SEQ ID NO: 53064 - DNA, 13 bp, Artificial Sequence
  Oligonucleotide for detection of SNP TSC0014667
ttacaataatttt

SEQ ID NO: 53065 - DNA, 13 bp, Artificial Sequence
  Oligonucleotide for detection of SNP TSC0014667
aaaatttttgtaa

SEQ ID NO: 53066 - DNA, 13 bp, Artificial Sequence
  Oligonucleotide for detection of SNP TSC0014667
ttacaaaaatttt

SEQ ID NO: 53067 - DNA, 13 bp, Artificial Sequence
  Oligonucleotide for detection of SNP TSC0014667
ttataataatttt

SEQ ID NO: 53068 - DNA, 13 bp, Artificial Sequence
  Oligonucleotide for detection of SNP TSC0014667
aaaattattataa

SEQ ID NO: 53069 - DNA, 13 bp, Artificial Sequence
  Oligonucleotide for detection of SNP TSC0014667
ttataagaatttt

SEQ ID NO: 53070 - DNA, 13 bp, Artificial Sequence
  Oligonucleotide for detection of SNP TSC0014667
aaaattcttataa

SEQ ID NO: 53071 - DNA, 13 bp, Artificial Sequence
  Oligonucleotide for detection of SNP TSC0014668
ttttttagttaat

SEQ ID NO: 53072 - DNA, 13 bp, Artificial Sequence
  Oligonucleotide for detection of SNP TSC0014668
attaactaaaaaa

SEQ ID NO: 53073 - DNA, 13 bp, Artificial Sequence
  Oligonucleotide for detection of SNP TSC0014668
ttttttggttaat

SEQ ID NO: 53074 - DNA, 13 bp, Artificial Sequence
  Oligonucleotide for detection of SNP TSC0014668
attaaccaaaaaa

SEQ ID NO: 53075 - DNA, 13 bp, Artificial Sequence
  Oligonucleotide for detection of SNP TSC0014668
tttttcggttaat

SEQ ID NO: 53076 - DNA, 13 bp, Artificial Sequence
  Oligonucleotide for detection of SNP TSC0014668
attaaccgaaaaa

SEQ ID NO: 53077 - DNA, 13 bp, Artificial Sequence
  Oligonucleotide for detection of SNP TSC0014668
attaattgaaaaa

SEQ ID NO: 53078 - DNA, 13 bp, Artificial Sequence
  Oligonucleotide for detection of SNP TSC0014668
tttttcaattaat

SEQ ID NO: 53079 - DNA, 13 bp, Artificial Sequence
  Oligonucleotide for detection of SNP TSC0014668
attaatcgaaaaa

SEQ ID NO: 53080 - DNA, 13 bp, Artificial Sequence
  Oligonucleotide for detection of SNP TSC0014668
tttttcgattaat

SEQ ID NO: 53081 - DNA, 13 bp, Artificial Sequence
  Oligonucleotide for detection of SNP TSC0014669
ggtgttagggttg

SEQ ID NO: 53082 - DNA, 13 bp, Artificial Sequence
  Oligonucleotide for detection of SNP TSC0014669
caaccctaacacc

SEQ ID NO: 53083 - DNA, 13 bp, Artificial Sequence
  Oligonucleotide for detection of SNP TSC0014669
ggtgttggggttg

SEQ ID NO: 53084 - DNA, 13 bp, Artificial Sequence
  Oligonucleotide for detection of SNP TSC0014669
caaccccaacacc

SEQ ID NO: 53085 - DNA, 13 bp, Artificial Sequence
  Oligonucleotide for detection of SNP TSC0014669
ggtgtcggggttg

SEQ ID NO: 53086 - DNA, 13 bp, Artificial Sequence
  Oligonucleotide for detection of SNP TSC0014669
caaccccgacacc

SEQ ID NO: 53087 - DNA, 13 bp, Artificial Sequence
  Oligonucleotide for detection of SNP TSC0014669
tagttttggtaty

SEQ ID NO: 53088 - DNA, 13 bp, Artificial Sequence
  Oligonucleotide for detection of SNP TSC0014669
rataccaaaacta

SEQ ID NO: 53089 - DNA, 13 bp, Artificial Sequence
  Oligonucleotide for detection of SNP TSC0014669
tagtttcggtaty

SEQ ID NO: 53090 - DNA, 13 bp, Artificial Sequence
  Oligonucleotide for detection of SNP TSC0014669
rataccgaaacta

SEQ ID NO: 53091 - DNA, 13 bp, Artificial Sequence
  Oligonucleotide for detection of SNP TSC0014670
attggatgttttt

SEQ ID NO: 53092 - DNA, 13 bp, Artificial Sequence
  Oligonucleotide for detection of SNP TSC0014670
aaaaacatccaat

SEQ ID NO: 53093 - DNA, 13 bp, Artificial Sequence
  Oligonucleotide for detection of SNP TSC0014670
attggaggttttt

SEQ ID NO: 53094 - DNA, 13 bp, Artificial Sequence
  Oligonucleotide for detection of SNP TSC0014670
aaaaacctccaat

SEQ ID NO: 53095 - DNA, 13 bp, Artificial Sequence
  Oligonucleotide for detection of SNP TSC0014670
attggacgttttt

SEQ ID NO: 53096 - DNA, 13 bp, Artificial Sequence
  Oligonucleotide for detection of SNP TSC0014670
aaaaacgtccaat

SEQ ID NO: 53097 - DNA, 13 bp, Artificial Sequence
  Oligonucleotide for detection of SNP TSC0014670
aggggtgtttagt

SEQ ID NO: 53098 - DNA, 13 bp, Artificial Sequence
  Oligonucleotide for detection of SNP TSC0014670
actaaacacccct

SEQ ID NO: 53099 - DNA, 13 bp, Artificial Sequence
  Oligonucleotide for detection of SNP TSC0014670
aggggtttttagt

SEQ ID NO: 53100 - DNA, 13 bp, Artificial Sequence
  Oligonucleotide for detection of SNP TSC0014670
actaaaaacccct

SEQ ID NO: 53101 - DNA, 13 bp, Artificial Sequence
  Oligonucleotide for detection of SNP TSC0014670
aggggcgtttagt

SEQ ID NO: 53102 - DNA, 13 bp, Artificial Sequence
  Oligonucleotide for detection of SNP TSC0014670
actaaacgcccct

SEQ ID NO: 53103 - DNA, 13 bp, Artificial Sequence
  Oligonucleotide for detection of SNP TSC0014671
aaaaaagggaagg

SEQ ID NO: 53104 - DNA, 13 bp, Artificial Sequence
  Oligonucleotide for detection of SNP TSC0014671
ccttccctttttt

SEQ ID NO: 53105 - DNA, 13 bp, Artificial Sequence
  Oligonucleotide for detection of SNP TSC0014671
aaaaaaaggaagg

SEQ ID NO: 53106 - DNA, 13 bp, Artificial Sequence
  Oligonucleotide for detection of SNP TSC0014671
ccttccttttttt

SEQ ID NO: 53107 - DNA, 13 bp, Artificial Sequence
  Oligonucleotide for detection of SNP TSC0014672
gagtttattttta

SEQ ID NO: 53108 - DNA, 13 bp, Artificial Sequence
  Oligonucleotide for detection of SNP TSC0014672
taaaaataaactc

SEQ ID NO: 53109 - DNA, 13 bp, Artificial Sequence
  Oligonucleotide for detection of SNP TSC0014672
gagtttgttttta

SEQ ID NO: 53110 - DNA, 13 bp, Artificial Sequence
  Oligonucleotide for detection of SNP TSC0014672
taaaaacaaactc

SEQ ID NO: 53111 - DNA, 13 bp, Artificial Sequence
  Oligonucleotide for detection of SNP TSC0014673
ttaaaagaaaagt

SEQ ID NO: 53112 - DNA, 13 bp, Artificial Sequence
  Oligonucleotide for detection of SNP TSC0014673
acttttcttttaa

SEQ ID NO: 53113 - DNA, 13 bp, Artificial Sequence
  Oligonucleotide for detection of SNP TSC0014673
ttaaaaaaaaagt

SEQ ID NO: 53114 - DNA, 13 bp, Artificial Sequence
  Oligonucleotide for detection of SNP TSC0014673
actttttttttaa

SEQ ID NO: 53115 - DNA, 13 bp, Artificial Sequence
  Oligonucleotide for detection of SNP TSC0014674
tttggagggggga

SEQ ID NO: 53116 - DNA, 13 bp, Artificial Sequence
  Oligonucleotide for detection of SNP TSC0014674
tcccccctccaaa

SEQ ID NO: 53117 - DNA, 13 bp, Artificial Sequence
  Oligonucleotide for detection of SNP TSC0014674
tttggatggggga

SEQ ID NO: 53118 - DNA, 13 bp, Artificial Sequence
  Oligonucleotide for detection of SNP TSC0014674
tcccccatccaaa

SEQ ID NO: 53119 - DNA, 13 bp, Artificial Sequence
  Oligonucleotide for detection of SNP TSC0014675
attttataggtaa

SEQ ID NO: 53120 - DNA, 13 bp, Artificial Sequence
  Oligonucleotide for detection of SNP TSC0014675
ttacctataaaat

SEQ ID NO: 53121 - DNA, 13 bp, Artificial Sequence
  Oligonucleotide for detection of SNP TSC0014675
attttagaggtaa

SEQ ID NO: 53122 - DNA, 13 bp, Artificial Sequence
  Oligonucleotide for detection of SNP TSC0014675
ttacctctaaaat

SEQ ID NO: 53123 - DNA, 13 bp, Artificial Sequence
  Oligonucleotide for detection of SNP TSC0014675
ttgtttgtggaat

SEQ ID NO: 53124 - DNA, 13 bp, Artificial Sequence
  Oligonucleotide for detection of SNP TSC0014675
attccacaaacaa

SEQ ID NO: 53125 - DNA, 13 bp, Artificial Sequence
  Oligonucleotide for detection of SNP TSC0014675
ttgtttttggaat

SEQ ID NO: 53126 - DNA, 13 bp, Artificial Sequence
  Oligonucleotide for detection of SNP TSC0014675
attccaaaaacaa

SEQ ID NO: 53127 - DNA, 13 bp, Artificial Sequence
  Oligonucleotide for detection of SNP TSC0014676
ttgggagagtaat

SEQ ID NO: 53128 - DNA, 13 bp, Artificial Sequence
  Oligonucleotide for detection of SNP TSC0014676
attactctcccaa

SEQ ID NO: 53129 - DNA, 13 bp, Artificial Sequence
  Oligonucleotide for detection of SNP TSC0014676
ttgggaaagtaat

SEQ ID NO: 53130 - DNA, 13 bp, Artificial Sequence
  Oligonucleotide for detection of SNP TSC0014676
attactttcccaa

SEQ ID NO: 53131 - DNA, 13 bp, Artificial Sequence
  Oligonucleotide for detection of SNP TSC0014677
ttttagagtttta

SEQ ID NO: 53132 - DNA, 13 bp, Artificial Sequence
  Oligonucleotide for detection of SNP TSC0014677
taaaactctaaaa

SEQ ID NO: 53133 - DNA, 13 bp, Artificial Sequence
  Oligonucleotide for detection of SNP TSC0014677
ttttagggtttta

SEQ ID NO: 53134 - DNA, 13 bp, Artificial Sequence
  Oligonucleotide for detection of SNP TSC0014677
taaaaccctaaaa

SEQ ID NO: 53135 - DNA, 13 bp, Artificial Sequence
  Oligonucleotide for detection of SNP TSC0014678
tgttttagtggty

SEQ ID NO: 53136 - DNA, 13 bp, Artificial Sequence
  Oligonucleotide for detection of SNP TSC0014678
raccactaaaaca

SEQ ID NO: 53137 - DNA, 13 bp, Artificial Sequence
  Oligonucleotide for detection of SNP TSC0014678
tgttttggtggty

SEQ ID NO: 53138 - DNA, 13 bp, Artificial Sequence
  Oligonucleotide for detection of SNP TSC0014678
raccaccaaaaca

SEQ ID NO: 53139 - DNA, 13 bp, Artificial Sequence
  Oligonucleotide for detection of SNP TSC0014678
tgtttcggtggty

SEQ ID NO: 53140 - DNA, 13 bp, Artificial Sequence
  Oligonucleotide for detection of SNP TSC0014678
raccaccgaaaca

SEQ ID NO: 53141 - DNA, 13 bp, Artificial Sequence
  Oligonucleotide for detection of SNP TSC0014678
ggttattgagata

SEQ ID NO: 53142 - DNA, 13 bp, Artificial Sequence
  Oligonucleotide for detection of SNP TSC0014678
tatctcaataacc

SEQ ID NO: 53143 - DNA, 13 bp, Artificial Sequence
  Oligonucleotide for detection of SNP TSC0014678
ggttatcgagata

SEQ ID NO: 53144 - DNA, 13 bp, Artificial Sequence
  Oligonucleotide for detection of SNP TSC0014678
tatctcgataacc

SEQ ID NO: 53145 - DNA, 13 bp, Artificial Sequence
  Oligonucleotide for detection of SNP TSC0014679
ttgttgtgaaggy

SEQ ID NO: 53146 - DNA, 13 bp, Artificial Sequence
  Oligonucleotide for detection of SNP TSC0014679
rccttcacaacaa

SEQ ID NO: 53147 - DNA, 13 bp, Artificial Sequence
  Oligonucleotide for detection of SNP TSC0014679
ttgttgcgaaggy

SEQ ID NO: 53148 - DNA, 13 bp, Artificial Sequence
  Oligonucleotide for detection of SNP TSC0014679
rccttcgcaacaa

SEQ ID NO: 53149 - DNA, 13 bp, Artificial Sequence
  Oligonucleotide for detection of SNP TSC0014679
gtttttgtagtaa

SEQ ID NO: 53150 - DNA, 13 bp, Artificial Sequence
  Oligonucleotide for detection of SNP TSC0014679
ttactacaaaaac

SEQ ID NO: 53151 - DNA, 13 bp, Artificial Sequence
  Oligonucleotide for detection of SNP TSC0014679
gtttttatagtaa

SEQ ID NO: 53152 - DNA, 13 bp, Artificial Sequence
  Oligonucleotide for detection of SNP TSC0014679
ttactataaaaac

SEQ ID NO: 53153 - DNA, 13 bp, Artificial Sequence
  Oligonucleotide for detection of SNP TSC0014679
gttttcgtagtaa

SEQ ID NO: 53154 - DNA, 13 bp, Artificial Sequence
  Oligonucleotide for detection of SNP TSC0014679
ttactacgaaaac

SEQ ID NO: 53155 - DNA, 13 bp, Artificial Sequence
  Oligonucleotide for detection of SNP TSC0014682
ttaggtgtattta

SEQ ID NO: 53156 - DNA, 13 bp, Artificial Sequence
  Oligonucleotide for detection of SNP TSC0014682
taaatacacctaa

SEQ ID NO: 53157 - DNA, 13 bp, Artificial Sequence
  Oligonucleotide for detection of SNP TSC0014682
ttaggtatattta

SEQ ID NO: 53158 - DNA, 13 bp, Artificial Sequence
  Oligonucleotide for detection of SNP TSC0014682
taaatatacctaa

SEQ ID NO: 53159 - DNA, 13 bp, Artificial Sequence
  Oligonucleotide for detection of SNP TSC0014687
agaggaattggtt

SEQ ID NO: 53160 - DNA, 13 bp, Artificial Sequence
  Oligonucleotide for detection of SNP TSC0014687
aaccaattcctct

SEQ ID NO: 53161 - DNA, 13 bp, Artificial Sequence
  Oligonucleotide for detection of SNP TSC0014687
agaggagttggtt

SEQ ID NO: 53162 - DNA, 13 bp, Artificial Sequence
  Oligonucleotide for detection of SNP TSC0014687
aaccaactcctct

SEQ ID NO: 53163 - DNA, 13 bp, Artificial Sequence
  Oligonucleotide for detection of SNP TSC0014688
aatgtttgtagay

SEQ ID NO: 53164 - DNA, 13 bp, Artificial Sequence
  Oligonucleotide for detection of SNP TSC0014688
rtctacaaacatt

SEQ ID NO: 53165 - DNA, 13 bp, Artificial Sequence
  Oligonucleotide for detection of SNP TSC0014688
aatgttcgtagay

SEQ ID NO: 53166 - DNA, 13 bp, Artificial Sequence
  Oligonucleotide for detection of SNP TSC0014688
rtctacgaacatt

SEQ ID NO: 53167 - DNA, 13 bp, Artificial Sequence
  Oligonucleotide for detection of SNP TSC0014688
gtttgtgaatatt

SEQ ID NO: 53168 - DNA, 13 bp, Artificial Sequence
  Oligonucleotide for detection of SNP TSC0014688
aatattcacaaac

SEQ ID NO: 53169 - DNA, 13 bp, Artificial Sequence
  Oligonucleotide for detection of SNP TSC0014688
gtttgtaaatatt

SEQ ID NO: 53170 - DNA, 13 bp, Artificial Sequence
  Oligonucleotide for detection of SNP TSC0014688
aatatttacaaac

SEQ ID NO: 53171 - DNA, 13 bp, Artificial Sequence
  Oligonucleotide for detection of SNP TSC0014688
gtttgcgaatatt

SEQ ID NO: 53172 - DNA, 13 bp, Artificial Sequence
  Oligonucleotide for detection of SNP TSC0014688
aatattcgcaaac

SEQ ID NO: 53173 - DNA, 13 bp, Artificial Sequence
  Oligonucleotide for detection of SNP TSC0014689
agttataataagy

SEQ ID NO: 53174 - DNA, 13 bp, Artificial Sequence
  Oligonucleotide for detection of SNP TSC0014689
rcttattataact

SEQ ID NO: 53175 - DNA, 13 bp, Artificial Sequence
  Oligonucleotide for detection of SNP TSC0014689
agttattataagy

SEQ ID NO: 53176 - DNA, 13 bp, Artificial Sequence
  Oligonucleotide for detection of SNP TSC0014689
rcttataataact

SEQ ID NO: 53177 - DNA, 13 bp, Artificial Sequence
  Oligonucleotide for detection of SNP TSC0014689
gtttgttatgatt

SEQ ID NO: 53178 - DNA, 13 bp, Artificial Sequence
  Oligonucleotide for detection of SNP TSC0014689
aatcataacaaac

SEQ ID NO: 53179 - DNA, 13 bp, Artificial Sequence
  Oligonucleotide for detection of SNP TSC0014689
gtttgtaatgatt

SEQ ID NO: 53180 - DNA, 13 bp, Artificial Sequence
  Oligonucleotide for detection of SNP TSC0014689
aatcattacaaac

SEQ ID NO: 53181 - DNA, 13 bp, Artificial Sequence
  Oligonucleotide for detection of SNP TSC0014695
ggagagttttgty

SEQ ID NO: 53182 - DNA, 13 bp, Artificial Sequence
  Oligonucleotide for detection of SNP TSC0014695
racaaaactctcc

SEQ ID NO: 53183 - DNA, 13 bp, Artificial Sequence
  Oligonucleotide for detection of SNP TSC0014695
ggagaggtttgty

SEQ ID NO: 53184 - DNA, 13 bp, Artificial Sequence
  Oligonucleotide for detection of SNP TSC0014695
racaaacctctcc

SEQ ID NO: 53185 - DNA, 13 bp, Artificial Sequence
  Oligonucleotide for detection of SNP TSC0014695
ggtaaggttttty

SEQ ID NO: 53186 - DNA, 13 bp, Artificial Sequence
  Oligonucleotide for detection of SNP TSC0014695
raaaaaccttacc

SEQ ID NO: 53187 - DNA, 13 bp, Artificial Sequence
  Oligonucleotide for detection of SNP TSC0014695
ggtaagtttttty

SEQ ID NO: 53188 - DNA, 13 bp, Artificial Sequence
  Oligonucleotide for detection of SNP TSC0014695
raaaaaacttacc

SEQ ID NO: 53189 - DNA, 13 bp, Artificial Sequence
  Oligonucleotide for detection of SNP TSC0014696
ttttgggatgggg

SEQ ID NO: 53190 - DNA, 13 bp, Artificial Sequence
  Oligonucleotide for detection of SNP TSC0014696
ccccatcccaaaa

SEQ ID NO: 53191 - DNA, 13 bp, Artificial Sequence
  Oligonucleotide for detection of SNP TSC0014696
ttttggaatgggg

SEQ ID NO: 53192 - DNA, 13 bp, Artificial Sequence
  Oligonucleotide for detection of SNP TSC0014696
ccccattccaaaa

SEQ ID NO: 53193 - DNA, 13 bp, Artificial Sequence
  Oligonucleotide for detection of SNP TSC0014697
gattttgaggagg

SEQ ID NO: 53194 - DNA, 13 bp, Artificial Sequence
  Oligonucleotide for detection of SNP TSC0014697
cctcctcaaaatc

SEQ ID NO: 53195 - DNA, 13 bp, Artificial Sequence
  Oligonucleotide for detection of SNP TSC0014697
gattttaaggagg

SEQ ID NO: 53196 - DNA, 13 bp, Artificial Sequence
  Oligonucleotide for detection of SNP TSC0014697
cctccttaaaatc

SEQ ID NO: 53197 - DNA, 13 bp, Artificial Sequence
  Oligonucleotide for detection of SNP TSC0014698
gaagggagagtta

SEQ ID NO: 53198 - DNA, 13 bp, Artificial Sequence
  Oligonucleotide for detection of SNP TSC0014698
taactctcccttc

SEQ ID NO: 53199 - DNA, 13 bp, Artificial Sequence
  Oligonucleotide for detection of SNP TSC0014698
gaagggggagtta

SEQ ID NO: 53200 - DNA, 13 bp, Artificial Sequence
  Oligonucleotide for detection of SNP TSC0014698
taactcccccttc

SEQ ID NO: 53201 - DNA, 13 bp, Artificial Sequence
  Oligonucleotide for detection of SNP TSC0014700
ttattcgttttta

SEQ ID NO: 53202 - DNA, 13 bp, Artificial Sequence
  Oligonucleotide for detection of SNP TSC0014700
taaaaacgaataa

SEQ ID NO: 53203 - DNA, 13 bp, Artificial Sequence
  Oligonucleotide for detection of SNP TSC0014700
tagggatgaatga

SEQ ID NO: 53204 - DNA, 13 bp, Artificial Sequence
  Oligonucleotide for detection of SNP TSC0014700
tcattcatcccta

SEQ ID NO: 53205 - DNA, 13 bp, Artificial Sequence
  Oligonucleotide for detection of SNP TSC0014700
tagggacgaatga

SEQ ID NO: 53206 - DNA, 13 bp, Artificial Sequence
  Oligonucleotide for detection of SNP TSC0014700
tcattcgtcccta

SEQ ID NO: 53207 - DNA, 13 bp, Artificial Sequence
  Oligonucleotide for detection of SNP TSC0014701
atatgaattaggg

SEQ ID NO: 53208 - DNA, 13 bp, Artificial Sequence
  Oligonucleotide for detection of SNP TSC0014701
ccctaattcatat

SEQ ID NO: 53209 - DNA, 13 bp, Artificial Sequence
  Oligonucleotide for detection of SNP TSC0014701
atatgagttaggg

SEQ ID NO: 53210 - DNA, 13 bp, Artificial Sequence
  Oligonucleotide for detection of SNP TSC0014701
ccctaactcatat

SEQ ID NO: 53211 - DNA, 13 bp, Artificial Sequence
  Oligonucleotide for detection of SNP TSC0014702
gtgaagttagtty

SEQ ID NO: 53212 - DNA, 13 bp, Artificial Sequence
  Oligonucleotide for detection of SNP TSC0014702
raactaacttcac

SEQ ID NO: 53213 - DNA, 13 bp, Artificial Sequence
  Oligonucleotide for detection of SNP TSC0014702
gtgaaggtagtty

SEQ ID NO: 53214 - DNA, 13 bp, Artificial Sequence
  Oligonucleotide for detection of SNP TSC0014702
raactaccttcac

SEQ ID NO: 53215 - DNA, 13 bp, Artificial Sequence
  Oligonucleotide for detection of SNP TSC0014702
gggttggttttay

SEQ ID NO: 53216 - DNA, 13 bp, Artificial Sequence
  Oligonucleotide for detection of SNP TSC0014702
rtaaaaccaaccc

SEQ ID NO: 53217 - DNA, 13 bp, Artificial Sequence
  Oligonucleotide for detection of SNP TSC0014702
gggttgtttttay

SEQ ID NO: 53218 - DNA, 13 bp, Artificial Sequence
  Oligonucleotide for detection of SNP TSC0014702
rtaaaaacaaccc

SEQ ID NO: 53219 - DNA, 13 bp, Artificial Sequence
  Oligonucleotide for detection of SNP TSC0014704
taatttatttgga

SEQ ID NO: 53220 - DNA, 13 bp, Artificial Sequence
  Oligonucleotide for detection of SNP TSC0014704
tccaaataaatta

SEQ ID NO: 53221 - DNA, 13 bp, Artificial Sequence
  Oligonucleotide for detection of SNP TSC0014704
taatttgtttgga

SEQ ID NO: 53222 - DNA, 13 bp, Artificial Sequence
  Oligonucleotide for detection of SNP TSC0014704
tccaaacaaatta

SEQ ID NO: 53223 - DNA, 13 bp, Artificial Sequence
  Oligonucleotide for detection of SNP TSC0014704
taattcgtttgga

SEQ ID NO: 53224 - DNA, 13 bp, Artificial Sequence
  Oligonucleotide for detection of SNP TSC0014704
tccaaacgaatta

SEQ ID NO: 53225 - DNA, 13 bp, Artificial Sequence
  Oligonucleotide for detection of SNP TSC0014704
tttagatggatta

SEQ ID NO: 53226 - DNA, 13 bp, Artificial Sequence
  Oligonucleotide for detection of SNP TSC0014704
taatccatctaaa

SEQ ID NO: 53227 - DNA, 13 bp, Artificial Sequence
  Oligonucleotide for detection of SNP TSC0014704
tttagacggatta

SEQ ID NO: 53228 - DNA, 13 bp, Artificial Sequence
  Oligonucleotide for detection of SNP TSC0014704
taatccgtctaaa

SEQ ID NO: 53229 - DNA, 13 bp, Artificial Sequence
  Oligonucleotide for detection of SNP TSC0014705
ttatttttattga

SEQ ID NO: 53230 - DNA, 13 bp, Artificial Sequence
  Oligonucleotide for detection of SNP TSC0014705
tcaataaaaataa

SEQ ID NO: 53231 - DNA, 13 bp, Artificial Sequence
  Oligonucleotide for detection of SNP TSC0014705
ttatttgtattga

SEQ ID NO: 53232 - DNA, 13 bp, Artificial Sequence
  Oligonucleotide for detection of SNP TSC0014705
tcaatacaaataa

SEQ ID NO: 53233 - DNA, 13 bp, Artificial Sequence
  Oligonucleotide for detection of SNP TSC0014705
ttagtggaaataa

SEQ ID NO: 53234 - DNA, 13 bp, Artificial Sequence
  Oligonucleotide for detection of SNP TSC0014705
ttatttccactaa

SEQ ID NO: 53235 - DNA, 13 bp, Artificial Sequence
  Oligonucleotide for detection of SNP TSC0014705
ttagtgtaaataa

SEQ ID NO: 53236 - DNA, 13 bp, Artificial Sequence
  Oligonucleotide for detection of SNP TSC0014705
ttatttacactaa

SEQ ID NO: 53237 - DNA, 13 bp, Artificial Sequence
  Oligonucleotide for detection of SNP TSC0014706
taaaatattatty

SEQ ID NO: 53238 - DNA, 13 bp, Artificial Sequence
  Oligonucleotide for detection of SNP TSC0014706
raataatatttta

SEQ ID NO: 53239 - DNA, 13 bp, Artificial Sequence
  Oligonucleotide for detection of SNP TSC0014706
taaaatgttatty

SEQ ID NO: 53240 - DNA, 13 bp, Artificial Sequence
  Oligonucleotide for detection of SNP TSC0014706
raataacatttta

SEQ ID NO: 53241 - DNA, 13 bp, Artificial Sequence
  Oligonucleotide for detection of SNP TSC0014708
aaaattgtgtaag

SEQ ID NO: 53242 - DNA, 13 bp, Artificial Sequence
  Oligonucleotide for detection of SNP TSC0014708
cttacacaatttt

SEQ ID NO: 53243 - DNA, 13 bp, Artificial Sequence
  Oligonucleotide for detection of SNP TSC0014708
aaaattatgtaag

SEQ ID NO: 53244 - DNA, 13 bp, Artificial Sequence
  Oligonucleotide for detection of SNP TSC0014708
cttacataatttt

SEQ ID NO: 53245 - DNA, 13 bp, Artificial Sequence
  Oligonucleotide for detection of SNP TSC0014709
ggtaaaaattttt

SEQ ID NO: 53246 - DNA, 13 bp, Artificial Sequence
  Oligonucleotide for detection of SNP TSC0014709
aaaaatttttacc

SEQ ID NO: 53247 - DNA, 13 bp, Artificial Sequence
  Oligonucleotide for detection of SNP TSC0014709
ggtaaatattttt

SEQ ID NO: 53248 - DNA, 13 bp, Artificial Sequence
  Oligonucleotide for detection of SNP TSC0014709
aaaaatatttacc

SEQ ID NO: 53249 - DNA, 13 bp, Artificial Sequence
  Oligonucleotide for detection of SNP TSC0014709
aaaaatttttgty

SEQ ID NO: 53250 - DNA, 13 bp, Artificial Sequence
  Oligonucleotide for detection of SNP TSC0014709
racaaaaattttt

SEQ ID NO: 53251 - DNA, 13 bp, Artificial Sequence
  Oligonucleotide for detection of SNP TSC0014709
aaaaatgtttgty

SEQ ID NO: 53252 - DNA, 13 bp, Artificial Sequence
  Oligonucleotide for detection of SNP TSC0014709
racaaacattttt

SEQ ID NO: 53253 - DNA, 13 bp, Artificial Sequence
  Oligonucleotide for detection of SNP TSC0014710
attgttagggttt

SEQ ID NO: 53254 - DNA, 13 bp, Artificial Sequence
  Oligonucleotide for detection of SNP TSC0014710
aaaccctaacaat

SEQ ID NO: 53255 - DNA, 13 bp, Artificial Sequence
  Oligonucleotide for detection of SNP TSC0014710
attgttggggttt

SEQ ID NO: 53256 - DNA, 13 bp, Artificial Sequence
  Oligonucleotide for detection of SNP TSC0014710
aaaccccaacaat

SEQ ID NO: 53257 - DNA, 13 bp, Artificial Sequence
  Oligonucleotide for detection of SNP TSC0014710
attgtcggggttt

SEQ ID NO: 53258 - DNA, 13 bp, Artificial Sequence
  Oligonucleotide for detection of SNP TSC0014710
aaaccccgacaat

SEQ ID NO: 53259 - DNA, 13 bp, Artificial Sequence
  Oligonucleotide for detection of SNP TSC0014710
aggttttgatagt

SEQ ID NO: 53260 - DNA, 13 bp, Artificial Sequence
  Oligonucleotide for detection of SNP TSC0014710
actatcaaaacct

SEQ ID NO: 53261 - DNA, 13 bp, Artificial Sequence
  Oligonucleotide for detection of SNP TSC0014710
aggtttcgatagt

SEQ ID NO: 53262 - DNA, 13 bp, Artificial Sequence
  Oligonucleotide for detection of SNP TSC0014710
actatcgaaacct

SEQ ID NO: 53263 - DNA, 13 bp, Artificial Sequence
  Oligonucleotide for detection of SNP TSC0014711
tttaggatatggt

SEQ ID NO: 53264 - DNA, 13 bp, Artificial Sequence
  Oligonucleotide for detection of SNP TSC0014711
accatatcctaaa

SEQ ID NO: 53265 - DNA, 13 bp, Artificial Sequence
  Oligonucleotide for detection of SNP TSC0014711
tttaggttatggt

SEQ ID NO: 53266 - DNA, 13 bp, Artificial Sequence
  Oligonucleotide for detection of SNP TSC0014711
accataacctaaa

SEQ ID NO: 53267 - DNA, 13 bp, Artificial Sequence
  Oligonucleotide for detection of SNP TSC0014711
attatgttttgga

SEQ ID NO: 53268 - DNA, 13 bp, Artificial Sequence
  Oligonucleotide for detection of SNP TSC0014711
tccaaaacataat

SEQ ID NO: 53269 - DNA, 13 bp, Artificial Sequence
  Oligonucleotide for detection of SNP TSC0014711
attatggtttgga

SEQ ID NO: 53270 - DNA, 13 bp, Artificial Sequence
  Oligonucleotide for detection of SNP TSC0014711
tccaaaccataat

SEQ ID NO: 53271 - DNA, 13 bp, Artificial Sequence
  Oligonucleotide for detection of SNP TSC0014712
aattgtataagtt

SEQ ID NO: 53272 - DNA, 13 bp, Artificial Sequence
  Oligonucleotide for detection of SNP TSC0014712
aacttatacaatt

SEQ ID NO: 53273 - DNA, 13 bp, Artificial Sequence
  Oligonucleotide for detection of SNP TSC0014712
aattgtgtaagtt

SEQ ID NO: 53274 - DNA, 13 bp, Artificial Sequence
  Oligonucleotide for detection of SNP TSC0014712
aacttacacaatt

SEQ ID NO: 53275 - DNA, 13 bp, Artificial Sequence
  Oligonucleotide for detection of SNP TSC0014712
aattgcgtaagtt

SEQ ID NO: 53276 - DNA, 13 bp, Artificial Sequence
  Oligonucleotide for detection of SNP TSC0014712
aacttacgcaatt

SEQ ID NO: 53277 - DNA, 13 bp, Artificial Sequence
  Oligonucleotide for detection of SNP TSC0014712
aatttatgtaatt

SEQ ID NO: 53278 - DNA, 13 bp, Artificial Sequence
  Oligonucleotide for detection of SNP TSC0014712
aattacataaatt

SEQ ID NO: 53279 - DNA, 13 bp, Artificial Sequence
  Oligonucleotide for detection of SNP TSC0014712
aatttacgtaatt

SEQ ID NO: 53280 - DNA, 13 bp, Artificial Sequence
  Oligonucleotide for detection of SNP TSC0014712
aattacgtaaatt

SEQ ID NO: 53281 - DNA, 13 bp, Artificial Sequence
  Oligonucleotide for detection of SNP TSC0014713
ttgggaggaattt

SEQ ID NO: 53282 - DNA, 13 bp, Artificial Sequence
  Oligonucleotide for detection of SNP TSC0014713
aaattcctcccaa

SEQ ID NO: 53283 - DNA, 13 bp, Artificial Sequence
  Oligonucleotide for detection of SNP TSC0014713
ttgggaagaattt

SEQ ID NO: 53284 - DNA, 13 bp, Artificial Sequence
  Oligonucleotide for detection of SNP TSC0014713
aaattcttcccaa

SEQ ID NO: 53285 - DNA, 13 bp, Artificial Sequence
  Oligonucleotide for detection of SNP TSC0014714
atttgggaggtag

SEQ ID NO: 53286 - DNA, 13 bp, Artificial Sequence
  Oligonucleotide for detection of SNP TSC0014714
ctacctcccaaat

SEQ ID NO: 53287 - DNA, 13 bp, Artificial Sequence
  Oligonucleotide for detection of SNP TSC0014714
atttggaaggtag

SEQ ID NO: 53288 - DNA, 13 bp, Artificial Sequence
  Oligonucleotide for detection of SNP TSC0014714
ctaccttccaaat

SEQ ID NO: 53289 - DNA, 13 bp, Artificial Sequence
  Oligonucleotide for detection of SNP TSC0014718
gttgtggtatatg

SEQ ID NO: 53290 - DNA, 13 bp, Artificial Sequence
  Oligonucleotide for detection of SNP TSC0014718
catataccacaac

SEQ ID NO: 53291 - DNA, 13 bp, Artificial Sequence
  Oligonucleotide for detection of SNP TSC0014718
gttgtgatatatg

SEQ ID NO: 53292 - DNA, 13 bp, Artificial Sequence
  Oligonucleotide for detection of SNP TSC0014718
catatatcacaac

SEQ ID NO: 53293 - DNA, 13 bp, Artificial Sequence
  Oligonucleotide for detection of SNP TSC0014719
tagataattttgy

SEQ ID NO: 53294 - DNA, 13 bp, Artificial Sequence
  Oligonucleotide for detection of SNP TSC0014719
rcaaaattatcta

SEQ ID NO: 53295 - DNA, 13 bp, Artificial Sequence
  Oligonucleotide for detection of SNP TSC0014719
tagatagttttgy

SEQ ID NO: 53296 - DNA, 13 bp, Artificial Sequence
  Oligonucleotide for detection of SNP TSC0014719
rcaaaactatcta

SEQ ID NO: 53297 - DNA, 13 bp, Artificial Sequence
  Oligonucleotide for detection of SNP TSC0014720
tagttattatatg

SEQ ID NO: 53298 - DNA, 13 bp, Artificial Sequence
  Oligonucleotide for detection of SNP TSC0014720
catataataacta

SEQ ID NO: 53299 - DNA, 13 bp, Artificial Sequence
  Oligonucleotide for detection of SNP TSC0014720
tagttagtatatg

SEQ ID NO: 53300 - DNA, 13 bp, Artificial Sequence
  Oligonucleotide for detection of SNP TSC0014720
catatactaacta

SEQ ID NO: 53301 - DNA, 13 bp, Artificial Sequence
  Oligonucleotide for detection of SNP TSC0014720
tatatagtgattg

SEQ ID NO: 53302 - DNA, 13 bp, Artificial Sequence
  Oligonucleotide for detection of SNP TSC0014720
caatcactatata

SEQ ID NO: 53303 - DNA, 13 bp, Artificial Sequence
  Oligonucleotide for detection of SNP TSC0014720
tatatattgattg

SEQ ID NO: 53304 - DNA, 13 bp, Artificial Sequence
  Oligonucleotide for detection of SNP TSC0014720
caatcaatatata

SEQ ID NO: 53305 - DNA, 13 bp, Artificial Sequence
  Oligonucleotide for detection of SNP TSC0014721
gtaagttgtaatg

SEQ ID NO: 53306 - DNA, 13 bp, Artificial Sequence
  Oligonucleotide for detection of SNP TSC0014721
cattacaacttac

SEQ ID NO: 53307 - DNA, 13 bp, Artificial Sequence
  Oligonucleotide for detection of SNP TSC0014721
gtaagtcgtaatg

SEQ ID NO: 53308 - DNA, 13 bp, Artificial Sequence
  Oligonucleotide for detection of SNP TSC0014721
cattacgacttac

SEQ ID NO: 53309 - DNA, 13 bp, Artificial Sequence
  Oligonucleotide for detection of SNP TSC0014721
tattatgatttgy

SEQ ID NO: 53310 - DNA, 13 bp, Artificial Sequence
  Oligonucleotide for detection of SNP TSC0014721
rcaaatcataata

SEQ ID NO: 53311 - DNA, 13 bp, Artificial Sequence
  Oligonucleotide for detection of SNP TSC0014721
tattataatttgy

SEQ ID NO: 53312 - DNA, 13 bp, Artificial Sequence
  Oligonucleotide for detection of SNP TSC0014721
rcaaattataata

SEQ ID NO: 53313 - DNA, 13 bp, Artificial Sequence
  Oligonucleotide for detection of SNP TSC0014721
tattacgatttgy

SEQ ID NO: 53314 - DNA, 13 bp, Artificial Sequence
  Oligonucleotide for detection of SNP TSC0014721
rcaaatcgtaata

SEQ ID NO: 53315 - DNA, 13 bp, Artificial Sequence
  Oligonucleotide for detection of SNP TSC0014724
tttgagaaaataa

SEQ ID NO: 53316 - DNA, 13 bp, Artificial Sequence
  Oligonucleotide for detection of SNP TSC0014724
ttattttctcaaa

SEQ ID NO: 53317 - DNA, 13 bp, Artificial Sequence
  Oligonucleotide for detection of SNP TSC0014724
tttgagtaaataa

SEQ ID NO: 53318 - DNA, 13 bp, Artificial Sequence
  Oligonucleotide for detection of SNP TSC0014724
ttatttactcaaa

SEQ ID NO: 53319 - DNA, 13 bp, Artificial Sequence
  Oligonucleotide for detection of SNP TSC0014725
ttgtttgagtttt

SEQ ID NO: 53320 - DNA, 13 bp, Artificial Sequence
  Oligonucleotide for detection of SNP TSC0014725
aaaactcaaacaa

SEQ ID NO: 53321 - DNA, 13 bp, Artificial Sequence
  Oligonucleotide for detection of SNP TSC0014725
ttgttttagtttt

SEQ ID NO: 53322 - DNA, 13 bp, Artificial Sequence
  Oligonucleotide for detection of SNP TSC0014725
aaaactaaaacaa

SEQ ID NO: 53323 - DNA, 13 bp, Artificial Sequence
  Oligonucleotide for detection of SNP TSC0014725
aaaatttaaatag

SEQ ID NO: 53324 - DNA, 13 bp, Artificial Sequence
  Oligonucleotide for detection of SNP TSC0014725
ctatttaaatttt

SEQ ID NO: 53325 - DNA, 13 bp, Artificial Sequence
  Oligonucleotide for detection of SNP TSC0014725
aaaattaaaatag

SEQ ID NO: 53326 - DNA, 13 bp, Artificial Sequence
  Oligonucleotide for detection of SNP TSC0014725
ctattttaatttt

SEQ ID NO: 53327 - DNA, 13 bp, Artificial Sequence
  Oligonucleotide for detection of SNP TSC0014728
gtggttaggaata

SEQ ID NO: 53328 - DNA, 13 bp, Artificial Sequence
  Oligonucleotide for detection of SNP TSC0014728
tattcctaaccac

SEQ ID NO: 53329 - DNA, 13 bp, Artificial Sequence
  Oligonucleotide for detection of SNP TSC0014728
gtggttgggaata

SEQ ID NO: 53330 - DNA, 13 bp, Artificial Sequence
  Oligonucleotide for detection of SNP TSC0014728
tattcccaaccac

SEQ ID NO: 53331 - DNA, 13 bp, Artificial Sequence
  Oligonucleotide for detection of SNP TSC0014729
taagttgttgttt

SEQ ID NO: 53332 - DNA, 13 bp, Artificial Sequence
  Oligonucleotide for detection of SNP TSC0014729
aaacaacaactta

SEQ ID NO: 53333 - DNA, 13 bp, Artificial Sequence
  Oligonucleotide for detection of SNP TSC0014729
taagtttttgttt

SEQ ID NO: 53334 - DNA, 13 bp, Artificial Sequence
  Oligonucleotide for detection of SNP TSC0014729
aaacaaaaactta

SEQ ID NO: 53335 - DNA, 13 bp, Artificial Sequence
  Oligonucleotide for detection of SNP TSC0014729
taagtcgttgttt

SEQ ID NO: 53336 - DNA, 13 bp, Artificial Sequence
  Oligonucleotide for detection of SNP TSC0014729
aaacaacgactta

SEQ ID NO: 53337 - DNA, 13 bp, Artificial Sequence
  Oligonucleotide for detection of SNP TSC0014729
aagtagtggtttg

SEQ ID NO: 53338 - DNA, 13 bp, Artificial Sequence
  Oligonucleotide for detection of SNP TSC0014729
caaaccactactt

SEQ ID NO: 53339 - DNA, 13 bp, Artificial Sequence
  Oligonucleotide for detection of SNP TSC0014729
aagtagaggtttg

SEQ ID NO: 53340 - DNA, 13 bp, Artificial Sequence
  Oligonucleotide for detection of SNP TSC0014729
caaacctctactt

SEQ ID NO: 53341 - DNA, 13 bp, Artificial Sequence
  Oligonucleotide for detection of SNP TSC0014729
aagtagcggtttg

SEQ ID NO: 53342 - DNA, 13 bp, Artificial Sequence
  Oligonucleotide for detection of SNP TSC0014729
caaaccgctactt

SEQ ID NO: 53343 - DNA, 13 bp, Artificial Sequence
  Oligonucleotide for detection of SNP TSC0014730
attattatttaag

SEQ ID NO: 53344 - DNA, 13 bp, Artificial Sequence
  Oligonucleotide for detection of SNP TSC0014730
cttaaataataat

SEQ ID NO: 53345 - DNA, 13 bp, Artificial Sequence
  Oligonucleotide for detection of SNP TSC0014730
attattgtttaag

SEQ ID NO: 53346 - DNA, 13 bp, Artificial Sequence
  Oligonucleotide for detection of SNP TSC0014730
cttaaacaataat

SEQ ID NO: 53347 - DNA, 13 bp, Artificial Sequence
  Oligonucleotide for detection of SNP TSC0014730
attatcgtttaag

SEQ ID NO: 53348 - DNA, 13 bp, Artificial Sequence
  Oligonucleotide for detection of SNP TSC0014730
cttaaacgataat

SEQ ID NO: 53349 - DNA, 13 bp, Artificial Sequence
  Oligonucleotide for detection of SNP TSC0014730
tttgggtgatggt

SEQ ID NO: 53350 - DNA, 13 bp, Artificial Sequence
  Oligonucleotide for detection of SNP TSC0014730
accatcacccaaa

SEQ ID NO: 53351 - DNA, 13 bp, Artificial Sequence
  Oligonucleotide for detection of SNP TSC0014730
tttgggcgatggt

SEQ ID NO: 53352 - DNA, 13 bp, Artificial Sequence
  Oligonucleotide for detection of SNP TSC0014730
accatcgcccaaa

SEQ ID NO: 53353 - DNA, 13 bp, Artificial Sequence
  Oligonucleotide for detection of SNP TSC0014731
tagtatatagtag

SEQ ID NO: 53354 - DNA, 13 bp, Artificial Sequence
  Oligonucleotide for detection of SNP TSC0014731
ctactatatacta

SEQ ID NO: 53355 - DNA, 13 bp, Artificial Sequence
  Oligonucleotide for detection of SNP TSC0014731
ttattgtgtgtta

SEQ ID NO: 53356 - DNA, 13 bp, Artificial Sequence
  Oligonucleotide for detection of SNP TSC0014731
taacacacaataa

SEQ ID NO: 53357 - DNA, 13 bp, Artificial Sequence
  Oligonucleotide for detection of SNP TSC0014731
ttattgcgtgtta

SEQ ID NO: 53358 - DNA, 13 bp, Artificial Sequence
  Oligonucleotide for detection of SNP TSC0014731
taacacgcaataa

SEQ ID NO: 53359 - DNA, 13 bp, Artificial Sequence
  Oligonucleotide for detection of SNP TSC0014732
ttgtagagatgag

SEQ ID NO: 53360 - DNA, 13 bp, Artificial Sequence
  Oligonucleotide for detection of SNP TSC0014732
ctcatctctacaa

SEQ ID NO: 53361 - DNA, 13 bp, Artificial Sequence
  Oligonucleotide for detection of SNP TSC0014732
ttgtagtgatgag

SEQ ID NO: 53362 - DNA, 13 bp, Artificial Sequence
  Oligonucleotide for detection of SNP TSC0014732
ctcatcactacaa

SEQ ID NO: 53363 - DNA, 13 bp, Artificial Sequence
  Oligonucleotide for detection of SNP TSC0014732
ttgtagcgatgag

SEQ ID NO: 53364 - DNA, 13 bp, Artificial Sequence
  Oligonucleotide for detection of SNP TSC0014732
ctcatcgctacaa

SEQ ID NO: 53365 - DNA, 13 bp, Artificial Sequence
  Oligonucleotide for detection of SNP TSC0014732
tttatttttataa

SEQ ID NO: 53366 - DNA, 13 bp, Artificial Sequence
  Oligonucleotide for detection of SNP TSC0014732
ttataaaaataaa

SEQ ID NO: 53367 - DNA, 13 bp, Artificial Sequence
  Oligonucleotide for detection of SNP TSC0014732
tttattgttataa

SEQ ID NO: 53368 - DNA, 13 bp, Artificial Sequence
  Oligonucleotide for detection of SNP TSC0014732
ttataacaataaa

SEQ ID NO: 53369 - DNA, 13 bp, Artificial Sequence
  Oligonucleotide for detection of SNP TSC0014732
tttatcgttataa

SEQ ID NO: 53370 - DNA, 13 bp, Artificial Sequence
  Oligonucleotide for detection of SNP TSC0014732
ttataacgataaa

SEQ ID NO: 53371 - DNA, 13 bp, Artificial Sequence
  Oligonucleotide for detection of SNP TSC0014733
ttaatagaattay

SEQ ID NO: 53372 - DNA, 13 bp, Artificial Sequence
  Oligonucleotide for detection of SNP TSC0014733
rtaattctattaa

SEQ ID NO: 53373 - DNA, 13 bp, Artificial Sequence
  Oligonucleotide for detection of SNP TSC0014733
ttaatataattay

SEQ ID NO: 53374 - DNA, 13 bp, Artificial Sequence
  Oligonucleotide for detection of SNP TSC0014733
rtaattatattaa

SEQ ID NO: 53375 - DNA, 13 bp, Artificial Sequence
  Oligonucleotide for detection of SNP TSC0014733
gtagttttgttaa

SEQ ID NO: 53376 - DNA, 13 bp, Artificial Sequence
  Oligonucleotide for detection of SNP TSC0014733
ttaacaaaactac

SEQ ID NO: 53377 - DNA, 13 bp, Artificial Sequence
  Oligonucleotide for detection of SNP TSC0014733
gtagttatgttaa

SEQ ID NO: 53378 - DNA, 13 bp, Artificial Sequence
  Oligonucleotide for detection of SNP TSC0014733
ttaacataactac

SEQ ID NO: 53379 - DNA, 13 bp, Artificial Sequence
  Oligonucleotide for detection of SNP TSC0014734
aaaaaatgaaata

SEQ ID NO: 53380 - DNA, 13 bp, Artificial Sequence
  Oligonucleotide for detection of SNP TSC0014734
tatttcatttttt

SEQ ID NO: 53381 - DNA, 13 bp, Artificial Sequence
  Oligonucleotide for detection of SNP TSC0014737
gtgatgtgtggty

SEQ ID NO: 53382 - DNA, 13 bp, Artificial Sequence
  Oligonucleotide for detection of SNP TSC0014737
raccacacatcac

SEQ ID NO: 53383 - DNA, 13 bp, Artificial Sequence
  Oligonucleotide for detection of SNP TSC0014737
gtgatgcgtggty

SEQ ID NO: 53384 - DNA, 13 bp, Artificial Sequence
  Oligonucleotide for detection of SNP TSC0014737
raccacgcatcac

SEQ ID NO: 53385 - DNA, 13 bp, Artificial Sequence
  Oligonucleotide for detection of SNP TSC0014737
ggttatgtattay

SEQ ID NO: 53386 - DNA, 13 bp, Artificial Sequence
  Oligonucleotide for detection of SNP TSC0014737
rtaatacataacc

SEQ ID NO: 53387 - DNA, 13 bp, Artificial Sequence
  Oligonucleotide for detection of SNP TSC0014737
ggttatatattay

SEQ ID NO: 53388 - DNA, 13 bp, Artificial Sequence
  Oligonucleotide for detection of SNP TSC0014737
rtaatatataacc

SEQ ID NO: 53389 - DNA, 13 bp, Artificial Sequence
  Oligonucleotide for detection of SNP TSC0014737
ggttacgtattay

SEQ ID NO: 53390 - DNA, 13 bp, Artificial Sequence
  Oligonucleotide for detection of SNP TSC0014737
rtaatacgtaacc

SEQ ID NO: 53391 - DNA, 13 bp, Artificial Sequence
  Oligonucleotide for detection of SNP TSC0014738
tattgtatattgt

SEQ ID NO: 53392 - DNA, 13 bp, Artificial Sequence
  Oligonucleotide for detection of SNP TSC0014738
acaatatacaata

SEQ ID NO: 53393 - DNA, 13 bp, Artificial Sequence
  Oligonucleotide for detection of SNP TSC0014738
tattgtgtattgt

SEQ ID NO: 53394 - DNA, 13 bp, Artificial Sequence
  Oligonucleotide for detection of SNP TSC0014738
acaatacacaata

SEQ ID NO: 53395 - DNA, 13 bp, Artificial Sequence
  Oligonucleotide for detection of SNP TSC0014738
tattgcgtattgt

SEQ ID NO: 53396 - DNA, 13 bp, Artificial Sequence
  Oligonucleotide for detection of SNP TSC0014738
acaatacgcaata

SEQ ID NO: 53397 - DNA, 13 bp, Artificial Sequence
  Oligonucleotide for detection of SNP TSC0014738
atagtatgtaata

SEQ ID NO: 53398 - DNA, 13 bp, Artificial Sequence
  Oligonucleotide for detection of SNP TSC0014738
tattacatactat

SEQ ID NO: 53399 - DNA, 13 bp, Artificial Sequence
  Oligonucleotide for detection of SNP TSC0014738
atagtacgtaata

SEQ ID NO: 53400 - DNA, 13 bp, Artificial Sequence
  Oligonucleotide for detection of SNP TSC0014738
tattacgtactat

SEQ ID NO: 53401 - DNA, 13 bp, Artificial Sequence
  Oligonucleotide for detection of SNP TSC0014741
attttaaggatga

SEQ ID NO: 53402 - DNA, 13 bp, Artificial Sequence
  Oligonucleotide for detection of SNP TSC0014741
tcatccttaaaat

SEQ ID NO: 53403 - DNA, 13 bp, Artificial Sequence
  Oligonucleotide for detection of SNP TSC0014741
attttagggatga

SEQ ID NO: 53404 - DNA, 13 bp, Artificial Sequence
  Oligonucleotide for detection of SNP TSC0014741
tcatccctaaaat

SEQ ID NO: 53405 - DNA, 13 bp, Artificial Sequence
  Oligonucleotide for detection of SNP TSC0014743
ttgataaagaaat

SEQ ID NO: 53406 - DNA, 13 bp, Artificial Sequence
  Oligonucleotide for detection of SNP TSC0014743
atttctttatcaa

SEQ ID NO: 53407 - DNA, 13 bp, Artificial Sequence
  Oligonucleotide for detection of SNP TSC0014743
ttgatagagaaat

SEQ ID NO: 53408 - DNA, 13 bp, Artificial Sequence
  Oligonucleotide for detection of SNP TSC0014743
atttctctatcaa

SEQ ID NO: 53409 - DNA, 13 bp, Artificial Sequence
  Oligonucleotide for detection of SNP TSC0014747
ggagatggggtaa

SEQ ID NO: 53410 - DNA, 13 bp, Artificial Sequence
  Oligonucleotide for detection of SNP TSC0014747
ttaccccatctcc

SEQ ID NO: 53411 - DNA, 13 bp, Artificial Sequence
  Oligonucleotide for detection of SNP TSC0014747
ggagatagggtaa

SEQ ID NO: 53412 - DNA, 13 bp, Artificial Sequence
  Oligonucleotide for detection of SNP TSC0014747
ttaccctatctcc

SEQ ID NO: 53413 - DNA, 13 bp, Artificial Sequence
  Oligonucleotide for detection of SNP TSC0014747
ggagacggggtaa

SEQ ID NO: 53414 - DNA, 13 bp, Artificial Sequence
  Oligonucleotide for detection of SNP TSC0014747
ttaccccgtctcc

SEQ ID NO: 53415 - DNA, 13 bp, Artificial Sequence
  Oligonucleotide for detection of SNP TSC0014748
gaagttagtggaa

SEQ ID NO: 53416 - DNA, 13 bp, Artificial Sequence
  Oligonucleotide for detection of SNP TSC0014748
ttccactaacttc

SEQ ID NO: 53417 - DNA, 13 bp, Artificial Sequence
  Oligonucleotide for detection of SNP TSC0014748
gaagtttgtggaa

SEQ ID NO: 53418 - DNA, 13 bp, Artificial Sequence
  Oligonucleotide for detection of SNP TSC0014748
ttccacaaacttc

SEQ ID NO: 53419 - DNA, 13 bp, Artificial Sequence
  Oligonucleotide for detection of SNP TSC0014748
gaagttcgtggaa

SEQ ID NO: 53420 - DNA, 13 bp, Artificial Sequence
  Oligonucleotide for detection of SNP TSC0014748
ttccacgaacttc

SEQ ID NO: 53421 - DNA, 13 bp, Artificial Sequence
  Oligonucleotide for detection of SNP TSC0014748
ttttattaattty

SEQ ID NO: 53422 - DNA, 13 bp, Artificial Sequence
  Oligonucleotide for detection of SNP TSC0014748
raaattaataaaa

SEQ ID NO: 53423 - DNA, 13 bp, Artificial Sequence
  Oligonucleotide for detection of SNP TSC0014748
ttttatgaattty

SEQ ID NO: 53424 - DNA, 13 bp, Artificial Sequence
  Oligonucleotide for detection of SNP TSC0014748
raaattcataaaa

SEQ ID NO: 53425 - DNA, 13 bp, Artificial Sequence
  Oligonucleotide for detection of SNP TSC0014748
ttttacgaattty

SEQ ID NO: 53426 - DNA, 13 bp, Artificial Sequence
  Oligonucleotide for detection of SNP TSC0014748
raaattcgtaaaa

SEQ ID NO: 53427 - DNA, 13 bp, Artificial Sequence
  Oligonucleotide for detection of SNP TSC0014750
ttaaatagtttaa

SEQ ID NO: 53428 - DNA, 13 bp, Artificial Sequence
  Oligonucleotide for detection of SNP TSC0014750
ttaaactatttaa

SEQ ID NO: 53429 - DNA, 13 bp, Artificial Sequence
  Oligonucleotide for detection of SNP TSC0014750
ttaaatggtttaa

SEQ ID NO: 53430 - DNA, 13 bp, Artificial Sequence
  Oligonucleotide for detection of SNP TSC0014750
ttaaaccatttaa

SEQ ID NO: 53431 - DNA, 13 bp, Artificial Sequence
  Oligonucleotide for detection of SNP TSC0014750
ttaaacggtttaa

SEQ ID NO: 53432 - DNA, 13 bp, Artificial Sequence
  Oligonucleotide for detection of SNP TSC0014750
ttaaaccgtttaa

SEQ ID NO: 53433 - DNA, 13 bp, Artificial Sequence
  Oligonucleotide for detection of SNP TSC0014750
ttgagttgtttaa

SEQ ID NO: 53434 - DNA, 13 bp, Artificial Sequence
  Oligonucleotide for detection of SNP TSC0014750
ttaaacaactcaa

SEQ ID NO: 53435 - DNA, 13 bp, Artificial Sequence
  Oligonucleotide for detection of SNP TSC0014750
ttgagtcgtttaa

SEQ ID NO: 53436 - DNA, 13 bp, Artificial Sequence
  Oligonucleotide for detection of SNP TSC0014750
ttaaacgactcaa

SEQ ID NO: 53437 - DNA, 13 bp, Artificial Sequence
  Oligonucleotide for detection of SNP TSC0014751
taatgaatagagg

SEQ ID NO: 53438 - DNA, 13 bp, Artificial Sequence
  Oligonucleotide for detection of SNP TSC0014751
cctctattcatta

SEQ ID NO: 53439 - DNA, 13 bp, Artificial Sequence
  Oligonucleotide for detection of SNP TSC0014751
taatgagtagagg

SEQ ID NO: 53440 - DNA, 13 bp, Artificial Sequence
  Oligonucleotide for detection of SNP TSC0014751
cctctactcatta

SEQ ID NO: 53441 - DNA, 13 bp, Artificial Sequence
  Oligonucleotide for detection of SNP TSC0014752
gtggttagtgttt

SEQ ID NO: 53442 - DNA, 13 bp, Artificial Sequence
  Oligonucleotide for detection of SNP TSC0014752
aaacactaaccac

SEQ ID NO: 53443 - DNA, 13 bp, Artificial Sequence
  Oligonucleotide for detection of SNP TSC0014752
gtggttggtgttt

SEQ ID NO: 53444 - DNA, 13 bp, Artificial Sequence
  Oligonucleotide for detection of SNP TSC0014752
aaacaccaaccac

SEQ ID NO: 53445 - DNA, 13 bp, Artificial Sequence
  Oligonucleotide for detection of SNP TSC0014752
gtggtcggtgttt

SEQ ID NO: 53446 - DNA, 13 bp, Artificial Sequence
  Oligonucleotide for detection of SNP TSC0014752
aaacaccgaccac

SEQ ID NO: 53447 - DNA, 13 bp, Artificial Sequence
  Oligonucleotide for detection of SNP TSC0014752
aaatattggttay

SEQ ID NO: 53448 - DNA, 13 bp, Artificial Sequence
  Oligonucleotide for detection of SNP TSC0014752
rtaaccaatattt

SEQ ID NO: 53449 - DNA, 13 bp, Artificial Sequence
  Oligonucleotide for detection of SNP TSC0014752
aaatatcggttay

SEQ ID NO: 53450 - DNA, 13 bp, Artificial Sequence
  Oligonucleotide for detection of SNP TSC0014752
rtaaccgatattt

SEQ ID NO: 53451 - DNA, 13 bp, Artificial Sequence
  Oligonucleotide for detection of SNP TSC0014753
taatgatgtttay

SEQ ID NO: 53452 - DNA, 13 bp, Artificial Sequence
  Oligonucleotide for detection of SNP TSC0014753
rtaaacatcatta

SEQ ID NO: 53453 - DNA, 13 bp, Artificial Sequence
  Oligonucleotide for detection of SNP TSC0014753
taatgacgtttay

SEQ ID NO: 53454 - DNA, 13 bp, Artificial Sequence
  Oligonucleotide for detection of SNP TSC0014753
rtaaacgtcatta

SEQ ID NO: 53455 - DNA, 13 bp, Artificial Sequence
  Oligonucleotide for detection of SNP TSC0014753
gtgaatgttattg

SEQ ID NO: 53456 - DNA, 13 bp, Artificial Sequence
  Oligonucleotide for detection of SNP TSC0014753
caataacattcac

SEQ ID NO: 53457 - DNA, 13 bp, Artificial Sequence
  Oligonucleotide for detection of SNP TSC0014753
gtgaatattattg

SEQ ID NO: 53458 - DNA, 13 bp, Artificial Sequence
  Oligonucleotide for detection of SNP TSC0014753
caataatattcac

SEQ ID NO: 53459 - DNA, 13 bp, Artificial Sequence
  Oligonucleotide for detection of SNP TSC0014753
gtgaacgttattg

SEQ ID NO: 53460 - DNA, 13 bp, Artificial Sequence
  Oligonucleotide for detection of SNP TSC0014753
caataacgttcac

SEQ ID NO: 53461 - DNA, 13 bp, Artificial Sequence
  Oligonucleotide for detection of SNP TSC0014760
gtgggtatttgtg

SEQ ID NO: 53462 - DNA, 13 bp, Artificial Sequence
  Oligonucleotide for detection of SNP TSC0014760
cacaaatacccac

SEQ ID NO: 53463 - DNA, 13 bp, Artificial Sequence
  Oligonucleotide for detection of SNP TSC0014760
gtgggtttttgtg

SEQ ID NO: 53464 - DNA, 13 bp, Artificial Sequence
  Oligonucleotide for detection of SNP TSC0014760
cacaaaaacccac

SEQ ID NO: 53465 - DNA, 13 bp, Artificial Sequence
  Oligonucleotide for detection of SNP TSC0014760
tataagtgtttay

SEQ ID NO: 53466 - DNA, 13 bp, Artificial Sequence
  Oligonucleotide for detection of SNP TSC0014760
rtaaacacttata

SEQ ID NO: 53467 - DNA, 13 bp, Artificial Sequence
  Oligonucleotide for detection of SNP TSC0014760
tataagagtttay

SEQ ID NO: 53468 - DNA, 13 bp, Artificial Sequence
  Oligonucleotide for detection of SNP TSC0014760
rtaaactcttata

SEQ ID NO: 53469 - DNA, 13 bp, Artificial Sequence
  Oligonucleotide for detection of SNP TSC0014761
aggaatgaagaaa

SEQ ID NO: 53470 - DNA, 13 bp, Artificial Sequence
  Oligonucleotide for detection of SNP TSC0014761
tttcttcattcct

SEQ ID NO: 53471 - DNA, 13 bp, Artificial Sequence
  Oligonucleotide for detection of SNP TSC0014761
aggaataaagaaa

SEQ ID NO: 53472 - DNA, 13 bp, Artificial Sequence
  Oligonucleotide for detection of SNP TSC0014761
tttctttattcct

SEQ ID NO: 53473 - DNA, 13 bp, Artificial Sequence
  Oligonucleotide for detection of SNP TSC0014761
aggaacgaagaaa

SEQ ID NO: 53474 - DNA, 13 bp, Artificial Sequence
  Oligonucleotide for detection of SNP TSC0014761
tttcttcgttcct

SEQ ID NO: 53475 - DNA, 13 bp, Artificial Sequence
  Oligonucleotide for detection of SNP TSC0014762
ttaattatattta

SEQ ID NO: 53476 - DNA, 13 bp, Artificial Sequence
  Oligonucleotide for detection of SNP TSC0014762
taaatataattaa

SEQ ID NO: 53477 - DNA, 13 bp, Artificial Sequence
  Oligonucleotide for detection of SNP TSC0014762
ttaattttattta

SEQ ID NO: 53478 - DNA, 13 bp, Artificial Sequence
  Oligonucleotide for detection of SNP TSC0014762
taaataaaattaa

SEQ ID NO: 53479 - DNA, 13 bp, Artificial Sequence
  Oligonucleotide for detection of SNP TSC0014763
tggttaatttttg

SEQ ID NO: 53480 - DNA, 13 bp, Artificial Sequence
  Oligonucleotide for detection of SNP TSC0014763
caaaaattaacca

SEQ ID NO: 53481 - DNA, 13 bp, Artificial Sequence
  Oligonucleotide for detection of SNP TSC0014763
tggttattttttg

SEQ ID NO: 53482 - DNA, 13 bp, Artificial Sequence
  Oligonucleotide for detection of SNP TSC0014763
caaaaaataacca

SEQ ID NO: 53483 - DNA, 13 bp, Artificial Sequence
  Oligonucleotide for detection of SNP TSC0014763
taaaaattagtta

SEQ ID NO: 53484 - DNA, 13 bp, Artificial Sequence
  Oligonucleotide for detection of SNP TSC0014763
taactaattttta

SEQ ID NO: 53485 - DNA, 13 bp, Artificial Sequence
  Oligonucleotide for detection of SNP TSC0014763
taaaaaatagtta

SEQ ID NO: 53486 - DNA, 13 bp, Artificial Sequence
  Oligonucleotide for detection of SNP TSC0014763
taactatttttta

SEQ ID NO: 53487 - DNA, 13 bp, Artificial Sequence
  Oligonucleotide for detection of SNP TSC0014764
ggagttgtttaga

SEQ ID NO: 53488 - DNA, 13 bp, Artificial Sequence
  Oligonucleotide for detection of SNP TSC0014764
tctaaacaactcc

SEQ ID NO: 53489 - DNA, 13 bp, Artificial Sequence
  Oligonucleotide for detection of SNP TSC0014764
ggagttttttaga

SEQ ID NO: 53490 - DNA, 13 bp, Artificial Sequence
  Oligonucleotide for detection of SNP TSC0014764
tctaaaaaactcc

SEQ ID NO: 53491 - DNA, 13 bp, Artificial Sequence
  Oligonucleotide for detection of SNP TSC0014764
tttaagtaattty

SEQ ID NO: 53492 - DNA, 13 bp, Artificial Sequence
  Oligonucleotide for detection of SNP TSC0014764
raaattacttaaa

SEQ ID NO: 53493 - DNA, 13 bp, Artificial Sequence
  Oligonucleotide for detection of SNP TSC0014764
tttaagaaattty

SEQ ID NO: 53494 - DNA, 13 bp, Artificial Sequence
  Oligonucleotide for detection of SNP TSC0014764
raaatttcttaaa

SEQ ID NO: 53495 - DNA, 13 bp, Artificial Sequence
  Oligonucleotide for detection of SNP TSC0014765
agtataaaggagg

SEQ ID NO: 53496 - DNA, 13 bp, Artificial Sequence
  Oligonucleotide for detection of SNP TSC0014765
cctcctttatact

SEQ ID NO: 53497 - DNA, 13 bp, Artificial Sequence
  Oligonucleotide for detection of SNP TSC0014765
agtatagaggagg

SEQ ID NO: 53498 - DNA, 13 bp, Artificial Sequence
  Oligonucleotide for detection of SNP TSC0014765
cctcctctatact

SEQ ID NO: 53499 - DNA, 13 bp, Artificial Sequence
  Oligonucleotide for detection of SNP TSC0014767
aaatttaattgaa

SEQ ID NO: 53500 - DNA, 13 bp, Artificial Sequence
  Oligonucleotide for detection of SNP TSC0014767
ttcaattaaattt

SEQ ID NO: 53501 - DNA, 13 bp, Artificial Sequence
  Oligonucleotide for detection of SNP TSC0014767
aaatttgattgaa

SEQ ID NO: 53502 - DNA, 13 bp, Artificial Sequence
  Oligonucleotide for detection of SNP TSC0014767
ttcaatcaaattt

SEQ ID NO: 53503 - DNA, 13 bp, Artificial Sequence
  Oligonucleotide for detection of SNP TSC0014767
aaattcgattgaa

SEQ ID NO: 53504 - DNA, 13 bp, Artificial Sequence
  Oligonucleotide for detection of SNP TSC0014767
ttcaatcgaattt

SEQ ID NO: 53505 - DNA, 13 bp, Artificial Sequence
  Oligonucleotide for detection of SNP TSC0014767
tttaattgaattt

SEQ ID NO: 53506 - DNA, 13 bp, Artificial Sequence
  Oligonucleotide for detection of SNP TSC0014767
aaattcaattaaa

SEQ ID NO: 53507 - DNA, 13 bp, Artificial Sequence
  Oligonucleotide for detection of SNP TSC0014768
gggtattttggtt

SEQ ID NO: 53508 - DNA, 13 bp, Artificial Sequence
  Oligonucleotide for detection of SNP TSC0014768
aaccaaaataccc

SEQ ID NO: 53509 - DNA, 13 bp, Artificial Sequence
  Oligonucleotide for detection of SNP TSC0014768
agttaatgtgtty

SEQ ID NO: 53510 - DNA, 13 bp, Artificial Sequence
  Oligonucleotide for detection of SNP TSC0014768
raacacattaact

SEQ ID NO: 53511 - DNA, 13 bp, Artificial Sequence
  Oligonucleotide for detection of SNP TSC0014768
agttaaagtgtty

SEQ ID NO: 53512 - DNA, 13 bp, Artificial Sequence
  Oligonucleotide for detection of SNP TSC0014768
raacactttaact

SEQ ID NO: 53513 - DNA, 13 bp, Artificial Sequence
  Oligonucleotide for detection of SNP TSC0014768
agttaacgtgtty

SEQ ID NO: 53514 - DNA, 13 bp, Artificial Sequence
  Oligonucleotide for detection of SNP TSC0014768
raacacgttaact

SEQ ID NO: 53515 - DNA, 13 bp, Artificial Sequence
  Oligonucleotide for detection of SNP TSC0014769
ttttgtattggaa

SEQ ID NO: 53516 - DNA, 13 bp, Artificial Sequence
  Oligonucleotide for detection of SNP TSC0014769
ttccaatacaaaa

SEQ ID NO: 53517 - DNA, 13 bp, Artificial Sequence
  Oligonucleotide for detection of SNP TSC0014769
ttttgtgttggaa

SEQ ID NO: 53518 - DNA, 13 bp, Artificial Sequence
  Oligonucleotide for detection of SNP TSC0014769
ttccaacacaaaa

SEQ ID NO: 53519 - DNA, 13 bp, Artificial Sequence
  Oligonucleotide for detection of SNP TSC0014769
tttcgtattggaa

SEQ ID NO: 53520 - DNA, 13 bp, Artificial Sequence
  Oligonucleotide for detection of SNP TSC0014769
ttccaatacgaaa

SEQ ID NO: 53521 - DNA, 13 bp, Artificial Sequence
  Oligonucleotide for detection of SNP TSC0014769
tttcgtgttggaa

SEQ ID NO: 53522 - DNA, 13 bp, Artificial Sequence
  Oligonucleotide for detection of SNP TSC0014769
ttccaacacgaaa

SEQ ID NO: 53523 - DNA, 13 bp, Artificial Sequence
  Oligonucleotide for detection of SNP TSC0014769
ttttgcgttggaa

SEQ ID NO: 53524 - DNA, 13 bp, Artificial Sequence
  Oligonucleotide for detection of SNP TSC0014769
ttccaacgcaaaa

SEQ ID NO: 53525 - DNA, 13 bp, Artificial Sequence
  Oligonucleotide for detection of SNP TSC0014769
tttcgcgttggaa

SEQ ID NO: 53526 - DNA, 13 bp, Artificial Sequence
  Oligonucleotide for detection of SNP TSC0014769
ttccaacgcgaaa

SEQ ID NO: 53527 - DNA, 13 bp, Artificial Sequence
  Oligonucleotide for detection of SNP TSC0014769
ttttagtgtgggg

SEQ ID NO: 53528 - DNA, 13 bp, Artificial Sequence
  Oligonucleotide for detection of SNP TSC0014769
ccccacactaaaa

SEQ ID NO: 53529 - DNA, 13 bp, Artificial Sequence
  Oligonucleotide for detection of SNP TSC0014769
ttttagtgcgggg

SEQ ID NO: 53530 - DNA, 13 bp, Artificial Sequence
  Oligonucleotide for detection of SNP TSC0014769
ccccgcactaaaa

SEQ ID NO: 53531 - DNA, 13 bp, Artificial Sequence
  Oligonucleotide for detection of SNP TSC0014769
ttttagcgtgggg

SEQ ID NO: 53532 - DNA, 13 bp, Artificial Sequence
  Oligonucleotide for detection of SNP TSC0014769
ccccacgctaaaa

SEQ ID NO: 53533 - DNA, 13 bp, Artificial Sequence
  Oligonucleotide for detection of SNP TSC0014769
ttttagcgcgggg

SEQ ID NO: 53534 - DNA, 13 bp, Artificial Sequence
  Oligonucleotide for detection of SNP TSC0014769
ccccgcgctaaaa

SEQ ID NO: 53535 - DNA, 13 bp, Artificial Sequence
  Oligonucleotide for detection of SNP TSC0014771
gaggttaggttaa

SEQ ID NO: 53536 - DNA, 13 bp, Artificial Sequence
  Oligonucleotide for detection of SNP TSC0014771
ttaacctaacctc

SEQ ID NO: 53537 - DNA, 13 bp, Artificial Sequence
  Oligonucleotide for detection of SNP TSC0014771
gaggtttggttaa

SEQ ID NO: 53538 - DNA, 13 bp, Artificial Sequence
  Oligonucleotide for detection of SNP TSC0014771
ttaaccaaacctc

SEQ ID NO: 53539 - DNA, 13 bp, Artificial Sequence
  Oligonucleotide for detection of SNP TSC0014771
ttagtttgattty

SEQ ID NO: 53540 - DNA, 13 bp, Artificial Sequence
  Oligonucleotide for detection of SNP TSC0014771
raaatcaaactaa

SEQ ID NO: 53541 - DNA, 13 bp, Artificial Sequence
  Oligonucleotide for detection of SNP TSC0014771
ttagttagattty

SEQ ID NO: 53542 - DNA, 13 bp, Artificial Sequence
  Oligonucleotide for detection of SNP TSC0014771
raaatctaactaa

SEQ ID NO: 53543 - DNA, 13 bp, Artificial Sequence
  Oligonucleotide for detection of SNP TSC0014772
gggagggtgaaay

SEQ ID NO: 53544 - DNA, 13 bp, Artificial Sequence
  Oligonucleotide for detection of SNP TSC0014772
rtttcaccctccc

SEQ ID NO: 53545 - DNA, 13 bp, Artificial Sequence
  Oligonucleotide for detection of SNP TSC0014772
gggaggatgaaay

SEQ ID NO: 53546 - DNA, 13 bp, Artificial Sequence
  Oligonucleotide for detection of SNP TSC0014772
rtttcatcctccc

SEQ ID NO: 53547 - DNA, 13 bp, Artificial Sequence
  Oligonucleotide for detection of SNP TSC0014777
taatttaggttty

SEQ ID NO: 53548 - DNA, 13 bp, Artificial Sequence
  Oligonucleotide for detection of SNP TSC0014777
raaacctaaatta

SEQ ID NO: 53549 - DNA, 13 bp, Artificial Sequence
  Oligonucleotide for detection of SNP TSC0014777
taatttgggttty

SEQ ID NO: 53550 - DNA, 13 bp, Artificial Sequence
  Oligonucleotide for detection of SNP TSC0014777
raaacccaaatta

SEQ ID NO: 53551 - DNA, 13 bp, Artificial Sequence
  Oligonucleotide for detection of SNP TSC0014777
taattcgggttty

SEQ ID NO: 53552 - DNA, 13 bp, Artificial Sequence
  Oligonucleotide for detection of SNP TSC0014777
raaacccgaatta

SEQ ID NO: 53553 - DNA, 13 bp, Artificial Sequence
  Oligonucleotide for detection of SNP TSC0014777
gaaatttgaattg

SEQ ID NO: 53554 - DNA, 13 bp, Artificial Sequence
  Oligonucleotide for detection of SNP TSC0014777
caattcaaatttc

SEQ ID NO: 53555 - DNA, 13 bp, Artificial Sequence
  Oligonucleotide for detection of SNP TSC0014777
gaaattcgaattg

SEQ ID NO: 53556 - DNA, 13 bp, Artificial Sequence
  Oligonucleotide for detection of SNP TSC0014777
caattcgaatttc

SEQ ID NO: 53557 - DNA, 13 bp, Artificial Sequence
  Oligonucleotide for detection of SNP TSC0014778
ttagttatgatgt

SEQ ID NO: 53558 - DNA, 13 bp, Artificial Sequence
  Oligonucleotide for detection of SNP TSC0014778
acatcataactaa

SEQ ID NO: 53559 - DNA, 13 bp, Artificial Sequence
  Oligonucleotide for detection of SNP TSC0014778
ttagttgtgatgt

SEQ ID NO: 53560 - DNA, 13 bp, Artificial Sequence
  Oligonucleotide for detection of SNP TSC0014778
acatcacaactaa

SEQ ID NO: 53561 - DNA, 13 bp, Artificial Sequence
  Oligonucleotide for detection of SNP TSC0014778
ttagtcgtgatgt

SEQ ID NO: 53562 - DNA, 13 bp, Artificial Sequence
  Oligonucleotide for detection of SNP TSC0014778
acatcacgactaa

SEQ ID NO: 53563 - DNA, 13 bp, Artificial Sequence
  Oligonucleotide for detection of SNP TSC0014778
atattatggttaa

SEQ ID NO: 53564 - DNA, 13 bp, Artificial Sequence
  Oligonucleotide for detection of SNP TSC0014778
ttaaccataatat

SEQ ID NO: 53565 - DNA, 13 bp, Artificial Sequence
  Oligonucleotide for detection of SNP TSC0014778
atattacggttaa

SEQ ID NO: 53566 - DNA, 13 bp, Artificial Sequence
  Oligonucleotide for detection of SNP TSC0014778
ttaaccgtaatat

SEQ ID NO: 53567 - DNA, 13 bp, Artificial Sequence
  Oligonucleotide for detection of SNP TSC0014779
ttttttagtgata

SEQ ID NO: 53568 - DNA, 13 bp, Artificial Sequence
  Oligonucleotide for detection of SNP TSC0014779
tatcactaaaaaa

SEQ ID NO: 53569 - DNA, 13 bp, Artificial Sequence
  Oligonucleotide for detection of SNP TSC0014779
ttttttggtgata

SEQ ID NO: 53570 - DNA, 13 bp, Artificial Sequence
  Oligonucleotide for detection of SNP TSC0014779
tatcaccaaaaaa

SEQ ID NO: 53571 - DNA, 13 bp, Artificial Sequence
  Oligonucleotide for detection of SNP TSC0014780
tggtatatatggg

SEQ ID NO: 53572 - DNA, 13 bp, Artificial Sequence
  Oligonucleotide for detection of SNP TSC0014780
cccatatatacca

SEQ ID NO: 53573 - DNA, 13 bp, Artificial Sequence
  Oligonucleotide for detection of SNP TSC0014780
tggtatgtatggg

SEQ ID NO: 53574 - DNA, 13 bp, Artificial Sequence
  Oligonucleotide for detection of SNP TSC0014780
cccatacatacca

SEQ ID NO: 53575 - DNA, 13 bp, Artificial Sequence
  Oligonucleotide for detection of SNP TSC0014780
tggtatatacggg

SEQ ID NO: 53576 - DNA, 13 bp, Artificial Sequence
  Oligonucleotide for detection of SNP TSC0014780
cccgtatatacca

SEQ ID NO: 53577 - DNA, 13 bp, Artificial Sequence
  Oligonucleotide for detection of SNP TSC0014780
tggtatgtacggg

SEQ ID NO: 53578 - DNA, 13 bp, Artificial Sequence
  Oligonucleotide for detection of SNP TSC0014780
cccgtacatacca

SEQ ID NO: 53579 - DNA, 13 bp, Artificial Sequence
  Oligonucleotide for detection of SNP TSC0014781
tgtatataaagtg

SEQ ID NO: 53580 - DNA, 13 bp, Artificial Sequence
  Oligonucleotide for detection of SNP TSC0014781
cactttatataca

SEQ ID NO: 53581 - DNA, 13 bp, Artificial Sequence
  Oligonucleotide for detection of SNP TSC0014781
tgtatagaaagtg

SEQ ID NO: 53582 - DNA, 13 bp, Artificial Sequence
  Oligonucleotide for detection of SNP TSC0014781
cactttctataca

SEQ ID NO: 53583 - DNA, 13 bp, Artificial Sequence
  Oligonucleotide for detection of SNP TSC0014782
gtaaatgagaatt

SEQ ID NO: 53584 - DNA, 13 bp, Artificial Sequence
  Oligonucleotide for detection of SNP TSC0014782
aattctcatttac

SEQ ID NO: 53585 - DNA, 13 bp, Artificial Sequence
  Oligonucleotide for detection of SNP TSC0014782
gtaaattagaatt

SEQ ID NO: 53586 - DNA, 13 bp, Artificial Sequence
  Oligonucleotide for detection of SNP TSC0014782
aattctaatttac

SEQ ID NO: 53587 - DNA, 13 bp, Artificial Sequence
  Oligonucleotide for detection of SNP TSC0014782
aatttttatttgy

SEQ ID NO: 53588 - DNA, 13 bp, Artificial Sequence
  Oligonucleotide for detection of SNP TSC0014782
rcaaataaaaatt

SEQ ID NO: 53589 - DNA, 13 bp, Artificial Sequence
  Oligonucleotide for detection of SNP TSC0014782
aattttaatttgy

SEQ ID NO: 53590 - DNA, 13 bp, Artificial Sequence
  Oligonucleotide for detection of SNP TSC0014782
rcaaattaaaatt

SEQ ID NO: 53591 - DNA, 13 bp, Artificial Sequence
  Oligonucleotide for detection of SNP TSC0014783
taagaggtaggga

SEQ ID NO: 53592 - DNA, 13 bp, Artificial Sequence
  Oligonucleotide for detection of SNP TSC0014783
tccctacctctta

SEQ ID NO: 53593 - DNA, 13 bp, Artificial Sequence
  Oligonucleotide for detection of SNP TSC0014783
taagagttaggga

SEQ ID NO: 53594 - DNA, 13 bp, Artificial Sequence
  Oligonucleotide for detection of SNP TSC0014783
tccctaactctta

SEQ ID NO: 53595 - DNA, 13 bp, Artificial Sequence
  Oligonucleotide for detection of SNP TSC0014784
agttgggtggagy

SEQ ID NO: 53596 - DNA, 13 bp, Artificial Sequence
  Oligonucleotide for detection of SNP TSC0014784
rctccacccaact

SEQ ID NO: 53597 - DNA, 13 bp, Artificial Sequence
  Oligonucleotide for detection of SNP TSC0014784
agttggttggagy

SEQ ID NO: 53598 - DNA, 13 bp, Artificial Sequence
  Oligonucleotide for detection of SNP TSC0014784
rctccaaccaact

SEQ ID NO: 53599 - DNA, 13 bp, Artificial Sequence
  Oligonucleotide for detection of SNP TSC0014784
agttgggcggagy

SEQ ID NO: 53600 - DNA, 13 bp, Artificial Sequence
  Oligonucleotide for detection of SNP TSC0014784
rctccgcccaact

SEQ ID NO: 53601 - DNA, 13 bp, Artificial Sequence
  Oligonucleotide for detection of SNP TSC0014784
agttggtcggagy

SEQ ID NO: 53602 - DNA, 13 bp, Artificial Sequence
  Oligonucleotide for detection of SNP TSC0014784
rctccgaccaact

SEQ ID NO: 53603 - DNA, 13 bp, Artificial Sequence
  Oligonucleotide for detection of SNP TSC0014784
gttttgtttagtt

SEQ ID NO: 53604 - DNA, 13 bp, Artificial Sequence
  Oligonucleotide for detection of SNP TSC0014784
aactaaacaaaac

SEQ ID NO: 53605 - DNA, 13 bp, Artificial Sequence
  Oligonucleotide for detection of SNP TSC0014784
gttttgattagtt

SEQ ID NO: 53606 - DNA, 13 bp, Artificial Sequence
  Oligonucleotide for detection of SNP TSC0014784
aactaatcaaaac

SEQ ID NO: 53607 - DNA, 13 bp, Artificial Sequence
  Oligonucleotide for detection of SNP TSC0014784
gtttcgtttagtt

SEQ ID NO: 53608 - DNA, 13 bp, Artificial Sequence
  Oligonucleotide for detection of SNP TSC0014784
aactaaacgaaac

SEQ ID NO: 53609 - DNA, 13 bp, Artificial Sequence
  Oligonucleotide for detection of SNP TSC0014784
gtttcgattagtt

SEQ ID NO: 53610 - DNA, 13 bp, Artificial Sequence
  Oligonucleotide for detection of SNP TSC0014784
aactaatcgaaac

SEQ ID NO: 53611 - DNA, 13 bp, Artificial Sequence
  Oligonucleotide for detection of SNP TSC0014785
ttttattgtttta

SEQ ID NO: 53612 - DNA, 13 bp, Artificial Sequence
  Oligonucleotide for detection of SNP TSC0014785
taaaacaataaaa

SEQ ID NO: 53613 - DNA, 13 bp, Artificial Sequence
  Oligonucleotide for detection of SNP TSC0014785
ttttatcgtttta

SEQ ID NO: 53614 - DNA, 13 bp, Artificial Sequence
  Oligonucleotide for detection of SNP TSC0014785
taaaacgataaaa

SEQ ID NO: 53615 - DNA, 13 bp, Artificial Sequence
  Oligonucleotide for detection of SNP TSC0014785
tgaagtggtgagg

SEQ ID NO: 53616 - DNA, 13 bp, Artificial Sequence
  Oligonucleotide for detection of SNP TSC0014785
cctcaccacttca

SEQ ID NO: 53617 - DNA, 13 bp, Artificial Sequence
  Oligonucleotide for detection of SNP TSC0014785
tgaagtagtgagg

SEQ ID NO: 53618 - DNA, 13 bp, Artificial Sequence
  Oligonucleotide for detection of SNP TSC0014785
cctcactacttca

SEQ ID NO: 53619 - DNA, 13 bp, Artificial Sequence
  Oligonucleotide for detection of SNP TSC0014785
tgaagcggtgagg

SEQ ID NO: 53620 - DNA, 13 bp, Artificial Sequence
  Oligonucleotide for detection of SNP TSC0014785
cctcaccgcttca

SEQ ID NO: 53621 - DNA, 13 bp, Artificial Sequence
  Oligonucleotide for detection of SNP TSC0014786
aaataagttaaag

SEQ ID NO: 53622 - DNA, 13 bp, Artificial Sequence
  Oligonucleotide for detection of SNP TSC0014786
ctttaacttattt

SEQ ID NO: 53623 - DNA, 13 bp, Artificial Sequence
  Oligonucleotide for detection of SNP TSC0014786
aaataaattaaag

SEQ ID NO: 53624 - DNA, 13 bp, Artificial Sequence
  Oligonucleotide for detection of SNP TSC0014786
ctttaatttattt

SEQ ID NO: 53625 - DNA, 13 bp, Artificial Sequence
  Oligonucleotide for detection of SNP TSC0014788
ttaagggttttga

SEQ ID NO: 53626 - DNA, 13 bp, Artificial Sequence
  Oligonucleotide for detection of SNP TSC0014788
tcaaaacccttaa

SEQ ID NO: 53627 - DNA, 13 bp, Artificial Sequence
  Oligonucleotide for detection of SNP TSC0014788
ttaaggtttttga

SEQ ID NO: 53628 - DNA, 13 bp, Artificial Sequence
  Oligonucleotide for detection of SNP TSC0014788
tcaaaaaccttaa

SEQ ID NO: 53629 - DNA, 13 bp, Artificial Sequence
  Oligonucleotide for detection of SNP TSC0014788
ttaaagtttttaa

SEQ ID NO: 53630 - DNA, 13 bp, Artificial Sequence
  Oligonucleotide for detection of SNP TSC0014788
ttaaaaactttaa

SEQ ID NO: 53631 - DNA, 13 bp, Artificial Sequence
  Oligonucleotide for detection of SNP TSC0014788
ttaaagattttaa

SEQ ID NO: 53632 - DNA, 13 bp, Artificial Sequence
  Oligonucleotide for detection of SNP TSC0014788
ttaaaatctttaa

SEQ ID NO: 53633 - DNA, 13 bp, Artificial Sequence
  Oligonucleotide for detection of SNP TSC0014792
ttgagaagtattg

SEQ ID NO: 53634 - DNA, 13 bp, Artificial Sequence
  Oligonucleotide for detection of SNP TSC0014792
caatacttctcaa

SEQ ID NO: 53635 - DNA, 13 bp, Artificial Sequence
  Oligonucleotide for detection of SNP TSC0014792
ttgagaggtattg

SEQ ID NO: 53636 - DNA, 13 bp, Artificial Sequence
  Oligonucleotide for detection of SNP TSC0014792
caatacctctcaa

SEQ ID NO: 53637 - DNA, 13 bp, Artificial Sequence
  Oligonucleotide for detection of SNP TSC0014793
aaattgaaaatta

SEQ ID NO: 53638 - DNA, 13 bp, Artificial Sequence
  Oligonucleotide for detection of SNP TSC0014793
taattttcaattt

SEQ ID NO: 53639 - DNA, 13 bp, Artificial Sequence
  Oligonucleotide for detection of SNP TSC0014793
aaattgtaaatta

SEQ ID NO: 53640 - DNA, 13 bp, Artificial Sequence
  Oligonucleotide for detection of SNP TSC0014793
taatttacaattt

SEQ ID NO: 53641 - DNA, 13 bp, Artificial Sequence
  Oligonucleotide for detection of SNP TSC0014793
tggtttttagttt

SEQ ID NO: 53642 - DNA, 13 bp, Artificial Sequence
  Oligonucleotide for detection of SNP TSC0014793
aaactaaaaacca

SEQ ID NO: 53643 - DNA, 13 bp, Artificial Sequence
  Oligonucleotide for detection of SNP TSC0014793
tggtttgtagttt

SEQ ID NO: 53644 - DNA, 13 bp, Artificial Sequence
  Oligonucleotide for detection of SNP TSC0014793
aaactacaaacca

SEQ ID NO: 53645 - DNA, 13 bp, Artificial Sequence
  Oligonucleotide for detection of SNP TSC0014795
atgataaaatttg

SEQ ID NO: 53646 - DNA, 13 bp, Artificial Sequence
  Oligonucleotide for detection of SNP TSC0014795
caaattttatcat

SEQ ID NO: 53647 - DNA, 13 bp, Artificial Sequence
  Oligonucleotide for detection of SNP TSC0014795
atgatagaatttg

SEQ ID NO: 53648 - DNA, 13 bp, Artificial Sequence
  Oligonucleotide for detection of SNP TSC0014795
caaattctatcat

SEQ ID NO: 53649 - DNA, 13 bp, Artificial Sequence
  Oligonucleotide for detection of SNP TSC0014796
ggttgataattay

SEQ ID NO: 53650 - DNA, 13 bp, Artificial Sequence
  Oligonucleotide for detection of SNP TSC0014796
rtaattatcaacc

SEQ ID NO: 53651 - DNA, 13 bp, Artificial Sequence
  Oligonucleotide for detection of SNP TSC0014796
ggttgagaattay

SEQ ID NO: 53652 - DNA, 13 bp, Artificial Sequence
  Oligonucleotide for detection of SNP TSC0014796
rtaattctcaacc

SEQ ID NO: 53653 - DNA, 13 bp, Artificial Sequence
  Oligonucleotide for detection of SNP TSC0014796
gtaattgttaaty

SEQ ID NO: 53654 - DNA, 13 bp, Artificial Sequence
  Oligonucleotide for detection of SNP TSC0014796
rattaacaattac

SEQ ID NO: 53655 - DNA, 13 bp, Artificial Sequence
  Oligonucleotide for detection of SNP TSC0014796
gtaatttttaaty

SEQ ID NO: 53656 - DNA, 13 bp, Artificial Sequence
  Oligonucleotide for detection of SNP TSC0014796
rattaaaaattac

SEQ ID NO: 53657 - DNA, 13 bp, Artificial Sequence
  Oligonucleotide for detection of SNP TSC0014797
gttattttgtggy

SEQ ID NO: 53658 - DNA, 13 bp, Artificial Sequence
  Oligonucleotide for detection of SNP TSC0014797
rccacaaaataac

SEQ ID NO: 53659 - DNA, 13 bp, Artificial Sequence
  Oligonucleotide for detection of SNP TSC0014797
gttattgtgtggy

SEQ ID NO: 53660 - DNA, 13 bp, Artificial Sequence
  Oligonucleotide for detection of SNP TSC0014797
rccacacaataac

SEQ ID NO: 53661 - DNA, 13 bp, Artificial Sequence
  Oligonucleotide for detection of SNP TSC0014797
gttatagagtaay

SEQ ID NO: 53662 - DNA, 13 bp, Artificial Sequence
  Oligonucleotide for detection of SNP TSC0014797
rttactctataac

SEQ ID NO: 53663 - DNA, 13 bp, Artificial Sequence
  Oligonucleotide for detection of SNP TSC0014797
gttatatagtaay

SEQ ID NO: 53664 - DNA, 13 bp, Artificial Sequence
  Oligonucleotide for detection of SNP TSC0014797
rttactatataac

SEQ ID NO: 53665 - DNA, 13 bp, Artificial Sequence
  Oligonucleotide for detection of SNP TSC0014798
taatgtgtttgay

SEQ ID NO: 53666 - DNA, 13 bp, Artificial Sequence
  Oligonucleotide for detection of SNP TSC0014798
rtcaaacacatta

SEQ ID NO: 53667 - DNA, 13 bp, Artificial Sequence
  Oligonucleotide for detection of SNP TSC0014798
taatgtatttgay

SEQ ID NO: 53668 - DNA, 13 bp, Artificial Sequence
  Oligonucleotide for detection of SNP TSC0014798
rtcaaatacatta

SEQ ID NO: 53669 - DNA, 13 bp, Artificial Sequence
  Oligonucleotide for detection of SNP TSC0014799
tttttaatattga

SEQ ID NO: 53670 - DNA, 13 bp, Artificial Sequence
  Oligonucleotide for detection of SNP TSC0014799
tcaatattaaaaa

SEQ ID NO: 53671 - DNA, 13 bp, Artificial Sequence
  Oligonucleotide for detection of SNP TSC0014799
tttttagtattga

SEQ ID NO: 53672 - DNA, 13 bp, Artificial Sequence
  Oligonucleotide for detection of SNP TSC0014799
tcaatactaaaaa

SEQ ID NO: 53673 - DNA, 13 bp, Artificial Sequence
  Oligonucleotide for detection of SNP TSC0014800
tggaaaattttag

SEQ ID NO: 53674 - DNA, 13 bp, Artificial Sequence
  Oligonucleotide for detection of SNP TSC0014800
ctaaaattttcca

SEQ ID NO: 53675 - DNA, 13 bp, Artificial Sequence
  Oligonucleotide for detection of SNP TSC0014800
tggaaagttttag

SEQ ID NO: 53676 - DNA, 13 bp, Artificial Sequence
  Oligonucleotide for detection of SNP TSC0014800
ctaaaactttcca

SEQ ID NO: 53677 - DNA, 13 bp, Artificial Sequence
  Oligonucleotide for detection of SNP TSC0014801
attgtagtggttg

SEQ ID NO: 53678 - DNA, 13 bp, Artificial Sequence
  Oligonucleotide for detection of SNP TSC0014801
caaccactacaat

SEQ ID NO: 53679 - DNA, 13 bp, Artificial Sequence
  Oligonucleotide for detection of SNP TSC0014801
attgtattggttg

SEQ ID NO: 53680 - DNA, 13 bp, Artificial Sequence
  Oligonucleotide for detection of SNP TSC0014801
caaccaatacaat

SEQ ID NO: 53681 - DNA, 13 bp, Artificial Sequence
  Oligonucleotide for detection of SNP TSC0014801
attgtagcggttg

SEQ ID NO: 53682 - DNA, 13 bp, Artificial Sequence
  Oligonucleotide for detection of SNP TSC0014801
caaccgctacaat

SEQ ID NO: 53683 - DNA, 13 bp, Artificial Sequence
  Oligonucleotide for detection of SNP TSC0014801
attgtatcggttg

SEQ ID NO: 53684 - DNA, 13 bp, Artificial Sequence
  Oligonucleotide for detection of SNP TSC0014801
caaccgatacaat

SEQ ID NO: 53685 - DNA, 13 bp, Artificial Sequence
  Oligonucleotide for detection of SNP TSC0014801
attgtagtggtcg

SEQ ID NO: 53686 - DNA, 13 bp, Artificial Sequence
  Oligonucleotide for detection of SNP TSC0014801
cgaccactacaat

SEQ ID NO: 53687 - DNA, 13 bp, Artificial Sequence
  Oligonucleotide for detection of SNP TSC0014801
attgtattggtcg

SEQ ID NO: 53688 - DNA, 13 bp, Artificial Sequence
  Oligonucleotide for detection of SNP TSC0014801
cgaccaatacaat

SEQ ID NO: 53689 - DNA, 13 bp, Artificial Sequence
  Oligonucleotide for detection of SNP TSC0014801
attgtagcggtcg

SEQ ID NO: 53690 - DNA, 13 bp, Artificial Sequence
  Oligonucleotide for detection of SNP TSC0014801
cgaccgctacaat

SEQ ID NO: 53691 - DNA, 13 bp, Artificial Sequence
  Oligonucleotide for detection of SNP TSC0014801
attgtatcggtcg

SEQ ID NO: 53692 - DNA, 13 bp, Artificial Sequence
  Oligonucleotide for detection of SNP TSC0014801
cgaccgatacaat

SEQ ID NO: 53693 - DNA, 13 bp, Artificial Sequence
  Oligonucleotide for detection of SNP TSC0014801
tgattgttgtaat

SEQ ID NO: 53694 - DNA, 13 bp, Artificial Sequence
  Oligonucleotide for detection of SNP TSC0014801
attacaacaatca

SEQ ID NO: 53695 - DNA, 13 bp, Artificial Sequence
  Oligonucleotide for detection of SNP TSC0014801
tgattgatgtaat

SEQ ID NO: 53696 - DNA, 13 bp, Artificial Sequence
  Oligonucleotide for detection of SNP TSC0014801
attacatcaatca

SEQ ID NO: 53697 - DNA, 13 bp, Artificial Sequence
  Oligonucleotide for detection of SNP TSC0014801
cgattgttgtaat

SEQ ID NO: 53698 - DNA, 13 bp, Artificial Sequence
  Oligonucleotide for detection of SNP TSC0014801
attacaacaatcg

SEQ ID NO: 53699 - DNA, 13 bp, Artificial Sequence
  Oligonucleotide for detection of SNP TSC0014801
cgattgatgtaat

SEQ ID NO: 53700 - DNA, 13 bp, Artificial Sequence
  Oligonucleotide for detection of SNP TSC0014801
attacatcaatcg

SEQ ID NO: 53701 - DNA, 13 bp, Artificial Sequence
  Oligonucleotide for detection of SNP TSC0014801
tgatcgttgtaat

SEQ ID NO: 53702 - DNA, 13 bp, Artificial Sequence
  Oligonucleotide for detection of SNP TSC0014801
attacaacgatca

SEQ ID NO: 53703 - DNA, 13 bp, Artificial Sequence
  Oligonucleotide for detection of SNP TSC0014801
tgatcgatgtaat

SEQ ID NO: 53704 - DNA, 13 bp, Artificial Sequence
  Oligonucleotide for detection of SNP TSC0014801
attacatcgatca

SEQ ID NO: 53705 - DNA, 13 bp, Artificial Sequence
  Oligonucleotide for detection of SNP TSC0014801
cgatcgttgtaat

SEQ ID NO: 53706 - DNA, 13 bp, Artificial Sequence
  Oligonucleotide for detection of SNP TSC0014801
attacaacgatcg

SEQ ID NO: 53707 - DNA, 13 bp, Artificial Sequence
  Oligonucleotide for detection of SNP TSC0014801
cgatcgatgtaat

SEQ ID NO: 53708 - DNA, 13 bp, Artificial Sequence
  Oligonucleotide for detection of SNP TSC0014801
attacatcgatcg

SEQ ID NO: 53709 - DNA, 13 bp, Artificial Sequence
  Oligonucleotide for detection of SNP TSC0014802
aaagaagaaaaat

SEQ ID NO: 53710 - DNA, 13 bp, Artificial Sequence
  Oligonucleotide for detection of SNP TSC0014802
atttttcttcttt

SEQ ID NO: 53711 - DNA, 13 bp, Artificial Sequence
  Oligonucleotide for detection of SNP TSC0014802
aaagaaaaaaaat

SEQ ID NO: 53712 - DNA, 13 bp, Artificial Sequence
  Oligonucleotide for detection of SNP TSC0014802
attttttttcttt

SEQ ID NO: 53713 - DNA, 13 bp, Artificial Sequence
  Oligonucleotide for detection of SNP TSC0014803
ggaagttttattt

SEQ ID NO: 53714 - DNA, 13 bp, Artificial Sequence
  Oligonucleotide for detection of SNP TSC0014803
aaataaaacttcc

SEQ ID NO: 53715 - DNA, 13 bp, Artificial Sequence
  Oligonucleotide for detection of SNP TSC0014803
ggaagtgttattt

SEQ ID NO: 53716 - DNA, 13 bp, Artificial Sequence
  Oligonucleotide for detection of SNP TSC0014803
aaataacacttcc

SEQ ID NO: 53717 - DNA, 13 bp, Artificial Sequence
  Oligonucleotide for detection of SNP TSC0014803
ggaagcgttattt

SEQ ID NO: 53718 - DNA, 13 bp, Artificial Sequence
  Oligonucleotide for detection of SNP TSC0014803
aaataacgcttcc

SEQ ID NO: 53719 - DNA, 13 bp, Artificial Sequence
  Oligonucleotide for detection of SNP TSC0014803
agatgaggtttty

SEQ ID NO: 53720 - DNA, 13 bp, Artificial Sequence
  Oligonucleotide for detection of SNP TSC0014803
raaaacctcatct

SEQ ID NO: 53721 - DNA, 13 bp, Artificial Sequence
  Oligonucleotide for detection of SNP TSC0014803
agatgatgtttty

SEQ ID NO: 53722 - DNA, 13 bp, Artificial Sequence
  Oligonucleotide for detection of SNP TSC0014803
raaaacatcatct

SEQ ID NO: 53723 - DNA, 13 bp, Artificial Sequence
  Oligonucleotide for detection of SNP TSC0014803
agatgacgtttty

SEQ ID NO: 53724 - DNA, 13 bp, Artificial Sequence
  Oligonucleotide for detection of SNP TSC0014803
raaaacgtcatct

SEQ ID NO: 53725 - DNA, 13 bp, Artificial Sequence
  Oligonucleotide for detection of SNP TSC0014807
tggggttgaggty

SEQ ID NO: 53726 - DNA, 13 bp, Artificial Sequence
  Oligonucleotide for detection of SNP TSC0014807
racctcaacccca

SEQ ID NO: 53727 - DNA, 13 bp, Artificial Sequence
  Oligonucleotide for detection of SNP TSC0014807
cggggttgaggty

SEQ ID NO: 53728 - DNA, 13 bp, Artificial Sequence
  Oligonucleotide for detection of SNP TSC0014807
racctcaaccccg

SEQ ID NO: 53729 - DNA, 13 bp, Artificial Sequence
  Oligonucleotide for detection of SNP TSC0014807
tggggtcgaggty

SEQ ID NO: 53730 - DNA, 13 bp, Artificial Sequence
  Oligonucleotide for detection of SNP TSC0014807
racctcgacccca

SEQ ID NO: 53731 - DNA, 13 bp, Artificial Sequence
  Oligonucleotide for detection of SNP TSC0014807
cggggtcgaggty

SEQ ID NO: 53732 - DNA, 13 bp, Artificial Sequence
  Oligonucleotide for detection of SNP TSC0014807
racctcgaccccg

SEQ ID NO: 53733 - DNA, 13 bp, Artificial Sequence
  Oligonucleotide for detection of SNP TSC0014807
ggttttggttttg

SEQ ID NO: 53734 - DNA, 13 bp, Artificial Sequence
  Oligonucleotide for detection of SNP TSC0014807
caaaaccaaaacc

SEQ ID NO: 53735 - DNA, 13 bp, Artificial Sequence
  Oligonucleotide for detection of SNP TSC0014807
ggttttagttttg

SEQ ID NO: 53736 - DNA, 13 bp, Artificial Sequence
  Oligonucleotide for detection of SNP TSC0014807
caaaactaaaacc

SEQ ID NO: 53737 - DNA, 13 bp, Artificial Sequence
  Oligonucleotide for detection of SNP TSC0014807
ggtttcggttttg

SEQ ID NO: 53738 - DNA, 13 bp, Artificial Sequence
  Oligonucleotide for detection of SNP TSC0014807
caaaaccgaaacc

SEQ ID NO: 53739 - DNA, 13 bp, Artificial Sequence
  Oligonucleotide for detection of SNP TSC0014807
ggttttagtttcg

SEQ ID NO: 53740 - DNA, 13 bp, Artificial Sequence
  Oligonucleotide for detection of SNP TSC0014807
cgaaactaaaacc

SEQ ID NO: 53741 - DNA, 13 bp, Artificial Sequence
  Oligonucleotide for detection of SNP TSC0014807
ggttttggtttcg

SEQ ID NO: 53742 - DNA, 13 bp, Artificial Sequence
  Oligonucleotide for detection of SNP TSC0014807
cgaaaccaaaacc

SEQ ID NO: 53743 - DNA, 13 bp, Artificial Sequence
  Oligonucleotide for detection of SNP TSC0014807
ggtttcggtttcg

SEQ ID NO: 53744 - DNA, 13 bp, Artificial Sequence
  Oligonucleotide for detection of SNP TSC0014807
cgaaaccgaaacc

SEQ ID NO: 53745 - DNA, 13 bp, Artificial Sequence
  Oligonucleotide for detection of SNP TSC0014808
tgtagggaaggta

SEQ ID NO: 53746 - DNA, 13 bp, Artificial Sequence
  Oligonucleotide for detection of SNP TSC0014808
taccttccctaca

SEQ ID NO: 53747 - DNA, 13 bp, Artificial Sequence
  Oligonucleotide for detection of SNP TSC0014808
tgtaggaaaggta

SEQ ID NO: 53748 - DNA, 13 bp, Artificial Sequence
  Oligonucleotide for detection of SNP TSC0014808
tacctttcctaca

SEQ ID NO: 53749 - DNA, 13 bp, Artificial Sequence
  Oligonucleotide for detection of SNP TSC0014808
cgtagggaaggta

SEQ ID NO: 53750 - DNA, 13 bp, Artificial Sequence
  Oligonucleotide for detection of SNP TSC0014808
taccttccctacg

SEQ ID NO: 53751 - DNA, 13 bp, Artificial Sequence
  Oligonucleotide for detection of SNP TSC0014808
cgtaggaaaggta

SEQ ID NO: 53752 - DNA, 13 bp, Artificial Sequence
  Oligonucleotide for detection of SNP TSC0014808
tacctttcctacg

SEQ ID NO: 53753 - DNA, 13 bp, Artificial Sequence
  Oligonucleotide for detection of SNP TSC0014809
tttttttggatag

SEQ ID NO: 53754 - DNA, 13 bp, Artificial Sequence
  Oligonucleotide for detection of SNP TSC0014809
ctatccaaaaaaa

SEQ ID NO: 53755 - DNA, 13 bp, Artificial Sequence
  Oligonucleotide for detection of SNP TSC0014809
ttttttcggatag

SEQ ID NO: 53756 - DNA, 13 bp, Artificial Sequence
  Oligonucleotide for detection of SNP TSC0014809
ctatccgaaaaaa

SEQ ID NO: 53757 - DNA, 13 bp, Artificial Sequence
  Oligonucleotide for detection of SNP TSC0014809
ttgtttgagaaaa

SEQ ID NO: 53758 - DNA, 13 bp, Artificial Sequence
  Oligonucleotide for detection of SNP TSC0014809
ttttctcaaacaa

SEQ ID NO: 53759 - DNA, 13 bp, Artificial Sequence
  Oligonucleotide for detection of SNP TSC0014809
ttgtttaagaaaa

SEQ ID NO: 53760 - DNA, 13 bp, Artificial Sequence
  Oligonucleotide for detection of SNP TSC0014809
ttttcttaaacaa

SEQ ID NO: 53761 - DNA, 13 bp, Artificial Sequence
  Oligonucleotide for detection of SNP TSC0014809
ttgttcgagaaaa

SEQ ID NO: 53762 - DNA, 13 bp, Artificial Sequence
  Oligonucleotide for detection of SNP TSC0014809
ttttctcgaacaa

SEQ ID NO: 53763 - DNA, 13 bp, Artificial Sequence
  Oligonucleotide for detection of SNP TSC0014810
ttggaatgtttat

SEQ ID NO: 53764 - DNA, 13 bp, Artificial Sequence
  Oligonucleotide for detection of SNP TSC0014810
ataaacattccaa

SEQ ID NO: 53765 - DNA, 13 bp, Artificial Sequence
  Oligonucleotide for detection of SNP TSC0014810
ttggaacgtttat

SEQ ID NO: 53766 - DNA, 13 bp, Artificial Sequence
  Oligonucleotide for detection of SNP TSC0014810
ataaacgttccaa

SEQ ID NO: 53767 - DNA, 13 bp, Artificial Sequence
  Oligonucleotide for detection of SNP TSC0014810
ataggcgttttag

SEQ ID NO: 53768 - DNA, 13 bp, Artificial Sequence
  Oligonucleotide for detection of SNP TSC0014810
ctaaaacgcctat

SEQ ID NO: 53769 - DNA, 13 bp, Artificial Sequence
  Oligonucleotide for detection of SNP TSC0014811
tatttatgtttgt

SEQ ID NO: 53770 - DNA, 13 bp, Artificial Sequence
  Oligonucleotide for detection of SNP TSC0014811
acaaacataaata

SEQ ID NO: 53771 - DNA, 13 bp, Artificial Sequence
  Oligonucleotide for detection of SNP TSC0014811
tatttacgtttgt

SEQ ID NO: 53772 - DNA, 13 bp, Artificial Sequence
  Oligonucleotide for detection of SNP TSC0014811
acaaacgtaaata

SEQ ID NO: 53773 - DNA, 13 bp, Artificial Sequence
  Oligonucleotide for detection of SNP TSC0014811
tatttatgttcgt

SEQ ID NO: 53774 - DNA, 13 bp, Artificial Sequence
  Oligonucleotide for detection of SNP TSC0014811
acgaacataaata

SEQ ID NO: 53775 - DNA, 13 bp, Artificial Sequence
  Oligonucleotide for detection of SNP TSC0014811
tatttacgttcgt

SEQ ID NO: 53776 - DNA, 13 bp, Artificial Sequence
  Oligonucleotide for detection of SNP TSC0014811
acgaacgtaaata

SEQ ID NO: 53777 - DNA, 13 bp, Artificial Sequence
  Oligonucleotide for detection of SNP TSC0014811
atgggtgtgggtg

SEQ ID NO: 53778 - DNA, 13 bp, Artificial Sequence
  Oligonucleotide for detection of SNP TSC0014811
cacccacacccat

SEQ ID NO: 53779 - DNA, 13 bp, Artificial Sequence
  Oligonucleotide for detection of SNP TSC0014811
atgggtatgggtg

SEQ ID NO: 53780 - DNA, 13 bp, Artificial Sequence
  Oligonucleotide for detection of SNP TSC0014811
cacccatacccat

SEQ ID NO: 53781 - DNA, 13 bp, Artificial Sequence
  Oligonucleotide for detection of SNP TSC0014811
acgggtgtgggtg

SEQ ID NO: 53782 - DNA, 13 bp, Artificial Sequence
  Oligonucleotide for detection of SNP TSC0014811
cacccacacccgt

SEQ ID NO: 53783 - DNA, 13 bp, Artificial Sequence
  Oligonucleotide for detection of SNP TSC0014811
acgggtatgggtg

SEQ ID NO: 53784 - DNA, 13 bp, Artificial Sequence
  Oligonucleotide for detection of SNP TSC0014811
cacccatacccgt

SEQ ID NO: 53785 - DNA, 13 bp, Artificial Sequence
  Oligonucleotide for detection of SNP TSC0014811
atgggcgtgggtg

SEQ ID NO: 53786 - DNA, 13 bp, Artificial Sequence
  Oligonucleotide for detection of SNP TSC0014811
cacccacgcccat

SEQ ID NO: 53787 - DNA, 13 bp, Artificial Sequence
  Oligonucleotide for detection of SNP TSC0014811
acgggcgtgggtg

SEQ ID NO: 53788 - DNA, 13 bp, Artificial Sequence
  Oligonucleotide for detection of SNP TSC0014811
cacccacgcccgt

SEQ ID NO: 53789 - DNA, 13 bp, Artificial Sequence
  Oligonucleotide for detection of SNP TSC0014813
aaaagagaagaaa

SEQ ID NO: 53790 - DNA, 13 bp, Artificial Sequence
  Oligonucleotide for detection of SNP TSC0014813
tttcttctctttt

SEQ ID NO: 53791 - DNA, 13 bp, Artificial Sequence
  Oligonucleotide for detection of SNP TSC0014813
aaaagaaaagaaa

SEQ ID NO: 53792 - DNA, 13 bp, Artificial Sequence
  Oligonucleotide for detection of SNP TSC0014813
tttcttttctttt

SEQ ID NO: 53793 - DNA, 13 bp, Artificial Sequence
  Oligonucleotide for detection of SNP TSC0014814
taatgttttttgt

SEQ ID NO: 53794 - DNA, 13 bp, Artificial Sequence
  Oligonucleotide for detection of SNP TSC0014814
acaaaaaacatta

SEQ ID NO: 53795 - DNA, 13 bp, Artificial Sequence
  Oligonucleotide for detection of SNP TSC0014814
taatgtgttttgt

SEQ ID NO: 53796 - DNA, 13 bp, Artificial Sequence
  Oligonucleotide for detection of SNP TSC0014814
acaaaacacatta

SEQ ID NO: 53797 - DNA, 13 bp, Artificial Sequence
  Oligonucleotide for detection of SNP TSC0014814
taatgcgttttgt

SEQ ID NO: 53798 - DNA, 13 bp, Artificial Sequence
  Oligonucleotide for detection of SNP TSC0014814
acaaaacgcatta

SEQ ID NO: 53799 - DNA, 13 bp, Artificial Sequence
  Oligonucleotide for detection of SNP TSC0014814
atagaaggtattg

SEQ ID NO: 53800 - DNA, 13 bp, Artificial Sequence
  Oligonucleotide for detection of SNP TSC0014814
caataccttctat

SEQ ID NO: 53801 - DNA, 13 bp, Artificial Sequence
  Oligonucleotide for detection of SNP TSC0014814
atagaatgtattg

SEQ ID NO: 53802 - DNA, 13 bp, Artificial Sequence
  Oligonucleotide for detection of SNP TSC0014814
caatacattctat

SEQ ID NO: 53803 - DNA, 13 bp, Artificial Sequence
  Oligonucleotide for detection of SNP TSC0014814
atagaacgtattg

SEQ ID NO: 53804 - DNA, 13 bp, Artificial Sequence
  Oligonucleotide for detection of SNP TSC0014814
caatacgttctat

SEQ ID NO: 53805 - DNA, 13 bp, Artificial Sequence
  Oligonucleotide for detection of SNP TSC0014815
attttaaggttty

SEQ ID NO: 53806 - DNA, 13 bp, Artificial Sequence
  Oligonucleotide for detection of SNP TSC0014815
raaaccttaaaat

SEQ ID NO: 53807 - DNA, 13 bp, Artificial Sequence
  Oligonucleotide for detection of SNP TSC0014815
attttatggttty

SEQ ID NO: 53808 - DNA, 13 bp, Artificial Sequence
  Oligonucleotide for detection of SNP TSC0014815
raaaccataaaat

SEQ ID NO: 53809 - DNA, 13 bp, Artificial Sequence
  Oligonucleotide for detection of SNP TSC0014815
gagattttggaat

SEQ ID NO: 53810 - DNA, 13 bp, Artificial Sequence
  Oligonucleotide for detection of SNP TSC0014815
attccaaaatctc

SEQ ID NO: 53811 - DNA, 13 bp, Artificial Sequence
  Oligonucleotide for detection of SNP TSC0014815
gagattatggaat

SEQ ID NO: 53812 - DNA, 13 bp, Artificial Sequence
  Oligonucleotide for detection of SNP TSC0014815
attccataatctc

SEQ ID NO: 53813 - DNA, 13 bp, Artificial Sequence
  Oligonucleotide for detection of SNP TSC0014816
ggtggtagtggay

SEQ ID NO: 53814 - DNA, 13 bp, Artificial Sequence
  Oligonucleotide for detection of SNP TSC0014816
rtccactaccacc

SEQ ID NO: 53815 - DNA, 13 bp, Artificial Sequence
  Oligonucleotide for detection of SNP TSC0014816
ggtggtggtggay

SEQ ID NO: 53816 - DNA, 13 bp, Artificial Sequence
  Oligonucleotide for detection of SNP TSC0014816
rtccaccaccacc

SEQ ID NO: 53817 - DNA, 13 bp, Artificial Sequence
  Oligonucleotide for detection of SNP TSC0014817
tgtgtagtagtag

SEQ ID NO: 53818 - DNA, 13 bp, Artificial Sequence
  Oligonucleotide for detection of SNP TSC0014817
ctactactacaca

SEQ ID NO: 53819 - DNA, 13 bp, Artificial Sequence
  Oligonucleotide for detection of SNP TSC0014817
tgtgtaatagtag

SEQ ID NO: 53820 - DNA, 13 bp, Artificial Sequence
  Oligonucleotide for detection of SNP TSC0014817
ctactattacaca

SEQ ID NO: 53821 - DNA, 13 bp, Artificial Sequence
  Oligonucleotide for detection of SNP TSC0014818
aggtagaaggaat

SEQ ID NO: 53822 - DNA, 13 bp, Artificial Sequence
  Oligonucleotide for detection of SNP TSC0014818
attccttctacct

SEQ ID NO: 53823 - DNA, 13 bp, Artificial Sequence
  Oligonucleotide for detection of SNP TSC0014818
aggtagtaggaat

SEQ ID NO: 53824 - DNA, 13 bp, Artificial Sequence
  Oligonucleotide for detection of SNP TSC0014818
attcctactacct

SEQ ID NO: 53825 - DNA, 13 bp, Artificial Sequence
  Oligonucleotide for detection of SNP TSC0014818
attttttttgttt

SEQ ID NO: 53826 - DNA, 13 bp, Artificial Sequence
  Oligonucleotide for detection of SNP TSC0014818
aaacaaaaaaaat

SEQ ID NO: 53827 - DNA, 13 bp, Artificial Sequence
  Oligonucleotide for detection of SNP TSC0014818
atttttgttgttt

SEQ ID NO: 53828 - DNA, 13 bp, Artificial Sequence
  Oligonucleotide for detection of SNP TSC0014818
aaacaacaaaaat

SEQ ID NO: 53829 - DNA, 13 bp, Artificial Sequence
  Oligonucleotide for detection of SNP TSC0014819
ggtagaaggaata

SEQ ID NO: 53830 - DNA, 13 bp, Artificial Sequence
  Oligonucleotide for detection of SNP TSC0014819
tattccttctacc

SEQ ID NO: 53831 - DNA, 13 bp, Artificial Sequence
  Oligonucleotide for detection of SNP TSC0014819
ggtagagggaata

SEQ ID NO: 53832 - DNA, 13 bp, Artificial Sequence
  Oligonucleotide for detection of SNP TSC0014819
tattccctctacc

SEQ ID NO: 53833 - DNA, 13 bp, Artificial Sequence
  Oligonucleotide for detection of SNP TSC0014820
gaaagtatataty

SEQ ID NO: 53834 - DNA, 13 bp, Artificial Sequence
  Oligonucleotide for detection of SNP TSC0014820
ratatatactttc

SEQ ID NO: 53835 - DNA, 13 bp, Artificial Sequence
  Oligonucleotide for detection of SNP TSC0014820
gaaagtgtataty

SEQ ID NO: 53836 - DNA, 13 bp, Artificial Sequence
  Oligonucleotide for detection of SNP TSC0014820
ratatacactttc

SEQ ID NO: 53837 - DNA, 13 bp, Artificial Sequence
  Oligonucleotide for detection of SNP TSC0014820
gaaagcgtataty

SEQ ID NO: 53838 - DNA, 13 bp, Artificial Sequence
  Oligonucleotide for detection of SNP TSC0014820
ratatacgctttc

SEQ ID NO: 53839 - DNA, 13 bp, Artificial Sequence
  Oligonucleotide for detection of SNP TSC0014820
gatgtatgtttty

SEQ ID NO: 53840 - DNA, 13 bp, Artificial Sequence
  Oligonucleotide for detection of SNP TSC0014820
raaaacatacatc

SEQ ID NO: 53841 - DNA, 13 bp, Artificial Sequence
  Oligonucleotide for detection of SNP TSC0014820
gatgtacgtttty

SEQ ID NO: 53842 - DNA, 13 bp, Artificial Sequence
  Oligonucleotide for detection of SNP TSC0014820
raaaacgtacatc

SEQ ID NO: 53843 - DNA, 13 bp, Artificial Sequence
  Oligonucleotide for detection of SNP TSC0014821
ttatttagtaaat

SEQ ID NO: 53844 - DNA, 13 bp, Artificial Sequence
  Oligonucleotide for detection of SNP TSC0014821
atttactaaataa

SEQ ID NO: 53845 - DNA, 13 bp, Artificial Sequence
  Oligonucleotide for detection of SNP TSC0014821
ttatttggtaaat

SEQ ID NO: 53846 - DNA, 13 bp, Artificial Sequence
  Oligonucleotide for detection of SNP TSC0014821
atttaccaaataa

SEQ ID NO: 53847 - DNA, 13 bp, Artificial Sequence
  Oligonucleotide for detection of SNP TSC0014822
taatttagtttty

SEQ ID NO: 53848 - DNA, 13 bp, Artificial Sequence
  Oligonucleotide for detection of SNP TSC0014822
raaaactaaatta

SEQ ID NO: 53849 - DNA, 13 bp, Artificial Sequence
  Oligonucleotide for detection of SNP TSC0014822
taattttgtttty

SEQ ID NO: 53850 - DNA, 13 bp, Artificial Sequence
  Oligonucleotide for detection of SNP TSC0014822
raaaacaaaatta

SEQ ID NO: 53851 - DNA, 13 bp, Artificial Sequence
  Oligonucleotide for detection of SNP TSC0014822
taatttcgtttty

SEQ ID NO: 53852 - DNA, 13 bp, Artificial Sequence
  Oligonucleotide for detection of SNP TSC0014822
raaaacgaaatta

SEQ ID NO: 53853 - DNA, 13 bp, Artificial Sequence
  Oligonucleotide for detection of SNP TSC0014822
gggaattaagttg

SEQ ID NO: 53854 - DNA, 13 bp, Artificial Sequence
  Oligonucleotide for detection of SNP TSC0014822
caacttaattccc

SEQ ID NO: 53855 - DNA, 13 bp, Artificial Sequence
  Oligonucleotide for detection of SNP TSC0014822
gggaatgaagttg

SEQ ID NO: 53856 - DNA, 13 bp, Artificial Sequence
  Oligonucleotide for detection of SNP TSC0014822
caacttcattccc

SEQ ID NO: 53857 - DNA, 13 bp, Artificial Sequence
  Oligonucleotide for detection of SNP TSC0014822
gggaacgaagttg

SEQ ID NO: 53858 - DNA, 13 bp, Artificial Sequence
  Oligonucleotide for detection of SNP TSC0014822
caacttcgttccc

SEQ ID NO: 53859 - DNA, 13 bp, Artificial Sequence
  Oligonucleotide for detection of SNP TSC0014823
gtgggaatttttt

SEQ ID NO: 53860 - DNA, 13 bp, Artificial Sequence
  Oligonucleotide for detection of SNP TSC0014823
aaaaaattcccac

SEQ ID NO: 53861 - DNA, 13 bp, Artificial Sequence
  Oligonucleotide for detection of SNP TSC0014823
gtgggattttttt

SEQ ID NO: 53862 - DNA, 13 bp, Artificial Sequence
  Oligonucleotide for detection of SNP TSC0014823
aaaaaaatcccac

SEQ ID NO: 53863 - DNA, 13 bp, Artificial Sequence
  Oligonucleotide for detection of SNP TSC0014823
agaagatttttay

SEQ ID NO: 53864 - DNA, 13 bp, Artificial Sequence
  Oligonucleotide for detection of SNP TSC0014823
rtaaaaatcttct

SEQ ID NO: 53865 - DNA, 13 bp, Artificial Sequence
  Oligonucleotide for detection of SNP TSC0014823
agaagaattttay

SEQ ID NO: 53866 - DNA, 13 bp, Artificial Sequence
  Oligonucleotide for detection of SNP TSC0014823
rtaaaattcttct

SEQ ID NO: 53867 - DNA, 13 bp, Artificial Sequence
  Oligonucleotide for detection of SNP TSC0014824
gtttgaataagty

SEQ ID NO: 53868 - DNA, 13 bp, Artificial Sequence
  Oligonucleotide for detection of SNP TSC0014824
racttattcaaac

SEQ ID NO: 53869 - DNA, 13 bp, Artificial Sequence
  Oligonucleotide for detection of SNP TSC0014824
gtttgagtaagty

SEQ ID NO: 53870 - DNA, 13 bp, Artificial Sequence
  Oligonucleotide for detection of SNP TSC0014824
racttactcaaac

SEQ ID NO: 53871 - DNA, 13 bp, Artificial Sequence
  Oligonucleotide for detection of SNP TSC0014825
ggtataaaaatat

SEQ ID NO: 53872 - DNA, 13 bp, Artificial Sequence
  Oligonucleotide for detection of SNP TSC0014825
atatttttatacc

SEQ ID NO: 53873 - DNA, 13 bp, Artificial Sequence
  Oligonucleotide for detection of SNP TSC0014825
ggtatataaatat

SEQ ID NO: 53874 - DNA, 13 bp, Artificial Sequence
  Oligonucleotide for detection of SNP TSC0014825
atatttatatacc

SEQ ID NO: 53875 - DNA, 13 bp, Artificial Sequence
  Oligonucleotide for detection of SNP TSC0014825
atatttttataty

SEQ ID NO: 53876 - DNA, 13 bp, Artificial Sequence
  Oligonucleotide for detection of SNP TSC0014825
ratataaaaatat

SEQ ID NO: 53877 - DNA, 13 bp, Artificial Sequence
  Oligonucleotide for detection of SNP TSC0014825
atatttatataty

SEQ ID NO: 53878 - DNA, 13 bp, Artificial Sequence
  Oligonucleotide for detection of SNP TSC0014825
ratatataaatat

SEQ ID NO: 53879 - DNA, 13 bp, Artificial Sequence
  Oligonucleotide for detection of SNP TSC0014826
taaaaaaagttaa

SEQ ID NO: 53880 - DNA, 13 bp, Artificial Sequence
  Oligonucleotide for detection of SNP TSC0014826
ttaacttttttta

SEQ ID NO: 53881 - DNA, 13 bp, Artificial Sequence
  Oligonucleotide for detection of SNP TSC0014826
taaaaagagttaa

SEQ ID NO: 53882 - DNA, 13 bp, Artificial Sequence
  Oligonucleotide for detection of SNP TSC0014826
ttaactcttttta

SEQ ID NO: 53883 - DNA, 13 bp, Artificial Sequence
  Oligonucleotide for detection of SNP TSC0014827
tagtattggaggt

SEQ ID NO: 53884 - DNA, 13 bp, Artificial Sequence
  Oligonucleotide for detection of SNP TSC0014827
acctccaatacta

SEQ ID NO: 53885 - DNA, 13 bp, Artificial Sequence
  Oligonucleotide for detection of SNP TSC0014827
tagtatcggaggt

SEQ ID NO: 53886 - DNA, 13 bp, Artificial Sequence
  Oligonucleotide for detection of SNP TSC0014827
acctccgatacta

SEQ ID NO: 53887 - DNA, 13 bp, Artificial Sequence
  Oligonucleotide for detection of SNP TSC0014827
atttttgatgttg

SEQ ID NO: 53888 - DNA, 13 bp, Artificial Sequence
  Oligonucleotide for detection of SNP TSC0014827
caacatcaaaaat

SEQ ID NO: 53889 - DNA, 13 bp, Artificial Sequence
  Oligonucleotide for detection of SNP TSC0014827
atttttaatgttg

SEQ ID NO: 53890 - DNA, 13 bp, Artificial Sequence
  Oligonucleotide for detection of SNP TSC0014827
caacattaaaaat

SEQ ID NO: 53891 - DNA, 13 bp, Artificial Sequence
  Oligonucleotide for detection of SNP TSC0014827
attttcgatgttg

SEQ ID NO: 53892 - DNA, 13 bp, Artificial Sequence
  Oligonucleotide for detection of SNP TSC0014827
caacatcgaaaat

SEQ ID NO: 53893 - DNA, 13 bp, Artificial Sequence
  Oligonucleotide for detection of SNP TSC0014828
tattagggatata

SEQ ID NO: 53894 - DNA, 13 bp, Artificial Sequence
  Oligonucleotide for detection of SNP TSC0014828
tatatccctaata

SEQ ID NO: 53895 - DNA, 13 bp, Artificial Sequence
  Oligonucleotide for detection of SNP TSC0014828
tattagtgatata

SEQ ID NO: 53896 - DNA, 13 bp, Artificial Sequence
  Oligonucleotide for detection of SNP TSC0014828
tatatcactaata

SEQ ID NO: 53897 - DNA, 13 bp, Artificial Sequence
  Oligonucleotide for detection of SNP TSC0014828
tgtgtttttaata

SEQ ID NO: 53898 - DNA, 13 bp, Artificial Sequence
  Oligonucleotide for detection of SNP TSC0014828
tattaaaaacaca

SEQ ID NO: 53899 - DNA, 13 bp, Artificial Sequence
  Oligonucleotide for detection of SNP TSC0014828
tgtgttattaata

SEQ ID NO: 53900 - DNA, 13 bp, Artificial Sequence
  Oligonucleotide for detection of SNP TSC0014828
tattaataacaca

SEQ ID NO: 53901 - DNA, 13 bp, Artificial Sequence
  Oligonucleotide for detection of SNP TSC0014829
ttgattgtgttty

SEQ ID NO: 53902 - DNA, 13 bp, Artificial Sequence
  Oligonucleotide for detection of SNP TSC0014829
raaacacaatcaa

SEQ ID NO: 53903 - DNA, 13 bp, Artificial Sequence
  Oligonucleotide for detection of SNP TSC0014829
ttgattatgttty

SEQ ID NO: 53904 - DNA, 13 bp, Artificial Sequence
  Oligonucleotide for detection of SNP TSC0014829
raaacataatcaa

SEQ ID NO: 53905 - DNA, 13 bp, Artificial Sequence
  Oligonucleotide for detection of SNP TSC0014830
ttttgtatggaay

SEQ ID NO: 53906 - DNA, 13 bp, Artificial Sequence
  Oligonucleotide for detection of SNP TSC0014830
rttccatacaaaa

SEQ ID NO: 53907 - DNA, 13 bp, Artificial Sequence
  Oligonucleotide for detection of SNP TSC0014830
ttttgtgtggaay

SEQ ID NO: 53908 - DNA, 13 bp, Artificial Sequence
  Oligonucleotide for detection of SNP TSC0014830
rttccacacaaaa

SEQ ID NO: 53909 - DNA, 13 bp, Artificial Sequence
  Oligonucleotide for detection of SNP TSC0014830
ttttgcgtggaay

SEQ ID NO: 53910 - DNA, 13 bp, Artificial Sequence
  Oligonucleotide for detection of SNP TSC0014830
rttccacgcaaaa

SEQ ID NO: 53911 - DNA, 13 bp, Artificial Sequence
  Oligonucleotide for detection of SNP TSC0014830
gttttatgtaaag

SEQ ID NO: 53912 - DNA, 13 bp, Artificial Sequence
  Oligonucleotide for detection of SNP TSC0014830
ctttacataaaac

SEQ ID NO: 53913 - DNA, 13 bp, Artificial Sequence
  Oligonucleotide for detection of SNP TSC0014830
gttttacgtaaag

SEQ ID NO: 53914 - DNA, 13 bp, Artificial Sequence
  Oligonucleotide for detection of SNP TSC0014830
ctttacgtaaaac

SEQ ID NO: 53915 - DNA, 13 bp, Artificial Sequence
  Oligonucleotide for detection of SNP TSC0014831
tgggaattatttg

SEQ ID NO: 53916 - DNA, 13 bp, Artificial Sequence
  Oligonucleotide for detection of SNP TSC0014831
caaataattccca

SEQ ID NO: 53917 - DNA, 13 bp, Artificial Sequence
  Oligonucleotide for detection of SNP TSC0014831
tgggaagtatttg

SEQ ID NO: 53918 - DNA, 13 bp, Artificial Sequence
  Oligonucleotide for detection of SNP TSC0014831
caaatacttccca

SEQ ID NO: 53919 - DNA, 13 bp, Artificial Sequence
  Oligonucleotide for detection of SNP TSC0014831
taagtggttttta

SEQ ID NO: 53920 - DNA, 13 bp, Artificial Sequence
  Oligonucleotide for detection of SNP TSC0014831
taaaaaccactta

SEQ ID NO: 53921 - DNA, 13 bp, Artificial Sequence
  Oligonucleotide for detection of SNP TSC0014831
taagtgtttttta

SEQ ID NO: 53922 - DNA, 13 bp, Artificial Sequence
  Oligonucleotide for detection of SNP TSC0014831
taaaaaacactta

SEQ ID NO: 53923 - DNA, 13 bp, Artificial Sequence
  Oligonucleotide for detection of SNP TSC0014834
ttttgggaatata

SEQ ID NO: 53924 - DNA, 13 bp, Artificial Sequence
  Oligonucleotide for detection of SNP TSC0014834
tatattcccaaaa

SEQ ID NO: 53925 - DNA, 13 bp, Artificial Sequence
  Oligonucleotide for detection of SNP TSC0014834
ttttggaaatata

SEQ ID NO: 53926 - DNA, 13 bp, Artificial Sequence
  Oligonucleotide for detection of SNP TSC0014834
tatatttccaaaa

SEQ ID NO: 53927 - DNA, 13 bp, Artificial Sequence
  Oligonucleotide for detection of SNP TSC0014835
attgatgttaagg

SEQ ID NO: 53928 - DNA, 13 bp, Artificial Sequence
  Oligonucleotide for detection of SNP TSC0014835
ccttaacatcaat

SEQ ID NO: 53929 - DNA, 13 bp, Artificial Sequence
  Oligonucleotide for detection of SNP TSC0014835
attgattttaagg

SEQ ID NO: 53930 - DNA, 13 bp, Artificial Sequence
  Oligonucleotide for detection of SNP TSC0014835
ccttaaaatcaat

SEQ ID NO: 53931 - DNA, 13 bp, Artificial Sequence
  Oligonucleotide for detection of SNP TSC0014835
ttttagtattaat

SEQ ID NO: 53932 - DNA, 13 bp, Artificial Sequence
  Oligonucleotide for detection of SNP TSC0014835
attaatactaaaa

SEQ ID NO: 53933 - DNA, 13 bp, Artificial Sequence
  Oligonucleotide for detection of SNP TSC0014835
ttttagaattaat

SEQ ID NO: 53934 - DNA, 13 bp, Artificial Sequence
  Oligonucleotide for detection of SNP TSC0014835
attaattctaaaa

SEQ ID NO: 53935 - DNA, 13 bp, Artificial Sequence
  Oligonucleotide for detection of SNP TSC0014836
taggatgtgaatt

SEQ ID NO: 53936 - DNA, 13 bp, Artificial Sequence
  Oligonucleotide for detection of SNP TSC0014836
aattcacatccta

SEQ ID NO: 53937 - DNA, 13 bp, Artificial Sequence
  Oligonucleotide for detection of SNP TSC0014836
taggatatgaatt

SEQ ID NO: 53938 - DNA, 13 bp, Artificial Sequence
  Oligonucleotide for detection of SNP TSC0014836
aattcatatccta

SEQ ID NO: 53939 - DNA, 13 bp, Artificial Sequence
  Oligonucleotide for detection of SNP TSC0014836
taggacgtgaatt

SEQ ID NO: 53940 - DNA, 13 bp, Artificial Sequence
  Oligonucleotide for detection of SNP TSC0014836
aattcacgtccta

SEQ ID NO: 53941 - DNA, 13 bp, Artificial Sequence
  Oligonucleotide for detection of SNP TSC0014838
gtaataattttay

SEQ ID NO: 53942 - DNA, 13 bp, Artificial Sequence
  Oligonucleotide for detection of SNP TSC0014838
rtaaaattattac

SEQ ID NO: 53943 - DNA, 13 bp, Artificial Sequence
  Oligonucleotide for detection of SNP TSC0014838
gtaatatttttay

SEQ ID NO: 53944 - DNA, 13 bp, Artificial Sequence
  Oligonucleotide for detection of SNP TSC0014838
rtaaaaatattac

SEQ ID NO: 53945 - DNA, 13 bp, Artificial Sequence
  Oligonucleotide for detection of SNP TSC0014838
gtggagttgttay

SEQ ID NO: 53946 - DNA, 13 bp, Artificial Sequence
  Oligonucleotide for detection of SNP TSC0014838
rtaacaactccac

SEQ ID NO: 53947 - DNA, 13 bp, Artificial Sequence
  Oligonucleotide for detection of SNP TSC0014838
gtggagatgttay

SEQ ID NO: 53948 - DNA, 13 bp, Artificial Sequence
  Oligonucleotide for detection of SNP TSC0014838
rtaacatctccac

SEQ ID NO: 53949 - DNA, 13 bp, Artificial Sequence
  Oligonucleotide for detection of SNP TSC0014839
ttattaagtggty

SEQ ID NO: 53950 - DNA, 13 bp, Artificial Sequence
  Oligonucleotide for detection of SNP TSC0014839
raccacttaataa

SEQ ID NO: 53951 - DNA, 13 bp, Artificial Sequence
  Oligonucleotide for detection of SNP TSC0014839
ggttatttagtgg

SEQ ID NO: 53952 - DNA, 13 bp, Artificial Sequence
  Oligonucleotide for detection of SNP TSC0014839
ccactaaataacc

SEQ ID NO: 53953 - DNA, 13 bp, Artificial Sequence
  Oligonucleotide for detection of SNP TSC0014839
ggttatgtagtgg

SEQ ID NO: 53954 - DNA, 13 bp, Artificial Sequence
  Oligonucleotide for detection of SNP TSC0014839
ccactacataacc

SEQ ID NO: 53955 - DNA, 13 bp, Artificial Sequence
  Oligonucleotide for detection of SNP TSC0014839
ggttacgtagtgg

SEQ ID NO: 53956 - DNA, 13 bp, Artificial Sequence
  Oligonucleotide for detection of SNP TSC0014839
ccactacgtaacc

SEQ ID NO: 53957 - DNA, 13 bp, Artificial Sequence
  Oligonucleotide for detection of SNP TSC0014842
tgagggtgtatta

SEQ ID NO: 53958 - DNA, 13 bp, Artificial Sequence
  Oligonucleotide for detection of SNP TSC0014842
taatacaccctca

SEQ ID NO: 53959 - DNA, 13 bp, Artificial Sequence
  Oligonucleotide for detection of SNP TSC0014842
tgagggcgtatta

SEQ ID NO: 53960 - DNA, 13 bp, Artificial Sequence
  Oligonucleotide for detection of SNP TSC0014842
taatacgccctca

SEQ ID NO: 53961 - DNA, 13 bp, Artificial Sequence
  Oligonucleotide for detection of SNP TSC0014842
taatgtattttta

SEQ ID NO: 53962 - DNA, 13 bp, Artificial Sequence
  Oligonucleotide for detection of SNP TSC0014842
taaaaatacatta

SEQ ID NO: 53963 - DNA, 13 bp, Artificial Sequence
  Oligonucleotide for detection of SNP TSC0014843
atgtaaattagtg

SEQ ID NO: 53964 - DNA, 13 bp, Artificial Sequence
  Oligonucleotide for detection of SNP TSC0014843
cactaatttacat

SEQ ID NO: 53965 - DNA, 13 bp, Artificial Sequence
  Oligonucleotide for detection of SNP TSC0014843
atgtaatttagtg

SEQ ID NO: 53966 - DNA, 13 bp, Artificial Sequence
  Oligonucleotide for detection of SNP TSC0014843
cactaaattacat

SEQ ID NO: 53967 - DNA, 13 bp, Artificial Sequence
  Oligonucleotide for detection of SNP TSC0014843
atgtaaattagcg

SEQ ID NO: 53968 - DNA, 13 bp, Artificial Sequence
  Oligonucleotide for detection of SNP TSC0014843
cgctaatttacat

SEQ ID NO: 53969 - DNA, 13 bp, Artificial Sequence
  Oligonucleotide for detection of SNP TSC0014843
atgtaatttagcg

SEQ ID NO: 53970 - DNA, 13 bp, Artificial Sequence
  Oligonucleotide for detection of SNP TSC0014843
cgctaaattacat

SEQ ID NO: 53971 - DNA, 13 bp, Artificial Sequence
  Oligonucleotide for detection of SNP TSC0014843
tgttaatttgtat

SEQ ID NO: 53972 - DNA, 13 bp, Artificial Sequence
  Oligonucleotide for detection of SNP TSC0014843
atacaaattaaca

SEQ ID NO: 53973 - DNA, 13 bp, Artificial Sequence
  Oligonucleotide for detection of SNP TSC0014843
tgttaagttgtat

SEQ ID NO: 53974 - DNA, 13 bp, Artificial Sequence
  Oligonucleotide for detection of SNP TSC0014843
atacaacttaaca

SEQ ID NO: 53975 - DNA, 13 bp, Artificial Sequence
  Oligonucleotide for detection of SNP TSC0014843
cgttaatttgtat

SEQ ID NO: 53976 - DNA, 13 bp, Artificial Sequence
  Oligonucleotide for detection of SNP TSC0014843
atacaaattaacg

SEQ ID NO: 53977 - DNA, 13 bp, Artificial Sequence
  Oligonucleotide for detection of SNP TSC0014843
cgttaagttgtat

SEQ ID NO: 53978 - DNA, 13 bp, Artificial Sequence
  Oligonucleotide for detection of SNP TSC0014843
atacaacttaacg

SEQ ID NO: 53979 - DNA, 13 bp, Artificial Sequence
  Oligonucleotide for detection of SNP TSC0014844
ataattgttgata

SEQ ID NO: 53980 - DNA, 13 bp, Artificial Sequence
  Oligonucleotide for detection of SNP TSC0014844
tatcaacaattat

SEQ ID NO: 53981 - DNA, 13 bp, Artificial Sequence
  Oligonucleotide for detection of SNP TSC0014844
ataattattgata

SEQ ID NO: 53982 - DNA, 13 bp, Artificial Sequence
  Oligonucleotide for detection of SNP TSC0014844
tatcaataattat

SEQ ID NO: 53983 - DNA, 13 bp, Artificial Sequence
  Oligonucleotide for detection of SNP TSC0014845
taaggaatagagg

SEQ ID NO: 53984 - DNA, 13 bp, Artificial Sequence
  Oligonucleotide for detection of SNP TSC0014845
cctctattcctta

SEQ ID NO: 53985 - DNA, 13 bp, Artificial Sequence
  Oligonucleotide for detection of SNP TSC0014845
taaggagtagagg

SEQ ID NO: 53986 - DNA, 13 bp, Artificial Sequence
  Oligonucleotide for detection of SNP TSC0014845
cctctactcctta

SEQ ID NO: 53987 - DNA, 13 bp, Artificial Sequence
  Oligonucleotide for detection of SNP TSC0014846
aatattattaaaa

SEQ ID NO: 53988 - DNA, 13 bp, Artificial Sequence
  Oligonucleotide for detection of SNP TSC0014846
ttttaataatatt

SEQ ID NO: 53989 - DNA, 13 bp, Artificial Sequence
  Oligonucleotide for detection of SNP TSC0014846
aatatttttaaaa

SEQ ID NO: 53990 - DNA, 13 bp, Artificial Sequence
  Oligonucleotide for detection of SNP TSC0014846
ttttaaaaatatt

SEQ ID NO: 53991 - DNA, 13 bp, Artificial Sequence
  Oligonucleotide for detection of SNP TSC0014846
ttttagtagtatt

SEQ ID NO: 53992 - DNA, 13 bp, Artificial Sequence
  Oligonucleotide for detection of SNP TSC0014846
aatactactaaaa

SEQ ID NO: 53993 - DNA, 13 bp, Artificial Sequence
  Oligonucleotide for detection of SNP TSC0014846
ttttaggagtatt

SEQ ID NO: 53994 - DNA, 13 bp, Artificial Sequence
  Oligonucleotide for detection of SNP TSC0014846
aatactcctaaaa

SEQ ID NO: 53995 - DNA, 13 bp, Artificial Sequence
  Oligonucleotide for detection of SNP TSC0014847
ggaagagtagaaa

SEQ ID NO: 53996 - DNA, 13 bp, Artificial Sequence
  Oligonucleotide for detection of SNP TSC0014847
tttctactcttcc

SEQ ID NO: 53997 - DNA, 13 bp, Artificial Sequence
  Oligonucleotide for detection of SNP TSC0014847
ggaagaatagaaa

SEQ ID NO: 53998 - DNA, 13 bp, Artificial Sequence
  Oligonucleotide for detection of SNP TSC0014847
tttctattcttcc

SEQ ID NO: 53999 - DNA, 13 bp, Artificial Sequence
  Oligonucleotide for detection of SNP TSC0014848
tttattatttagg

SEQ ID NO: 54000 - DNA, 13 bp, Artificial Sequence
  Oligonucleotide for detection of SNP TSC0014848
cctaaataataaa

SEQ ID NO: 54001 - DNA, 13 bp, Artificial Sequence
  Oligonucleotide for detection of SNP TSC0014848
tttattgtttagg

SEQ ID NO: 54002 - DNA, 13 bp, Artificial Sequence
  Oligonucleotide for detection of SNP TSC0014848
cctaaacaataaa

SEQ ID NO: 54003 - DNA, 13 bp, Artificial Sequence
  Oligonucleotide for detection of SNP TSC0014849
gtagtagttgtta

SEQ ID NO: 54004 - DNA, 13 bp, Artificial Sequence
  Oligonucleotide for detection of SNP TSC0014849
taacaactactac

SEQ ID NO: 54005 - DNA, 13 bp, Artificial Sequence
  Oligonucleotide for detection of SNP TSC0014849
gtagtaattgtta

SEQ ID NO: 54006 - DNA, 13 bp, Artificial Sequence
  Oligonucleotide for detection of SNP TSC0014849
taacaattactac

SEQ ID NO: 54007 - DNA, 13 bp, Artificial Sequence
  Oligonucleotide for detection of SNP TSC0014850
tatagtattttty

SEQ ID NO: 54008 - DNA, 13 bp, Artificial Sequence
  Oligonucleotide for detection of SNP TSC0014850
raaaaatactata

SEQ ID NO: 54009 - DNA, 13 bp, Artificial Sequence
  Oligonucleotide for detection of SNP TSC0014850
tatagttttttty

SEQ ID NO: 54010 - DNA, 13 bp, Artificial Sequence
  Oligonucleotide for detection of SNP TSC0014850
raaaaaaactata

SEQ ID NO: 54011 - DNA, 13 bp, Artificial Sequence
  Oligonucleotide for detection of SNP TSC0014850
gggaaatattgtg

SEQ ID NO: 54012 - DNA, 13 bp, Artificial Sequence
  Oligonucleotide for detection of SNP TSC0014850
cacaatatttccc

SEQ ID NO: 54013 - DNA, 13 bp, Artificial Sequence
  Oligonucleotide for detection of SNP TSC0014850
gggaaagattgtg

SEQ ID NO: 54014 - DNA, 13 bp, Artificial Sequence
  Oligonucleotide for detection of SNP TSC0014850
cacaatctttccc

SEQ ID NO: 54015 - DNA, 13 bp, Artificial Sequence
  Oligonucleotide for detection of SNP TSC0014855
attattataatat

SEQ ID NO: 54016 - DNA, 13 bp, Artificial Sequence
  Oligonucleotide for detection of SNP TSC0014855
atattataataat

SEQ ID NO: 54017 - DNA, 13 bp, Artificial Sequence
  Oligonucleotide for detection of SNP TSC0014855
attattgtaatat

SEQ ID NO: 54018 - DNA, 13 bp, Artificial Sequence
  Oligonucleotide for detection of SNP TSC0014855
atattacaataat

SEQ ID NO: 54019 - DNA, 13 bp, Artificial Sequence
  Oligonucleotide for detection of SNP TSC0014859
gtattatgaatat

SEQ ID NO: 54020 - DNA, 13 bp, Artificial Sequence
  Oligonucleotide for detection of SNP TSC0014859
atattcataatac

SEQ ID NO: 54021 - DNA, 13 bp, Artificial Sequence
  Oligonucleotide for detection of SNP TSC0014859
gtattacgaatat

SEQ ID NO: 54022 - DNA, 13 bp, Artificial Sequence
  Oligonucleotide for detection of SNP TSC0014859
atattcgtaatac

SEQ ID NO: 54023 - DNA, 13 bp, Artificial Sequence
  Oligonucleotide for detection of SNP TSC0014859
atgtttgtggtay

SEQ ID NO: 54024 - DNA, 13 bp, Artificial Sequence
  Oligonucleotide for detection of SNP TSC0014859
rtaccacaaacat

SEQ ID NO: 54025 - DNA, 13 bp, Artificial Sequence
  Oligonucleotide for detection of SNP TSC0014859
atgtttatggtay

SEQ ID NO: 54026 - DNA, 13 bp, Artificial Sequence
  Oligonucleotide for detection of SNP TSC0014859
rtaccataaacat

SEQ ID NO: 54027 - DNA, 13 bp, Artificial Sequence
  Oligonucleotide for detection of SNP TSC0014859
atgttcgtggtay

SEQ ID NO: 54028 - DNA, 13 bp, Artificial Sequence
  Oligonucleotide for detection of SNP TSC0014859
rtaccacgaacat

SEQ ID NO: 54029 - DNA, 13 bp, Artificial Sequence
  Oligonucleotide for detection of SNP TSC0014860
ttaattattttgg

SEQ ID NO: 54030 - DNA, 13 bp, Artificial Sequence
  Oligonucleotide for detection of SNP TSC0014860
ccaaaataattaa

SEQ ID NO: 54031 - DNA, 13 bp, Artificial Sequence
  Oligonucleotide for detection of SNP TSC0014860
ttaatttttttgg

SEQ ID NO: 54032 - DNA, 13 bp, Artificial Sequence
  Oligonucleotide for detection of SNP TSC0014860
ccaaaaaaattaa

SEQ ID NO: 54033 - DNA, 13 bp, Artificial Sequence
  Oligonucleotide for detection of SNP TSC0014860
ttaattatttcgg

SEQ ID NO: 54034 - DNA, 13 bp, Artificial Sequence
  Oligonucleotide for detection of SNP TSC0014860
ccgaaataattaa

SEQ ID NO: 54035 - DNA, 13 bp, Artificial Sequence
  Oligonucleotide for detection of SNP TSC0014860
ttaattttttcgg

SEQ ID NO: 54036 - DNA, 13 bp, Artificial Sequence
  Oligonucleotide for detection of SNP TSC0014860
ccgaaaaaattaa

SEQ ID NO: 54037 - DNA, 13 bp, Artificial Sequence
  Oligonucleotide for detection of SNP TSC0014860
ttgagataattaa

SEQ ID NO: 54038 - DNA, 13 bp, Artificial Sequence
  Oligonucleotide for detection of SNP TSC0014860
ttaattatctcaa

SEQ ID NO: 54039 - DNA, 13 bp, Artificial Sequence
  Oligonucleotide for detection of SNP TSC0014860
ttgagagaattaa

SEQ ID NO: 54040 - DNA, 13 bp, Artificial Sequence
  Oligonucleotide for detection of SNP TSC0014860
ttaattctctcaa

SEQ ID NO: 54041 - DNA, 13 bp, Artificial Sequence
  Oligonucleotide for detection of SNP TSC0014860
tcgagataattaa

SEQ ID NO: 54042 - DNA, 13 bp, Artificial Sequence
  Oligonucleotide for detection of SNP TSC0014860
ttaattatctcga

SEQ ID NO: 54043 - DNA, 13 bp, Artificial Sequence
  Oligonucleotide for detection of SNP TSC0014860
tcgagagaattaa

SEQ ID NO: 54044 - DNA, 13 bp, Artificial Sequence
  Oligonucleotide for detection of SNP TSC0014860
ttaattctctcga

SEQ ID NO: 54045 - DNA, 13 bp, Artificial Sequence
  Oligonucleotide for detection of SNP TSC0014861
gttttaattgtta

SEQ ID NO: 54046 - DNA, 13 bp, Artificial Sequence
  Oligonucleotide for detection of SNP TSC0014861
taacaattaaaac

SEQ ID NO: 54047 - DNA, 13 bp, Artificial Sequence
  Oligonucleotide for detection of SNP TSC0014861
gttttatttgtta

SEQ ID NO: 54048 - DNA, 13 bp, Artificial Sequence
  Oligonucleotide for detection of SNP TSC0014861
taacaaataaaac

SEQ ID NO: 54049 - DNA, 13 bp, Artificial Sequence
  Oligonucleotide for detection of SNP TSC0014861
tggtagttgaggy

SEQ ID NO: 54050 - DNA, 13 bp, Artificial Sequence
  Oligonucleotide for detection of SNP TSC0014861
rcctcaactacca

SEQ ID NO: 54051 - DNA, 13 bp, Artificial Sequence
  Oligonucleotide for detection of SNP TSC0014861
tggtaggtgaggy

SEQ ID NO: 54052 - DNA, 13 bp, Artificial Sequence
  Oligonucleotide for detection of SNP TSC0014861
rcctcacctacca

SEQ ID NO: 54053 - DNA, 13 bp, Artificial Sequence
  Oligonucleotide for detection of SNP TSC0014863
ttaattgttatta

SEQ ID NO: 54054 - DNA, 13 bp, Artificial Sequence
  Oligonucleotide for detection of SNP TSC0014863
taataacaattaa

SEQ ID NO: 54055 - DNA, 13 bp, Artificial Sequence
  Oligonucleotide for detection of SNP TSC0014863
ttaatttttatta

SEQ ID NO: 54056 - DNA, 13 bp, Artificial Sequence
  Oligonucleotide for detection of SNP TSC0014863
taataaaaattaa

SEQ ID NO: 54057 - DNA, 13 bp, Artificial Sequence
  Oligonucleotide for detection of SNP TSC0014863
taatggtaattag

SEQ ID NO: 54058 - DNA, 13 bp, Artificial Sequence
  Oligonucleotide for detection of SNP TSC0014863
ctaattaccatta

SEQ ID NO: 54059 - DNA, 13 bp, Artificial Sequence
  Oligonucleotide for detection of SNP TSC0014863
taatggaaattag

SEQ ID NO: 54060 - DNA, 13 bp, Artificial Sequence
  Oligonucleotide for detection of SNP TSC0014863
ctaatttccatta

SEQ ID NO: 54061 - DNA, 13 bp, Artificial Sequence
  Oligonucleotide for detection of SNP TSC0014864
ggggaaaaaagga

SEQ ID NO: 54062 - DNA, 13 bp, Artificial Sequence
  Oligonucleotide for detection of SNP TSC0014864
tccttttttcccc

SEQ ID NO: 54063 - DNA, 13 bp, Artificial Sequence
  Oligonucleotide for detection of SNP TSC0014864
ggggaagaaagga

SEQ ID NO: 54064 - DNA, 13 bp, Artificial Sequence
  Oligonucleotide for detection of SNP TSC0014864
tcctttcttcccc

SEQ ID NO: 54065 - DNA, 13 bp, Artificial Sequence
  Oligonucleotide for detection of SNP TSC0014865
agtaatatgaata

SEQ ID NO: 54066 - DNA, 13 bp, Artificial Sequence
  Oligonucleotide for detection of SNP TSC0014865
tattcatattact

SEQ ID NO: 54067 - DNA, 13 bp, Artificial Sequence
  Oligonucleotide for detection of SNP TSC0014865
agtaatgtgaata

SEQ ID NO: 54068 - DNA, 13 bp, Artificial Sequence
  Oligonucleotide for detection of SNP TSC0014865
tattcacattact

SEQ ID NO: 54069 - DNA, 13 bp, Artificial Sequence
  Oligonucleotide for detection of SNP TSC0014865
agtaacgtgaata

SEQ ID NO: 54070 - DNA, 13 bp, Artificial Sequence
  Oligonucleotide for detection of SNP TSC0014865
tattcacgttact

SEQ ID NO: 54071 - DNA, 13 bp, Artificial Sequence
  Oligonucleotide for detection of SNP TSC0014865
tgtttatgttgtt

SEQ ID NO: 54072 - DNA, 13 bp, Artificial Sequence
  Oligonucleotide for detection of SNP TSC0014865
aacaacataaaca

SEQ ID NO: 54073 - DNA, 13 bp, Artificial Sequence
  Oligonucleotide for detection of SNP TSC0014865
tgtttacgttgtt

SEQ ID NO: 54074 - DNA, 13 bp, Artificial Sequence
  Oligonucleotide for detection of SNP TSC0014865
aacaacgtaaaca

SEQ ID NO: 54075 - DNA, 13 bp, Artificial Sequence
  Oligonucleotide for detection of SNP TSC0014866
tgaaatgtttttt

SEQ ID NO: 54076 - DNA, 13 bp, Artificial Sequence
  Oligonucleotide for detection of SNP TSC0014866
aaaaaacatttca

SEQ ID NO: 54077 - DNA, 13 bp, Artificial Sequence
  Oligonucleotide for detection of SNP TSC0014866
tgaaatatttttt

SEQ ID NO: 54078 - DNA, 13 bp, Artificial Sequence
  Oligonucleotide for detection of SNP TSC0014866
aaaaaatatttca

SEQ ID NO: 54079 - DNA, 13 bp, Artificial Sequence
  Oligonucleotide for detection of SNP TSC0014867
tgagttatgatta

SEQ ID NO: 54080 - DNA, 13 bp, Artificial Sequence
  Oligonucleotide for detection of SNP TSC0014867
taatcataactca

SEQ ID NO: 54081 - DNA, 13 bp, Artificial Sequence
  Oligonucleotide for detection of SNP TSC0014867
tgagttgtgatta

SEQ ID NO: 54082 - DNA, 13 bp, Artificial Sequence
  Oligonucleotide for detection of SNP TSC0014867
taatcacaactca

SEQ ID NO: 54083 - DNA, 13 bp, Artificial Sequence
  Oligonucleotide for detection of SNP TSC0014867
tgagtcgtgatta

SEQ ID NO: 54084 - DNA, 13 bp, Artificial Sequence
  Oligonucleotide for detection of SNP TSC0014867
taatcacgactca

SEQ ID NO: 54085 - DNA, 13 bp, Artificial Sequence
  Oligonucleotide for detection of SNP TSC0014868
ataaaaataatty

SEQ ID NO: 54086 - DNA, 13 bp, Artificial Sequence
  Oligonucleotide for detection of SNP TSC0014868
raattatttttat

SEQ ID NO: 54087 - DNA, 13 bp, Artificial Sequence
  Oligonucleotide for detection of SNP TSC0014868
ataaaattaatty

SEQ ID NO: 54088 - DNA, 13 bp, Artificial Sequence
  Oligonucleotide for detection of SNP TSC0014868
raattaattttat

SEQ ID NO: 54089 - DNA, 13 bp, Artificial Sequence
  Oligonucleotide for detection of SNP TSC0014868
gagttgtttttat

SEQ ID NO: 54090 - DNA, 13 bp, Artificial Sequence
  Oligonucleotide for detection of SNP TSC0014868
ataaaaacaactc

SEQ ID NO: 54091 - DNA, 13 bp, Artificial Sequence
  Oligonucleotide for detection of SNP TSC0014868
gagttgattttat

SEQ ID NO: 54092 - DNA, 13 bp, Artificial Sequence
  Oligonucleotide for detection of SNP TSC0014868
ataaaatcaactc

SEQ ID NO: 54093 - DNA, 13 bp, Artificial Sequence
  Oligonucleotide for detection of SNP TSC0014869
taatgtaagttgt

SEQ ID NO: 54094 - DNA, 13 bp, Artificial Sequence
  Oligonucleotide for detection of SNP TSC0014869
acaacttacatta

SEQ ID NO: 54095 - DNA, 13 bp, Artificial Sequence
  Oligonucleotide for detection of SNP TSC0014869
taatgttagttgt

SEQ ID NO: 54096 - DNA, 13 bp, Artificial Sequence
  Oligonucleotide for detection of SNP TSC0014869
acaactaacatta

SEQ ID NO: 54097 - DNA, 13 bp, Artificial Sequence
  Oligonucleotide for detection of SNP TSC0014869
taacgtaagttgt

SEQ ID NO: 54098 - DNA, 13 bp, Artificial Sequence
  Oligonucleotide for detection of SNP TSC0014869
acaacttacgtta

SEQ ID NO: 54099 - DNA, 13 bp, Artificial Sequence
  Oligonucleotide for detection of SNP TSC0014869
taacgttagttgt

SEQ ID NO: 54100 - DNA, 13 bp, Artificial Sequence
  Oligonucleotide for detection of SNP TSC0014869
acaactaacgtta

SEQ ID NO: 54101 - DNA, 13 bp, Artificial Sequence
  Oligonucleotide for detection of SNP TSC0014869
taatgtaagtcgt

SEQ ID NO: 54102 - DNA, 13 bp, Artificial Sequence
  Oligonucleotide for detection of SNP TSC0014869
acgacttacatta

SEQ ID NO: 54103 - DNA, 13 bp, Artificial Sequence
  Oligonucleotide for detection of SNP TSC0014869
taatgttagtcgt

SEQ ID NO: 54104 - DNA, 13 bp, Artificial Sequence
  Oligonucleotide for detection of SNP TSC0014869
acgactaacatta

SEQ ID NO: 54105 - DNA, 13 bp, Artificial Sequence
  Oligonucleotide for detection of SNP TSC0014869
taacgtaagtcgt

SEQ ID NO: 54106 - DNA, 13 bp, Artificial Sequence
  Oligonucleotide for detection of SNP TSC0014869
acgacttacgtta

SEQ ID NO: 54107 - DNA, 13 bp, Artificial Sequence
  Oligonucleotide for detection of SNP TSC0014869
taacgttagtcgt

SEQ ID NO: 54108 - DNA, 13 bp, Artificial Sequence
  Oligonucleotide for detection of SNP TSC0014869
acgactaacgtta

SEQ ID NO: 54109 - DNA, 13 bp, Artificial Sequence
  Oligonucleotide for detection of SNP TSC0014869
atggtttgtgtta

SEQ ID NO: 54110 - DNA, 13 bp, Artificial Sequence
  Oligonucleotide for detection of SNP TSC0014869
taacacaaaccat

SEQ ID NO: 54111 - DNA, 13 bp, Artificial Sequence
  Oligonucleotide for detection of SNP TSC0014869
atggttagtgtta

SEQ ID NO: 54112 - DNA, 13 bp, Artificial Sequence
  Oligonucleotide for detection of SNP TSC0014869
taacactaaccat

SEQ ID NO: 54113 - DNA, 13 bp, Artificial Sequence
  Oligonucleotide for detection of SNP TSC0014869
acggtttgtgtta

SEQ ID NO: 54114 - DNA, 13 bp, Artificial Sequence
  Oligonucleotide for detection of SNP TSC0014869
taacacaaaccgt

SEQ ID NO: 54115 - DNA, 13 bp, Artificial Sequence
  Oligonucleotide for detection of SNP TSC0014869
acggttagtgtta

SEQ ID NO: 54116 - DNA, 13 bp, Artificial Sequence
  Oligonucleotide for detection of SNP TSC0014869
taacactaaccgt

SEQ ID NO: 54117 - DNA, 13 bp, Artificial Sequence
  Oligonucleotide for detection of SNP TSC0014869
atggtttgcgtta

SEQ ID NO: 54118 - DNA, 13 bp, Artificial Sequence
  Oligonucleotide for detection of SNP TSC0014869
taacgcaaaccat

SEQ ID NO: 54119 - DNA, 13 bp, Artificial Sequence
  Oligonucleotide for detection of SNP TSC0014869
atggttagcgtta

SEQ ID NO: 54120 - DNA, 13 bp, Artificial Sequence
  Oligonucleotide for detection of SNP TSC0014869
taacgctaaccat

SEQ ID NO: 54121 - DNA, 13 bp, Artificial Sequence
  Oligonucleotide for detection of SNP TSC0014869
acggtttgcgtta

SEQ ID NO: 54122 - DNA, 13 bp, Artificial Sequence
  Oligonucleotide for detection of SNP TSC0014869
taacgcaaaccgt

SEQ ID NO: 54123 - DNA, 13 bp, Artificial Sequence
  Oligonucleotide for detection of SNP TSC0014869
acggttagcgtta

SEQ ID NO: 54124 - DNA, 13 bp, Artificial Sequence
  Oligonucleotide for detection of SNP TSC0014869
taacgctaaccgt

SEQ ID NO: 54125 - DNA, 13 bp, Artificial Sequence
  Oligonucleotide for detection of SNP TSC0014870
gtaagttgtgtta

SEQ ID NO: 54126 - DNA, 13 bp, Artificial Sequence
  Oligonucleotide for detection of SNP TSC0014870
taacacaacttac

SEQ ID NO: 54127 - DNA, 13 bp, Artificial Sequence
  Oligonucleotide for detection of SNP TSC0014870
gtaagtcgtgtta

SEQ ID NO: 54128 - DNA, 13 bp, Artificial Sequence
  Oligonucleotide for detection of SNP TSC0014870
taacacgacttac

SEQ ID NO: 54129 - DNA, 13 bp, Artificial Sequence
  Oligonucleotide for detection of SNP TSC0014870
tgatatggtttgy

SEQ ID NO: 54130 - DNA, 13 bp, Artificial Sequence
  Oligonucleotide for detection of SNP TSC0014870
rcaaaccatatca

SEQ ID NO: 54131 - DNA, 13 bp, Artificial Sequence
  Oligonucleotide for detection of SNP TSC0014870
tgatatagtttgy

SEQ ID NO: 54132 - DNA, 13 bp, Artificial Sequence
  Oligonucleotide for detection of SNP TSC0014870
rcaaactatatca

SEQ ID NO: 54133 - DNA, 13 bp, Artificial Sequence
  Oligonucleotide for detection of SNP TSC0014870
tgatacggtttgy

SEQ ID NO: 54134 - DNA, 13 bp, Artificial Sequence
  Oligonucleotide for detection of SNP TSC0014870
rcaaaccgtatca

SEQ ID NO: 54135 - DNA, 13 bp, Artificial Sequence
  Oligonucleotide for detection of SNP TSC0014871
aggggagtgttat

SEQ ID NO: 54136 - DNA, 13 bp, Artificial Sequence
  Oligonucleotide for detection of SNP TSC0014871
ataacactcccct

SEQ ID NO: 54137 - DNA, 13 bp, Artificial Sequence
  Oligonucleotide for detection of SNP TSC0014871
aggggaatgttat

SEQ ID NO: 54138 - DNA, 13 bp, Artificial Sequence
  Oligonucleotide for detection of SNP TSC0014871
ataacattcccct

SEQ ID NO: 54139 - DNA, 13 bp, Artificial Sequence
  Oligonucleotide for detection of SNP TSC0014874
ttgttttttgtga

SEQ ID NO: 54140 - DNA, 13 bp, Artificial Sequence
  Oligonucleotide for detection of SNP TSC0014874
tcacaaaaaacaa

SEQ ID NO: 54141 - DNA, 13 bp, Artificial Sequence
  Oligonucleotide for detection of SNP TSC0014874
ttgtttattgtga

SEQ ID NO: 54142 - DNA, 13 bp, Artificial Sequence
  Oligonucleotide for detection of SNP TSC0014874
tcacaataaacaa

SEQ ID NO: 54143 - DNA, 13 bp, Artificial Sequence
  Oligonucleotide for detection of SNP TSC0014875
ggtaatgttttty

SEQ ID NO: 54144 - DNA, 13 bp, Artificial Sequence
  Oligonucleotide for detection of SNP TSC0014875
raaaaacattacc

SEQ ID NO: 54145 - DNA, 13 bp, Artificial Sequence
  Oligonucleotide for detection of SNP TSC0014875
ggtaattttttty

SEQ ID NO: 54146 - DNA, 13 bp, Artificial Sequence
  Oligonucleotide for detection of SNP TSC0014875
raaaaaaattacc

SEQ ID NO: 54147 - DNA, 13 bp, Artificial Sequence
  Oligonucleotide for detection of SNP TSC0014875
ggtaacgttttty

SEQ ID NO: 54148 - DNA, 13 bp, Artificial Sequence
  Oligonucleotide for detection of SNP TSC0014875
raaaaacgttacc

SEQ ID NO: 54149 - DNA, 13 bp, Artificial Sequence
  Oligonucleotide for detection of SNP TSC0014875
gaaaaatgttgty

SEQ ID NO: 54150 - DNA, 13 bp, Artificial Sequence
  Oligonucleotide for detection of SNP TSC0014875
racaacatttttc

SEQ ID NO: 54151 - DNA, 13 bp, Artificial Sequence
  Oligonucleotide for detection of SNP TSC0014875
gaaaaaagttgty

SEQ ID NO: 54152 - DNA, 13 bp, Artificial Sequence
  Oligonucleotide for detection of SNP TSC0014875
racaacttttttc

SEQ ID NO: 54153 - DNA, 13 bp, Artificial Sequence
  Oligonucleotide for detection of SNP TSC0014875
gaaaaacgttgty

SEQ ID NO: 54154 - DNA, 13 bp, Artificial Sequence
  Oligonucleotide for detection of SNP TSC0014875
racaacgtttttc

SEQ ID NO: 54155 - DNA, 13 bp, Artificial Sequence
  Oligonucleotide for detection of SNP TSC0014879
tattataattgag

SEQ ID NO: 54156 - DNA, 13 bp, Artificial Sequence
  Oligonucleotide for detection of SNP TSC0014879
ctcaattataata

SEQ ID NO: 54157 - DNA, 13 bp, Artificial Sequence
  Oligonucleotide for detection of SNP TSC0014879
tattatgattgag

SEQ ID NO: 54158 - DNA, 13 bp, Artificial Sequence
  Oligonucleotide for detection of SNP TSC0014879
ctcaatcataata

SEQ ID NO: 54159 - DNA, 13 bp, Artificial Sequence
  Oligonucleotide for detection of SNP TSC0014880
tgtttgtttatgt

SEQ ID NO: 54160 - DNA, 13 bp, Artificial Sequence
  Oligonucleotide for detection of SNP TSC0014880
acataaacaaaca

SEQ ID NO: 54161 - DNA, 13 bp, Artificial Sequence
  Oligonucleotide for detection of SNP TSC0014880
tgtttggttatgt

SEQ ID NO: 54162 - DNA, 13 bp, Artificial Sequence
  Oligonucleotide for detection of SNP TSC0014880
acataaccaaaca

SEQ ID NO: 54163 - DNA, 13 bp, Artificial Sequence
  Oligonucleotide for detection of SNP TSC0014880
atatgagtaggta

SEQ ID NO: 54164 - DNA, 13 bp, Artificial Sequence
  Oligonucleotide for detection of SNP TSC0014880
tacctactcatat

SEQ ID NO: 54165 - DNA, 13 bp, Artificial Sequence
  Oligonucleotide for detection of SNP TSC0014880
atatgattaggta

SEQ ID NO: 54166 - DNA, 13 bp, Artificial Sequence
  Oligonucleotide for detection of SNP TSC0014880
tacctaatcatat

SEQ ID NO: 54167 - DNA, 13 bp, Artificial Sequence
  Oligonucleotide for detection of SNP TSC0014881
gtagagaattagt

SEQ ID NO: 54168 - DNA, 13 bp, Artificial Sequence
  Oligonucleotide for detection of SNP TSC0014881
actaattctctac

SEQ ID NO: 54169 - DNA, 13 bp, Artificial Sequence
  Oligonucleotide for detection of SNP TSC0014881
gtagaggattagt

SEQ ID NO: 54170 - DNA, 13 bp, Artificial Sequence
  Oligonucleotide for detection of SNP TSC0014881
actaatcctctac

SEQ ID NO: 54171 - DNA, 13 bp, Artificial Sequence
  Oligonucleotide for detection of SNP TSC0014882
aatggtagtattt

SEQ ID NO: 54172 - DNA, 13 bp, Artificial Sequence
  Oligonucleotide for detection of SNP TSC0014882
aaatactaccatt

SEQ ID NO: 54173 - DNA, 13 bp, Artificial Sequence
  Oligonucleotide for detection of SNP TSC0014882
aatggtggtattt

SEQ ID NO: 54174 - DNA, 13 bp, Artificial Sequence
  Oligonucleotide for detection of SNP TSC0014882
aaataccaccatt

SEQ ID NO: 54175 - DNA, 13 bp, Artificial Sequence
  Oligonucleotide for detection of SNP TSC0014882
aacggtagtattt

SEQ ID NO: 54176 - DNA, 13 bp, Artificial Sequence
  Oligonucleotide for detection of SNP TSC0014882
aaatactaccgtt

SEQ ID NO: 54177 - DNA, 13 bp, Artificial Sequence
  Oligonucleotide for detection of SNP TSC0014882
aacggtggtattt

SEQ ID NO: 54178 - DNA, 13 bp, Artificial Sequence
  Oligonucleotide for detection of SNP TSC0014882
aaataccaccgtt

SEQ ID NO: 54179 - DNA, 13 bp, Artificial Sequence
  Oligonucleotide for detection of SNP TSC0014883
ttttagagatagt

SEQ ID NO: 54180 - DNA, 13 bp, Artificial Sequence
  Oligonucleotide for detection of SNP TSC0014883
actatctctaaaa

SEQ ID NO: 54181 - DNA, 13 bp, Artificial Sequence
  Oligonucleotide for detection of SNP TSC0014883
ttttagggatagt

SEQ ID NO: 54182 - DNA, 13 bp, Artificial Sequence
  Oligonucleotide for detection of SNP TSC0014883
actatccctaaaa

SEQ ID NO: 54183 - DNA, 13 bp, Artificial Sequence
  Oligonucleotide for detection of SNP TSC0014884
atggatattgttt

SEQ ID NO: 54184 - DNA, 13 bp, Artificial Sequence
  Oligonucleotide for detection of SNP TSC0014884
aaacaatatccat

SEQ ID NO: 54185 - DNA, 13 bp, Artificial Sequence
  Oligonucleotide for detection of SNP TSC0014884
atggatgttgttt

SEQ ID NO: 54186 - DNA, 13 bp, Artificial Sequence
  Oligonucleotide for detection of SNP TSC0014884
aaacaacatccat

SEQ ID NO: 54187 - DNA, 13 bp, Artificial Sequence
  Oligonucleotide for detection of SNP TSC0014884
atggacgttgttt

SEQ ID NO: 54188 - DNA, 13 bp, Artificial Sequence
  Oligonucleotide for detection of SNP TSC0014884
aaacaacgtccat

SEQ ID NO: 54189 - DNA, 13 bp, Artificial Sequence
  Oligonucleotide for detection of SNP TSC0014884
aggtagtgtttat

SEQ ID NO: 54190 - DNA, 13 bp, Artificial Sequence
  Oligonucleotide for detection of SNP TSC0014884
ataaacactacct

SEQ ID NO: 54191 - DNA, 13 bp, Artificial Sequence
  Oligonucleotide for detection of SNP TSC0014884
aggtagcgtttat

SEQ ID NO: 54192 - DNA, 13 bp, Artificial Sequence
  Oligonucleotide for detection of SNP TSC0014884
ataaacgctacct

SEQ ID NO: 54193 - DNA, 13 bp, Artificial Sequence
  Oligonucleotide for detection of SNP TSC0014885
tgttttattaatt

SEQ ID NO: 54194 - DNA, 13 bp, Artificial Sequence
  Oligonucleotide for detection of SNP TSC0014885
aattaataaaaca

SEQ ID NO: 54195 - DNA, 13 bp, Artificial Sequence
  Oligonucleotide for detection of SNP TSC0014885
tgttttgttaatt

SEQ ID NO: 54196 - DNA, 13 bp, Artificial Sequence
  Oligonucleotide for detection of SNP TSC0014885
aattaacaaaaca

SEQ ID NO: 54197 - DNA, 13 bp, Artificial Sequence
  Oligonucleotide for detection of SNP TSC0014885
cgttttattaatt

SEQ ID NO: 54198 - DNA, 13 bp, Artificial Sequence
  Oligonucleotide for detection of SNP TSC0014885
aattaataaaacg

SEQ ID NO: 54199 - DNA, 13 bp, Artificial Sequence
  Oligonucleotide for detection of SNP TSC0014885
cgttttgttaatt

SEQ ID NO: 54200 - DNA, 13 bp, Artificial Sequence
  Oligonucleotide for detection of SNP TSC0014885
aattaacaaaacg

SEQ ID NO: 54201 - DNA, 13 bp, Artificial Sequence
  Oligonucleotide for detection of SNP TSC0014885
tgtttcgttaatt

SEQ ID NO: 54202 - DNA, 13 bp, Artificial Sequence
  Oligonucleotide for detection of SNP TSC0014885
aattaacgaaaca

SEQ ID NO: 54203 - DNA, 13 bp, Artificial Sequence
  Oligonucleotide for detection of SNP TSC0014885
cgtttcgttaatt

SEQ ID NO: 54204 - DNA, 13 bp, Artificial Sequence
  Oligonucleotide for detection of SNP TSC0014885
aattaacgaaacg

SEQ ID NO: 54205 - DNA, 13 bp, Artificial Sequence
  Oligonucleotide for detection of SNP TSC0014885
agttggtgagatg

SEQ ID NO: 54206 - DNA, 13 bp, Artificial Sequence
  Oligonucleotide for detection of SNP TSC0014885
catctcaccaact

SEQ ID NO: 54207 - DNA, 13 bp, Artificial Sequence
  Oligonucleotide for detection of SNP TSC0014885
agttggtgagacg

SEQ ID NO: 54208 - DNA, 13 bp, Artificial Sequence
  Oligonucleotide for detection of SNP TSC0014885
cgtctcaccaact

SEQ ID NO: 54209 - DNA, 13 bp, Artificial Sequence
  Oligonucleotide for detection of SNP TSC0014885
agttggcgagatg

SEQ ID NO: 54210 - DNA, 13 bp, Artificial Sequence
  Oligonucleotide for detection of SNP TSC0014885
catctcgccaact

SEQ ID NO: 54211 - DNA, 13 bp, Artificial Sequence
  Oligonucleotide for detection of SNP TSC0014885
agttggcgagacg

SEQ ID NO: 54212 - DNA, 13 bp, Artificial Sequence
  Oligonucleotide for detection of SNP TSC0014885
cgtctcgccaact

SEQ ID NO: 54213 - DNA, 13 bp, Artificial Sequence
  Oligonucleotide for detection of SNP TSC0014886
tttaaaatgtgtt

SEQ ID NO: 54214 - DNA, 13 bp, Artificial Sequence
  Oligonucleotide for detection of SNP TSC0014886
aacacattttaaa

SEQ ID NO: 54215 - DNA, 13 bp, Artificial Sequence
  Oligonucleotide for detection of SNP TSC0014886
tttaaattgtgtt

SEQ ID NO: 54216 - DNA, 13 bp, Artificial Sequence
  Oligonucleotide for detection of SNP TSC0014886
aacacaatttaaa

SEQ ID NO: 54217 - DNA, 13 bp, Artificial Sequence
  Oligonucleotide for detection of SNP TSC0014886
aatatattttgga

SEQ ID NO: 54218 - DNA, 13 bp, Artificial Sequence
  Oligonucleotide for detection of SNP TSC0014886
tccaaaatatatt

SEQ ID NO: 54219 - DNA, 13 bp, Artificial Sequence
  Oligonucleotide for detection of SNP TSC0014886
aatatagtttgga

SEQ ID NO: 54220 - DNA, 13 bp, Artificial Sequence
  Oligonucleotide for detection of SNP TSC0014886
tccaaactatatt

SEQ ID NO: 54221 - DNA, 13 bp, Artificial Sequence
  Oligonucleotide for detection of SNP TSC0014887
ggagatgttatag

SEQ ID NO: 54222 - DNA, 13 bp, Artificial Sequence
  Oligonucleotide for detection of SNP TSC0014887
ctataacatctcc

SEQ ID NO: 54223 - DNA, 13 bp, Artificial Sequence
  Oligonucleotide for detection of SNP TSC0014887
ggagatattatag

SEQ ID NO: 54224 - DNA, 13 bp, Artificial Sequence
  Oligonucleotide for detection of SNP TSC0014887
ctataatatctcc

SEQ ID NO: 54225 - DNA, 13 bp, Artificial Sequence
  Oligonucleotide for detection of SNP TSC0014888
tatttgggggaga

SEQ ID NO: 54226 - DNA, 13 bp, Artificial Sequence
  Oligonucleotide for detection of SNP TSC0014888
tctcccccaaata

SEQ ID NO: 54227 - DNA, 13 bp, Artificial Sequence
  Oligonucleotide for detection of SNP TSC0014888
tatttgagggaga

SEQ ID NO: 54228 - DNA, 13 bp, Artificial Sequence
  Oligonucleotide for detection of SNP TSC0014888
tctccctcaaata

SEQ ID NO: 54229 - DNA, 13 bp, Artificial Sequence
  Oligonucleotide for detection of SNP TSC0014889
aaggaggaataay

SEQ ID NO: 54230 - DNA, 13 bp, Artificial Sequence
  Oligonucleotide for detection of SNP TSC0014889
rttattcctcctt

SEQ ID NO: 54231 - DNA, 13 bp, Artificial Sequence
  Oligonucleotide for detection of SNP TSC0014889
aaggagtaataay

SEQ ID NO: 54232 - DNA, 13 bp, Artificial Sequence
  Oligonucleotide for detection of SNP TSC0014889
rttattactcctt

SEQ ID NO: 54233 - DNA, 13 bp, Artificial Sequence
  Oligonucleotide for detection of SNP TSC0014889
gttattttttttt

SEQ ID NO: 54234 - DNA, 13 bp, Artificial Sequence
  Oligonucleotide for detection of SNP TSC0014889
aaaaaaaaataac

SEQ ID NO: 54235 - DNA, 13 bp, Artificial Sequence
  Oligonucleotide for detection of SNP TSC0014891
tttgtttgtgaty

SEQ ID NO: 54236 - DNA, 13 bp, Artificial Sequence
  Oligonucleotide for detection of SNP TSC0014891
ratcacaaacaaa

SEQ ID NO: 54237 - DNA, 13 bp, Artificial Sequence
  Oligonucleotide for detection of SNP TSC0014891
tttgttcgtgaty

SEQ ID NO: 54238 - DNA, 13 bp, Artificial Sequence
  Oligonucleotide for detection of SNP TSC0014891
ratcacgaacaaa

SEQ ID NO: 54239 - DNA, 13 bp, Artificial Sequence
  Oligonucleotide for detection of SNP TSC0014891
gattatggataaa

SEQ ID NO: 54240 - DNA, 13 bp, Artificial Sequence
  Oligonucleotide for detection of SNP TSC0014891
tttatccataatc

SEQ ID NO: 54241 - DNA, 13 bp, Artificial Sequence
  Oligonucleotide for detection of SNP TSC0014891
gattatagataaa

SEQ ID NO: 54242 - DNA, 13 bp, Artificial Sequence
  Oligonucleotide for detection of SNP TSC0014891
tttatctataatc

SEQ ID NO: 54243 - DNA, 13 bp, Artificial Sequence
  Oligonucleotide for detection of SNP TSC0014891
gattacggataaa

SEQ ID NO: 54244 - DNA, 13 bp, Artificial Sequence
  Oligonucleotide for detection of SNP TSC0014891
tttatccgtaatc

SEQ ID NO: 54245 - DNA, 13 bp, Artificial Sequence
  Oligonucleotide for detection of SNP TSC0014892
gagttaaagattt

SEQ ID NO: 54246 - DNA, 13 bp, Artificial Sequence
  Oligonucleotide for detection of SNP TSC0014892
aaatctttaactc

SEQ ID NO: 54247 - DNA, 13 bp, Artificial Sequence
  Oligonucleotide for detection of SNP TSC0014892
gagttagagattt

SEQ ID NO: 54248 - DNA, 13 bp, Artificial Sequence
  Oligonucleotide for detection of SNP TSC0014892
aaatctctaactc

SEQ ID NO: 54249 - DNA, 13 bp, Artificial Sequence
  Oligonucleotide for detection of SNP TSC0014893
tgatagatattta

SEQ ID NO: 54250 - DNA, 13 bp, Artificial Sequence
  Oligonucleotide for detection of SNP TSC0014893
taaatatctatca

SEQ ID NO: 54251 - DNA, 13 bp, Artificial Sequence
  Oligonucleotide for detection of SNP TSC0014893
tgatagttattta

SEQ ID NO: 54252 - DNA, 13 bp, Artificial Sequence
  Oligonucleotide for detection of SNP TSC0014893
taaataactatca

SEQ ID NO: 54253 - DNA, 13 bp, Artificial Sequence
  Oligonucleotide for detection of SNP TSC0014893
taaatgtttgtta

SEQ ID NO: 54254 - DNA, 13 bp, Artificial Sequence
  Oligonucleotide for detection of SNP TSC0014893
taacaaacattta

SEQ ID NO: 54255 - DNA, 13 bp, Artificial Sequence
  Oligonucleotide for detection of SNP TSC0014893
taaatgattgtta

SEQ ID NO: 54256 - DNA, 13 bp, Artificial Sequence
  Oligonucleotide for detection of SNP TSC0014893
taacaatcattta

SEQ ID NO: 54257 - DNA, 13 bp, Artificial Sequence
  Oligonucleotide for detection of SNP TSC0014894
ttgagggttttat

SEQ ID NO: 54258 - DNA, 13 bp, Artificial Sequence
  Oligonucleotide for detection of SNP TSC0014894
ataaaaccctcaa

SEQ ID NO: 54259 - DNA, 13 bp, Artificial Sequence
  Oligonucleotide for detection of SNP TSC0014894
ttgaggattttat

SEQ ID NO: 54260 - DNA, 13 bp, Artificial Sequence
  Oligonucleotide for detection of SNP TSC0014894
ataaaatcctcaa

SEQ ID NO: 54261 - DNA, 13 bp, Artificial Sequence
  Oligonucleotide for detection of SNP TSC0014895
aagtgaatttaaa

SEQ ID NO: 54262 - DNA, 13 bp, Artificial Sequence
  Oligonucleotide for detection of SNP TSC0014895
tttaaattcactt

SEQ ID NO: 54263 - DNA, 13 bp, Artificial Sequence
  Oligonucleotide for detection of SNP TSC0014895
aagtgagtttaaa

SEQ ID NO: 54264 - DNA, 13 bp, Artificial Sequence
  Oligonucleotide for detection of SNP TSC0014895
tttaaactcactt

SEQ ID NO: 54265 - DNA, 13 bp, Artificial Sequence
  Oligonucleotide for detection of SNP TSC0014896
ttttgagtatttg

SEQ ID NO: 54266 - DNA, 13 bp, Artificial Sequence
  Oligonucleotide for detection of SNP TSC0014896
caaatactcaaaa

SEQ ID NO: 54267 - DNA, 13 bp, Artificial Sequence
  Oligonucleotide for detection of SNP TSC0014896
ttttgaatatttg

SEQ ID NO: 54268 - DNA, 13 bp, Artificial Sequence
  Oligonucleotide for detection of SNP TSC0014896
caaatattcaaaa

SEQ ID NO: 54269 - DNA, 13 bp, Artificial Sequence
  Oligonucleotide for detection of SNP TSC0014903
agtaaaaataatt

SEQ ID NO: 54270 - DNA, 13 bp, Artificial Sequence
  Oligonucleotide for detection of SNP TSC0014903
aattatttttact

SEQ ID NO: 54271 - DNA, 13 bp, Artificial Sequence
  Oligonucleotide for detection of SNP TSC0014903
agtaaatataatt

SEQ ID NO: 54272 - DNA, 13 bp, Artificial Sequence
  Oligonucleotide for detection of SNP TSC0014903
aattatatttact

SEQ ID NO: 54273 - DNA, 13 bp, Artificial Sequence
  Oligonucleotide for detection of SNP TSC0014903
aattatttttatt

SEQ ID NO: 54274 - DNA, 13 bp, Artificial Sequence
  Oligonucleotide for detection of SNP TSC0014903
aataaaaataatt

SEQ ID NO: 54275 - DNA, 13 bp, Artificial Sequence
  Oligonucleotide for detection of SNP TSC0014903
aattatgtttatt

SEQ ID NO: 54276 - DNA, 13 bp, Artificial Sequence
  Oligonucleotide for detection of SNP TSC0014903
aataaacataatt

SEQ ID NO: 54277 - DNA, 13 bp, Artificial Sequence
  Oligonucleotide for detection of SNP TSC0014905
aggtgggggatgy

SEQ ID NO: 54278 - DNA, 13 bp, Artificial Sequence
  Oligonucleotide for detection of SNP TSC0014905
rcatcccccacct

SEQ ID NO: 54279 - DNA, 13 bp, Artificial Sequence
  Oligonucleotide for detection of SNP TSC0014905
aggtggaggatgy

SEQ ID NO: 54280 - DNA, 13 bp, Artificial Sequence
  Oligonucleotide for detection of SNP TSC0014905
rcatcctccacct

SEQ ID NO: 54281 - DNA, 13 bp, Artificial Sequence
  Oligonucleotide for detection of SNP TSC0014906
atggtaggtttta

SEQ ID NO: 54282 - DNA, 13 bp, Artificial Sequence
  Oligonucleotide for detection of SNP TSC0014906
taaaacctaccat

SEQ ID NO: 54283 - DNA, 13 bp, Artificial Sequence
  Oligonucleotide for detection of SNP TSC0014906
atggtaagtttta

SEQ ID NO: 54284 - DNA, 13 bp, Artificial Sequence
  Oligonucleotide for detection of SNP TSC0014906
taaaacttaccat

SEQ ID NO: 54285 - DNA, 13 bp, Artificial Sequence
  Oligonucleotide for detection of SNP TSC0014907
tttaaaggggata

SEQ ID NO: 54286 - DNA, 13 bp, Artificial Sequence
  Oligonucleotide for detection of SNP TSC0014907
tatcccctttaaa

SEQ ID NO: 54287 - DNA, 13 bp, Artificial Sequence
  Oligonucleotide for detection of SNP TSC0014907
tttaaaagggata

SEQ ID NO: 54288 - DNA, 13 bp, Artificial Sequence
  Oligonucleotide for detection of SNP TSC0014907
tatcccttttaaa

SEQ ID NO: 54289 - DNA, 13 bp, Artificial Sequence
  Oligonucleotide for detection of SNP TSC0014908
tgatttatattgg

SEQ ID NO: 54290 - DNA, 13 bp, Artificial Sequence
  Oligonucleotide for detection of SNP TSC0014908
ccaatataaatca

SEQ ID NO: 54291 - DNA, 13 bp, Artificial Sequence
  Oligonucleotide for detection of SNP TSC0014908
tgatttgtattgg

SEQ ID NO: 54292 - DNA, 13 bp, Artificial Sequence
  Oligonucleotide for detection of SNP TSC0014908
ccaatacaaatca

SEQ ID NO: 54293 - DNA, 13 bp, Artificial Sequence
  Oligonucleotide for detection of SNP TSC0014908
tgattcgtattgg

SEQ ID NO: 54294 - DNA, 13 bp, Artificial Sequence
  Oligonucleotide for detection of SNP TSC0014908
ccaatacgaatca

SEQ ID NO: 54295 - DNA, 13 bp, Artificial Sequence
  Oligonucleotide for detection of SNP TSC0014908
ttagtgtgggtta

SEQ ID NO: 54296 - DNA, 13 bp, Artificial Sequence
  Oligonucleotide for detection of SNP TSC0014908
taacccacactaa

SEQ ID NO: 54297 - DNA, 13 bp, Artificial Sequence
  Oligonucleotide for detection of SNP TSC0014908
ttagtgcgggtta

SEQ ID NO: 54298 - DNA, 13 bp, Artificial Sequence
  Oligonucleotide for detection of SNP TSC0014908
taacccgcactaa

SEQ ID NO: 54299 - DNA, 13 bp, Artificial Sequence
  Oligonucleotide for detection of SNP TSC0014909
gagttttgggagg

SEQ ID NO: 54300 - DNA, 13 bp, Artificial Sequence
  Oligonucleotide for detection of SNP TSC0014909
cctcccaaaactc

SEQ ID NO: 54301 - DNA, 13 bp, Artificial Sequence
  Oligonucleotide for detection of SNP TSC0014909
gagtttcgggagg

SEQ ID NO: 54302 - DNA, 13 bp, Artificial Sequence
  Oligonucleotide for detection of SNP TSC0014909
cctcccgaaactc

SEQ ID NO: 54303 - DNA, 13 bp, Artificial Sequence
  Oligonucleotide for detection of SNP TSC0014909
ttttttggagtty

SEQ ID NO: 54304 - DNA, 13 bp, Artificial Sequence
  Oligonucleotide for detection of SNP TSC0014909
raactccaaaaaa

SEQ ID NO: 54305 - DNA, 13 bp, Artificial Sequence
  Oligonucleotide for detection of SNP TSC0014909
ttttttagagtty

SEQ ID NO: 54306 - DNA, 13 bp, Artificial Sequence
  Oligonucleotide for detection of SNP TSC0014909
raactctaaaaaa

SEQ ID NO: 54307 - DNA, 13 bp, Artificial Sequence
  Oligonucleotide for detection of SNP TSC0014909
tttttcggagtty

SEQ ID NO: 54308 - DNA, 13 bp, Artificial Sequence
  Oligonucleotide for detection of SNP TSC0014909
raactccgaaaaa

SEQ ID NO: 54309 - DNA, 13 bp, Artificial Sequence
  Oligonucleotide for detection of SNP TSC0014910
gagggtagaggtt

SEQ ID NO: 54310 - DNA, 13 bp, Artificial Sequence
  Oligonucleotide for detection of SNP TSC0014910
aacctctaccctc

SEQ ID NO: 54311 - DNA, 13 bp, Artificial Sequence
  Oligonucleotide for detection of SNP TSC0014910
gagggtggaggtt

SEQ ID NO: 54312 - DNA, 13 bp, Artificial Sequence
  Oligonucleotide for detection of SNP TSC0014910
aacctccaccctc

SEQ ID NO: 54313 - DNA, 13 bp, Artificial Sequence
  Oligonucleotide for detection of SNP TSC0014910
gagggcggaggtt

SEQ ID NO: 54314 - DNA, 13 bp, Artificial Sequence
  Oligonucleotide for detection of SNP TSC0014910
aacctccgccctc

SEQ ID NO: 54315 - DNA, 13 bp, Artificial Sequence
  Oligonucleotide for detection of SNP TSC0014910
agtttttgtttty

SEQ ID NO: 54316 - DNA, 13 bp, Artificial Sequence
  Oligonucleotide for detection of SNP TSC0014910
raaaacaaaaact

SEQ ID NO: 54317 - DNA, 13 bp, Artificial Sequence
  Oligonucleotide for detection of SNP TSC0014910
agttttcgtttty

SEQ ID NO: 54318 - DNA, 13 bp, Artificial Sequence
  Oligonucleotide for detection of SNP TSC0014910
raaaacgaaaact

SEQ ID NO: 54319 - DNA, 13 bp, Artificial Sequence
  Oligonucleotide for detection of SNP TSC0014911
gttgttatgagtt

SEQ ID NO: 54320 - DNA, 13 bp, Artificial Sequence
  Oligonucleotide for detection of SNP TSC0014911
aactcataacaac

SEQ ID NO: 54321 - DNA, 13 bp, Artificial Sequence
  Oligonucleotide for detection of SNP TSC0014911
gttgttgtgagtt

SEQ ID NO: 54322 - DNA, 13 bp, Artificial Sequence
  Oligonucleotide for detection of SNP TSC0014911
aactcacaacaac

SEQ ID NO: 54323 - DNA, 13 bp, Artificial Sequence
  Oligonucleotide for detection of SNP TSC0014911
gttgtcgtgagtt

SEQ ID NO: 54324 - DNA, 13 bp, Artificial Sequence
  Oligonucleotide for detection of SNP TSC0014911
aactcacgacaac

SEQ ID NO: 54325 - DNA, 13 bp, Artificial Sequence
  Oligonucleotide for detection of SNP TSC0014911
agtttatggtaay

SEQ ID NO: 54326 - DNA, 13 bp, Artificial Sequence
  Oligonucleotide for detection of SNP TSC0014911
rttaccataaact

SEQ ID NO: 54327 - DNA, 13 bp, Artificial Sequence
  Oligonucleotide for detection of SNP TSC0014911
agtttacggtaay

SEQ ID NO: 54328 - DNA, 13 bp, Artificial Sequence
  Oligonucleotide for detection of SNP TSC0014911
rttaccgtaaact

SEQ ID NO: 54329 - DNA, 13 bp, Artificial Sequence
  Oligonucleotide for detection of SNP TSC0014912
agaattggaagty

SEQ ID NO: 54330 - DNA, 13 bp, Artificial Sequence
  Oligonucleotide for detection of SNP TSC0014912
racttccaattct

SEQ ID NO: 54331 - DNA, 13 bp, Artificial Sequence
  Oligonucleotide for detection of SNP TSC0014912
agaattagaagty

SEQ ID NO: 54332 - DNA, 13 bp, Artificial Sequence
  Oligonucleotide for detection of SNP TSC0014912
racttctaattct

SEQ ID NO: 54333 - DNA, 13 bp, Artificial Sequence
  Oligonucleotide for detection of SNP TSC0014913
gtggtaattatgt

SEQ ID NO: 54334 - DNA, 13 bp, Artificial Sequence
  Oligonucleotide for detection of SNP TSC0014913
acataattaccac

SEQ ID NO: 54335 - DNA, 13 bp, Artificial Sequence
  Oligonucleotide for detection of SNP TSC0014913
gtggtagttatgt

SEQ ID NO: 54336 - DNA, 13 bp, Artificial Sequence
  Oligonucleotide for detection of SNP TSC0014913
acataactaccac

SEQ ID NO: 54337 - DNA, 13 bp, Artificial Sequence
  Oligonucleotide for detection of SNP TSC0014914
gtatagtgtgaag

SEQ ID NO: 54338 - DNA, 13 bp, Artificial Sequence
  Oligonucleotide for detection of SNP TSC0014914
cttcacactatac

SEQ ID NO: 54339 - DNA, 13 bp, Artificial Sequence
  Oligonucleotide for detection of SNP TSC0014914
gtatagggtgaag

SEQ ID NO: 54340 - DNA, 13 bp, Artificial Sequence
  Oligonucleotide for detection of SNP TSC0014914
cttcaccctatac

SEQ ID NO: 54341 - DNA, 13 bp, Artificial Sequence
  Oligonucleotide for detection of SNP TSC0014914
gtatagcgtgaag

SEQ ID NO: 54342 - DNA, 13 bp, Artificial Sequence
  Oligonucleotide for detection of SNP TSC0014914
cttcacgctatac

SEQ ID NO: 54343 - DNA, 13 bp, Artificial Sequence
  Oligonucleotide for detection of SNP TSC0014914
ttttatgttgtay

SEQ ID NO: 54344 - DNA, 13 bp, Artificial Sequence
  Oligonucleotide for detection of SNP TSC0014914
rtacaacataaaa

SEQ ID NO: 54345 - DNA, 13 bp, Artificial Sequence
  Oligonucleotide for detection of SNP TSC0014914
ttttattttgtay

SEQ ID NO: 54346 - DNA, 13 bp, Artificial Sequence
  Oligonucleotide for detection of SNP TSC0014914
rtacaaaataaaa

SEQ ID NO: 54347 - DNA, 13 bp, Artificial Sequence
  Oligonucleotide for detection of SNP TSC0014914
ttttacgttgtay

SEQ ID NO: 54348 - DNA, 13 bp, Artificial Sequence
  Oligonucleotide for detection of SNP TSC0014914
rtacaacgtaaaa

SEQ ID NO: 54349 - DNA, 13 bp, Artificial Sequence
  Oligonucleotide for detection of SNP TSC0014915
taggtttgtgttt

SEQ ID NO: 54350 - DNA, 13 bp, Artificial Sequence
  Oligonucleotide for detection of SNP TSC0014915
aaacacaaaccta

SEQ ID NO: 54351 - DNA, 13 bp, Artificial Sequence
  Oligonucleotide for detection of SNP TSC0014915
taggttcgtgttt

SEQ ID NO: 54352 - DNA, 13 bp, Artificial Sequence
  Oligonucleotide for detection of SNP TSC0014915
aaacacgaaccta

SEQ ID NO: 54353 - DNA, 13 bp, Artificial Sequence
  Oligonucleotide for detection of SNP TSC0014915
agatatgaatttg

SEQ ID NO: 54354 - DNA, 13 bp, Artificial Sequence
  Oligonucleotide for detection of SNP TSC0014915
caaattcatatct

SEQ ID NO: 54355 - DNA, 13 bp, Artificial Sequence
  Oligonucleotide for detection of SNP TSC0014915
agatataaatttg

SEQ ID NO: 54356 - DNA, 13 bp, Artificial Sequence
  Oligonucleotide for detection of SNP TSC0014915
caaatttatatct

SEQ ID NO: 54357 - DNA, 13 bp, Artificial Sequence
  Oligonucleotide for detection of SNP TSC0014915
agatacgaatttg

SEQ ID NO: 54358 - DNA, 13 bp, Artificial Sequence
  Oligonucleotide for detection of SNP TSC0014915
caaattcgtatct

SEQ ID NO: 54359 - DNA, 13 bp, Artificial Sequence
  Oligonucleotide for detection of SNP TSC0014916
gtttttggtgtty

SEQ ID NO: 54360 - DNA, 13 bp, Artificial Sequence
  Oligonucleotide for detection of SNP TSC0014916
raacaccaaaaac

SEQ ID NO: 54361 - DNA, 13 bp, Artificial Sequence
  Oligonucleotide for detection of SNP TSC0014916
gttttttgtgtty

SEQ ID NO: 54362 - DNA, 13 bp, Artificial Sequence
  Oligonucleotide for detection of SNP TSC0014916
raacacaaaaaac

SEQ ID NO: 54363 - DNA, 13 bp, Artificial Sequence
  Oligonucleotide for detection of SNP TSC0014916
gaatattaaagay

SEQ ID NO: 54364 - DNA, 13 bp, Artificial Sequence
  Oligonucleotide for detection of SNP TSC0014916
rtctttaatattc

SEQ ID NO: 54365 - DNA, 13 bp, Artificial Sequence
  Oligonucleotide for detection of SNP TSC0014916
gaatataaaagay

SEQ ID NO: 54366 - DNA, 13 bp, Artificial Sequence
  Oligonucleotide for detection of SNP TSC0014916
rtcttttatattc

SEQ ID NO: 54367 - DNA, 13 bp, Artificial Sequence
  Oligonucleotide for detection of SNP TSC0014917
gggggagatatgy

SEQ ID NO: 54368 - DNA, 13 bp, Artificial Sequence
  Oligonucleotide for detection of SNP TSC0014917
rcatatctccccc

SEQ ID NO: 54369 - DNA, 13 bp, Artificial Sequence
  Oligonucleotide for detection of SNP TSC0014917
gggggatatatgy

SEQ ID NO: 54370 - DNA, 13 bp, Artificial Sequence
  Oligonucleotide for detection of SNP TSC0014917
rcatatatccccc

SEQ ID NO: 54371 - DNA, 13 bp, Artificial Sequence
  Oligonucleotide for detection of SNP TSC0014917
gtatattttttty

SEQ ID NO: 54372 - DNA, 13 bp, Artificial Sequence
  Oligonucleotide for detection of SNP TSC0014917
raaaaaaatatac

SEQ ID NO: 54373 - DNA, 13 bp, Artificial Sequence
  Oligonucleotide for detection of SNP TSC0014917
gtatatattttty

SEQ ID NO: 54374 - DNA, 13 bp, Artificial Sequence
  Oligonucleotide for detection of SNP TSC0014917
raaaaatatatac

SEQ ID NO: 54375 - DNA, 13 bp, Artificial Sequence
  Oligonucleotide for detection of SNP TSC0014918
gttaaaaattaaa

SEQ ID NO: 54376 - DNA, 13 bp, Artificial Sequence
  Oligonucleotide for detection of SNP TSC0014918
tttaatttttaac

SEQ ID NO: 54377 - DNA, 13 bp, Artificial Sequence
  Oligonucleotide for detection of SNP TSC0014918
gttaaatattaaa

SEQ ID NO: 54378 - DNA, 13 bp, Artificial Sequence
  Oligonucleotide for detection of SNP TSC0014918
tttaatatttaac

SEQ ID NO: 54379 - DNA, 13 bp, Artificial Sequence
  Oligonucleotide for detection of SNP TSC0014918
tttggtttttggy

SEQ ID NO: 54380 - DNA, 13 bp, Artificial Sequence
  Oligonucleotide for detection of SNP TSC0014918
rccaaaaaccaaa

SEQ ID NO: 54381 - DNA, 13 bp, Artificial Sequence
  Oligonucleotide for detection of SNP TSC0014918
tttggtgtttggy

SEQ ID NO: 54382 - DNA, 13 bp, Artificial Sequence
  Oligonucleotide for detection of SNP TSC0014918
rccaaacaccaaa

SEQ ID NO: 54383 - DNA, 13 bp, Artificial Sequence
  Oligonucleotide for detection of SNP TSC0014919
agaaatgaaaagg

SEQ ID NO: 54384 - DNA, 13 bp, Artificial Sequence
  Oligonucleotide for detection of SNP TSC0014919
ccttttcatttct

SEQ ID NO: 54385 - DNA, 13 bp, Artificial Sequence
  Oligonucleotide for detection of SNP TSC0014919
agaaataaaaagg

SEQ ID NO: 54386 - DNA, 13 bp, Artificial Sequence
  Oligonucleotide for detection of SNP TSC0014919
cctttttatttct

SEQ ID NO: 54387 - DNA, 13 bp, Artificial Sequence
  Oligonucleotide for detection of SNP TSC0014919
agaaacgaaaagg

SEQ ID NO: 54388 - DNA, 13 bp, Artificial Sequence
  Oligonucleotide for detection of SNP TSC0014919
ccttttcgtttct

SEQ ID NO: 54389 - DNA, 13 bp, Artificial Sequence
  Oligonucleotide for detection of SNP TSC0014920
ttttttatgaaga

SEQ ID NO: 54390 - DNA, 13 bp, Artificial Sequence
  Oligonucleotide for detection of SNP TSC0014920
tcttcataaaaaa

SEQ ID NO: 54391 - DNA, 13 bp, Artificial Sequence
  Oligonucleotide for detection of SNP TSC0014920
ttttttgtgaaga

SEQ ID NO: 54392 - DNA, 13 bp, Artificial Sequence
  Oligonucleotide for detection of SNP TSC0014920
tcttcacaaaaaa

SEQ ID NO: 54393 - DNA, 13 bp, Artificial Sequence
  Oligonucleotide for detection of SNP TSC0014921
aggatagaaatat

SEQ ID NO: 54394 - DNA, 13 bp, Artificial Sequence
  Oligonucleotide for detection of SNP TSC0014921
atatttctatcct

SEQ ID NO: 54395 - DNA, 13 bp, Artificial Sequence
  Oligonucleotide for detection of SNP TSC0014921
aggataaaaatat

SEQ ID NO: 54396 - DNA, 13 bp, Artificial Sequence
  Oligonucleotide for detection of SNP TSC0014921
atatttttatcct

SEQ ID NO: 54397 - DNA, 13 bp, Artificial Sequence
  Oligonucleotide for detection of SNP TSC0014923
aagagaaagaaga

SEQ ID NO: 54398 - DNA, 13 bp, Artificial Sequence
  Oligonucleotide for detection of SNP TSC0014923
tcttctttctctt

SEQ ID NO: 54399 - DNA, 13 bp, Artificial Sequence
  Oligonucleotide for detection of SNP TSC0014923
aagagagagaaga

SEQ ID NO: 54400 - DNA, 13 bp, Artificial Sequence
  Oligonucleotide for detection of SNP TSC0014923
tcttctctctctt

SEQ ID NO: 54401 - DNA, 13 bp, Artificial Sequence
  Oligonucleotide for detection of SNP TSC0014924
aaagaaatttaag

SEQ ID NO: 54402 - DNA, 13 bp, Artificial Sequence
  Oligonucleotide for detection of SNP TSC0014924
cttaaatttcttt

SEQ ID NO: 54403 - DNA, 13 bp, Artificial Sequence
  Oligonucleotide for detection of SNP TSC0014924
aaagaagtttaag

SEQ ID NO: 54404 - DNA, 13 bp, Artificial Sequence
  Oligonucleotide for detection of SNP TSC0014924
cttaaacttcttt

SEQ ID NO: 54405 - DNA, 13 bp, Artificial Sequence
  Oligonucleotide for detection of SNP TSC0014925
taggatatggtag

SEQ ID NO: 54406 - DNA, 13 bp, Artificial Sequence
  Oligonucleotide for detection of SNP TSC0014925
ctaccatatccta

SEQ ID NO: 54407 - DNA, 13 bp, Artificial Sequence
  Oligonucleotide for detection of SNP TSC0014925
taggatgtggtag

SEQ ID NO: 54408 - DNA, 13 bp, Artificial Sequence
  Oligonucleotide for detection of SNP TSC0014925
ctaccacatccta

SEQ ID NO: 54409 - DNA, 13 bp, Artificial Sequence
  Oligonucleotide for detection of SNP TSC0014925
taggacgtggtag

SEQ ID NO: 54410 - DNA, 13 bp, Artificial Sequence
  Oligonucleotide for detection of SNP TSC0014925
ctaccacgtccta

SEQ ID NO: 54411 - DNA, 13 bp, Artificial Sequence
  Oligonucleotide for detection of SNP TSC0014925
ttattatgttttg

SEQ ID NO: 54412 - DNA, 13 bp, Artificial Sequence
  Oligonucleotide for detection of SNP TSC0014925
caaaacataataa

SEQ ID NO: 54413 - DNA, 13 bp, Artificial Sequence
  Oligonucleotide for detection of SNP TSC0014925
ttattacgttttg

SEQ ID NO: 54414 - DNA, 13 bp, Artificial Sequence
  Oligonucleotide for detection of SNP TSC0014925
caaaacgtaataa

SEQ ID NO: 54415 - DNA, 13 bp, Artificial Sequence
  Oligonucleotide for detection of SNP TSC0014926
agtagggttaagt

SEQ ID NO: 54416 - DNA, 13 bp, Artificial Sequence
  Oligonucleotide for detection of SNP TSC0014926
acttaaccctact

SEQ ID NO: 54417 - DNA, 13 bp, Artificial Sequence
  Oligonucleotide for detection of SNP TSC0014926
agtaggtttaagt

SEQ ID NO: 54418 - DNA, 13 bp, Artificial Sequence
  Oligonucleotide for detection of SNP TSC0014926
acttaaacctact

SEQ ID NO: 54419 - DNA, 13 bp, Artificial Sequence
  Oligonucleotide for detection of SNP TSC0014926
atttgattttgtt

SEQ ID NO: 54420 - DNA, 13 bp, Artificial Sequence
  Oligonucleotide for detection of SNP TSC0014926
aacaaaatcaaat

SEQ ID NO: 54421 - DNA, 13 bp, Artificial Sequence
  Oligonucleotide for detection of SNP TSC0014926
atttgaatttgtt

SEQ ID NO: 54422 - DNA, 13 bp, Artificial Sequence
  Oligonucleotide for detection of SNP TSC0014926
aacaaattcaaat

SEQ ID NO: 54423 - DNA, 13 bp, Artificial Sequence
  Oligonucleotide for detection of SNP TSC0014927
ttttaatgtaagt

SEQ ID NO: 54424 - DNA, 13 bp, Artificial Sequence
  Oligonucleotide for detection of SNP TSC0014927
acttacattaaaa

SEQ ID NO: 54425 - DNA, 13 bp, Artificial Sequence
  Oligonucleotide for detection of SNP TSC0014927
ttttaacgtaagt

SEQ ID NO: 54426 - DNA, 13 bp, Artificial Sequence
  Oligonucleotide for detection of SNP TSC0014927
acttacgttaaaa

SEQ ID NO: 54427 - DNA, 13 bp, Artificial Sequence
  Oligonucleotide for detection of SNP TSC0014927
atttgtgttaaag

SEQ ID NO: 54428 - DNA, 13 bp, Artificial Sequence
  Oligonucleotide for detection of SNP TSC0014927
ctttaacacaaat

SEQ ID NO: 54429 - DNA, 13 bp, Artificial Sequence
  Oligonucleotide for detection of SNP TSC0014927
atttgtattaaag

SEQ ID NO: 54430 - DNA, 13 bp, Artificial Sequence
  Oligonucleotide for detection of SNP TSC0014927
ctttaatacaaat

SEQ ID NO: 54431 - DNA, 13 bp, Artificial Sequence
  Oligonucleotide for detection of SNP TSC0014927
atttgcgttaaag

SEQ ID NO: 54432 - DNA, 13 bp, Artificial Sequence
  Oligonucleotide for detection of SNP TSC0014927
ctttaacgcaaat

SEQ ID NO: 54433 - DNA, 13 bp, Artificial Sequence
  Oligonucleotide for detection of SNP TSC0014928
gggtaatggtgtg

SEQ ID NO: 54434 - DNA, 13 bp, Artificial Sequence
  Oligonucleotide for detection of SNP TSC0014928
cacaccattaccc

SEQ ID NO: 54435 - DNA, 13 bp, Artificial Sequence
  Oligonucleotide for detection of SNP TSC0014928
gggtaacggtgtg

SEQ ID NO: 54436 - DNA, 13 bp, Artificial Sequence
  Oligonucleotide for detection of SNP TSC0014928
cacaccgttaccc

SEQ ID NO: 54437 - DNA, 13 bp, Artificial Sequence
  Oligonucleotide for detection of SNP TSC0014928
gggtaatggcgtg

SEQ ID NO: 54438 - DNA, 13 bp, Artificial Sequence
  Oligonucleotide for detection of SNP TSC0014928
cacgccattaccc

SEQ ID NO: 54439 - DNA, 13 bp, Artificial Sequence
  Oligonucleotide for detection of SNP TSC0014928
gggtaacggcgtg

SEQ ID NO: 54440 - DNA, 13 bp, Artificial Sequence
  Oligonucleotide for detection of SNP TSC0014928
cacgccgttaccc

SEQ ID NO: 54441 - DNA, 13 bp, Artificial Sequence
  Oligonucleotide for detection of SNP TSC0014928
tatgttattgtty

SEQ ID NO: 54442 - DNA, 13 bp, Artificial Sequence
  Oligonucleotide for detection of SNP TSC0014928
raacaataacata

SEQ ID NO: 54443 - DNA, 13 bp, Artificial Sequence
  Oligonucleotide for detection of SNP TSC0014928
tacgttgttgtty

SEQ ID NO: 54444 - DNA, 13 bp, Artificial Sequence
  Oligonucleotide for detection of SNP TSC0014928
raacaacaacgta

SEQ ID NO: 54445 - DNA, 13 bp, Artificial Sequence
  Oligonucleotide for detection of SNP TSC0014928
tacgttattgtty

SEQ ID NO: 54446 - DNA, 13 bp, Artificial Sequence
  Oligonucleotide for detection of SNP TSC0014928
raacaataacgta

SEQ ID NO: 54447 - DNA, 13 bp, Artificial Sequence
  Oligonucleotide for detection of SNP TSC0014928
tatgtcgttgtty

SEQ ID NO: 54448 - DNA, 13 bp, Artificial Sequence
  Oligonucleotide for detection of SNP TSC0014928
raacaacgacata

SEQ ID NO: 54449 - DNA, 13 bp, Artificial Sequence
  Oligonucleotide for detection of SNP TSC0014928
tacgtcgttgtty

SEQ ID NO: 54450 - DNA, 13 bp, Artificial Sequence
  Oligonucleotide for detection of SNP TSC0014928
raacaacgacgta

SEQ ID NO: 54451 - DNA, 13 bp, Artificial Sequence
  Oligonucleotide for detection of SNP TSC0014929
gggatagttttat

SEQ ID NO: 54452 - DNA, 13 bp, Artificial Sequence
  Oligonucleotide for detection of SNP TSC0014929
ataaaactatccc

SEQ ID NO: 54453 - DNA, 13 bp, Artificial Sequence
  Oligonucleotide for detection of SNP TSC0014929
gggatatttttat

SEQ ID NO: 54454 - DNA, 13 bp, Artificial Sequence
  Oligonucleotide for detection of SNP TSC0014929
ataaaaatatccc

SEQ ID NO: 54455 - DNA, 13 bp, Artificial Sequence
  Oligonucleotide for detection of SNP TSC0014929
ataaggttattty

SEQ ID NO: 54456 - DNA, 13 bp, Artificial Sequence
  Oligonucleotide for detection of SNP TSC0014929
raaataaccttat

SEQ ID NO: 54457 - DNA, 13 bp, Artificial Sequence
  Oligonucleotide for detection of SNP TSC0014929
ataaggatattty

SEQ ID NO: 54458 - DNA, 13 bp, Artificial Sequence
  Oligonucleotide for detection of SNP TSC0014929
raaatatccttat

SEQ ID NO: 54459 - DNA, 13 bp, Artificial Sequence
  Oligonucleotide for detection of SNP TSC0014930
gttttatgtatty

SEQ ID NO: 54460 - DNA, 13 bp, Artificial Sequence
  Oligonucleotide for detection of SNP TSC0014930
raatacataaaac

SEQ ID NO: 54461 - DNA, 13 bp, Artificial Sequence
  Oligonucleotide for detection of SNP TSC0014930
gttttacgtatty

SEQ ID NO: 54462 - DNA, 13 bp, Artificial Sequence
  Oligonucleotide for detection of SNP TSC0014930
raatacgtaaaac

SEQ ID NO: 54463 - DNA, 13 bp, Artificial Sequence
  Oligonucleotide for detection of SNP TSC0014930
gaatatgtagggy

SEQ ID NO: 54464 - DNA, 13 bp, Artificial Sequence
  Oligonucleotide for detection of SNP TSC0014930
rccctacatattc

SEQ ID NO: 54465 - DNA, 13 bp, Artificial Sequence
  Oligonucleotide for detection of SNP TSC0014930
gaatatatagggy

SEQ ID NO: 54466 - DNA, 13 bp, Artificial Sequence
  Oligonucleotide for detection of SNP TSC0014930
rccctatatattc

SEQ ID NO: 54467 - DNA, 13 bp, Artificial Sequence
  Oligonucleotide for detection of SNP TSC0014930
gaatacgtagggy

SEQ ID NO: 54468 - DNA, 13 bp, Artificial Sequence
  Oligonucleotide for detection of SNP TSC0014930
rccctacgtattc

SEQ ID NO: 54469 - DNA, 13 bp, Artificial Sequence
  Oligonucleotide for detection of SNP TSC0014932
taattgatttaat

SEQ ID NO: 54470 - DNA, 13 bp, Artificial Sequence
  Oligonucleotide for detection of SNP TSC0014932
attaaatcaatta

SEQ ID NO: 54471 - DNA, 13 bp, Artificial Sequence
  Oligonucleotide for detection of SNP TSC0014932
taattggtttaat

SEQ ID NO: 54472 - DNA, 13 bp, Artificial Sequence
  Oligonucleotide for detection of SNP TSC0014932
attaaaccaatta

SEQ ID NO: 54473 - DNA, 13 bp, Artificial Sequence
  Oligonucleotide for detection of SNP TSC0014933
tgtaaaattataa

SEQ ID NO: 54474 - DNA, 13 bp, Artificial Sequence
  Oligonucleotide for detection of SNP TSC0014933
ttataattttaca

SEQ ID NO: 54475 - DNA, 13 bp, Artificial Sequence
  Oligonucleotide for detection of SNP TSC0014933
tgtaaatttataa

SEQ ID NO: 54476 - DNA, 13 bp, Artificial Sequence
  Oligonucleotide for detection of SNP TSC0014933
ttataaatttaca

SEQ ID NO: 54477 - DNA, 13 bp, Artificial Sequence
  Oligonucleotide for detection of SNP TSC0014933
ttatggttttgta

SEQ ID NO: 54478 - DNA, 13 bp, Artificial Sequence
  Oligonucleotide for detection of SNP TSC0014933
tacaaaaccataa

SEQ ID NO: 54479 - DNA, 13 bp, Artificial Sequence
  Oligonucleotide for detection of SNP TSC0014933
ttatggatttgta

SEQ ID NO: 54480 - DNA, 13 bp, Artificial Sequence
  Oligonucleotide for detection of SNP TSC0014933
tacaaatccataa

SEQ ID NO: 54481 - DNA, 13 bp, Artificial Sequence
  Oligonucleotide for detection of SNP TSC0014934
gtttttatgtatg

SEQ ID NO: 54482 - DNA, 13 bp, Artificial Sequence
  Oligonucleotide for detection of SNP TSC0014934
catacataaaaac

SEQ ID NO: 54483 - DNA, 13 bp, Artificial Sequence
  Oligonucleotide for detection of SNP TSC0014934
gtttttgtgtatg

SEQ ID NO: 54484 - DNA, 13 bp, Artificial Sequence
  Oligonucleotide for detection of SNP TSC0014934
catacacaaaaac

SEQ ID NO: 54485 - DNA, 13 bp, Artificial Sequence
  Oligonucleotide for detection of SNP TSC0014934
gttttcgtgtatg

SEQ ID NO: 54486 - DNA, 13 bp, Artificial Sequence
  Oligonucleotide for detection of SNP TSC0014934
catacacgaaaac

SEQ ID NO: 54487 - DNA, 13 bp, Artificial Sequence
  Oligonucleotide for detection of SNP TSC0014934
tatatatggaaay

SEQ ID NO: 54488 - DNA, 13 bp, Artificial Sequence
  Oligonucleotide for detection of SNP TSC0014934
rtttccatatata

SEQ ID NO: 54489 - DNA, 13 bp, Artificial Sequence
  Oligonucleotide for detection of SNP TSC0014934
tatatacggaaay

SEQ ID NO: 54490 - DNA, 13 bp, Artificial Sequence
  Oligonucleotide for detection of SNP TSC0014934
rtttccgtatata

SEQ ID NO: 54491 - DNA, 13 bp, Artificial Sequence
  Oligonucleotide for detection of SNP TSC0014935
taatgtggtttta

SEQ ID NO: 54492 - DNA, 13 bp, Artificial Sequence
  Oligonucleotide for detection of SNP TSC0014935
taaaaccacatta

SEQ ID NO: 54493 - DNA, 13 bp, Artificial Sequence
  Oligonucleotide for detection of SNP TSC0014935
taatgtagtttta

SEQ ID NO: 54494 - DNA, 13 bp, Artificial Sequence
  Oligonucleotide for detection of SNP TSC0014935
taaaactacatta

SEQ ID NO: 54495 - DNA, 13 bp, Artificial Sequence
  Oligonucleotide for detection of SNP TSC0014936
ttttttaaatttg

SEQ ID NO: 54496 - DNA, 13 bp, Artificial Sequence
  Oligonucleotide for detection of SNP TSC0014936
caaatttaaaaaa

SEQ ID NO: 54497 - DNA, 13 bp, Artificial Sequence
  Oligonucleotide for detection of SNP TSC0014936
ttttttgaatttg

SEQ ID NO: 54498 - DNA, 13 bp, Artificial Sequence
  Oligonucleotide for detection of SNP TSC0014936
caaattcaaaaaa

SEQ ID NO: 54499 - DNA, 13 bp, Artificial Sequence
  Oligonucleotide for detection of SNP TSC0014937
tatagtattttta

SEQ ID NO: 54500 - DNA, 13 bp, Artificial Sequence
  Oligonucleotide for detection of SNP TSC0014937
taaaaatactata

SEQ ID NO: 54501 - DNA, 13 bp, Artificial Sequence
  Oligonucleotide for detection of SNP TSC0014937
tatagtgttttta

SEQ ID NO: 54502 - DNA, 13 bp, Artificial Sequence
  Oligonucleotide for detection of SNP TSC0014937
taaaaacactata

SEQ ID NO: 54503 - DNA, 13 bp, Artificial Sequence
  Oligonucleotide for detection of SNP TSC0014939
ttttttgtgttat

SEQ ID NO: 54504 - DNA, 13 bp, Artificial Sequence
  Oligonucleotide for detection of SNP TSC0014939
ataacacaaaaaa

SEQ ID NO: 54505 - DNA, 13 bp, Artificial Sequence
  Oligonucleotide for detection of SNP TSC0014939
ttttttttgttat

SEQ ID NO: 54506 - DNA, 13 bp, Artificial Sequence
  Oligonucleotide for detection of SNP TSC0014939
ataacaaaaaaaa

SEQ ID NO: 54507 - DNA, 13 bp, Artificial Sequence
  Oligonucleotide for detection of SNP TSC0014939
atgatataggagg

SEQ ID NO: 54508 - DNA, 13 bp, Artificial Sequence
  Oligonucleotide for detection of SNP TSC0014939
cctcctatatcat

SEQ ID NO: 54509 - DNA, 13 bp, Artificial Sequence
  Oligonucleotide for detection of SNP TSC0014939
atgataaaggagg

SEQ ID NO: 54510 - DNA, 13 bp, Artificial Sequence
  Oligonucleotide for detection of SNP TSC0014939
cctcctttatcat

SEQ ID NO: 54511 - DNA, 13 bp, Artificial Sequence
  Oligonucleotide for detection of SNP TSC0014940
tatttaattttta

SEQ ID NO: 54512 - DNA, 13 bp, Artificial Sequence
  Oligonucleotide for detection of SNP TSC0014940
taaaaattaaata

SEQ ID NO: 54513 - DNA, 13 bp, Artificial Sequence
  Oligonucleotide for detection of SNP TSC0014940
tatttagttttta

SEQ ID NO: 54514 - DNA, 13 bp, Artificial Sequence
  Oligonucleotide for detection of SNP TSC0014940
taaaaactaaata

SEQ ID NO: 54515 - DNA, 13 bp, Artificial Sequence
  Oligonucleotide for detection of SNP TSC0014941
gagggagtaagga

SEQ ID NO: 54516 - DNA, 13 bp, Artificial Sequence
  Oligonucleotide for detection of SNP TSC0014941
tccttactccctc

SEQ ID NO: 54517 - DNA, 13 bp, Artificial Sequence
  Oligonucleotide for detection of SNP TSC0014941
gagggaataagga

SEQ ID NO: 54518 - DNA, 13 bp, Artificial Sequence
  Oligonucleotide for detection of SNP TSC0014941
tccttattccctc

SEQ ID NO: 54519 - DNA, 13 bp, Artificial Sequence
  Oligonucleotide for detection of SNP TSC0014942
gtttaggtttttg

SEQ ID NO: 54520 - DNA, 13 bp, Artificial Sequence
  Oligonucleotide for detection of SNP TSC0014942
caaaaacctaaac

SEQ ID NO: 54521 - DNA, 13 bp, Artificial Sequence
  Oligonucleotide for detection of SNP TSC0014942
gtttagatttttg

SEQ ID NO: 54522 - DNA, 13 bp, Artificial Sequence
  Oligonucleotide for detection of SNP TSC0014942
caaaaatctaaac

SEQ ID NO: 54523 - DNA, 13 bp, Artificial Sequence
  Oligonucleotide for detection of SNP TSC0014945
agagaaggagaga

SEQ ID NO: 54524 - DNA, 13 bp, Artificial Sequence
  Oligonucleotide for detection of SNP TSC0014945
tctctccttctct

SEQ ID NO: 54525 - DNA, 13 bp, Artificial Sequence
  Oligonucleotide for detection of SNP TSC0014945
agagaaagagaga

SEQ ID NO: 54526 - DNA, 13 bp, Artificial Sequence
  Oligonucleotide for detection of SNP TSC0014945
tctctctttctct

SEQ ID NO: 54527 - DNA, 13 bp, Artificial Sequence
  Oligonucleotide for detection of SNP TSC0014946
ttttttttattty

SEQ ID NO: 54528 - DNA, 13 bp, Artificial Sequence
  Oligonucleotide for detection of SNP TSC0014946
raaataaaaaaaa

SEQ ID NO: 54529 - DNA, 13 bp, Artificial Sequence
  Oligonucleotide for detection of SNP TSC0014946
gaaatggagagag

SEQ ID NO: 54530 - DNA, 13 bp, Artificial Sequence
  Oligonucleotide for detection of SNP TSC0014946
ctctctccatttc

SEQ ID NO: 54531 - DNA, 13 bp, Artificial Sequence
  Oligonucleotide for detection of SNP TSC0014946
gaaatgtagagag

SEQ ID NO: 54532 - DNA, 13 bp, Artificial Sequence
  Oligonucleotide for detection of SNP TSC0014946
ctctctacatttc

SEQ ID NO: 54533 - DNA, 13 bp, Artificial Sequence
  Oligonucleotide for detection of SNP TSC0014947
atggtagatgaga

SEQ ID NO: 54534 - DNA, 13 bp, Artificial Sequence
  Oligonucleotide for detection of SNP TSC0014947
tctcatctaccat

SEQ ID NO: 54535 - DNA, 13 bp, Artificial Sequence
  Oligonucleotide for detection of SNP TSC0014947
atggtaaatgaga

SEQ ID NO: 54536 - DNA, 13 bp, Artificial Sequence
  Oligonucleotide for detection of SNP TSC0014947
tctcatttaccat

SEQ ID NO: 54537 - DNA, 13 bp, Artificial Sequence
  Oligonucleotide for detection of SNP TSC0014951
ttttttgggagta

SEQ ID NO: 54538 - DNA, 13 bp, Artificial Sequence
  Oligonucleotide for detection of SNP TSC0014951
tactcccaaaaaa

SEQ ID NO: 54539 - DNA, 13 bp, Artificial Sequence
  Oligonucleotide for detection of SNP TSC0014951
tttttttggagta

SEQ ID NO: 54540 - DNA, 13 bp, Artificial Sequence
  Oligonucleotide for detection of SNP TSC0014951
tactccaaaaaaa

SEQ ID NO: 54541 - DNA, 13 bp, Artificial Sequence
  Oligonucleotide for detection of SNP TSC0014951
tttttcgggagta

SEQ ID NO: 54542 - DNA, 13 bp, Artificial Sequence
  Oligonucleotide for detection of SNP TSC0014951
tactcccgaaaaa

SEQ ID NO: 54543 - DNA, 13 bp, Artificial Sequence
  Oligonucleotide for detection of SNP TSC0014951
tgtttttggagag

SEQ ID NO: 54544 - DNA, 13 bp, Artificial Sequence
  Oligonucleotide for detection of SNP TSC0014951
ctctccaaaaaca

SEQ ID NO: 54545 - DNA, 13 bp, Artificial Sequence
  Oligonucleotide for detection of SNP TSC0014951
tgttttaggagag

SEQ ID NO: 54546 - DNA, 13 bp, Artificial Sequence
  Oligonucleotide for detection of SNP TSC0014951
ctctcctaaaaca

SEQ ID NO: 54547 - DNA, 13 bp, Artificial Sequence
  Oligonucleotide for detection of SNP TSC0014951
tgttttcggagag

SEQ ID NO: 54548 - DNA, 13 bp, Artificial Sequence
  Oligonucleotide for detection of SNP TSC0014951
ctctccgaaaaca

SEQ ID NO: 54549 - DNA, 13 bp, Artificial Sequence
  Oligonucleotide for detection of SNP TSC0014953
tattataggttag

SEQ ID NO: 54550 - DNA, 13 bp, Artificial Sequence
  Oligonucleotide for detection of SNP TSC0014953
ctaacctataata

SEQ ID NO: 54551 - DNA, 13 bp, Artificial Sequence
  Oligonucleotide for detection of SNP TSC0014953
tattatgggttag

SEQ ID NO: 54552 - DNA, 13 bp, Artificial Sequence
  Oligonucleotide for detection of SNP TSC0014953
ctaacccataata

SEQ ID NO: 54553 - DNA, 13 bp, Artificial Sequence
  Oligonucleotide for detection of SNP TSC0014955
gttattatatttt

SEQ ID NO: 54554 - DNA, 13 bp, Artificial Sequence
  Oligonucleotide for detection of SNP TSC0014955
aaaatataataac

SEQ ID NO: 54555 - DNA, 13 bp, Artificial Sequence
  Oligonucleotide for detection of SNP TSC0014955
gttattgtatttt

SEQ ID NO: 54556 - DNA, 13 bp, Artificial Sequence
  Oligonucleotide for detection of SNP TSC0014955
aaaatacaataac

SEQ ID NO: 54557 - DNA, 13 bp, Artificial Sequence
  Oligonucleotide for detection of SNP TSC0014956
gttaatgagagta

SEQ ID NO: 54558 - DNA, 13 bp, Artificial Sequence
  Oligonucleotide for detection of SNP TSC0014956
tactctcattaac

SEQ ID NO: 54559 - DNA, 13 bp, Artificial Sequence
  Oligonucleotide for detection of SNP TSC0014956
gttaataagagta

SEQ ID NO: 54560 - DNA, 13 bp, Artificial Sequence
  Oligonucleotide for detection of SNP TSC0014956
tactcttattaac

SEQ ID NO: 54561 - DNA, 13 bp, Artificial Sequence
  Oligonucleotide for detection of SNP TSC0014957
tatagaagtttag

SEQ ID NO: 54562 - DNA, 13 bp, Artificial Sequence
  Oligonucleotide for detection of SNP TSC0014957
ctaaacttctata

SEQ ID NO: 54563 - DNA, 13 bp, Artificial Sequence
  Oligonucleotide for detection of SNP TSC0014957
tatagaggtttag

SEQ ID NO: 54564 - DNA, 13 bp, Artificial Sequence
  Oligonucleotide for detection of SNP TSC0014957
ctaaacctctata

SEQ ID NO: 54565 - DNA, 13 bp, Artificial Sequence
  Oligonucleotide for detection of SNP TSC0014958
tagaaaaaaaaat

SEQ ID NO: 54566 - DNA, 13 bp, Artificial Sequence
  Oligonucleotide for detection of SNP TSC0014958
atttttttttcta

SEQ ID NO: 54567 - DNA, 13 bp, Artificial Sequence
  Oligonucleotide for detection of SNP TSC0014958
tagaaataaaaat

SEQ ID NO: 54568 - DNA, 13 bp, Artificial Sequence
  Oligonucleotide for detection of SNP TSC0014958
atttttatttcta

SEQ ID NO: 54569 - DNA, 13 bp, Artificial Sequence
  Oligonucleotide for detection of SNP TSC0014958
attttttttttta

SEQ ID NO: 54570 - DNA, 13 bp, Artificial Sequence
  Oligonucleotide for detection of SNP TSC0014958
taaaaaaaaaaat

SEQ ID NO: 54571 - DNA, 13 bp, Artificial Sequence
  Oligonucleotide for detection of SNP TSC0014963
gagagggaggtgy

SEQ ID NO: 54572 - DNA, 13 bp, Artificial Sequence
  Oligonucleotide for detection of SNP TSC0014963
rcacctccctctc

SEQ ID NO: 54573 - DNA, 13 bp, Artificial Sequence
  Oligonucleotide for detection of SNP TSC0014963
gagaggaaggtgy

SEQ ID NO: 54574 - DNA, 13 bp, Artificial Sequence
  Oligonucleotide for detection of SNP TSC0014963
rcaccttcctctc

SEQ ID NO: 54575 - DNA, 13 bp, Artificial Sequence
  Oligonucleotide for detection of SNP TSC0014964
ttgggtatttttg

SEQ ID NO: 54576 - DNA, 13 bp, Artificial Sequence
  Oligonucleotide for detection of SNP TSC0014964
caaaaatacccaa

SEQ ID NO: 54577 - DNA, 13 bp, Artificial Sequence
  Oligonucleotide for detection of SNP TSC0014964
ttgggtgtttttg

SEQ ID NO: 54578 - DNA, 13 bp, Artificial Sequence
  Oligonucleotide for detection of SNP TSC0014964
caaaaacacccaa

SEQ ID NO: 54579 - DNA, 13 bp, Artificial Sequence
  Oligonucleotide for detection of SNP TSC0014966
atagtggttgttt

SEQ ID NO: 54580 - DNA, 13 bp, Artificial Sequence
  Oligonucleotide for detection of SNP TSC0014966
aaacaaccactat

SEQ ID NO: 54581 - DNA, 13 bp, Artificial Sequence
  Oligonucleotide for detection of SNP TSC0014966
atagtgattgttt

SEQ ID NO: 54582 - DNA, 13 bp, Artificial Sequence
  Oligonucleotide for detection of SNP TSC0014966
aaacaatcactat

SEQ ID NO: 54583 - DNA, 13 bp, Artificial Sequence
  Oligonucleotide for detection of SNP TSC0014967
gaagtagtagaaa

SEQ ID NO: 54584 - DNA, 13 bp, Artificial Sequence
  Oligonucleotide for detection of SNP TSC0014967
tttctactacttc

SEQ ID NO: 54585 - DNA, 13 bp, Artificial Sequence
  Oligonucleotide for detection of SNP TSC0014967
gaagtaatagaaa

SEQ ID NO: 54586 - DNA, 13 bp, Artificial Sequence
  Oligonucleotide for detection of SNP TSC0014967
tttctattacttc

SEQ ID NO: 54587 - DNA, 13 bp, Artificial Sequence
  Oligonucleotide for detection of SNP TSC0014968
agtattataattg

SEQ ID NO: 54588 - DNA, 13 bp, Artificial Sequence
  Oligonucleotide for detection of SNP TSC0014968
caattataatact

SEQ ID NO: 54589 - DNA, 13 bp, Artificial Sequence
  Oligonucleotide for detection of SNP TSC0014968
agtattgtaattg

SEQ ID NO: 54590 - DNA, 13 bp, Artificial Sequence
  Oligonucleotide for detection of SNP TSC0014968
caattacaatact

SEQ ID NO: 54591 - DNA, 13 bp, Artificial Sequence
  Oligonucleotide for detection of SNP TSC0014968
agtatcgtaattg

SEQ ID NO: 54592 - DNA, 13 bp, Artificial Sequence
  Oligonucleotide for detection of SNP TSC0014968
caattacgatact

SEQ ID NO: 54593 - DNA, 13 bp, Artificial Sequence
  Oligonucleotide for detection of SNP TSC0014969
gagaataggttta

SEQ ID NO: 54594 - DNA, 13 bp, Artificial Sequence
  Oligonucleotide for detection of SNP TSC0014969
taaacctattctc

SEQ ID NO: 54595 - DNA, 13 bp, Artificial Sequence
  Oligonucleotide for detection of SNP TSC0014969
gagaatgggttta

SEQ ID NO: 54596 - DNA, 13 bp, Artificial Sequence
  Oligonucleotide for detection of SNP TSC0014969
taaacccattctc

SEQ ID NO: 54597 - DNA, 13 bp, Artificial Sequence
  Oligonucleotide for detection of SNP TSC0014969
gagaacgggttta

SEQ ID NO: 54598 - DNA, 13 bp, Artificial Sequence
  Oligonucleotide for detection of SNP TSC0014969
taaacccgttctc

SEQ ID NO: 54599 - DNA, 13 bp, Artificial Sequence
  Oligonucleotide for detection of SNP TSC0014969
tgggtttgtttty

SEQ ID NO: 54600 - DNA, 13 bp, Artificial Sequence
  Oligonucleotide for detection of SNP TSC0014969
raaaacaaaccca

SEQ ID NO: 54601 - DNA, 13 bp, Artificial Sequence
  Oligonucleotide for detection of SNP TSC0014969
tgggttcgtttty

SEQ ID NO: 54602 - DNA, 13 bp, Artificial Sequence
  Oligonucleotide for detection of SNP TSC0014969
raaaacgaaccca

SEQ ID NO: 54603 - DNA, 13 bp, Artificial Sequence
  Oligonucleotide for detection of SNP TSC0014970
tttaatttttatg

SEQ ID NO: 54604 - DNA, 13 bp, Artificial Sequence
  Oligonucleotide for detection of SNP TSC0014970
cataaaaattaaa

SEQ ID NO: 54605 - DNA, 13 bp, Artificial Sequence
  Oligonucleotide for detection of SNP TSC0014970
tttaatgtttatg

SEQ ID NO: 54606 - DNA, 13 bp, Artificial Sequence
  Oligonucleotide for detection of SNP TSC0014970
cataaacattaaa

SEQ ID NO: 54607 - DNA, 13 bp, Artificial Sequence
  Oligonucleotide for detection of SNP TSC0014970
tatgaagattaaa

SEQ ID NO: 54608 - DNA, 13 bp, Artificial Sequence
  Oligonucleotide for detection of SNP TSC0014970
tttaatcttcata

SEQ ID NO: 54609 - DNA, 13 bp, Artificial Sequence
  Oligonucleotide for detection of SNP TSC0014970
tatgaatattaaa

SEQ ID NO: 54610 - DNA, 13 bp, Artificial Sequence
  Oligonucleotide for detection of SNP TSC0014970
tttaatattcata

SEQ ID NO: 54611 - DNA, 13 bp, Artificial Sequence
  Oligonucleotide for detection of SNP TSC0014971
tattatatgtgty

SEQ ID NO: 54612 - DNA, 13 bp, Artificial Sequence
  Oligonucleotide for detection of SNP TSC0014971
racacatataata

SEQ ID NO: 54613 - DNA, 13 bp, Artificial Sequence
  Oligonucleotide for detection of SNP TSC0014971
tattatgtgtgty

SEQ ID NO: 54614 - DNA, 13 bp, Artificial Sequence
  Oligonucleotide for detection of SNP TSC0014971
racacacataata

SEQ ID NO: 54615 - DNA, 13 bp, Artificial Sequence
  Oligonucleotide for detection of SNP TSC0014971
tattacgtgtgty

SEQ ID NO: 54616 - DNA, 13 bp, Artificial Sequence
  Oligonucleotide for detection of SNP TSC0014971
racacacgtaata

SEQ ID NO: 54617 - DNA, 13 bp, Artificial Sequence
  Oligonucleotide for detection of SNP TSC0014971
gatatatgtgatg

SEQ ID NO: 54618 - DNA, 13 bp, Artificial Sequence
  Oligonucleotide for detection of SNP TSC0014971
catcacatatatc

SEQ ID NO: 54619 - DNA, 13 bp, Artificial Sequence
  Oligonucleotide for detection of SNP TSC0014971
gatatacgtgatg

SEQ ID NO: 54620 - DNA, 13 bp, Artificial Sequence
  Oligonucleotide for detection of SNP TSC0014971
catcacgtatatc

SEQ ID NO: 54621 - DNA, 13 bp, Artificial Sequence
  Oligonucleotide for detection of SNP TSC0014972
attgttatgggtg

SEQ ID NO: 54622 - DNA, 13 bp, Artificial Sequence
  Oligonucleotide for detection of SNP TSC0014972
cacccataacaat

SEQ ID NO: 54623 - DNA, 13 bp, Artificial Sequence
  Oligonucleotide for detection of SNP TSC0014972
attgttgtgggtg

SEQ ID NO: 54624 - DNA, 13 bp, Artificial Sequence
  Oligonucleotide for detection of SNP TSC0014972
cacccacaacaat

SEQ ID NO: 54625 - DNA, 13 bp, Artificial Sequence
  Oligonucleotide for detection of SNP TSC0014972
attgtcgtgggtg

SEQ ID NO: 54626 - DNA, 13 bp, Artificial Sequence
  Oligonucleotide for detection of SNP TSC0014972
cacccacgacaat

SEQ ID NO: 54627 - DNA, 13 bp, Artificial Sequence
  Oligonucleotide for detection of SNP TSC0014972
tatttatgataat

SEQ ID NO: 54628 - DNA, 13 bp, Artificial Sequence
  Oligonucleotide for detection of SNP TSC0014972
attatcataaata

SEQ ID NO: 54629 - DNA, 13 bp, Artificial Sequence
  Oligonucleotide for detection of SNP TSC0014972
tatttacgataat

SEQ ID NO: 54630 - DNA, 13 bp, Artificial Sequence
  Oligonucleotide for detection of SNP TSC0014972
attatcgtaaata

SEQ ID NO: 54631 - DNA, 13 bp, Artificial Sequence
  Oligonucleotide for detection of SNP TSC0014978
attgaggggtttt

SEQ ID NO: 54632 - DNA, 13 bp, Artificial Sequence
  Oligonucleotide for detection of SNP TSC0014978
aaaacccctcaat

SEQ ID NO: 54633 - DNA, 13 bp, Artificial Sequence
  Oligonucleotide for detection of SNP TSC0014978
attgagaggtttt

SEQ ID NO: 54634 - DNA, 13 bp, Artificial Sequence
  Oligonucleotide for detection of SNP TSC0014978
aaaacctctcaat

SEQ ID NO: 54635 - DNA, 13 bp, Artificial Sequence
  Oligonucleotide for detection of SNP TSC0014979
tagtagagtgaat

SEQ ID NO: 54636 - DNA, 13 bp, Artificial Sequence
  Oligonucleotide for detection of SNP TSC0014979
attcactctacta

SEQ ID NO: 54637 - DNA, 13 bp, Artificial Sequence
  Oligonucleotide for detection of SNP TSC0014979
tagtagggtgaat

SEQ ID NO: 54638 - DNA, 13 bp, Artificial Sequence
  Oligonucleotide for detection of SNP TSC0014979
attcaccctacta

SEQ ID NO: 54639 - DNA, 13 bp, Artificial Sequence
  Oligonucleotide for detection of SNP TSC0014980
tgattgtgtgtag

SEQ ID NO: 54640 - DNA, 13 bp, Artificial Sequence
  Oligonucleotide for detection of SNP TSC0014980
ctacacacaatca

SEQ ID NO: 54641 - DNA, 13 bp, Artificial Sequence
  Oligonucleotide for detection of SNP TSC0014980
tgattgggtgtag

SEQ ID NO: 54642 - DNA, 13 bp, Artificial Sequence
  Oligonucleotide for detection of SNP TSC0014980
ctacacccaatca

SEQ ID NO: 54643 - DNA, 13 bp, Artificial Sequence
  Oligonucleotide for detection of SNP TSC0014980
tgattgcgtgtag

SEQ ID NO: 54644 - DNA, 13 bp, Artificial Sequence
  Oligonucleotide for detection of SNP TSC0014980
ctacacgcaatca

SEQ ID NO: 54645 - DNA, 13 bp, Artificial Sequence
  Oligonucleotide for detection of SNP TSC0014980
ttgtatgtaatta

SEQ ID NO: 54646 - DNA, 13 bp, Artificial Sequence
  Oligonucleotide for detection of SNP TSC0014980
taattacatacaa

SEQ ID NO: 54647 - DNA, 13 bp, Artificial Sequence
  Oligonucleotide for detection of SNP TSC0014980
ttgtatttaatta

SEQ ID NO: 54648 - DNA, 13 bp, Artificial Sequence
  Oligonucleotide for detection of SNP TSC0014980
taattaaatacaa

SEQ ID NO: 54649 - DNA, 13 bp, Artificial Sequence
  Oligonucleotide for detection of SNP TSC0014980
ttgtacgtaatta

SEQ ID NO: 54650 - DNA, 13 bp, Artificial Sequence
  Oligonucleotide for detection of SNP TSC0014980
taattacgtacaa

SEQ ID NO: 54651 - DNA, 13 bp, Artificial Sequence
  Oligonucleotide for detection of SNP TSC0014981
ttttatgtaaaay

SEQ ID NO: 54652 - DNA, 13 bp, Artificial Sequence
  Oligonucleotide for detection of SNP TSC0014981
rttttacataaaa

SEQ ID NO: 54653 - DNA, 13 bp, Artificial Sequence
  Oligonucleotide for detection of SNP TSC0014981
ttttatttaaaay

SEQ ID NO: 54654 - DNA, 13 bp, Artificial Sequence
  Oligonucleotide for detection of SNP TSC0014981
rttttaaataaaa

SEQ ID NO: 54655 - DNA, 13 bp, Artificial Sequence
  Oligonucleotide for detection of SNP TSC0014981
gttttatataaag

SEQ ID NO: 54656 - DNA, 13 bp, Artificial Sequence
  Oligonucleotide for detection of SNP TSC0014981
ctttatataaaac

SEQ ID NO: 54657 - DNA, 13 bp, Artificial Sequence
  Oligonucleotide for detection of SNP TSC0014981
gttttaaataaag

SEQ ID NO: 54658 - DNA, 13 bp, Artificial Sequence
  Oligonucleotide for detection of SNP TSC0014981
ctttatttaaaac

SEQ ID NO: 54659 - DNA, 13 bp, Artificial Sequence
  Oligonucleotide for detection of SNP TSC0014986
atatataggtttt

SEQ ID NO: 54660 - DNA, 13 bp, Artificial Sequence
  Oligonucleotide for detection of SNP TSC0014986
aaaacctatatat

SEQ ID NO: 54661 - DNA, 13 bp, Artificial Sequence
  Oligonucleotide for detection of SNP TSC0014986
atatattggtttt

SEQ ID NO: 54662 - DNA, 13 bp, Artificial Sequence
  Oligonucleotide for detection of SNP TSC0014986
aaaaccaatatat

SEQ ID NO: 54663 - DNA, 13 bp, Artificial Sequence
  Oligonucleotide for detection of SNP TSC0014986
aaaatttgtatgt

SEQ ID NO: 54664 - DNA, 13 bp, Artificial Sequence
  Oligonucleotide for detection of SNP TSC0014986
acatacaaatttt

SEQ ID NO: 54665 - DNA, 13 bp, Artificial Sequence
  Oligonucleotide for detection of SNP TSC0014986
aaaattagtatgt

SEQ ID NO: 54666 - DNA, 13 bp, Artificial Sequence
  Oligonucleotide for detection of SNP TSC0014986
acatactaatttt

SEQ ID NO: 54667 - DNA, 13 bp, Artificial Sequence
  Oligonucleotide for detection of SNP TSC0014987
tgtgatatgttga

SEQ ID NO: 54668 - DNA, 13 bp, Artificial Sequence
  Oligonucleotide for detection of SNP TSC0014987
tcaacatatcaca

SEQ ID NO: 54669 - DNA, 13 bp, Artificial Sequence
  Oligonucleotide for detection of SNP TSC0014987
tgtgatgtgttga

SEQ ID NO: 54670 - DNA, 13 bp, Artificial Sequence
  Oligonucleotide for detection of SNP TSC0014987
tcaacacatcaca

SEQ ID NO: 54671 - DNA, 13 bp, Artificial Sequence
  Oligonucleotide for detection of SNP TSC0014987
tgtgacgtgttga

SEQ ID NO: 54672 - DNA, 13 bp, Artificial Sequence
  Oligonucleotide for detection of SNP TSC0014987
tcaacacgtcaca

SEQ ID NO: 54673 - DNA, 13 bp, Artificial Sequence
  Oligonucleotide for detection of SNP TSC0014987
ttaatatgttata

SEQ ID NO: 54674 - DNA, 13 bp, Artificial Sequence
  Oligonucleotide for detection of SNP TSC0014987
tataacatattaa

SEQ ID NO: 54675 - DNA, 13 bp, Artificial Sequence
  Oligonucleotide for detection of SNP TSC0014987
ttaatacgttata

SEQ ID NO: 54676 - DNA, 13 bp, Artificial Sequence
  Oligonucleotide for detection of SNP TSC0014987
tataacgtattaa

SEQ ID NO: 54677 - DNA, 13 bp, Artificial Sequence
  Oligonucleotide for detection of SNP TSC0014988
atggtgggtagta

SEQ ID NO: 54678 - DNA, 13 bp, Artificial Sequence
  Oligonucleotide for detection of SNP TSC0014988
tactacccaccat

SEQ ID NO: 54679 - DNA, 13 bp, Artificial Sequence
  Oligonucleotide for detection of SNP TSC0014988
atggtgagtagta

SEQ ID NO: 54680 - DNA, 13 bp, Artificial Sequence
  Oligonucleotide for detection of SNP TSC0014988
tactactcaccat

SEQ ID NO: 54681 - DNA, 13 bp, Artificial Sequence
  Oligonucleotide for detection of SNP TSC0014989
ggtttttggtggg

SEQ ID NO: 54682 - DNA, 13 bp, Artificial Sequence
  Oligonucleotide for detection of SNP TSC0014989
cccaccaaaaacc

SEQ ID NO: 54683 - DNA, 13 bp, Artificial Sequence
  Oligonucleotide for detection of SNP TSC0014989
ggttttcggtggg

SEQ ID NO: 54684 - DNA, 13 bp, Artificial Sequence
  Oligonucleotide for detection of SNP TSC0014989
cccaccgaaaacc

SEQ ID NO: 54685 - DNA, 13 bp, Artificial Sequence
  Oligonucleotide for detection of SNP TSC0014989
tttattgagggty

SEQ ID NO: 54686 - DNA, 13 bp, Artificial Sequence
  Oligonucleotide for detection of SNP TSC0014989
raccctcaataaa

SEQ ID NO: 54687 - DNA, 13 bp, Artificial Sequence
  Oligonucleotide for detection of SNP TSC0014989
tttattaagggty

SEQ ID NO: 54688 - DNA, 13 bp, Artificial Sequence
  Oligonucleotide for detection of SNP TSC0014989
racccttaataaa

SEQ ID NO: 54689 - DNA, 13 bp, Artificial Sequence
  Oligonucleotide for detection of SNP TSC0014989
tttatcgagggty

SEQ ID NO: 54690 - DNA, 13 bp, Artificial Sequence
  Oligonucleotide for detection of SNP TSC0014989
raccctcgataaa

SEQ ID NO: 54691 - DNA, 13 bp, Artificial Sequence
  Oligonucleotide for detection of SNP TSC0014990
tgagtaattatay

SEQ ID NO: 54692 - DNA, 13 bp, Artificial Sequence
  Oligonucleotide for detection of SNP TSC0014990
rtataattactca

SEQ ID NO: 54693 - DNA, 13 bp, Artificial Sequence
  Oligonucleotide for detection of SNP TSC0014990
tgagtatttatay

SEQ ID NO: 54694 - DNA, 13 bp, Artificial Sequence
  Oligonucleotide for detection of SNP TSC0014990
rtataaatactca

SEQ ID NO: 54695 - DNA, 13 bp, Artificial Sequence
  Oligonucleotide for detection of SNP TSC0014990
cgagtaattatay

SEQ ID NO: 54696 - DNA, 13 bp, Artificial Sequence
  Oligonucleotide for detection of SNP TSC0014990
rtataattactcg

SEQ ID NO: 54697 - DNA, 13 bp, Artificial Sequence
  Oligonucleotide for detection of SNP TSC0014990
cgagtatttatay

SEQ ID NO: 54698 - DNA, 13 bp, Artificial Sequence
  Oligonucleotide for detection of SNP TSC0014990
rtataaatactcg

SEQ ID NO: 54699 - DNA, 13 bp, Artificial Sequence
  Oligonucleotide for detection of SNP TSC0014990
gtatggttgtttg

SEQ ID NO: 54700 - DNA, 13 bp, Artificial Sequence
  Oligonucleotide for detection of SNP TSC0014990
caaacaaccatac

SEQ ID NO: 54701 - DNA, 13 bp, Artificial Sequence
  Oligonucleotide for detection of SNP TSC0014990
gtatgggtgtttg

SEQ ID NO: 54702 - DNA, 13 bp, Artificial Sequence
  Oligonucleotide for detection of SNP TSC0014990
caaacacccatac

SEQ ID NO: 54703 - DNA, 13 bp, Artificial Sequence
  Oligonucleotide for detection of SNP TSC0014990
gtatggttgttcg

SEQ ID NO: 54704 - DNA, 13 bp, Artificial Sequence
  Oligonucleotide for detection of SNP TSC0014990
cgaacaaccatac

SEQ ID NO: 54705 - DNA, 13 bp, Artificial Sequence
  Oligonucleotide for detection of SNP TSC0014990
gtatgggtgttcg

SEQ ID NO: 54706 - DNA, 13 bp, Artificial Sequence
  Oligonucleotide for detection of SNP TSC0014990
cgaacacccatac

SEQ ID NO: 54707 - DNA, 13 bp, Artificial Sequence
  Oligonucleotide for detection of SNP TSC0014991
ggggttatgagaa

SEQ ID NO: 54708 - DNA, 13 bp, Artificial Sequence
  Oligonucleotide for detection of SNP TSC0014991
ttctcataacccc

SEQ ID NO: 54709 - DNA, 13 bp, Artificial Sequence
  Oligonucleotide for detection of SNP TSC0014991
ggggttgtgagaa

SEQ ID NO: 54710 - DNA, 13 bp, Artificial Sequence
  Oligonucleotide for detection of SNP TSC0014991
ttctcacaacccc

SEQ ID NO: 54711 - DNA, 13 bp, Artificial Sequence
  Oligonucleotide for detection of SNP TSC0014991
ggggtcgtgagaa

SEQ ID NO: 54712 - DNA, 13 bp, Artificial Sequence
  Oligonucleotide for detection of SNP TSC0014991
ttctcacgacccc

SEQ ID NO: 54713 - DNA, 13 bp, Artificial Sequence
  Oligonucleotide for detection of SNP TSC0014992
ataaataaaagta

SEQ ID NO: 54714 - DNA, 13 bp, Artificial Sequence
  Oligonucleotide for detection of SNP TSC0014992
tacttttatttat

SEQ ID NO: 54715 - DNA, 13 bp, Artificial Sequence
  Oligonucleotide for detection of SNP TSC0014992
ataaattaaagta

SEQ ID NO: 54716 - DNA, 13 bp, Artificial Sequence
  Oligonucleotide for detection of SNP TSC0014992
tactttaatttat

SEQ ID NO: 54717 - DNA, 13 bp, Artificial Sequence
  Oligonucleotide for detection of SNP TSC0014992
tatttttgtttat

SEQ ID NO: 54718 - DNA, 13 bp, Artificial Sequence
  Oligonucleotide for detection of SNP TSC0014992
ataaacaaaaata

SEQ ID NO: 54719 - DNA, 13 bp, Artificial Sequence
  Oligonucleotide for detection of SNP TSC0014992
tattttggtttat

SEQ ID NO: 54720 - DNA, 13 bp, Artificial Sequence
  Oligonucleotide for detection of SNP TSC0014992
ataaaccaaaata

SEQ ID NO: 54721 - DNA, 13 bp, Artificial Sequence
  Oligonucleotide for detection of SNP TSC0014995
gttagaggaagaa

SEQ ID NO: 54722 - DNA, 13 bp, Artificial Sequence
  Oligonucleotide for detection of SNP TSC0014995
ttcttcctctaac

SEQ ID NO: 54723 - DNA, 13 bp, Artificial Sequence
  Oligonucleotide for detection of SNP TSC0014995
gttagaagaagaa

SEQ ID NO: 54724 - DNA, 13 bp, Artificial Sequence
  Oligonucleotide for detection of SNP TSC0014995
ttcttcttctaac

SEQ ID NO: 54725 - DNA, 13 bp, Artificial Sequence
  Oligonucleotide for detection of SNP TSC0014997
ttggttatttttg

SEQ ID NO: 54726 - DNA, 13 bp, Artificial Sequence
  Oligonucleotide for detection of SNP TSC0014997
caaaaataaccaa

SEQ ID NO: 54727 - DNA, 13 bp, Artificial Sequence
  Oligonucleotide for detection of SNP TSC0014997
ttggttgtttttg

SEQ ID NO: 54728 - DNA, 13 bp, Artificial Sequence
  Oligonucleotide for detection of SNP TSC0014997
caaaaacaaccaa

SEQ ID NO: 54729 - DNA, 13 bp, Artificial Sequence
  Oligonucleotide for detection of SNP TSC0014997
tcggttatttttg

SEQ ID NO: 54730 - DNA, 13 bp, Artificial Sequence
  Oligonucleotide for detection of SNP TSC0014997
caaaaataaccga

SEQ ID NO: 54731 - DNA, 13 bp, Artificial Sequence
  Oligonucleotide for detection of SNP TSC0014997
tcggttgtttttg

SEQ ID NO: 54732 - DNA, 13 bp, Artificial Sequence
  Oligonucleotide for detection of SNP TSC0014997
caaaaacaaccga

SEQ ID NO: 54733 - DNA, 13 bp, Artificial Sequence
  Oligonucleotide for detection of SNP TSC0014997
ttggtcgtttttg

SEQ ID NO: 54734 - DNA, 13 bp, Artificial Sequence
  Oligonucleotide for detection of SNP TSC0014997
caaaaacgaccaa

SEQ ID NO: 54735 - DNA, 13 bp, Artificial Sequence
  Oligonucleotide for detection of SNP TSC0014997
tcggtcgtttttg

SEQ ID NO: 54736 - DNA, 13 bp, Artificial Sequence
  Oligonucleotide for detection of SNP TSC0014997
caaaaacgaccga

SEQ ID NO: 54737 - DNA, 13 bp, Artificial Sequence
  Oligonucleotide for detection of SNP TSC0014997
tagagatggttga

SEQ ID NO: 54738 - DNA, 13 bp, Artificial Sequence
  Oligonucleotide for detection of SNP TSC0014997
tcaaccatctcta

SEQ ID NO: 54739 - DNA, 13 bp, Artificial Sequence
  Oligonucleotide for detection of SNP TSC0014997
tagagatggtcga

SEQ ID NO: 54740 - DNA, 13 bp, Artificial Sequence
  Oligonucleotide for detection of SNP TSC0014997
tcgaccatctcta

SEQ ID NO: 54741 - DNA, 13 bp, Artificial Sequence
  Oligonucleotide for detection of SNP TSC0014997
tagagacggttga

SEQ ID NO: 54742 - DNA, 13 bp, Artificial Sequence
  Oligonucleotide for detection of SNP TSC0014997
tcaaccgtctcta

SEQ ID NO: 54743 - DNA, 13 bp, Artificial Sequence
  Oligonucleotide for detection of SNP TSC0014997
tagagacggtcga

SEQ ID NO: 54744 - DNA, 13 bp, Artificial Sequence
  Oligonucleotide for detection of SNP TSC0014997
tcgaccgtctcta

SEQ ID NO: 54745 - DNA, 13 bp, Artificial Sequence
  Oligonucleotide for detection of SNP TSC0015001
ttggttagttggt

SEQ ID NO: 54746 - DNA, 13 bp, Artificial Sequence
  Oligonucleotide for detection of SNP TSC0015001
accaactaaccaa

SEQ ID NO: 54747 - DNA, 13 bp, Artificial Sequence
  Oligonucleotide for detection of SNP TSC0015001
ttggttggttggt

SEQ ID NO: 54748 - DNA, 13 bp, Artificial Sequence
  Oligonucleotide for detection of SNP TSC0015001
accaaccaaccaa

SEQ ID NO: 54749 - DNA, 13 bp, Artificial Sequence
  Oligonucleotide for detection of SNP TSC0015002
gtttagaaaaaty

SEQ ID NO: 54750 - DNA, 13 bp, Artificial Sequence
  Oligonucleotide for detection of SNP TSC0015002
ratttttctaaac

SEQ ID NO: 54751 - DNA, 13 bp, Artificial Sequence
  Oligonucleotide for detection of SNP TSC0015002
gtttaggaaaaty

SEQ ID NO: 54752 - DNA, 13 bp, Artificial Sequence
  Oligonucleotide for detection of SNP TSC0015002
rattttcctaaac

SEQ ID NO: 54753 - DNA, 13 bp, Artificial Sequence
  Oligonucleotide for detection of SNP TSC0015003
tatttgtattagt

SEQ ID NO: 54754 - DNA, 13 bp, Artificial Sequence
  Oligonucleotide for detection of SNP TSC0015003
actaatacaaata

SEQ ID NO: 54755 - DNA, 13 bp, Artificial Sequence
  Oligonucleotide for detection of SNP TSC0015003
tatttggattagt

SEQ ID NO: 54756 - DNA, 13 bp, Artificial Sequence
  Oligonucleotide for detection of SNP TSC0015003
actaatccaaata

SEQ ID NO: 54757 - DNA, 13 bp, Artificial Sequence
  Oligonucleotide for detection of SNP TSC0015003
tattcgtattagt

SEQ ID NO: 54758 - DNA, 13 bp, Artificial Sequence
  Oligonucleotide for detection of SNP TSC0015003
actaatacgaata

SEQ ID NO: 54759 - DNA, 13 bp, Artificial Sequence
  Oligonucleotide for detection of SNP TSC0015003
tattcggattagt

SEQ ID NO: 54760 - DNA, 13 bp, Artificial Sequence
  Oligonucleotide for detection of SNP TSC0015003
actaatccgaata

SEQ ID NO: 54761 - DNA, 13 bp, Artificial Sequence
  Oligonucleotide for detection of SNP TSC0015003
attaatgtgaata

SEQ ID NO: 54762 - DNA, 13 bp, Artificial Sequence
  Oligonucleotide for detection of SNP TSC0015003
tattcacattaat

SEQ ID NO: 54763 - DNA, 13 bp, Artificial Sequence
  Oligonucleotide for detection of SNP TSC0015003
attaatttgaata

SEQ ID NO: 54764 - DNA, 13 bp, Artificial Sequence
  Oligonucleotide for detection of SNP TSC0015003
tattcaaattaat

SEQ ID NO: 54765 - DNA, 13 bp, Artificial Sequence
  Oligonucleotide for detection of SNP TSC0015003
attaatgcgaata

SEQ ID NO: 54766 - DNA, 13 bp, Artificial Sequence
  Oligonucleotide for detection of SNP TSC0015003
tattcgcattaat

SEQ ID NO: 54767 - DNA, 13 bp, Artificial Sequence
  Oligonucleotide for detection of SNP TSC0015003
attaattcgaata

SEQ ID NO: 54768 - DNA, 13 bp, Artificial Sequence
  Oligonucleotide for detection of SNP TSC0015003
tattcgaattaat

SEQ ID NO: 54769 - DNA, 13 bp, Artificial Sequence
  Oligonucleotide for detection of SNP TSC0015004
tgtgtatgttgtt

SEQ ID NO: 54770 - DNA, 13 bp, Artificial Sequence
  Oligonucleotide for detection of SNP TSC0015004
aacaacatacaca

SEQ ID NO: 54771 - DNA, 13 bp, Artificial Sequence
  Oligonucleotide for detection of SNP TSC0015004
tgtgtacgttgtt

SEQ ID NO: 54772 - DNA, 13 bp, Artificial Sequence
  Oligonucleotide for detection of SNP TSC0015004
aacaacgtacaca

SEQ ID NO: 54773 - DNA, 13 bp, Artificial Sequence
  Oligonucleotide for detection of SNP TSC0015004
aatagtgtatata

SEQ ID NO: 54774 - DNA, 13 bp, Artificial Sequence
  Oligonucleotide for detection of SNP TSC0015004
tatatacactatt

SEQ ID NO: 54775 - DNA, 13 bp, Artificial Sequence
  Oligonucleotide for detection of SNP TSC0015004
aatagtatatata

SEQ ID NO: 54776 - DNA, 13 bp, Artificial Sequence
  Oligonucleotide for detection of SNP TSC0015004
tatatatactatt

SEQ ID NO: 54777 - DNA, 13 bp, Artificial Sequence
  Oligonucleotide for detection of SNP TSC0015004
aatagcgtatata

SEQ ID NO: 54778 - DNA, 13 bp, Artificial Sequence
  Oligonucleotide for detection of SNP TSC0015004
tatatacgctatt

SEQ ID NO: 54779 - DNA, 13 bp, Artificial Sequence
  Oligonucleotide for detection of SNP TSC0015009
ttttaatttttta

SEQ ID NO: 54780 - DNA, 13 bp, Artificial Sequence
  Oligonucleotide for detection of SNP TSC0015009
taaaaaattaaaa

SEQ ID NO: 54781 - DNA, 13 bp, Artificial Sequence
  Oligonucleotide for detection of SNP TSC0015009
tgagaatttagaa

SEQ ID NO: 54782 - DNA, 13 bp, Artificial Sequence
  Oligonucleotide for detection of SNP TSC0015009
ttctaaattctca

SEQ ID NO: 54783 - DNA, 13 bp, Artificial Sequence
  Oligonucleotide for detection of SNP TSC0015009
tgagaaattagaa

SEQ ID NO: 54784 - DNA, 13 bp, Artificial Sequence
  Oligonucleotide for detection of SNP TSC0015009
ttctaatttctca

SEQ ID NO: 54785 - DNA, 13 bp, Artificial Sequence
  Oligonucleotide for detection of SNP TSC0015010
agaggggtttagt

SEQ ID NO: 54786 - DNA, 13 bp, Artificial Sequence
  Oligonucleotide for detection of SNP TSC0015010
actaaacccctct

SEQ ID NO: 54787 - DNA, 13 bp, Artificial Sequence
  Oligonucleotide for detection of SNP TSC0015010
agagggatttagt

SEQ ID NO: 54788 - DNA, 13 bp, Artificial Sequence
  Oligonucleotide for detection of SNP TSC0015010
actaaatccctct

SEQ ID NO: 54789 - DNA, 13 bp, Artificial Sequence
  Oligonucleotide for detection of SNP TSC0015012
tagttttgttatt

SEQ ID NO: 54790 - DNA, 13 bp, Artificial Sequence
  Oligonucleotide for detection of SNP TSC0015012
aataacaaaacta

SEQ ID NO: 54791 - DNA, 13 bp, Artificial Sequence
  Oligonucleotide for detection of SNP TSC0015012
tagtttcgttatt

SEQ ID NO: 54792 - DNA, 13 bp, Artificial Sequence
  Oligonucleotide for detection of SNP TSC0015012
aataacgaaacta

SEQ ID NO: 54793 - DNA, 13 bp, Artificial Sequence
  Oligonucleotide for detection of SNP TSC0015012
agtagtgaaattg

SEQ ID NO: 54794 - DNA, 13 bp, Artificial Sequence
  Oligonucleotide for detection of SNP TSC0015012
caatttcactact

SEQ ID NO: 54795 - DNA, 13 bp, Artificial Sequence
  Oligonucleotide for detection of SNP TSC0015012
agtagtaaaattg

SEQ ID NO: 54796 - DNA, 13 bp, Artificial Sequence
  Oligonucleotide for detection of SNP TSC0015012
caattttactact

SEQ ID NO: 54797 - DNA, 13 bp, Artificial Sequence
  Oligonucleotide for detection of SNP TSC0015012
agtagcgaaattg

SEQ ID NO: 54798 - DNA, 13 bp, Artificial Sequence
  Oligonucleotide for detection of SNP TSC0015012
caatttcgctact

SEQ ID NO: 54799 - DNA, 13 bp, Artificial Sequence
  Oligonucleotide for detection of SNP TSC0015013
taaagaaagatat

SEQ ID NO: 54800 - DNA, 13 bp, Artificial Sequence
  Oligonucleotide for detection of SNP TSC0015013
atatctttcttta

SEQ ID NO: 54801 - DNA, 13 bp, Artificial Sequence
  Oligonucleotide for detection of SNP TSC0015013
taaagagagatat

SEQ ID NO: 54802 - DNA, 13 bp, Artificial Sequence
  Oligonucleotide for detection of SNP TSC0015013
atatctctcttta

SEQ ID NO: 54803 - DNA, 13 bp, Artificial Sequence
  Oligonucleotide for detection of SNP TSC0015014
tgatatgaagaaa

SEQ ID NO: 54804 - DNA, 13 bp, Artificial Sequence
  Oligonucleotide for detection of SNP TSC0015014
tttcttcatatca

SEQ ID NO: 54805 - DNA, 13 bp, Artificial Sequence
  Oligonucleotide for detection of SNP TSC0015014
tgatattaagaaa

SEQ ID NO: 54806 - DNA, 13 bp, Artificial Sequence
  Oligonucleotide for detection of SNP TSC0015014
tttcttaatatca

SEQ ID NO: 54807 - DNA, 13 bp, Artificial Sequence
  Oligonucleotide for detection of SNP TSC0015015
aattagttaatgy

SEQ ID NO: 54808 - DNA, 13 bp, Artificial Sequence
  Oligonucleotide for detection of SNP TSC0015015
rcattaactaatt

SEQ ID NO: 54809 - DNA, 13 bp, Artificial Sequence
  Oligonucleotide for detection of SNP TSC0015015
aattaggtaatgy

SEQ ID NO: 54810 - DNA, 13 bp, Artificial Sequence
  Oligonucleotide for detection of SNP TSC0015015
rcattacctaatt

SEQ ID NO: 54811 - DNA, 13 bp, Artificial Sequence
  Oligonucleotide for detection of SNP TSC0015015
gtattagttggtt

SEQ ID NO: 54812 - DNA, 13 bp, Artificial Sequence
  Oligonucleotide for detection of SNP TSC0015015
aaccaactaatac

SEQ ID NO: 54813 - DNA, 13 bp, Artificial Sequence
  Oligonucleotide for detection of SNP TSC0015015
gtattatttggtt

SEQ ID NO: 54814 - DNA, 13 bp, Artificial Sequence
  Oligonucleotide for detection of SNP TSC0015015
aaccaaataatac

SEQ ID NO: 54815 - DNA, 13 bp, Artificial Sequence
  Oligonucleotide for detection of SNP TSC0015019
ttttaggtttaaa

SEQ ID NO: 54816 - DNA, 13 bp, Artificial Sequence
  Oligonucleotide for detection of SNP TSC0015019
tttaaacctaaaa

SEQ ID NO: 54817 - DNA, 13 bp, Artificial Sequence
  Oligonucleotide for detection of SNP TSC0015019
ttttagatttaaa

SEQ ID NO: 54818 - DNA, 13 bp, Artificial Sequence
  Oligonucleotide for detection of SNP TSC0015019
tttaaatctaaaa

SEQ ID NO: 54819 - DNA, 13 bp, Artificial Sequence
  Oligonucleotide for detection of SNP TSC0015020
aagggtagtaaag

SEQ ID NO: 54820 - DNA, 13 bp, Artificial Sequence
  Oligonucleotide for detection of SNP TSC0015020
ctttactaccctt

SEQ ID NO: 54821 - DNA, 13 bp, Artificial Sequence
  Oligonucleotide for detection of SNP TSC0015020
aagggtggtaaag

SEQ ID NO: 54822 - DNA, 13 bp, Artificial Sequence
  Oligonucleotide for detection of SNP TSC0015020
ctttaccaccctt

SEQ ID NO: 54823 - DNA, 13 bp, Artificial Sequence
  Oligonucleotide for detection of SNP TSC0015020
aagggcggtaaag

SEQ ID NO: 54824 - DNA, 13 bp, Artificial Sequence
  Oligonucleotide for detection of SNP TSC0015020
ctttaccgccctt

SEQ ID NO: 54825 - DNA, 13 bp, Artificial Sequence
  Oligonucleotide for detection of SNP TSC0015021
agttaggatggty

SEQ ID NO: 54826 - DNA, 13 bp, Artificial Sequence
  Oligonucleotide for detection of SNP TSC0015021
raccatcctaact

SEQ ID NO: 54827 - DNA, 13 bp, Artificial Sequence
  Oligonucleotide for detection of SNP TSC0015021
agttagaatggty

SEQ ID NO: 54828 - DNA, 13 bp, Artificial Sequence
  Oligonucleotide for detection of SNP TSC0015021
raccattctaact

SEQ ID NO: 54829 - DNA, 13 bp, Artificial Sequence
  Oligonucleotide for detection of SNP TSC0015021
agttaggacggty

SEQ ID NO: 54830 - DNA, 13 bp, Artificial Sequence
  Oligonucleotide for detection of SNP TSC0015021
raccgtcctaact

SEQ ID NO: 54831 - DNA, 13 bp, Artificial Sequence
  Oligonucleotide for detection of SNP TSC0015021
agttagaacggty

SEQ ID NO: 54832 - DNA, 13 bp, Artificial Sequence
  Oligonucleotide for detection of SNP TSC0015021
raccgttctaact

SEQ ID NO: 54833 - DNA, 13 bp, Artificial Sequence
  Oligonucleotide for detection of SNP TSC0015022
ttttttaggggty

SEQ ID NO: 54834 - DNA, 13 bp, Artificial Sequence
  Oligonucleotide for detection of SNP TSC0015022
racccctaaaaaa

SEQ ID NO: 54835 - DNA, 13 bp, Artificial Sequence
  Oligonucleotide for detection of SNP TSC0015022
tttttttggggty

SEQ ID NO: 54836 - DNA, 13 bp, Artificial Sequence
  Oligonucleotide for detection of SNP TSC0015022
raccccaaaaaaa

SEQ ID NO: 54837 - DNA, 13 bp, Artificial Sequence
  Oligonucleotide for detection of SNP TSC0015022
ttttttcggggty

SEQ ID NO: 54838 - DNA, 13 bp, Artificial Sequence
  Oligonucleotide for detection of SNP TSC0015022
raccccgaaaaaa

SEQ ID NO: 54839 - DNA, 13 bp, Artificial Sequence
  Oligonucleotide for detection of SNP TSC0015022
ggtttttagaggg

SEQ ID NO: 54840 - DNA, 13 bp, Artificial Sequence
  Oligonucleotide for detection of SNP TSC0015022
ccctctaaaaacc

SEQ ID NO: 54841 - DNA, 13 bp, Artificial Sequence
  Oligonucleotide for detection of SNP TSC0015022
ggttttgagaggg

SEQ ID NO: 54842 - DNA, 13 bp, Artificial Sequence
  Oligonucleotide for detection of SNP TSC0015022
ccctctcaaaacc

SEQ ID NO: 54843 - DNA, 13 bp, Artificial Sequence
  Oligonucleotide for detection of SNP TSC0015022
ggtttcgagaggg

SEQ ID NO: 54844 - DNA, 13 bp, Artificial Sequence
  Oligonucleotide for detection of SNP TSC0015022
ccctctcgaaacc

SEQ ID NO: 54845 - DNA, 13 bp, Artificial Sequence
  Oligonucleotide for detection of SNP TSC0015023
tttataattgttg

SEQ ID NO: 54846 - DNA, 13 bp, Artificial Sequence
  Oligonucleotide for detection of SNP TSC0015023
caacaattataaa

SEQ ID NO: 54847 - DNA, 13 bp, Artificial Sequence
  Oligonucleotide for detection of SNP TSC0015023
tttatagttgttg

SEQ ID NO: 54848 - DNA, 13 bp, Artificial Sequence
  Oligonucleotide for detection of SNP TSC0015023
caacaactataaa

SEQ ID NO: 54849 - DNA, 13 bp, Artificial Sequence
  Oligonucleotide for detection of SNP TSC0015026
ttattgaggttag

SEQ ID NO: 54850 - DNA, 13 bp, Artificial Sequence
  Oligonucleotide for detection of SNP TSC0015026
ctaacctcaataa

SEQ ID NO: 54851 - DNA, 13 bp, Artificial Sequence
  Oligonucleotide for detection of SNP TSC0015026
ttattggggttag

SEQ ID NO: 54852 - DNA, 13 bp, Artificial Sequence
  Oligonucleotide for detection of SNP TSC0015026
ctaaccccaataa

SEQ ID NO: 54853 - DNA, 13 bp, Artificial Sequence
  Oligonucleotide for detection of SNP TSC0015028
aaaaatatatatg

SEQ ID NO: 54854 - DNA, 13 bp, Artificial Sequence
  Oligonucleotide for detection of SNP TSC0015028
catatatattttt

SEQ ID NO: 54855 - DNA, 13 bp, Artificial Sequence
  Oligonucleotide for detection of SNP TSC0015028
aaaaatgtatatg

SEQ ID NO: 54856 - DNA, 13 bp, Artificial Sequence
  Oligonucleotide for detection of SNP TSC0015028
catatacattttt

SEQ ID NO: 54857 - DNA, 13 bp, Artificial Sequence
  Oligonucleotide for detection of SNP TSC0015028
aaaaatatatacg

SEQ ID NO: 54858 - DNA, 13 bp, Artificial Sequence
  Oligonucleotide for detection of SNP TSC0015028
cgtatatattttt

SEQ ID NO: 54859 - DNA, 13 bp, Artificial Sequence
  Oligonucleotide for detection of SNP TSC0015028
aaaaatgtatacg

SEQ ID NO: 54860 - DNA, 13 bp, Artificial Sequence
  Oligonucleotide for detection of SNP TSC0015028
cgtatacattttt

SEQ ID NO: 54861 - DNA, 13 bp, Artificial Sequence
  Oligonucleotide for detection of SNP TSC0015030
ttagtaatttggy

SEQ ID NO: 54862 - DNA, 13 bp, Artificial Sequence
  Oligonucleotide for detection of SNP TSC0015030
rccaaattactaa

SEQ ID NO: 54863 - DNA, 13 bp, Artificial Sequence
  Oligonucleotide for detection of SNP TSC0015030
ttagtagtttggy

SEQ ID NO: 54864 - DNA, 13 bp, Artificial Sequence
  Oligonucleotide for detection of SNP TSC0015030
rccaaactactaa

SEQ ID NO: 54865 - DNA, 13 bp, Artificial Sequence
  Oligonucleotide for detection of SNP TSC0015031
tttaagttataag

SEQ ID NO: 54866 - DNA, 13 bp, Artificial Sequence
  Oligonucleotide for detection of SNP TSC0015031
cttataacttaaa

SEQ ID NO: 54867 - DNA, 13 bp, Artificial Sequence
  Oligonucleotide for detection of SNP TSC0015031
tttaaggtataag

SEQ ID NO: 54868 - DNA, 13 bp, Artificial Sequence
  Oligonucleotide for detection of SNP TSC0015031
cttataccttaaa

SEQ ID NO: 54869 - DNA, 13 bp, Artificial Sequence
  Oligonucleotide for detection of SNP TSC0015031
tttgtggtttaaa

SEQ ID NO: 54870 - DNA, 13 bp, Artificial Sequence
  Oligonucleotide for detection of SNP TSC0015031
tttaaaccacaaa

SEQ ID NO: 54871 - DNA, 13 bp, Artificial Sequence
  Oligonucleotide for detection of SNP TSC0015031
tttgtgttttaaa

SEQ ID NO: 54872 - DNA, 13 bp, Artificial Sequence
  Oligonucleotide for detection of SNP TSC0015031
tttaaaacacaaa

SEQ ID NO: 54873 - DNA, 13 bp, Artificial Sequence
  Oligonucleotide for detection of SNP TSC0015035
ttttttattaata

SEQ ID NO: 54874 - DNA, 13 bp, Artificial Sequence
  Oligonucleotide for detection of SNP TSC0015035
tattaataaaaaa

SEQ ID NO: 54875 - DNA, 13 bp, Artificial Sequence
  Oligonucleotide for detection of SNP TSC0015035
tgttagtaaggaa

SEQ ID NO: 54876 - DNA, 13 bp, Artificial Sequence
  Oligonucleotide for detection of SNP TSC0015035
ttccttactaaca

SEQ ID NO: 54877 - DNA, 13 bp, Artificial Sequence
  Oligonucleotide for detection of SNP TSC0015035
tgttaggaaggaa

SEQ ID NO: 54878 - DNA, 13 bp, Artificial Sequence
  Oligonucleotide for detection of SNP TSC0015035
ttccttcctaaca

SEQ ID NO: 54879 - DNA, 13 bp, Artificial Sequence
  Oligonucleotide for detection of SNP TSC0015036
tattacgtatttt

SEQ ID NO: 54880 - DNA, 13 bp, Artificial Sequence
  Oligonucleotide for detection of SNP TSC0015036
aaaatacgtaata

SEQ ID NO: 54881 - DNA, 13 bp, Artificial Sequence
  Oligonucleotide for detection of SNP TSC0015036
aaggtatgtaatg

SEQ ID NO: 54882 - DNA, 13 bp, Artificial Sequence
  Oligonucleotide for detection of SNP TSC0015036
cattacatacctt

SEQ ID NO: 54883 - DNA, 13 bp, Artificial Sequence
  Oligonucleotide for detection of SNP TSC0015036
aaggtacgtaatg

SEQ ID NO: 54884 - DNA, 13 bp, Artificial Sequence
  Oligonucleotide for detection of SNP TSC0015036
cattacgtacctt

SEQ ID NO: 54885 - DNA, 13 bp, Artificial Sequence
  Oligonucleotide for detection of SNP TSC0015037
tggtgatgttagt

SEQ ID NO: 54886 - DNA, 13 bp, Artificial Sequence
  Oligonucleotide for detection of SNP TSC0015037
actaacatcacca

SEQ ID NO: 54887 - DNA, 13 bp, Artificial Sequence
  Oligonucleotide for detection of SNP TSC0015037
tggtgacgttagt

SEQ ID NO: 54888 - DNA, 13 bp, Artificial Sequence
  Oligonucleotide for detection of SNP TSC0015037
actaacgtcacca

SEQ ID NO: 54889 - DNA, 13 bp, Artificial Sequence
  Oligonucleotide for detection of SNP TSC0015037
attggtgttatta

SEQ ID NO: 54890 - DNA, 13 bp, Artificial Sequence
  Oligonucleotide for detection of SNP TSC0015037
taataacaccaat

SEQ ID NO: 54891 - DNA, 13 bp, Artificial Sequence
  Oligonucleotide for detection of SNP TSC0015037
attggtattatta

SEQ ID NO: 54892 - DNA, 13 bp, Artificial Sequence
  Oligonucleotide for detection of SNP TSC0015037
taataataccaat

SEQ ID NO: 54893 - DNA, 13 bp, Artificial Sequence
  Oligonucleotide for detection of SNP TSC0015037
attggcgttatta

SEQ ID NO: 54894 - DNA, 13 bp, Artificial Sequence
  Oligonucleotide for detection of SNP TSC0015037
taataacgccaat

SEQ ID NO: 54895 - DNA, 13 bp, Artificial Sequence
  Oligonucleotide for detection of SNP TSC0015038
ttttggaagattt

SEQ ID NO: 54896 - DNA, 13 bp, Artificial Sequence
  Oligonucleotide for detection of SNP TSC0015038
aaatcttccaaaa

SEQ ID NO: 54897 - DNA, 13 bp, Artificial Sequence
  Oligonucleotide for detection of SNP TSC0015038
ttttgggagattt

SEQ ID NO: 54898 - DNA, 13 bp, Artificial Sequence
  Oligonucleotide for detection of SNP TSC0015038
aaatctcccaaaa

SEQ ID NO: 54899 - DNA, 13 bp, Artificial Sequence
  Oligonucleotide for detection of SNP TSC0015038
tttcggaagattt

SEQ ID NO: 54900 - DNA, 13 bp, Artificial Sequence
  Oligonucleotide for detection of SNP TSC0015038
aaatcttccgaaa

SEQ ID NO: 54901 - DNA, 13 bp, Artificial Sequence
  Oligonucleotide for detection of SNP TSC0015038
tttcgggagattt

SEQ ID NO: 54902 - DNA, 13 bp, Artificial Sequence
  Oligonucleotide for detection of SNP TSC0015038
aaatctcccgaaa

SEQ ID NO: 54903 - DNA, 13 bp, Artificial Sequence
  Oligonucleotide for detection of SNP TSC0015039
tgatttagagtag

SEQ ID NO: 54904 - DNA, 13 bp, Artificial Sequence
  Oligonucleotide for detection of SNP TSC0015039
ctactctaaatca

SEQ ID NO: 54905 - DNA, 13 bp, Artificial Sequence
  Oligonucleotide for detection of SNP TSC0015039
tgatttggagtag

SEQ ID NO: 54906 - DNA, 13 bp, Artificial Sequence
  Oligonucleotide for detection of SNP TSC0015039
ctactccaaatca

SEQ ID NO: 54907 - DNA, 13 bp, Artificial Sequence
  Oligonucleotide for detection of SNP TSC0015040
ttttgagagggag

SEQ ID NO: 54908 - DNA, 13 bp, Artificial Sequence
  Oligonucleotide for detection of SNP TSC0015040
ctccctctcaaaa

SEQ ID NO: 54909 - DNA, 13 bp, Artificial Sequence
  Oligonucleotide for detection of SNP TSC0015040
ttttgaaagggag

SEQ ID NO: 54910 - DNA, 13 bp, Artificial Sequence
  Oligonucleotide for detection of SNP TSC0015040
ctccctttcaaaa

SEQ ID NO: 54911 - DNA, 13 bp, Artificial Sequence
  Oligonucleotide for detection of SNP TSC0015040
tttcgagagggag

SEQ ID NO: 54912 - DNA, 13 bp, Artificial Sequence
  Oligonucleotide for detection of SNP TSC0015040
ctccctctcgaaa

SEQ ID NO: 54913 - DNA, 13 bp, Artificial Sequence
  Oligonucleotide for detection of SNP TSC0015040
tttcgaaagggag

SEQ ID NO: 54914 - DNA, 13 bp, Artificial Sequence
  Oligonucleotide for detection of SNP TSC0015040
ctccctttcgaaa

SEQ ID NO: 54915 - DNA, 13 bp, Artificial Sequence
  Oligonucleotide for detection of SNP TSC0015041
aagatgtgtatgg

SEQ ID NO: 54916 - DNA, 13 bp, Artificial Sequence
  Oligonucleotide for detection of SNP TSC0015041
ccatacacatctt

SEQ ID NO: 54917 - DNA, 13 bp, Artificial Sequence
  Oligonucleotide for detection of SNP TSC0015041
aagatgcgtatgg

SEQ ID NO: 54918 - DNA, 13 bp, Artificial Sequence
  Oligonucleotide for detection of SNP TSC0015041
ccatacgcatctt

SEQ ID NO: 54919 - DNA, 13 bp, Artificial Sequence
  Oligonucleotide for detection of SNP TSC0015041
ttatatgtatttt

SEQ ID NO: 54920 - DNA, 13 bp, Artificial Sequence
  Oligonucleotide for detection of SNP TSC0015041
aaaatacatataa

SEQ ID NO: 54921 - DNA, 13 bp, Artificial Sequence
  Oligonucleotide for detection of SNP TSC0015041
ttatacgtatttt

SEQ ID NO: 54922 - DNA, 13 bp, Artificial Sequence
  Oligonucleotide for detection of SNP TSC0015041
aaaatacgtataa

SEQ ID NO: 54923 - DNA, 13 bp, Artificial Sequence
  Oligonucleotide for detection of SNP TSC0015043
ggtaggggggaat

SEQ ID NO: 54924 - DNA, 13 bp, Artificial Sequence
  Oligonucleotide for detection of SNP TSC0015043
attcccccctacc

SEQ ID NO: 54925 - DNA, 13 bp, Artificial Sequence
  Oligonucleotide for detection of SNP TSC0015043
ggtaggtgggaat

SEQ ID NO: 54926 - DNA, 13 bp, Artificial Sequence
  Oligonucleotide for detection of SNP TSC0015043
attcccacctacc

SEQ ID NO: 54927 - DNA, 13 bp, Artificial Sequence
  Oligonucleotide for detection of SNP TSC0015043
atttttttttgty

SEQ ID NO: 54928 - DNA, 13 bp, Artificial Sequence
  Oligonucleotide for detection of SNP TSC0015043
racaaaaaaaaat

SEQ ID NO: 54929 - DNA, 13 bp, Artificial Sequence
  Oligonucleotide for detection of SNP TSC0015045
tatatttgagagt

SEQ ID NO: 54930 - DNA, 13 bp, Artificial Sequence
  Oligonucleotide for detection of SNP TSC0015045
actctcaaatata

SEQ ID NO: 54931 - DNA, 13 bp, Artificial Sequence
  Oligonucleotide for detection of SNP TSC0015045
tatattcgagagt

SEQ ID NO: 54932 - DNA, 13 bp, Artificial Sequence
  Oligonucleotide for detection of SNP TSC0015045
actctcgaatata

SEQ ID NO: 54933 - DNA, 13 bp, Artificial Sequence
  Oligonucleotide for detection of SNP TSC0015045
atttttgggtatg

SEQ ID NO: 54934 - DNA, 13 bp, Artificial Sequence
  Oligonucleotide for detection of SNP TSC0015045
catacccaaaaat

SEQ ID NO: 54935 - DNA, 13 bp, Artificial Sequence
  Oligonucleotide for detection of SNP TSC0015045
atttttaggtatg

SEQ ID NO: 54936 - DNA, 13 bp, Artificial Sequence
  Oligonucleotide for detection of SNP TSC0015045
catacctaaaaat

SEQ ID NO: 54937 - DNA, 13 bp, Artificial Sequence
  Oligonucleotide for detection of SNP TSC0015045
attttcgggtatg

SEQ ID NO: 54938 - DNA, 13 bp, Artificial Sequence
  Oligonucleotide for detection of SNP TSC0015045
catacccgaaaat

SEQ ID NO: 54939 - DNA, 13 bp, Artificial Sequence
  Oligonucleotide for detection of SNP TSC0015046
tatagggggatay

SEQ ID NO: 54940 - DNA, 13 bp, Artificial Sequence
  Oligonucleotide for detection of SNP TSC0015046
rtatccccctata

SEQ ID NO: 54941 - DNA, 13 bp, Artificial Sequence
  Oligonucleotide for detection of SNP TSC0015046
tataggaggatay

SEQ ID NO: 54942 - DNA, 13 bp, Artificial Sequence
  Oligonucleotide for detection of SNP TSC0015046
rtatcctcctata

SEQ ID NO: 54943 - DNA, 13 bp, Artificial Sequence
  Oligonucleotide for detection of SNP TSC0015047
aatttatggaggy

SEQ ID NO: 54944 - DNA, 13 bp, Artificial Sequence
  Oligonucleotide for detection of SNP TSC0015047
rcctccataaatt

SEQ ID NO: 54945 - DNA, 13 bp, Artificial Sequence
  Oligonucleotide for detection of SNP TSC0015047
aatttacggaggy

SEQ ID NO: 54946 - DNA, 13 bp, Artificial Sequence
  Oligonucleotide for detection of SNP TSC0015047
rcctccgtaaatt

SEQ ID NO: 54947 - DNA, 13 bp, Artificial Sequence
  Oligonucleotide for detection of SNP TSC0015047
gtttttgtaggtt

SEQ ID NO: 54948 - DNA, 13 bp, Artificial Sequence
  Oligonucleotide for detection of SNP TSC0015047
aacctacaaaaac

SEQ ID NO: 54949 - DNA, 13 bp, Artificial Sequence
  Oligonucleotide for detection of SNP TSC0015047
gtttttataggtt

SEQ ID NO: 54950 - DNA, 13 bp, Artificial Sequence
  Oligonucleotide for detection of SNP TSC0015047
aacctataaaaac

SEQ ID NO: 54951 - DNA, 13 bp, Artificial Sequence
  Oligonucleotide for detection of SNP TSC0015047
gttttcgtaggtt

SEQ ID NO: 54952 - DNA, 13 bp, Artificial Sequence
  Oligonucleotide for detection of SNP TSC0015047
aacctacgaaaac

SEQ ID NO: 54953 - DNA, 13 bp, Artificial Sequence
  Oligonucleotide for detection of SNP TSC0015048
ggtgtatggaata

SEQ ID NO: 54954 - DNA, 13 bp, Artificial Sequence
  Oligonucleotide for detection of SNP TSC0015048
tattccatacacc

SEQ ID NO: 54955 - DNA, 13 bp, Artificial Sequence
  Oligonucleotide for detection of SNP TSC0015048
ggtgtacggaata

SEQ ID NO: 54956 - DNA, 13 bp, Artificial Sequence
  Oligonucleotide for detection of SNP TSC0015048
tattccgtacacc

SEQ ID NO: 54957 - DNA, 13 bp, Artificial Sequence
  Oligonucleotide for detection of SNP TSC0015048
tgttttgtgtaty

SEQ ID NO: 54958 - DNA, 13 bp, Artificial Sequence
  Oligonucleotide for detection of SNP TSC0015048
ratacacaaaaca

SEQ ID NO: 54959 - DNA, 13 bp, Artificial Sequence
  Oligonucleotide for detection of SNP TSC0015048
tgttttatgtaty

SEQ ID NO: 54960 - DNA, 13 bp, Artificial Sequence
  Oligonucleotide for detection of SNP TSC0015048
ratacataaaaca

SEQ ID NO: 54961 - DNA, 13 bp, Artificial Sequence
  Oligonucleotide for detection of SNP TSC0015048
tgtttcgtgtaty

SEQ ID NO: 54962 - DNA, 13 bp, Artificial Sequence
  Oligonucleotide for detection of SNP TSC0015048
ratacacgaaaca

SEQ ID NO: 54963 - DNA, 13 bp, Artificial Sequence
  Oligonucleotide for detection of SNP TSC0015051
aggtttgaatatg

SEQ ID NO: 54964 - DNA, 13 bp, Artificial Sequence
  Oligonucleotide for detection of SNP TSC0015051
catattcaaacct

SEQ ID NO: 54965 - DNA, 13 bp, Artificial Sequence
  Oligonucleotide for detection of SNP TSC0015051
aggttttaatatg

SEQ ID NO: 54966 - DNA, 13 bp, Artificial Sequence
  Oligonucleotide for detection of SNP TSC0015051
catattaaaacct

SEQ ID NO: 54967 - DNA, 13 bp, Artificial Sequence
  Oligonucleotide for detection of SNP TSC0015051
tatatttagattt

SEQ ID NO: 54968 - DNA, 13 bp, Artificial Sequence
  Oligonucleotide for detection of SNP TSC0015051
aaatctaaatata

SEQ ID NO: 54969 - DNA, 13 bp, Artificial Sequence
  Oligonucleotide for detection of SNP TSC0015051
tatattaagattt

SEQ ID NO: 54970 - DNA, 13 bp, Artificial Sequence
  Oligonucleotide for detection of SNP TSC0015051
aaatcttaatata

SEQ ID NO: 54971 - DNA, 13 bp, Artificial Sequence
  Oligonucleotide for detection of SNP TSC0015052
ttgttttttaatt

SEQ ID NO: 54972 - DNA, 13 bp, Artificial Sequence
  Oligonucleotide for detection of SNP TSC0015052
aattaaaaaacaa

SEQ ID NO: 54973 - DNA, 13 bp, Artificial Sequence
  Oligonucleotide for detection of SNP TSC0015052
ttgtttgttaatt

SEQ ID NO: 54974 - DNA, 13 bp, Artificial Sequence
  Oligonucleotide for detection of SNP TSC0015052
aattaacaaacaa

SEQ ID NO: 54975 - DNA, 13 bp, Artificial Sequence
  Oligonucleotide for detection of SNP TSC0015052
aattaggaaatag

SEQ ID NO: 54976 - DNA, 13 bp, Artificial Sequence
  Oligonucleotide for detection of SNP TSC0015052
ctatttcctaatt

SEQ ID NO: 54977 - DNA, 13 bp, Artificial Sequence
  Oligonucleotide for detection of SNP TSC0015052
aattagtaaatag

SEQ ID NO: 54978 - DNA, 13 bp, Artificial Sequence
  Oligonucleotide for detection of SNP TSC0015052
ctatttactaatt

SEQ ID NO: 54979 - DNA, 13 bp, Artificial Sequence
  Oligonucleotide for detection of SNP TSC0015053
gagagtgttaatt

SEQ ID NO: 54980 - DNA, 13 bp, Artificial Sequence
  Oligonucleotide for detection of SNP TSC0015053
aattaacactctc

SEQ ID NO: 54981 - DNA, 13 bp, Artificial Sequence
  Oligonucleotide for detection of SNP TSC0015053
gagagtattaatt

SEQ ID NO: 54982 - DNA, 13 bp, Artificial Sequence
  Oligonucleotide for detection of SNP TSC0015053
aattaatactctc

SEQ ID NO: 54983 - DNA, 13 bp, Artificial Sequence
  Oligonucleotide for detection of SNP TSC0015056
tttttttgttatg

SEQ ID NO: 54984 - DNA, 13 bp, Artificial Sequence
  Oligonucleotide for detection of SNP TSC0015056
cataacaaaaaaa

SEQ ID NO: 54985 - DNA, 13 bp, Artificial Sequence
  Oligonucleotide for detection of SNP TSC0015056
ttttttcgttatg

SEQ ID NO: 54986 - DNA, 13 bp, Artificial Sequence
  Oligonucleotide for detection of SNP TSC0015056
cataacgaaaaaa

SEQ ID NO: 54987 - DNA, 13 bp, Artificial Sequence
  Oligonucleotide for detection of SNP TSC0015056
tatggtggaagga

SEQ ID NO: 54988 - DNA, 13 bp, Artificial Sequence
  Oligonucleotide for detection of SNP TSC0015056
tccttccaccata

SEQ ID NO: 54989 - DNA, 13 bp, Artificial Sequence
  Oligonucleotide for detection of SNP TSC0015056
tatggtagaagga

SEQ ID NO: 54990 - DNA, 13 bp, Artificial Sequence
  Oligonucleotide for detection of SNP TSC0015056
tccttctaccata

SEQ ID NO: 54991 - DNA, 13 bp, Artificial Sequence
  Oligonucleotide for detection of SNP TSC0015056
tatggcggaagga

SEQ ID NO: 54992 - DNA, 13 bp, Artificial Sequence
  Oligonucleotide for detection of SNP TSC0015056
tccttccgccata

SEQ ID NO: 54993 - DNA, 13 bp, Artificial Sequence
  Oligonucleotide for detection of SNP TSC0015057
atttgtagtgagy

SEQ ID NO: 54994 - DNA, 13 bp, Artificial Sequence
  Oligonucleotide for detection of SNP TSC0015057
rctcactacaaat

SEQ ID NO: 54995 - DNA, 13 bp, Artificial Sequence
  Oligonucleotide for detection of SNP TSC0015057
atttgtggtgagy

SEQ ID NO: 54996 - DNA, 13 bp, Artificial Sequence
  Oligonucleotide for detection of SNP TSC0015057
rctcaccacaaat

SEQ ID NO: 54997 - DNA, 13 bp, Artificial Sequence
  Oligonucleotide for detection of SNP TSC0015057
atttgcggtgagy

SEQ ID NO: 54998 - DNA, 13 bp, Artificial Sequence
  Oligonucleotide for detection of SNP TSC0015057
rctcaccgcaaat

SEQ ID NO: 54999 - DNA, 13 bp, Artificial Sequence
  Oligonucleotide for detection of SNP TSC0015057
gtttattgtaaat

SEQ ID NO: 55000 - DNA, 13 bp, Artificial Sequence
  Oligonucleotide for detection of SNP TSC0015057
atttacaataaac

SEQ ID NO: 55001 - DNA, 13 bp, Artificial Sequence
  Oligonucleotide for detection of SNP TSC0015057
gtttatcgtaaat

SEQ ID NO: 55002 - DNA, 13 bp, Artificial Sequence
  Oligonucleotide for detection of SNP TSC0015057
atttacgataaac

SEQ ID NO: 55003 - DNA, 13 bp, Artificial Sequence
  Oligonucleotide for detection of SNP TSC0015058
taaataattattg

SEQ ID NO: 55004 - DNA, 13 bp, Artificial Sequence
  Oligonucleotide for detection of SNP TSC0015058
caataattattta

SEQ ID NO: 55005 - DNA, 13 bp, Artificial Sequence
  Oligonucleotide for detection of SNP TSC0015058
taaatatttattg

SEQ ID NO: 55006 - DNA, 13 bp, Artificial Sequence
  Oligonucleotide for detection of SNP TSC0015058
caataaatattta

SEQ ID NO: 55007 - DNA, 13 bp, Artificial Sequence
  Oligonucleotide for detection of SNP TSC0015058
taataattatttg

SEQ ID NO: 55008 - DNA, 13 bp, Artificial Sequence
  Oligonucleotide for detection of SNP TSC0015058
caaataattatta

SEQ ID NO: 55009 - DNA, 13 bp, Artificial Sequence
  Oligonucleotide for detection of SNP TSC0015058
taataagtatttg

SEQ ID NO: 55010 - DNA, 13 bp, Artificial Sequence
  Oligonucleotide for detection of SNP TSC0015058
caaatacttatta

SEQ ID NO: 55011 - DNA, 13 bp, Artificial Sequence
  Oligonucleotide for detection of SNP TSC0015059
gtttttatgtgtg

SEQ ID NO: 55012 - DNA, 13 bp, Artificial Sequence
  Oligonucleotide for detection of SNP TSC0015059
cacacataaaaac

SEQ ID NO: 55013 - DNA, 13 bp, Artificial Sequence
  Oligonucleotide for detection of SNP TSC0015059
gtttttgtgtgtg

SEQ ID NO: 55014 - DNA, 13 bp, Artificial Sequence
  Oligonucleotide for detection of SNP TSC0015059
cacacacaaaaac

SEQ ID NO: 55015 - DNA, 13 bp, Artificial Sequence
  Oligonucleotide for detection of SNP TSC0015059
gtttttatgtgcg

SEQ ID NO: 55016 - DNA, 13 bp, Artificial Sequence
  Oligonucleotide for detection of SNP TSC0015059
cgcacataaaaac

SEQ ID NO: 55017 - DNA, 13 bp, Artificial Sequence
  Oligonucleotide for detection of SNP TSC0015059
gttttcgtgtgtg

SEQ ID NO: 55018 - DNA, 13 bp, Artificial Sequence
  Oligonucleotide for detection of SNP TSC0015059
cacacacgaaaac

SEQ ID NO: 55019 - DNA, 13 bp, Artificial Sequence
  Oligonucleotide for detection of SNP TSC0015059
gtttttgtgtgcg

SEQ ID NO: 55020 - DNA, 13 bp, Artificial Sequence
  Oligonucleotide for detection of SNP TSC0015059
cgcacacaaaaac

SEQ ID NO: 55021 - DNA, 13 bp, Artificial Sequence
  Oligonucleotide for detection of SNP TSC0015059
gttttcgtgtgcg

SEQ ID NO: 55022 - DNA, 13 bp, Artificial Sequence
  Oligonucleotide for detection of SNP TSC0015059
cgcacacgaaaac

SEQ ID NO: 55023 - DNA, 13 bp, Artificial Sequence
  Oligonucleotide for detection of SNP TSC0015059
tgtatatgggaay

SEQ ID NO: 55024 - DNA, 13 bp, Artificial Sequence
  Oligonucleotide for detection of SNP TSC0015059
rttcccatataca

SEQ ID NO: 55025 - DNA, 13 bp, Artificial Sequence
  Oligonucleotide for detection of SNP TSC0015059
cgtatatgggaay

SEQ ID NO: 55026 - DNA, 13 bp, Artificial Sequence
  Oligonucleotide for detection of SNP TSC0015059
rttcccatatacg

SEQ ID NO: 55027 - DNA, 13 bp, Artificial Sequence
  Oligonucleotide for detection of SNP TSC0015059
tgtatacgggaay

SEQ ID NO: 55028 - DNA, 13 bp, Artificial Sequence
  Oligonucleotide for detection of SNP TSC0015059
rttcccgtataca

SEQ ID NO: 55029 - DNA, 13 bp, Artificial Sequence
  Oligonucleotide for detection of SNP TSC0015059
cgtatacgggaay

SEQ ID NO: 55030 - DNA, 13 bp, Artificial Sequence
  Oligonucleotide for detection of SNP TSC0015059
rttcccgtatacg

SEQ ID NO: 55031 - DNA, 13 bp, Artificial Sequence
  Oligonucleotide for detection of SNP TSC0015060
atatttaagaaag

SEQ ID NO: 55032 - DNA, 13 bp, Artificial Sequence
  Oligonucleotide for detection of SNP TSC0015060
ctttcttaaatat

SEQ ID NO: 55033 - DNA, 13 bp, Artificial Sequence
  Oligonucleotide for detection of SNP TSC0015060
atattttagaaag

SEQ ID NO: 55034 - DNA, 13 bp, Artificial Sequence
  Oligonucleotide for detection of SNP TSC0015060
ctttctaaaatat

SEQ ID NO: 55035 - DNA, 13 bp, Artificial Sequence
  Oligonucleotide for detection of SNP TSC0015060
tttttttaaatgt

SEQ ID NO: 55036 - DNA, 13 bp, Artificial Sequence
  Oligonucleotide for detection of SNP TSC0015060
acatttaaaaaaa

SEQ ID NO: 55037 - DNA, 13 bp, Artificial Sequence
  Oligonucleotide for detection of SNP TSC0015061
tggagggttagat

SEQ ID NO: 55038 - DNA, 13 bp, Artificial Sequence
  Oligonucleotide for detection of SNP TSC0015061
atctaaccctcca

SEQ ID NO: 55039 - DNA, 13 bp, Artificial Sequence
  Oligonucleotide for detection of SNP TSC0015061
tggaggattagat

SEQ ID NO: 55040 - DNA, 13 bp, Artificial Sequence
  Oligonucleotide for detection of SNP TSC0015061
atctaatcctcca

SEQ ID NO: 55041 - DNA, 13 bp, Artificial Sequence
  Oligonucleotide for detection of SNP TSC0015062
tgtggagggttag

SEQ ID NO: 55042 - DNA, 13 bp, Artificial Sequence
  Oligonucleotide for detection of SNP TSC0015062
ctaaccctccaca

SEQ ID NO: 55043 - DNA, 13 bp, Artificial Sequence
  Oligonucleotide for detection of SNP TSC0015062
tgtggaaggttag

SEQ ID NO: 55044 - DNA, 13 bp, Artificial Sequence
  Oligonucleotide for detection of SNP TSC0015062
ctaaccttccaca

SEQ ID NO: 55045 - DNA, 13 bp, Artificial Sequence
  Oligonucleotide for detection of SNP TSC0015064
gttagggtttata

SEQ ID NO: 55046 - DNA, 13 bp, Artificial Sequence
  Oligonucleotide for detection of SNP TSC0015064
tataaaccctaac

SEQ ID NO: 55047 - DNA, 13 bp, Artificial Sequence
  Oligonucleotide for detection of SNP TSC0015064
gttaggttttata

SEQ ID NO: 55048 - DNA, 13 bp, Artificial Sequence
  Oligonucleotide for detection of SNP TSC0015064
tataaaacctaac

SEQ ID NO: 55049 - DNA, 13 bp, Artificial Sequence
  Oligonucleotide for detection of SNP TSC0015064
tgtaaattttgay

SEQ ID NO: 55050 - DNA, 13 bp, Artificial Sequence
  Oligonucleotide for detection of SNP TSC0015064
rtcaaaatttaca

SEQ ID NO: 55051 - DNA, 13 bp, Artificial Sequence
  Oligonucleotide for detection of SNP TSC0015064
tgtaaaatttgay

SEQ ID NO: 55052 - DNA, 13 bp, Artificial Sequence
  Oligonucleotide for detection of SNP TSC0015064
rtcaaattttaca

SEQ ID NO: 55053 - DNA, 13 bp, Artificial Sequence
  Oligonucleotide for detection of SNP TSC0015065
atggaagagtatt

SEQ ID NO: 55054 - DNA, 13 bp, Artificial Sequence
  Oligonucleotide for detection of SNP TSC0015065
aatactcttccat

SEQ ID NO: 55055 - DNA, 13 bp, Artificial Sequence
  Oligonucleotide for detection of SNP TSC0015065
atggaaaagtatt

SEQ ID NO: 55056 - DNA, 13 bp, Artificial Sequence
  Oligonucleotide for detection of SNP TSC0015065
aatacttttccat

SEQ ID NO: 55057 - DNA, 13 bp, Artificial Sequence
  Oligonucleotide for detection of SNP TSC0015066
aagtagggattag

SEQ ID NO: 55058 - DNA, 13 bp, Artificial Sequence
  Oligonucleotide for detection of SNP TSC0015066
ctaatccctactt

SEQ ID NO: 55059 - DNA, 13 bp, Artificial Sequence
  Oligonucleotide for detection of SNP TSC0015066
aagtagagattag

SEQ ID NO: 55060 - DNA, 13 bp, Artificial Sequence
  Oligonucleotide for detection of SNP TSC0015066
ctaatctctactt

SEQ ID NO: 55061 - DNA, 13 bp, Artificial Sequence
  Oligonucleotide for detection of SNP TSC0015068
tttagaaagttgy

SEQ ID NO: 55062 - DNA, 13 bp, Artificial Sequence
  Oligonucleotide for detection of SNP TSC0015068
rcaactttctaaa

SEQ ID NO: 55063 - DNA, 13 bp, Artificial Sequence
  Oligonucleotide for detection of SNP TSC0015068
tttagatagttgy

SEQ ID NO: 55064 - DNA, 13 bp, Artificial Sequence
  Oligonucleotide for detection of SNP TSC0015068
rcaactatctaaa

SEQ ID NO: 55065 - DNA, 13 bp, Artificial Sequence
  Oligonucleotide for detection of SNP TSC0015068
gtagttttttgag

SEQ ID NO: 55066 - DNA, 13 bp, Artificial Sequence
  Oligonucleotide for detection of SNP TSC0015068
ctcaaaaaactac

SEQ ID NO: 55067 - DNA, 13 bp, Artificial Sequence
  Oligonucleotide for detection of SNP TSC0015068
gtagttatttgag

SEQ ID NO: 55068 - DNA, 13 bp, Artificial Sequence
  Oligonucleotide for detection of SNP TSC0015068
ctcaaataactac

SEQ ID NO: 55069 - DNA, 13 bp, Artificial Sequence
  Oligonucleotide for detection of SNP TSC0015069
gaaggttggaggg

SEQ ID NO: 55070 - DNA, 13 bp, Artificial Sequence
  Oligonucleotide for detection of SNP TSC0015069
ccctccaaccttc

SEQ ID NO: 55071 - DNA, 13 bp, Artificial Sequence
  Oligonucleotide for detection of SNP TSC0015069
gaaggtaggaggg

SEQ ID NO: 55072 - DNA, 13 bp, Artificial Sequence
  Oligonucleotide for detection of SNP TSC0015069
ccctcctaccttc

SEQ ID NO: 55073 - DNA, 13 bp, Artificial Sequence
  Oligonucleotide for detection of SNP TSC0015069
gaaggtcggaggg

SEQ ID NO: 55074 - DNA, 13 bp, Artificial Sequence
  Oligonucleotide for detection of SNP TSC0015069
ccctccgaccttc

SEQ ID NO: 55075 - DNA, 13 bp, Artificial Sequence
  Oligonucleotide for detection of SNP TSC0015070
agaaaggaaggty

SEQ ID NO: 55076 - DNA, 13 bp, Artificial Sequence
  Oligonucleotide for detection of SNP TSC0015070
raccttcctttct

SEQ ID NO: 55077 - DNA, 13 bp, Artificial Sequence
  Oligonucleotide for detection of SNP TSC0015070
agaaagaaaggty

SEQ ID NO: 55078 - DNA, 13 bp, Artificial Sequence
  Oligonucleotide for detection of SNP TSC0015070
racctttctttct

SEQ ID NO: 55079 - DNA, 13 bp, Artificial Sequence
  Oligonucleotide for detection of SNP TSC0015071
ttattaaatgaty

SEQ ID NO: 55080 - DNA, 13 bp, Artificial Sequence
  Oligonucleotide for detection of SNP TSC0015071
ratcatttaataa

SEQ ID NO: 55081 - DNA, 13 bp, Artificial Sequence
  Oligonucleotide for detection of SNP TSC0015071
ttattagatgaty

SEQ ID NO: 55082 - DNA, 13 bp, Artificial Sequence
  Oligonucleotide for detection of SNP TSC0015071
ratcatctaataa

SEQ ID NO: 55083 - DNA, 13 bp, Artificial Sequence
  Oligonucleotide for detection of SNP TSC0015073
gaagagggtgtta

SEQ ID NO: 55084 - DNA, 13 bp, Artificial Sequence
  Oligonucleotide for detection of SNP TSC0015073
taacaccctcttc

SEQ ID NO: 55085 - DNA, 13 bp, Artificial Sequence
  Oligonucleotide for detection of SNP TSC0015073
gaagagagtgtta

SEQ ID NO: 55086 - DNA, 13 bp, Artificial Sequence
  Oligonucleotide for detection of SNP TSC0015073
taacactctcttc

SEQ ID NO: 55087 - DNA, 13 bp, Artificial Sequence
  Oligonucleotide for detection of SNP TSC0015074
aaatagaattttt

SEQ ID NO: 55088 - DNA, 13 bp, Artificial Sequence
  Oligonucleotide for detection of SNP TSC0015074
aaaaattctattt

SEQ ID NO: 55089 - DNA, 13 bp, Artificial Sequence
  Oligonucleotide for detection of SNP TSC0015074
aaataggattttt

SEQ ID NO: 55090 - DNA, 13 bp, Artificial Sequence
  Oligonucleotide for detection of SNP TSC0015074
aaaaatcctattt

SEQ ID NO: 55091 - DNA, 13 bp, Artificial Sequence
  Oligonucleotide for detection of SNP TSC0015078
tgtatatggtaga

SEQ ID NO: 55092 - DNA, 13 bp, Artificial Sequence
  Oligonucleotide for detection of SNP TSC0015078
tctaccatataca

SEQ ID NO: 55093 - DNA, 13 bp, Artificial Sequence
  Oligonucleotide for detection of SNP TSC0015078
tgtatacggtaga

SEQ ID NO: 55094 - DNA, 13 bp, Artificial Sequence
  Oligonucleotide for detection of SNP TSC0015078
tctaccgtataca

SEQ ID NO: 55095 - DNA, 13 bp, Artificial Sequence
  Oligonucleotide for detection of SNP TSC0015078
tttattgtatata

SEQ ID NO: 55096 - DNA, 13 bp, Artificial Sequence
  Oligonucleotide for detection of SNP TSC0015078
tatatacaataaa

SEQ ID NO: 55097 - DNA, 13 bp, Artificial Sequence
  Oligonucleotide for detection of SNP TSC0015078
tttattatatata

SEQ ID NO: 55098 - DNA, 13 bp, Artificial Sequence
  Oligonucleotide for detection of SNP TSC0015078
tatatataataaa

SEQ ID NO: 55099 - DNA, 13 bp, Artificial Sequence
  Oligonucleotide for detection of SNP TSC0015078
tttatcgtatata

SEQ ID NO: 55100 - DNA, 13 bp, Artificial Sequence
  Oligonucleotide for detection of SNP TSC0015078
tatatacgataaa

SEQ ID NO: 55101 - DNA, 13 bp, Artificial Sequence
  Oligonucleotide for detection of SNP TSC0015079
ggttaggaaaagt

SEQ ID NO: 55102 - DNA, 13 bp, Artificial Sequence
  Oligonucleotide for detection of SNP TSC0015079
acttttcctaacc

SEQ ID NO: 55103 - DNA, 13 bp, Artificial Sequence
  Oligonucleotide for detection of SNP TSC0015079
ggttagaaaaagt

SEQ ID NO: 55104 - DNA, 13 bp, Artificial Sequence
  Oligonucleotide for detection of SNP TSC0015079
actttttctaacc

SEQ ID NO: 55105 - DNA, 13 bp, Artificial Sequence
  Oligonucleotide for detection of SNP TSC0015080
tattttaaatttg

SEQ ID NO: 55106 - DNA, 13 bp, Artificial Sequence
  Oligonucleotide for detection of SNP TSC0015080
caaatttaaaata

SEQ ID NO: 55107 - DNA, 13 bp, Artificial Sequence
  Oligonucleotide for detection of SNP TSC0015080
tattttgaatttg

SEQ ID NO: 55108 - DNA, 13 bp, Artificial Sequence
  Oligonucleotide for detection of SNP TSC0015080
caaattcaaaata

SEQ ID NO: 55109 - DNA, 13 bp, Artificial Sequence
  Oligonucleotide for detection of SNP TSC0015080
tatttcgaatttg

SEQ ID NO: 55110 - DNA, 13 bp, Artificial Sequence
  Oligonucleotide for detection of SNP TSC0015080
caaattcgaaata

SEQ ID NO: 55111 - DNA, 13 bp, Artificial Sequence
  Oligonucleotide for detection of SNP TSC0015080
taggtttgaagta

SEQ ID NO: 55112 - DNA, 13 bp, Artificial Sequence
  Oligonucleotide for detection of SNP TSC0015080
tacttcaaaccta

SEQ ID NO: 55113 - DNA, 13 bp, Artificial Sequence
  Oligonucleotide for detection of SNP TSC0015080
taggttcgaagta

SEQ ID NO: 55114 - DNA, 13 bp, Artificial Sequence
  Oligonucleotide for detection of SNP TSC0015080
tacttcgaaccta

SEQ ID NO: 55115 - DNA, 13 bp, Artificial Sequence
  Oligonucleotide for detection of SNP TSC0015081
aggttatattata

SEQ ID NO: 55116 - DNA, 13 bp, Artificial Sequence
  Oligonucleotide for detection of SNP TSC0015081
tataatataacct

SEQ ID NO: 55117 - DNA, 13 bp, Artificial Sequence
  Oligonucleotide for detection of SNP TSC0015081
aggttagattata

SEQ ID NO: 55118 - DNA, 13 bp, Artificial Sequence
  Oligonucleotide for detection of SNP TSC0015081
tataatctaacct

SEQ ID NO: 55119 - DNA, 13 bp, Artificial Sequence
  Oligonucleotide for detection of SNP TSC0015081
tgtagtttagttt

SEQ ID NO: 55120 - DNA, 13 bp, Artificial Sequence
  Oligonucleotide for detection of SNP TSC0015081
aaactaaactaca

SEQ ID NO: 55121 - DNA, 13 bp, Artificial Sequence
  Oligonucleotide for detection of SNP TSC0015082
ttttttgggataa

SEQ ID NO: 55122 - DNA, 13 bp, Artificial Sequence
  Oligonucleotide for detection of SNP TSC0015082
ttatcccaaaaaa

SEQ ID NO: 55123 - DNA, 13 bp, Artificial Sequence
  Oligonucleotide for detection of SNP TSC0015082
ttttttaggataa

SEQ ID NO: 55124 - DNA, 13 bp, Artificial Sequence
  Oligonucleotide for detection of SNP TSC0015082
ttatcctaaaaaa

SEQ ID NO: 55125 - DNA, 13 bp, Artificial Sequence
  Oligonucleotide for detection of SNP TSC0015082
tttttcgggataa

SEQ ID NO: 55126 - DNA, 13 bp, Artificial Sequence
  Oligonucleotide for detection of SNP TSC0015082
ttatcccgaaaaa

SEQ ID NO: 55127 - DNA, 13 bp, Artificial Sequence
  Oligonucleotide for detection of SNP TSC0015083
taaagaattgagg

SEQ ID NO: 55128 - DNA, 13 bp, Artificial Sequence
  Oligonucleotide for detection of SNP TSC0015083
cctcaattcttta

SEQ ID NO: 55129 - DNA, 13 bp, Artificial Sequence
  Oligonucleotide for detection of SNP TSC0015083
taaagatttgagg

SEQ ID NO: 55130 - DNA, 13 bp, Artificial Sequence
  Oligonucleotide for detection of SNP TSC0015083
cctcaaatcttta

SEQ ID NO: 55131 - DNA, 13 bp, Artificial Sequence
  Oligonucleotide for detection of SNP TSC0015084
taaattagttaga

SEQ ID NO: 55132 - DNA, 13 bp, Artificial Sequence
  Oligonucleotide for detection of SNP TSC0015084
tctaactaattta

SEQ ID NO: 55133 - DNA, 13 bp, Artificial Sequence
  Oligonucleotide for detection of SNP TSC0015084
taaattggttaga

SEQ ID NO: 55134 - DNA, 13 bp, Artificial Sequence
  Oligonucleotide for detection of SNP TSC0015084
tctaaccaattta

SEQ ID NO: 55135 - DNA, 13 bp, Artificial Sequence
  Oligonucleotide for detection of SNP TSC0015084
taaatcggttaga

SEQ ID NO: 55136 - DNA, 13 bp, Artificial Sequence
  Oligonucleotide for detection of SNP TSC0015084
tctaaccgattta

SEQ ID NO: 55137 - DNA, 13 bp, Artificial Sequence
  Oligonucleotide for detection of SNP TSC0015084
tttggttgattta

SEQ ID NO: 55138 - DNA, 13 bp, Artificial Sequence
  Oligonucleotide for detection of SNP TSC0015084
taaatcaaccaaa

SEQ ID NO: 55139 - DNA, 13 bp, Artificial Sequence
  Oligonucleotide for detection of SNP TSC0015084
tttggtcgattta

SEQ ID NO: 55140 - DNA, 13 bp, Artificial Sequence
  Oligonucleotide for detection of SNP TSC0015084
taaatcgaccaaa

SEQ ID NO: 55141 - DNA, 13 bp, Artificial Sequence
  Oligonucleotide for detection of SNP TSC0015087
ttattgtgtaaay

SEQ ID NO: 55142 - DNA, 13 bp, Artificial Sequence
  Oligonucleotide for detection of SNP TSC0015087
rtttacacaataa

SEQ ID NO: 55143 - DNA, 13 bp, Artificial Sequence
  Oligonucleotide for detection of SNP TSC0015087
ttattgcgtaaay

SEQ ID NO: 55144 - DNA, 13 bp, Artificial Sequence
  Oligonucleotide for detection of SNP TSC0015087
rtttacgcaataa

SEQ ID NO: 55145 - DNA, 13 bp, Artificial Sequence
  Oligonucleotide for detection of SNP TSC0015087
gtttgtgtagtgg

SEQ ID NO: 55146 - DNA, 13 bp, Artificial Sequence
  Oligonucleotide for detection of SNP TSC0015087
ccactacacaaac

SEQ ID NO: 55147 - DNA, 13 bp, Artificial Sequence
  Oligonucleotide for detection of SNP TSC0015087
gtttgtatagtgg

SEQ ID NO: 55148 - DNA, 13 bp, Artificial Sequence
  Oligonucleotide for detection of SNP TSC0015087
ccactatacaaac

SEQ ID NO: 55149 - DNA, 13 bp, Artificial Sequence
  Oligonucleotide for detection of SNP TSC0015087
gtttgcgtagtgg

SEQ ID NO: 55150 - DNA, 13 bp, Artificial Sequence
  Oligonucleotide for detection of SNP TSC0015087
ccactacgcaaac

SEQ ID NO: 55151 - DNA, 13 bp, Artificial Sequence
  Oligonucleotide for detection of SNP TSC0015088
tattttaggatgy

SEQ ID NO: 55152 - DNA, 13 bp, Artificial Sequence
  Oligonucleotide for detection of SNP TSC0015088
rcatcctaaaata

SEQ ID NO: 55153 - DNA, 13 bp, Artificial Sequence
  Oligonucleotide for detection of SNP TSC0015088
tattttgggatgy

SEQ ID NO: 55154 - DNA, 13 bp, Artificial Sequence
  Oligonucleotide for detection of SNP TSC0015088
rcatcccaaaata

SEQ ID NO: 55155 - DNA, 13 bp, Artificial Sequence
  Oligonucleotide for detection of SNP TSC0015088
tatttcgggatgy

SEQ ID NO: 55156 - DNA, 13 bp, Artificial Sequence
  Oligonucleotide for detection of SNP TSC0015088
rcatcccgaaata

SEQ ID NO: 55157 - DNA, 13 bp, Artificial Sequence
  Oligonucleotide for detection of SNP TSC0015088
gtattttggggtg

SEQ ID NO: 55158 - DNA, 13 bp, Artificial Sequence
  Oligonucleotide for detection of SNP TSC0015088
caccccaaaatac

SEQ ID NO: 55159 - DNA, 13 bp, Artificial Sequence
  Oligonucleotide for detection of SNP TSC0015088
gtatttcggggtg

SEQ ID NO: 55160 - DNA, 13 bp, Artificial Sequence
  Oligonucleotide for detection of SNP TSC0015088
caccccgaaatac

SEQ ID NO: 55161 - DNA, 13 bp, Artificial Sequence
  Oligonucleotide for detection of SNP TSC0015089
aggtaatggagty

SEQ ID NO: 55162 - DNA, 13 bp, Artificial Sequence
  Oligonucleotide for detection of SNP TSC0015089
ractccattacct

SEQ ID NO: 55163 - DNA, 13 bp, Artificial Sequence
  Oligonucleotide for detection of SNP TSC0015089
aggtaacggagty

SEQ ID NO: 55164 - DNA, 13 bp, Artificial Sequence
  Oligonucleotide for detection of SNP TSC0015089
ractccgttacct

SEQ ID NO: 55165 - DNA, 13 bp, Artificial Sequence
  Oligonucleotide for detection of SNP TSC0015089
gattttgttattt

SEQ ID NO: 55166 - DNA, 13 bp, Artificial Sequence
  Oligonucleotide for detection of SNP TSC0015089
aaataacaaaatc

SEQ ID NO: 55167 - DNA, 13 bp, Artificial Sequence
  Oligonucleotide for detection of SNP TSC0015089
gattttattattt

SEQ ID NO: 55168 - DNA, 13 bp, Artificial Sequence
  Oligonucleotide for detection of SNP TSC0015089
aaataataaaatc

SEQ ID NO: 55169 - DNA, 13 bp, Artificial Sequence
  Oligonucleotide for detection of SNP TSC0015089
gatttcgttattt

SEQ ID NO: 55170 - DNA, 13 bp, Artificial Sequence
  Oligonucleotide for detection of SNP TSC0015089
aaataacgaaatc

SEQ ID NO: 55171 - DNA, 13 bp, Artificial Sequence
  Oligonucleotide for detection of SNP TSC0015090
tataaagtggaat

SEQ ID NO: 55172 - DNA, 13 bp, Artificial Sequence
  Oligonucleotide for detection of SNP TSC0015090
attccactttata

SEQ ID NO: 55173 - DNA, 13 bp, Artificial Sequence
  Oligonucleotide for detection of SNP TSC0015090
tataaaatggaat

SEQ ID NO: 55174 - DNA, 13 bp, Artificial Sequence
  Oligonucleotide for detection of SNP TSC0015090
attccattttata

SEQ ID NO: 55175 - DNA, 13 bp, Artificial Sequence
  Oligonucleotide for detection of SNP TSC0015092
tttgggattgtta

SEQ ID NO: 55176 - DNA, 13 bp, Artificial Sequence
  Oligonucleotide for detection of SNP TSC0015092
taacaatcccaaa

SEQ ID NO: 55177 - DNA, 13 bp, Artificial Sequence
  Oligonucleotide for detection of SNP TSC0015092
tttgggtttgtta

SEQ ID NO: 55178 - DNA, 13 bp, Artificial Sequence
  Oligonucleotide for detection of SNP TSC0015092
taacaaacccaaa

SEQ ID NO: 55179 - DNA, 13 bp, Artificial Sequence
  Oligonucleotide for detection of SNP TSC0015092
tttgggatcgtta

SEQ ID NO: 55180 - DNA, 13 bp, Artificial Sequence
  Oligonucleotide for detection of SNP TSC0015092
taacgatcccaaa

SEQ ID NO: 55181 - DNA, 13 bp, Artificial Sequence
  Oligonucleotide for detection of SNP TSC0015092
tttgggttcgtta

SEQ ID NO: 55182 - DNA, 13 bp, Artificial Sequence
  Oligonucleotide for detection of SNP TSC0015092
taacgaacccaaa

SEQ ID NO: 55183 - DNA, 13 bp, Artificial Sequence
  Oligonucleotide for detection of SNP TSC0015092
tgatggttttagg

SEQ ID NO: 55184 - DNA, 13 bp, Artificial Sequence
  Oligonucleotide for detection of SNP TSC0015092
cctaaaaccatca

SEQ ID NO: 55185 - DNA, 13 bp, Artificial Sequence
  Oligonucleotide for detection of SNP TSC0015092
tgatgggtttagg

SEQ ID NO: 55186 - DNA, 13 bp, Artificial Sequence
  Oligonucleotide for detection of SNP TSC0015092
cctaaacccatca

SEQ ID NO: 55187 - DNA, 13 bp, Artificial Sequence
  Oligonucleotide for detection of SNP TSC0015092
tgacggttttagg

SEQ ID NO: 55188 - DNA, 13 bp, Artificial Sequence
  Oligonucleotide for detection of SNP TSC0015092
cctaaaaccgtca

SEQ ID NO: 55189 - DNA, 13 bp, Artificial Sequence
  Oligonucleotide for detection of SNP TSC0015092
tgacgggtttagg

SEQ ID NO: 55190 - DNA, 13 bp, Artificial Sequence
  Oligonucleotide for detection of SNP TSC0015092
cctaaacccgtca

SEQ ID NO: 55191 - DNA, 13 bp, Artificial Sequence
  Oligonucleotide for detection of SNP TSC0015093
taaaaaaaattgt

SEQ ID NO: 55192 - DNA, 13 bp, Artificial Sequence
  Oligonucleotide for detection of SNP TSC0015093
acaatttttttta

SEQ ID NO: 55193 - DNA, 13 bp, Artificial Sequence
  Oligonucleotide for detection of SNP TSC0015093
taaaaagaattgt

SEQ ID NO: 55194 - DNA, 13 bp, Artificial Sequence
  Oligonucleotide for detection of SNP TSC0015093
acaattcttttta

SEQ ID NO: 55195 - DNA, 13 bp, Artificial Sequence
  Oligonucleotide for detection of SNP TSC0015094
ggaggtgggaggt

SEQ ID NO: 55196 - DNA, 13 bp, Artificial Sequence
  Oligonucleotide for detection of SNP TSC0015094
acctcccacctcc

SEQ ID NO: 55197 - DNA, 13 bp, Artificial Sequence
  Oligonucleotide for detection of SNP TSC0015094
ggaggtaggaggt

SEQ ID NO: 55198 - DNA, 13 bp, Artificial Sequence
  Oligonucleotide for detection of SNP TSC0015094
acctcctacctcc

SEQ ID NO: 55199 - DNA, 13 bp, Artificial Sequence
  Oligonucleotide for detection of SNP TSC0015094
ggaggcgggaggt

SEQ ID NO: 55200 - DNA, 13 bp, Artificial Sequence
  Oligonucleotide for detection of SNP TSC0015094
acctcccgcctcc

SEQ ID NO: 55201 - DNA, 13 bp, Artificial Sequence
  Oligonucleotide for detection of SNP TSC0015095
ggataagttattt

SEQ ID NO: 55202 - DNA, 13 bp, Artificial Sequence
  Oligonucleotide for detection of SNP TSC0015095
aaataacttatcc

SEQ ID NO: 55203 - DNA, 13 bp, Artificial Sequence
  Oligonucleotide for detection of SNP TSC0015095
ggataaattattt

SEQ ID NO: 55204 - DNA, 13 bp, Artificial Sequence
  Oligonucleotide for detection of SNP TSC0015095
aaataatttatcc

SEQ ID NO: 55205 - DNA, 13 bp, Artificial Sequence
  Oligonucleotide for detection of SNP TSC0015096
gaatgtgtttaag

SEQ ID NO: 55206 - DNA, 13 bp, Artificial Sequence
  Oligonucleotide for detection of SNP TSC0015096
cttaaacacattc

SEQ ID NO: 55207 - DNA, 13 bp, Artificial Sequence
  Oligonucleotide for detection of SNP TSC0015096
gaatgtttttaag

SEQ ID NO: 55208 - DNA, 13 bp, Artificial Sequence
  Oligonucleotide for detection of SNP TSC0015096
cttaaaaacattc

SEQ ID NO: 55209 - DNA, 13 bp, Artificial Sequence
  Oligonucleotide for detection of SNP TSC0015096
gaatgcgtttaag

SEQ ID NO: 55210 - DNA, 13 bp, Artificial Sequence
  Oligonucleotide for detection of SNP TSC0015096
cttaaacgcattc

SEQ ID NO: 55211 - DNA, 13 bp, Artificial Sequence
  Oligonucleotide for detection of SNP TSC0015096
tttgagtgtatty

SEQ ID NO: 55212 - DNA, 13 bp, Artificial Sequence
  Oligonucleotide for detection of SNP TSC0015096
raatacactcaaa

SEQ ID NO: 55213 - DNA, 13 bp, Artificial Sequence
  Oligonucleotide for detection of SNP TSC0015096
tttgagagtatty

SEQ ID NO: 55214 - DNA, 13 bp, Artificial Sequence
  Oligonucleotide for detection of SNP TSC0015096
raatactctcaaa

SEQ ID NO: 55215 - DNA, 13 bp, Artificial Sequence
  Oligonucleotide for detection of SNP TSC0015096
tttgagcgtatty

SEQ ID NO: 55216 - DNA, 13 bp, Artificial Sequence
  Oligonucleotide for detection of SNP TSC0015096
raatacgctcaaa

SEQ ID NO: 55217 - DNA, 13 bp, Artificial Sequence
  Oligonucleotide for detection of SNP TSC0015097
ttttatggttgta

SEQ ID NO: 55218 - DNA, 13 bp, Artificial Sequence
  Oligonucleotide for detection of SNP TSC0015097
tacaaccataaaa

SEQ ID NO: 55219 - DNA, 13 bp, Artificial Sequence
  Oligonucleotide for detection of SNP TSC0015097
ttttacggttgta

SEQ ID NO: 55220 - DNA, 13 bp, Artificial Sequence
  Oligonucleotide for detection of SNP TSC0015097
tacaaccgtaaaa

SEQ ID NO: 55221 - DNA, 13 bp, Artificial Sequence
  Oligonucleotide for detection of SNP TSC0015097
tatagttgtgaaa

SEQ ID NO: 55222 - DNA, 13 bp, Artificial Sequence
  Oligonucleotide for detection of SNP TSC0015097
tttcacaactata

SEQ ID NO: 55223 - DNA, 13 bp, Artificial Sequence
  Oligonucleotide for detection of SNP TSC0015097
tatagtagtgaaa

SEQ ID NO: 55224 - DNA, 13 bp, Artificial Sequence
  Oligonucleotide for detection of SNP TSC0015097
tttcactactata

SEQ ID NO: 55225 - DNA, 13 bp, Artificial Sequence
  Oligonucleotide for detection of SNP TSC0015097
tatagtcgtgaaa

SEQ ID NO: 55226 - DNA, 13 bp, Artificial Sequence
  Oligonucleotide for detection of SNP TSC0015097
tttcacgactata

SEQ ID NO: 55227 - DNA, 13 bp, Artificial Sequence
  Oligonucleotide for detection of SNP TSC0015098
tttatatgaagty

SEQ ID NO: 55228 - DNA, 13 bp, Artificial Sequence
  Oligonucleotide for detection of SNP TSC0015098
racttcatataaa

SEQ ID NO: 55229 - DNA, 13 bp, Artificial Sequence
  Oligonucleotide for detection of SNP TSC0015098
tttatacgaagty

SEQ ID NO: 55230 - DNA, 13 bp, Artificial Sequence
  Oligonucleotide for detection of SNP TSC0015098
racttcgtataaa

SEQ ID NO: 55231 - DNA, 13 bp, Artificial Sequence
  Oligonucleotide for detection of SNP TSC0015098
ggttttgtgtaaa

SEQ ID NO: 55232 - DNA, 13 bp, Artificial Sequence
  Oligonucleotide for detection of SNP TSC0015098
tttacacaaaacc

SEQ ID NO: 55233 - DNA, 13 bp, Artificial Sequence
  Oligonucleotide for detection of SNP TSC0015098
ggttttatgtaaa

SEQ ID NO: 55234 - DNA, 13 bp, Artificial Sequence
  Oligonucleotide for detection of SNP TSC0015098
tttacataaaacc

SEQ ID NO: 55235 - DNA, 13 bp, Artificial Sequence
  Oligonucleotide for detection of SNP TSC0015098
ggtttcgtgtaaa

SEQ ID NO: 55236 - DNA, 13 bp, Artificial Sequence
  Oligonucleotide for detection of SNP TSC0015098
tttacacgaaacc

SEQ ID NO: 55237 - DNA, 13 bp, Artificial Sequence
  Oligonucleotide for detection of SNP TSC0015099
atttttatagtty

SEQ ID NO: 55238 - DNA, 13 bp, Artificial Sequence
  Oligonucleotide for detection of SNP TSC0015099
raactataaaaat

SEQ ID NO: 55239 - DNA, 13 bp, Artificial Sequence
  Oligonucleotide for detection of SNP TSC0015099
atttttgtagtty

SEQ ID NO: 55240 - DNA, 13 bp, Artificial Sequence
  Oligonucleotide for detection of SNP TSC0015099
raactacaaaaat

SEQ ID NO: 55241 - DNA, 13 bp, Artificial Sequence
  Oligonucleotide for detection of SNP TSC0015099
attttcgtagtty

SEQ ID NO: 55242 - DNA, 13 bp, Artificial Sequence
  Oligonucleotide for detection of SNP TSC0015099
raactacgaaaat

SEQ ID NO: 55243 - DNA, 13 bp, Artificial Sequence
  Oligonucleotide for detection of SNP TSC0015099
ggattatgggggt

SEQ ID NO: 55244 - DNA, 13 bp, Artificial Sequence
  Oligonucleotide for detection of SNP TSC0015099
acccccataatcc

SEQ ID NO: 55245 - DNA, 13 bp, Artificial Sequence
  Oligonucleotide for detection of SNP TSC0015099
ggattacgggggt

SEQ ID NO: 55246 - DNA, 13 bp, Artificial Sequence
  Oligonucleotide for detection of SNP TSC0015099
acccccgtaatcc

SEQ ID NO: 55247 - DNA, 13 bp, Artificial Sequence
  Oligonucleotide for detection of SNP TSC0015102
gttttggttttta

SEQ ID NO: 55248 - DNA, 13 bp, Artificial Sequence
  Oligonucleotide for detection of SNP TSC0015102
taaaaaccaaaac

SEQ ID NO: 55249 - DNA, 13 bp, Artificial Sequence
  Oligonucleotide for detection of SNP TSC0015102
gttttgattttta

SEQ ID NO: 55250 - DNA, 13 bp, Artificial Sequence
  Oligonucleotide for detection of SNP TSC0015102
taaaaatcaaaac

SEQ ID NO: 55251 - DNA, 13 bp, Artificial Sequence
  Oligonucleotide for detection of SNP TSC0015103
tgttggaatagay

SEQ ID NO: 55252 - DNA, 13 bp, Artificial Sequence
  Oligonucleotide for detection of SNP TSC0015103
rtctattccaaca

SEQ ID NO: 55253 - DNA, 13 bp, Artificial Sequence
  Oligonucleotide for detection of SNP TSC0015103
tgttgggatagay

SEQ ID NO: 55254 - DNA, 13 bp, Artificial Sequence
  Oligonucleotide for detection of SNP TSC0015103
rtctatcccaaca

SEQ ID NO: 55255 - DNA, 13 bp, Artificial Sequence
  Oligonucleotide for detection of SNP TSC0015104
gttggaatagaty

SEQ ID NO: 55256 - DNA, 13 bp, Artificial Sequence
  Oligonucleotide for detection of SNP TSC0015104
ratctattccaac

SEQ ID NO: 55257 - DNA, 13 bp, Artificial Sequence
  Oligonucleotide for detection of SNP TSC0015104
gttggagtagaty

SEQ ID NO: 55258 - DNA, 13 bp, Artificial Sequence
  Oligonucleotide for detection of SNP TSC0015104
ratctactccaac

SEQ ID NO: 55259 - DNA, 13 bp, Artificial Sequence
  Oligonucleotide for detection of SNP TSC0015105
gaagggattggty

SEQ ID NO: 55260 - DNA, 13 bp, Artificial Sequence
  Oligonucleotide for detection of SNP TSC0015105
raccaatcccttc

SEQ ID NO: 55261 - DNA, 13 bp, Artificial Sequence
  Oligonucleotide for detection of SNP TSC0015105
gaaggggttggty

SEQ ID NO: 55262 - DNA, 13 bp, Artificial Sequence
  Oligonucleotide for detection of SNP TSC0015105
raccaaccccttc

SEQ ID NO: 55263 - DNA, 13 bp, Artificial Sequence
  Oligonucleotide for detection of SNP TSC0015106
ttaaatattatta

SEQ ID NO: 55264 - DNA, 13 bp, Artificial Sequence
  Oligonucleotide for detection of SNP TSC0015106
taataatatttaa

SEQ ID NO: 55265 - DNA, 13 bp, Artificial Sequence
  Oligonucleotide for detection of SNP TSC0015106
ttaaatgttatta

SEQ ID NO: 55266 - DNA, 13 bp, Artificial Sequence
  Oligonucleotide for detection of SNP TSC0015106
taataacatttaa

SEQ ID NO: 55267 - DNA, 13 bp, Artificial Sequence
  Oligonucleotide for detection of SNP TSC0015107
atatggattttga

SEQ ID NO: 55268 - DNA, 13 bp, Artificial Sequence
  Oligonucleotide for detection of SNP TSC0015107
tcaaaatccatat

SEQ ID NO: 55269 - DNA, 13 bp, Artificial Sequence
  Oligonucleotide for detection of SNP TSC0015107
atatggtttttga

SEQ ID NO: 55270 - DNA, 13 bp, Artificial Sequence
  Oligonucleotide for detection of SNP TSC0015107
tcaaaaaccatat

SEQ ID NO: 55271 - DNA, 13 bp, Artificial Sequence
  Oligonucleotide for detection of SNP TSC0015107
ttaaaatttatat

SEQ ID NO: 55272 - DNA, 13 bp, Artificial Sequence
  Oligonucleotide for detection of SNP TSC0015107
atataaattttaa

SEQ ID NO: 55273 - DNA, 13 bp, Artificial Sequence
  Oligonucleotide for detection of SNP TSC0015107
ttaaaagttatat

SEQ ID NO: 55274 - DNA, 13 bp, Artificial Sequence
  Oligonucleotide for detection of SNP TSC0015107
atataacttttaa

SEQ ID NO: 55275 - DNA, 13 bp, Artificial Sequence
  Oligonucleotide for detection of SNP TSC0015108
ttagtgtgaatta

SEQ ID NO: 55276 - DNA, 13 bp, Artificial Sequence
  Oligonucleotide for detection of SNP TSC0015108
taattcacactaa

SEQ ID NO: 55277 - DNA, 13 bp, Artificial Sequence
  Oligonucleotide for detection of SNP TSC0015108
ttagtgcgaatta

SEQ ID NO: 55278 - DNA, 13 bp, Artificial Sequence
  Oligonucleotide for detection of SNP TSC0015108
taattcgcactaa

SEQ ID NO: 55279 - DNA, 13 bp, Artificial Sequence
  Oligonucleotide for detection of SNP TSC0015108
tggtttgtattga

SEQ ID NO: 55280 - DNA, 13 bp, Artificial Sequence
  Oligonucleotide for detection of SNP TSC0015108
tcaatacaaacca

SEQ ID NO: 55281 - DNA, 13 bp, Artificial Sequence
  Oligonucleotide for detection of SNP TSC0015108
tggtttatattga

SEQ ID NO: 55282 - DNA, 13 bp, Artificial Sequence
  Oligonucleotide for detection of SNP TSC0015108
tcaatataaacca

SEQ ID NO: 55283 - DNA, 13 bp, Artificial Sequence
  Oligonucleotide for detection of SNP TSC0015108
tggttcgtattga

SEQ ID NO: 55284 - DNA, 13 bp, Artificial Sequence
  Oligonucleotide for detection of SNP TSC0015108
tcaatacgaacca

SEQ ID NO: 55285 - DNA, 13 bp, Artificial Sequence
  Oligonucleotide for detection of SNP TSC0015109
gttaggtgtggga

SEQ ID NO: 55286 - DNA, 13 bp, Artificial Sequence
  Oligonucleotide for detection of SNP TSC0015109
tcccacacctaac

SEQ ID NO: 55287 - DNA, 13 bp, Artificial Sequence
  Oligonucleotide for detection of SNP TSC0015109
gttaggagtggga

SEQ ID NO: 55288 - DNA, 13 bp, Artificial Sequence
  Oligonucleotide for detection of SNP TSC0015109
tcccactcctaac

SEQ ID NO: 55289 - DNA, 13 bp, Artificial Sequence
  Oligonucleotide for detection of SNP TSC0015110
gtaaatatagaga

SEQ ID NO: 55290 - DNA, 13 bp, Artificial Sequence
  Oligonucleotide for detection of SNP TSC0015110
tctctatatttac

SEQ ID NO: 55291 - DNA, 13 bp, Artificial Sequence
  Oligonucleotide for detection of SNP TSC0015110
gtaaatgtagaga

SEQ ID NO: 55292 - DNA, 13 bp, Artificial Sequence
  Oligonucleotide for detection of SNP TSC0015110
tctctacatttac

SEQ ID NO: 55293 - DNA, 13 bp, Artificial Sequence
  Oligonucleotide for detection of SNP TSC0015111
tgattgataatag

SEQ ID NO: 55294 - DNA, 13 bp, Artificial Sequence
  Oligonucleotide for detection of SNP TSC0015111
ctattatcaatca

SEQ ID NO: 55295 - DNA, 13 bp, Artificial Sequence
  Oligonucleotide for detection of SNP TSC0015111
tgattggtaatag

SEQ ID NO: 55296 - DNA, 13 bp, Artificial Sequence
  Oligonucleotide for detection of SNP TSC0015111
ctattaccaatca

SEQ ID NO: 55297 - DNA, 13 bp, Artificial Sequence
  Oligonucleotide for detection of SNP TSC0015112
tatgtgtgattty

SEQ ID NO: 55298 - DNA, 13 bp, Artificial Sequence
  Oligonucleotide for detection of SNP TSC0015112
raaatcacacata

SEQ ID NO: 55299 - DNA, 13 bp, Artificial Sequence
  Oligonucleotide for detection of SNP TSC0015112
tatgtgcgattty

SEQ ID NO: 55300 - DNA, 13 bp, Artificial Sequence
  Oligonucleotide for detection of SNP TSC0015112
raaatcgcacata

SEQ ID NO: 55301 - DNA, 13 bp, Artificial Sequence
  Oligonucleotide for detection of SNP TSC0015112
gaggttgtatatg

SEQ ID NO: 55302 - DNA, 13 bp, Artificial Sequence
  Oligonucleotide for detection of SNP TSC0015112
catatacaacctc

SEQ ID NO: 55303 - DNA, 13 bp, Artificial Sequence
  Oligonucleotide for detection of SNP TSC0015112
gaggttatatatg

SEQ ID NO: 55304 - DNA, 13 bp, Artificial Sequence
  Oligonucleotide for detection of SNP TSC0015112
catatataacctc

SEQ ID NO: 55305 - DNA, 13 bp, Artificial Sequence
  Oligonucleotide for detection of SNP TSC0015112
gaggtcgtatatg

SEQ ID NO: 55306 - DNA, 13 bp, Artificial Sequence
  Oligonucleotide for detection of SNP TSC0015112
catatacgacctc

SEQ ID NO: 55307 - DNA, 13 bp, Artificial Sequence
  Oligonucleotide for detection of SNP TSC0015113
ttatatatatgag

SEQ ID NO: 55308 - DNA, 13 bp, Artificial Sequence
  Oligonucleotide for detection of SNP TSC0015113
ctcatatatataa

SEQ ID NO: 55309 - DNA, 13 bp, Artificial Sequence
  Oligonucleotide for detection of SNP TSC0015113
ttatatgtatgag

SEQ ID NO: 55310 - DNA, 13 bp, Artificial Sequence
  Oligonucleotide for detection of SNP TSC0015113
ctcatacatataa

SEQ ID NO: 55311 - DNA, 13 bp, Artificial Sequence
  Oligonucleotide for detection of SNP TSC0015113
ttatatatacgag

SEQ ID NO: 55312 - DNA, 13 bp, Artificial Sequence
  Oligonucleotide for detection of SNP TSC0015113
ctcgtatatataa

SEQ ID NO: 55313 - DNA, 13 bp, Artificial Sequence
  Oligonucleotide for detection of SNP TSC0015113
ttatacgtatgag

SEQ ID NO: 55314 - DNA, 13 bp, Artificial Sequence
  Oligonucleotide for detection of SNP TSC0015113
ctcatacgtataa

SEQ ID NO: 55315 - DNA, 13 bp, Artificial Sequence
  Oligonucleotide for detection of SNP TSC0015113
ttatatgtacgag

SEQ ID NO: 55316 - DNA, 13 bp, Artificial Sequence
  Oligonucleotide for detection of SNP TSC0015113
ctcgtacatataa

SEQ ID NO: 55317 - DNA, 13 bp, Artificial Sequence
  Oligonucleotide for detection of SNP TSC0015113
ttatacgtacgag

SEQ ID NO: 55318 - DNA, 13 bp, Artificial Sequence
  Oligonucleotide for detection of SNP TSC0015113
ctcgtacgtataa

SEQ ID NO: 55319 - DNA, 13 bp, Artificial Sequence
  Oligonucleotide for detection of SNP TSC0015113
tttgtgtgtgtaa

SEQ ID NO: 55320 - DNA, 13 bp, Artificial Sequence
  Oligonucleotide for detection of SNP TSC0015113
ttacacacacaaa

SEQ ID NO: 55321 - DNA, 13 bp, Artificial Sequence
  Oligonucleotide for detection of SNP TSC0015113
ttcgtgtgtgtaa

SEQ ID NO: 55322 - DNA, 13 bp, Artificial Sequence
  Oligonucleotide for detection of SNP TSC0015113
ttacacacacgaa

SEQ ID NO: 55323 - DNA, 13 bp, Artificial Sequence
  Oligonucleotide for detection of SNP TSC0015113
tttgtgcgtgtaa

SEQ ID NO: 55324 - DNA, 13 bp, Artificial Sequence
  Oligonucleotide for detection of SNP TSC0015113
ttacacgcacaaa

SEQ ID NO: 55325 - DNA, 13 bp, Artificial Sequence
  Oligonucleotide for detection of SNP TSC0015113
ttcgtgcgtgtaa

SEQ ID NO: 55326 - DNA, 13 bp, Artificial Sequence
  Oligonucleotide for detection of SNP TSC0015113
ttacacgcacgaa

SEQ ID NO: 55327 - DNA, 13 bp, Artificial Sequence
  Oligonucleotide for detection of SNP TSC0015114
attaatagtattt

SEQ ID NO: 55328 - DNA, 13 bp, Artificial Sequence
  Oligonucleotide for detection of SNP TSC0015114
aaatactattaat

SEQ ID NO: 55329 - DNA, 13 bp, Artificial Sequence
  Oligonucleotide for detection of SNP TSC0015114
attaattgtattt

SEQ ID NO: 55330 - DNA, 13 bp, Artificial Sequence
  Oligonucleotide for detection of SNP TSC0015114
aaatacaattaat

SEQ ID NO: 55331 - DNA, 13 bp, Artificial Sequence
  Oligonucleotide for detection of SNP TSC0015114
agatgttattagt

SEQ ID NO: 55332 - DNA, 13 bp, Artificial Sequence
  Oligonucleotide for detection of SNP TSC0015114
actaataacatct

SEQ ID NO: 55333 - DNA, 13 bp, Artificial Sequence
  Oligonucleotide for detection of SNP TSC0015114
agatgtaattagt

SEQ ID NO: 55334 - DNA, 13 bp, Artificial Sequence
  Oligonucleotide for detection of SNP TSC0015114
actaattacatct

SEQ ID NO: 55335 - DNA, 13 bp, Artificial Sequence
  Oligonucleotide for detection of SNP TSC0015115
ttagagggttatg

SEQ ID NO: 55336 - DNA, 13 bp, Artificial Sequence
  Oligonucleotide for detection of SNP TSC0015115
cataaccctctaa

SEQ ID NO: 55337 - DNA, 13 bp, Artificial Sequence
  Oligonucleotide for detection of SNP TSC0015115
ttagagagttatg

SEQ ID NO: 55338 - DNA, 13 bp, Artificial Sequence
  Oligonucleotide for detection of SNP TSC0015115
cataactctctaa

SEQ ID NO: 55339 - DNA, 13 bp, Artificial Sequence
  Oligonucleotide for detection of SNP TSC0015119
ttatttatttgaa

SEQ ID NO: 55340 - DNA, 13 bp, Artificial Sequence
  Oligonucleotide for detection of SNP TSC0015119
ttcaaataaataa

SEQ ID NO: 55341 - DNA, 13 bp, Artificial Sequence
  Oligonucleotide for detection of SNP TSC0015119
ttatttttttgaa

SEQ ID NO: 55342 - DNA, 13 bp, Artificial Sequence
  Oligonucleotide for detection of SNP TSC0015119
ttcaaaaaaataa

SEQ ID NO: 55343 - DNA, 13 bp, Artificial Sequence
  Oligonucleotide for detection of SNP TSC0015119
tttaagtgggtga

SEQ ID NO: 55344 - DNA, 13 bp, Artificial Sequence
  Oligonucleotide for detection of SNP TSC0015119
tcacccacttaaa

SEQ ID NO: 55345 - DNA, 13 bp, Artificial Sequence
  Oligonucleotide for detection of SNP TSC0015119
tttaagggggtga

SEQ ID NO: 55346 - DNA, 13 bp, Artificial Sequence
  Oligonucleotide for detection of SNP TSC0015119
tcacccccttaaa

SEQ ID NO: 55347 - DNA, 13 bp, Artificial Sequence
  Oligonucleotide for detection of SNP TSC0015120
tagttgtggtgtt

SEQ ID NO: 55348 - DNA, 13 bp, Artificial Sequence
  Oligonucleotide for detection of SNP TSC0015120
aacaccacaacta

SEQ ID NO: 55349 - DNA, 13 bp, Artificial Sequence
  Oligonucleotide for detection of SNP TSC0015120
tagttgcggtgtt

SEQ ID NO: 55350 - DNA, 13 bp, Artificial Sequence
  Oligonucleotide for detection of SNP TSC0015120
aacaccgcaacta

SEQ ID NO: 55351 - DNA, 13 bp, Artificial Sequence
  Oligonucleotide for detection of SNP TSC0015120
agtattgtagttg

SEQ ID NO: 55352 - DNA, 13 bp, Artificial Sequence
  Oligonucleotide for detection of SNP TSC0015120
caactacaatact

SEQ ID NO: 55353 - DNA, 13 bp, Artificial Sequence
  Oligonucleotide for detection of SNP TSC0015120
agtattatagttg

SEQ ID NO: 55354 - DNA, 13 bp, Artificial Sequence
  Oligonucleotide for detection of SNP TSC0015120
caactataatact

SEQ ID NO: 55355 - DNA, 13 bp, Artificial Sequence
  Oligonucleotide for detection of SNP TSC0015120
agtatcgtagttg

SEQ ID NO: 55356 - DNA, 13 bp, Artificial Sequence
  Oligonucleotide for detection of SNP TSC0015120
caactacgatact

SEQ ID NO: 55357 - DNA, 13 bp, Artificial Sequence
  Oligonucleotide for detection of SNP TSC0015122
ttgtgtagtttag

SEQ ID NO: 55358 - DNA, 13 bp, Artificial Sequence
  Oligonucleotide for detection of SNP TSC0015122
ctaaactacacaa

SEQ ID NO: 55359 - DNA, 13 bp, Artificial Sequence
  Oligonucleotide for detection of SNP TSC0015122
ttgtgttgtttag

SEQ ID NO: 55360 - DNA, 13 bp, Artificial Sequence
  Oligonucleotide for detection of SNP TSC0015122
ctaaacaacacaa

SEQ ID NO: 55361 - DNA, 13 bp, Artificial Sequence
  Oligonucleotide for detection of SNP TSC0015122
ttgtgtcgtttag

SEQ ID NO: 55362 - DNA, 13 bp, Artificial Sequence
  Oligonucleotide for detection of SNP TSC0015122
ctaaacgacacaa

SEQ ID NO: 55363 - DNA, 13 bp, Artificial Sequence
  Oligonucleotide for detection of SNP TSC0015122
ttgagttatatag

SEQ ID NO: 55364 - DNA, 13 bp, Artificial Sequence
  Oligonucleotide for detection of SNP TSC0015122
ctatataactcaa

SEQ ID NO: 55365 - DNA, 13 bp, Artificial Sequence
  Oligonucleotide for detection of SNP TSC0015122
ttgagtgatatag

SEQ ID NO: 55366 - DNA, 13 bp, Artificial Sequence
  Oligonucleotide for detection of SNP TSC0015122
ctatatcactcaa

SEQ ID NO: 55367 - DNA, 13 bp, Artificial Sequence
  Oligonucleotide for detection of SNP TSC0015122
ttgagcgatatag

SEQ ID NO: 55368 - DNA, 13 bp, Artificial Sequence
  Oligonucleotide for detection of SNP TSC0015122
ctatatcgctcaa

SEQ ID NO: 55369 - DNA, 13 bp, Artificial Sequence
  Oligonucleotide for detection of SNP TSC0015123
agtgtgttgtgat

SEQ ID NO: 55370 - DNA, 13 bp, Artificial Sequence
  Oligonucleotide for detection of SNP TSC0015123
atcacaacacact

SEQ ID NO: 55371 - DNA, 13 bp, Artificial Sequence
  Oligonucleotide for detection of SNP TSC0015123
agtgtggtgtgat

SEQ ID NO: 55372 - DNA, 13 bp, Artificial Sequence
  Oligonucleotide for detection of SNP TSC0015123
atcacaccacact

SEQ ID NO: 55373 - DNA, 13 bp, Artificial Sequence
  Oligonucleotide for detection of SNP TSC0015123
attatagtatatt

SEQ ID NO: 55374 - DNA, 13 bp, Artificial Sequence
  Oligonucleotide for detection of SNP TSC0015123
aatatactataat

SEQ ID NO: 55375 - DNA, 13 bp, Artificial Sequence
  Oligonucleotide for detection of SNP TSC0015123
attatattatatt

SEQ ID NO: 55376 - DNA, 13 bp, Artificial Sequence
  Oligonucleotide for detection of SNP TSC0015123
aatataatataat

SEQ ID NO: 55377 - DNA, 13 bp, Artificial Sequence
  Oligonucleotide for detection of SNP TSC0015125
ggaaggagtttgt

SEQ ID NO: 55378 - DNA, 13 bp, Artificial Sequence
  Oligonucleotide for detection of SNP TSC0015125
acaaactccttcc

SEQ ID NO: 55379 - DNA, 13 bp, Artificial Sequence
  Oligonucleotide for detection of SNP TSC0015125
ggaaggggtttgt

SEQ ID NO: 55380 - DNA, 13 bp, Artificial Sequence
  Oligonucleotide for detection of SNP TSC0015125
acaaaccccttcc

SEQ ID NO: 55381 - DNA, 13 bp, Artificial Sequence
  Oligonucleotide for detection of SNP TSC0015126
ataaggtgggtty

SEQ ID NO: 55382 - DNA, 13 bp, Artificial Sequence
  Oligonucleotide for detection of SNP TSC0015126
raacccaccttat

SEQ ID NO: 55383 - DNA, 13 bp, Artificial Sequence
  Oligonucleotide for detection of SNP TSC0015126
ataaggcgggtty

SEQ ID NO: 55384 - DNA, 13 bp, Artificial Sequence
  Oligonucleotide for detection of SNP TSC0015126
raacccgccttat

SEQ ID NO: 55385 - DNA, 13 bp, Artificial Sequence
  Oligonucleotide for detection of SNP TSC0015126
gggtttgttttgt

SEQ ID NO: 55386 - DNA, 13 bp, Artificial Sequence
  Oligonucleotide for detection of SNP TSC0015126
acaaaacaaaccc

SEQ ID NO: 55387 - DNA, 13 bp, Artificial Sequence
  Oligonucleotide for detection of SNP TSC0015126
gggtttattttgt

SEQ ID NO: 55388 - DNA, 13 bp, Artificial Sequence
  Oligonucleotide for detection of SNP TSC0015126
acaaaataaaccc

SEQ ID NO: 55389 - DNA, 13 bp, Artificial Sequence
  Oligonucleotide for detection of SNP TSC0015126
gggttcgttttgt

SEQ ID NO: 55390 - DNA, 13 bp, Artificial Sequence
  Oligonucleotide for detection of SNP TSC0015126
acaaaacgaaccc

SEQ ID NO: 55391 - DNA, 13 bp, Artificial Sequence
  Oligonucleotide for detection of SNP TSC0015127
tagtgtattgagt

SEQ ID NO: 55392 - DNA, 13 bp, Artificial Sequence
  Oligonucleotide for detection of SNP TSC0015127
actcaatacacta

SEQ ID NO: 55393 - DNA, 13 bp, Artificial Sequence
  Oligonucleotide for detection of SNP TSC0015127
tagtgtgttgagt

SEQ ID NO: 55394 - DNA, 13 bp, Artificial Sequence
  Oligonucleotide for detection of SNP TSC0015127
actcaacacacta

SEQ ID NO: 55395 - DNA, 13 bp, Artificial Sequence
  Oligonucleotide for detection of SNP TSC0015127
tagcgtattgagt

SEQ ID NO: 55396 - DNA, 13 bp, Artificial Sequence
  Oligonucleotide for detection of SNP TSC0015127
actcaatacgcta

SEQ ID NO: 55397 - DNA, 13 bp, Artificial Sequence
  Oligonucleotide for detection of SNP TSC0015127
tagcgtgttgagt

SEQ ID NO: 55398 - DNA, 13 bp, Artificial Sequence
  Oligonucleotide for detection of SNP TSC0015127
actcaacacgcta

SEQ ID NO: 55399 - DNA, 13 bp, Artificial Sequence
  Oligonucleotide for detection of SNP TSC0015127
tagtgcgttgagt

SEQ ID NO: 55400 - DNA, 13 bp, Artificial Sequence
  Oligonucleotide for detection of SNP TSC0015127
actcaacgcacta

SEQ ID NO: 55401 - DNA, 13 bp, Artificial Sequence
  Oligonucleotide for detection of SNP TSC0015127
tagcgcgttgagt

SEQ ID NO: 55402 - DNA, 13 bp, Artificial Sequence
  Oligonucleotide for detection of SNP TSC0015127
actcaacgcgcta

SEQ ID NO: 55403 - DNA, 13 bp, Artificial Sequence
  Oligonucleotide for detection of SNP TSC0015127
atttagtgtgttg

SEQ ID NO: 55404 - DNA, 13 bp, Artificial Sequence
  Oligonucleotide for detection of SNP TSC0015127
caacacactaaat

SEQ ID NO: 55405 - DNA, 13 bp, Artificial Sequence
  Oligonucleotide for detection of SNP TSC0015127
atttagtgcgttg

SEQ ID NO: 55406 - DNA, 13 bp, Artificial Sequence
  Oligonucleotide for detection of SNP TSC0015127
caacgcactaaat

SEQ ID NO: 55407 - DNA, 13 bp, Artificial Sequence
  Oligonucleotide for detection of SNP TSC0015127
atttagcgtgttg

SEQ ID NO: 55408 - DNA, 13 bp, Artificial Sequence
  Oligonucleotide for detection of SNP TSC0015127
caacacgctaaat

SEQ ID NO: 55409 - DNA, 13 bp, Artificial Sequence
  Oligonucleotide for detection of SNP TSC0015127
atttagcgcgttg

SEQ ID NO: 55410 - DNA, 13 bp, Artificial Sequence
  Oligonucleotide for detection of SNP TSC0015127
caacgcgctaaat

SEQ ID NO: 55411 - DNA, 13 bp, Artificial Sequence
  Oligonucleotide for detection of SNP TSC0015129
tgtttttggttty

SEQ ID NO: 55412 - DNA, 13 bp, Artificial Sequence
  Oligonucleotide for detection of SNP TSC0015129
raaaccaaaaaca

SEQ ID NO: 55413 - DNA, 13 bp, Artificial Sequence
  Oligonucleotide for detection of SNP TSC0015129
tgttttgggttty

SEQ ID NO: 55414 - DNA, 13 bp, Artificial Sequence
  Oligonucleotide for detection of SNP TSC0015129
raaacccaaaaca

SEQ ID NO: 55415 - DNA, 13 bp, Artificial Sequence
  Oligonucleotide for detection of SNP TSC0015129
tgttttcggttty

SEQ ID NO: 55416 - DNA, 13 bp, Artificial Sequence
  Oligonucleotide for detection of SNP TSC0015129
raaaccgaaaaca

SEQ ID NO: 55417 - DNA, 13 bp, Artificial Sequence
  Oligonucleotide for detection of SNP TSC0015129
gaggttgaagata

SEQ ID NO: 55418 - DNA, 13 bp, Artificial Sequence
  Oligonucleotide for detection of SNP TSC0015129
tatcttcaacctc

SEQ ID NO: 55419 - DNA, 13 bp, Artificial Sequence
  Oligonucleotide for detection of SNP TSC0015129
gaggtttaagata

SEQ ID NO: 55420 - DNA, 13 bp, Artificial Sequence
  Oligonucleotide for detection of SNP TSC0015129
tatcttaaacctc

SEQ ID NO: 55421 - DNA, 13 bp, Artificial Sequence
  Oligonucleotide for detection of SNP TSC0015129
gaggtcgaagata

SEQ ID NO: 55422 - DNA, 13 bp, Artificial Sequence
  Oligonucleotide for detection of SNP TSC0015129
tatcttcgacctc

SEQ ID NO: 55423 - DNA, 13 bp, Artificial Sequence
  Oligonucleotide for detection of SNP TSC0015130
aagttttgtaggy

SEQ ID NO: 55424 - DNA, 13 bp, Artificial Sequence
  Oligonucleotide for detection of SNP TSC0015130
rcctacaaaactt

SEQ ID NO: 55425 - DNA, 13 bp, Artificial Sequence
  Oligonucleotide for detection of SNP TSC0015130
aagtttcgtaggy

SEQ ID NO: 55426 - DNA, 13 bp, Artificial Sequence
  Oligonucleotide for detection of SNP TSC0015130
rcctacgaaactt

SEQ ID NO: 55427 - DNA, 13 bp, Artificial Sequence
  Oligonucleotide for detection of SNP TSC0015130
gtttatggaattt

SEQ ID NO: 55428 - DNA, 13 bp, Artificial Sequence
  Oligonucleotide for detection of SNP TSC0015130
aaattccataaac

SEQ ID NO: 55429 - DNA, 13 bp, Artificial Sequence
  Oligonucleotide for detection of SNP TSC0015130
gtttatagaattt

SEQ ID NO: 55430 - DNA, 13 bp, Artificial Sequence
  Oligonucleotide for detection of SNP TSC0015130
aaattctataaac

SEQ ID NO: 55431 - DNA, 13 bp, Artificial Sequence
  Oligonucleotide for detection of SNP TSC0015130
gtttacggaattt

SEQ ID NO: 55432 - DNA, 13 bp, Artificial Sequence
  Oligonucleotide for detection of SNP TSC0015130
aaattccgtaaac

SEQ ID NO: 55433 - DNA, 13 bp, Artificial Sequence
  Oligonucleotide for detection of SNP TSC0015134
attaatgaagtgt

SEQ ID NO: 55434 - DNA, 13 bp, Artificial Sequence
  Oligonucleotide for detection of SNP TSC0015134
acacttcattaat

SEQ ID NO: 55435 - DNA, 13 bp, Artificial Sequence
  Oligonucleotide for detection of SNP TSC0015134
attaataaagtgt

SEQ ID NO: 55436 - DNA, 13 bp, Artificial Sequence
  Oligonucleotide for detection of SNP TSC0015134
acactttattaat

SEQ ID NO: 55437 - DNA, 13 bp, Artificial Sequence
  Oligonucleotide for detection of SNP TSC0015135
taatatattttaa

SEQ ID NO: 55438 - DNA, 13 bp, Artificial Sequence
  Oligonucleotide for detection of SNP TSC0015135
ttaaaatatatta

SEQ ID NO: 55439 - DNA, 13 bp, Artificial Sequence
  Oligonucleotide for detection of SNP TSC0015135
taatattttttaa

SEQ ID NO: 55440 - DNA, 13 bp, Artificial Sequence
  Oligonucleotide for detection of SNP TSC0015135
ttaaaaaatatta

SEQ ID NO: 55441 - DNA, 13 bp, Artificial Sequence
  Oligonucleotide for detection of SNP TSC0015135
ttggaatatgttg

SEQ ID NO: 55442 - DNA, 13 bp, Artificial Sequence
  Oligonucleotide for detection of SNP TSC0015135
caacatattccaa

SEQ ID NO: 55443 - DNA, 13 bp, Artificial Sequence
  Oligonucleotide for detection of SNP TSC0015135
ttggaagatgttg

SEQ ID NO: 55444 - DNA, 13 bp, Artificial Sequence
  Oligonucleotide for detection of SNP TSC0015135
caacatcttccaa

SEQ ID NO: 55445 - DNA, 13 bp, Artificial Sequence
  Oligonucleotide for detection of SNP TSC0015136
gaggaagggtttg

SEQ ID NO: 55446 - DNA, 13 bp, Artificial Sequence
  Oligonucleotide for detection of SNP TSC0015136
caaacccttcctc

SEQ ID NO: 55447 - DNA, 13 bp, Artificial Sequence
  Oligonucleotide for detection of SNP TSC0015136
gaggaaaggtttg

SEQ ID NO: 55448 - DNA, 13 bp, Artificial Sequence
  Oligonucleotide for detection of SNP TSC0015136
caaacctttcctc

SEQ ID NO: 55449 - DNA, 13 bp, Artificial Sequence
  Oligonucleotide for detection of SNP TSC0015136
gaggaagggttcg

SEQ ID NO: 55450 - DNA, 13 bp, Artificial Sequence
  Oligonucleotide for detection of SNP TSC0015136
cgaacccttcctc

SEQ ID NO: 55451 - DNA, 13 bp, Artificial Sequence
  Oligonucleotide for detection of SNP TSC0015136
gaggaaaggttcg

SEQ ID NO: 55452 - DNA, 13 bp, Artificial Sequence
  Oligonucleotide for detection of SNP TSC0015136
cgaacctttcctc

SEQ ID NO: 55453 - DNA, 13 bp, Artificial Sequence
  Oligonucleotide for detection of SNP TSC0015137
ttatgtatatttt

SEQ ID NO: 55454 - DNA, 13 bp, Artificial Sequence
  Oligonucleotide for detection of SNP TSC0015137
aaaatatacataa

SEQ ID NO: 55455 - DNA, 13 bp, Artificial Sequence
  Oligonucleotide for detection of SNP TSC0015137
ttatgtgtatttt

SEQ ID NO: 55456 - DNA, 13 bp, Artificial Sequence
  Oligonucleotide for detection of SNP TSC0015137
aaaatacacataa

SEQ ID NO: 55457 - DNA, 13 bp, Artificial Sequence
  Oligonucleotide for detection of SNP TSC0015137
ttatgcgtatttt

SEQ ID NO: 55458 - DNA, 13 bp, Artificial Sequence
  Oligonucleotide for detection of SNP TSC0015137
aaaatacgcataa

SEQ ID NO: 55459 - DNA, 13 bp, Artificial Sequence
  Oligonucleotide for detection of SNP TSC0015137
aggatgtgtatag

SEQ ID NO: 55460 - DNA, 13 bp, Artificial Sequence
  Oligonucleotide for detection of SNP TSC0015137
ctatacacatcct

SEQ ID NO: 55461 - DNA, 13 bp, Artificial Sequence
  Oligonucleotide for detection of SNP TSC0015137
aggatgcgtatag

SEQ ID NO: 55462 - DNA, 13 bp, Artificial Sequence
  Oligonucleotide for detection of SNP TSC0015137
ctatacgcatcct

SEQ ID NO: 55463 - DNA, 13 bp, Artificial Sequence
  Oligonucleotide for detection of SNP TSC0015138
gaattgtattagg

SEQ ID NO: 55464 - DNA, 13 bp, Artificial Sequence
  Oligonucleotide for detection of SNP TSC0015138
cctaatacaattc

SEQ ID NO: 55465 - DNA, 13 bp, Artificial Sequence
  Oligonucleotide for detection of SNP TSC0015138
gaattggattagg

SEQ ID NO: 55466 - DNA, 13 bp, Artificial Sequence
  Oligonucleotide for detection of SNP TSC0015138
cctaatccaattc

SEQ ID NO: 55467 - DNA, 13 bp, Artificial Sequence
  Oligonucleotide for detection of SNP TSC0015138
tttgatgtaatty

SEQ ID NO: 55468 - DNA, 13 bp, Artificial Sequence
  Oligonucleotide for detection of SNP TSC0015138
raattacatcaaa

SEQ ID NO: 55469 - DNA, 13 bp, Artificial Sequence
  Oligonucleotide for detection of SNP TSC0015138
tttgatttaatty

SEQ ID NO: 55470 - DNA, 13 bp, Artificial Sequence
  Oligonucleotide for detection of SNP TSC0015138
raattaaatcaaa

SEQ ID NO: 55471 - DNA, 13 bp, Artificial Sequence
  Oligonucleotide for detection of SNP TSC0015140
taaagtattggga

SEQ ID NO: 55472 - DNA, 13 bp, Artificial Sequence
  Oligonucleotide for detection of SNP TSC0015140
tcccaatacttta

SEQ ID NO: 55473 - DNA, 13 bp, Artificial Sequence
  Oligonucleotide for detection of SNP TSC0015141
atttagggattga

SEQ ID NO: 55474 - DNA, 13 bp, Artificial Sequence
  Oligonucleotide for detection of SNP TSC0015141
tcaatccctaaat

SEQ ID NO: 55475 - DNA, 13 bp, Artificial Sequence
  Oligonucleotide for detection of SNP TSC0015141
atttagagattga

SEQ ID NO: 55476 - DNA, 13 bp, Artificial Sequence
  Oligonucleotide for detection of SNP TSC0015141
tcaatctctaaat

SEQ ID NO: 55477 - DNA, 13 bp, Artificial Sequence
  Oligonucleotide for detection of SNP TSC0015142
gaaagttaaagaa

SEQ ID NO: 55478 - DNA, 13 bp, Artificial Sequence
  Oligonucleotide for detection of SNP TSC0015142
ttctttaactttc

SEQ ID NO: 55479 - DNA, 13 bp, Artificial Sequence
  Oligonucleotide for detection of SNP TSC0015142
gaaagtaaaagaa

SEQ ID NO: 55480 - DNA, 13 bp, Artificial Sequence
  Oligonucleotide for detection of SNP TSC0015142
ttcttttactttc

SEQ ID NO: 55481 - DNA, 13 bp, Artificial Sequence
  Oligonucleotide for detection of SNP TSC0015143
agggtgtgtgagg

SEQ ID NO: 55482 - DNA, 13 bp, Artificial Sequence
  Oligonucleotide for detection of SNP TSC0015143
cctcacacaccct

SEQ ID NO: 55483 - DNA, 13 bp, Artificial Sequence
  Oligonucleotide for detection of SNP TSC0015143
agggtgggtgagg

SEQ ID NO: 55484 - DNA, 13 bp, Artificial Sequence
  Oligonucleotide for detection of SNP TSC0015143
cctcacccaccct

SEQ ID NO: 55485 - DNA, 13 bp, Artificial Sequence
  Oligonucleotide for detection of SNP TSC0015144
ttaaggagatttt

SEQ ID NO: 55486 - DNA, 13 bp, Artificial Sequence
  Oligonucleotide for detection of SNP TSC0015144
aaaatctccttaa

SEQ ID NO: 55487 - DNA, 13 bp, Artificial Sequence
  Oligonucleotide for detection of SNP TSC0015144
ttaaggtgatttt

SEQ ID NO: 55488 - DNA, 13 bp, Artificial Sequence
  Oligonucleotide for detection of SNP TSC0015144
aaaatcaccttaa

SEQ ID NO: 55489 - DNA, 13 bp, Artificial Sequence
  Oligonucleotide for detection of SNP TSC0015144
agagtttttttaa

SEQ ID NO: 55490 - DNA, 13 bp, Artificial Sequence
  Oligonucleotide for detection of SNP TSC0015144
ttaaaaaaactct

SEQ ID NO: 55491 - DNA, 13 bp, Artificial Sequence
  Oligonucleotide for detection of SNP TSC0015144
agagttattttaa

SEQ ID NO: 55492 - DNA, 13 bp, Artificial Sequence
  Oligonucleotide for detection of SNP TSC0015144
ttaaaataactct

SEQ ID NO: 55493 - DNA, 13 bp, Artificial Sequence
  Oligonucleotide for detection of SNP TSC0015145
gtatttatgtttg

SEQ ID NO: 55494 - DNA, 13 bp, Artificial Sequence
  Oligonucleotide for detection of SNP TSC0015145
caaacataaatac

SEQ ID NO: 55495 - DNA, 13 bp, Artificial Sequence
  Oligonucleotide for detection of SNP TSC0015145
gtatttgtgtttg

SEQ ID NO: 55496 - DNA, 13 bp, Artificial Sequence
  Oligonucleotide for detection of SNP TSC0015145
caaacacaaatac

SEQ ID NO: 55497 - DNA, 13 bp, Artificial Sequence
  Oligonucleotide for detection of SNP TSC0015146
atatttatgttgt

SEQ ID NO: 55498 - DNA, 13 bp, Artificial Sequence
  Oligonucleotide for detection of SNP TSC0015146
acaacataaatat

SEQ ID NO: 55499 - DNA, 13 bp, Artificial Sequence
  Oligonucleotide for detection of SNP TSC0015146
atatttgtgttgt

SEQ ID NO: 55500 - DNA, 13 bp, Artificial Sequence
  Oligonucleotide for detection of SNP TSC0015146
acaacacaaatat

SEQ ID NO: 55501 - DNA, 13 bp, Artificial Sequence
  Oligonucleotide for detection of SNP TSC0015146
atattcgtgttgt

SEQ ID NO: 55502 - DNA, 13 bp, Artificial Sequence
  Oligonucleotide for detection of SNP TSC0015146
acaacacgaatat

SEQ ID NO: 55503 - DNA, 13 bp, Artificial Sequence
  Oligonucleotide for detection of SNP TSC0015146
atagtatgagtat

SEQ ID NO: 55504 - DNA, 13 bp, Artificial Sequence
  Oligonucleotide for detection of SNP TSC0015146
atactcatactat

SEQ ID NO: 55505 - DNA, 13 bp, Artificial Sequence
  Oligonucleotide for detection of SNP TSC0015146
atagtacgagtat

SEQ ID NO: 55506 - DNA, 13 bp, Artificial Sequence
  Oligonucleotide for detection of SNP TSC0015146
atactcgtactat

SEQ ID NO: 55507 - DNA, 13 bp, Artificial Sequence
  Oligonucleotide for detection of SNP TSC0015147
ttattgaatatta

SEQ ID NO: 55508 - DNA, 13 bp, Artificial Sequence
  Oligonucleotide for detection of SNP TSC0015147
taatattcaataa

SEQ ID NO: 55509 - DNA, 13 bp, Artificial Sequence
  Oligonucleotide for detection of SNP TSC0015147
ttattgtatatta

SEQ ID NO: 55510 - DNA, 13 bp, Artificial Sequence
  Oligonucleotide for detection of SNP TSC0015147
taatatacaataa

SEQ ID NO: 55511 - DNA, 13 bp, Artificial Sequence
  Oligonucleotide for detection of SNP TSC0015147
tagtatttaatag

SEQ ID NO: 55512 - DNA, 13 bp, Artificial Sequence
  Oligonucleotide for detection of SNP TSC0015147
ctattaaatacta

SEQ ID NO: 55513 - DNA, 13 bp, Artificial Sequence
  Oligonucleotide for detection of SNP TSC0015147
tagtatataatag

SEQ ID NO: 55514 - DNA, 13 bp, Artificial Sequence
  Oligonucleotide for detection of SNP TSC0015147
ctattatatacta

SEQ ID NO: 55515 - DNA, 13 bp, Artificial Sequence
  Oligonucleotide for detection of SNP TSC0015148
tttttttagtatt

SEQ ID NO: 55516 - DNA, 13 bp, Artificial Sequence
  Oligonucleotide for detection of SNP TSC0015148
aatactaaaaaaa

SEQ ID NO: 55517 - DNA, 13 bp, Artificial Sequence
  Oligonucleotide for detection of SNP TSC0015148
ttttttgagtatt

SEQ ID NO: 55518 - DNA, 13 bp, Artificial Sequence
  Oligonucleotide for detection of SNP TSC0015148
aatactcaaaaaa

SEQ ID NO: 55519 - DNA, 13 bp, Artificial Sequence
  Oligonucleotide for detection of SNP TSC0015148
tttttcgagtatt

SEQ ID NO: 55520 - DNA, 13 bp, Artificial Sequence
  Oligonucleotide for detection of SNP TSC0015148
aatactcgaaaaa

SEQ ID NO: 55521 - DNA, 13 bp, Artificial Sequence
  Oligonucleotide for detection of SNP TSC0015148
agtgttgggagag

SEQ ID NO: 55522 - DNA, 13 bp, Artificial Sequence
  Oligonucleotide for detection of SNP TSC0015148
ctctcccaacact

SEQ ID NO: 55523 - DNA, 13 bp, Artificial Sequence
  Oligonucleotide for detection of SNP TSC0015148
agtgtttggagag

SEQ ID NO: 55524 - DNA, 13 bp, Artificial Sequence
  Oligonucleotide for detection of SNP TSC0015148
ctctccaaacact

SEQ ID NO: 55525 - DNA, 13 bp, Artificial Sequence
  Oligonucleotide for detection of SNP TSC0015148
agtgttcggagag

SEQ ID NO: 55526 - DNA, 13 bp, Artificial Sequence
  Oligonucleotide for detection of SNP TSC0015148
ctctccgaacact

SEQ ID NO: 55527 - DNA, 13 bp, Artificial Sequence
  Oligonucleotide for detection of SNP TSC0015149
aaagtaataaaag

SEQ ID NO: 55528 - DNA, 13 bp, Artificial Sequence
  Oligonucleotide for detection of SNP TSC0015149
cttttattacttt

SEQ ID NO: 55529 - DNA, 13 bp, Artificial Sequence
  Oligonucleotide for detection of SNP TSC0015149
aaagtagtaaaag

SEQ ID NO: 55530 - DNA, 13 bp, Artificial Sequence
  Oligonucleotide for detection of SNP TSC0015149
cttttactacttt

SEQ ID NO: 55531 - DNA, 13 bp, Artificial Sequence
  Oligonucleotide for detection of SNP TSC0015150
ttatttgaaagtg

SEQ ID NO: 55532 - DNA, 13 bp, Artificial Sequence
  Oligonucleotide for detection of SNP TSC0015150
cactttcaaataa

SEQ ID NO: 55533 - DNA, 13 bp, Artificial Sequence
  Oligonucleotide for detection of SNP TSC0015150
ttattttaaagtg

SEQ ID NO: 55534 - DNA, 13 bp, Artificial Sequence
  Oligonucleotide for detection of SNP TSC0015150
cactttaaaataa

SEQ ID NO: 55535 - DNA, 13 bp, Artificial Sequence
  Oligonucleotide for detection of SNP TSC0015150
tatttttaaataa

SEQ ID NO: 55536 - DNA, 13 bp, Artificial Sequence
  Oligonucleotide for detection of SNP TSC0015150
ttatttaaaaata

SEQ ID NO: 55537 - DNA, 13 bp, Artificial Sequence
  Oligonucleotide for detection of SNP TSC0015150
tattttaaaataa

SEQ ID NO: 55538 - DNA, 13 bp, Artificial Sequence
  Oligonucleotide for detection of SNP TSC0015150
ttattttaaaata

SEQ ID NO: 55539 - DNA, 13 bp, Artificial Sequence
  Oligonucleotide for detection of SNP TSC0015151
tttttaggagata

SEQ ID NO: 55540 - DNA, 13 bp, Artificial Sequence
  Oligonucleotide for detection of SNP TSC0015151
tatctcctaaaaa

SEQ ID NO: 55541 - DNA, 13 bp, Artificial Sequence
  Oligonucleotide for detection of SNP TSC0015151
tttttaagagata

SEQ ID NO: 55542 - DNA, 13 bp, Artificial Sequence
  Oligonucleotide for detection of SNP TSC0015151
tatctcttaaaaa

SEQ ID NO: 55543 - DNA, 13 bp, Artificial Sequence
  Oligonucleotide for detection of SNP TSC0015152
ggggggtggtagg

SEQ ID NO: 55544 - DNA, 13 bp, Artificial Sequence
  Oligonucleotide for detection of SNP TSC0015152
cctaccacccccc

SEQ ID NO: 55545 - DNA, 13 bp, Artificial Sequence
  Oligonucleotide for detection of SNP TSC0015152
gggggggggtagg

SEQ ID NO: 55546 - DNA, 13 bp, Artificial Sequence
  Oligonucleotide for detection of SNP TSC0015152
cctaccccccccc

SEQ ID NO: 55547 - DNA, 13 bp, Artificial Sequence
  Oligonucleotide for detection of SNP TSC0015152
ggggggcggtagg

SEQ ID NO: 55548 - DNA, 13 bp, Artificial Sequence
  Oligonucleotide for detection of SNP TSC0015152
cctaccgcccccc

SEQ ID NO: 55549 - DNA, 13 bp, Artificial Sequence
  Oligonucleotide for detection of SNP TSC0015154
tgtggggtaatay

SEQ ID NO: 55550 - DNA, 13 bp, Artificial Sequence
  Oligonucleotide for detection of SNP TSC0015154
rtattaccccaca

SEQ ID NO: 55551 - DNA, 13 bp, Artificial Sequence
  Oligonucleotide for detection of SNP TSC0015154
tgtgggttaatay

SEQ ID NO: 55552 - DNA, 13 bp, Artificial Sequence
  Oligonucleotide for detection of SNP TSC0015154
rtattaacccaca

SEQ ID NO: 55553 - DNA, 13 bp, Artificial Sequence
  Oligonucleotide for detection of SNP TSC0015154
gtattattttata

SEQ ID NO: 55554 - DNA, 13 bp, Artificial Sequence
  Oligonucleotide for detection of SNP TSC0015154
tataaaataatac

SEQ ID NO: 55555 - DNA, 13 bp, Artificial Sequence
  Oligonucleotide for detection of SNP TSC0015154
gtattaatttata

SEQ ID NO: 55556 - DNA, 13 bp, Artificial Sequence
  Oligonucleotide for detection of SNP TSC0015154
tataaattaatac

SEQ ID NO: 55557 - DNA, 13 bp, Artificial Sequence
  Oligonucleotide for detection of SNP TSC0015155
ttaggaatattgy

SEQ ID NO: 55558 - DNA, 13 bp, Artificial Sequence
  Oligonucleotide for detection of SNP TSC0015155
rcaatattcctaa

SEQ ID NO: 55559 - DNA, 13 bp, Artificial Sequence
  Oligonucleotide for detection of SNP TSC0015155
ttaggagtattgy

SEQ ID NO: 55560 - DNA, 13 bp, Artificial Sequence
  Oligonucleotide for detection of SNP TSC0015155
rcaatactcctaa

SEQ ID NO: 55561 - DNA, 13 bp, Artificial Sequence
  Oligonucleotide for detection of SNP TSC0015156
tgggttgtatttt

SEQ ID NO: 55562 - DNA, 13 bp, Artificial Sequence
  Oligonucleotide for detection of SNP TSC0015156
aaaatacaaccca

SEQ ID NO: 55563 - DNA, 13 bp, Artificial Sequence
  Oligonucleotide for detection of SNP TSC0015156
tgggttatatttt

SEQ ID NO: 55564 - DNA, 13 bp, Artificial Sequence
  Oligonucleotide for detection of SNP TSC0015156
aaaatataaccca

SEQ ID NO: 55565 - DNA, 13 bp, Artificial Sequence
  Oligonucleotide for detection of SNP TSC0015157
ggatagaaaggta

SEQ ID NO: 55566 - DNA, 13 bp, Artificial Sequence
  Oligonucleotide for detection of SNP TSC0015157
tacctttctatcc

SEQ ID NO: 55567 - DNA, 13 bp, Artificial Sequence
  Oligonucleotide for detection of SNP TSC0015157
ggataggaaggta

SEQ ID NO: 55568 - DNA, 13 bp, Artificial Sequence
  Oligonucleotide for detection of SNP TSC0015157
taccttcctatcc

SEQ ID NO: 55569 - DNA, 13 bp, Artificial Sequence
  Oligonucleotide for detection of SNP TSC0015158
atttgggggggty

SEQ ID NO: 55570 - DNA, 13 bp, Artificial Sequence
  Oligonucleotide for detection of SNP TSC0015158
racccccccaaat

SEQ ID NO: 55571 - DNA, 13 bp, Artificial Sequence
  Oligonucleotide for detection of SNP TSC0015158
atttggtggggty

SEQ ID NO: 55572 - DNA, 13 bp, Artificial Sequence
  Oligonucleotide for detection of SNP TSC0015158
raccccaccaaat

SEQ ID NO: 55573 - DNA, 13 bp, Artificial Sequence
  Oligonucleotide for detection of SNP TSC0015158
gatttttttaagt

SEQ ID NO: 55574 - DNA, 13 bp, Artificial Sequence
  Oligonucleotide for detection of SNP TSC0015158
acttaaaaaaatc

SEQ ID NO: 55575 - DNA, 13 bp, Artificial Sequence
  Oligonucleotide for detection of SNP TSC0015158
gattttattaagt

SEQ ID NO: 55576 - DNA, 13 bp, Artificial Sequence
  Oligonucleotide for detection of SNP TSC0015158
acttaataaaatc

SEQ ID NO: 55577 - DNA, 13 bp, Artificial Sequence
  Oligonucleotide for detection of SNP TSC0015160
aaaaatggaatag

SEQ ID NO: 55578 - DNA, 13 bp, Artificial Sequence
  Oligonucleotide for detection of SNP TSC0015160
ctattccattttt

SEQ ID NO: 55579 - DNA, 13 bp, Artificial Sequence
  Oligonucleotide for detection of SNP TSC0015160
aaaaattgaatag

SEQ ID NO: 55580 - DNA, 13 bp, Artificial Sequence
  Oligonucleotide for detection of SNP TSC0015160
ctattcaattttt

SEQ ID NO: 55581 - DNA, 13 bp, Artificial Sequence
  Oligonucleotide for detection of SNP TSC0015160
aaaaacggaatag

SEQ ID NO: 55582 - DNA, 13 bp, Artificial Sequence
  Oligonucleotide for detection of SNP TSC0015160
ctattccgttttt

SEQ ID NO: 55583 - DNA, 13 bp, Artificial Sequence
  Oligonucleotide for detection of SNP TSC0015160
ttgttttgttttt

SEQ ID NO: 55584 - DNA, 13 bp, Artificial Sequence
  Oligonucleotide for detection of SNP TSC0015160
aaaaacaaaacaa

SEQ ID NO: 55585 - DNA, 13 bp, Artificial Sequence
  Oligonucleotide for detection of SNP TSC0015160
ttgtttagttttt

SEQ ID NO: 55586 - DNA, 13 bp, Artificial Sequence
  Oligonucleotide for detection of SNP TSC0015160
aaaaactaaacaa

SEQ ID NO: 55587 - DNA, 13 bp, Artificial Sequence
  Oligonucleotide for detection of SNP TSC0015160
ttgtttcgttttt

SEQ ID NO: 55588 - DNA, 13 bp, Artificial Sequence
  Oligonucleotide for detection of SNP TSC0015160
aaaaacgaaacaa

SEQ ID NO: 55589 - DNA, 13 bp, Artificial Sequence
  Oligonucleotide for detection of SNP TSC0015161
aatattatggaaa

SEQ ID NO: 55590 - DNA, 13 bp, Artificial Sequence
  Oligonucleotide for detection of SNP TSC0015161
tttccataatatt

SEQ ID NO: 55591 - DNA, 13 bp, Artificial Sequence
  Oligonucleotide for detection of SNP TSC0015161
aatattgtggaaa

SEQ ID NO: 55592 - DNA, 13 bp, Artificial Sequence
  Oligonucleotide for detection of SNP TSC0015161
tttccacaatatt

SEQ ID NO: 55593 - DNA, 13 bp, Artificial Sequence
  Oligonucleotide for detection of SNP TSC0015162
gggtggagttagy

SEQ ID NO: 55594 - DNA, 13 bp, Artificial Sequence
  Oligonucleotide for detection of SNP TSC0015162
rctaactccaccc

SEQ ID NO: 55595 - DNA, 13 bp, Artificial Sequence
  Oligonucleotide for detection of SNP TSC0015162
gggtggtgttagy

SEQ ID NO: 55596 - DNA, 13 bp, Artificial Sequence
  Oligonucleotide for detection of SNP TSC0015162
rctaacaccaccc

SEQ ID NO: 55597 - DNA, 13 bp, Artificial Sequence
  Oligonucleotide for detection of SNP TSC0015162
gttgattttatty

SEQ ID NO: 55598 - DNA, 13 bp, Artificial Sequence
  Oligonucleotide for detection of SNP TSC0015162
raataaaatcaac

SEQ ID NO: 55599 - DNA, 13 bp, Artificial Sequence
  Oligonucleotide for detection of SNP TSC0015162
gttgatattatty

SEQ ID NO: 55600 - DNA, 13 bp, Artificial Sequence
  Oligonucleotide for detection of SNP TSC0015162
raataatatcaac

SEQ ID NO: 55601 - DNA, 13 bp, Artificial Sequence
  Oligonucleotide for detection of SNP TSC0015165
tgtaaggagataa

SEQ ID NO: 55602 - DNA, 13 bp, Artificial Sequence
  Oligonucleotide for detection of SNP TSC0015165
ttatctccttaca

SEQ ID NO: 55603 - DNA, 13 bp, Artificial Sequence
  Oligonucleotide for detection of SNP TSC0015165
tgtaagaagataa

SEQ ID NO: 55604 - DNA, 13 bp, Artificial Sequence
  Oligonucleotide for detection of SNP TSC0015165
ttatcttcttaca

SEQ ID NO: 55605 - DNA, 13 bp, Artificial Sequence
  Oligonucleotide for detection of SNP TSC0015169
tcggttattttgg

SEQ ID NO: 55606 - DNA, 13 bp, Artificial Sequence
  Oligonucleotide for detection of SNP TSC0015169
ccaaaataaccga

SEQ ID NO: 55607 - DNA, 13 bp, Artificial Sequence
  Oligonucleotide for detection of SNP TSC0015169
tcggttgttttgg

SEQ ID NO: 55608 - DNA, 13 bp, Artificial Sequence
  Oligonucleotide for detection of SNP TSC0015169
ccaaaacaaccga

SEQ ID NO: 55609 - DNA, 13 bp, Artificial Sequence
  Oligonucleotide for detection of SNP TSC0015171
tataattgtagtg

SEQ ID NO: 55610 - DNA, 13 bp, Artificial Sequence
  Oligonucleotide for detection of SNP TSC0015171
cactacaattata

SEQ ID NO: 55611 - DNA, 13 bp, Artificial Sequence
  Oligonucleotide for detection of SNP TSC0015171
tataatcgtagtg

SEQ ID NO: 55612 - DNA, 13 bp, Artificial Sequence
  Oligonucleotide for detection of SNP TSC0015171
cactacgattata

SEQ ID NO: 55613 - DNA, 13 bp, Artificial Sequence
  Oligonucleotide for detection of SNP TSC0015171
tataattgtagcg

SEQ ID NO: 55614 - DNA, 13 bp, Artificial Sequence
  Oligonucleotide for detection of SNP TSC0015171
cgctacaattata

SEQ ID NO: 55615 - DNA, 13 bp, Artificial Sequence
  Oligonucleotide for detection of SNP TSC0015171
tataatcgtagcg

SEQ ID NO: 55616 - DNA, 13 bp, Artificial Sequence
  Oligonucleotide for detection of SNP TSC0015171
cgctacgattata

SEQ ID NO: 55617 - DNA, 13 bp, Artificial Sequence
  Oligonucleotide for detection of SNP TSC0015171
tgttgtggttgta

SEQ ID NO: 55618 - DNA, 13 bp, Artificial Sequence
  Oligonucleotide for detection of SNP TSC0015171
tacaaccacaaca

SEQ ID NO: 55619 - DNA, 13 bp, Artificial Sequence
  Oligonucleotide for detection of SNP TSC0015171
tgttgtagttgta

SEQ ID NO: 55620 - DNA, 13 bp, Artificial Sequence
  Oligonucleotide for detection of SNP TSC0015171
tacaactacaaca

SEQ ID NO: 55621 - DNA, 13 bp, Artificial Sequence
  Oligonucleotide for detection of SNP TSC0015171
cgttgtggttgta

SEQ ID NO: 55622 - DNA, 13 bp, Artificial Sequence
  Oligonucleotide for detection of SNP TSC0015171
tacaaccacaacg

SEQ ID NO: 55623 - DNA, 13 bp, Artificial Sequence
  Oligonucleotide for detection of SNP TSC0015171
cgttgtagttgta

SEQ ID NO: 55624 - DNA, 13 bp, Artificial Sequence
  Oligonucleotide for detection of SNP TSC0015171
tacaactacaacg

SEQ ID NO: 55625 - DNA, 13 bp, Artificial Sequence
  Oligonucleotide for detection of SNP TSC0015171
tgttgcggttgta

SEQ ID NO: 55626 - DNA, 13 bp, Artificial Sequence
  Oligonucleotide for detection of SNP TSC0015171
tacaaccgcaaca

SEQ ID NO: 55627 - DNA, 13 bp, Artificial Sequence
  Oligonucleotide for detection of SNP TSC0015171
cgttgcggttgta

SEQ ID NO: 55628 - DNA, 13 bp, Artificial Sequence
  Oligonucleotide for detection of SNP TSC0015171
tacaaccgcaacg

SEQ ID NO: 55629 - DNA, 13 bp, Artificial Sequence
  Oligonucleotide for detection of SNP TSC0015172
gaggaagttatta

SEQ ID NO: 55630 - DNA, 13 bp, Artificial Sequence
  Oligonucleotide for detection of SNP TSC0015172
taataacttcctc

SEQ ID NO: 55631 - DNA, 13 bp, Artificial Sequence
  Oligonucleotide for detection of SNP TSC0015172
gaggaaattatta

SEQ ID NO: 55632 - DNA, 13 bp, Artificial Sequence
  Oligonucleotide for detection of SNP TSC0015172
taataatttcctc

SEQ ID NO: 55633 - DNA, 13 bp, Artificial Sequence
  Oligonucleotide for detection of SNP TSC0015174
attttgtgattag

SEQ ID NO: 55634 - DNA, 13 bp, Artificial Sequence
  Oligonucleotide for detection of SNP TSC0015174
ctaatcacaaaat

SEQ ID NO: 55635 - DNA, 13 bp, Artificial Sequence
  Oligonucleotide for detection of SNP TSC0015174
attttgcgattag

SEQ ID NO: 55636 - DNA, 13 bp, Artificial Sequence
  Oligonucleotide for detection of SNP TSC0015174
ctaatcgcaaaat

SEQ ID NO: 55637 - DNA, 13 bp, Artificial Sequence
  Oligonucleotide for detection of SNP TSC0015174
ttggttgtagggt

SEQ ID NO: 55638 - DNA, 13 bp, Artificial Sequence
  Oligonucleotide for detection of SNP TSC0015174
accctacaaccaa

SEQ ID NO: 55639 - DNA, 13 bp, Artificial Sequence
  Oligonucleotide for detection of SNP TSC0015174
ttggttatagggt

SEQ ID NO: 55640 - DNA, 13 bp, Artificial Sequence
  Oligonucleotide for detection of SNP TSC0015174
accctataaccaa

SEQ ID NO: 55641 - DNA, 13 bp, Artificial Sequence
  Oligonucleotide for detection of SNP TSC0015174
ttggtcgtagggt

SEQ ID NO: 55642 - DNA, 13 bp, Artificial Sequence
  Oligonucleotide for detection of SNP TSC0015174
accctacgaccaa

SEQ ID NO: 55643 - DNA, 13 bp, Artificial Sequence
  Oligonucleotide for detection of SNP TSC0015177
atgattattatgt

SEQ ID NO: 55644 - DNA, 13 bp, Artificial Sequence
  Oligonucleotide for detection of SNP TSC0015177
acataataatcat

SEQ ID NO: 55645 - DNA, 13 bp, Artificial Sequence
  Oligonucleotide for detection of SNP TSC0015177
atgattgttatgt

SEQ ID NO: 55646 - DNA, 13 bp, Artificial Sequence
  Oligonucleotide for detection of SNP TSC0015177
acataacaatcat

SEQ ID NO: 55647 - DNA, 13 bp, Artificial Sequence
  Oligonucleotide for detection of SNP TSC0015177
atgattattacgt

SEQ ID NO: 55648 - DNA, 13 bp, Artificial Sequence
  Oligonucleotide for detection of SNP TSC0015177
acgtaataatcat

SEQ ID NO: 55649 - DNA, 13 bp, Artificial Sequence
  Oligonucleotide for detection of SNP TSC0015177
atgatcgttatgt

SEQ ID NO: 55650 - DNA, 13 bp, Artificial Sequence
  Oligonucleotide for detection of SNP TSC0015177
acataacgatcat

SEQ ID NO: 55651 - DNA, 13 bp, Artificial Sequence
  Oligonucleotide for detection of SNP TSC0015177
atgattgttacgt

SEQ ID NO: 55652 - DNA, 13 bp, Artificial Sequence
  Oligonucleotide for detection of SNP TSC0015177
acgtaacaatcat

SEQ ID NO: 55653 - DNA, 13 bp, Artificial Sequence
  Oligonucleotide for detection of SNP TSC0015177
atgatcgttacgt

SEQ ID NO: 55654 - DNA, 13 bp, Artificial Sequence
  Oligonucleotide for detection of SNP TSC0015177
acgtaacgatcat

SEQ ID NO: 55655 - DNA, 13 bp, Artificial Sequence
  Oligonucleotide for detection of SNP TSC0015177
atgtagtgattat

SEQ ID NO: 55656 - DNA, 13 bp, Artificial Sequence
  Oligonucleotide for detection of SNP TSC0015177
ataatcactacat

SEQ ID NO: 55657 - DNA, 13 bp, Artificial Sequence
  Oligonucleotide for detection of SNP TSC0015177
acgtagtgattat

SEQ ID NO: 55658 - DNA, 13 bp, Artificial Sequence
  Oligonucleotide for detection of SNP TSC0015177
ataatcactacgt

SEQ ID NO: 55659 - DNA, 13 bp, Artificial Sequence
  Oligonucleotide for detection of SNP TSC0015177
atgtagcgattat

SEQ ID NO: 55660 - DNA, 13 bp, Artificial Sequence
  Oligonucleotide for detection of SNP TSC0015177
ataatcgctacat

SEQ ID NO: 55661 - DNA, 13 bp, Artificial Sequence
  Oligonucleotide for detection of SNP TSC0015177
acgtagcgattat

SEQ ID NO: 55662 - DNA, 13 bp, Artificial Sequence
  Oligonucleotide for detection of SNP TSC0015177
ataatcgctacgt

SEQ ID NO: 55663 - DNA, 13 bp, Artificial Sequence
  Oligonucleotide for detection of SNP TSC0015178
tattaatgtgttg

SEQ ID NO: 55664 - DNA, 13 bp, Artificial Sequence
  Oligonucleotide for detection of SNP TSC0015178
caacacattaata

SEQ ID NO: 55665 - DNA, 13 bp, Artificial Sequence
  Oligonucleotide for detection of SNP TSC0015178
tattaaggtgttg

SEQ ID NO: 55666 - DNA, 13 bp, Artificial Sequence
  Oligonucleotide for detection of SNP TSC0015178
caacaccttaata

SEQ ID NO: 55667 - DNA, 13 bp, Artificial Sequence
  Oligonucleotide for detection of SNP TSC0015178
tattaacgtgttg

SEQ ID NO: 55668 - DNA, 13 bp, Artificial Sequence
  Oligonucleotide for detection of SNP TSC0015178
caacacgttaata

SEQ ID NO: 55669 - DNA, 13 bp, Artificial Sequence
  Oligonucleotide for detection of SNP TSC0015178
tagtatgttgatg

SEQ ID NO: 55670 - DNA, 13 bp, Artificial Sequence
  Oligonucleotide for detection of SNP TSC0015178
catcaacatacta

SEQ ID NO: 55671 - DNA, 13 bp, Artificial Sequence
  Oligonucleotide for detection of SNP TSC0015178
tagtattttgatg

SEQ ID NO: 55672 - DNA, 13 bp, Artificial Sequence
  Oligonucleotide for detection of SNP TSC0015178
catcaaaatacta

SEQ ID NO: 55673 - DNA, 13 bp, Artificial Sequence
  Oligonucleotide for detection of SNP TSC0015178
tagtacgttgatg

SEQ ID NO: 55674 - DNA, 13 bp, Artificial Sequence
  Oligonucleotide for detection of SNP TSC0015178
catcaacgtacta

SEQ ID NO: 55675 - DNA, 13 bp, Artificial Sequence
  Oligonucleotide for detection of SNP TSC0015179
gtttgagatgtga

SEQ ID NO: 55676 - DNA, 13 bp, Artificial Sequence
  Oligonucleotide for detection of SNP TSC0015179
tcacatctcaaac

SEQ ID NO: 55677 - DNA, 13 bp, Artificial Sequence
  Oligonucleotide for detection of SNP TSC0015179
gtttgatatgtga

SEQ ID NO: 55678 - DNA, 13 bp, Artificial Sequence
  Oligonucleotide for detection of SNP TSC0015179
tcacatatcaaac

SEQ ID NO: 55679 - DNA, 13 bp, Artificial Sequence
  Oligonucleotide for detection of SNP TSC0015179
gtttgagacgtga

SEQ ID NO: 55680 - DNA, 13 bp, Artificial Sequence
  Oligonucleotide for detection of SNP TSC0015179
tcacgtctcaaac

SEQ ID NO: 55681 - DNA, 13 bp, Artificial Sequence
  Oligonucleotide for detection of SNP TSC0015179
gtttgatacgtga

SEQ ID NO: 55682 - DNA, 13 bp, Artificial Sequence
  Oligonucleotide for detection of SNP TSC0015179
tcacgtatcaaac

SEQ ID NO: 55683 - DNA, 13 bp, Artificial Sequence
  Oligonucleotide for detection of SNP TSC0015179
ttatgttttaggy

SEQ ID NO: 55684 - DNA, 13 bp, Artificial Sequence
  Oligonucleotide for detection of SNP TSC0015179
rcctaaaacataa

SEQ ID NO: 55685 - DNA, 13 bp, Artificial Sequence
  Oligonucleotide for detection of SNP TSC0015179
ttatgtattaggy

SEQ ID NO: 55686 - DNA, 13 bp, Artificial Sequence
  Oligonucleotide for detection of SNP TSC0015179
rcctaatacataa

SEQ ID NO: 55687 - DNA, 13 bp, Artificial Sequence
  Oligonucleotide for detection of SNP TSC0015179
ttacgttttaggy

SEQ ID NO: 55688 - DNA, 13 bp, Artificial Sequence
  Oligonucleotide for detection of SNP TSC0015179
rcctaaaacgtaa

SEQ ID NO: 55689 - DNA, 13 bp, Artificial Sequence
  Oligonucleotide for detection of SNP TSC0015179
ttacgtattaggy

SEQ ID NO: 55690 - DNA, 13 bp, Artificial Sequence
  Oligonucleotide for detection of SNP TSC0015179
rcctaatacgtaa

SEQ ID NO: 55691 - DNA, 13 bp, Artificial Sequence
  Oligonucleotide for detection of SNP TSC0015180
ttgagatgtgata

SEQ ID NO: 55692 - DNA, 13 bp, Artificial Sequence
  Oligonucleotide for detection of SNP TSC0015180
tatcacatctcaa

SEQ ID NO: 55693 - DNA, 13 bp, Artificial Sequence
  Oligonucleotide for detection of SNP TSC0015180
ttgagacgtgata

SEQ ID NO: 55694 - DNA, 13 bp, Artificial Sequence
  Oligonucleotide for detection of SNP TSC0015180
tatcacgtctcaa

SEQ ID NO: 55695 - DNA, 13 bp, Artificial Sequence
  Oligonucleotide for detection of SNP TSC0015180
tgttatgttttag

SEQ ID NO: 55696 - DNA, 13 bp, Artificial Sequence
  Oligonucleotide for detection of SNP TSC0015180
ctaaaacataaca

SEQ ID NO: 55697 - DNA, 13 bp, Artificial Sequence
  Oligonucleotide for detection of SNP TSC0015180
tgttatattttag

SEQ ID NO: 55698 - DNA, 13 bp, Artificial Sequence
  Oligonucleotide for detection of SNP TSC0015180
ctaaaatataaca

SEQ ID NO: 55699 - DNA, 13 bp, Artificial Sequence
  Oligonucleotide for detection of SNP TSC0015180
tgttacgttttag

SEQ ID NO: 55700 - DNA, 13 bp, Artificial Sequence
  Oligonucleotide for detection of SNP TSC0015180
ctaaaacgtaaca

SEQ ID NO: 55701 - DNA, 13 bp, Artificial Sequence
  Oligonucleotide for detection of SNP TSC0015181
taaatggtattty

SEQ ID NO: 55702 - DNA, 13 bp, Artificial Sequence
  Oligonucleotide for detection of SNP TSC0015181
raaataccattta

SEQ ID NO: 55703 - DNA, 13 bp, Artificial Sequence
  Oligonucleotide for detection of SNP TSC0015181
taaatgatattty

SEQ ID NO: 55704 - DNA, 13 bp, Artificial Sequence
  Oligonucleotide for detection of SNP TSC0015181
raaatatcattta

SEQ ID NO: 55705 - DNA, 13 bp, Artificial Sequence
  Oligonucleotide for detection of SNP TSC0015182
gtatatatatgtt

SEQ ID NO: 55706 - DNA, 13 bp, Artificial Sequence
  Oligonucleotide for detection of SNP TSC0015182
aacatatatatac

SEQ ID NO: 55707 - DNA, 13 bp, Artificial Sequence
  Oligonucleotide for detection of SNP TSC0015182
gtatatgtatgtt

SEQ ID NO: 55708 - DNA, 13 bp, Artificial Sequence
  Oligonucleotide for detection of SNP TSC0015182
aacatacatatac

SEQ ID NO: 55709 - DNA, 13 bp, Artificial Sequence
  Oligonucleotide for detection of SNP TSC0015182
gtatacgtatgtt

SEQ ID NO: 55710 - DNA, 13 bp, Artificial Sequence
  Oligonucleotide for detection of SNP TSC0015182
aacatacgtatac

SEQ ID NO: 55711 - DNA, 13 bp, Artificial Sequence
  Oligonucleotide for detection of SNP TSC0015182
aatatatgtgtgy

SEQ ID NO: 55712 - DNA, 13 bp, Artificial Sequence
  Oligonucleotide for detection of SNP TSC0015182
rcacacatatatt

SEQ ID NO: 55713 - DNA, 13 bp, Artificial Sequence
  Oligonucleotide for detection of SNP TSC0015182
aatatacgtgtgy

SEQ ID NO: 55714 - DNA, 13 bp, Artificial Sequence
  Oligonucleotide for detection of SNP TSC0015182
rcacacgtatatt

SEQ ID NO: 55715 - DNA, 13 bp, Artificial Sequence
  Oligonucleotide for detection of SNP TSC0015183
attttaatagtaa

SEQ ID NO: 55716 - DNA, 13 bp, Artificial Sequence
  Oligonucleotide for detection of SNP TSC0015183
ttactattaaaat

SEQ ID NO: 55717 - DNA, 13 bp, Artificial Sequence
  Oligonucleotide for detection of SNP TSC0015183
attttagtagtaa

SEQ ID NO: 55718 - DNA, 13 bp, Artificial Sequence
  Oligonucleotide for detection of SNP TSC0015183
ttactactaaaat

SEQ ID NO: 55719 - DNA, 13 bp, Artificial Sequence
  Oligonucleotide for detection of SNP TSC0015184
ataattgttggtt

SEQ ID NO: 55720 - DNA, 13 bp, Artificial Sequence
  Oligonucleotide for detection of SNP TSC0015184
aaccaacaattat

SEQ ID NO: 55721 - DNA, 13 bp, Artificial Sequence
  Oligonucleotide for detection of SNP TSC0015184
ataattattggtt

SEQ ID NO: 55722 - DNA, 13 bp, Artificial Sequence
  Oligonucleotide for detection of SNP TSC0015184
aaccaataattat

SEQ ID NO: 55723 - DNA, 13 bp, Artificial Sequence
  Oligonucleotide for detection of SNP TSC0015185
tgttggattttaa

SEQ ID NO: 55724 - DNA, 13 bp, Artificial Sequence
  Oligonucleotide for detection of SNP TSC0015185
ttaaaatccaaca

SEQ ID NO: 55725 - DNA, 13 bp, Artificial Sequence
  Oligonucleotide for detection of SNP TSC0015185
tgttggtttttaa

SEQ ID NO: 55726 - DNA, 13 bp, Artificial Sequence
  Oligonucleotide for detection of SNP TSC0015185
ttaaaaaccaaca

SEQ ID NO: 55727 - DNA, 13 bp, Artificial Sequence
  Oligonucleotide for detection of SNP TSC0015185
ttaaaatttagta

SEQ ID NO: 55728 - DNA, 13 bp, Artificial Sequence
  Oligonucleotide for detection of SNP TSC0015185
tactaaattttaa

SEQ ID NO: 55729 - DNA, 13 bp, Artificial Sequence
  Oligonucleotide for detection of SNP TSC0015185
ttaaaagttagta

SEQ ID NO: 55730 - DNA, 13 bp, Artificial Sequence
  Oligonucleotide for detection of SNP TSC0015185
tactaacttttaa

SEQ ID NO: 55731 - DNA, 13 bp, Artificial Sequence
  Oligonucleotide for detection of SNP TSC0015186
ttttgtataggaa

SEQ ID NO: 55732 - DNA, 13 bp, Artificial Sequence
  Oligonucleotide for detection of SNP TSC0015186
ttcctatacaaaa

SEQ ID NO: 55733 - DNA, 13 bp, Artificial Sequence
  Oligonucleotide for detection of SNP TSC0015186
ttttgtgtaggaa

SEQ ID NO: 55734 - DNA, 13 bp, Artificial Sequence
  Oligonucleotide for detection of SNP TSC0015186
ttcctacacaaaa

SEQ ID NO: 55735 - DNA, 13 bp, Artificial Sequence
  Oligonucleotide for detection of SNP TSC0015187
tgtttttgggtta

SEQ ID NO: 55736 - DNA, 13 bp, Artificial Sequence
  Oligonucleotide for detection of SNP TSC0015187
taacccaaaaaca

SEQ ID NO: 55737 - DNA, 13 bp, Artificial Sequence
  Oligonucleotide for detection of SNP TSC0015187
tgttttcgggtta

SEQ ID NO: 55738 - DNA, 13 bp, Artificial Sequence
  Oligonucleotide for detection of SNP TSC0015187
taacccgaaaaca

SEQ ID NO: 55739 - DNA, 13 bp, Artificial Sequence
  Oligonucleotide for detection of SNP TSC0015187
tggtttggggata

SEQ ID NO: 55740 - DNA, 13 bp, Artificial Sequence
  Oligonucleotide for detection of SNP TSC0015187
tatccccaaacca

SEQ ID NO: 55741 - DNA, 13 bp, Artificial Sequence
  Oligonucleotide for detection of SNP TSC0015187
tggtttagggata

SEQ ID NO: 55742 - DNA, 13 bp, Artificial Sequence
  Oligonucleotide for detection of SNP TSC0015187
tatccctaaacca

SEQ ID NO: 55743 - DNA, 13 bp, Artificial Sequence
  Oligonucleotide for detection of SNP TSC0015187
tggttcggggata

SEQ ID NO: 55744 - DNA, 13 bp, Artificial Sequence
  Oligonucleotide for detection of SNP TSC0015187
tatccccgaacca

SEQ ID NO: 55745 - DNA, 13 bp, Artificial Sequence
  Oligonucleotide for detection of SNP TSC0015188
gtttagtggttgy

SEQ ID NO: 55746 - DNA, 13 bp, Artificial Sequence
  Oligonucleotide for detection of SNP TSC0015188
rcaaccactaaac

SEQ ID NO: 55747 - DNA, 13 bp, Artificial Sequence
  Oligonucleotide for detection of SNP TSC0015188
gtttagcggttgy

SEQ ID NO: 55748 - DNA, 13 bp, Artificial Sequence
  Oligonucleotide for detection of SNP TSC0015188
rcaaccgctaaac

SEQ ID NO: 55749 - DNA, 13 bp, Artificial Sequence
  Oligonucleotide for detection of SNP TSC0015188
gtagttgttaagy

SEQ ID NO: 55750 - DNA, 13 bp, Artificial Sequence
  Oligonucleotide for detection of SNP TSC0015188
rcttaacaactac

SEQ ID NO: 55751 - DNA, 13 bp, Artificial Sequence
  Oligonucleotide for detection of SNP TSC0015188
gtagttattaagy

SEQ ID NO: 55752 - DNA, 13 bp, Artificial Sequence
  Oligonucleotide for detection of SNP TSC0015188
rcttaataactac

SEQ ID NO: 55753 - DNA, 13 bp, Artificial Sequence
  Oligonucleotide for detection of SNP TSC0015188
gtagtcgttaagy

SEQ ID NO: 55754 - DNA, 13 bp, Artificial Sequence
  Oligonucleotide for detection of SNP TSC0015188
rcttaacgactac

SEQ ID NO: 55755 - DNA, 13 bp, Artificial Sequence
  Oligonucleotide for detection of SNP TSC0015189
tggaaggatttaa

SEQ ID NO: 55756 - DNA, 13 bp, Artificial Sequence
  Oligonucleotide for detection of SNP TSC0015189
ttaaatccttcca

SEQ ID NO: 55757 - DNA, 13 bp, Artificial Sequence
  Oligonucleotide for detection of SNP TSC0015189
tggaagaatttaa

SEQ ID NO: 55758 - DNA, 13 bp, Artificial Sequence
  Oligonucleotide for detection of SNP TSC0015189
ttaaattcttcca

SEQ ID NO: 55759 - DNA, 13 bp, Artificial Sequence
  Oligonucleotide for detection of SNP TSC0015190
atagagagtattt

SEQ ID NO: 55760 - DNA, 13 bp, Artificial Sequence
  Oligonucleotide for detection of SNP TSC0015190
aaatactctctat

SEQ ID NO: 55761 - DNA, 13 bp, Artificial Sequence
  Oligonucleotide for detection of SNP TSC0015190
atagagggtattt

SEQ ID NO: 55762 - DNA, 13 bp, Artificial Sequence
  Oligonucleotide for detection of SNP TSC0015190
aaataccctctat

SEQ ID NO: 55763 - DNA, 13 bp, Artificial Sequence
  Oligonucleotide for detection of SNP TSC0015193
agtgagattttat

SEQ ID NO: 55764 - DNA, 13 bp, Artificial Sequence
  Oligonucleotide for detection of SNP TSC0015193
ataaaatctcact

SEQ ID NO: 55765 - DNA, 13 bp, Artificial Sequence
  Oligonucleotide for detection of SNP TSC0015193
agtgagtttttat

SEQ ID NO: 55766 - DNA, 13 bp, Artificial Sequence
  Oligonucleotide for detection of SNP TSC0015193
ataaaaactcact

SEQ ID NO: 55767 - DNA, 13 bp, Artificial Sequence
  Oligonucleotide for detection of SNP TSC0015193
agcgagattttat

SEQ ID NO: 55768 - DNA, 13 bp, Artificial Sequence
  Oligonucleotide for detection of SNP TSC0015193
ataaaatctcgct

SEQ ID NO: 55769 - DNA, 13 bp, Artificial Sequence
  Oligonucleotide for detection of SNP TSC0015193
agcgagtttttat

SEQ ID NO: 55770 - DNA, 13 bp, Artificial Sequence
  Oligonucleotide for detection of SNP TSC0015193
ataaaaactcgct

SEQ ID NO: 55771 - DNA, 13 bp, Artificial Sequence
  Oligonucleotide for detection of SNP TSC0015193
atggagttttgtt

SEQ ID NO: 55772 - DNA, 13 bp, Artificial Sequence
  Oligonucleotide for detection of SNP TSC0015193
aacaaaactccat

SEQ ID NO: 55773 - DNA, 13 bp, Artificial Sequence
  Oligonucleotide for detection of SNP TSC0015193
atggagatttgtt

SEQ ID NO: 55774 - DNA, 13 bp, Artificial Sequence
  Oligonucleotide for detection of SNP TSC0015193
aacaaatctccat

SEQ ID NO: 55775 - DNA, 13 bp, Artificial Sequence
  Oligonucleotide for detection of SNP TSC0015193
atggagtttcgtt

SEQ ID NO: 55776 - DNA, 13 bp, Artificial Sequence
  Oligonucleotide for detection of SNP TSC0015193
aacgaaactccat

SEQ ID NO: 55777 - DNA, 13 bp, Artificial Sequence
  Oligonucleotide for detection of SNP TSC0015193
atggagattcgtt

SEQ ID NO: 55778 - DNA, 13 bp, Artificial Sequence
  Oligonucleotide for detection of SNP TSC0015193
aacgaatctccat

SEQ ID NO: 55779 - DNA, 13 bp, Artificial Sequence
  Oligonucleotide for detection of SNP TSC0015194
agtaatgttaaaa

SEQ ID NO: 55780 - DNA, 13 bp, Artificial Sequence
  Oligonucleotide for detection of SNP TSC0015194
ttttaacattact

SEQ ID NO: 55781 - DNA, 13 bp, Artificial Sequence
  Oligonucleotide for detection of SNP TSC0015194
agtaattttaaaa

SEQ ID NO: 55782 - DNA, 13 bp, Artificial Sequence
  Oligonucleotide for detection of SNP TSC0015194
ttttaaaattact

SEQ ID NO: 55783 - DNA, 13 bp, Artificial Sequence
  Oligonucleotide for detection of SNP TSC0015194
ttttgatattgtt

SEQ ID NO: 55784 - DNA, 13 bp, Artificial Sequence
  Oligonucleotide for detection of SNP TSC0015194
aacaatatcaaaa

SEQ ID NO: 55785 - DNA, 13 bp, Artificial Sequence
  Oligonucleotide for detection of SNP TSC0015194
ttttgaaattgtt

SEQ ID NO: 55786 - DNA, 13 bp, Artificial Sequence
  Oligonucleotide for detection of SNP TSC0015194
aacaatttcaaaa

SEQ ID NO: 55787 - DNA, 13 bp, Artificial Sequence
  Oligonucleotide for detection of SNP TSC0015197
taagagtggaaga

SEQ ID NO: 55788 - DNA, 13 bp, Artificial Sequence
  Oligonucleotide for detection of SNP TSC0015197
tcttccactctta

SEQ ID NO: 55789 - DNA, 13 bp, Artificial Sequence
  Oligonucleotide for detection of SNP TSC0015197
taagagaggaaga

SEQ ID NO: 55790 - DNA, 13 bp, Artificial Sequence
  Oligonucleotide for detection of SNP TSC0015197
tcttcctctctta

SEQ ID NO: 55791 - DNA, 13 bp, Artificial Sequence
  Oligonucleotide for detection of SNP TSC0015197
taagagcggaaga

SEQ ID NO: 55792 - DNA, 13 bp, Artificial Sequence
  Oligonucleotide for detection of SNP TSC0015197
tcttccgctctta

SEQ ID NO: 55793 - DNA, 13 bp, Artificial Sequence
  Oligonucleotide for detection of SNP TSC0015198
tataaataaatgg

SEQ ID NO: 55794 - DNA, 13 bp, Artificial Sequence
  Oligonucleotide for detection of SNP TSC0015198
ccatttatttata

SEQ ID NO: 55795 - DNA, 13 bp, Artificial Sequence
  Oligonucleotide for detection of SNP TSC0015198
tataaaaaaatgg

SEQ ID NO: 55796 - DNA, 13 bp, Artificial Sequence
  Oligonucleotide for detection of SNP TSC0015198
ccatttttttata

SEQ ID NO: 55797 - DNA, 13 bp, Artificial Sequence
  Oligonucleotide for detection of SNP TSC0015199
tttgaagggagta

SEQ ID NO: 55798 - DNA, 13 bp, Artificial Sequence
  Oligonucleotide for detection of SNP TSC0015199
tactcccttcaaa

SEQ ID NO: 55799 - DNA, 13 bp, Artificial Sequence
  Oligonucleotide for detection of SNP TSC0015199
tttgaaaggagta

SEQ ID NO: 55800 - DNA, 13 bp, Artificial Sequence
  Oligonucleotide for detection of SNP TSC0015199
tactcctttcaaa

SEQ ID NO: 55801 - DNA, 13 bp, Artificial Sequence
  Oligonucleotide for detection of SNP TSC0015200
tttgttttaattg

SEQ ID NO: 55802 - DNA, 13 bp, Artificial Sequence
  Oligonucleotide for detection of SNP TSC0015200
caattaaaacaaa

SEQ ID NO: 55803 - DNA, 13 bp, Artificial Sequence
  Oligonucleotide for detection of SNP TSC0015200
tttgttgtaattg

SEQ ID NO: 55804 - DNA, 13 bp, Artificial Sequence
  Oligonucleotide for detection of SNP TSC0015200
caattacaacaaa

SEQ ID NO: 55805 - DNA, 13 bp, Artificial Sequence
  Oligonucleotide for detection of SNP TSC0015200
ttcgttttaattg

SEQ ID NO: 55806 - DNA, 13 bp, Artificial Sequence
  Oligonucleotide for detection of SNP TSC0015200
caattaaaacgaa

SEQ ID NO: 55807 - DNA, 13 bp, Artificial Sequence
  Oligonucleotide for detection of SNP TSC0015200
ttcgttgtaattg

SEQ ID NO: 55808 - DNA, 13 bp, Artificial Sequence
  Oligonucleotide for detection of SNP TSC0015200
caattacaacgaa

SEQ ID NO: 55809 - DNA, 13 bp, Artificial Sequence
  Oligonucleotide for detection of SNP TSC0015200
taattggaatgag

SEQ ID NO: 55810 - DNA, 13 bp, Artificial Sequence
  Oligonucleotide for detection of SNP TSC0015200
ctcattccaatta

SEQ ID NO: 55811 - DNA, 13 bp, Artificial Sequence
  Oligonucleotide for detection of SNP TSC0015200
taattgtaatgag

SEQ ID NO: 55812 - DNA, 13 bp, Artificial Sequence
  Oligonucleotide for detection of SNP TSC0015200
ctcattacaatta

SEQ ID NO: 55813 - DNA, 13 bp, Artificial Sequence
  Oligonucleotide for detection of SNP TSC0015200
taattggaacgag

SEQ ID NO: 55814 - DNA, 13 bp, Artificial Sequence
  Oligonucleotide for detection of SNP TSC0015200
ctcgttccaatta

SEQ ID NO: 55815 - DNA, 13 bp, Artificial Sequence
  Oligonucleotide for detection of SNP TSC0015200
taattgtaacgag

SEQ ID NO: 55816 - DNA, 13 bp, Artificial Sequence
  Oligonucleotide for detection of SNP TSC0015200
ctcgttacaatta

SEQ ID NO: 55817 - DNA, 13 bp, Artificial Sequence
  Oligonucleotide for detection of SNP TSC0015201
ttatgtattttat

SEQ ID NO: 55818 - DNA, 13 bp, Artificial Sequence
  Oligonucleotide for detection of SNP TSC0015201
ataaaatacataa

SEQ ID NO: 55819 - DNA, 13 bp, Artificial Sequence
  Oligonucleotide for detection of SNP TSC0015201
ttatgttttttat

SEQ ID NO: 55820 - DNA, 13 bp, Artificial Sequence
  Oligonucleotide for detection of SNP TSC0015201
ataaaaaacataa

SEQ ID NO: 55821 - DNA, 13 bp, Artificial Sequence
  Oligonucleotide for detection of SNP TSC0015201
ataagatatatgg

SEQ ID NO: 55822 - DNA, 13 bp, Artificial Sequence
  Oligonucleotide for detection of SNP TSC0015201
ccatatatcttat

SEQ ID NO: 55823 - DNA, 13 bp, Artificial Sequence
  Oligonucleotide for detection of SNP TSC0015201
ataagagatatgg

SEQ ID NO: 55824 - DNA, 13 bp, Artificial Sequence
  Oligonucleotide for detection of SNP TSC0015201
ccatatctcttat

SEQ ID NO: 55825 - DNA, 13 bp, Artificial Sequence
  Oligonucleotide for detection of SNP TSC0015202
aaaaaagaaaaag

SEQ ID NO: 55826 - DNA, 13 bp, Artificial Sequence
  Oligonucleotide for detection of SNP TSC0015202
ctttttctttttt

SEQ ID NO: 55827 - DNA, 13 bp, Artificial Sequence
  Oligonucleotide for detection of SNP TSC0015203
gttgaaatgatty

SEQ ID NO: 55828 - DNA, 13 bp, Artificial Sequence
  Oligonucleotide for detection of SNP TSC0015203
raatcatttcaac

SEQ ID NO: 55829 - DNA, 13 bp, Artificial Sequence
  Oligonucleotide for detection of SNP TSC0015203
gttgaagtgatty

SEQ ID NO: 55830 - DNA, 13 bp, Artificial Sequence
  Oligonucleotide for detection of SNP TSC0015203
raatcacttcaac

SEQ ID NO: 55831 - DNA, 13 bp, Artificial Sequence
  Oligonucleotide for detection of SNP TSC0015204
tggggggatgtta

SEQ ID NO: 55832 - DNA, 13 bp, Artificial Sequence
  Oligonucleotide for detection of SNP TSC0015204
taacatcccccca

SEQ ID NO: 55833 - DNA, 13 bp, Artificial Sequence
  Oligonucleotide for detection of SNP TSC0015204
tgggggaatgtta

SEQ ID NO: 55834 - DNA, 13 bp, Artificial Sequence
  Oligonucleotide for detection of SNP TSC0015204
taacattccccca

SEQ ID NO: 55835 - DNA, 13 bp, Artificial Sequence
  Oligonucleotide for detection of SNP TSC0015205
gtaattgaatttt

SEQ ID NO: 55836 - DNA, 13 bp, Artificial Sequence
  Oligonucleotide for detection of SNP TSC0015205
aaaattcaattac

SEQ ID NO: 55837 - DNA, 13 bp, Artificial Sequence
  Oligonucleotide for detection of SNP TSC0015205
gtaatttaatttt

SEQ ID NO: 55838 - DNA, 13 bp, Artificial Sequence
  Oligonucleotide for detection of SNP TSC0015205
aaaattaaattac

SEQ ID NO: 55839 - DNA, 13 bp, Artificial Sequence
  Oligonucleotide for detection of SNP TSC0015205
gtaatcgaatttt

SEQ ID NO: 55840 - DNA, 13 bp, Artificial Sequence
  Oligonucleotide for detection of SNP TSC0015205
aaaattcgattac

SEQ ID NO: 55841 - DNA, 13 bp, Artificial Sequence
  Oligonucleotide for detection of SNP TSC0015205
aagatttgattgy

SEQ ID NO: 55842 - DNA, 13 bp, Artificial Sequence
  Oligonucleotide for detection of SNP TSC0015205
rcaatcaaatctt

SEQ ID NO: 55843 - DNA, 13 bp, Artificial Sequence
  Oligonucleotide for detection of SNP TSC0015205
aagattagattgy

SEQ ID NO: 55844 - DNA, 13 bp, Artificial Sequence
  Oligonucleotide for detection of SNP TSC0015205
rcaatctaatctt

SEQ ID NO: 55845 - DNA, 13 bp, Artificial Sequence
  Oligonucleotide for detection of SNP TSC0015205
aagattcgattgy

SEQ ID NO: 55846 - DNA, 13 bp, Artificial Sequence
  Oligonucleotide for detection of SNP TSC0015205
rcaatcgaatctt

SEQ ID NO: 55847 - DNA, 13 bp, Artificial Sequence
  Oligonucleotide for detection of SNP TSC0015209
tgatttatgtagg

SEQ ID NO: 55848 - DNA, 13 bp, Artificial Sequence
  Oligonucleotide for detection of SNP TSC0015209
cctacataaatca

SEQ ID NO: 55849 - DNA, 13 bp, Artificial Sequence
  Oligonucleotide for detection of SNP TSC0015209
tgatttgtgtagg

SEQ ID NO: 55850 - DNA, 13 bp, Artificial Sequence
  Oligonucleotide for detection of SNP TSC0015209
cctacacaaatca

SEQ ID NO: 55851 - DNA, 13 bp, Artificial Sequence
  Oligonucleotide for detection of SNP TSC0015209
tgattcgtgtagg

SEQ ID NO: 55852 - DNA, 13 bp, Artificial Sequence
  Oligonucleotide for detection of SNP TSC0015209
cctacacgaatca

SEQ ID NO: 55853 - DNA, 13 bp, Artificial Sequence
  Oligonucleotide for detection of SNP TSC0015210
gggtataggtaat

SEQ ID NO: 55854 - DNA, 13 bp, Artificial Sequence
  Oligonucleotide for detection of SNP TSC0015210
attacctataccc

SEQ ID NO: 55855 - DNA, 13 bp, Artificial Sequence
  Oligonucleotide for detection of SNP TSC0015210
gggtatgggtaat

SEQ ID NO: 55856 - DNA, 13 bp, Artificial Sequence
  Oligonucleotide for detection of SNP TSC0015210
attacccataccc

SEQ ID NO: 55857 - DNA, 13 bp, Artificial Sequence
  Oligonucleotide for detection of SNP TSC0015210
gggtacgggtaat

SEQ ID NO: 55858 - DNA, 13 bp, Artificial Sequence
  Oligonucleotide for detection of SNP TSC0015210
attacccgtaccc

SEQ ID NO: 55859 - DNA, 13 bp, Artificial Sequence
  Oligonucleotide for detection of SNP TSC0015210
attatttgtgtty

SEQ ID NO: 55860 - DNA, 13 bp, Artificial Sequence
  Oligonucleotide for detection of SNP TSC0015210
raacacaaataat

SEQ ID NO: 55861 - DNA, 13 bp, Artificial Sequence
  Oligonucleotide for detection of SNP TSC0015210
attattcgtgtty

SEQ ID NO: 55862 - DNA, 13 bp, Artificial Sequence
  Oligonucleotide for detection of SNP TSC0015210
raacacgaataat

SEQ ID NO: 55863 - DNA, 13 bp, Artificial Sequence
  Oligonucleotide for detection of SNP TSC0015213
atatttaaaagga

SEQ ID NO: 55864 - DNA, 13 bp, Artificial Sequence
  Oligonucleotide for detection of SNP TSC0015213
tccttttaaatat

SEQ ID NO: 55865 - DNA, 13 bp, Artificial Sequence
  Oligonucleotide for detection of SNP TSC0015213
atatttgaaagga

SEQ ID NO: 55866 - DNA, 13 bp, Artificial Sequence
  Oligonucleotide for detection of SNP TSC0015213
tcctttcaaatat

SEQ ID NO: 55867 - DNA, 13 bp, Artificial Sequence
  Oligonucleotide for detection of SNP TSC0015213
atattcgaaagga

SEQ ID NO: 55868 - DNA, 13 bp, Artificial Sequence
  Oligonucleotide for detection of SNP TSC0015213
tcctttcgaatat

SEQ ID NO: 55869 - DNA, 13 bp, Artificial Sequence
  Oligonucleotide for detection of SNP TSC0015213
tttttttgaatat

SEQ ID NO: 55870 - DNA, 13 bp, Artificial Sequence
  Oligonucleotide for detection of SNP TSC0015213
atattcaaaaaaa

SEQ ID NO: 55871 - DNA, 13 bp, Artificial Sequence
  Oligonucleotide for detection of SNP TSC0015213
ttttttcgaatat

SEQ ID NO: 55872 - DNA, 13 bp, Artificial Sequence
  Oligonucleotide for detection of SNP TSC0015213
atattcgaaaaaa

SEQ ID NO: 55873 - DNA, 13 bp, Artificial Sequence
  Oligonucleotide for detection of SNP TSC0015214
agtttatggtttg

SEQ ID NO: 55874 - DNA, 13 bp, Artificial Sequence
  Oligonucleotide for detection of SNP TSC0015214
caaaccataaact

SEQ ID NO: 55875 - DNA, 13 bp, Artificial Sequence
  Oligonucleotide for detection of SNP TSC0015214
agtttacggtttg

SEQ ID NO: 55876 - DNA, 13 bp, Artificial Sequence
  Oligonucleotide for detection of SNP TSC0015214
caaaccgtaaact

SEQ ID NO: 55877 - DNA, 13 bp, Artificial Sequence
  Oligonucleotide for detection of SNP TSC0015214
taagttgtagatt

SEQ ID NO: 55878 - DNA, 13 bp, Artificial Sequence
  Oligonucleotide for detection of SNP TSC0015214
aatctacaactta

SEQ ID NO: 55879 - DNA, 13 bp, Artificial Sequence
  Oligonucleotide for detection of SNP TSC0015214
taagttatagatt

SEQ ID NO: 55880 - DNA, 13 bp, Artificial Sequence
  Oligonucleotide for detection of SNP TSC0015214
aatctataactta

SEQ ID NO: 55881 - DNA, 13 bp, Artificial Sequence
  Oligonucleotide for detection of SNP TSC0015214
taagtcgtagatt

SEQ ID NO: 55882 - DNA, 13 bp, Artificial Sequence
  Oligonucleotide for detection of SNP TSC0015214
aatctacgactta

SEQ ID NO: 55883 - DNA, 13 bp, Artificial Sequence
  Oligonucleotide for detection of SNP TSC0015217
gttttttgattty

SEQ ID NO: 55884 - DNA, 13 bp, Artificial Sequence
  Oligonucleotide for detection of SNP TSC0015217
raaatcaaaaaac

SEQ ID NO: 55885 - DNA, 13 bp, Artificial Sequence
  Oligonucleotide for detection of SNP TSC0015217
gtttttcgattty

SEQ ID NO: 55886 - DNA, 13 bp, Artificial Sequence
  Oligonucleotide for detection of SNP TSC0015217
raaatcgaaaaac

SEQ ID NO: 55887 - DNA, 13 bp, Artificial Sequence
  Oligonucleotide for detection of SNP TSC0015217
ggaattggaaaay

SEQ ID NO: 55888 - DNA, 13 bp, Artificial Sequence
  Oligonucleotide for detection of SNP TSC0015217
rttttccaattcc

SEQ ID NO: 55889 - DNA, 13 bp, Artificial Sequence
  Oligonucleotide for detection of SNP TSC0015217
ggaattagaaaay

SEQ ID NO: 55890 - DNA, 13 bp, Artificial Sequence
  Oligonucleotide for detection of SNP TSC0015217
rttttctaattcc

SEQ ID NO: 55891 - DNA, 13 bp, Artificial Sequence
  Oligonucleotide for detection of SNP TSC0015217
ggaatcggaaaay

SEQ ID NO: 55892 - DNA, 13 bp, Artificial Sequence
  Oligonucleotide for detection of SNP TSC0015217
rttttccgattcc

SEQ ID NO: 55893 - DNA, 13 bp, Artificial Sequence
  Oligonucleotide for detection of SNP TSC0015218
ggaagtagaaaty

SEQ ID NO: 55894 - DNA, 13 bp, Artificial Sequence
  Oligonucleotide for detection of SNP TSC0015218
ratttctacttcc

SEQ ID NO: 55895 - DNA, 13 bp, Artificial Sequence
  Oligonucleotide for detection of SNP TSC0015218
ggaagtggaaaty

SEQ ID NO: 55896 - DNA, 13 bp, Artificial Sequence
  Oligonucleotide for detection of SNP TSC0015218
ratttccacttcc

SEQ ID NO: 55897 - DNA, 13 bp, Artificial Sequence
  Oligonucleotide for detection of SNP TSC0015219
ttgtgatgttttt

SEQ ID NO: 55898 - DNA, 13 bp, Artificial Sequence
  Oligonucleotide for detection of SNP TSC0015219
aaaaacatcacaa

SEQ ID NO: 55899 - DNA, 13 bp, Artificial Sequence
  Oligonucleotide for detection of SNP TSC0015219
ttgtgacgttttt

SEQ ID NO: 55900 - DNA, 13 bp, Artificial Sequence
  Oligonucleotide for detection of SNP TSC0015219
aaaaacgtcacaa

SEQ ID NO: 55901 - DNA, 13 bp, Artificial Sequence
  Oligonucleotide for detection of SNP TSC0015219
agaagtgttatag

SEQ ID NO: 55902 - DNA, 13 bp, Artificial Sequence
  Oligonucleotide for detection of SNP TSC0015219
ctataacacttct

SEQ ID NO: 55903 - DNA, 13 bp, Artificial Sequence
  Oligonucleotide for detection of SNP TSC0015219
agaagtattatag

SEQ ID NO: 55904 - DNA, 13 bp, Artificial Sequence
  Oligonucleotide for detection of SNP TSC0015219
ctataatacttct

SEQ ID NO: 55905 - DNA, 13 bp, Artificial Sequence
  Oligonucleotide for detection of SNP TSC0015219
agaagcgttatag

SEQ ID NO: 55906 - DNA, 13 bp, Artificial Sequence
  Oligonucleotide for detection of SNP TSC0015219
ctataacgcttct

SEQ ID NO: 55907 - DNA, 13 bp, Artificial Sequence
  Oligonucleotide for detection of SNP TSC0015220
ttatttatatgtt

SEQ ID NO: 55908 - DNA, 13 bp, Artificial Sequence
  Oligonucleotide for detection of SNP TSC0015220
aacatataaataa

SEQ ID NO: 55909 - DNA, 13 bp, Artificial Sequence
  Oligonucleotide for detection of SNP TSC0015220
ttatttttatgtt

SEQ ID NO: 55910 - DNA, 13 bp, Artificial Sequence
  Oligonucleotide for detection of SNP TSC0015220
aacataaaaataa

SEQ ID NO: 55911 - DNA, 13 bp, Artificial Sequence
  Oligonucleotide for detection of SNP TSC0015220
agtatgtaaatag

SEQ ID NO: 55912 - DNA, 13 bp, Artificial Sequence
  Oligonucleotide for detection of SNP TSC0015220
ctatttacatact

SEQ ID NO: 55913 - DNA, 13 bp, Artificial Sequence
  Oligonucleotide for detection of SNP TSC0015220
agtatgaaaatag

SEQ ID NO: 55914 - DNA, 13 bp, Artificial Sequence
  Oligonucleotide for detection of SNP TSC0015220
ctattttcatact

SEQ ID NO: 55915 - DNA, 13 bp, Artificial Sequence
  Oligonucleotide for detection of SNP TSC0015221
gtggggtgaggag

SEQ ID NO: 55916 - DNA, 13 bp, Artificial Sequence
  Oligonucleotide for detection of SNP TSC0015221
ctcctcaccccac

SEQ ID NO: 55917 - DNA, 13 bp, Artificial Sequence
  Oligonucleotide for detection of SNP TSC0015221
gtggggcgaggag

SEQ ID NO: 55918 - DNA, 13 bp, Artificial Sequence
  Oligonucleotide for detection of SNP TSC0015221
ctcctcgccccac

SEQ ID NO: 55919 - DNA, 13 bp, Artificial Sequence
  Oligonucleotide for detection of SNP TSC0015221
tttttcgttttay

SEQ ID NO: 55920 - DNA, 13 bp, Artificial Sequence
  Oligonucleotide for detection of SNP TSC0015221
rtaaaacgaaaaa

SEQ ID NO: 55921 - DNA, 13 bp, Artificial Sequence
  Oligonucleotide for detection of SNP TSC0015223
agaaatagttggt

SEQ ID NO: 55922 - DNA, 13 bp, Artificial Sequence
  Oligonucleotide for detection of SNP TSC0015223
accaactatttct

SEQ ID NO: 55923 - DNA, 13 bp, Artificial Sequence
  Oligonucleotide for detection of SNP TSC0015223
agaaatggttggt

SEQ ID NO: 55924 - DNA, 13 bp, Artificial Sequence
  Oligonucleotide for detection of SNP TSC0015223
accaaccatttct

SEQ ID NO: 55925 - DNA, 13 bp, Artificial Sequence
  Oligonucleotide for detection of SNP TSC0015223
agaaacggttggt

SEQ ID NO: 55926 - DNA, 13 bp, Artificial Sequence
  Oligonucleotide for detection of SNP TSC0015223
accaaccgtttct

SEQ ID NO: 55927 - DNA, 13 bp, Artificial Sequence
  Oligonucleotide for detection of SNP TSC0015223
attagttgttttt

SEQ ID NO: 55928 - DNA, 13 bp, Artificial Sequence
  Oligonucleotide for detection of SNP TSC0015223
aaaaacaactaat

SEQ ID NO: 55929 - DNA, 13 bp, Artificial Sequence
  Oligonucleotide for detection of SNP TSC0015223
attagtcgttttt

SEQ ID NO: 55930 - DNA, 13 bp, Artificial Sequence
  Oligonucleotide for detection of SNP TSC0015223
aaaaacgactaat

SEQ ID NO: 55931 - DNA, 13 bp, Artificial Sequence
  Oligonucleotide for detection of SNP TSC0015224
agttttatattgt

SEQ ID NO: 55932 - DNA, 13 bp, Artificial Sequence
  Oligonucleotide for detection of SNP TSC0015224
acaatataaaact

SEQ ID NO: 55933 - DNA, 13 bp, Artificial Sequence
  Oligonucleotide for detection of SNP TSC0015224
agttttgtattgt

SEQ ID NO: 55934 - DNA, 13 bp, Artificial Sequence
  Oligonucleotide for detection of SNP TSC0015224
acaatacaaaact

SEQ ID NO: 55935 - DNA, 13 bp, Artificial Sequence
  Oligonucleotide for detection of SNP TSC0015225
taatatagtttty

SEQ ID NO: 55936 - DNA, 13 bp, Artificial Sequence
  Oligonucleotide for detection of SNP TSC0015225
raaaactatatta

SEQ ID NO: 55937 - DNA, 13 bp, Artificial Sequence
  Oligonucleotide for detection of SNP TSC0015225
taatattgtttty

SEQ ID NO: 55938 - DNA, 13 bp, Artificial Sequence
  Oligonucleotide for detection of SNP TSC0015225
raaaacaatatta

SEQ ID NO: 55939 - DNA, 13 bp, Artificial Sequence
  Oligonucleotide for detection of SNP TSC0015225
taatatcgtttty

SEQ ID NO: 55940 - DNA, 13 bp, Artificial Sequence
  Oligonucleotide for detection of SNP TSC0015225
raaaacgatatta

SEQ ID NO: 55941 - DNA, 13 bp, Artificial Sequence
  Oligonucleotide for detection of SNP TSC0015225
ggaggttatgtta

SEQ ID NO: 55942 - DNA, 13 bp, Artificial Sequence
  Oligonucleotide for detection of SNP TSC0015225
taacataacctcc

SEQ ID NO: 55943 - DNA, 13 bp, Artificial Sequence
  Oligonucleotide for detection of SNP TSC0015225
ggaggtgatgtta

SEQ ID NO: 55944 - DNA, 13 bp, Artificial Sequence
  Oligonucleotide for detection of SNP TSC0015225
taacatcacctcc

SEQ ID NO: 55945 - DNA, 13 bp, Artificial Sequence
  Oligonucleotide for detection of SNP TSC0015225
ggaggcgatgtta

SEQ ID NO: 55946 - DNA, 13 bp, Artificial Sequence
  Oligonucleotide for detection of SNP TSC0015225
taacatcgcctcc

SEQ ID NO: 55947 - DNA, 13 bp, Artificial Sequence
  Oligonucleotide for detection of SNP TSC0015227
gatttatgtatat

SEQ ID NO: 55948 - DNA, 13 bp, Artificial Sequence
  Oligonucleotide for detection of SNP TSC0015227
atatacataaatc

SEQ ID NO: 55949 - DNA, 13 bp, Artificial Sequence
  Oligonucleotide for detection of SNP TSC0015227
gatttacgtatat

SEQ ID NO: 55950 - DNA, 13 bp, Artificial Sequence
  Oligonucleotide for detection of SNP TSC0015227
atatacgtaaatc

SEQ ID NO: 55951 - DNA, 13 bp, Artificial Sequence
  Oligonucleotide for detection of SNP TSC0015227
atatgtgtaagty

SEQ ID NO: 55952 - DNA, 13 bp, Artificial Sequence
  Oligonucleotide for detection of SNP TSC0015227
racttacacatat

SEQ ID NO: 55953 - DNA, 13 bp, Artificial Sequence
  Oligonucleotide for detection of SNP TSC0015227
atatgtataagty

SEQ ID NO: 55954 - DNA, 13 bp, Artificial Sequence
  Oligonucleotide for detection of SNP TSC0015227
racttatacatat

SEQ ID NO: 55955 - DNA, 13 bp, Artificial Sequence
  Oligonucleotide for detection of SNP TSC0015227
atatgcgtaagty

SEQ ID NO: 55956 - DNA, 13 bp, Artificial Sequence
  Oligonucleotide for detection of SNP TSC0015227
racttacgcatat

SEQ ID NO: 55957 - DNA, 13 bp, Artificial Sequence
  Oligonucleotide for detection of SNP TSC0015228
gtgggtagttata

SEQ ID NO: 55958 - DNA, 13 bp, Artificial Sequence
  Oligonucleotide for detection of SNP TSC0015228
tataactacccac

SEQ ID NO: 55959 - DNA, 13 bp, Artificial Sequence
  Oligonucleotide for detection of SNP TSC0015228
gtgggtggttata

SEQ ID NO: 55960 - DNA, 13 bp, Artificial Sequence
  Oligonucleotide for detection of SNP TSC0015228
tataaccacccac

SEQ ID NO: 55961 - DNA, 13 bp, Artificial Sequence
  Oligonucleotide for detection of SNP TSC0015228
gtgggcggttata

SEQ ID NO: 55962 - DNA, 13 bp, Artificial Sequence
  Oligonucleotide for detection of SNP TSC0015228
tataaccgcccac

SEQ ID NO: 55963 - DNA, 13 bp, Artificial Sequence
  Oligonucleotide for detection of SNP TSC0015228
tatggttgtttay

SEQ ID NO: 55964 - DNA, 13 bp, Artificial Sequence
  Oligonucleotide for detection of SNP TSC0015228
rtaaacaaccata

SEQ ID NO: 55965 - DNA, 13 bp, Artificial Sequence
  Oligonucleotide for detection of SNP TSC0015228
tatggtcgtttay

SEQ ID NO: 55966 - DNA, 13 bp, Artificial Sequence
  Oligonucleotide for detection of SNP TSC0015228
rtaaacgaccata

SEQ ID NO: 55967 - DNA, 13 bp, Artificial Sequence
  Oligonucleotide for detection of SNP TSC0015229
tagtgtattggga

SEQ ID NO: 55968 - DNA, 13 bp, Artificial Sequence
  Oligonucleotide for detection of SNP TSC0015229
tcccaatacacta

SEQ ID NO: 55969 - DNA, 13 bp, Artificial Sequence
  Oligonucleotide for detection of SNP TSC0015229
tagtgtgttggga

SEQ ID NO: 55970 - DNA, 13 bp, Artificial Sequence
  Oligonucleotide for detection of SNP TSC0015229
tcccaacacacta

SEQ ID NO: 55971 - DNA, 13 bp, Artificial Sequence
  Oligonucleotide for detection of SNP TSC0015229
tagtgcgttggga

SEQ ID NO: 55972 - DNA, 13 bp, Artificial Sequence
  Oligonucleotide for detection of SNP TSC0015229
tcccaacgcacta

SEQ ID NO: 55973 - DNA, 13 bp, Artificial Sequence
  Oligonucleotide for detection of SNP TSC0015229
ttttaatgtatta

SEQ ID NO: 55974 - DNA, 13 bp, Artificial Sequence
  Oligonucleotide for detection of SNP TSC0015229
taatacattaaaa

SEQ ID NO: 55975 - DNA, 13 bp, Artificial Sequence
  Oligonucleotide for detection of SNP TSC0015229
ttttaacgtatta

SEQ ID NO: 55976 - DNA, 13 bp, Artificial Sequence
  Oligonucleotide for detection of SNP TSC0015229
taatacgttaaaa

SEQ ID NO: 55977 - DNA, 13 bp, Artificial Sequence
  Oligonucleotide for detection of SNP TSC0015230
ttagttagtgtty

SEQ ID NO: 55978 - DNA, 13 bp, Artificial Sequence
  Oligonucleotide for detection of SNP TSC0015230
raacactaactaa

SEQ ID NO: 55979 - DNA, 13 bp, Artificial Sequence
  Oligonucleotide for detection of SNP TSC0015230
ttagttggtgtty

SEQ ID NO: 55980 - DNA, 13 bp, Artificial Sequence
  Oligonucleotide for detection of SNP TSC0015230
raacaccaactaa

SEQ ID NO: 55981 - DNA, 13 bp, Artificial Sequence
  Oligonucleotide for detection of SNP TSC0015230
ttagttagcgtty

SEQ ID NO: 55982 - DNA, 13 bp, Artificial Sequence
  Oligonucleotide for detection of SNP TSC0015230
raacgctaactaa

SEQ ID NO: 55983 - DNA, 13 bp, Artificial Sequence
  Oligonucleotide for detection of SNP TSC0015230
ttagtcggtgtty

SEQ ID NO: 55984 - DNA, 13 bp, Artificial Sequence
  Oligonucleotide for detection of SNP TSC0015230
raacaccgactaa

SEQ ID NO: 55985 - DNA, 13 bp, Artificial Sequence
  Oligonucleotide for detection of SNP TSC0015230
ttagttggcgtty

SEQ ID NO: 55986 - DNA, 13 bp, Artificial Sequence
  Oligonucleotide for detection of SNP TSC0015230
raacgccaactaa

SEQ ID NO: 55987 - DNA, 13 bp, Artificial Sequence
  Oligonucleotide for detection of SNP TSC0015230
ttagtcggcgtty

SEQ ID NO: 55988 - DNA, 13 bp, Artificial Sequence
  Oligonucleotide for detection of SNP TSC0015230
raacgccgactaa

SEQ ID NO: 55989 - DNA, 13 bp, Artificial Sequence
  Oligonucleotide for detection of SNP TSC0015230
gggtgttggttgg

SEQ ID NO: 55990 - DNA, 13 bp, Artificial Sequence
  Oligonucleotide for detection of SNP TSC0015230
ccaaccaacaccc

SEQ ID NO: 55991 - DNA, 13 bp, Artificial Sequence
  Oligonucleotide for detection of SNP TSC0015230
gggcgttggttgg

SEQ ID NO: 55992 - DNA, 13 bp, Artificial Sequence
  Oligonucleotide for detection of SNP TSC0015230
ccaaccaacgccc

SEQ ID NO: 55993 - DNA, 13 bp, Artificial Sequence
  Oligonucleotide for detection of SNP TSC0015230
gggtgtcggttgg

SEQ ID NO: 55994 - DNA, 13 bp, Artificial Sequence
  Oligonucleotide for detection of SNP TSC0015230
ccaaccgacaccc

SEQ ID NO: 55995 - DNA, 13 bp, Artificial Sequence
  Oligonucleotide for detection of SNP TSC0015230
gggcgtcggttgg

SEQ ID NO: 55996 - DNA, 13 bp, Artificial Sequence
  Oligonucleotide for detection of SNP TSC0015230
ccaaccgacgccc

SEQ ID NO: 55997 - DNA, 13 bp, Artificial Sequence
  Oligonucleotide for detection of SNP TSC0015231
attttttgtttat

SEQ ID NO: 55998 - DNA, 13 bp, Artificial Sequence
  Oligonucleotide for detection of SNP TSC0015231
ataaacaaaaaat

SEQ ID NO: 55999 - DNA, 13 bp, Artificial Sequence
  Oligonucleotide for detection of SNP TSC0015231
atttttcgtttat

SEQ ID NO: 56000 - DNA, 13 bp, Artificial Sequence
  Oligonucleotide for detection of SNP TSC0015231
ataaacgaaaaat

SEQ ID NO: 56001 - DNA, 13 bp, Artificial Sequence
  Oligonucleotide for detection of SNP TSC0015231
atgaatgagaggt

SEQ ID NO: 56002 - DNA, 13 bp, Artificial Sequence
  Oligonucleotide for detection of SNP TSC0015231
acctctcattcat

SEQ ID NO: 56003 - DNA, 13 bp, Artificial Sequence
  Oligonucleotide for detection of SNP TSC0015231
atgaataagaggt

SEQ ID NO: 56004 - DNA, 13 bp, Artificial Sequence
  Oligonucleotide for detection of SNP TSC0015231
acctcttattcat

SEQ ID NO: 56005 - DNA, 13 bp, Artificial Sequence
  Oligonucleotide for detection of SNP TSC0015231
atgaacgagaggt

SEQ ID NO: 56006 - DNA, 13 bp, Artificial Sequence
  Oligonucleotide for detection of SNP TSC0015231
acctctcgttcat

SEQ ID NO: 56007 - DNA, 13 bp, Artificial Sequence
  Oligonucleotide for detection of SNP TSC0015232
tggtgatagaggy

SEQ ID NO: 56008 - DNA, 13 bp, Artificial Sequence
  Oligonucleotide for detection of SNP TSC0015232
rcctctatcacca

SEQ ID NO: 56009 - DNA, 13 bp, Artificial Sequence
  Oligonucleotide for detection of SNP TSC0015232
tggtgagagaggy

SEQ ID NO: 56010 - DNA, 13 bp, Artificial Sequence
  Oligonucleotide for detection of SNP TSC0015232
rcctctctcacca

SEQ ID NO: 56011 - DNA, 13 bp, Artificial Sequence
  Oligonucleotide for detection of SNP TSC0015232
gtttttgttatta

SEQ ID NO: 56012 - DNA, 13 bp, Artificial Sequence
  Oligonucleotide for detection of SNP TSC0015232
taataacaaaaac

SEQ ID NO: 56013 - DNA, 13 bp, Artificial Sequence
  Oligonucleotide for detection of SNP TSC0015232
gttttttttatta

SEQ ID NO: 56014 - DNA, 13 bp, Artificial Sequence
  Oligonucleotide for detection of SNP TSC0015232
taataaaaaaaac

SEQ ID NO: 56015 - DNA, 13 bp, Artificial Sequence
  Oligonucleotide for detection of SNP TSC0015233
taagtgtggggty

SEQ ID NO: 56016 - DNA, 13 bp, Artificial Sequence
  Oligonucleotide for detection of SNP TSC0015233
raccccacactta

SEQ ID NO: 56017 - DNA, 13 bp, Artificial Sequence
  Oligonucleotide for detection of SNP TSC0015233
taagtgcggggty

SEQ ID NO: 56018 - DNA, 13 bp, Artificial Sequence
  Oligonucleotide for detection of SNP TSC0015233
raccccgcactta

SEQ ID NO: 56019 - DNA, 13 bp, Artificial Sequence
  Oligonucleotide for detection of SNP TSC0015234
ggatagtatagag

SEQ ID NO: 56020 - DNA, 13 bp, Artificial Sequence
  Oligonucleotide for detection of SNP TSC0015234
ctctatactatcc

SEQ ID NO: 56021 - DNA, 13 bp, Artificial Sequence
  Oligonucleotide for detection of SNP TSC0015234
ggataggatagag

SEQ ID NO: 56022 - DNA, 13 bp, Artificial Sequence
  Oligonucleotide for detection of SNP TSC0015234
ctctatcctatcc

SEQ ID NO: 56023 - DNA, 13 bp, Artificial Sequence
  Oligonucleotide for detection of SNP TSC0015234
ttttgtgttgtty

SEQ ID NO: 56024 - DNA, 13 bp, Artificial Sequence
  Oligonucleotide for detection of SNP TSC0015234
raacaacacaaaa

SEQ ID NO: 56025 - DNA, 13 bp, Artificial Sequence
  Oligonucleotide for detection of SNP TSC0015234
ttttgttttgtty

SEQ ID NO: 56026 - DNA, 13 bp, Artificial Sequence
  Oligonucleotide for detection of SNP TSC0015234
raacaaaacaaaa

SEQ ID NO: 56027 - DNA, 13 bp, Artificial Sequence
  Oligonucleotide for detection of SNP TSC0015235
gaaattttgtatt

SEQ ID NO: 56028 - DNA, 13 bp, Artificial Sequence
  Oligonucleotide for detection of SNP TSC0015235
aatacaaaatttc

SEQ ID NO: 56029 - DNA, 13 bp, Artificial Sequence
  Oligonucleotide for detection of SNP TSC0015235
gaaattgtgtatt

SEQ ID NO: 56030 - DNA, 13 bp, Artificial Sequence
  Oligonucleotide for detection of SNP TSC0015235
aatacacaatttc

SEQ ID NO: 56031 - DNA, 13 bp, Artificial Sequence
  Oligonucleotide for detection of SNP TSC0015235
gaaatcgtgtatt

SEQ ID NO: 56032 - DNA, 13 bp, Artificial Sequence
  Oligonucleotide for detection of SNP TSC0015235
aatacacgatttc

SEQ ID NO: 56033 - DNA, 13 bp, Artificial Sequence
  Oligonucleotide for detection of SNP TSC0015235
agtgtaggattty

SEQ ID NO: 56034 - DNA, 13 bp, Artificial Sequence
  Oligonucleotide for detection of SNP TSC0015235
raaatcctacact

SEQ ID NO: 56035 - DNA, 13 bp, Artificial Sequence
  Oligonucleotide for detection of SNP TSC0015235
agtgtatgattty

SEQ ID NO: 56036 - DNA, 13 bp, Artificial Sequence
  Oligonucleotide for detection of SNP TSC0015235
raaatcatacact

SEQ ID NO: 56037 - DNA, 13 bp, Artificial Sequence
  Oligonucleotide for detection of SNP TSC0015235
agtgtacgattty

SEQ ID NO: 56038 - DNA, 13 bp, Artificial Sequence
  Oligonucleotide for detection of SNP TSC0015235
raaatcgtacact

SEQ ID NO: 56039 - DNA, 13 bp, Artificial Sequence
  Oligonucleotide for detection of SNP TSC0015236
tttgttaatttat

SEQ ID NO: 56040 - DNA, 13 bp, Artificial Sequence
  Oligonucleotide for detection of SNP TSC0015236
ataaattaacaaa

SEQ ID NO: 56041 - DNA, 13 bp, Artificial Sequence
  Oligonucleotide for detection of SNP TSC0015236
tttgttgatttat

SEQ ID NO: 56042 - DNA, 13 bp, Artificial Sequence
  Oligonucleotide for detection of SNP TSC0015236
ataaatcaacaaa

SEQ ID NO: 56043 - DNA, 13 bp, Artificial Sequence
  Oligonucleotide for detection of SNP TSC0015236
tttgtcgatttat

SEQ ID NO: 56044 - DNA, 13 bp, Artificial Sequence
  Oligonucleotide for detection of SNP TSC0015236
ataaatcgacaaa

SEQ ID NO: 56045 - DNA, 13 bp, Artificial Sequence
  Oligonucleotide for detection of SNP TSC0015236
atggattgataga

SEQ ID NO: 56046 - DNA, 13 bp, Artificial Sequence
  Oligonucleotide for detection of SNP TSC0015236
tctatcaatccat

SEQ ID NO: 56047 - DNA, 13 bp, Artificial Sequence
  Oligonucleotide for detection of SNP TSC0015236
atggatcgataga

SEQ ID NO: 56048 - DNA, 13 bp, Artificial Sequence
  Oligonucleotide for detection of SNP TSC0015236
tctatcgatccat

SEQ ID NO: 56049 - DNA, 13 bp, Artificial Sequence
  Oligonucleotide for detection of SNP TSC0015237
tagtagagaggta

SEQ ID NO: 56050 - DNA, 13 bp, Artificial Sequence
  Oligonucleotide for detection of SNP TSC0015237
tacctctctacta

SEQ ID NO: 56051 - DNA, 13 bp, Artificial Sequence
  Oligonucleotide for detection of SNP TSC0015237
tagtagtgaggta

SEQ ID NO: 56052 - DNA, 13 bp, Artificial Sequence
  Oligonucleotide for detection of SNP TSC0015237
tacctcactacta

SEQ ID NO: 56053 - DNA, 13 bp, Artificial Sequence
  Oligonucleotide for detection of SNP TSC0015237
tgtttttttatta

SEQ ID NO: 56054 - DNA, 13 bp, Artificial Sequence
  Oligonucleotide for detection of SNP TSC0015237
taataaaaaaaca

SEQ ID NO: 56055 - DNA, 13 bp, Artificial Sequence
  Oligonucleotide for detection of SNP TSC0015237
tgttttattatta

SEQ ID NO: 56056 - DNA, 13 bp, Artificial Sequence
  Oligonucleotide for detection of SNP TSC0015237
taataataaaaca

SEQ ID NO: 56057 - DNA, 13 bp, Artificial Sequence
  Oligonucleotide for detection of SNP TSC0015240
ttaggtatatgty

SEQ ID NO: 56058 - DNA, 13 bp, Artificial Sequence
  Oligonucleotide for detection of SNP TSC0015240
racatatacctaa

SEQ ID NO: 56059 - DNA, 13 bp, Artificial Sequence
  Oligonucleotide for detection of SNP TSC0015240
ttaggtgtatgty

SEQ ID NO: 56060 - DNA, 13 bp, Artificial Sequence
  Oligonucleotide for detection of SNP TSC0015240
racatacacctaa

SEQ ID NO: 56061 - DNA, 13 bp, Artificial Sequence
  Oligonucleotide for detection of SNP TSC0015240
ttaggcgtatgty

SEQ ID NO: 56062 - DNA, 13 bp, Artificial Sequence
  Oligonucleotide for detection of SNP TSC0015240
racatacgcctaa

SEQ ID NO: 56063 - DNA, 13 bp, Artificial Sequence
  Oligonucleotide for detection of SNP TSC0015240
ggtatgtgtttga

SEQ ID NO: 56064 - DNA, 13 bp, Artificial Sequence
  Oligonucleotide for detection of SNP TSC0015240
tcaaacacatacc

SEQ ID NO: 56065 - DNA, 13 bp, Artificial Sequence
  Oligonucleotide for detection of SNP TSC0015240
ggtatgcgtttga

SEQ ID NO: 56066 - DNA, 13 bp, Artificial Sequence
  Oligonucleotide for detection of SNP TSC0015240
tcaaacgcatacc

SEQ ID NO: 56067 - DNA, 13 bp, Artificial Sequence
  Oligonucleotide for detection of SNP TSC0015245
aggaagattttty

SEQ ID NO: 56068 - DNA, 13 bp, Artificial Sequence
  Oligonucleotide for detection of SNP TSC0015245
raaaaatcttcct

SEQ ID NO: 56069 - DNA, 13 bp, Artificial Sequence
  Oligonucleotide for detection of SNP TSC0015245
aggaaggttttty

SEQ ID NO: 56070 - DNA, 13 bp, Artificial Sequence
  Oligonucleotide for detection of SNP TSC0015245
raaaaaccttcct

SEQ ID NO: 56071 - DNA, 13 bp, Artificial Sequence
  Oligonucleotide for detection of SNP TSC0015246
tagtttggttatt

SEQ ID NO: 56072 - DNA, 13 bp, Artificial Sequence
  Oligonucleotide for detection of SNP TSC0015246
aataaccaaacta

SEQ ID NO: 56073 - DNA, 13 bp, Artificial Sequence
  Oligonucleotide for detection of SNP TSC0015246
aatggtgaaattg

SEQ ID NO: 56074 - DNA, 13 bp, Artificial Sequence
  Oligonucleotide for detection of SNP TSC0015246
caatttcaccatt

SEQ ID NO: 56075 - DNA, 13 bp, Artificial Sequence
  Oligonucleotide for detection of SNP TSC0015246
aatggttaaattg

SEQ ID NO: 56076 - DNA, 13 bp, Artificial Sequence
  Oligonucleotide for detection of SNP TSC0015246
caatttaaccatt

SEQ ID NO: 56077 - DNA, 13 bp, Artificial Sequence
  Oligonucleotide for detection of SNP TSC0015246
aatggcgaaattg

SEQ ID NO: 56078 - DNA, 13 bp, Artificial Sequence
  Oligonucleotide for detection of SNP TSC0015246
caatttcgccatt

SEQ ID NO: 56079 - DNA, 13 bp, Artificial Sequence
  Oligonucleotide for detection of SNP TSC0015248
atttatattaaaa

SEQ ID NO: 56080 - DNA, 13 bp, Artificial Sequence
  Oligonucleotide for detection of SNP TSC0015248
ttttaatataaat

SEQ ID NO: 56081 - DNA, 13 bp, Artificial Sequence
  Oligonucleotide for detection of SNP TSC0015248
atttatgttaaaa

SEQ ID NO: 56082 - DNA, 13 bp, Artificial Sequence
  Oligonucleotide for detection of SNP TSC0015248
ttttaacataaat

SEQ ID NO: 56083 - DNA, 13 bp, Artificial Sequence
  Oligonucleotide for detection of SNP TSC0015249
ttgtgtatttgta

SEQ ID NO: 56084 - DNA, 13 bp, Artificial Sequence
  Oligonucleotide for detection of SNP TSC0015249
tacaaatacacaa

SEQ ID NO: 56085 - DNA, 13 bp, Artificial Sequence
  Oligonucleotide for detection of SNP TSC0015249
ttgtgtgtttgta

SEQ ID NO: 56086 - DNA, 13 bp, Artificial Sequence
  Oligonucleotide for detection of SNP TSC0015249
tacaaacacacaa

SEQ ID NO: 56087 - DNA, 13 bp, Artificial Sequence
  Oligonucleotide for detection of SNP TSC0015249
tcgtgtatttgta

SEQ ID NO: 56088 - DNA, 13 bp, Artificial Sequence
  Oligonucleotide for detection of SNP TSC0015249
tacaaatacacga

SEQ ID NO: 56089 - DNA, 13 bp, Artificial Sequence
  Oligonucleotide for detection of SNP TSC0015249
tcgtgtgtttgta

SEQ ID NO: 56090 - DNA, 13 bp, Artificial Sequence
  Oligonucleotide for detection of SNP TSC0015249
tacaaacacacga

SEQ ID NO: 56091 - DNA, 13 bp, Artificial Sequence
  Oligonucleotide for detection of SNP TSC0015249
ttgtgcgtttgta

SEQ ID NO: 56092 - DNA, 13 bp, Artificial Sequence
  Oligonucleotide for detection of SNP TSC0015249
tacaaacgcacaa

SEQ ID NO: 56093 - DNA, 13 bp, Artificial Sequence
  Oligonucleotide for detection of SNP TSC0015249
tcgtgcgtttgta

SEQ ID NO: 56094 - DNA, 13 bp, Artificial Sequence
  Oligonucleotide for detection of SNP TSC0015249
tacaaacgcacga

SEQ ID NO: 56095 - DNA, 13 bp, Artificial Sequence
  Oligonucleotide for detection of SNP TSC0015249
tataggtgtatga

SEQ ID NO: 56096 - DNA, 13 bp, Artificial Sequence
  Oligonucleotide for detection of SNP TSC0015249
tcatacacctata

SEQ ID NO: 56097 - DNA, 13 bp, Artificial Sequence
  Oligonucleotide for detection of SNP TSC0015249
tataggtgtacga

SEQ ID NO: 56098 - DNA, 13 bp, Artificial Sequence
  Oligonucleotide for detection of SNP TSC0015249
tcgtacacctata

SEQ ID NO: 56099 - DNA, 13 bp, Artificial Sequence
  Oligonucleotide for detection of SNP TSC0015249
tataggcgtatga

SEQ ID NO: 56100 - DNA, 13 bp, Artificial Sequence
  Oligonucleotide for detection of SNP TSC0015249
tcatacgcctata

SEQ ID NO: 56101 - DNA, 13 bp, Artificial Sequence
  Oligonucleotide for detection of SNP TSC0015249
tataggcgtacga

SEQ ID NO: 56102 - DNA, 13 bp, Artificial Sequence
  Oligonucleotide for detection of SNP TSC0015249
tcgtacgcctata

SEQ ID NO: 56103 - DNA, 13 bp, Artificial Sequence
  Oligonucleotide for detection of SNP TSC0015250
ggatgagttaaga

SEQ ID NO: 56104 - DNA, 13 bp, Artificial Sequence
  Oligonucleotide for detection of SNP TSC0015250
tcttaactcatcc

SEQ ID NO: 56105 - DNA, 13 bp, Artificial Sequence
  Oligonucleotide for detection of SNP TSC0015250
ggatgaattaaga

SEQ ID NO: 56106 - DNA, 13 bp, Artificial Sequence
  Oligonucleotide for detection of SNP TSC0015250
tcttaattcatcc

SEQ ID NO: 56107 - DNA, 13 bp, Artificial Sequence
  Oligonucleotide for detection of SNP TSC0015252
tgttgtaatatta

SEQ ID NO: 56108 - DNA, 13 bp, Artificial Sequence
  Oligonucleotide for detection of SNP TSC0015252
taatattacaaca

SEQ ID NO: 56109 - DNA, 13 bp, Artificial Sequence
  Oligonucleotide for detection of SNP TSC0015252
tgttgtgatatta

SEQ ID NO: 56110 - DNA, 13 bp, Artificial Sequence
  Oligonucleotide for detection of SNP TSC0015252
taatatcacaaca

SEQ ID NO: 56111 - DNA, 13 bp, Artificial Sequence
  Oligonucleotide for detection of SNP TSC0015253
gtttgtaagggga

SEQ ID NO: 56112 - DNA, 13 bp, Artificial Sequence
  Oligonucleotide for detection of SNP TSC0015253
tccccttacaaac

SEQ ID NO: 56113 - DNA, 13 bp, Artificial Sequence
  Oligonucleotide for detection of SNP TSC0015253
gtttgtgagggga

SEQ ID NO: 56114 - DNA, 13 bp, Artificial Sequence
  Oligonucleotide for detection of SNP TSC0015253
tcccctcacaaac

SEQ ID NO: 56115 - DNA, 13 bp, Artificial Sequence
  Oligonucleotide for detection of SNP TSC0015253
gtttgcgagggga

SEQ ID NO: 56116 - DNA, 13 bp, Artificial Sequence
  Oligonucleotide for detection of SNP TSC0015253
tcccctcgcaaac

SEQ ID NO: 56117 - DNA, 13 bp, Artificial Sequence
  Oligonucleotide for detection of SNP TSC0015253
tttttttgtaggy

SEQ ID NO: 56118 - DNA, 13 bp, Artificial Sequence
  Oligonucleotide for detection of SNP TSC0015253
rcctacaaaaaaa

SEQ ID NO: 56119 - DNA, 13 bp, Artificial Sequence
  Oligonucleotide for detection of SNP TSC0015253
ttttttcgtaggy

SEQ ID NO: 56120 - DNA, 13 bp, Artificial Sequence
  Oligonucleotide for detection of SNP TSC0015253
rcctacgaaaaaa

SEQ ID NO: 56121 - DNA, 13 bp, Artificial Sequence
  Oligonucleotide for detection of SNP TSC0015256
tgttttatagata

SEQ ID NO: 56122 - DNA, 13 bp, Artificial Sequence
  Oligonucleotide for detection of SNP TSC0015256
tatctataaaaca

SEQ ID NO: 56123 - DNA, 13 bp, Artificial Sequence
  Oligonucleotide for detection of SNP TSC0015256
tgttttgtagata

SEQ ID NO: 56124 - DNA, 13 bp, Artificial Sequence
  Oligonucleotide for detection of SNP TSC0015256
tatctacaaaaca

SEQ ID NO: 56125 - DNA, 13 bp, Artificial Sequence
  Oligonucleotide for detection of SNP TSC0015256
tgtttcgtagata

SEQ ID NO: 56126 - DNA, 13 bp, Artificial Sequence
  Oligonucleotide for detection of SNP TSC0015256
tatctacgaaaca

SEQ ID NO: 56127 - DNA, 13 bp, Artificial Sequence
  Oligonucleotide for detection of SNP TSC0015256
tgtttatggagta

SEQ ID NO: 56128 - DNA, 13 bp, Artificial Sequence
  Oligonucleotide for detection of SNP TSC0015256
tactccataaaca

SEQ ID NO: 56129 - DNA, 13 bp, Artificial Sequence
  Oligonucleotide for detection of SNP TSC0015256
tgtttacggagta

SEQ ID NO: 56130 - DNA, 13 bp, Artificial Sequence
  Oligonucleotide for detection of SNP TSC0015256
tactccgtaaaca

SEQ ID NO: 56131 - DNA, 13 bp, Artificial Sequence
  Oligonucleotide for detection of SNP TSC0015257
gagattttgttta

SEQ ID NO: 56132 - DNA, 13 bp, Artificial Sequence
  Oligonucleotide for detection of SNP TSC0015257
taaacaaaatctc

SEQ ID NO: 56133 - DNA, 13 bp, Artificial Sequence
  Oligonucleotide for detection of SNP TSC0015257
gagattgtgttta

SEQ ID NO: 56134 - DNA, 13 bp, Artificial Sequence
  Oligonucleotide for detection of SNP TSC0015257
taaacacaatctc

SEQ ID NO: 56135 - DNA, 13 bp, Artificial Sequence
  Oligonucleotide for detection of SNP TSC0015257
gagatcgtgttta

SEQ ID NO: 56136 - DNA, 13 bp, Artificial Sequence
  Oligonucleotide for detection of SNP TSC0015257
taaacacgatctc

SEQ ID NO: 56137 - DNA, 13 bp, Artificial Sequence
  Oligonucleotide for detection of SNP TSC0015257
tagatagggttty

SEQ ID NO: 56138 - DNA, 13 bp, Artificial Sequence
  Oligonucleotide for detection of SNP TSC0015257
raaaccctatcta

SEQ ID NO: 56139 - DNA, 13 bp, Artificial Sequence
  Oligonucleotide for detection of SNP TSC0015257
tagatatggttty

SEQ ID NO: 56140 - DNA, 13 bp, Artificial Sequence
  Oligonucleotide for detection of SNP TSC0015257
raaaccatatcta

SEQ ID NO: 56141 - DNA, 13 bp, Artificial Sequence
  Oligonucleotide for detection of SNP TSC0015257
tagatacggttty

SEQ ID NO: 56142 - DNA, 13 bp, Artificial Sequence
  Oligonucleotide for detection of SNP TSC0015257
raaaccgtatcta

SEQ ID NO: 56143 - DNA, 13 bp, Artificial Sequence
  Oligonucleotide for detection of SNP TSC0015260
ggggatattataa

SEQ ID NO: 56144 - DNA, 13 bp, Artificial Sequence
  Oligonucleotide for detection of SNP TSC0015260
ttataatatcccc

SEQ ID NO: 56145 - DNA, 13 bp, Artificial Sequence
  Oligonucleotide for detection of SNP TSC0015260
ggggatgttataa

SEQ ID NO: 56146 - DNA, 13 bp, Artificial Sequence
  Oligonucleotide for detection of SNP TSC0015260
ttataacatcccc

SEQ ID NO: 56147 - DNA, 13 bp, Artificial Sequence
  Oligonucleotide for detection of SNP TSC0015260
ggggacgttataa

SEQ ID NO: 56148 - DNA, 13 bp, Artificial Sequence
  Oligonucleotide for detection of SNP TSC0015260
ttataacgtcccc

SEQ ID NO: 56149 - DNA, 13 bp, Artificial Sequence
  Oligonucleotide for detection of SNP TSC0015260
ttgtgatgtttty

SEQ ID NO: 56150 - DNA, 13 bp, Artificial Sequence
  Oligonucleotide for detection of SNP TSC0015260
raaaacatcacaa

SEQ ID NO: 56151 - DNA, 13 bp, Artificial Sequence
  Oligonucleotide for detection of SNP TSC0015260
ttgtgacgtttty

SEQ ID NO: 56152 - DNA, 13 bp, Artificial Sequence
  Oligonucleotide for detection of SNP TSC0015260
raaaacgtcacaa

SEQ ID NO: 56153 - DNA, 13 bp, Artificial Sequence
  Oligonucleotide for detection of SNP TSC0015261
ttatgatgaagay

SEQ ID NO: 56154 - DNA, 13 bp, Artificial Sequence
  Oligonucleotide for detection of SNP TSC0015261
rtcttcatcataa

SEQ ID NO: 56155 - DNA, 13 bp, Artificial Sequence
  Oligonucleotide for detection of SNP TSC0015261
ttatgacgaagay

SEQ ID NO: 56156 - DNA, 13 bp, Artificial Sequence
  Oligonucleotide for detection of SNP TSC0015261
rtcttcgtcataa

SEQ ID NO: 56157 - DNA, 13 bp, Artificial Sequence
  Oligonucleotide for detection of SNP TSC0015261
gtttttgttataa

SEQ ID NO: 56158 - DNA, 13 bp, Artificial Sequence
  Oligonucleotide for detection of SNP TSC0015261
ttataacaaaaac

SEQ ID NO: 56159 - DNA, 13 bp, Artificial Sequence
  Oligonucleotide for detection of SNP TSC0015261
gtttttattataa

SEQ ID NO: 56160 - DNA, 13 bp, Artificial Sequence
  Oligonucleotide for detection of SNP TSC0015261
ttataataaaaac

SEQ ID NO: 56161 - DNA, 13 bp, Artificial Sequence
  Oligonucleotide for detection of SNP TSC0015261
gttttcgttataa

SEQ ID NO: 56162 - DNA, 13 bp, Artificial Sequence
  Oligonucleotide for detection of SNP TSC0015261
ttataacgaaaac

SEQ ID NO: 56163 - DNA, 13 bp, Artificial Sequence
  Oligonucleotide for detection of SNP TSC0015262
gtggtttgtttay

SEQ ID NO: 56164 - DNA, 13 bp, Artificial Sequence
  Oligonucleotide for detection of SNP TSC0015262
rtaaacaaaccac

SEQ ID NO: 56165 - DNA, 13 bp, Artificial Sequence
  Oligonucleotide for detection of SNP TSC0015262
gtggttcgtttay

SEQ ID NO: 56166 - DNA, 13 bp, Artificial Sequence
  Oligonucleotide for detection of SNP TSC0015262
rtaaacgaaccac

SEQ ID NO: 56167 - DNA, 13 bp, Artificial Sequence
  Oligonucleotide for detection of SNP TSC0015262
gtgaatgagttay

SEQ ID NO: 56168 - DNA, 13 bp, Artificial Sequence
  Oligonucleotide for detection of SNP TSC0015262
rtaactcattcac

SEQ ID NO: 56169 - DNA, 13 bp, Artificial Sequence
  Oligonucleotide for detection of SNP TSC0015262
gtgaataagttay

SEQ ID NO: 56170 - DNA, 13 bp, Artificial Sequence
  Oligonucleotide for detection of SNP TSC0015262
rtaacttattcac

SEQ ID NO: 56171 - DNA, 13 bp, Artificial Sequence
  Oligonucleotide for detection of SNP TSC0015262
gtgaacgagttay

SEQ ID NO: 56172 - DNA, 13 bp, Artificial Sequence
  Oligonucleotide for detection of SNP TSC0015262
rtaactcgttcac

SEQ ID NO: 56173 - DNA, 13 bp, Artificial Sequence
  Oligonucleotide for detection of SNP TSC0015263
taaatagaaaatt

SEQ ID NO: 56174 - DNA, 13 bp, Artificial Sequence
  Oligonucleotide for detection of SNP TSC0015263
aattttctattta

SEQ ID NO: 56175 - DNA, 13 bp, Artificial Sequence
  Oligonucleotide for detection of SNP TSC0015263
aattttgtatttg

SEQ ID NO: 56176 - DNA, 13 bp, Artificial Sequence
  Oligonucleotide for detection of SNP TSC0015263
caaatacaaaatt

SEQ ID NO: 56177 - DNA, 13 bp, Artificial Sequence
  Oligonucleotide for detection of SNP TSC0015263
aattttttatttg

SEQ ID NO: 56178 - DNA, 13 bp, Artificial Sequence
  Oligonucleotide for detection of SNP TSC0015263
caaataaaaaatt

SEQ ID NO: 56179 - DNA, 13 bp, Artificial Sequence
  Oligonucleotide for detection of SNP TSC0015266
aatattaatattt

SEQ ID NO: 56180 - DNA, 13 bp, Artificial Sequence
  Oligonucleotide for detection of SNP TSC0015266
aaatattaatatt

SEQ ID NO: 56181 - DNA, 13 bp, Artificial Sequence
  Oligonucleotide for detection of SNP TSC0015266
aatattgatattt

SEQ ID NO: 56182 - DNA, 13 bp, Artificial Sequence
  Oligonucleotide for detection of SNP TSC0015266
aaatatcaatatt

SEQ ID NO: 56183 - DNA, 13 bp, Artificial Sequence
  Oligonucleotide for detection of SNP TSC0015267
taaggaagggtgg

SEQ ID NO: 56184 - DNA, 13 bp, Artificial Sequence
  Oligonucleotide for detection of SNP TSC0015267
ccacccttcctta

SEQ ID NO: 56185 - DNA, 13 bp, Artificial Sequence
  Oligonucleotide for detection of SNP TSC0015267
taaggatgggtgg

SEQ ID NO: 56186 - DNA, 13 bp, Artificial Sequence
  Oligonucleotide for detection of SNP TSC0015267
ccacccatcctta

SEQ ID NO: 56187 - DNA, 13 bp, Artificial Sequence
  Oligonucleotide for detection of SNP TSC0015267
taaggacgggtgg

SEQ ID NO: 56188 - DNA, 13 bp, Artificial Sequence
  Oligonucleotide for detection of SNP TSC0015267
ccacccgtcctta

SEQ ID NO: 56189 - DNA, 13 bp, Artificial Sequence
  Oligonucleotide for detection of SNP TSC0015268
ttgtggggggatg

SEQ ID NO: 56190 - DNA, 13 bp, Artificial Sequence
  Oligonucleotide for detection of SNP TSC0015268
catccccccacaa

SEQ ID NO: 56191 - DNA, 13 bp, Artificial Sequence
  Oligonucleotide for detection of SNP TSC0015268
ttgtggtgggatg

SEQ ID NO: 56192 - DNA, 13 bp, Artificial Sequence
  Oligonucleotide for detection of SNP TSC0015268
catcccaccacaa

SEQ ID NO: 56193 - DNA, 13 bp, Artificial Sequence
  Oligonucleotide for detection of SNP TSC0015268
tatttttttatag

SEQ ID NO: 56194 - DNA, 13 bp, Artificial Sequence
  Oligonucleotide for detection of SNP TSC0015268
ctataaaaaaata

SEQ ID NO: 56195 - DNA, 13 bp, Artificial Sequence
  Oligonucleotide for detection of SNP TSC0015268
tattttattatag

SEQ ID NO: 56196 - DNA, 13 bp, Artificial Sequence
  Oligonucleotide for detection of SNP TSC0015268
ctataataaaata

SEQ ID NO: 56197 - DNA, 13 bp, Artificial Sequence
  Oligonucleotide for detection of SNP TSC0015269
tgggtaatagagt

SEQ ID NO: 56198 - DNA, 13 bp, Artificial Sequence
  Oligonucleotide for detection of SNP TSC0015269
actctattaccca

SEQ ID NO: 56199 - DNA, 13 bp, Artificial Sequence
  Oligonucleotide for detection of SNP TSC0015269
tgggtagtagagt

SEQ ID NO: 56200 - DNA, 13 bp, Artificial Sequence
  Oligonucleotide for detection of SNP TSC0015269
actctactaccca

SEQ ID NO: 56201 - DNA, 13 bp, Artificial Sequence
  Oligonucleotide for detection of SNP TSC0015270
tttaggagggtag

SEQ ID NO: 56202 - DNA, 13 bp, Artificial Sequence
  Oligonucleotide for detection of SNP TSC0015270
ctaccctcctaaa

SEQ ID NO: 56203 - DNA, 13 bp, Artificial Sequence
  Oligonucleotide for detection of SNP TSC0015270
tttaggggggtag

SEQ ID NO: 56204 - DNA, 13 bp, Artificial Sequence
  Oligonucleotide for detection of SNP TSC0015270
ctacccccctaaa

SEQ ID NO: 56205 - DNA, 13 bp, Artificial Sequence
  Oligonucleotide for detection of SNP TSC0015271
ttgaaagtatttt

SEQ ID NO: 56206 - DNA, 13 bp, Artificial Sequence
  Oligonucleotide for detection of SNP TSC0015271
aaaatactttcaa

SEQ ID NO: 56207 - DNA, 13 bp, Artificial Sequence
  Oligonucleotide for detection of SNP TSC0015271
ttgaaaatatttt

SEQ ID NO: 56208 - DNA, 13 bp, Artificial Sequence
  Oligonucleotide for detection of SNP TSC0015271
aaaatattttcaa

SEQ ID NO: 56209 - DNA, 13 bp, Artificial Sequence
  Oligonucleotide for detection of SNP TSC0015272
ttggtaaattgtt

SEQ ID NO: 56210 - DNA, 13 bp, Artificial Sequence
  Oligonucleotide for detection of SNP TSC0015272
aacaatttaccaa

SEQ ID NO: 56211 - DNA, 13 bp, Artificial Sequence
  Oligonucleotide for detection of SNP TSC0015272
ttggtatattgtt

SEQ ID NO: 56212 - DNA, 13 bp, Artificial Sequence
  Oligonucleotide for detection of SNP TSC0015272
aacaatataccaa

SEQ ID NO: 56213 - DNA, 13 bp, Artificial Sequence
  Oligonucleotide for detection of SNP TSC0015272
ttggtaaatcgtt

SEQ ID NO: 56214 - DNA, 13 bp, Artificial Sequence
  Oligonucleotide for detection of SNP TSC0015272
aacgatttaccaa

SEQ ID NO: 56215 - DNA, 13 bp, Artificial Sequence
  Oligonucleotide for detection of SNP TSC0015272
ttggtatatcgtt

SEQ ID NO: 56216 - DNA, 13 bp, Artificial Sequence
  Oligonucleotide for detection of SNP TSC0015272
aacgatataccaa

SEQ ID NO: 56217 - DNA, 13 bp, Artificial Sequence
  Oligonucleotide for detection of SNP TSC0015272
aatgatttgttaa

SEQ ID NO: 56218 - DNA, 13 bp, Artificial Sequence
  Oligonucleotide for detection of SNP TSC0015272
ttaacaaatcatt

SEQ ID NO: 56219 - DNA, 13 bp, Artificial Sequence
  Oligonucleotide for detection of SNP TSC0015272
aatgatgtgttaa

SEQ ID NO: 56220 - DNA, 13 bp, Artificial Sequence
  Oligonucleotide for detection of SNP TSC0015272
ttaacacatcatt

SEQ ID NO: 56221 - DNA, 13 bp, Artificial Sequence
  Oligonucleotide for detection of SNP TSC0015272
aacgatttgttaa

SEQ ID NO: 56222 - DNA, 13 bp, Artificial Sequence
  Oligonucleotide for detection of SNP TSC0015272
ttaacaaatcgtt

SEQ ID NO: 56223 - DNA, 13 bp, Artificial Sequence
  Oligonucleotide for detection of SNP TSC0015272
aacgatgtgttaa

SEQ ID NO: 56224 - DNA, 13 bp, Artificial Sequence
  Oligonucleotide for detection of SNP TSC0015272
ttaacacatcgtt

SEQ ID NO: 56225 - DNA, 13 bp, Artificial Sequence
  Oligonucleotide for detection of SNP TSC0015273
gtgggttgttttg

SEQ ID NO: 56226 - DNA, 13 bp, Artificial Sequence
  Oligonucleotide for detection of SNP TSC0015273
caaaacaacccac

SEQ ID NO: 56227 - DNA, 13 bp, Artificial Sequence
  Oligonucleotide for detection of SNP TSC0015273
gtgggtggttttg

SEQ ID NO: 56228 - DNA, 13 bp, Artificial Sequence
  Oligonucleotide for detection of SNP TSC0015273
caaaaccacccac

SEQ ID NO: 56229 - DNA, 13 bp, Artificial Sequence
  Oligonucleotide for detection of SNP TSC0015273
gcgggttgttttg

SEQ ID NO: 56230 - DNA, 13 bp, Artificial Sequence
  Oligonucleotide for detection of SNP TSC0015273
caaaacaacccgc

SEQ ID NO: 56231 - DNA, 13 bp, Artificial Sequence
  Oligonucleotide for detection of SNP TSC0015273
gcgggtggttttg

SEQ ID NO: 56232 - DNA, 13 bp, Artificial Sequence
  Oligonucleotide for detection of SNP TSC0015273
caaaaccacccgc

SEQ ID NO: 56233 - DNA, 13 bp, Artificial Sequence
  Oligonucleotide for detection of SNP TSC0015273
gtgggtcgttttg

SEQ ID NO: 56234 - DNA, 13 bp, Artificial Sequence
  Oligonucleotide for detection of SNP TSC0015273
caaaacgacccac

SEQ ID NO: 56235 - DNA, 13 bp, Artificial Sequence
  Oligonucleotide for detection of SNP TSC0015273
gcgggtcgttttg

SEQ ID NO: 56236 - DNA, 13 bp, Artificial Sequence
  Oligonucleotide for detection of SNP TSC0015273
caaaacgacccgc

SEQ ID NO: 56237 - DNA, 13 bp, Artificial Sequence
  Oligonucleotide for detection of SNP TSC0015273
taaagtgatttgy

SEQ ID NO: 56238 - DNA, 13 bp, Artificial Sequence
  Oligonucleotide for detection of SNP TSC0015273
rcaaatcacttta

SEQ ID NO: 56239 - DNA, 13 bp, Artificial Sequence
  Oligonucleotide for detection of SNP TSC0015273
taaagttatttgy

SEQ ID NO: 56240 - DNA, 13 bp, Artificial Sequence
  Oligonucleotide for detection of SNP TSC0015273
rcaaataacttta

SEQ ID NO: 56241 - DNA, 13 bp, Artificial Sequence
  Oligonucleotide for detection of SNP TSC0015273
taaagcgatttgy

SEQ ID NO: 56242 - DNA, 13 bp, Artificial Sequence
  Oligonucleotide for detection of SNP TSC0015273
rcaaatcgcttta

SEQ ID NO: 56243 - DNA, 13 bp, Artificial Sequence
  Oligonucleotide for detection of SNP TSC0015273
taaagttattcgy

SEQ ID NO: 56244 - DNA, 13 bp, Artificial Sequence
  Oligonucleotide for detection of SNP TSC0015273
rcgaataacttta

SEQ ID NO: 56245 - DNA, 13 bp, Artificial Sequence
  Oligonucleotide for detection of SNP TSC0015273
taaagtgattcgy

SEQ ID NO: 56246 - DNA, 13 bp, Artificial Sequence
  Oligonucleotide for detection of SNP TSC0015273
rcgaatcacttta

SEQ ID NO: 56247 - DNA, 13 bp, Artificial Sequence
  Oligonucleotide for detection of SNP TSC0015273
taaagcgattcgy

SEQ ID NO: 56248 - DNA, 13 bp, Artificial Sequence
  Oligonucleotide for detection of SNP TSC0015273
rcgaatcgcttta

SEQ ID NO: 56249 - DNA, 13 bp, Artificial Sequence
  Oligonucleotide for detection of SNP TSC0015275
gagaatggtttga

SEQ ID NO: 56250 - DNA, 13 bp, Artificial Sequence
  Oligonucleotide for detection of SNP TSC0015275
tcaaaccattctc

SEQ ID NO: 56251 - DNA, 13 bp, Artificial Sequence
  Oligonucleotide for detection of SNP TSC0015276
atgtttttgatay

SEQ ID NO: 56252 - DNA, 13 bp, Artificial Sequence
  Oligonucleotide for detection of SNP TSC0015276
rtatcaaaaacat

SEQ ID NO: 56253 - DNA, 13 bp, Artificial Sequence
  Oligonucleotide for detection of SNP TSC0015276
atgtttgtgatay

SEQ ID NO: 56254 - DNA, 13 bp, Artificial Sequence
  Oligonucleotide for detection of SNP TSC0015276
rtatcacaaacat

SEQ ID NO: 56255 - DNA, 13 bp, Artificial Sequence
  Oligonucleotide for detection of SNP TSC0015276
gtgttagaggtat

SEQ ID NO: 56256 - DNA, 13 bp, Artificial Sequence
  Oligonucleotide for detection of SNP TSC0015276
atacctctaacac

SEQ ID NO: 56257 - DNA, 13 bp, Artificial Sequence
  Oligonucleotide for detection of SNP TSC0015276
gtgttataggtat

SEQ ID NO: 56258 - DNA, 13 bp, Artificial Sequence
  Oligonucleotide for detection of SNP TSC0015276
atacctataacac

SEQ ID NO: 56259 - DNA, 13 bp, Artificial Sequence
  Oligonucleotide for detection of SNP TSC0015277
tagggtaaaatay

SEQ ID NO: 56260 - DNA, 13 bp, Artificial Sequence
  Oligonucleotide for detection of SNP TSC0015277
rtattttacccta

SEQ ID NO: 56261 - DNA, 13 bp, Artificial Sequence
  Oligonucleotide for detection of SNP TSC0015277
tagggtgaaatay

SEQ ID NO: 56262 - DNA, 13 bp, Artificial Sequence
  Oligonucleotide for detection of SNP TSC0015277
rtatttcacccta

SEQ ID NO: 56263 - DNA, 13 bp, Artificial Sequence
  Oligonucleotide for detection of SNP TSC0015277
tagggcgaaatay

SEQ ID NO: 56264 - DNA, 13 bp, Artificial Sequence
  Oligonucleotide for detection of SNP TSC0015277
rtatttcgcccta

SEQ ID NO: 56265 - DNA, 13 bp, Artificial Sequence
  Oligonucleotide for detection of SNP TSC0015277
gtattttgttttg

SEQ ID NO: 56266 - DNA, 13 bp, Artificial Sequence
  Oligonucleotide for detection of SNP TSC0015277
caaaacaaaatac

SEQ ID NO: 56267 - DNA, 13 bp, Artificial Sequence
  Oligonucleotide for detection of SNP TSC0015277
gtatttcgttttg

SEQ ID NO: 56268 - DNA, 13 bp, Artificial Sequence
  Oligonucleotide for detection of SNP TSC0015277
caaaacgaaatac

SEQ ID NO: 56269 - DNA, 13 bp, Artificial Sequence
  Oligonucleotide for detection of SNP TSC0015279
ttttgtaatagtg

SEQ ID NO: 56270 - DNA, 13 bp, Artificial Sequence
  Oligonucleotide for detection of SNP TSC0015279
cactattacaaaa

SEQ ID NO: 56271 - DNA, 13 bp, Artificial Sequence
  Oligonucleotide for detection of SNP TSC0015279
ttttgttatagtg

SEQ ID NO: 56272 - DNA, 13 bp, Artificial Sequence
  Oligonucleotide for detection of SNP TSC0015279
cactataacaaaa

SEQ ID NO: 56273 - DNA, 13 bp, Artificial Sequence
  Oligonucleotide for detection of SNP TSC0015279
tattgttgtagag

SEQ ID NO: 56274 - DNA, 13 bp, Artificial Sequence
  Oligonucleotide for detection of SNP TSC0015279
ctctacaacaata

SEQ ID NO: 56275 - DNA, 13 bp, Artificial Sequence
  Oligonucleotide for detection of SNP TSC0015279
tattgtggtagag

SEQ ID NO: 56276 - DNA, 13 bp, Artificial Sequence
  Oligonucleotide for detection of SNP TSC0015279
ctctaccacaata

SEQ ID NO: 56277 - DNA, 13 bp, Artificial Sequence
  Oligonucleotide for detection of SNP TSC0015280
agagaagttggag

SEQ ID NO: 56278 - DNA, 13 bp, Artificial Sequence
  Oligonucleotide for detection of SNP TSC0015280
ctccaacttctct

SEQ ID NO: 56279 - DNA, 13 bp, Artificial Sequence
  Oligonucleotide for detection of SNP TSC0015280
agagaatttggag

SEQ ID NO: 56280 - DNA, 13 bp, Artificial Sequence
  Oligonucleotide for detection of SNP TSC0015280
ctccaaattctct

SEQ ID NO: 56281 - DNA, 13 bp, Artificial Sequence
  Oligonucleotide for detection of SNP TSC0015281
aggttttgattat

SEQ ID NO: 56282 - DNA, 13 bp, Artificial Sequence
  Oligonucleotide for detection of SNP TSC0015281
ataatcaaaacct

SEQ ID NO: 56283 - DNA, 13 bp, Artificial Sequence
  Oligonucleotide for detection of SNP TSC0015281
aggtttcgattat

SEQ ID NO: 56284 - DNA, 13 bp, Artificial Sequence
  Oligonucleotide for detection of SNP TSC0015281
ataatcgaaacct

SEQ ID NO: 56285 - DNA, 13 bp, Artificial Sequence
  Oligonucleotide for detection of SNP TSC0015281
ataattggggttt

SEQ ID NO: 56286 - DNA, 13 bp, Artificial Sequence
  Oligonucleotide for detection of SNP TSC0015281
aaaccccaattat

SEQ ID NO: 56287 - DNA, 13 bp, Artificial Sequence
  Oligonucleotide for detection of SNP TSC0015281
ataattagggttt

SEQ ID NO: 56288 - DNA, 13 bp, Artificial Sequence
  Oligonucleotide for detection of SNP TSC0015281
aaaccctaattat

SEQ ID NO: 56289 - DNA, 13 bp, Artificial Sequence
  Oligonucleotide for detection of SNP TSC0015281
ataatcggggttt

SEQ ID NO: 56290 - DNA, 13 bp, Artificial Sequence
  Oligonucleotide for detection of SNP TSC0015281
aaaccccgattat

SEQ ID NO: 56291 - DNA, 13 bp, Artificial Sequence
  Oligonucleotide for detection of SNP TSC0015282
aagattttttttt

SEQ ID NO: 56292 - DNA, 13 bp, Artificial Sequence
  Oligonucleotide for detection of SNP TSC0015282
aaaaaaaaatctt

SEQ ID NO: 56293 - DNA, 13 bp, Artificial Sequence
  Oligonucleotide for detection of SNP TSC0015282
aagattgtttttt

SEQ ID NO: 56294 - DNA, 13 bp, Artificial Sequence
  Oligonucleotide for detection of SNP TSC0015282
aaaaaacaatctt

SEQ ID NO: 56295 - DNA, 13 bp, Artificial Sequence
  Oligonucleotide for detection of SNP TSC0015282
aaagaagaatttt

SEQ ID NO: 56296 - DNA, 13 bp, Artificial Sequence
  Oligonucleotide for detection of SNP TSC0015282
aaaattcttcttt

SEQ ID NO: 56297 - DNA, 13 bp, Artificial Sequence
  Oligonucleotide for detection of SNP TSC0015282
aaagaataatttt

SEQ ID NO: 56298 - DNA, 13 bp, Artificial Sequence
  Oligonucleotide for detection of SNP TSC0015282
aaaattattcttt

SEQ ID NO: 56299 - DNA, 13 bp, Artificial Sequence
  Oligonucleotide for detection of SNP TSC0015283
aggtttagggaaa

SEQ ID NO: 56300 - DNA, 13 bp, Artificial Sequence
  Oligonucleotide for detection of SNP TSC0015283
tttccctaaacct

SEQ ID NO: 56301 - DNA, 13 bp, Artificial Sequence
  Oligonucleotide for detection of SNP TSC0015283
aggtttggggaaa

SEQ ID NO: 56302 - DNA, 13 bp, Artificial Sequence
  Oligonucleotide for detection of SNP TSC0015283
tttccccaaacct

SEQ ID NO: 56303 - DNA, 13 bp, Artificial Sequence
  Oligonucleotide for detection of SNP TSC0015284
gttttagggttgg

SEQ ID NO: 56304 - DNA, 13 bp, Artificial Sequence
  Oligonucleotide for detection of SNP TSC0015284
ccaaccctaaaac

SEQ ID NO: 56305 - DNA, 13 bp, Artificial Sequence
  Oligonucleotide for detection of SNP TSC0015284
gttttatggttgg

SEQ ID NO: 56306 - DNA, 13 bp, Artificial Sequence
  Oligonucleotide for detection of SNP TSC0015284
ccaaccataaaac

SEQ ID NO: 56307 - DNA, 13 bp, Artificial Sequence
  Oligonucleotide for detection of SNP TSC0015284
ttagttttgaggy

SEQ ID NO: 56308 - DNA, 13 bp, Artificial Sequence
  Oligonucleotide for detection of SNP TSC0015284
rcctcaaaactaa

SEQ ID NO: 56309 - DNA, 13 bp, Artificial Sequence
  Oligonucleotide for detection of SNP TSC0015284
ttagttatgaggy

SEQ ID NO: 56310 - DNA, 13 bp, Artificial Sequence
  Oligonucleotide for detection of SNP TSC0015284
rcctcataactaa

SEQ ID NO: 56311 - DNA, 13 bp, Artificial Sequence
  Oligonucleotide for detection of SNP TSC0015285
gagatatgaaagt

SEQ ID NO: 56312 - DNA, 13 bp, Artificial Sequence
  Oligonucleotide for detection of SNP TSC0015285
actttcatatctc

SEQ ID NO: 56313 - DNA, 13 bp, Artificial Sequence
  Oligonucleotide for detection of SNP TSC0015285
gagatacgaaagt

SEQ ID NO: 56314 - DNA, 13 bp, Artificial Sequence
  Oligonucleotide for detection of SNP TSC0015285
actttcgtatctc

SEQ ID NO: 56315 - DNA, 13 bp, Artificial Sequence
  Oligonucleotide for detection of SNP TSC0015286
aggaaagtgtata

SEQ ID NO: 56316 - DNA, 13 bp, Artificial Sequence
  Oligonucleotide for detection of SNP TSC0015286
tatacactttcct

SEQ ID NO: 56317 - DNA, 13 bp, Artificial Sequence
  Oligonucleotide for detection of SNP TSC0015286
aggaaaatgtata

SEQ ID NO: 56318 - DNA, 13 bp, Artificial Sequence
  Oligonucleotide for detection of SNP TSC0015286
tatacattttcct

SEQ ID NO: 56319 - DNA, 13 bp, Artificial Sequence
  Oligonucleotide for detection of SNP TSC0015287
ttaggaatgttgy

SEQ ID NO: 56320 - DNA, 13 bp, Artificial Sequence
  Oligonucleotide for detection of SNP TSC0015287
rcaacattcctaa

SEQ ID NO: 56321 - DNA, 13 bp, Artificial Sequence
  Oligonucleotide for detection of SNP TSC0015287
ttaggattgttgy

SEQ ID NO: 56322 - DNA, 13 bp, Artificial Sequence
  Oligonucleotide for detection of SNP TSC0015287
rcaacaatcctaa

SEQ ID NO: 56323 - DNA, 13 bp, Artificial Sequence
  Oligonucleotide for detection of SNP TSC0015287
gtagtatttttag

SEQ ID NO: 56324 - DNA, 13 bp, Artificial Sequence
  Oligonucleotide for detection of SNP TSC0015287
ctaaaaatactac

SEQ ID NO: 56325 - DNA, 13 bp, Artificial Sequence
  Oligonucleotide for detection of SNP TSC0015287
gtagtagttttag

SEQ ID NO: 56326 - DNA, 13 bp, Artificial Sequence
  Oligonucleotide for detection of SNP TSC0015287
ctaaaactactac

SEQ ID NO: 56327 - DNA, 13 bp, Artificial Sequence
  Oligonucleotide for detection of SNP TSC0015288
tggaaaaggtggg

SEQ ID NO: 56328 - DNA, 13 bp, Artificial Sequence
  Oligonucleotide for detection of SNP TSC0015288
cccaccttttcca

SEQ ID NO: 56329 - DNA, 13 bp, Artificial Sequence
  Oligonucleotide for detection of SNP TSC0015288
tggaaatggtggg

SEQ ID NO: 56330 - DNA, 13 bp, Artificial Sequence
  Oligonucleotide for detection of SNP TSC0015288
cccaccatttcca

SEQ ID NO: 56331 - DNA, 13 bp, Artificial Sequence
  Oligonucleotide for detection of SNP TSC0015288
tggaaacggtggg

SEQ ID NO: 56332 - DNA, 13 bp, Artificial Sequence
  Oligonucleotide for detection of SNP TSC0015288
cccaccgtttcca

SEQ ID NO: 56333 - DNA, 13 bp, Artificial Sequence
  Oligonucleotide for detection of SNP TSC0015288
tttatcgttttta

SEQ ID NO: 56334 - DNA, 13 bp, Artificial Sequence
  Oligonucleotide for detection of SNP TSC0015288
taaaaacgataaa

SEQ ID NO: 56335 - DNA, 13 bp, Artificial Sequence
  Oligonucleotide for detection of SNP TSC0015289
tatgatgttttty

SEQ ID NO: 56336 - DNA, 13 bp, Artificial Sequence
  Oligonucleotide for detection of SNP TSC0015289
raaaaacatcata

SEQ ID NO: 56337 - DNA, 13 bp, Artificial Sequence
  Oligonucleotide for detection of SNP TSC0015289
tatgatattttty

SEQ ID NO: 56338 - DNA, 13 bp, Artificial Sequence
  Oligonucleotide for detection of SNP TSC0015289
raaaaatatcata

SEQ ID NO: 56339 - DNA, 13 bp, Artificial Sequence
  Oligonucleotide for detection of SNP TSC0015290
ataaataaataaa

SEQ ID NO: 56340 - DNA, 13 bp, Artificial Sequence
  Oligonucleotide for detection of SNP TSC0015290
tttatttatttat

SEQ ID NO: 56341 - DNA, 13 bp, Artificial Sequence
  Oligonucleotide for detection of SNP TSC0015290
ataaattaataaa

SEQ ID NO: 56342 - DNA, 13 bp, Artificial Sequence
  Oligonucleotide for detection of SNP TSC0015290
tttattaatttat

SEQ ID NO: 56343 - DNA, 13 bp, Artificial Sequence
  Oligonucleotide for detection of SNP TSC0015292
tttaaggggtata

SEQ ID NO: 56344 - DNA, 13 bp, Artificial Sequence
  Oligonucleotide for detection of SNP TSC0015292
tataccccttaaa

SEQ ID NO: 56345 - DNA, 13 bp, Artificial Sequence
  Oligonucleotide for detection of SNP TSC0015292
tttaagaggtata

SEQ ID NO: 56346 - DNA, 13 bp, Artificial Sequence
  Oligonucleotide for detection of SNP TSC0015292
tatacctcttaaa

SEQ ID NO: 56347 - DNA, 13 bp, Artificial Sequence
  Oligonucleotide for detection of SNP TSC0015293
gttggagtgttty

SEQ ID NO: 56348 - DNA, 13 bp, Artificial Sequence
  Oligonucleotide for detection of SNP TSC0015293
raaacactccaac

SEQ ID NO: 56349 - DNA, 13 bp, Artificial Sequence
  Oligonucleotide for detection of SNP TSC0015293
gttggaatgttty

SEQ ID NO: 56350 - DNA, 13 bp, Artificial Sequence
  Oligonucleotide for detection of SNP TSC0015293
raaacattccaac

SEQ ID NO: 56351 - DNA, 13 bp, Artificial Sequence
  Oligonucleotide for detection of SNP TSC0015294
taggagattattt

SEQ ID NO: 56352 - DNA, 13 bp, Artificial Sequence
  Oligonucleotide for detection of SNP TSC0015294
aaataatctccta

SEQ ID NO: 56353 - DNA, 13 bp, Artificial Sequence
  Oligonucleotide for detection of SNP TSC0015294
taggaggttattt

SEQ ID NO: 56354 - DNA, 13 bp, Artificial Sequence
  Oligonucleotide for detection of SNP TSC0015294
aaataacctccta

SEQ ID NO: 56355 - DNA, 13 bp, Artificial Sequence
  Oligonucleotide for detection of SNP TSC0015296
ttttatgttagtt

SEQ ID NO: 56356 - DNA, 13 bp, Artificial Sequence
  Oligonucleotide for detection of SNP TSC0015296
aactaacataaaa

SEQ ID NO: 56357 - DNA, 13 bp, Artificial Sequence
  Oligonucleotide for detection of SNP TSC0015296
ttttatattagtt

SEQ ID NO: 56358 - DNA, 13 bp, Artificial Sequence
  Oligonucleotide for detection of SNP TSC0015296
aactaatataaaa

SEQ ID NO: 56359 - DNA, 13 bp, Artificial Sequence
  Oligonucleotide for detection of SNP TSC0015297
tattttattttga

SEQ ID NO: 56360 - DNA, 13 bp, Artificial Sequence
  Oligonucleotide for detection of SNP TSC0015297
tcaaaataaaata

SEQ ID NO: 56361 - DNA, 13 bp, Artificial Sequence
  Oligonucleotide for detection of SNP TSC0015297
tattttgttttga

SEQ ID NO: 56362 - DNA, 13 bp, Artificial Sequence
  Oligonucleotide for detection of SNP TSC0015297
tcaaaacaaaata

SEQ ID NO: 56363 - DNA, 13 bp, Artificial Sequence
  Oligonucleotide for detection of SNP TSC0015297
tattttatttcga

SEQ ID NO: 56364 - DNA, 13 bp, Artificial Sequence
  Oligonucleotide for detection of SNP TSC0015297
tcgaaataaaata

SEQ ID NO: 56365 - DNA, 13 bp, Artificial Sequence
  Oligonucleotide for detection of SNP TSC0015297
tattttgtttcga

SEQ ID NO: 56366 - DNA, 13 bp, Artificial Sequence
  Oligonucleotide for detection of SNP TSC0015297
tcgaaacaaaata

SEQ ID NO: 56367 - DNA, 13 bp, Artificial Sequence
  Oligonucleotide for detection of SNP TSC0015298
gaaggtaaagtta

SEQ ID NO: 56368 - DNA, 13 bp, Artificial Sequence
  Oligonucleotide for detection of SNP TSC0015298
taactttaccttc

SEQ ID NO: 56369 - DNA, 13 bp, Artificial Sequence
  Oligonucleotide for detection of SNP TSC0015298
gaaggtgaagtta

SEQ ID NO: 56370 - DNA, 13 bp, Artificial Sequence
  Oligonucleotide for detection of SNP TSC0015298
taacttcaccttc

SEQ ID NO: 56371 - DNA, 13 bp, Artificial Sequence
  Oligonucleotide for detection of SNP TSC0015298
gaaggcgaagtta

SEQ ID NO: 56372 - DNA, 13 bp, Artificial Sequence
  Oligonucleotide for detection of SNP TSC0015298
taacttcgccttc

SEQ ID NO: 56373 - DNA, 13 bp, Artificial Sequence
  Oligonucleotide for detection of SNP TSC0015298
tgattttgtttty

SEQ ID NO: 56374 - DNA, 13 bp, Artificial Sequence
  Oligonucleotide for detection of SNP TSC0015298
raaaacaaaatca

SEQ ID NO: 56375 - DNA, 13 bp, Artificial Sequence
  Oligonucleotide for detection of SNP TSC0015298
tgatttcgtttty

SEQ ID NO: 56376 - DNA, 13 bp, Artificial Sequence
  Oligonucleotide for detection of SNP TSC0015298
raaaacgaaatca

SEQ ID NO: 56377 - DNA, 13 bp, Artificial Sequence
  Oligonucleotide for detection of SNP TSC0015299
ttgattatttgat

SEQ ID NO: 56378 - DNA, 13 bp, Artificial Sequence
  Oligonucleotide for detection of SNP TSC0015299
atcaaataatcaa

SEQ ID NO: 56379 - DNA, 13 bp, Artificial Sequence
  Oligonucleotide for detection of SNP TSC0015299
ttgattttttgat

SEQ ID NO: 56380 - DNA, 13 bp, Artificial Sequence
  Oligonucleotide for detection of SNP TSC0015299
atcaaaaaatcaa

SEQ ID NO: 56381 - DNA, 13 bp, Artificial Sequence
  Oligonucleotide for detection of SNP TSC0015299
tcgattatttgat

SEQ ID NO: 56382 - DNA, 13 bp, Artificial Sequence
  Oligonucleotide for detection of SNP TSC0015299
atcaaataatcga

SEQ ID NO: 56383 - DNA, 13 bp, Artificial Sequence
  Oligonucleotide for detection of SNP TSC0015299
tcgattttttgat

SEQ ID NO: 56384 - DNA, 13 bp, Artificial Sequence
  Oligonucleotide for detection of SNP TSC0015299
atcaaaaaatcga

SEQ ID NO: 56385 - DNA, 13 bp, Artificial Sequence
  Oligonucleotide for detection of SNP TSC0015299
ttgattattcgat

SEQ ID NO: 56386 - DNA, 13 bp, Artificial Sequence
  Oligonucleotide for detection of SNP TSC0015299
atcgaataatcaa

SEQ ID NO: 56387 - DNA, 13 bp, Artificial Sequence
  Oligonucleotide for detection of SNP TSC0015299
ttgatttttcgat

SEQ ID NO: 56388 - DNA, 13 bp, Artificial Sequence
  Oligonucleotide for detection of SNP TSC0015299
atcgaaaaatcaa

SEQ ID NO: 56389 - DNA, 13 bp, Artificial Sequence
  Oligonucleotide for detection of SNP TSC0015299
tcgattattcgat

SEQ ID NO: 56390 - DNA, 13 bp, Artificial Sequence
  Oligonucleotide for detection of SNP TSC0015299
atcgaataatcga

SEQ ID NO: 56391 - DNA, 13 bp, Artificial Sequence
  Oligonucleotide for detection of SNP TSC0015299
tcgatttttcgat

SEQ ID NO: 56392 - DNA, 13 bp, Artificial Sequence
  Oligonucleotide for detection of SNP TSC0015299
atcgaaaaatcga

SEQ ID NO: 56393 - DNA, 13 bp, Artificial Sequence
  Oligonucleotide for detection of SNP TSC0015299
attgagtgattga

SEQ ID NO: 56394 - DNA, 13 bp, Artificial Sequence
  Oligonucleotide for detection of SNP TSC0015299
tcaatcactcaat

SEQ ID NO: 56395 - DNA, 13 bp, Artificial Sequence
  Oligonucleotide for detection of SNP TSC0015299
attgagggattga

SEQ ID NO: 56396 - DNA, 13 bp, Artificial Sequence
  Oligonucleotide for detection of SNP TSC0015299
tcaatccctcaat

SEQ ID NO: 56397 - DNA, 13 bp, Artificial Sequence
  Oligonucleotide for detection of SNP TSC0015299
atcgagtgattga

SEQ ID NO: 56398 - DNA, 13 bp, Artificial Sequence
  Oligonucleotide for detection of SNP TSC0015299
tcaatcactcgat

SEQ ID NO: 56399 - DNA, 13 bp, Artificial Sequence
  Oligonucleotide for detection of SNP TSC0015299
atcgagggattga

SEQ ID NO: 56400 - DNA, 13 bp, Artificial Sequence
  Oligonucleotide for detection of SNP TSC0015299
tcaatccctcgat

SEQ ID NO: 56401 - DNA, 13 bp, Artificial Sequence
  Oligonucleotide for detection of SNP TSC0015299
attgagtgatcga

SEQ ID NO: 56402 - DNA, 13 bp, Artificial Sequence
  Oligonucleotide for detection of SNP TSC0015299
tcgatcactcaat

SEQ ID NO: 56403 - DNA, 13 bp, Artificial Sequence
  Oligonucleotide for detection of SNP TSC0015299
attgagggatcga

SEQ ID NO: 56404 - DNA, 13 bp, Artificial Sequence
  Oligonucleotide for detection of SNP TSC0015299
tcgatccctcaat

SEQ ID NO: 56405 - DNA, 13 bp, Artificial Sequence
  Oligonucleotide for detection of SNP TSC0015299
atcgagtgatcga

SEQ ID NO: 56406 - DNA, 13 bp, Artificial Sequence
  Oligonucleotide for detection of SNP TSC0015299
tcgatcactcgat

SEQ ID NO: 56407 - DNA, 13 bp, Artificial Sequence
  Oligonucleotide for detection of SNP TSC0015299
atcgagggatcga

SEQ ID NO: 56408 - DNA, 13 bp, Artificial Sequence
  Oligonucleotide for detection of SNP TSC0015299
tcgatccctcgat

SEQ ID NO: 56409 - DNA, 13 bp, Artificial Sequence
  Oligonucleotide for detection of SNP TSC0015300
tagttagtattay

SEQ ID NO: 56410 - DNA, 13 bp, Artificial Sequence
  Oligonucleotide for detection of SNP TSC0015300
rtaatactaacta

SEQ ID NO: 56411 - DNA, 13 bp, Artificial Sequence
  Oligonucleotide for detection of SNP TSC0015300
tagttaatattay

SEQ ID NO: 56412 - DNA, 13 bp, Artificial Sequence
  Oligonucleotide for detection of SNP TSC0015300
rtaatattaacta

SEQ ID NO: 56413 - DNA, 13 bp, Artificial Sequence
  Oligonucleotide for detection of SNP TSC0015301
aaagaaaagttgy

SEQ ID NO: 56414 - DNA, 13 bp, Artificial Sequence
  Oligonucleotide for detection of SNP TSC0015301
rcaacttttcttt

SEQ ID NO: 56415 - DNA, 13 bp, Artificial Sequence
  Oligonucleotide for detection of SNP TSC0015301
aaagaagagttgy

SEQ ID NO: 56416 - DNA, 13 bp, Artificial Sequence
  Oligonucleotide for detection of SNP TSC0015301
rcaactcttcttt

SEQ ID NO: 56417 - DNA, 13 bp, Artificial Sequence
  Oligonucleotide for detection of SNP TSC0015302
gtgtaagaaatga

SEQ ID NO: 56418 - DNA, 13 bp, Artificial Sequence
  Oligonucleotide for detection of SNP TSC0015302
tcatttcttacac

SEQ ID NO: 56419 - DNA, 13 bp, Artificial Sequence
  Oligonucleotide for detection of SNP TSC0015302
gtgtaaaaaatga

SEQ ID NO: 56420 - DNA, 13 bp, Artificial Sequence
  Oligonucleotide for detection of SNP TSC0015302
tcattttttacac

SEQ ID NO: 56421 - DNA, 13 bp, Artificial Sequence
  Oligonucleotide for detection of SNP TSC0015303
tttttgagaaaaa

SEQ ID NO: 56422 - DNA, 13 bp, Artificial Sequence
  Oligonucleotide for detection of SNP TSC0015303
tttttctcaaaaa

SEQ ID NO: 56423 - DNA, 13 bp, Artificial Sequence
  Oligonucleotide for detection of SNP TSC0015303
tttttgtgaaaaa

SEQ ID NO: 56424 - DNA, 13 bp, Artificial Sequence
  Oligonucleotide for detection of SNP TSC0015303
tttttcacaaaaa

SEQ ID NO: 56425 - DNA, 13 bp, Artificial Sequence
  Oligonucleotide for detection of SNP TSC0015303
ttttttttagaaa

SEQ ID NO: 56426 - DNA, 13 bp, Artificial Sequence
  Oligonucleotide for detection of SNP TSC0015303
tttctaaaaaaaa

SEQ ID NO: 56427 - DNA, 13 bp, Artificial Sequence
  Oligonucleotide for detection of SNP TSC0015303
ttttttatagaaa

SEQ ID NO: 56428 - DNA, 13 bp, Artificial Sequence
  Oligonucleotide for detection of SNP TSC0015303
tttctataaaaaa

SEQ ID NO: 56429 - DNA, 13 bp, Artificial Sequence
  Oligonucleotide for detection of SNP TSC0015304
agagatgaaaatg

SEQ ID NO: 56430 - DNA, 13 bp, Artificial Sequence
  Oligonucleotide for detection of SNP TSC0015304
cattttcatctct

SEQ ID NO: 56431 - DNA, 13 bp, Artificial Sequence
  Oligonucleotide for detection of SNP TSC0015304
agagataaaaatg

SEQ ID NO: 56432 - DNA, 13 bp, Artificial Sequence
  Oligonucleotide for detection of SNP TSC0015304
catttttatctct

SEQ ID NO: 56433 - DNA, 13 bp, Artificial Sequence
  Oligonucleotide for detection of SNP TSC0015304
agagatgaaaacg

SEQ ID NO: 56434 - DNA, 13 bp, Artificial Sequence
  Oligonucleotide for detection of SNP TSC0015304
cgttttcatctct

SEQ ID NO: 56435 - DNA, 13 bp, Artificial Sequence
  Oligonucleotide for detection of SNP TSC0015304
agagataaaaacg

SEQ ID NO: 56436 - DNA, 13 bp, Artificial Sequence
  Oligonucleotide for detection of SNP TSC0015304
cgtttttatctct

SEQ ID NO: 56437 - DNA, 13 bp, Artificial Sequence
  Oligonucleotide for detection of SNP TSC0015305
agagaatgtttta

SEQ ID NO: 56438 - DNA, 13 bp, Artificial Sequence
  Oligonucleotide for detection of SNP TSC0015305
taaaacattctct

SEQ ID NO: 56439 - DNA, 13 bp, Artificial Sequence
  Oligonucleotide for detection of SNP TSC0015305
agagaacgtttta

SEQ ID NO: 56440 - DNA, 13 bp, Artificial Sequence
  Oligonucleotide for detection of SNP TSC0015305
taaaacgttctct

SEQ ID NO: 56441 - DNA, 13 bp, Artificial Sequence
  Oligonucleotide for detection of SNP TSC0015305
tgggatgtttttt

SEQ ID NO: 56442 - DNA, 13 bp, Artificial Sequence
  Oligonucleotide for detection of SNP TSC0015305
aaaaaacatccca

SEQ ID NO: 56443 - DNA, 13 bp, Artificial Sequence
  Oligonucleotide for detection of SNP TSC0015305
tgggatatttttt

SEQ ID NO: 56444 - DNA, 13 bp, Artificial Sequence
  Oligonucleotide for detection of SNP TSC0015305
aaaaaatatccca

SEQ ID NO: 56445 - DNA, 13 bp, Artificial Sequence
  Oligonucleotide for detection of SNP TSC0015305
tgggacgtttttt

SEQ ID NO: 56446 - DNA, 13 bp, Artificial Sequence
  Oligonucleotide for detection of SNP TSC0015305
aaaaaacgtccca

SEQ ID NO: 56447 - DNA, 13 bp, Artificial Sequence
  Oligonucleotide for detection of SNP TSC0015306
gaagatatgtgtt

SEQ ID NO: 56448 - DNA, 13 bp, Artificial Sequence
  Oligonucleotide for detection of SNP TSC0015306
aacacatatcttc

SEQ ID NO: 56449 - DNA, 13 bp, Artificial Sequence
  Oligonucleotide for detection of SNP TSC0015306
gaagatgtgtgtt

SEQ ID NO: 56450 - DNA, 13 bp, Artificial Sequence
  Oligonucleotide for detection of SNP TSC0015306
aacacacatcttc

SEQ ID NO: 56451 - DNA, 13 bp, Artificial Sequence
  Oligonucleotide for detection of SNP TSC0015307
tttgatatgatta

SEQ ID NO: 56452 - DNA, 13 bp, Artificial Sequence
  Oligonucleotide for detection of SNP TSC0015307
taatcatatcaaa

SEQ ID NO: 56453 - DNA, 13 bp, Artificial Sequence
  Oligonucleotide for detection of SNP TSC0015307
tttgatttgatta

SEQ ID NO: 56454 - DNA, 13 bp, Artificial Sequence
  Oligonucleotide for detection of SNP TSC0015307
taatcaaatcaaa

SEQ ID NO: 56455 - DNA, 13 bp, Artificial Sequence
  Oligonucleotide for detection of SNP TSC0015307
tttgatacgatta

SEQ ID NO: 56456 - DNA, 13 bp, Artificial Sequence
  Oligonucleotide for detection of SNP TSC0015307
taatcgtatcaaa

SEQ ID NO: 56457 - DNA, 13 bp, Artificial Sequence
  Oligonucleotide for detection of SNP TSC0015307
tttgattcgatta

SEQ ID NO: 56458 - DNA, 13 bp, Artificial Sequence
  Oligonucleotide for detection of SNP TSC0015307
taatcgaatcaaa

SEQ ID NO: 56459 - DNA, 13 bp, Artificial Sequence
  Oligonucleotide for detection of SNP TSC0015307
taattgtgttaag

SEQ ID NO: 56460 - DNA, 13 bp, Artificial Sequence
  Oligonucleotide for detection of SNP TSC0015307
cttaacacaatta

SEQ ID NO: 56461 - DNA, 13 bp, Artificial Sequence
  Oligonucleotide for detection of SNP TSC0015307
taattgggttaag

SEQ ID NO: 56462 - DNA, 13 bp, Artificial Sequence
  Oligonucleotide for detection of SNP TSC0015307
cttaacccaatta

SEQ ID NO: 56463 - DNA, 13 bp, Artificial Sequence
  Oligonucleotide for detection of SNP TSC0015307
taatcgtgttaag

SEQ ID NO: 56464 - DNA, 13 bp, Artificial Sequence
  Oligonucleotide for detection of SNP TSC0015307
cttaacacgatta

SEQ ID NO: 56465 - DNA, 13 bp, Artificial Sequence
  Oligonucleotide for detection of SNP TSC0015307
taatcgggttaag

SEQ ID NO: 56466 - DNA, 13 bp, Artificial Sequence
  Oligonucleotide for detection of SNP TSC0015307
cttaacccgatta

SEQ ID NO: 56467 - DNA, 13 bp, Artificial Sequence
  Oligonucleotide for detection of SNP TSC0015308
atgtaattaaaat

SEQ ID NO: 56468 - DNA, 13 bp, Artificial Sequence
  Oligonucleotide for detection of SNP TSC0015308
attttaattacat

SEQ ID NO: 56469 - DNA, 13 bp, Artificial Sequence
  Oligonucleotide for detection of SNP TSC0015308
atgtaagtaaaat

SEQ ID NO: 56470 - DNA, 13 bp, Artificial Sequence
  Oligonucleotide for detection of SNP TSC0015308
attttacttacat

SEQ ID NO: 56471 - DNA, 13 bp, Artificial Sequence
  Oligonucleotide for detection of SNP TSC0015308
attttggttatat

SEQ ID NO: 56472 - DNA, 13 bp, Artificial Sequence
  Oligonucleotide for detection of SNP TSC0015308
atataaccaaaat

SEQ ID NO: 56473 - DNA, 13 bp, Artificial Sequence
  Oligonucleotide for detection of SNP TSC0015308
attttgtttatat

SEQ ID NO: 56474 - DNA, 13 bp, Artificial Sequence
  Oligonucleotide for detection of SNP TSC0015308
atataaacaaaat

SEQ ID NO: 56475 - DNA, 13 bp, Artificial Sequence
  Oligonucleotide for detection of SNP TSC0015309
tttgtaaaggggt

SEQ ID NO: 56476 - DNA, 13 bp, Artificial Sequence
  Oligonucleotide for detection of SNP TSC0015309
acccctttacaaa

SEQ ID NO: 56477 - DNA, 13 bp, Artificial Sequence
  Oligonucleotide for detection of SNP TSC0015309
tttgtagaggggt

SEQ ID NO: 56478 - DNA, 13 bp, Artificial Sequence
  Oligonucleotide for detection of SNP TSC0015309
acccctctacaaa

SEQ ID NO: 56479 - DNA, 13 bp, Artificial Sequence
  Oligonucleotide for detection of SNP TSC0015310
ggttagagttaay

SEQ ID NO: 56480 - DNA, 13 bp, Artificial Sequence
  Oligonucleotide for detection of SNP TSC0015310
rttaactctaacc

SEQ ID NO: 56481 - DNA, 13 bp, Artificial Sequence
  Oligonucleotide for detection of SNP TSC0015310
ggttagggttaay

SEQ ID NO: 56482 - DNA, 13 bp, Artificial Sequence
  Oligonucleotide for detection of SNP TSC0015310
rttaaccctaacc

SEQ ID NO: 56483 - DNA, 13 bp, Artificial Sequence
  Oligonucleotide for detection of SNP TSC0015311
ttttttagtatay

SEQ ID NO: 56484 - DNA, 13 bp, Artificial Sequence
  Oligonucleotide for detection of SNP TSC0015311
rtatactaaaaaa

SEQ ID NO: 56485 - DNA, 13 bp, Artificial Sequence
  Oligonucleotide for detection of SNP TSC0015311
ttttttggtatay

SEQ ID NO: 56486 - DNA, 13 bp, Artificial Sequence
  Oligonucleotide for detection of SNP TSC0015311
rtataccaaaaaa

SEQ ID NO: 56487 - DNA, 13 bp, Artificial Sequence
  Oligonucleotide for detection of SNP TSC0015312
gtagttatttttt

SEQ ID NO: 56488 - DNA, 13 bp, Artificial Sequence
  Oligonucleotide for detection of SNP TSC0015312
aaaaaataactac

SEQ ID NO: 56489 - DNA, 13 bp, Artificial Sequence
  Oligonucleotide for detection of SNP TSC0015312
gtagttgtttttt

SEQ ID NO: 56490 - DNA, 13 bp, Artificial Sequence
  Oligonucleotide for detection of SNP TSC0015312
aaaaaacaactac

SEQ ID NO: 56491 - DNA, 13 bp, Artificial Sequence
  Oligonucleotide for detection of SNP TSC0015313
agtgaggaaagtt

SEQ ID NO: 56492 - DNA, 13 bp, Artificial Sequence
  Oligonucleotide for detection of SNP TSC0015313
aactttcctcact

SEQ ID NO: 56493 - DNA, 13 bp, Artificial Sequence
  Oligonucleotide for detection of SNP TSC0015313
agtgagaaaagtt

SEQ ID NO: 56494 - DNA, 13 bp, Artificial Sequence
  Oligonucleotide for detection of SNP TSC0015313
aacttttctcact

SEQ ID NO: 56495 - DNA, 13 bp, Artificial Sequence
  Oligonucleotide for detection of SNP TSC0015314
tattgtatttaty

SEQ ID NO: 56496 - DNA, 13 bp, Artificial Sequence
  Oligonucleotide for detection of SNP TSC0015314
rataaatacaata

SEQ ID NO: 56497 - DNA, 13 bp, Artificial Sequence
  Oligonucleotide for detection of SNP TSC0015314
tattgtgtttaty

SEQ ID NO: 56498 - DNA, 13 bp, Artificial Sequence
  Oligonucleotide for detection of SNP TSC0015314
rataaacacaata

SEQ ID NO: 56499 - DNA, 13 bp, Artificial Sequence
  Oligonucleotide for detection of SNP TSC0015314
tattgcgtttaty

SEQ ID NO: 56500 - DNA, 13 bp, Artificial Sequence
  Oligonucleotide for detection of SNP TSC0015314
rataaacgcaata

SEQ ID NO: 56501 - DNA, 13 bp, Artificial Sequence
  Oligonucleotide for detection of SNP TSC0015314
ggtaaatgtagtg

SEQ ID NO: 56502 - DNA, 13 bp, Artificial Sequence
  Oligonucleotide for detection of SNP TSC0015314
cactacatttacc

SEQ ID NO: 56503 - DNA, 13 bp, Artificial Sequence
  Oligonucleotide for detection of SNP TSC0015314
ggtaaacgtagtg

SEQ ID NO: 56504 - DNA, 13 bp, Artificial Sequence
  Oligonucleotide for detection of SNP TSC0015314
cactacgtttacc

SEQ ID NO: 56505 - DNA, 13 bp, Artificial Sequence
  Oligonucleotide for detection of SNP TSC0015318
agagagtgttgtt

SEQ ID NO: 56506 - DNA, 13 bp, Artificial Sequence
  Oligonucleotide for detection of SNP TSC0015318
aacaacactctct

SEQ ID NO: 56507 - DNA, 13 bp, Artificial Sequence
  Oligonucleotide for detection of SNP TSC0015318
agagagcgttgtt

SEQ ID NO: 56508 - DNA, 13 bp, Artificial Sequence
  Oligonucleotide for detection of SNP TSC0015318
aacaacgctctct

SEQ ID NO: 56509 - DNA, 13 bp, Artificial Sequence
  Oligonucleotide for detection of SNP TSC0015319
taatatgtgataa

SEQ ID NO: 56510 - DNA, 13 bp, Artificial Sequence
  Oligonucleotide for detection of SNP TSC0015319
ttatcacatatta

SEQ ID NO: 56511 - DNA, 13 bp, Artificial Sequence
  Oligonucleotide for detection of SNP TSC0015319
taatatatgataa

SEQ ID NO: 56512 - DNA, 13 bp, Artificial Sequence
  Oligonucleotide for detection of SNP TSC0015319
ttatcatatatta

SEQ ID NO: 56513 - DNA, 13 bp, Artificial Sequence
  Oligonucleotide for detection of SNP TSC0015319
taatacgtgataa

SEQ ID NO: 56514 - DNA, 13 bp, Artificial Sequence
  Oligonucleotide for detection of SNP TSC0015319
ttatcacgtatta

SEQ ID NO: 56515 - DNA, 13 bp, Artificial Sequence
  Oligonucleotide for detection of SNP TSC0015321
ttatatattttay

SEQ ID NO: 56516 - DNA, 13 bp, Artificial Sequence
  Oligonucleotide for detection of SNP TSC0015321
rtaaaatatataa

SEQ ID NO: 56517 - DNA, 13 bp, Artificial Sequence
  Oligonucleotide for detection of SNP TSC0015321
ttatatgttttay

SEQ ID NO: 56518 - DNA, 13 bp, Artificial Sequence
  Oligonucleotide for detection of SNP TSC0015321
rtaaaacatataa

SEQ ID NO: 56519 - DNA, 13 bp, Artificial Sequence
  Oligonucleotide for detection of SNP TSC0015322
agaggattttggg

SEQ ID NO: 56520 - DNA, 13 bp, Artificial Sequence
  Oligonucleotide for detection of SNP TSC0015322
cccaaaatcctct

SEQ ID NO: 56521 - DNA, 13 bp, Artificial Sequence
  Oligonucleotide for detection of SNP TSC0015322
agaggagtttggg

SEQ ID NO: 56522 - DNA, 13 bp, Artificial Sequence
  Oligonucleotide for detection of SNP TSC0015322
cccaaactcctct

SEQ ID NO: 56523 - DNA, 13 bp, Artificial Sequence
  Oligonucleotide for detection of SNP TSC0015322
tttaaagtttttt

SEQ ID NO: 56524 - DNA, 13 bp, Artificial Sequence
  Oligonucleotide for detection of SNP TSC0015322
aaaaaactttaaa

SEQ ID NO: 56525 - DNA, 13 bp, Artificial Sequence
  Oligonucleotide for detection of SNP TSC0015323
gaaaaaaggaagg

SEQ ID NO: 56526 - DNA, 13 bp, Artificial Sequence
  Oligonucleotide for detection of SNP TSC0015323
ccttccttttttc

SEQ ID NO: 56527 - DNA, 13 bp, Artificial Sequence
  Oligonucleotide for detection of SNP TSC0015323
gaaaaagggaagg

SEQ ID NO: 56528 - DNA, 13 bp, Artificial Sequence
  Oligonucleotide for detection of SNP TSC0015323
ccttccctttttc

SEQ ID NO: 56529 - DNA, 13 bp, Artificial Sequence
  Oligonucleotide for detection of SNP TSC0015324
ttttttaggaagt

SEQ ID NO: 56530 - DNA, 13 bp, Artificial Sequence
  Oligonucleotide for detection of SNP TSC0015324
acttcctaaaaaa

SEQ ID NO: 56531 - DNA, 13 bp, Artificial Sequence
  Oligonucleotide for detection of SNP TSC0015324
ttttttgggaagt

SEQ ID NO: 56532 - DNA, 13 bp, Artificial Sequence
  Oligonucleotide for detection of SNP TSC0015324
acttcccaaaaaa

SEQ ID NO: 56533 - DNA, 13 bp, Artificial Sequence
  Oligonucleotide for detection of SNP TSC0015325
gagtttgtgtgtg

SEQ ID NO: 56534 - DNA, 13 bp, Artificial Sequence
  Oligonucleotide for detection of SNP TSC0015325
cacacacaaactc

SEQ ID NO: 56535 - DNA, 13 bp, Artificial Sequence
  Oligonucleotide for detection of SNP TSC0015325
gagtttatgtgtg

SEQ ID NO: 56536 - DNA, 13 bp, Artificial Sequence
  Oligonucleotide for detection of SNP TSC0015325
cacacataaactc

SEQ ID NO: 56537 - DNA, 13 bp, Artificial Sequence
  Oligonucleotide for detection of SNP TSC0015327
tttgaatgtttay

SEQ ID NO: 56538 - DNA, 13 bp, Artificial Sequence
  Oligonucleotide for detection of SNP TSC0015327
rtaaacattcaaa

SEQ ID NO: 56539 - DNA, 13 bp, Artificial Sequence
  Oligonucleotide for detection of SNP TSC0015327
tttgaacgtttay

SEQ ID NO: 56540 - DNA, 13 bp, Artificial Sequence
  Oligonucleotide for detection of SNP TSC0015327
rtaaacgttcaaa

SEQ ID NO: 56541 - DNA, 13 bp, Artificial Sequence
  Oligonucleotide for detection of SNP TSC0015327
gtaaatgtttaaa

SEQ ID NO: 56542 - DNA, 13 bp, Artificial Sequence
  Oligonucleotide for detection of SNP TSC0015327
tttaaacatttac

SEQ ID NO: 56543 - DNA, 13 bp, Artificial Sequence
  Oligonucleotide for detection of SNP TSC0015327
gtaaatatttaaa

SEQ ID NO: 56544 - DNA, 13 bp, Artificial Sequence
  Oligonucleotide for detection of SNP TSC0015327
tttaaatatttac

SEQ ID NO: 56545 - DNA, 13 bp, Artificial Sequence
  Oligonucleotide for detection of SNP TSC0015327
gtaaacgtttaaa

SEQ ID NO: 56546 - DNA, 13 bp, Artificial Sequence
  Oligonucleotide for detection of SNP TSC0015327
tttaaacgtttac

SEQ ID NO: 56547 - DNA, 13 bp, Artificial Sequence
  Oligonucleotide for detection of SNP TSC0015328
ataggaagaatgy

SEQ ID NO: 56548 - DNA, 13 bp, Artificial Sequence
  Oligonucleotide for detection of SNP TSC0015328
rcattcttcctat

SEQ ID NO: 56549 - DNA, 13 bp, Artificial Sequence
  Oligonucleotide for detection of SNP TSC0015328
ataggatgaatgy

SEQ ID NO: 56550 - DNA, 13 bp, Artificial Sequence
  Oligonucleotide for detection of SNP TSC0015328
rcattcatcctat

SEQ ID NO: 56551 - DNA, 13 bp, Artificial Sequence
  Oligonucleotide for detection of SNP TSC0015328
ataggacgaatgy

SEQ ID NO: 56552 - DNA, 13 bp, Artificial Sequence
  Oligonucleotide for detection of SNP TSC0015328
rcattcgtcctat

SEQ ID NO: 56553 - DNA, 13 bp, Artificial Sequence
  Oligonucleotide for detection of SNP TSC0015328
gtattttttttgt

SEQ ID NO: 56554 - DNA, 13 bp, Artificial Sequence
  Oligonucleotide for detection of SNP TSC0015328
acaaaaaaaatac

SEQ ID NO: 56555 - DNA, 13 bp, Artificial Sequence
  Oligonucleotide for detection of SNP TSC0015328
gtatttgttttgt

SEQ ID NO: 56556 - DNA, 13 bp, Artificial Sequence
  Oligonucleotide for detection of SNP TSC0015328
acaaaacaaatac

SEQ ID NO: 56557 - DNA, 13 bp, Artificial Sequence
  Oligonucleotide for detection of SNP TSC0015328
gtattcgttttgt

SEQ ID NO: 56558 - DNA, 13 bp, Artificial Sequence
  Oligonucleotide for detection of SNP TSC0015328
acaaaacgaatac

SEQ ID NO: 56559 - DNA, 13 bp, Artificial Sequence
  Oligonucleotide for detection of SNP TSC0015331
tggtttagggtta

SEQ ID NO: 56560 - DNA, 13 bp, Artificial Sequence
  Oligonucleotide for detection of SNP TSC0015331
taaccctaaacca

SEQ ID NO: 56561 - DNA, 13 bp, Artificial Sequence
  Oligonucleotide for detection of SNP TSC0015331
tggtttggggtta

SEQ ID NO: 56562 - DNA, 13 bp, Artificial Sequence
  Oligonucleotide for detection of SNP TSC0015331
taaccccaaacca

SEQ ID NO: 56563 - DNA, 13 bp, Artificial Sequence
  Oligonucleotide for detection of SNP TSC0015331
tggttcggggtta

SEQ ID NO: 56564 - DNA, 13 bp, Artificial Sequence
  Oligonucleotide for detection of SNP TSC0015331
taaccccgaacca

SEQ ID NO: 56565 - DNA, 13 bp, Artificial Sequence
  Oligonucleotide for detection of SNP TSC0015331
tagttttgggtta

SEQ ID NO: 56566 - DNA, 13 bp, Artificial Sequence
  Oligonucleotide for detection of SNP TSC0015331
taacccaaaacta

SEQ ID NO: 56567 - DNA, 13 bp, Artificial Sequence
  Oligonucleotide for detection of SNP TSC0015331
tagtttcgggtta

SEQ ID NO: 56568 - DNA, 13 bp, Artificial Sequence
  Oligonucleotide for detection of SNP TSC0015331
taacccgaaacta

SEQ ID NO: 56569 - DNA, 13 bp, Artificial Sequence
  Oligonucleotide for detection of SNP TSC0015332
ataagggagtttg

SEQ ID NO: 56570 - DNA, 13 bp, Artificial Sequence
  Oligonucleotide for detection of SNP TSC0015332
caaactcccttat

SEQ ID NO: 56571 - DNA, 13 bp, Artificial Sequence
  Oligonucleotide for detection of SNP TSC0015332
ataaggaagtttg

SEQ ID NO: 56572 - DNA, 13 bp, Artificial Sequence
  Oligonucleotide for detection of SNP TSC0015332
caaacttccttat

SEQ ID NO: 56573 - DNA, 13 bp, Artificial Sequence
  Oligonucleotide for detection of SNP TSC0015335
attattataagtt

SEQ ID NO: 56574 - DNA, 13 bp, Artificial Sequence
  Oligonucleotide for detection of SNP TSC0015335
aacttataataat

SEQ ID NO: 56575 - DNA, 13 bp, Artificial Sequence
  Oligonucleotide for detection of SNP TSC0015335
attattgtaagtt

SEQ ID NO: 56576 - DNA, 13 bp, Artificial Sequence
  Oligonucleotide for detection of SNP TSC0015335
aacttacaataat

SEQ ID NO: 56577 - DNA, 13 bp, Artificial Sequence
  Oligonucleotide for detection of SNP TSC0015336
tggttaggagagg

SEQ ID NO: 56578 - DNA, 13 bp, Artificial Sequence
  Oligonucleotide for detection of SNP TSC0015336
cctctcctaacca

SEQ ID NO: 56579 - DNA, 13 bp, Artificial Sequence
  Oligonucleotide for detection of SNP TSC0015336
tggttaagagagg

SEQ ID NO: 56580 - DNA, 13 bp, Artificial Sequence
  Oligonucleotide for detection of SNP TSC0015336
cctctcttaacca

SEQ ID NO: 56581 - DNA, 13 bp, Artificial Sequence
  Oligonucleotide for detection of SNP TSC0015339
atatttagagtgg

SEQ ID NO: 56582 - DNA, 13 bp, Artificial Sequence
  Oligonucleotide for detection of SNP TSC0015339
ccactctaaatat

SEQ ID NO: 56583 - DNA, 13 bp, Artificial Sequence
  Oligonucleotide for detection of SNP TSC0015339
atatttggagtgg

SEQ ID NO: 56584 - DNA, 13 bp, Artificial Sequence
  Oligonucleotide for detection of SNP TSC0015339
ccactccaaatat

SEQ ID NO: 56585 - DNA, 13 bp, Artificial Sequence
  Oligonucleotide for detection of SNP TSC0015339
atattcggagtgg

SEQ ID NO: 56586 - DNA, 13 bp, Artificial Sequence
  Oligonucleotide for detection of SNP TSC0015339
ccactccgaatat

SEQ ID NO: 56587 - DNA, 13 bp, Artificial Sequence
  Oligonucleotide for detection of SNP TSC0015339
ttattttgggtgt

SEQ ID NO: 56588 - DNA, 13 bp, Artificial Sequence
  Oligonucleotide for detection of SNP TSC0015339
acacccaaaataa

SEQ ID NO: 56589 - DNA, 13 bp, Artificial Sequence
  Oligonucleotide for detection of SNP TSC0015339
ttatttcgggtgt

SEQ ID NO: 56590 - DNA, 13 bp, Artificial Sequence
  Oligonucleotide for detection of SNP TSC0015339
acacccgaaataa

SEQ ID NO: 56591 - DNA, 13 bp, Artificial Sequence
  Oligonucleotide for detection of SNP TSC0015340
ttttttttaagtt

SEQ ID NO: 56592 - DNA, 13 bp, Artificial Sequence
  Oligonucleotide for detection of SNP TSC0015340
aacttaaaaaaaa

SEQ ID NO: 56593 - DNA, 13 bp, Artificial Sequence
  Oligonucleotide for detection of SNP TSC0015340
aatttgtaggaag

SEQ ID NO: 56594 - DNA, 13 bp, Artificial Sequence
  Oligonucleotide for detection of SNP TSC0015340
cttcctacaaatt

SEQ ID NO: 56595 - DNA, 13 bp, Artificial Sequence
  Oligonucleotide for detection of SNP TSC0015340
aatttgaaggaag

SEQ ID NO: 56596 - DNA, 13 bp, Artificial Sequence
  Oligonucleotide for detection of SNP TSC0015340
cttccttcaaatt

SEQ ID NO: 56597 - DNA, 13 bp, Artificial Sequence
  Oligonucleotide for detection of SNP TSC0015341
ttaagtgttaggy

SEQ ID NO: 56598 - DNA, 13 bp, Artificial Sequence
  Oligonucleotide for detection of SNP TSC0015341
rcctaacacttaa

SEQ ID NO: 56599 - DNA, 13 bp, Artificial Sequence
  Oligonucleotide for detection of SNP TSC0015341
ttaagtattaggy

SEQ ID NO: 56600 - DNA, 13 bp, Artificial Sequence
  Oligonucleotide for detection of SNP TSC0015341
rcctaatacttaa

SEQ ID NO: 56601 - DNA, 13 bp, Artificial Sequence
  Oligonucleotide for detection of SNP TSC0015342
gtaggttgggtat

SEQ ID NO: 56602 - DNA, 13 bp, Artificial Sequence
  Oligonucleotide for detection of SNP TSC0015342
atacccaacctac

SEQ ID NO: 56603 - DNA, 13 bp, Artificial Sequence
  Oligonucleotide for detection of SNP TSC0015342
gtaggtcgggtat

SEQ ID NO: 56604 - DNA, 13 bp, Artificial Sequence
  Oligonucleotide for detection of SNP TSC0015342
atacccgacctac

SEQ ID NO: 56605 - DNA, 13 bp, Artificial Sequence
  Oligonucleotide for detection of SNP TSC0015342
atgtttggtttgy

SEQ ID NO: 56606 - DNA, 13 bp, Artificial Sequence
  Oligonucleotide for detection of SNP TSC0015342
rcaaaccaaacat

SEQ ID NO: 56607 - DNA, 13 bp, Artificial Sequence
  Oligonucleotide for detection of SNP TSC0015342
atgtttagtttgy

SEQ ID NO: 56608 - DNA, 13 bp, Artificial Sequence
  Oligonucleotide for detection of SNP TSC0015342
rcaaactaaacat

SEQ ID NO: 56609 - DNA, 13 bp, Artificial Sequence
  Oligonucleotide for detection of SNP TSC0015342
atgttcggtttgy

SEQ ID NO: 56610 - DNA, 13 bp, Artificial Sequence
  Oligonucleotide for detection of SNP TSC0015342
rcaaaccgaacat

SEQ ID NO: 56611 - DNA, 13 bp, Artificial Sequence
  Oligonucleotide for detection of SNP TSC0015345
atatgggtaggtt

SEQ ID NO: 56612 - DNA, 13 bp, Artificial Sequence
  Oligonucleotide for detection of SNP TSC0015345
aacctacccatat

SEQ ID NO: 56613 - DNA, 13 bp, Artificial Sequence
  Oligonucleotide for detection of SNP TSC0015345
atatggataggtt

SEQ ID NO: 56614 - DNA, 13 bp, Artificial Sequence
  Oligonucleotide for detection of SNP TSC0015345
aacctatccatat

SEQ ID NO: 56615 - DNA, 13 bp, Artificial Sequence
  Oligonucleotide for detection of SNP TSC0015346
atttttgtaaagt

SEQ ID NO: 56616 - DNA, 13 bp, Artificial Sequence
  Oligonucleotide for detection of SNP TSC0015346
actttacaaaaat

SEQ ID NO: 56617 - DNA, 13 bp, Artificial Sequence
  Oligonucleotide for detection of SNP TSC0015346
atttttataaagt

SEQ ID NO: 56618 - DNA, 13 bp, Artificial Sequence
  Oligonucleotide for detection of SNP TSC0015346
actttataaaaat

SEQ ID NO: 56619 - DNA, 13 bp, Artificial Sequence
  Oligonucleotide for detection of SNP TSC0015348
tttgaggtgttgy

SEQ ID NO: 56620 - DNA, 13 bp, Artificial Sequence
  Oligonucleotide for detection of SNP TSC0015348
rcaacacctcaaa

SEQ ID NO: 56621 - DNA, 13 bp, Artificial Sequence
  Oligonucleotide for detection of SNP TSC0015348
tttgagatgttgy

SEQ ID NO: 56622 - DNA, 13 bp, Artificial Sequence
  Oligonucleotide for detection of SNP TSC0015348
rcaacatctcaaa

SEQ ID NO: 56623 - DNA, 13 bp, Artificial Sequence
  Oligonucleotide for detection of SNP TSC0015349
tttattttaattt

SEQ ID NO: 56624 - DNA, 13 bp, Artificial Sequence
  Oligonucleotide for detection of SNP TSC0015349
aaattaaaataaa

SEQ ID NO: 56625 - DNA, 13 bp, Artificial Sequence
  Oligonucleotide for detection of SNP TSC0015349
aggttaggataag

SEQ ID NO: 56626 - DNA, 13 bp, Artificial Sequence
  Oligonucleotide for detection of SNP TSC0015349
cttatcctaacct

SEQ ID NO: 56627 - DNA, 13 bp, Artificial Sequence
  Oligonucleotide for detection of SNP TSC0015349
aggttatgataag

SEQ ID NO: 56628 - DNA, 13 bp, Artificial Sequence
  Oligonucleotide for detection of SNP TSC0015349
cttatcataacct

SEQ ID NO: 56629 - DNA, 13 bp, Artificial Sequence
  Oligonucleotide for detection of SNP TSC0015349
aggttacgataag

SEQ ID NO: 56630 - DNA, 13 bp, Artificial Sequence
  Oligonucleotide for detection of SNP TSC0015349
cttatcgtaacct

SEQ ID NO: 56631 - DNA, 13 bp, Artificial Sequence
  Oligonucleotide for detection of SNP TSC0015350
gatgagaagatag

SEQ ID NO: 56632 - DNA, 13 bp, Artificial Sequence
  Oligonucleotide for detection of SNP TSC0015350
ctatcttctcatc

SEQ ID NO: 56633 - DNA, 13 bp, Artificial Sequence
  Oligonucleotide for detection of SNP TSC0015350
gatgagtagatag

SEQ ID NO: 56634 - DNA, 13 bp, Artificial Sequence
  Oligonucleotide for detection of SNP TSC0015350
ctatctactcatc

SEQ ID NO: 56635 - DNA, 13 bp, Artificial Sequence
  Oligonucleotide for detection of SNP TSC0015350
ttgtttttttaty

SEQ ID NO: 56636 - DNA, 13 bp, Artificial Sequence
  Oligonucleotide for detection of SNP TSC0015350
rataaaaaaacaa

SEQ ID NO: 56637 - DNA, 13 bp, Artificial Sequence
  Oligonucleotide for detection of SNP TSC0015353
ggtttaagaaatt

SEQ ID NO: 56638 - DNA, 13 bp, Artificial Sequence
  Oligonucleotide for detection of SNP TSC0015353
aatttcttaaacc

SEQ ID NO: 56639 - DNA, 13 bp, Artificial Sequence
  Oligonucleotide for detection of SNP TSC0015353
ggtttaggaaatt

SEQ ID NO: 56640 - DNA, 13 bp, Artificial Sequence
  Oligonucleotide for detection of SNP TSC0015353
aatttcctaaacc

SEQ ID NO: 56641 - DNA, 13 bp, Artificial Sequence
  Oligonucleotide for detection of SNP TSC0015354
tataagatgaagg

SEQ ID NO: 56642 - DNA, 13 bp, Artificial Sequence
  Oligonucleotide for detection of SNP TSC0015354
ccttcatcttata

SEQ ID NO: 56643 - DNA, 13 bp, Artificial Sequence
  Oligonucleotide for detection of SNP TSC0015354
tataaggtgaagg

SEQ ID NO: 56644 - DNA, 13 bp, Artificial Sequence
  Oligonucleotide for detection of SNP TSC0015354
ccttcaccttata

SEQ ID NO: 56645 - DNA, 13 bp, Artificial Sequence
  Oligonucleotide for detection of SNP TSC0015355
tgggtgtgtggag

SEQ ID NO: 56646 - DNA, 13 bp, Artificial Sequence
  Oligonucleotide for detection of SNP TSC0015355
ctccacacaccca

SEQ ID NO: 56647 - DNA, 13 bp, Artificial Sequence
  Oligonucleotide for detection of SNP TSC0015355
tgggtgcgtggag

SEQ ID NO: 56648 - DNA, 13 bp, Artificial Sequence
  Oligonucleotide for detection of SNP TSC0015355
ctccacgcaccca

SEQ ID NO: 56649 - DNA, 13 bp, Artificial Sequence
  Oligonucleotide for detection of SNP TSC0015355
ttttatgtattta

SEQ ID NO: 56650 - DNA, 13 bp, Artificial Sequence
  Oligonucleotide for detection of SNP TSC0015355
taaatacataaaa

SEQ ID NO: 56651 - DNA, 13 bp, Artificial Sequence
  Oligonucleotide for detection of SNP TSC0015355
ttttatatattta

SEQ ID NO: 56652 - DNA, 13 bp, Artificial Sequence
  Oligonucleotide for detection of SNP TSC0015355
taaatatataaaa

SEQ ID NO: 56653 - DNA, 13 bp, Artificial Sequence
  Oligonucleotide for detection of SNP TSC0015355
ttttacgtattta

SEQ ID NO: 56654 - DNA, 13 bp, Artificial Sequence
  Oligonucleotide for detection of SNP TSC0015355
taaatacgtaaaa

SEQ ID NO: 56655 - DNA, 13 bp, Artificial Sequence
  Oligonucleotide for detection of SNP TSC0015356
gataggagtttag

SEQ ID NO: 56656 - DNA, 13 bp, Artificial Sequence
  Oligonucleotide for detection of SNP TSC0015356
ctaaactcctatc

SEQ ID NO: 56657 - DNA, 13 bp, Artificial Sequence
  Oligonucleotide for detection of SNP TSC0015356
gataggggtttag

SEQ ID NO: 56658 - DNA, 13 bp, Artificial Sequence
  Oligonucleotide for detection of SNP TSC0015356
ctaaacccctatc

SEQ ID NO: 56659 - DNA, 13 bp, Artificial Sequence
  Oligonucleotide for detection of SNP TSC0015357
ttttttgaagaag

SEQ ID NO: 56660 - DNA, 13 bp, Artificial Sequence
  Oligonucleotide for detection of SNP TSC0015357
cttcttcaaaaaa

SEQ ID NO: 56661 - DNA, 13 bp, Artificial Sequence
  Oligonucleotide for detection of SNP TSC0015357
tttttcgaagaag

SEQ ID NO: 56662 - DNA, 13 bp, Artificial Sequence
  Oligonucleotide for detection of SNP TSC0015357
cttcttcgaaaaa

SEQ ID NO: 56663 - DNA, 13 bp, Artificial Sequence
  Oligonucleotide for detection of SNP TSC0015357
tttttttgaaagg

SEQ ID NO: 56664 - DNA, 13 bp, Artificial Sequence
  Oligonucleotide for detection of SNP TSC0015357
cctttcaaaaaaa

SEQ ID NO: 56665 - DNA, 13 bp, Artificial Sequence
  Oligonucleotide for detection of SNP TSC0015357
ttttttcgaaagg

SEQ ID NO: 56666 - DNA, 13 bp, Artificial Sequence
  Oligonucleotide for detection of SNP TSC0015357
cctttcgaaaaaa

SEQ ID NO: 56667 - DNA, 13 bp, Artificial Sequence
  Oligonucleotide for detection of SNP TSC0015358
aattttatttttt

SEQ ID NO: 56668 - DNA, 13 bp, Artificial Sequence
  Oligonucleotide for detection of SNP TSC0015358
aaaaaataaaatt

SEQ ID NO: 56669 - DNA, 13 bp, Artificial Sequence
  Oligonucleotide for detection of SNP TSC0015360
tatttagttggty

SEQ ID NO: 56670 - DNA, 13 bp, Artificial Sequence
  Oligonucleotide for detection of SNP TSC0015360
raccaactaaata

SEQ ID NO: 56671 - DNA, 13 bp, Artificial Sequence
  Oligonucleotide for detection of SNP TSC0015360
tatttaattggty

SEQ ID NO: 56672 - DNA, 13 bp, Artificial Sequence
  Oligonucleotide for detection of SNP TSC0015360
raccaattaaata

SEQ ID NO: 56673 - DNA, 13 bp, Artificial Sequence
  Oligonucleotide for detection of SNP TSC0015360
tatttagtcggty

SEQ ID NO: 56674 - DNA, 13 bp, Artificial Sequence
  Oligonucleotide for detection of SNP TSC0015360
raccgactaaata

SEQ ID NO: 56675 - DNA, 13 bp, Artificial Sequence
  Oligonucleotide for detection of SNP TSC0015360
tatttaatcggty

SEQ ID NO: 56676 - DNA, 13 bp, Artificial Sequence
  Oligonucleotide for detection of SNP TSC0015360
raccgattaaata

SEQ ID NO: 56677 - DNA, 13 bp, Artificial Sequence
  Oligonucleotide for detection of SNP TSC0015363
attgttaattatt

SEQ ID NO: 56678 - DNA, 13 bp, Artificial Sequence
  Oligonucleotide for detection of SNP TSC0015363
aataattaacaat

SEQ ID NO: 56679 - DNA, 13 bp, Artificial Sequence
  Oligonucleotide for detection of SNP TSC0015363
attgtttattatt

SEQ ID NO: 56680 - DNA, 13 bp, Artificial Sequence
  Oligonucleotide for detection of SNP TSC0015363
aataataaacaat

SEQ ID NO: 56681 - DNA, 13 bp, Artificial Sequence
  Oligonucleotide for detection of SNP TSC0015363
aatagttaataat

SEQ ID NO: 56682 - DNA, 13 bp, Artificial Sequence
  Oligonucleotide for detection of SNP TSC0015363
attattaactatt

SEQ ID NO: 56683 - DNA, 13 bp, Artificial Sequence
  Oligonucleotide for detection of SNP TSC0015363
aatagtaaataat

SEQ ID NO: 56684 - DNA, 13 bp, Artificial Sequence
  Oligonucleotide for detection of SNP TSC0015363
attatttactatt

SEQ ID NO: 56685 - DNA, 13 bp, Artificial Sequence
  Oligonucleotide for detection of SNP TSC0015364
tagttaagttgtg

SEQ ID NO: 56686 - DNA, 13 bp, Artificial Sequence
  Oligonucleotide for detection of SNP TSC0015364
cacaacttaacta

SEQ ID NO: 56687 - DNA, 13 bp, Artificial Sequence
  Oligonucleotide for detection of SNP TSC0015364
tagttaggttgtg

SEQ ID NO: 56688 - DNA, 13 bp, Artificial Sequence
  Oligonucleotide for detection of SNP TSC0015364
cacaacctaacta

SEQ ID NO: 56689 - DNA, 13 bp, Artificial Sequence
  Oligonucleotide for detection of SNP TSC0015366
gatggaagtgggg

SEQ ID NO: 56690 - DNA, 13 bp, Artificial Sequence
  Oligonucleotide for detection of SNP TSC0015366
ccccacttccatc

SEQ ID NO: 56691 - DNA, 13 bp, Artificial Sequence
  Oligonucleotide for detection of SNP TSC0015366
gatggaggtgggg

SEQ ID NO: 56692 - DNA, 13 bp, Artificial Sequence
  Oligonucleotide for detection of SNP TSC0015366
ccccacctccatc

SEQ ID NO: 56693 - DNA, 13 bp, Artificial Sequence
  Oligonucleotide for detection of SNP TSC0015367
tgtataatttgty

SEQ ID NO: 56694 - DNA, 13 bp, Artificial Sequence
  Oligonucleotide for detection of SNP TSC0015367
racaaattataca

SEQ ID NO: 56695 - DNA, 13 bp, Artificial Sequence
  Oligonucleotide for detection of SNP TSC0015367
tgtatagtttgty

SEQ ID NO: 56696 - DNA, 13 bp, Artificial Sequence
  Oligonucleotide for detection of SNP TSC0015367
racaaactataca

SEQ ID NO: 56697 - DNA, 13 bp, Artificial Sequence
  Oligonucleotide for detection of SNP TSC0015367
cgtataatttgty

SEQ ID NO: 56698 - DNA, 13 bp, Artificial Sequence
  Oligonucleotide for detection of SNP TSC0015367
racaaattatacg

SEQ ID NO: 56699 - DNA, 13 bp, Artificial Sequence
  Oligonucleotide for detection of SNP TSC0015367
cgtatagtttgty

SEQ ID NO: 56700 - DNA, 13 bp, Artificial Sequence
  Oligonucleotide for detection of SNP TSC0015367
racaaactatacg

SEQ ID NO: 56701 - DNA, 13 bp, Artificial Sequence
  Oligonucleotide for detection of SNP TSC0015368
atttaatttaggy

SEQ ID NO: 56702 - DNA, 13 bp, Artificial Sequence
  Oligonucleotide for detection of SNP TSC0015368
rcctaaattaaat

SEQ ID NO: 56703 - DNA, 13 bp, Artificial Sequence
  Oligonucleotide for detection of SNP TSC0015368
atttaagttaggy

SEQ ID NO: 56704 - DNA, 13 bp, Artificial Sequence
  Oligonucleotide for detection of SNP TSC0015368
rcctaacttaaat

SEQ ID NO: 56705 - DNA, 13 bp, Artificial Sequence
  Oligonucleotide for detection of SNP TSC0015368
gtttaagttgggt

SEQ ID NO: 56706 - DNA, 13 bp, Artificial Sequence
  Oligonucleotide for detection of SNP TSC0015368
acccaacttaaac

SEQ ID NO: 56707 - DNA, 13 bp, Artificial Sequence
  Oligonucleotide for detection of SNP TSC0015368
gtttaatttgggt

SEQ ID NO: 56708 - DNA, 13 bp, Artificial Sequence
  Oligonucleotide for detection of SNP TSC0015368
acccaaattaaac

SEQ ID NO: 56709 - DNA, 13 bp, Artificial Sequence
  Oligonucleotide for detection of SNP TSC0015369
ttttttgtttagg

SEQ ID NO: 56710 - DNA, 13 bp, Artificial Sequence
  Oligonucleotide for detection of SNP TSC0015369
cctaaacaaaaaa

SEQ ID NO: 56711 - DNA, 13 bp, Artificial Sequence
  Oligonucleotide for detection of SNP TSC0015369
ttttttatttagg

SEQ ID NO: 56712 - DNA, 13 bp, Artificial Sequence
  Oligonucleotide for detection of SNP TSC0015369
cctaaataaaaaa

SEQ ID NO: 56713 - DNA, 13 bp, Artificial Sequence
  Oligonucleotide for detection of SNP TSC0015370
gtggaagtgatty

SEQ ID NO: 56714 - DNA, 13 bp, Artificial Sequence
  Oligonucleotide for detection of SNP TSC0015370
raatcacttccac

SEQ ID NO: 56715 - DNA, 13 bp, Artificial Sequence
  Oligonucleotide for detection of SNP TSC0015370
gtggaaatgatty

SEQ ID NO: 56716 - DNA, 13 bp, Artificial Sequence
  Oligonucleotide for detection of SNP TSC0015370
raatcatttccac

SEQ ID NO: 56717 - DNA, 13 bp, Artificial Sequence
  Oligonucleotide for detection of SNP TSC0015371
tagagagttttgt

SEQ ID NO: 56718 - DNA, 13 bp, Artificial Sequence
  Oligonucleotide for detection of SNP TSC0015371
acaaaactctcta

SEQ ID NO: 56719 - DNA, 13 bp, Artificial Sequence
  Oligonucleotide for detection of SNP TSC0015371
tagagatttttgt

SEQ ID NO: 56720 - DNA, 13 bp, Artificial Sequence
  Oligonucleotide for detection of SNP TSC0015371
acaaaaatctcta

SEQ ID NO: 56721 - DNA, 13 bp, Artificial Sequence
  Oligonucleotide for detection of SNP TSC0015371
ataagattttttg

SEQ ID NO: 56722 - DNA, 13 bp, Artificial Sequence
  Oligonucleotide for detection of SNP TSC0015371
caaaaaatcttat

SEQ ID NO: 56723 - DNA, 13 bp, Artificial Sequence
  Oligonucleotide for detection of SNP TSC0015371
ataagaatttttg

SEQ ID NO: 56724 - DNA, 13 bp, Artificial Sequence
  Oligonucleotide for detection of SNP TSC0015371
caaaaattcttat

SEQ ID NO: 56725 - DNA, 13 bp, Artificial Sequence
  Oligonucleotide for detection of SNP TSC0015372
ttattttgtttta

SEQ ID NO: 56726 - DNA, 13 bp, Artificial Sequence
  Oligonucleotide for detection of SNP TSC0015372
taaaacaaaataa

SEQ ID NO: 56727 - DNA, 13 bp, Artificial Sequence
  Oligonucleotide for detection of SNP TSC0015372
ttatttcgtttta

SEQ ID NO: 56728 - DNA, 13 bp, Artificial Sequence
  Oligonucleotide for detection of SNP TSC0015372
taaaacgaaataa

SEQ ID NO: 56729 - DNA, 13 bp, Artificial Sequence
  Oligonucleotide for detection of SNP TSC0015372
taagatgagatga

SEQ ID NO: 56730 - DNA, 13 bp, Artificial Sequence
  Oligonucleotide for detection of SNP TSC0015372
tcatctcatctta

SEQ ID NO: 56731 - DNA, 13 bp, Artificial Sequence
  Oligonucleotide for detection of SNP TSC0015372
taagataagatga

SEQ ID NO: 56732 - DNA, 13 bp, Artificial Sequence
  Oligonucleotide for detection of SNP TSC0015372
tcatcttatctta

SEQ ID NO: 56733 - DNA, 13 bp, Artificial Sequence
  Oligonucleotide for detection of SNP TSC0015372
taagacgagatga

SEQ ID NO: 56734 - DNA, 13 bp, Artificial Sequence
  Oligonucleotide for detection of SNP TSC0015372
tcatctcgtctta

SEQ ID NO: 56735 - DNA, 13 bp, Artificial Sequence
  Oligonucleotide for detection of SNP TSC0015373
ttgatttgtaaaa

SEQ ID NO: 56736 - DNA, 13 bp, Artificial Sequence
  Oligonucleotide for detection of SNP TSC0015373
ttttacaaatcaa

SEQ ID NO: 56737 - DNA, 13 bp, Artificial Sequence
  Oligonucleotide for detection of SNP TSC0015373
ttgattcgtaaaa

SEQ ID NO: 56738 - DNA, 13 bp, Artificial Sequence
  Oligonucleotide for detection of SNP TSC0015373
ttttacgaatcaa

SEQ ID NO: 56739 - DNA, 13 bp, Artificial Sequence
  Oligonucleotide for detection of SNP TSC0015373
ttttatggattaa

SEQ ID NO: 56740 - DNA, 13 bp, Artificial Sequence
  Oligonucleotide for detection of SNP TSC0015373
ttaatccataaaa

SEQ ID NO: 56741 - DNA, 13 bp, Artificial Sequence
  Oligonucleotide for detection of SNP TSC0015373
ttttatagattaa

SEQ ID NO: 56742 - DNA, 13 bp, Artificial Sequence
  Oligonucleotide for detection of SNP TSC0015373
ttaatctataaaa

SEQ ID NO: 56743 - DNA, 13 bp, Artificial Sequence
  Oligonucleotide for detection of SNP TSC0015373
ttttacggattaa

SEQ ID NO: 56744 - DNA, 13 bp, Artificial Sequence
  Oligonucleotide for detection of SNP TSC0015373
ttaatccgtaaaa

SEQ ID NO: 56745 - DNA, 13 bp, Artificial Sequence
  Oligonucleotide for detection of SNP TSC0015376
gtagttagtttay

SEQ ID NO: 56746 - DNA, 13 bp, Artificial Sequence
  Oligonucleotide for detection of SNP TSC0015376
rtaaactaactac

SEQ ID NO: 56747 - DNA, 13 bp, Artificial Sequence
  Oligonucleotide for detection of SNP TSC0015376
gtagtttgtttay

SEQ ID NO: 56748 - DNA, 13 bp, Artificial Sequence
  Oligonucleotide for detection of SNP TSC0015376
rtaaacaaactac

SEQ ID NO: 56749 - DNA, 13 bp, Artificial Sequence
  Oligonucleotide for detection of SNP TSC0015376
gtggattagttgy

SEQ ID NO: 56750 - DNA, 13 bp, Artificial Sequence
  Oligonucleotide for detection of SNP TSC0015376
rcaactaatccac

SEQ ID NO: 56751 - DNA, 13 bp, Artificial Sequence
  Oligonucleotide for detection of SNP TSC0015376
gtggataagttgy

SEQ ID NO: 56752 - DNA, 13 bp, Artificial Sequence
  Oligonucleotide for detection of SNP TSC0015376
rcaacttatccac

SEQ ID NO: 56753 - DNA, 13 bp, Artificial Sequence
  Oligonucleotide for detection of SNP TSC0015377
agttgaatttggy

SEQ ID NO: 56754 - DNA, 13 bp, Artificial Sequence
  Oligonucleotide for detection of SNP TSC0015377
rccaaattcaact

SEQ ID NO: 56755 - DNA, 13 bp, Artificial Sequence
  Oligonucleotide for detection of SNP TSC0015377
agttgattttggy

SEQ ID NO: 56756 - DNA, 13 bp, Artificial Sequence
  Oligonucleotide for detection of SNP TSC0015377
rccaaaatcaact

SEQ ID NO: 56757 - DNA, 13 bp, Artificial Sequence
  Oligonucleotide for detection of SNP TSC0015377
gttaagtttagtt

SEQ ID NO: 56758 - DNA, 13 bp, Artificial Sequence
  Oligonucleotide for detection of SNP TSC0015377
aactaaacttaac

SEQ ID NO: 56759 - DNA, 13 bp, Artificial Sequence
  Oligonucleotide for detection of SNP TSC0015377
gttaaggttagtt

SEQ ID NO: 56760 - DNA, 13 bp, Artificial Sequence
  Oligonucleotide for detection of SNP TSC0015377
aactaaccttaac

SEQ ID NO: 56761 - DNA, 13 bp, Artificial Sequence
  Oligonucleotide for detection of SNP TSC0015378
agtattattagaa

SEQ ID NO: 56762 - DNA, 13 bp, Artificial Sequence
  Oligonucleotide for detection of SNP TSC0015378
ttctaataatact

SEQ ID NO: 56763 - DNA, 13 bp, Artificial Sequence
  Oligonucleotide for detection of SNP TSC0015378
agtattgttagaa

SEQ ID NO: 56764 - DNA, 13 bp, Artificial Sequence
  Oligonucleotide for detection of SNP TSC0015378
ttctaacaatact

SEQ ID NO: 56765 - DNA, 13 bp, Artificial Sequence
  Oligonucleotide for detection of SNP TSC0015379
atgttgattgttt

SEQ ID NO: 56766 - DNA, 13 bp, Artificial Sequence
  Oligonucleotide for detection of SNP TSC0015379
aaacaatcaacat

SEQ ID NO: 56767 - DNA, 13 bp, Artificial Sequence
  Oligonucleotide for detection of SNP TSC0015379
atgttggttgttt

SEQ ID NO: 56768 - DNA, 13 bp, Artificial Sequence
  Oligonucleotide for detection of SNP TSC0015379
aaacaaccaacat

SEQ ID NO: 56769 - DNA, 13 bp, Artificial Sequence
  Oligonucleotide for detection of SNP TSC0015380
gagatatgtggtt

SEQ ID NO: 56770 - DNA, 13 bp, Artificial Sequence
  Oligonucleotide for detection of SNP TSC0015380
aaccacatatctc

SEQ ID NO: 56771 - DNA, 13 bp, Artificial Sequence
  Oligonucleotide for detection of SNP TSC0015380
gagatacgtggtt

SEQ ID NO: 56772 - DNA, 13 bp, Artificial Sequence
  Oligonucleotide for detection of SNP TSC0015380
aaccacgtatctc

SEQ ID NO: 56773 - DNA, 13 bp, Artificial Sequence
  Oligonucleotide for detection of SNP TSC0015380
agttatgtgttty

SEQ ID NO: 56774 - DNA, 13 bp, Artificial Sequence
  Oligonucleotide for detection of SNP TSC0015380
raaacacataact

SEQ ID NO: 56775 - DNA, 13 bp, Artificial Sequence
  Oligonucleotide for detection of SNP TSC0015380
agttatatgttty

SEQ ID NO: 56776 - DNA, 13 bp, Artificial Sequence
  Oligonucleotide for detection of SNP TSC0015380
raaacatataact

SEQ ID NO: 56777 - DNA, 13 bp, Artificial Sequence
  Oligonucleotide for detection of SNP TSC0015380
agttacgtgttty

SEQ ID NO: 56778 - DNA, 13 bp, Artificial Sequence
  Oligonucleotide for detection of SNP TSC0015380
raaacacgtaact

SEQ ID NO: 56779 - DNA, 13 bp, Artificial Sequence
  Oligonucleotide for detection of SNP TSC0015381
aagttatgggttt

SEQ ID NO: 56780 - DNA, 13 bp, Artificial Sequence
  Oligonucleotide for detection of SNP TSC0015381
aaacccataactt

SEQ ID NO: 56781 - DNA, 13 bp, Artificial Sequence
  Oligonucleotide for detection of SNP TSC0015381
aagttacgggttt

SEQ ID NO: 56782 - DNA, 13 bp, Artificial Sequence
  Oligonucleotide for detection of SNP TSC0015381
aaacccgtaactt

SEQ ID NO: 56783 - DNA, 13 bp, Artificial Sequence
  Oligonucleotide for detection of SNP TSC0015381
aggtttgtggttt

SEQ ID NO: 56784 - DNA, 13 bp, Artificial Sequence
  Oligonucleotide for detection of SNP TSC0015381
aaaccacaaacct

SEQ ID NO: 56785 - DNA, 13 bp, Artificial Sequence
  Oligonucleotide for detection of SNP TSC0015381
aggtttatggttt

SEQ ID NO: 56786 - DNA, 13 bp, Artificial Sequence
  Oligonucleotide for detection of SNP TSC0015381
aaaccataaacct

SEQ ID NO: 56787 - DNA, 13 bp, Artificial Sequence
  Oligonucleotide for detection of SNP TSC0015381
aggttcgtggttt

SEQ ID NO: 56788 - DNA, 13 bp, Artificial Sequence
  Oligonucleotide for detection of SNP TSC0015381
aaaccacgaacct

SEQ ID NO: 56789 - DNA, 13 bp, Artificial Sequence
  Oligonucleotide for detection of SNP TSC0015382
taaaatgagaagg

SEQ ID NO: 56790 - DNA, 13 bp, Artificial Sequence
  Oligonucleotide for detection of SNP TSC0015382
ccttctcatttta

SEQ ID NO: 56791 - DNA, 13 bp, Artificial Sequence
  Oligonucleotide for detection of SNP TSC0015382
taaaataagaagg

SEQ ID NO: 56792 - DNA, 13 bp, Artificial Sequence
  Oligonucleotide for detection of SNP TSC0015382
ccttcttatttta

SEQ ID NO: 56793 - DNA, 13 bp, Artificial Sequence
  Oligonucleotide for detection of SNP TSC0015382
taaaacgagaagg

SEQ ID NO: 56794 - DNA, 13 bp, Artificial Sequence
  Oligonucleotide for detection of SNP TSC0015382
ccttctcgtttta

SEQ ID NO: 56795 - DNA, 13 bp, Artificial Sequence
  Oligonucleotide for detection of SNP TSC0015383
ttttggttattta

SEQ ID NO: 56796 - DNA, 13 bp, Artificial Sequence
  Oligonucleotide for detection of SNP TSC0015383
taaataaccaaaa

SEQ ID NO: 56797 - DNA, 13 bp, Artificial Sequence
  Oligonucleotide for detection of SNP TSC0015383
ttttgggtattta

SEQ ID NO: 56798 - DNA, 13 bp, Artificial Sequence
  Oligonucleotide for detection of SNP TSC0015383
taaatacccaaaa

SEQ ID NO: 56799 - DNA, 13 bp, Artificial Sequence
  Oligonucleotide for detection of SNP TSC0015383
tggatggttaggg

SEQ ID NO: 56800 - DNA, 13 bp, Artificial Sequence
  Oligonucleotide for detection of SNP TSC0015383
ccctaaccatcca

SEQ ID NO: 56801 - DNA, 13 bp, Artificial Sequence
  Oligonucleotide for detection of SNP TSC0015383
tggatgtttaggg

SEQ ID NO: 56802 - DNA, 13 bp, Artificial Sequence
  Oligonucleotide for detection of SNP TSC0015383
ccctaaacatcca

SEQ ID NO: 56803 - DNA, 13 bp, Artificial Sequence
  Oligonucleotide for detection of SNP TSC0015384
gagtttaaggttg

SEQ ID NO: 56804 - DNA, 13 bp, Artificial Sequence
  Oligonucleotide for detection of SNP TSC0015384
caaccttaaactc

SEQ ID NO: 56805 - DNA, 13 bp, Artificial Sequence
  Oligonucleotide for detection of SNP TSC0015384
gagtttgaggttg

SEQ ID NO: 56806 - DNA, 13 bp, Artificial Sequence
  Oligonucleotide for detection of SNP TSC0015384
caacctcaaactc

SEQ ID NO: 56807 - DNA, 13 bp, Artificial Sequence
  Oligonucleotide for detection of SNP TSC0015384
gagttcgaggttg

SEQ ID NO: 56808 - DNA, 13 bp, Artificial Sequence
  Oligonucleotide for detection of SNP TSC0015384
caacctcgaactc

SEQ ID NO: 56809 - DNA, 13 bp, Artificial Sequence
  Oligonucleotide for detection of SNP TSC0015384
tagttttgaatty

SEQ ID NO: 56810 - DNA, 13 bp, Artificial Sequence
  Oligonucleotide for detection of SNP TSC0015384
raattcaaaacta

SEQ ID NO: 56811 - DNA, 13 bp, Artificial Sequence
  Oligonucleotide for detection of SNP TSC0015384
tagtttcgaatty

SEQ ID NO: 56812 - DNA, 13 bp, Artificial Sequence
  Oligonucleotide for detection of SNP TSC0015384
raattcgaaacta

SEQ ID NO: 56813 - DNA, 13 bp, Artificial Sequence
  Oligonucleotide for detection of SNP TSC0015385
gtaatagtgttgt

SEQ ID NO: 56814 - DNA, 13 bp, Artificial Sequence
  Oligonucleotide for detection of SNP TSC0015385
acaacactattac

SEQ ID NO: 56815 - DNA, 13 bp, Artificial Sequence
  Oligonucleotide for detection of SNP TSC0015385
gtaataatgttgt

SEQ ID NO: 56816 - DNA, 13 bp, Artificial Sequence
  Oligonucleotide for detection of SNP TSC0015385
acaacattattac

SEQ ID NO: 56817 - DNA, 13 bp, Artificial Sequence
  Oligonucleotide for detection of SNP TSC0015386
agataaataggtg

SEQ ID NO: 56818 - DNA, 13 bp, Artificial Sequence
  Oligonucleotide for detection of SNP TSC0015386
cacctatttatct

SEQ ID NO: 56819 - DNA, 13 bp, Artificial Sequence
  Oligonucleotide for detection of SNP TSC0015386
agataagtaggtg

SEQ ID NO: 56820 - DNA, 13 bp, Artificial Sequence
  Oligonucleotide for detection of SNP TSC0015386
cacctacttatct

SEQ ID NO: 56821 - DNA, 13 bp, Artificial Sequence
  Oligonucleotide for detection of SNP TSC0015387
aaaaaagtagatg

SEQ ID NO: 56822 - DNA, 13 bp, Artificial Sequence
  Oligonucleotide for detection of SNP TSC0015387
catctactttttt

SEQ ID NO: 56823 - DNA, 13 bp, Artificial Sequence
  Oligonucleotide for detection of SNP TSC0015387
aaaaaaatagatg

SEQ ID NO: 56824 - DNA, 13 bp, Artificial Sequence
  Oligonucleotide for detection of SNP TSC0015387
catctattttttt

SEQ ID NO: 56825 - DNA, 13 bp, Artificial Sequence
  Oligonucleotide for detection of SNP TSC0015388
ttaattaaagtat

SEQ ID NO: 56826 - DNA, 13 bp, Artificial Sequence
  Oligonucleotide for detection of SNP TSC0015388
atactttaattaa

SEQ ID NO: 56827 - DNA, 13 bp, Artificial Sequence
  Oligonucleotide for detection of SNP TSC0015388
ttaattgaagtat

SEQ ID NO: 56828 - DNA, 13 bp, Artificial Sequence
  Oligonucleotide for detection of SNP TSC0015388
atacttcaattaa

SEQ ID NO: 56829 - DNA, 13 bp, Artificial Sequence
  Oligonucleotide for detection of SNP TSC0015389
tgggttagatata

SEQ ID NO: 56830 - DNA, 13 bp, Artificial Sequence
  Oligonucleotide for detection of SNP TSC0015389
tatatctaaccca

SEQ ID NO: 56831 - DNA, 13 bp, Artificial Sequence
  Oligonucleotide for detection of SNP TSC0015389
tgggttggatata

SEQ ID NO: 56832 - DNA, 13 bp, Artificial Sequence
  Oligonucleotide for detection of SNP TSC0015389
tatatccaaccca

SEQ ID NO: 56833 - DNA, 13 bp, Artificial Sequence
  Oligonucleotide for detection of SNP TSC0015389
tgggtcggatata

SEQ ID NO: 56834 - DNA, 13 bp, Artificial Sequence
  Oligonucleotide for detection of SNP TSC0015389
tatatccgaccca

SEQ ID NO: 56835 - DNA, 13 bp, Artificial Sequence
  Oligonucleotide for detection of SNP TSC0015389
tgtgtttggttta

SEQ ID NO: 56836 - DNA, 13 bp, Artificial Sequence
  Oligonucleotide for detection of SNP TSC0015389
taaaccaaacaca

SEQ ID NO: 56837 - DNA, 13 bp, Artificial Sequence
  Oligonucleotide for detection of SNP TSC0015389
tgtgttcggttta

SEQ ID NO: 56838 - DNA, 13 bp, Artificial Sequence
  Oligonucleotide for detection of SNP TSC0015389
taaaccgaacaca

SEQ ID NO: 56839 - DNA, 13 bp, Artificial Sequence
  Oligonucleotide for detection of SNP TSC0015390
gtatatgtgttga

SEQ ID NO: 56840 - DNA, 13 bp, Artificial Sequence
  Oligonucleotide for detection of SNP TSC0015390
tcaacacatatac

SEQ ID NO: 56841 - DNA, 13 bp, Artificial Sequence
  Oligonucleotide for detection of SNP TSC0015390
gtatatatgttga

SEQ ID NO: 56842 - DNA, 13 bp, Artificial Sequence
  Oligonucleotide for detection of SNP TSC0015390
tcaacatatatac

SEQ ID NO: 56843 - DNA, 13 bp, Artificial Sequence
  Oligonucleotide for detection of SNP TSC0015391
agggatgggagga

SEQ ID NO: 56844 - DNA, 13 bp, Artificial Sequence
  Oligonucleotide for detection of SNP TSC0015391
tcctcccatccct

SEQ ID NO: 56845 - DNA, 13 bp, Artificial Sequence
  Oligonucleotide for detection of SNP TSC0015391
agggataggagga

SEQ ID NO: 56846 - DNA, 13 bp, Artificial Sequence
  Oligonucleotide for detection of SNP TSC0015391
tcctcctatccct

SEQ ID NO: 56847 - DNA, 13 bp, Artificial Sequence
  Oligonucleotide for detection of SNP TSC0015392
gtggtgaattttt

SEQ ID NO: 56848 - DNA, 13 bp, Artificial Sequence
  Oligonucleotide for detection of SNP TSC0015392
aaaaattcaccac

SEQ ID NO: 56849 - DNA, 13 bp, Artificial Sequence
  Oligonucleotide for detection of SNP TSC0015392
gtggtgtattttt

SEQ ID NO: 56850 - DNA, 13 bp, Artificial Sequence
  Oligonucleotide for detection of SNP TSC0015392
aaaaatacaccac

SEQ ID NO: 56851 - DNA, 13 bp, Artificial Sequence
  Oligonucleotide for detection of SNP TSC0015392
aagaatttattay

SEQ ID NO: 56852 - DNA, 13 bp, Artificial Sequence
  Oligonucleotide for detection of SNP TSC0015392
rtaataaattctt

SEQ ID NO: 56853 - DNA, 13 bp, Artificial Sequence
  Oligonucleotide for detection of SNP TSC0015392
aagaatatattay

SEQ ID NO: 56854 - DNA, 13 bp, Artificial Sequence
  Oligonucleotide for detection of SNP TSC0015392
rtaatatattctt

SEQ ID NO: 56855 - DNA, 13 bp, Artificial Sequence
  Oligonucleotide for detection of SNP TSC0015394
tttaaaattatag

SEQ ID NO: 56856 - DNA, 13 bp, Artificial Sequence
  Oligonucleotide for detection of SNP TSC0015394
ctataattttaaa

SEQ ID NO: 56857 - DNA, 13 bp, Artificial Sequence
  Oligonucleotide for detection of SNP TSC0015394
tttaaagttatag

SEQ ID NO: 56858 - DNA, 13 bp, Artificial Sequence
  Oligonucleotide for detection of SNP TSC0015394
ctataactttaaa

SEQ ID NO: 56859 - DNA, 13 bp, Artificial Sequence
  Oligonucleotide for detection of SNP TSC0015395
gttattatgagaa

SEQ ID NO: 56860 - DNA, 13 bp, Artificial Sequence
  Oligonucleotide for detection of SNP TSC0015395
ttctcataataac

SEQ ID NO: 56861 - DNA, 13 bp, Artificial Sequence
  Oligonucleotide for detection of SNP TSC0015395
gttattgtgagaa

SEQ ID NO: 56862 - DNA, 13 bp, Artificial Sequence
  Oligonucleotide for detection of SNP TSC0015395
ttctcacaataac

SEQ ID NO: 56863 - DNA, 13 bp, Artificial Sequence
  Oligonucleotide for detection of SNP TSC0015395
gttatcgtgagaa

SEQ ID NO: 56864 - DNA, 13 bp, Artificial Sequence
  Oligonucleotide for detection of SNP TSC0015395
ttctcacgataac

SEQ ID NO: 56865 - DNA, 13 bp, Artificial Sequence
  Oligonucleotide for detection of SNP TSC0015395
tttttatgataay

SEQ ID NO: 56866 - DNA, 13 bp, Artificial Sequence
  Oligonucleotide for detection of SNP TSC0015395
rttatcataaaaa

SEQ ID NO: 56867 - DNA, 13 bp, Artificial Sequence
  Oligonucleotide for detection of SNP TSC0015395
tttttacgataay

SEQ ID NO: 56868 - DNA, 13 bp, Artificial Sequence
  Oligonucleotide for detection of SNP TSC0015395
rttatcgtaaaaa

SEQ ID NO: 56869 - DNA, 13 bp, Artificial Sequence
  Oligonucleotide for detection of SNP TSC0015396
gggttaggggaga

SEQ ID NO: 56870 - DNA, 13 bp, Artificial Sequence
  Oligonucleotide for detection of SNP TSC0015396
tctcccctaaccc

SEQ ID NO: 56871 - DNA, 13 bp, Artificial Sequence
  Oligonucleotide for detection of SNP TSC0015396
gggttatgggaga

SEQ ID NO: 56872 - DNA, 13 bp, Artificial Sequence
  Oligonucleotide for detection of SNP TSC0015396
tctcccataaccc

SEQ ID NO: 56873 - DNA, 13 bp, Artificial Sequence
  Oligonucleotide for detection of SNP TSC0015396
gggttacgggaga

SEQ ID NO: 56874 - DNA, 13 bp, Artificial Sequence
  Oligonucleotide for detection of SNP TSC0015396
tctcccgtaaccc

SEQ ID NO: 56875 - DNA, 13 bp, Artificial Sequence
  Oligonucleotide for detection of SNP TSC0015397
tttggtattgatt

SEQ ID NO: 56876 - DNA, 13 bp, Artificial Sequence
  Oligonucleotide for detection of SNP TSC0015397
aatcaataccaaa

SEQ ID NO: 56877 - DNA, 13 bp, Artificial Sequence
  Oligonucleotide for detection of SNP TSC0015397
tttggtgttgatt

SEQ ID NO: 56878 - DNA, 13 bp, Artificial Sequence
  Oligonucleotide for detection of SNP TSC0015397
aatcaacaccaaa

SEQ ID NO: 56879 - DNA, 13 bp, Artificial Sequence
  Oligonucleotide for detection of SNP TSC0015397
tttggcgttgatt

SEQ ID NO: 56880 - DNA, 13 bp, Artificial Sequence
  Oligonucleotide for detection of SNP TSC0015397
aatcaacgccaaa

SEQ ID NO: 56881 - DNA, 13 bp, Artificial Sequence
  Oligonucleotide for detection of SNP TSC0015397
aattagtgttagg

SEQ ID NO: 56882 - DNA, 13 bp, Artificial Sequence
  Oligonucleotide for detection of SNP TSC0015397
cctaacactaatt

SEQ ID NO: 56883 - DNA, 13 bp, Artificial Sequence
  Oligonucleotide for detection of SNP TSC0015397
aattagcgttagg

SEQ ID NO: 56884 - DNA, 13 bp, Artificial Sequence
  Oligonucleotide for detection of SNP TSC0015397
cctaacgctaatt

SEQ ID NO: 56885 - DNA, 13 bp, Artificial Sequence
  Oligonucleotide for detection of SNP TSC0015398
ttttatttgttga

SEQ ID NO: 56886 - DNA, 13 bp, Artificial Sequence
  Oligonucleotide for detection of SNP TSC0015398
tcaacaaataaaa

SEQ ID NO: 56887 - DNA, 13 bp, Artificial Sequence
  Oligonucleotide for detection of SNP TSC0015398
ttaatatatgaaa

SEQ ID NO: 56888 - DNA, 13 bp, Artificial Sequence
  Oligonucleotide for detection of SNP TSC0015398
tttcatatattaa

SEQ ID NO: 56889 - DNA, 13 bp, Artificial Sequence
  Oligonucleotide for detection of SNP TSC0015398
ttaataaatgaaa

SEQ ID NO: 56890 - DNA, 13 bp, Artificial Sequence
  Oligonucleotide for detection of SNP TSC0015398
tttcatttattaa

SEQ ID NO: 56891 - DNA, 13 bp, Artificial Sequence
  Oligonucleotide for detection of SNP TSC0015399
gtagtgagataty

SEQ ID NO: 56892 - DNA, 13 bp, Artificial Sequence
  Oligonucleotide for detection of SNP TSC0015399
ratatctcactac

SEQ ID NO: 56893 - DNA, 13 bp, Artificial Sequence
  Oligonucleotide for detection of SNP TSC0015399
gtagtgtgataty

SEQ ID NO: 56894 - DNA, 13 bp, Artificial Sequence
  Oligonucleotide for detection of SNP TSC0015399
ratatcacactac

SEQ ID NO: 56895 - DNA, 13 bp, Artificial Sequence
  Oligonucleotide for detection of SNP TSC0015399
ggtattttattay

SEQ ID NO: 56896 - DNA, 13 bp, Artificial Sequence
  Oligonucleotide for detection of SNP TSC0015399
rtaataaaatacc

SEQ ID NO: 56897 - DNA, 13 bp, Artificial Sequence
  Oligonucleotide for detection of SNP TSC0015399
ggtattatattay

SEQ ID NO: 56898 - DNA, 13 bp, Artificial Sequence
  Oligonucleotide for detection of SNP TSC0015399
rtaatataatacc

SEQ ID NO: 56899 - DNA, 13 bp, Artificial Sequence
  Oligonucleotide for detection of SNP TSC0015400
aaaaatgttaatg

SEQ ID NO: 56900 - DNA, 13 bp, Artificial Sequence
  Oligonucleotide for detection of SNP TSC0015400
cattaacattttt

SEQ ID NO: 56901 - DNA, 13 bp, Artificial Sequence
  Oligonucleotide for detection of SNP TSC0015400
aaaaattttaatg

SEQ ID NO: 56902 - DNA, 13 bp, Artificial Sequence
  Oligonucleotide for detection of SNP TSC0015400
cattaaaattttt

SEQ ID NO: 56903 - DNA, 13 bp, Artificial Sequence
  Oligonucleotide for detection of SNP TSC0015400
tattgatattttt

SEQ ID NO: 56904 - DNA, 13 bp, Artificial Sequence
  Oligonucleotide for detection of SNP TSC0015400
aaaaatatcaata

SEQ ID NO: 56905 - DNA, 13 bp, Artificial Sequence
  Oligonucleotide for detection of SNP TSC0015400
tattgaaattttt

SEQ ID NO: 56906 - DNA, 13 bp, Artificial Sequence
  Oligonucleotide for detection of SNP TSC0015400
aaaaatttcaata

SEQ ID NO: 56907 - DNA, 13 bp, Artificial Sequence
  Oligonucleotide for detection of SNP TSC0015401
ttttatatgagga

SEQ ID NO: 56908 - DNA, 13 bp, Artificial Sequence
  Oligonucleotide for detection of SNP TSC0015401
tcctcatataaaa

SEQ ID NO: 56909 - DNA, 13 bp, Artificial Sequence
  Oligonucleotide for detection of SNP TSC0015401
ttttatgtgagga

SEQ ID NO: 56910 - DNA, 13 bp, Artificial Sequence
  Oligonucleotide for detection of SNP TSC0015401
tcctcacataaaa

SEQ ID NO: 56911 - DNA, 13 bp, Artificial Sequence
  Oligonucleotide for detection of SNP TSC0015401
ttttacgtgagga

SEQ ID NO: 56912 - DNA, 13 bp, Artificial Sequence
  Oligonucleotide for detection of SNP TSC0015401
tcctcacgtaaaa

SEQ ID NO: 56913 - DNA, 13 bp, Artificial Sequence
  Oligonucleotide for detection of SNP TSC0015401
tttttatgtgaga

SEQ ID NO: 56914 - DNA, 13 bp, Artificial Sequence
  Oligonucleotide for detection of SNP TSC0015401
tctcacataaaaa

SEQ ID NO: 56915 - DNA, 13 bp, Artificial Sequence
  Oligonucleotide for detection of SNP TSC0015401
tttttacgtgaga

SEQ ID NO: 56916 - DNA, 13 bp, Artificial Sequence
  Oligonucleotide for detection of SNP TSC0015401
tctcacgtaaaaa

SEQ ID NO: 56917 - DNA, 13 bp, Artificial Sequence
  Oligonucleotide for detection of SNP TSC0015402
tatgtagagatay

SEQ ID NO: 56918 - DNA, 13 bp, Artificial Sequence
  Oligonucleotide for detection of SNP TSC0015402
rtatctctacata

SEQ ID NO: 56919 - DNA, 13 bp, Artificial Sequence
  Oligonucleotide for detection of SNP TSC0015402
tatgtaaagatay

SEQ ID NO: 56920 - DNA, 13 bp, Artificial Sequence
  Oligonucleotide for detection of SNP TSC0015402
rtatctttacata

SEQ ID NO: 56921 - DNA, 13 bp, Artificial Sequence
  Oligonucleotide for detection of SNP TSC0015403
ggtaaaattttaa

SEQ ID NO: 56922 - DNA, 13 bp, Artificial Sequence
  Oligonucleotide for detection of SNP TSC0015403
ttaaaattttacc

SEQ ID NO: 56923 - DNA, 13 bp, Artificial Sequence
  Oligonucleotide for detection of SNP TSC0015403
ggtaaagttttaa

SEQ ID NO: 56924 - DNA, 13 bp, Artificial Sequence
  Oligonucleotide for detection of SNP TSC0015403
ttaaaactttacc

SEQ ID NO: 56925 - DNA, 13 bp, Artificial Sequence
  Oligonucleotide for detection of SNP TSC0015404
aatgaaaaagttg

SEQ ID NO: 56926 - DNA, 13 bp, Artificial Sequence
  Oligonucleotide for detection of SNP TSC0015404
caactttttcatt

SEQ ID NO: 56927 - DNA, 13 bp, Artificial Sequence
  Oligonucleotide for detection of SNP TSC0015404
aatgaagaagttg

SEQ ID NO: 56928 - DNA, 13 bp, Artificial Sequence
  Oligonucleotide for detection of SNP TSC0015404
caacttcttcatt

SEQ ID NO: 56929 - DNA, 13 bp, Artificial Sequence
  Oligonucleotide for detection of SNP TSC0015407
tttttagtgtaaa

SEQ ID NO: 56930 - DNA, 13 bp, Artificial Sequence
  Oligonucleotide for detection of SNP TSC0015407
tttacactaaaaa

SEQ ID NO: 56931 - DNA, 13 bp, Artificial Sequence
  Oligonucleotide for detection of SNP TSC0015407
tttttaatgtaaa

SEQ ID NO: 56932 - DNA, 13 bp, Artificial Sequence
  Oligonucleotide for detection of SNP TSC0015407
tttacattaaaaa

SEQ ID NO: 56933 - DNA, 13 bp, Artificial Sequence
  Oligonucleotide for detection of SNP TSC0015408
tttaaattgtgaa

SEQ ID NO: 56934 - DNA, 13 bp, Artificial Sequence
  Oligonucleotide for detection of SNP TSC0015408
ttcacaatttaaa

SEQ ID NO: 56935 - DNA, 13 bp, Artificial Sequence
  Oligonucleotide for detection of SNP TSC0015408
tttaaagtgtgaa

SEQ ID NO: 56936 - DNA, 13 bp, Artificial Sequence
  Oligonucleotide for detection of SNP TSC0015408
ttcacactttaaa

SEQ ID NO: 56937 - DNA, 13 bp, Artificial Sequence
  Oligonucleotide for detection of SNP TSC0015408
tttatagtttggg

SEQ ID NO: 56938 - DNA, 13 bp, Artificial Sequence
  Oligonucleotide for detection of SNP TSC0015408
cccaaactataaa

SEQ ID NO: 56939 - DNA, 13 bp, Artificial Sequence
  Oligonucleotide for detection of SNP TSC0015408
tttatattttggg

SEQ ID NO: 56940 - DNA, 13 bp, Artificial Sequence
  Oligonucleotide for detection of SNP TSC0015408
cccaaaatataaa

SEQ ID NO: 56941 - DNA, 13 bp, Artificial Sequence
  Oligonucleotide for detection of SNP TSC0015413
ttaggtatggtga

SEQ ID NO: 56942 - DNA, 13 bp, Artificial Sequence
  Oligonucleotide for detection of SNP TSC0015413
tcaccatacctaa

SEQ ID NO: 56943 - DNA, 13 bp, Artificial Sequence
  Oligonucleotide for detection of SNP TSC0015413
ttaggtgtggtga

SEQ ID NO: 56944 - DNA, 13 bp, Artificial Sequence
  Oligonucleotide for detection of SNP TSC0015413
tcaccacacctaa

SEQ ID NO: 56945 - DNA, 13 bp, Artificial Sequence
  Oligonucleotide for detection of SNP TSC0015413
ttaggcgtggtga

SEQ ID NO: 56946 - DNA, 13 bp, Artificial Sequence
  Oligonucleotide for detection of SNP TSC0015413
tcaccacgcctaa

SEQ ID NO: 56947 - DNA, 13 bp, Artificial Sequence
  Oligonucleotide for detection of SNP TSC0015413
ttattatgtttgg

SEQ ID NO: 56948 - DNA, 13 bp, Artificial Sequence
  Oligonucleotide for detection of SNP TSC0015413
ccaaacataataa

SEQ ID NO: 56949 - DNA, 13 bp, Artificial Sequence
  Oligonucleotide for detection of SNP TSC0015413
ttattacgtttgg

SEQ ID NO: 56950 - DNA, 13 bp, Artificial Sequence
  Oligonucleotide for detection of SNP TSC0015413
ccaaacgtaataa

SEQ ID NO: 56951 - DNA, 13 bp, Artificial Sequence
  Oligonucleotide for detection of SNP TSC0015414
gagatggaaatag

SEQ ID NO: 56952 - DNA, 13 bp, Artificial Sequence
  Oligonucleotide for detection of SNP TSC0015414
ctatttccatctc

SEQ ID NO: 56953 - DNA, 13 bp, Artificial Sequence
  Oligonucleotide for detection of SNP TSC0015414
gagatgaaaatag

SEQ ID NO: 56954 - DNA, 13 bp, Artificial Sequence
  Oligonucleotide for detection of SNP TSC0015414
ctattttcatctc

SEQ ID NO: 56955 - DNA, 13 bp, Artificial Sequence
  Oligonucleotide for detection of SNP TSC0015415
ataaaaggtgatg

SEQ ID NO: 56956 - DNA, 13 bp, Artificial Sequence
  Oligonucleotide for detection of SNP TSC0015415
catcaccttttat

SEQ ID NO: 56957 - DNA, 13 bp, Artificial Sequence
  Oligonucleotide for detection of SNP TSC0015415
ataaaaagtgatg

SEQ ID NO: 56958 - DNA, 13 bp, Artificial Sequence
  Oligonucleotide for detection of SNP TSC0015415
catcactttttat

SEQ ID NO: 56959 - DNA, 13 bp, Artificial Sequence
  Oligonucleotide for detection of SNP TSC0015416
tatgggtaaagag

SEQ ID NO: 56960 - DNA, 13 bp, Artificial Sequence
  Oligonucleotide for detection of SNP TSC0015416
ctctttacccata

SEQ ID NO: 56961 - DNA, 13 bp, Artificial Sequence
  Oligonucleotide for detection of SNP TSC0015416
tatggggaaagag

SEQ ID NO: 56962 - DNA, 13 bp, Artificial Sequence
  Oligonucleotide for detection of SNP TSC0015416
ctctttccccata

SEQ ID NO: 56963 - DNA, 13 bp, Artificial Sequence
  Oligonucleotide for detection of SNP TSC0015417
tttttggatttty

SEQ ID NO: 56964 - DNA, 13 bp, Artificial Sequence
  Oligonucleotide for detection of SNP TSC0015417
raaaatccaaaaa

SEQ ID NO: 56965 - DNA, 13 bp, Artificial Sequence
  Oligonucleotide for detection of SNP TSC0015417
tttttgaatttty

SEQ ID NO: 56966 - DNA, 13 bp, Artificial Sequence
  Oligonucleotide for detection of SNP TSC0015417
raaaattcaaaaa

SEQ ID NO: 56967 - DNA, 13 bp, Artificial Sequence
  Oligonucleotide for detection of SNP TSC0015419
gtttttttttgta

SEQ ID NO: 56968 - DNA, 13 bp, Artificial Sequence
  Oligonucleotide for detection of SNP TSC0015419
tacaaaaaaaaac

SEQ ID NO: 56969 - DNA, 13 bp, Artificial Sequence
  Oligonucleotide for detection of SNP TSC0015419
gtttttgtttgta

SEQ ID NO: 56970 - DNA, 13 bp, Artificial Sequence
  Oligonucleotide for detection of SNP TSC0015419
tacaaacaaaaac

SEQ ID NO: 56971 - DNA, 13 bp, Artificial Sequence
  Oligonucleotide for detection of SNP TSC0015419
tataaggaagagy

SEQ ID NO: 56972 - DNA, 13 bp, Artificial Sequence
  Oligonucleotide for detection of SNP TSC0015419
rctcttccttata

SEQ ID NO: 56973 - DNA, 13 bp, Artificial Sequence
  Oligonucleotide for detection of SNP TSC0015419
tataagtaagagy

SEQ ID NO: 56974 - DNA, 13 bp, Artificial Sequence
  Oligonucleotide for detection of SNP TSC0015419
rctcttacttata

SEQ ID NO: 56975 - DNA, 13 bp, Artificial Sequence
  Oligonucleotide for detection of SNP TSC0015420
gtcgggtgtagtg

SEQ ID NO: 56976 - DNA, 13 bp, Artificial Sequence
  Oligonucleotide for detection of SNP TSC0015420
cactacacccgac

SEQ ID NO: 56977 - DNA, 13 bp, Artificial Sequence
  Oligonucleotide for detection of SNP TSC0015420
gtcgggcgtagtg

SEQ ID NO: 56978 - DNA, 13 bp, Artificial Sequence
  Oligonucleotide for detection of SNP TSC0015420
cactacgcccgac

SEQ ID NO: 56979 - DNA, 13 bp, Artificial Sequence
  Oligonucleotide for detection of SNP TSC0015421
ggatgatggagay

SEQ ID NO: 56980 - DNA, 13 bp, Artificial Sequence
  Oligonucleotide for detection of SNP TSC0015421
rtctccatcatcc

SEQ ID NO: 56981 - DNA, 13 bp, Artificial Sequence
  Oligonucleotide for detection of SNP TSC0015421
ggatgacggagay

SEQ ID NO: 56982 - DNA, 13 bp, Artificial Sequence
  Oligonucleotide for detection of SNP TSC0015421
rtctccgtcatcc

SEQ ID NO: 56983 - DNA, 13 bp, Artificial Sequence
  Oligonucleotide for detection of SNP TSC0015421
gtttttgttatty

SEQ ID NO: 56984 - DNA, 13 bp, Artificial Sequence
  Oligonucleotide for detection of SNP TSC0015421
raataacaaaaac

SEQ ID NO: 56985 - DNA, 13 bp, Artificial Sequence
  Oligonucleotide for detection of SNP TSC0015421
gtttttattatty

SEQ ID NO: 56986 - DNA, 13 bp, Artificial Sequence
  Oligonucleotide for detection of SNP TSC0015421
raataataaaaac

SEQ ID NO: 56987 - DNA, 13 bp, Artificial Sequence
  Oligonucleotide for detection of SNP TSC0015421
gttttcgttatty

SEQ ID NO: 56988 - DNA, 13 bp, Artificial Sequence
  Oligonucleotide for detection of SNP TSC0015421
raataacgaaaac

SEQ ID NO: 56989 - DNA, 13 bp, Artificial Sequence
  Oligonucleotide for detection of SNP TSC0015422
gttgttggtgtty

SEQ ID NO: 56990 - DNA, 13 bp, Artificial Sequence
  Oligonucleotide for detection of SNP TSC0015422
raacaccaacaac

SEQ ID NO: 56991 - DNA, 13 bp, Artificial Sequence
  Oligonucleotide for detection of SNP TSC0015422
gttgtttgtgtty

SEQ ID NO: 56992 - DNA, 13 bp, Artificial Sequence
  Oligonucleotide for detection of SNP TSC0015422
raacacaaacaac

SEQ ID NO: 56993 - DNA, 13 bp, Artificial Sequence
  Oligonucleotide for detection of SNP TSC0015422
gaatattaatagy

SEQ ID NO: 56994 - DNA, 13 bp, Artificial Sequence
  Oligonucleotide for detection of SNP TSC0015422
rctattaatattc

SEQ ID NO: 56995 - DNA, 13 bp, Artificial Sequence
  Oligonucleotide for detection of SNP TSC0015422
gaatataaatagy

SEQ ID NO: 56996 - DNA, 13 bp, Artificial Sequence
  Oligonucleotide for detection of SNP TSC0015422
rctatttatattc

SEQ ID NO: 56997 - DNA, 13 bp, Artificial Sequence
  Oligonucleotide for detection of SNP TSC0015423
tttttagtttaag

SEQ ID NO: 56998 - DNA, 13 bp, Artificial Sequence
  Oligonucleotide for detection of SNP TSC0015423
cttaaactaaaaa

SEQ ID NO: 56999 - DNA, 13 bp, Artificial Sequence
  Oligonucleotide for detection of SNP TSC0015423
tttttaatttaag

SEQ ID NO: 57000 - DNA, 13 bp, Artificial Sequence
  Oligonucleotide for detection of SNP TSC0015423
cttaaattaaaaa

SEQ ID NO: 57001 - DNA, 13 bp, Artificial Sequence
  Oligonucleotide for detection of SNP TSC0015425
gttagaatgtttg

SEQ ID NO: 57002 - DNA, 13 bp, Artificial Sequence
  Oligonucleotide for detection of SNP TSC0015425
caaacattctaac

SEQ ID NO: 57003 - DNA, 13 bp, Artificial Sequence
  Oligonucleotide for detection of SNP TSC0015425
gttagagtgtttg

SEQ ID NO: 57004 - DNA, 13 bp, Artificial Sequence
  Oligonucleotide for detection of SNP TSC0015425
caaacactctaac

SEQ ID NO: 57005 - DNA, 13 bp, Artificial Sequence
  Oligonucleotide for detection of SNP TSC0015425
gttagaacgtttg

SEQ ID NO: 57006 - DNA, 13 bp, Artificial Sequence
  Oligonucleotide for detection of SNP TSC0015425
caaacgttctaac

SEQ ID NO: 57007 - DNA, 13 bp, Artificial Sequence
  Oligonucleotide for detection of SNP TSC0015425
gttagagcgtttg

SEQ ID NO: 57008 - DNA, 13 bp, Artificial Sequence
  Oligonucleotide for detection of SNP TSC0015425
caaacgctctaac

SEQ ID NO: 57009 - DNA, 13 bp, Artificial Sequence
  Oligonucleotide for detection of SNP TSC0015426
aattaaaggatta

SEQ ID NO: 57010 - DNA, 13 bp, Artificial Sequence
  Oligonucleotide for detection of SNP TSC0015426
taatcctttaatt

SEQ ID NO: 57011 - DNA, 13 bp, Artificial Sequence
  Oligonucleotide for detection of SNP TSC0015426
aattaatggatta

SEQ ID NO: 57012 - DNA, 13 bp, Artificial Sequence
  Oligonucleotide for detection of SNP TSC0015426
taatccattaatt

SEQ ID NO: 57013 - DNA, 13 bp, Artificial Sequence
  Oligonucleotide for detection of SNP TSC0015426
tgattttttaatt

SEQ ID NO: 57014 - DNA, 13 bp, Artificial Sequence
  Oligonucleotide for detection of SNP TSC0015426
aattaaaaaatca

SEQ ID NO: 57015 - DNA, 13 bp, Artificial Sequence
  Oligonucleotide for detection of SNP TSC0015426
tgatttattaatt

SEQ ID NO: 57016 - DNA, 13 bp, Artificial Sequence
  Oligonucleotide for detection of SNP TSC0015426
aattaataaatca

SEQ ID NO: 57017 - DNA, 13 bp, Artificial Sequence
  Oligonucleotide for detection of SNP TSC0015427
tttgttatgttta

SEQ ID NO: 57018 - DNA, 13 bp, Artificial Sequence
  Oligonucleotide for detection of SNP TSC0015427
taaacataacaaa

SEQ ID NO: 57019 - DNA, 13 bp, Artificial Sequence
  Oligonucleotide for detection of SNP TSC0015427
tttgttgtgttta

SEQ ID NO: 57020 - DNA, 13 bp, Artificial Sequence
  Oligonucleotide for detection of SNP TSC0015427
taaacacaacaaa

SEQ ID NO: 57021 - DNA, 13 bp, Artificial Sequence
  Oligonucleotide for detection of SNP TSC0015427
ttcgttatgttta

SEQ ID NO: 57022 - DNA, 13 bp, Artificial Sequence
  Oligonucleotide for detection of SNP TSC0015427
taaacataacgaa

SEQ ID NO: 57023 - DNA, 13 bp, Artificial Sequence
  Oligonucleotide for detection of SNP TSC0015427
ttcgttgtgttta

SEQ ID NO: 57024 - DNA, 13 bp, Artificial Sequence
  Oligonucleotide for detection of SNP TSC0015427
taaacacaacgaa

SEQ ID NO: 57025 - DNA, 13 bp, Artificial Sequence
  Oligonucleotide for detection of SNP TSC0015427
tttgtcgtgttta

SEQ ID NO: 57026 - DNA, 13 bp, Artificial Sequence
  Oligonucleotide for detection of SNP TSC0015427
taaacacgacaaa

SEQ ID NO: 57027 - DNA, 13 bp, Artificial Sequence
  Oligonucleotide for detection of SNP TSC0015427
ttcgtcgtgttta

SEQ ID NO: 57028 - DNA, 13 bp, Artificial Sequence
  Oligonucleotide for detection of SNP TSC0015427
taaacacgacgaa

SEQ ID NO: 57029 - DNA, 13 bp, Artificial Sequence
  Oligonucleotide for detection of SNP TSC0015427
taaatatgatgag

SEQ ID NO: 57030 - DNA, 13 bp, Artificial Sequence
  Oligonucleotide for detection of SNP TSC0015427
ctcatcatattta

SEQ ID NO: 57031 - DNA, 13 bp, Artificial Sequence
  Oligonucleotide for detection of SNP TSC0015427
taaatatgacgag

SEQ ID NO: 57032 - DNA, 13 bp, Artificial Sequence
  Oligonucleotide for detection of SNP TSC0015427
ctcgtcatattta

SEQ ID NO: 57033 - DNA, 13 bp, Artificial Sequence
  Oligonucleotide for detection of SNP TSC0015427
taaatacgatgag

SEQ ID NO: 57034 - DNA, 13 bp, Artificial Sequence
  Oligonucleotide for detection of SNP TSC0015427
ctcatcgtattta

SEQ ID NO: 57035 - DNA, 13 bp, Artificial Sequence
  Oligonucleotide for detection of SNP TSC0015427
taaatacgacgag

SEQ ID NO: 57036 - DNA, 13 bp, Artificial Sequence
  Oligonucleotide for detection of SNP TSC0015427
ctcgtcgtattta

SEQ ID NO: 57037 - DNA, 13 bp, Artificial Sequence
  Oligonucleotide for detection of SNP TSC0015428
agataaatatgat

SEQ ID NO: 57038 - DNA, 13 bp, Artificial Sequence
  Oligonucleotide for detection of SNP TSC0015428
atcatatttatct

SEQ ID NO: 57039 - DNA, 13 bp, Artificial Sequence
  Oligonucleotide for detection of SNP TSC0015428
agataagtatgat

SEQ ID NO: 57040 - DNA, 13 bp, Artificial Sequence
  Oligonucleotide for detection of SNP TSC0015428
atcatacttatct

SEQ ID NO: 57041 - DNA, 13 bp, Artificial Sequence
  Oligonucleotide for detection of SNP TSC0015429
ggttgagggttty

SEQ ID NO: 57042 - DNA, 13 bp, Artificial Sequence
  Oligonucleotide for detection of SNP TSC0015429
raaaccctcaacc

SEQ ID NO: 57043 - DNA, 13 bp, Artificial Sequence
  Oligonucleotide for detection of SNP TSC0015429
ggttgaaggttty

SEQ ID NO: 57044 - DNA, 13 bp, Artificial Sequence
  Oligonucleotide for detection of SNP TSC0015429
raaaccttcaacc

SEQ ID NO: 57045 - DNA, 13 bp, Artificial Sequence
  Oligonucleotide for detection of SNP TSC0015430
gtttatgggtatt

SEQ ID NO: 57046 - DNA, 13 bp, Artificial Sequence
  Oligonucleotide for detection of SNP TSC0015430
aatacccataaac

SEQ ID NO: 57047 - DNA, 13 bp, Artificial Sequence
  Oligonucleotide for detection of SNP TSC0015430
gtttataggtatt

SEQ ID NO: 57048 - DNA, 13 bp, Artificial Sequence
  Oligonucleotide for detection of SNP TSC0015430
aatacctataaac

SEQ ID NO: 57049 - DNA, 13 bp, Artificial Sequence
  Oligonucleotide for detection of SNP TSC0015431
ttttaagttttat

SEQ ID NO: 57050 - DNA, 13 bp, Artificial Sequence
  Oligonucleotide for detection of SNP TSC0015431
ataaaacttaaaa

SEQ ID NO: 57051 - DNA, 13 bp, Artificial Sequence
  Oligonucleotide for detection of SNP TSC0015431
ttttaaattttat

SEQ ID NO: 57052 - DNA, 13 bp, Artificial Sequence
  Oligonucleotide for detection of SNP TSC0015431
ataaaatttaaaa

SEQ ID NO: 57053 - DNA, 13 bp, Artificial Sequence
  Oligonucleotide for detection of SNP TSC0015432
atttatgtataga

SEQ ID NO: 57054 - DNA, 13 bp, Artificial Sequence
  Oligonucleotide for detection of SNP TSC0015432
tctatacataaat

SEQ ID NO: 57055 - DNA, 13 bp, Artificial Sequence
  Oligonucleotide for detection of SNP TSC0015432
atttatatataga

SEQ ID NO: 57056 - DNA, 13 bp, Artificial Sequence
  Oligonucleotide for detection of SNP TSC0015432
tctatatataaat

SEQ ID NO: 57057 - DNA, 13 bp, Artificial Sequence
  Oligonucleotide for detection of SNP TSC0015433
ttagaaatttaay

SEQ ID NO: 57058 - DNA, 13 bp, Artificial Sequence
  Oligonucleotide for detection of SNP TSC0015433
rttaaatttctaa

SEQ ID NO: 57059 - DNA, 13 bp, Artificial Sequence
  Oligonucleotide for detection of SNP TSC0015433
ttagaagtttaay

SEQ ID NO: 57060 - DNA, 13 bp, Artificial Sequence
  Oligonucleotide for detection of SNP TSC0015433
rttaaacttctaa

SEQ ID NO: 57061 - DNA, 13 bp, Artificial Sequence
  Oligonucleotide for detection of SNP TSC0015434
attttagttttay

SEQ ID NO: 57062 - DNA, 13 bp, Artificial Sequence
  Oligonucleotide for detection of SNP TSC0015434
rtaaaactaaaat

SEQ ID NO: 57063 - DNA, 13 bp, Artificial Sequence
  Oligonucleotide for detection of SNP TSC0015434
attttaattttay

SEQ ID NO: 57064 - DNA, 13 bp, Artificial Sequence
  Oligonucleotide for detection of SNP TSC0015434
rtaaaattaaaat

SEQ ID NO: 57065 - DNA, 13 bp, Artificial Sequence
  Oligonucleotide for detection of SNP TSC0015435
tggagtttatttg

SEQ ID NO: 57066 - DNA, 13 bp, Artificial Sequence
  Oligonucleotide for detection of SNP TSC0015435
caaataaactcca

SEQ ID NO: 57067 - DNA, 13 bp, Artificial Sequence
  Oligonucleotide for detection of SNP TSC0015435
tggagtgtatttg

SEQ ID NO: 57068 - DNA, 13 bp, Artificial Sequence
  Oligonucleotide for detection of SNP TSC0015435
caaatacactcca

SEQ ID NO: 57069 - DNA, 13 bp, Artificial Sequence
  Oligonucleotide for detection of SNP TSC0015435
taaatggatttta

SEQ ID NO: 57070 - DNA, 13 bp, Artificial Sequence
  Oligonucleotide for detection of SNP TSC0015435
taaaatccattta

SEQ ID NO: 57071 - DNA, 13 bp, Artificial Sequence
  Oligonucleotide for detection of SNP TSC0015435
taaatgtatttta

SEQ ID NO: 57072 - DNA, 13 bp, Artificial Sequence
  Oligonucleotide for detection of SNP TSC0015435
taaaatacattta

SEQ ID NO: 57073 - DNA, 13 bp, Artificial Sequence
  Oligonucleotide for detection of SNP TSC0015437
aaatatgtatata

SEQ ID NO: 57074 - DNA, 13 bp, Artificial Sequence
  Oligonucleotide for detection of SNP TSC0015437
tatatacatattt

SEQ ID NO: 57075 - DNA, 13 bp, Artificial Sequence
  Oligonucleotide for detection of SNP TSC0015439
ttgttatggaagt

SEQ ID NO: 57076 - DNA, 13 bp, Artificial Sequence
  Oligonucleotide for detection of SNP TSC0015439
acttccataacaa

SEQ ID NO: 57077 - DNA, 13 bp, Artificial Sequence
  Oligonucleotide for detection of SNP TSC0015439
tcgttatggaagt

SEQ ID NO: 57078 - DNA, 13 bp, Artificial Sequence
  Oligonucleotide for detection of SNP TSC0015439
acttccataacga

SEQ ID NO: 57079 - DNA, 13 bp, Artificial Sequence
  Oligonucleotide for detection of SNP TSC0015439
ttgttacggaagt

SEQ ID NO: 57080 - DNA, 13 bp, Artificial Sequence
  Oligonucleotide for detection of SNP TSC0015439
acttccgtaacaa

SEQ ID NO: 57081 - DNA, 13 bp, Artificial Sequence
  Oligonucleotide for detection of SNP TSC0015439
tcgttacggaagt

SEQ ID NO: 57082 - DNA, 13 bp, Artificial Sequence
  Oligonucleotide for detection of SNP TSC0015439
acttccgtaacga

SEQ ID NO: 57083 - DNA, 13 bp, Artificial Sequence
  Oligonucleotide for detection of SNP TSC0015439
atttttgtggtga

SEQ ID NO: 57084 - DNA, 13 bp, Artificial Sequence
  Oligonucleotide for detection of SNP TSC0015439
tcaccacaaaaat

SEQ ID NO: 57085 - DNA, 13 bp, Artificial Sequence
  Oligonucleotide for detection of SNP TSC0015439
atttttatggtga

SEQ ID NO: 57086 - DNA, 13 bp, Artificial Sequence
  Oligonucleotide for detection of SNP TSC0015439
tcaccataaaaat

SEQ ID NO: 57087 - DNA, 13 bp, Artificial Sequence
  Oligonucleotide for detection of SNP TSC0015439
attttcgtggtga

SEQ ID NO: 57088 - DNA, 13 bp, Artificial Sequence
  Oligonucleotide for detection of SNP TSC0015439
tcaccacgaaaat

SEQ ID NO: 57089 - DNA, 13 bp, Artificial Sequence
  Oligonucleotide for detection of SNP TSC0015439
atttttatggcga

SEQ ID NO: 57090 - DNA, 13 bp, Artificial Sequence
  Oligonucleotide for detection of SNP TSC0015439
tcgccataaaaat

SEQ ID NO: 57091 - DNA, 13 bp, Artificial Sequence
  Oligonucleotide for detection of SNP TSC0015439
atttttgtggcga

SEQ ID NO: 57092 - DNA, 13 bp, Artificial Sequence
  Oligonucleotide for detection of SNP TSC0015439
tcgccacaaaaat

SEQ ID NO: 57093 - DNA, 13 bp, Artificial Sequence
  Oligonucleotide for detection of SNP TSC0015439
attttcgtggcga

SEQ ID NO: 57094 - DNA, 13 bp, Artificial Sequence
  Oligonucleotide for detection of SNP TSC0015439
tcgccacgaaaat

SEQ ID NO: 57095 - DNA, 13 bp, Artificial Sequence
  Oligonucleotide for detection of SNP TSC0015441
ttgtaagttttga

SEQ ID NO: 57096 - DNA, 13 bp, Artificial Sequence
  Oligonucleotide for detection of SNP TSC0015441
tcaaaacttacaa

SEQ ID NO: 57097 - DNA, 13 bp, Artificial Sequence
  Oligonucleotide for detection of SNP TSC0015441
ttgtaaattttga

SEQ ID NO: 57098 - DNA, 13 bp, Artificial Sequence
  Oligonucleotide for detection of SNP TSC0015441
tcaaaatttacaa

SEQ ID NO: 57099 - DNA, 13 bp, Artificial Sequence
  Oligonucleotide for detection of SNP TSC0015442
tatatgatttgtt

SEQ ID NO: 57100 - DNA, 13 bp, Artificial Sequence
  Oligonucleotide for detection of SNP TSC0015442
aacaaatcatata

SEQ ID NO: 57101 - DNA, 13 bp, Artificial Sequence
  Oligonucleotide for detection of SNP TSC0015442
tatatggtttgtt

SEQ ID NO: 57102 - DNA, 13 bp, Artificial Sequence
  Oligonucleotide for detection of SNP TSC0015442
aacaaaccatata

SEQ ID NO: 57103 - DNA, 13 bp, Artificial Sequence
  Oligonucleotide for detection of SNP TSC0015443
ttggataaatgtg

SEQ ID NO: 57104 - DNA, 13 bp, Artificial Sequence
  Oligonucleotide for detection of SNP TSC0015443
cacatttatccaa

SEQ ID NO: 57105 - DNA, 13 bp, Artificial Sequence
  Oligonucleotide for detection of SNP TSC0015443
ttggatgaatgtg

SEQ ID NO: 57106 - DNA, 13 bp, Artificial Sequence
  Oligonucleotide for detection of SNP TSC0015443
cacattcatccaa

SEQ ID NO: 57107 - DNA, 13 bp, Artificial Sequence
  Oligonucleotide for detection of SNP TSC0015443
ttggacgaatgtg

SEQ ID NO: 57108 - DNA, 13 bp, Artificial Sequence
  Oligonucleotide for detection of SNP TSC0015443
cacattcgtccaa

SEQ ID NO: 57109 - DNA, 13 bp, Artificial Sequence
  Oligonucleotide for detection of SNP TSC0015443
tatatttgtttaa

SEQ ID NO: 57110 - DNA, 13 bp, Artificial Sequence
  Oligonucleotide for detection of SNP TSC0015443
ttaaacaaatata

SEQ ID NO: 57111 - DNA, 13 bp, Artificial Sequence
  Oligonucleotide for detection of SNP TSC0015443
tatattcgtttaa

SEQ ID NO: 57112 - DNA, 13 bp, Artificial Sequence
  Oligonucleotide for detection of SNP TSC0015443
ttaaacgaatata

SEQ ID NO: 57113 - DNA, 13 bp, Artificial Sequence
  Oligonucleotide for detection of SNP TSC0015445
atatagattatty

SEQ ID NO: 57114 - DNA, 13 bp, Artificial Sequence
  Oligonucleotide for detection of SNP TSC0015445
raataatctatat

SEQ ID NO: 57115 - DNA, 13 bp, Artificial Sequence
  Oligonucleotide for detection of SNP TSC0015445
atatagtttatty

SEQ ID NO: 57116 - DNA, 13 bp, Artificial Sequence
  Oligonucleotide for detection of SNP TSC0015445
raataaactatat

SEQ ID NO: 57117 - DNA, 13 bp, Artificial Sequence
  Oligonucleotide for detection of SNP TSC0015445
gggtggtttatat

SEQ ID NO: 57118 - DNA, 13 bp, Artificial Sequence
  Oligonucleotide for detection of SNP TSC0015445
atataaaccaccc

SEQ ID NO: 57119 - DNA, 13 bp, Artificial Sequence
  Oligonucleotide for detection of SNP TSC0015445
gggtgggttatat

SEQ ID NO: 57120 - DNA, 13 bp, Artificial Sequence
  Oligonucleotide for detection of SNP TSC0015445
atataacccaccc

SEQ ID NO: 57121 - DNA, 13 bp, Artificial Sequence
  Oligonucleotide for detection of SNP TSC0015446
gttgttgaagata

SEQ ID NO: 57122 - DNA, 13 bp, Artificial Sequence
  Oligonucleotide for detection of SNP TSC0015446
tatcttcaacaac

SEQ ID NO: 57123 - DNA, 13 bp, Artificial Sequence
  Oligonucleotide for detection of SNP TSC0015446
gttgttaaagata

SEQ ID NO: 57124 - DNA, 13 bp, Artificial Sequence
  Oligonucleotide for detection of SNP TSC0015446
tatctttaacaac

SEQ ID NO: 57125 - DNA, 13 bp, Artificial Sequence
  Oligonucleotide for detection of SNP TSC0015447
ttagggggtgtga

SEQ ID NO: 57126 - DNA, 13 bp, Artificial Sequence
  Oligonucleotide for detection of SNP TSC0015447
tcacaccccctaa

SEQ ID NO: 57127 - DNA, 13 bp, Artificial Sequence
  Oligonucleotide for detection of SNP TSC0015447
ttagggtgtgtga

SEQ ID NO: 57128 - DNA, 13 bp, Artificial Sequence
  Oligonucleotide for detection of SNP TSC0015447
tcacacaccctaa

SEQ ID NO: 57129 - DNA, 13 bp, Artificial Sequence
  Oligonucleotide for detection of SNP TSC0015447
ttatattttttga

SEQ ID NO: 57130 - DNA, 13 bp, Artificial Sequence
  Oligonucleotide for detection of SNP TSC0015447
tcaaaaaatataa

SEQ ID NO: 57131 - DNA, 13 bp, Artificial Sequence
  Oligonucleotide for detection of SNP TSC0015447
ttatatattttga

SEQ ID NO: 57132 - DNA, 13 bp, Artificial Sequence
  Oligonucleotide for detection of SNP TSC0015447
tcaaaatatataa

SEQ ID NO: 57133 - DNA, 13 bp, Artificial Sequence
  Oligonucleotide for detection of SNP TSC0015448
tattagtaagtta

SEQ ID NO: 57134 - DNA, 13 bp, Artificial Sequence
  Oligonucleotide for detection of SNP TSC0015448
taacttactaata

SEQ ID NO: 57135 - DNA, 13 bp, Artificial Sequence
  Oligonucleotide for detection of SNP TSC0015448
tattaggaagtta

SEQ ID NO: 57136 - DNA, 13 bp, Artificial Sequence
  Oligonucleotide for detection of SNP TSC0015448
taacttcctaata

SEQ ID NO: 57137 - DNA, 13 bp, Artificial Sequence
  Oligonucleotide for detection of SNP TSC0015448
taatttgttagtg

SEQ ID NO: 57138 - DNA, 13 bp, Artificial Sequence
  Oligonucleotide for detection of SNP TSC0015448
cactaacaaatta

SEQ ID NO: 57139 - DNA, 13 bp, Artificial Sequence
  Oligonucleotide for detection of SNP TSC0015448
taattttttagtg

SEQ ID NO: 57140 - DNA, 13 bp, Artificial Sequence
  Oligonucleotide for detection of SNP TSC0015448
cactaaaaaatta

SEQ ID NO: 57141 - DNA, 13 bp, Artificial Sequence
  Oligonucleotide for detection of SNP TSC0015457
tttggtataatta

SEQ ID NO: 57142 - DNA, 13 bp, Artificial Sequence
  Oligonucleotide for detection of SNP TSC0015457
taattataccaaa

SEQ ID NO: 57143 - DNA, 13 bp, Artificial Sequence
  Oligonucleotide for detection of SNP TSC0015457
tttggtgtaatta

SEQ ID NO: 57144 - DNA, 13 bp, Artificial Sequence
  Oligonucleotide for detection of SNP TSC0015457
taattacaccaaa

SEQ ID NO: 57145 - DNA, 13 bp, Artificial Sequence
  Oligonucleotide for detection of SNP TSC0015458
gttggggtatttt

SEQ ID NO: 57146 - DNA, 13 bp, Artificial Sequence
  Oligonucleotide for detection of SNP TSC0015458
aaaataccccaac

SEQ ID NO: 57147 - DNA, 13 bp, Artificial Sequence
  Oligonucleotide for detection of SNP TSC0015458
gttgggatatttt

SEQ ID NO: 57148 - DNA, 13 bp, Artificial Sequence
  Oligonucleotide for detection of SNP TSC0015458
aaaatatcccaac

SEQ ID NO: 57149 - DNA, 13 bp, Artificial Sequence
  Oligonucleotide for detection of SNP TSC0015459
ggtggtggtttty

SEQ ID NO: 57150 - DNA, 13 bp, Artificial Sequence
  Oligonucleotide for detection of SNP TSC0015459
raaaaccaccacc

SEQ ID NO: 57151 - DNA, 13 bp, Artificial Sequence
  Oligonucleotide for detection of SNP TSC0015459
ggtggttgtttty

SEQ ID NO: 57152 - DNA, 13 bp, Artificial Sequence
  Oligonucleotide for detection of SNP TSC0015459
raaaacaaccacc

SEQ ID NO: 57153 - DNA, 13 bp, Artificial Sequence
  Oligonucleotide for detection of SNP TSC0015459
gagaattattaty

SEQ ID NO: 57154 - DNA, 13 bp, Artificial Sequence
  Oligonucleotide for detection of SNP TSC0015459
rataataattctc

SEQ ID NO: 57155 - DNA, 13 bp, Artificial Sequence
  Oligonucleotide for detection of SNP TSC0015459
gagaataattaty

SEQ ID NO: 57156 - DNA, 13 bp, Artificial Sequence
  Oligonucleotide for detection of SNP TSC0015459
rataattattctc

SEQ ID NO: 57157 - DNA, 13 bp, Artificial Sequence
  Oligonucleotide for detection of SNP TSC0015460
gtaattgaaggga

SEQ ID NO: 57158 - DNA, 13 bp, Artificial Sequence
  Oligonucleotide for detection of SNP TSC0015460
tcccttcaattac

SEQ ID NO: 57159 - DNA, 13 bp, Artificial Sequence
  Oligonucleotide for detection of SNP TSC0015460
gtaattaaaggga

SEQ ID NO: 57160 - DNA, 13 bp, Artificial Sequence
  Oligonucleotide for detection of SNP TSC0015460
tccctttaattac

SEQ ID NO: 57161 - DNA, 13 bp, Artificial Sequence
  Oligonucleotide for detection of SNP TSC0015460
gtaatcgaaggga

SEQ ID NO: 57162 - DNA, 13 bp, Artificial Sequence
  Oligonucleotide for detection of SNP TSC0015460
tcccttcgattac

SEQ ID NO: 57163 - DNA, 13 bp, Artificial Sequence
  Oligonucleotide for detection of SNP TSC0015462
tttttgggagtga

SEQ ID NO: 57164 - DNA, 13 bp, Artificial Sequence
  Oligonucleotide for detection of SNP TSC0015462
tcactcccaaaaa

SEQ ID NO: 57165 - DNA, 13 bp, Artificial Sequence
  Oligonucleotide for detection of SNP TSC0015462
tttttgagagtga

SEQ ID NO: 57166 - DNA, 13 bp, Artificial Sequence
  Oligonucleotide for detection of SNP TSC0015462
tcactctcaaaaa

SEQ ID NO: 57167 - DNA, 13 bp, Artificial Sequence
  Oligonucleotide for detection of SNP TSC0015463
ggaggtaagatag

SEQ ID NO: 57168 - DNA, 13 bp, Artificial Sequence
  Oligonucleotide for detection of SNP TSC0015463
ctatcttacctcc

SEQ ID NO: 57169 - DNA, 13 bp, Artificial Sequence
  Oligonucleotide for detection of SNP TSC0015463
ggaggtgagatag

SEQ ID NO: 57170 - DNA, 13 bp, Artificial Sequence
  Oligonucleotide for detection of SNP TSC0015463
ctatctcacctcc

SEQ ID NO: 57171 - DNA, 13 bp, Artificial Sequence
  Oligonucleotide for detection of SNP TSC0015465
taatgtgttaaag

SEQ ID NO: 57172 - DNA, 13 bp, Artificial Sequence
  Oligonucleotide for detection of SNP TSC0015465
ctttaacacatta

SEQ ID NO: 57173 - DNA, 13 bp, Artificial Sequence
  Oligonucleotide for detection of SNP TSC0015465
taatgtattaaag

SEQ ID NO: 57174 - DNA, 13 bp, Artificial Sequence
  Oligonucleotide for detection of SNP TSC0015465
ctttaatacatta

SEQ ID NO: 57175 - DNA, 13 bp, Artificial Sequence
  Oligonucleotide for detection of SNP TSC0015466
gggtgtagatagt

SEQ ID NO: 57176 - DNA, 13 bp, Artificial Sequence
  Oligonucleotide for detection of SNP TSC0015466
actatctacaccc

SEQ ID NO: 57177 - DNA, 13 bp, Artificial Sequence
  Oligonucleotide for detection of SNP TSC0015466
gggtgttgatagt

SEQ ID NO: 57178 - DNA, 13 bp, Artificial Sequence
  Oligonucleotide for detection of SNP TSC0015466
actatcaacaccc

SEQ ID NO: 57179 - DNA, 13 bp, Artificial Sequence
  Oligonucleotide for detection of SNP TSC0015466
attatttgtatty

SEQ ID NO: 57180 - DNA, 13 bp, Artificial Sequence
  Oligonucleotide for detection of SNP TSC0015466
raatacaaataat

SEQ ID NO: 57181 - DNA, 13 bp, Artificial Sequence
  Oligonucleotide for detection of SNP TSC0015466
attattagtatty

SEQ ID NO: 57182 - DNA, 13 bp, Artificial Sequence
  Oligonucleotide for detection of SNP TSC0015466
raatactaataat

SEQ ID NO: 57183 - DNA, 13 bp, Artificial Sequence
  Oligonucleotide for detection of SNP TSC0015467
agggttgtataaa

SEQ ID NO: 57184 - DNA, 13 bp, Artificial Sequence
  Oligonucleotide for detection of SNP TSC0015467
tttatacaaccct

SEQ ID NO: 57185 - DNA, 13 bp, Artificial Sequence
  Oligonucleotide for detection of SNP TSC0015467
agggttatataaa

SEQ ID NO: 57186 - DNA, 13 bp, Artificial Sequence
  Oligonucleotide for detection of SNP TSC0015467
tttatataaccct

SEQ ID NO: 57187 - DNA, 13 bp, Artificial Sequence
  Oligonucleotide for detection of SNP TSC0015471
aagtgagggtatt

SEQ ID NO: 57188 - DNA, 13 bp, Artificial Sequence
  Oligonucleotide for detection of SNP TSC0015471
aataccctcactt

SEQ ID NO: 57189 - DNA, 13 bp, Artificial Sequence
  Oligonucleotide for detection of SNP TSC0015471
aagtgaaggtatt

SEQ ID NO: 57190 - DNA, 13 bp, Artificial Sequence
  Oligonucleotide for detection of SNP TSC0015471
aataccttcactt

SEQ ID NO: 57191 - DNA, 13 bp, Artificial Sequence
  Oligonucleotide for detection of SNP TSC0015472
ttaaattttttta

SEQ ID NO: 57192 - DNA, 13 bp, Artificial Sequence
  Oligonucleotide for detection of SNP TSC0015472
taaaaaaatttaa

SEQ ID NO: 57193 - DNA, 13 bp, Artificial Sequence
  Oligonucleotide for detection of SNP TSC0015472
taaaagtatttag

SEQ ID NO: 57194 - DNA, 13 bp, Artificial Sequence
  Oligonucleotide for detection of SNP TSC0015472
ctaaatactttta

SEQ ID NO: 57195 - DNA, 13 bp, Artificial Sequence
  Oligonucleotide for detection of SNP TSC0015472
taaaagaatttag

SEQ ID NO: 57196 - DNA, 13 bp, Artificial Sequence
  Oligonucleotide for detection of SNP TSC0015472
ctaaattctttta

SEQ ID NO: 57197 - DNA, 13 bp, Artificial Sequence
  Oligonucleotide for detection of SNP TSC0015473
aaattaaaggtta

SEQ ID NO: 57198 - DNA, 13 bp, Artificial Sequence
  Oligonucleotide for detection of SNP TSC0015473
taacctttaattt

SEQ ID NO: 57199 - DNA, 13 bp, Artificial Sequence
  Oligonucleotide for detection of SNP TSC0015473
aaattataggtta

SEQ ID NO: 57200 - DNA, 13 bp, Artificial Sequence
  Oligonucleotide for detection of SNP TSC0015473
taacctataattt

SEQ ID NO: 57201 - DNA, 13 bp, Artificial Sequence
  Oligonucleotide for detection of SNP TSC0015473
tggtttttgattt

SEQ ID NO: 57202 - DNA, 13 bp, Artificial Sequence
  Oligonucleotide for detection of SNP TSC0015473
aaatcaaaaacca

SEQ ID NO: 57203 - DNA, 13 bp, Artificial Sequence
  Oligonucleotide for detection of SNP TSC0015473
tggtttgtgattt

SEQ ID NO: 57204 - DNA, 13 bp, Artificial Sequence
  Oligonucleotide for detection of SNP TSC0015473
aaatcacaaacca

SEQ ID NO: 57205 - DNA, 13 bp, Artificial Sequence
  Oligonucleotide for detection of SNP TSC0015474
gaattaattgatt

SEQ ID NO: 57206 - DNA, 13 bp, Artificial Sequence
  Oligonucleotide for detection of SNP TSC0015474
aatcaattaattc

SEQ ID NO: 57207 - DNA, 13 bp, Artificial Sequence
  Oligonucleotide for detection of SNP TSC0015474
gaattatttgatt

SEQ ID NO: 57208 - DNA, 13 bp, Artificial Sequence
  Oligonucleotide for detection of SNP TSC0015474
aatcaaataattc

SEQ ID NO: 57209 - DNA, 13 bp, Artificial Sequence
  Oligonucleotide for detection of SNP TSC0015474
aattagttaatty

SEQ ID NO: 57210 - DNA, 13 bp, Artificial Sequence
  Oligonucleotide for detection of SNP TSC0015474
raattaactaatt

SEQ ID NO: 57211 - DNA, 13 bp, Artificial Sequence
  Oligonucleotide for detection of SNP TSC0015474
aattaggtaatty

SEQ ID NO: 57212 - DNA, 13 bp, Artificial Sequence
  Oligonucleotide for detection of SNP TSC0015474
raattacctaatt

SEQ ID NO: 57213 - DNA, 13 bp, Artificial Sequence
  Oligonucleotide for detection of SNP TSC0015475
agaattaggatta

SEQ ID NO: 57214 - DNA, 13 bp, Artificial Sequence
  Oligonucleotide for detection of SNP TSC0015475
taatcctaattct

SEQ ID NO: 57215 - DNA, 13 bp, Artificial Sequence
  Oligonucleotide for detection of SNP TSC0015475
agaattgggatta

SEQ ID NO: 57216 - DNA, 13 bp, Artificial Sequence
  Oligonucleotide for detection of SNP TSC0015475
taatcccaattct

SEQ ID NO: 57217 - DNA, 13 bp, Artificial Sequence
  Oligonucleotide for detection of SNP TSC0015475
agaatcgggatta

SEQ ID NO: 57218 - DNA, 13 bp, Artificial Sequence
  Oligonucleotide for detection of SNP TSC0015475
taatcccgattct

SEQ ID NO: 57219 - DNA, 13 bp, Artificial Sequence
  Oligonucleotide for detection of SNP TSC0015475
tggttttgatttt

SEQ ID NO: 57220 - DNA, 13 bp, Artificial Sequence
  Oligonucleotide for detection of SNP TSC0015475
aaaatcaaaacca

SEQ ID NO: 57221 - DNA, 13 bp, Artificial Sequence
  Oligonucleotide for detection of SNP TSC0015475
tggtttcgatttt

SEQ ID NO: 57222 - DNA, 13 bp, Artificial Sequence
  Oligonucleotide for detection of SNP TSC0015475
aaaatcgaaacca

SEQ ID NO: 57223 - DNA, 13 bp, Artificial Sequence
  Oligonucleotide for detection of SNP TSC0015477
gagattaagatty

SEQ ID NO: 57224 - DNA, 13 bp, Artificial Sequence
  Oligonucleotide for detection of SNP TSC0015477
raatcttaatctc

SEQ ID NO: 57225 - DNA, 13 bp, Artificial Sequence
  Oligonucleotide for detection of SNP TSC0015477
gagattgagatty

SEQ ID NO: 57226 - DNA, 13 bp, Artificial Sequence
  Oligonucleotide for detection of SNP TSC0015477
raatctcaatctc

SEQ ID NO: 57227 - DNA, 13 bp, Artificial Sequence
  Oligonucleotide for detection of SNP TSC0015477
gagatcgagatty

SEQ ID NO: 57228 - DNA, 13 bp, Artificial Sequence
  Oligonucleotide for detection of SNP TSC0015477
raatctcgatctc

SEQ ID NO: 57229 - DNA, 13 bp, Artificial Sequence
  Oligonucleotide for detection of SNP TSC0015477
gggttttgattty

SEQ ID NO: 57230 - DNA, 13 bp, Artificial Sequence
  Oligonucleotide for detection of SNP TSC0015477
raaatcaaaaccc

SEQ ID NO: 57231 - DNA, 13 bp, Artificial Sequence
  Oligonucleotide for detection of SNP TSC0015477
gggtttcgattty

SEQ ID NO: 57232 - DNA, 13 bp, Artificial Sequence
  Oligonucleotide for detection of SNP TSC0015477
raaatcgaaaccc

SEQ ID NO: 57233 - DNA, 13 bp, Artificial Sequence
  Oligonucleotide for detection of SNP TSC0015483
aatttgaaattag

SEQ ID NO: 57234 - DNA, 13 bp, Artificial Sequence
  Oligonucleotide for detection of SNP TSC0015483
ctaatttcaaatt

SEQ ID NO: 57235 - DNA, 13 bp, Artificial Sequence
  Oligonucleotide for detection of SNP TSC0015483
aatttggaattag

SEQ ID NO: 57236 - DNA, 13 bp, Artificial Sequence
  Oligonucleotide for detection of SNP TSC0015483
ctaattccaaatt

SEQ ID NO: 57237 - DNA, 13 bp, Artificial Sequence
  Oligonucleotide for detection of SNP TSC0015484
gttagatgtgtta

SEQ ID NO: 57238 - DNA, 13 bp, Artificial Sequence
  Oligonucleotide for detection of SNP TSC0015484
taacacatctaac

SEQ ID NO: 57239 - DNA, 13 bp, Artificial Sequence
  Oligonucleotide for detection of SNP TSC0015484
gttagacgtgtta

SEQ ID NO: 57240 - DNA, 13 bp, Artificial Sequence
  Oligonucleotide for detection of SNP TSC0015484
taacacgtctaac

SEQ ID NO: 57241 - DNA, 13 bp, Artificial Sequence
  Oligonucleotide for detection of SNP TSC0015484
tggtatgtttaay

SEQ ID NO: 57242 - DNA, 13 bp, Artificial Sequence
  Oligonucleotide for detection of SNP TSC0015484
rttaaacatacca

SEQ ID NO: 57243 - DNA, 13 bp, Artificial Sequence
  Oligonucleotide for detection of SNP TSC0015484
tggtatatttaay

SEQ ID NO: 57244 - DNA, 13 bp, Artificial Sequence
  Oligonucleotide for detection of SNP TSC0015484
rttaaatatacca

SEQ ID NO: 57245 - DNA, 13 bp, Artificial Sequence
  Oligonucleotide for detection of SNP TSC0015484
tggtacgtttaay

SEQ ID NO: 57246 - DNA, 13 bp, Artificial Sequence
  Oligonucleotide for detection of SNP TSC0015484
rttaaacgtacca

SEQ ID NO: 57247 - DNA, 13 bp, Artificial Sequence
  Oligonucleotide for detection of SNP TSC0015485
atagttgttatta

SEQ ID NO: 57248 - DNA, 13 bp, Artificial Sequence
  Oligonucleotide for detection of SNP TSC0015485
taataacaactat

SEQ ID NO: 57249 - DNA, 13 bp, Artificial Sequence
  Oligonucleotide for detection of SNP TSC0015485
atagttattatta

SEQ ID NO: 57250 - DNA, 13 bp, Artificial Sequence
  Oligonucleotide for detection of SNP TSC0015485
taataataactat

SEQ ID NO: 57251 - DNA, 13 bp, Artificial Sequence
  Oligonucleotide for detection of SNP TSC0015487
ttagagtgtttag

SEQ ID NO: 57252 - DNA, 13 bp, Artificial Sequence
  Oligonucleotide for detection of SNP TSC0015487
ctaaacactctaa

SEQ ID NO: 57253 - DNA, 13 bp, Artificial Sequence
  Oligonucleotide for detection of SNP TSC0015487
ttagagcgtttag

SEQ ID NO: 57254 - DNA, 13 bp, Artificial Sequence
  Oligonucleotide for detection of SNP TSC0015487
ctaaacgctctaa

SEQ ID NO: 57255 - DNA, 13 bp, Artificial Sequence
  Oligonucleotide for detection of SNP TSC0015487
ttggatgttttga

SEQ ID NO: 57256 - DNA, 13 bp, Artificial Sequence
  Oligonucleotide for detection of SNP TSC0015487
tcaaaacatccaa

SEQ ID NO: 57257 - DNA, 13 bp, Artificial Sequence
  Oligonucleotide for detection of SNP TSC0015487
ttggatattttga

SEQ ID NO: 57258 - DNA, 13 bp, Artificial Sequence
  Oligonucleotide for detection of SNP TSC0015487
tcaaaatatccaa

SEQ ID NO: 57259 - DNA, 13 bp, Artificial Sequence
  Oligonucleotide for detection of SNP TSC0015487
ttggacgttttga

SEQ ID NO: 57260 - DNA, 13 bp, Artificial Sequence
  Oligonucleotide for detection of SNP TSC0015487
tcaaaacgtccaa

SEQ ID NO: 57261 - DNA, 13 bp, Artificial Sequence
  Oligonucleotide for detection of SNP TSC0015488
gtagatattttag

SEQ ID NO: 57262 - DNA, 13 bp, Artificial Sequence
  Oligonucleotide for detection of SNP TSC0015488
ctaaaatatctac

SEQ ID NO: 57263 - DNA, 13 bp, Artificial Sequence
  Oligonucleotide for detection of SNP TSC0015488
gtagatgttttag

SEQ ID NO: 57264 - DNA, 13 bp, Artificial Sequence
  Oligonucleotide for detection of SNP TSC0015488
ctaaaacatctac

SEQ ID NO: 57265 - DNA, 13 bp, Artificial Sequence
  Oligonucleotide for detection of SNP TSC0015488
gtagacgttttag

SEQ ID NO: 57266 - DNA, 13 bp, Artificial Sequence
  Oligonucleotide for detection of SNP TSC0015488
ctaaaacgtctac

SEQ ID NO: 57267 - DNA, 13 bp, Artificial Sequence
  Oligonucleotide for detection of SNP TSC0015488
ttgaagtgtttgy

SEQ ID NO: 57268 - DNA, 13 bp, Artificial Sequence
  Oligonucleotide for detection of SNP TSC0015488
rcaaacacttcaa

SEQ ID NO: 57269 - DNA, 13 bp, Artificial Sequence
  Oligonucleotide for detection of SNP TSC0015488
ttgaagcgtttgy

SEQ ID NO: 57270 - DNA, 13 bp, Artificial Sequence
  Oligonucleotide for detection of SNP TSC0015488
rcaaacgcttcaa

SEQ ID NO: 57271 - DNA, 13 bp, Artificial Sequence
  Oligonucleotide for detection of SNP TSC0015489
ggatgaagttata

SEQ ID NO: 57272 - DNA, 13 bp, Artificial Sequence
  Oligonucleotide for detection of SNP TSC0015489
tataacttcatcc

SEQ ID NO: 57273 - DNA, 13 bp, Artificial Sequence
  Oligonucleotide for detection of SNP TSC0015489
ggatgaggttata

SEQ ID NO: 57274 - DNA, 13 bp, Artificial Sequence
  Oligonucleotide for detection of SNP TSC0015489
tataacctcatcc

SEQ ID NO: 57275 - DNA, 13 bp, Artificial Sequence
  Oligonucleotide for detection of SNP TSC0015490
attaggtgggaga

SEQ ID NO: 57276 - DNA, 13 bp, Artificial Sequence
  Oligonucleotide for detection of SNP TSC0015490
tctcccacctaat

SEQ ID NO: 57277 - DNA, 13 bp, Artificial Sequence
  Oligonucleotide for detection of SNP TSC0015490
attaggcgggaga

SEQ ID NO: 57278 - DNA, 13 bp, Artificial Sequence
  Oligonucleotide for detection of SNP TSC0015490
tctcccgcctaat

SEQ ID NO: 57279 - DNA, 13 bp, Artificial Sequence
  Oligonucleotide for detection of SNP TSC0015490
tttttcgtttggt

SEQ ID NO: 57280 - DNA, 13 bp, Artificial Sequence
  Oligonucleotide for detection of SNP TSC0015490
accaaacgaaaaa

SEQ ID NO: 57281 - DNA, 13 bp, Artificial Sequence
  Oligonucleotide for detection of SNP TSC0015491
ttaggtatgtagg

SEQ ID NO: 57282 - DNA, 13 bp, Artificial Sequence
  Oligonucleotide for detection of SNP TSC0015491
cctacatacctaa

SEQ ID NO: 57283 - DNA, 13 bp, Artificial Sequence
  Oligonucleotide for detection of SNP TSC0015491
ttaggtgtgtagg

SEQ ID NO: 57284 - DNA, 13 bp, Artificial Sequence
  Oligonucleotide for detection of SNP TSC0015491
cctacacacctaa

SEQ ID NO: 57285 - DNA, 13 bp, Artificial Sequence
  Oligonucleotide for detection of SNP TSC0015491
ttaggcgtgtagg

SEQ ID NO: 57286 - DNA, 13 bp, Artificial Sequence
  Oligonucleotide for detection of SNP TSC0015491
cctacacgcctaa

SEQ ID NO: 57287 - DNA, 13 bp, Artificial Sequence
  Oligonucleotide for detection of SNP TSC0015491
tttgtatgtttgg

SEQ ID NO: 57288 - DNA, 13 bp, Artificial Sequence
  Oligonucleotide for detection of SNP TSC0015491
ccaaacatacaaa

SEQ ID NO: 57289 - DNA, 13 bp, Artificial Sequence
  Oligonucleotide for detection of SNP TSC0015491
tttgtacgtttgg

SEQ ID NO: 57290 - DNA, 13 bp, Artificial Sequence
  Oligonucleotide for detection of SNP TSC0015491
ccaaacgtacaaa

SEQ ID NO: 57291 - DNA, 13 bp, Artificial Sequence
  Oligonucleotide for detection of SNP TSC0015492
atgtgtagtgtgt

SEQ ID NO: 57292 - DNA, 13 bp, Artificial Sequence
  Oligonucleotide for detection of SNP TSC0015492
acacactacacat

SEQ ID NO: 57293 - DNA, 13 bp, Artificial Sequence
  Oligonucleotide for detection of SNP TSC0015492
atgtgtggtgtgt

SEQ ID NO: 57294 - DNA, 13 bp, Artificial Sequence
  Oligonucleotide for detection of SNP TSC0015492
acacaccacacat

SEQ ID NO: 57295 - DNA, 13 bp, Artificial Sequence
  Oligonucleotide for detection of SNP TSC0015492
acgtgtagtgtgt

SEQ ID NO: 57296 - DNA, 13 bp, Artificial Sequence
  Oligonucleotide for detection of SNP TSC0015492
acacactacacgt

SEQ ID NO: 57297 - DNA, 13 bp, Artificial Sequence
  Oligonucleotide for detection of SNP TSC0015492
acgtgtggtgtgt

SEQ ID NO: 57298 - DNA, 13 bp, Artificial Sequence
  Oligonucleotide for detection of SNP TSC0015492
acacaccacacgt

SEQ ID NO: 57299 - DNA, 13 bp, Artificial Sequence
  Oligonucleotide for detection of SNP TSC0015492
atgtgtagcgtgt

SEQ ID NO: 57300 - DNA, 13 bp, Artificial Sequence
  Oligonucleotide for detection of SNP TSC0015492
acacgctacacat

SEQ ID NO: 57301 - DNA, 13 bp, Artificial Sequence
  Oligonucleotide for detection of SNP TSC0015492
atgtgcggtgtgt

SEQ ID NO: 57302 - DNA, 13 bp, Artificial Sequence
  Oligonucleotide for detection of SNP TSC0015492
acacaccgcacat

SEQ ID NO: 57303 - DNA, 13 bp, Artificial Sequence
  Oligonucleotide for detection of SNP TSC0015492
acgtgtagcgtgt

SEQ ID NO: 57304 - DNA, 13 bp, Artificial Sequence
  Oligonucleotide for detection of SNP TSC0015492
acacgctacacgt

SEQ ID NO: 57305 - DNA, 13 bp, Artificial Sequence
  Oligonucleotide for detection of SNP TSC0015492
atgtgtggcgtgt

SEQ ID NO: 57306 - DNA, 13 bp, Artificial Sequence
  Oligonucleotide for detection of SNP TSC0015492
acacgccacacat

SEQ ID NO: 57307 - DNA, 13 bp, Artificial Sequence
  Oligonucleotide for detection of SNP TSC0015492
acgtgcggtgtgt

SEQ ID NO: 57308 - DNA, 13 bp, Artificial Sequence
  Oligonucleotide for detection of SNP TSC0015492
acacaccgcacgt

SEQ ID NO: 57309 - DNA, 13 bp, Artificial Sequence
  Oligonucleotide for detection of SNP TSC0015492
acgtgtggcgtgt

SEQ ID NO: 57310 - DNA, 13 bp, Artificial Sequence
  Oligonucleotide for detection of SNP TSC0015492
acacgccacacgt

SEQ ID NO: 57311 - DNA, 13 bp, Artificial Sequence
  Oligonucleotide for detection of SNP TSC0015492
atgtgcggcgtgt

SEQ ID NO: 57312 - DNA, 13 bp, Artificial Sequence
  Oligonucleotide for detection of SNP TSC0015492
acacgccgcacat

SEQ ID NO: 57313 - DNA, 13 bp, Artificial Sequence
  Oligonucleotide for detection of SNP TSC0015492
acgtgcggcgtgt

SEQ ID NO: 57314 - DNA, 13 bp, Artificial Sequence
  Oligonucleotide for detection of SNP TSC0015492
acacgccgcacgt

SEQ ID NO: 57315 - DNA, 13 bp, Artificial Sequence
  Oligonucleotide for detection of SNP TSC0015492
atatgttgtatgt

SEQ ID NO: 57316 - DNA, 13 bp, Artificial Sequence
  Oligonucleotide for detection of SNP TSC0015492
acatacaacatat

SEQ ID NO: 57317 - DNA, 13 bp, Artificial Sequence
  Oligonucleotide for detection of SNP TSC0015492
atacgttgtatgt

SEQ ID NO: 57318 - DNA, 13 bp, Artificial Sequence
  Oligonucleotide for detection of SNP TSC0015492
acatacaacgtat

SEQ ID NO: 57319 - DNA, 13 bp, Artificial Sequence
  Oligonucleotide for detection of SNP TSC0015492
atatgttgtacgt

SEQ ID NO: 57320 - DNA, 13 bp, Artificial Sequence
  Oligonucleotide for detection of SNP TSC0015492
acgtacaacatat

SEQ ID NO: 57321 - DNA, 13 bp, Artificial Sequence
  Oligonucleotide for detection of SNP TSC0015492
atatgtcgtatgt

SEQ ID NO: 57322 - DNA, 13 bp, Artificial Sequence
  Oligonucleotide for detection of SNP TSC0015492
acatacgacatat

SEQ ID NO: 57323 - DNA, 13 bp, Artificial Sequence
  Oligonucleotide for detection of SNP TSC0015492
atacgttgtacgt

SEQ ID NO: 57324 - DNA, 13 bp, Artificial Sequence
  Oligonucleotide for detection of SNP TSC0015492
acgtacaacgtat

SEQ ID NO: 57325 - DNA, 13 bp, Artificial Sequence
  Oligonucleotide for detection of SNP TSC0015492
atacgtcgtatgt

SEQ ID NO: 57326 - DNA, 13 bp, Artificial Sequence
  Oligonucleotide for detection of SNP TSC0015492
acatacgacgtat

SEQ ID NO: 57327 - DNA, 13 bp, Artificial Sequence
  Oligonucleotide for detection of SNP TSC0015492
atatgtcgtacgt

SEQ ID NO: 57328 - DNA, 13 bp, Artificial Sequence
  Oligonucleotide for detection of SNP TSC0015492
acgtacgacatat

SEQ ID NO: 57329 - DNA, 13 bp, Artificial Sequence
  Oligonucleotide for detection of SNP TSC0015492
atacgtcgtacgt

SEQ ID NO: 57330 - DNA, 13 bp, Artificial Sequence
  Oligonucleotide for detection of SNP TSC0015492
acgtacgacgtat

SEQ ID NO: 57331 - DNA, 13 bp, Artificial Sequence
  Oligonucleotide for detection of SNP TSC0015493
ggattgtgggttt

SEQ ID NO: 57332 - DNA, 13 bp, Artificial Sequence
  Oligonucleotide for detection of SNP TSC0015493
aaacccacaatcc

SEQ ID NO: 57333 - DNA, 13 bp, Artificial Sequence
  Oligonucleotide for detection of SNP TSC0015493
ggatcgtgggttt

SEQ ID NO: 57334 - DNA, 13 bp, Artificial Sequence
  Oligonucleotide for detection of SNP TSC0015493
aaacccacgatcc

SEQ ID NO: 57335 - DNA, 13 bp, Artificial Sequence
  Oligonucleotide for detection of SNP TSC0015493
ggattgcgggttt

SEQ ID NO: 57336 - DNA, 13 bp, Artificial Sequence
  Oligonucleotide for detection of SNP TSC0015493
aaacccgcaatcc

SEQ ID NO: 57337 - DNA, 13 bp, Artificial Sequence
  Oligonucleotide for detection of SNP TSC0015493
ggatcgcgggttt

SEQ ID NO: 57338 - DNA, 13 bp, Artificial Sequence
  Oligonucleotide for detection of SNP TSC0015493
aaacccgcgatcc

SEQ ID NO: 57339 - DNA, 13 bp, Artificial Sequence
  Oligonucleotide for detection of SNP TSC0015493
aggtttgtggtty

SEQ ID NO: 57340 - DNA, 13 bp, Artificial Sequence
  Oligonucleotide for detection of SNP TSC0015493
raaccacaaacct

SEQ ID NO: 57341 - DNA, 13 bp, Artificial Sequence
  Oligonucleotide for detection of SNP TSC0015493
aggtttatggtty

SEQ ID NO: 57342 - DNA, 13 bp, Artificial Sequence
  Oligonucleotide for detection of SNP TSC0015493
raaccataaacct

SEQ ID NO: 57343 - DNA, 13 bp, Artificial Sequence
  Oligonucleotide for detection of SNP TSC0015493
aggttcgtggtty

SEQ ID NO: 57344 - DNA, 13 bp, Artificial Sequence
  Oligonucleotide for detection of SNP TSC0015493
raaccacgaacct

SEQ ID NO: 57345 - DNA, 13 bp, Artificial Sequence
  Oligonucleotide for detection of SNP TSC0015493
aggtttacggtty

SEQ ID NO: 57346 - DNA, 13 bp, Artificial Sequence
  Oligonucleotide for detection of SNP TSC0015493
raaccgtaaacct

SEQ ID NO: 57347 - DNA, 13 bp, Artificial Sequence
  Oligonucleotide for detection of SNP TSC0015493
aggtttgcggtty

SEQ ID NO: 57348 - DNA, 13 bp, Artificial Sequence
  Oligonucleotide for detection of SNP TSC0015493
raaccgcaaacct

SEQ ID NO: 57349 - DNA, 13 bp, Artificial Sequence
  Oligonucleotide for detection of SNP TSC0015493
aggttcgcggtty

SEQ ID NO: 57350 - DNA, 13 bp, Artificial Sequence
  Oligonucleotide for detection of SNP TSC0015493
raaccgcgaacct

SEQ ID NO: 57351 - DNA, 13 bp, Artificial Sequence
  Oligonucleotide for detection of SNP TSC0015494
atatttgaatagt

SEQ ID NO: 57352 - DNA, 13 bp, Artificial Sequence
  Oligonucleotide for detection of SNP TSC0015494
actattcaaatat

SEQ ID NO: 57353 - DNA, 13 bp, Artificial Sequence
  Oligonucleotide for detection of SNP TSC0015494
atatttaaatagt

SEQ ID NO: 57354 - DNA, 13 bp, Artificial Sequence
  Oligonucleotide for detection of SNP TSC0015494
actatttaaatat

SEQ ID NO: 57355 - DNA, 13 bp, Artificial Sequence
  Oligonucleotide for detection of SNP TSC0015495
tgttttattaaga

SEQ ID NO: 57356 - DNA, 13 bp, Artificial Sequence
  Oligonucleotide for detection of SNP TSC0015495
tcttaataaaaca

SEQ ID NO: 57357 - DNA, 13 bp, Artificial Sequence
  Oligonucleotide for detection of SNP TSC0015495
tgttttgttaaga

SEQ ID NO: 57358 - DNA, 13 bp, Artificial Sequence
  Oligonucleotide for detection of SNP TSC0015495
tcttaacaaaaca

SEQ ID NO: 57359 - DNA, 13 bp, Artificial Sequence
  Oligonucleotide for detection of SNP TSC0015495
tgtttcgttaaga

SEQ ID NO: 57360 - DNA, 13 bp, Artificial Sequence
  Oligonucleotide for detection of SNP TSC0015495
tcttaacgaaaca

SEQ ID NO: 57361 - DNA, 13 bp, Artificial Sequence
  Oligonucleotide for detection of SNP TSC0015495
ttttaatgaaata

SEQ ID NO: 57362 - DNA, 13 bp, Artificial Sequence
  Oligonucleotide for detection of SNP TSC0015495
tatttcattaaaa

SEQ ID NO: 57363 - DNA, 13 bp, Artificial Sequence
  Oligonucleotide for detection of SNP TSC0015495
ttttaacgaaata

SEQ ID NO: 57364 - DNA, 13 bp, Artificial Sequence
  Oligonucleotide for detection of SNP TSC0015495
tatttcgttaaaa

SEQ ID NO: 57365 - DNA, 13 bp, Artificial Sequence
  Oligonucleotide for detection of SNP TSC0015496
agtatatattttg

SEQ ID NO: 57366 - DNA, 13 bp, Artificial Sequence
  Oligonucleotide for detection of SNP TSC0015496
caaaatatatact

SEQ ID NO: 57367 - DNA, 13 bp, Artificial Sequence
  Oligonucleotide for detection of SNP TSC0015496
agtatagattttg

SEQ ID NO: 57368 - DNA, 13 bp, Artificial Sequence
  Oligonucleotide for detection of SNP TSC0015496
caaaatctatact

SEQ ID NO: 57369 - DNA, 13 bp, Artificial Sequence
  Oligonucleotide for detection of SNP TSC0015496
tagaatgtgtgtt

SEQ ID NO: 57370 - DNA, 13 bp, Artificial Sequence
  Oligonucleotide for detection of SNP TSC0015496
aacacacattcta

SEQ ID NO: 57371 - DNA, 13 bp, Artificial Sequence
  Oligonucleotide for detection of SNP TSC0015496
tagaatttgtgtt

SEQ ID NO: 57372 - DNA, 13 bp, Artificial Sequence
  Oligonucleotide for detection of SNP TSC0015496
aacacaaattcta

SEQ ID NO: 57373 - DNA, 13 bp, Artificial Sequence
  Oligonucleotide for detection of SNP TSC0015501
tttttttggggga

SEQ ID NO: 57374 - DNA, 13 bp, Artificial Sequence
  Oligonucleotide for detection of SNP TSC0015501
tcccccaaaaaaa

SEQ ID NO: 57375 - DNA, 13 bp, Artificial Sequence
  Oligonucleotide for detection of SNP TSC0015501
ttttttgggggga

SEQ ID NO: 57376 - DNA, 13 bp, Artificial Sequence
  Oligonucleotide for detection of SNP TSC0015501
tccccccaaaaaa

SEQ ID NO: 57377 - DNA, 13 bp, Artificial Sequence
  Oligonucleotide for detection of SNP TSC0015501
ttttttcggggga

SEQ ID NO: 57378 - DNA, 13 bp, Artificial Sequence
  Oligonucleotide for detection of SNP TSC0015501
tcccccgaaaaaa

SEQ ID NO: 57379 - DNA, 13 bp, Artificial Sequence
  Oligonucleotide for detection of SNP TSC0015501
ttttttgaaaaga

SEQ ID NO: 57380 - DNA, 13 bp, Artificial Sequence
  Oligonucleotide for detection of SNP TSC0015501
tcttttcaaaaaa

SEQ ID NO: 57381 - DNA, 13 bp, Artificial Sequence
  Oligonucleotide for detection of SNP TSC0015501
tttttttaaaaga

SEQ ID NO: 57382 - DNA, 13 bp, Artificial Sequence
  Oligonucleotide for detection of SNP TSC0015501
tcttttaaaaaaa

SEQ ID NO: 57383 - DNA, 13 bp, Artificial Sequence
  Oligonucleotide for detection of SNP TSC0015501
tttttcgaaaaga

SEQ ID NO: 57384 - DNA, 13 bp, Artificial Sequence
  Oligonucleotide for detection of SNP TSC0015501
tcttttcgaaaaa

SEQ ID NO: 57385 - DNA, 13 bp, Artificial Sequence
  Oligonucleotide for detection of SNP TSC0015502
tgagtagaggata

SEQ ID NO: 57386 - DNA, 13 bp, Artificial Sequence
  Oligonucleotide for detection of SNP TSC0015502
tatcctctactca

SEQ ID NO: 57387 - DNA, 13 bp, Artificial Sequence
  Oligonucleotide for detection of SNP TSC0015502
tgagtaaaggata

SEQ ID NO: 57388 - DNA, 13 bp, Artificial Sequence
  Oligonucleotide for detection of SNP TSC0015502
tatcctttactca

SEQ ID NO: 57389 - DNA, 13 bp, Artificial Sequence
  Oligonucleotide for detection of SNP TSC0015502
cgagtagaggata

SEQ ID NO: 57390 - DNA, 13 bp, Artificial Sequence
  Oligonucleotide for detection of SNP TSC0015502
tatcctctactcg

SEQ ID NO: 57391 - DNA, 13 bp, Artificial Sequence
  Oligonucleotide for detection of SNP TSC0015502
cgagtaaaggata

SEQ ID NO: 57392 - DNA, 13 bp, Artificial Sequence
  Oligonucleotide for detection of SNP TSC0015502
tatcctttactcg

SEQ ID NO: 57393 - DNA, 13 bp, Artificial Sequence
  Oligonucleotide for detection of SNP TSC0015505
attgagatataat

SEQ ID NO: 57394 - DNA, 13 bp, Artificial Sequence
  Oligonucleotide for detection of SNP TSC0015505
attatatctcaat

SEQ ID NO: 57395 - DNA, 13 bp, Artificial Sequence
  Oligonucleotide for detection of SNP TSC0015505
attgagttataat

SEQ ID NO: 57396 - DNA, 13 bp, Artificial Sequence
  Oligonucleotide for detection of SNP TSC0015505
attataactcaat

SEQ ID NO: 57397 - DNA, 13 bp, Artificial Sequence
  Oligonucleotide for detection of SNP TSC0015505
atcgagatataat

SEQ ID NO: 57398 - DNA, 13 bp, Artificial Sequence
  Oligonucleotide for detection of SNP TSC0015505
attatatctcgat

SEQ ID NO: 57399 - DNA, 13 bp, Artificial Sequence
  Oligonucleotide for detection of SNP TSC0015505
atcgagttataat

SEQ ID NO: 57400 - DNA, 13 bp, Artificial Sequence
  Oligonucleotide for detection of SNP TSC0015505
attataactcgat

SEQ ID NO: 57401 - DNA, 13 bp, Artificial Sequence
  Oligonucleotide for detection of SNP TSC0015505
attgtgttttggt

SEQ ID NO: 57402 - DNA, 13 bp, Artificial Sequence
  Oligonucleotide for detection of SNP TSC0015505
accaaaacacaat

SEQ ID NO: 57403 - DNA, 13 bp, Artificial Sequence
  Oligonucleotide for detection of SNP TSC0015505
attgtgatttggt

SEQ ID NO: 57404 - DNA, 13 bp, Artificial Sequence
  Oligonucleotide for detection of SNP TSC0015505
accaaatcacaat

SEQ ID NO: 57405 - DNA, 13 bp, Artificial Sequence
  Oligonucleotide for detection of SNP TSC0015505
attgtgtttcggt

SEQ ID NO: 57406 - DNA, 13 bp, Artificial Sequence
  Oligonucleotide for detection of SNP TSC0015505
accgaaacacaat

SEQ ID NO: 57407 - DNA, 13 bp, Artificial Sequence
  Oligonucleotide for detection of SNP TSC0015505
attgtgattcggt

SEQ ID NO: 57408 - DNA, 13 bp, Artificial Sequence
  Oligonucleotide for detection of SNP TSC0015505
accgaatcacaat

SEQ ID NO: 57409 - DNA, 13 bp, Artificial Sequence
  Oligonucleotide for detection of SNP TSC0015507
ttaattgtatgag

SEQ ID NO: 57410 - DNA, 13 bp, Artificial Sequence
  Oligonucleotide for detection of SNP TSC0015507
ctcatacaattaa

SEQ ID NO: 57411 - DNA, 13 bp, Artificial Sequence
  Oligonucleotide for detection of SNP TSC0015507
ttaattttatgag

SEQ ID NO: 57412 - DNA, 13 bp, Artificial Sequence
  Oligonucleotide for detection of SNP TSC0015507
ctcataaaattaa

SEQ ID NO: 57413 - DNA, 13 bp, Artificial Sequence
  Oligonucleotide for detection of SNP TSC0015507
tttatgtagttgg

SEQ ID NO: 57414 - DNA, 13 bp, Artificial Sequence
  Oligonucleotide for detection of SNP TSC0015507
ccaactacataaa

SEQ ID NO: 57415 - DNA, 13 bp, Artificial Sequence
  Oligonucleotide for detection of SNP TSC0015507
tttatgaagttgg

SEQ ID NO: 57416 - DNA, 13 bp, Artificial Sequence
  Oligonucleotide for detection of SNP TSC0015507
ccaacttcataaa

SEQ ID NO: 57417 - DNA, 13 bp, Artificial Sequence
  Oligonucleotide for detection of SNP TSC0015508
tagaaatgaatta

SEQ ID NO: 57418 - DNA, 13 bp, Artificial Sequence
  Oligonucleotide for detection of SNP TSC0015508
taattcatttcta

SEQ ID NO: 57419 - DNA, 13 bp, Artificial Sequence
  Oligonucleotide for detection of SNP TSC0015508
tagaaacgaatta

SEQ ID NO: 57420 - DNA, 13 bp, Artificial Sequence
  Oligonucleotide for detection of SNP TSC0015508
taattcgtttcta

SEQ ID NO: 57421 - DNA, 13 bp, Artificial Sequence
  Oligonucleotide for detection of SNP TSC0015508
tagtttgttttta

SEQ ID NO: 57422 - DNA, 13 bp, Artificial Sequence
  Oligonucleotide for detection of SNP TSC0015508
taaaaacaaacta

SEQ ID NO: 57423 - DNA, 13 bp, Artificial Sequence
  Oligonucleotide for detection of SNP TSC0015508
tagtttattttta

SEQ ID NO: 57424 - DNA, 13 bp, Artificial Sequence
  Oligonucleotide for detection of SNP TSC0015508
taaaaataaacta

SEQ ID NO: 57425 - DNA, 13 bp, Artificial Sequence
  Oligonucleotide for detection of SNP TSC0015508
tagttcgttttta

SEQ ID NO: 57426 - DNA, 13 bp, Artificial Sequence
  Oligonucleotide for detection of SNP TSC0015508
taaaaacgaacta

SEQ ID NO: 57427 - DNA, 13 bp, Artificial Sequence
  Oligonucleotide for detection of SNP TSC0015510
ggttttagggtag

SEQ ID NO: 57428 - DNA, 13 bp, Artificial Sequence
  Oligonucleotide for detection of SNP TSC0015510
ctaccctaaaacc

SEQ ID NO: 57429 - DNA, 13 bp, Artificial Sequence
  Oligonucleotide for detection of SNP TSC0015510
ggtttttgggtag

SEQ ID NO: 57430 - DNA, 13 bp, Artificial Sequence
  Oligonucleotide for detection of SNP TSC0015510
ctacccaaaaacc

SEQ ID NO: 57431 - DNA, 13 bp, Artificial Sequence
  Oligonucleotide for detection of SNP TSC0015510
ttgttttaaggty

SEQ ID NO: 57432 - DNA, 13 bp, Artificial Sequence
  Oligonucleotide for detection of SNP TSC0015510
raccttaaaacaa

SEQ ID NO: 57433 - DNA, 13 bp, Artificial Sequence
  Oligonucleotide for detection of SNP TSC0015510
ttgtttaaaggty

SEQ ID NO: 57434 - DNA, 13 bp, Artificial Sequence
  Oligonucleotide for detection of SNP TSC0015510
racctttaaacaa

SEQ ID NO: 57435 - DNA, 13 bp, Artificial Sequence
  Oligonucleotide for detection of SNP TSC0015512
ttgagtattttta

SEQ ID NO: 57436 - DNA, 13 bp, Artificial Sequence
  Oligonucleotide for detection of SNP TSC0015512
taaaaatactcaa

SEQ ID NO: 57437 - DNA, 13 bp, Artificial Sequence
  Oligonucleotide for detection of SNP TSC0015512
ttgagtgttttta

SEQ ID NO: 57438 - DNA, 13 bp, Artificial Sequence
  Oligonucleotide for detection of SNP TSC0015512
taaaaacactcaa

SEQ ID NO: 57439 - DNA, 13 bp, Artificial Sequence
  Oligonucleotide for detection of SNP TSC0015512
ttgagcgttttta

SEQ ID NO: 57440 - DNA, 13 bp, Artificial Sequence
  Oligonucleotide for detection of SNP TSC0015512
taaaaacgctcaa

SEQ ID NO: 57441 - DNA, 13 bp, Artificial Sequence
  Oligonucleotide for detection of SNP TSC0015512
tgggggtgtttag

SEQ ID NO: 57442 - DNA, 13 bp, Artificial Sequence
  Oligonucleotide for detection of SNP TSC0015512
ctaaacaccccca

SEQ ID NO: 57443 - DNA, 13 bp, Artificial Sequence
  Oligonucleotide for detection of SNP TSC0015512
tgggggcgtttag

SEQ ID NO: 57444 - DNA, 13 bp, Artificial Sequence
  Oligonucleotide for detection of SNP TSC0015512
ctaaacgccccca

SEQ ID NO: 57445 - DNA, 13 bp, Artificial Sequence
  Oligonucleotide for detection of SNP TSC0015514
tttttattttgga

SEQ ID NO: 57446 - DNA, 13 bp, Artificial Sequence
  Oligonucleotide for detection of SNP TSC0015514
tccaaaataaaaa

SEQ ID NO: 57447 - DNA, 13 bp, Artificial Sequence
  Oligonucleotide for detection of SNP TSC0015514
tttttagtttgga

SEQ ID NO: 57448 - DNA, 13 bp, Artificial Sequence
  Oligonucleotide for detection of SNP TSC0015514
tccaaactaaaaa

SEQ ID NO: 57449 - DNA, 13 bp, Artificial Sequence
  Oligonucleotide for detection of SNP TSC0015514
tttaaggtaaaag

SEQ ID NO: 57450 - DNA, 13 bp, Artificial Sequence
  Oligonucleotide for detection of SNP TSC0015514
cttttaccttaaa

SEQ ID NO: 57451 - DNA, 13 bp, Artificial Sequence
  Oligonucleotide for detection of SNP TSC0015514
tttaagttaaaag

SEQ ID NO: 57452 - DNA, 13 bp, Artificial Sequence
  Oligonucleotide for detection of SNP TSC0015514
cttttaacttaaa

SEQ ID NO: 57453 - DNA, 13 bp, Artificial Sequence
  Oligonucleotide for detection of SNP TSC0015515
agtgtcgggatta

SEQ ID NO: 57454 - DNA, 13 bp, Artificial Sequence
  Oligonucleotide for detection of SNP TSC0015515
taatcccgacact

SEQ ID NO: 57455 - DNA, 13 bp, Artificial Sequence
  Oligonucleotide for detection of SNP TSC0015515
taattttggtatt

SEQ ID NO: 57456 - DNA, 13 bp, Artificial Sequence
  Oligonucleotide for detection of SNP TSC0015515
aataccaaaatta

SEQ ID NO: 57457 - DNA, 13 bp, Artificial Sequence
  Oligonucleotide for detection of SNP TSC0015515
taatttaggtatt

SEQ ID NO: 57458 - DNA, 13 bp, Artificial Sequence
  Oligonucleotide for detection of SNP TSC0015515
aatacctaaatta

SEQ ID NO: 57459 - DNA, 13 bp, Artificial Sequence
  Oligonucleotide for detection of SNP TSC0015515
taatttcggtatt

SEQ ID NO: 57460 - DNA, 13 bp, Artificial Sequence
  Oligonucleotide for detection of SNP TSC0015515
aataccgaaatta

SEQ ID NO: 57461 - DNA, 13 bp, Artificial Sequence
  Oligonucleotide for detection of SNP TSC0015516
tttagtattgtag

SEQ ID NO: 57462 - DNA, 13 bp, Artificial Sequence
  Oligonucleotide for detection of SNP TSC0015516
ctacaatactaaa

SEQ ID NO: 57463 - DNA, 13 bp, Artificial Sequence
  Oligonucleotide for detection of SNP TSC0015516
tttagtgttgtag

SEQ ID NO: 57464 - DNA, 13 bp, Artificial Sequence
  Oligonucleotide for detection of SNP TSC0015516
ctacaacactaaa

SEQ ID NO: 57465 - DNA, 13 bp, Artificial Sequence
  Oligonucleotide for detection of SNP TSC0015516
tttagcgttgtag

SEQ ID NO: 57466 - DNA, 13 bp, Artificial Sequence
  Oligonucleotide for detection of SNP TSC0015516
ctacaacgctaaa

SEQ ID NO: 57467 - DNA, 13 bp, Artificial Sequence
  Oligonucleotide for detection of SNP TSC0015516
ttataatgttgga

SEQ ID NO: 57468 - DNA, 13 bp, Artificial Sequence
  Oligonucleotide for detection of SNP TSC0015516
tccaacattataa

SEQ ID NO: 57469 - DNA, 13 bp, Artificial Sequence
  Oligonucleotide for detection of SNP TSC0015516
ttataacgttgga

SEQ ID NO: 57470 - DNA, 13 bp, Artificial Sequence
  Oligonucleotide for detection of SNP TSC0015516
tccaacgttataa

SEQ ID NO: 57471 - DNA, 13 bp, Artificial Sequence
  Oligonucleotide for detection of SNP TSC0015517
agaaataattgaa

SEQ ID NO: 57472 - DNA, 13 bp, Artificial Sequence
  Oligonucleotide for detection of SNP TSC0015517
ttcaattatttct

SEQ ID NO: 57473 - DNA, 13 bp, Artificial Sequence
  Oligonucleotide for detection of SNP TSC0015517
agaaatgattgaa

SEQ ID NO: 57474 - DNA, 13 bp, Artificial Sequence
  Oligonucleotide for detection of SNP TSC0015517
ttcaatcatttct

SEQ ID NO: 57475 - DNA, 13 bp, Artificial Sequence
  Oligonucleotide for detection of SNP TSC0015517
agaaacgattgaa

SEQ ID NO: 57476 - DNA, 13 bp, Artificial Sequence
  Oligonucleotide for detection of SNP TSC0015517
ttcaatcgtttct

SEQ ID NO: 57477 - DNA, 13 bp, Artificial Sequence
  Oligonucleotide for detection of SNP TSC0015517
tttaattgttttt

SEQ ID NO: 57478 - DNA, 13 bp, Artificial Sequence
  Oligonucleotide for detection of SNP TSC0015517
aaaaacaattaaa

SEQ ID NO: 57479 - DNA, 13 bp, Artificial Sequence
  Oligonucleotide for detection of SNP TSC0015517
tttaatcgttttt

SEQ ID NO: 57480 - DNA, 13 bp, Artificial Sequence
  Oligonucleotide for detection of SNP TSC0015517
aaaaacgattaaa

SEQ ID NO: 57481 - DNA, 13 bp, Artificial Sequence
  Oligonucleotide for detection of SNP TSC0015518
tggtgatgaagaa

SEQ ID NO: 57482 - DNA, 13 bp, Artificial Sequence
  Oligonucleotide for detection of SNP TSC0015518
ttcttcatcacca

SEQ ID NO: 57483 - DNA, 13 bp, Artificial Sequence
  Oligonucleotide for detection of SNP TSC0015518
tggtgacgaagaa

SEQ ID NO: 57484 - DNA, 13 bp, Artificial Sequence
  Oligonucleotide for detection of SNP TSC0015518
ttcttcgtcacca

SEQ ID NO: 57485 - DNA, 13 bp, Artificial Sequence
  Oligonucleotide for detection of SNP TSC0015520
gaatttaggaaga

SEQ ID NO: 57486 - DNA, 13 bp, Artificial Sequence
  Oligonucleotide for detection of SNP TSC0015520
tcttcctaaattc

SEQ ID NO: 57487 - DNA, 13 bp, Artificial Sequence
  Oligonucleotide for detection of SNP TSC0015520
gaatttgggaaga

SEQ ID NO: 57488 - DNA, 13 bp, Artificial Sequence
  Oligonucleotide for detection of SNP TSC0015520
tcttcccaaattc

SEQ ID NO: 57489 - DNA, 13 bp, Artificial Sequence
  Oligonucleotide for detection of SNP TSC0015521
taaatatggttay

SEQ ID NO: 57490 - DNA, 13 bp, Artificial Sequence
  Oligonucleotide for detection of SNP TSC0015521
rtaaccatattta

SEQ ID NO: 57491 - DNA, 13 bp, Artificial Sequence
  Oligonucleotide for detection of SNP TSC0015521
taaatacggttay

SEQ ID NO: 57492 - DNA, 13 bp, Artificial Sequence
  Oligonucleotide for detection of SNP TSC0015521
rtaaccgtattta

SEQ ID NO: 57493 - DNA, 13 bp, Artificial Sequence
  Oligonucleotide for detection of SNP TSC0015521
gtgattgtattta

SEQ ID NO: 57494 - DNA, 13 bp, Artificial Sequence
  Oligonucleotide for detection of SNP TSC0015521
taaatacaatcac

SEQ ID NO: 57495 - DNA, 13 bp, Artificial Sequence
  Oligonucleotide for detection of SNP TSC0015521
gtgattatattta

SEQ ID NO: 57496 - DNA, 13 bp, Artificial Sequence
  Oligonucleotide for detection of SNP TSC0015521
taaatataatcac

SEQ ID NO: 57497 - DNA, 13 bp, Artificial Sequence
  Oligonucleotide for detection of SNP TSC0015521
gtgatcgtattta

SEQ ID NO: 57498 - DNA, 13 bp, Artificial Sequence
  Oligonucleotide for detection of SNP TSC0015521
taaatacgatcac

SEQ ID NO: 57499 - DNA, 13 bp, Artificial Sequence
  Oligonucleotide for detection of SNP TSC0015522
ttatgggtgtaga

SEQ ID NO: 57500 - DNA, 13 bp, Artificial Sequence
  Oligonucleotide for detection of SNP TSC0015522
tctacacccataa

SEQ ID NO: 57501 - DNA, 13 bp, Artificial Sequence
  Oligonucleotide for detection of SNP TSC0015522
ttatggttgtaga

SEQ ID NO: 57502 - DNA, 13 bp, Artificial Sequence
  Oligonucleotide for detection of SNP TSC0015522
tctacaaccataa

SEQ ID NO: 57503 - DNA, 13 bp, Artificial Sequence
  Oligonucleotide for detection of SNP TSC0015522
ttatgggcgtaga

SEQ ID NO: 57504 - DNA, 13 bp, Artificial Sequence
  Oligonucleotide for detection of SNP TSC0015522
tctacgcccataa

SEQ ID NO: 57505 - DNA, 13 bp, Artificial Sequence
  Oligonucleotide for detection of SNP TSC0015522
ttatggtcgtaga

SEQ ID NO: 57506 - DNA, 13 bp, Artificial Sequence
  Oligonucleotide for detection of SNP TSC0015522
tctacgaccataa

SEQ ID NO: 57507 - DNA, 13 bp, Artificial Sequence
  Oligonucleotide for detection of SNP TSC0015522
tttgtgtttatgg

SEQ ID NO: 57508 - DNA, 13 bp, Artificial Sequence
  Oligonucleotide for detection of SNP TSC0015522
ccataaacacaaa

SEQ ID NO: 57509 - DNA, 13 bp, Artificial Sequence
  Oligonucleotide for detection of SNP TSC0015522
tttgtgattatgg

SEQ ID NO: 57510 - DNA, 13 bp, Artificial Sequence
  Oligonucleotide for detection of SNP TSC0015522
ccataatcacaaa

SEQ ID NO: 57511 - DNA, 13 bp, Artificial Sequence
  Oligonucleotide for detection of SNP TSC0015522
tttgcgtttatgg

SEQ ID NO: 57512 - DNA, 13 bp, Artificial Sequence
  Oligonucleotide for detection of SNP TSC0015522
ccataaacgcaaa

SEQ ID NO: 57513 - DNA, 13 bp, Artificial Sequence
  Oligonucleotide for detection of SNP TSC0015522
tttgcgattatgg

SEQ ID NO: 57514 - DNA, 13 bp, Artificial Sequence
  Oligonucleotide for detection of SNP TSC0015522
ccataatcgcaaa

SEQ ID NO: 57515 - DNA, 13 bp, Artificial Sequence
  Oligonucleotide for detection of SNP TSC0015523
tggagagttgtty

SEQ ID NO: 57516 - DNA, 13 bp, Artificial Sequence
  Oligonucleotide for detection of SNP TSC0015523
raacaactctcca

SEQ ID NO: 57517 - DNA, 13 bp, Artificial Sequence
  Oligonucleotide for detection of SNP TSC0015523
tggagaattgtty

SEQ ID NO: 57518 - DNA, 13 bp, Artificial Sequence
  Oligonucleotide for detection of SNP TSC0015523
raacaattctcca

SEQ ID NO: 57519 - DNA, 13 bp, Artificial Sequence
  Oligonucleotide for detection of SNP TSC0015523
tggagagtcgtty

SEQ ID NO: 57520 - DNA, 13 bp, Artificial Sequence
  Oligonucleotide for detection of SNP TSC0015523
raacgactctcca

SEQ ID NO: 57521 - DNA, 13 bp, Artificial Sequence
  Oligonucleotide for detection of SNP TSC0015523
tggagaatcgtty

SEQ ID NO: 57522 - DNA, 13 bp, Artificial Sequence
  Oligonucleotide for detection of SNP TSC0015523
raacgattctcca

SEQ ID NO: 57523 - DNA, 13 bp, Artificial Sequence
  Oligonucleotide for detection of SNP TSC0015524
ttttagtgtataa

SEQ ID NO: 57524 - DNA, 13 bp, Artificial Sequence
  Oligonucleotide for detection of SNP TSC0015524
ttatacactaaaa

SEQ ID NO: 57525 - DNA, 13 bp, Artificial Sequence
  Oligonucleotide for detection of SNP TSC0015524
ttttagcgtataa

SEQ ID NO: 57526 - DNA, 13 bp, Artificial Sequence
  Oligonucleotide for detection of SNP TSC0015524
ttatacgctaaaa

SEQ ID NO: 57527 - DNA, 13 bp, Artificial Sequence
  Oligonucleotide for detection of SNP TSC0015524
ttgtatgttgaga

SEQ ID NO: 57528 - DNA, 13 bp, Artificial Sequence
  Oligonucleotide for detection of SNP TSC0015524
tctcaacatacaa

SEQ ID NO: 57529 - DNA, 13 bp, Artificial Sequence
  Oligonucleotide for detection of SNP TSC0015524
ttgtatattgaga

SEQ ID NO: 57530 - DNA, 13 bp, Artificial Sequence
  Oligonucleotide for detection of SNP TSC0015524
tctcaatatacaa

SEQ ID NO: 57531 - DNA, 13 bp, Artificial Sequence
  Oligonucleotide for detection of SNP TSC0015524
ttgtacgttgaga

SEQ ID NO: 57532 - DNA, 13 bp, Artificial Sequence
  Oligonucleotide for detection of SNP TSC0015524
tctcaacgtacaa

SEQ ID NO: 57533 - DNA, 13 bp, Artificial Sequence
  Oligonucleotide for detection of SNP TSC0015526
tttaagatttagt

SEQ ID NO: 57534 - DNA, 13 bp, Artificial Sequence
  Oligonucleotide for detection of SNP TSC0015526
actaaatcttaaa

SEQ ID NO: 57535 - DNA, 13 bp, Artificial Sequence
  Oligonucleotide for detection of SNP TSC0015526
tttaagttttagt

SEQ ID NO: 57536 - DNA, 13 bp, Artificial Sequence
  Oligonucleotide for detection of SNP TSC0015526
actaaaacttaaa

SEQ ID NO: 57537 - DNA, 13 bp, Artificial Sequence
  Oligonucleotide for detection of SNP TSC0015526
attgagttttgga

SEQ ID NO: 57538 - DNA, 13 bp, Artificial Sequence
  Oligonucleotide for detection of SNP TSC0015526
tccaaaactcaat

SEQ ID NO: 57539 - DNA, 13 bp, Artificial Sequence
  Oligonucleotide for detection of SNP TSC0015526
attgaggtttgga

SEQ ID NO: 57540 - DNA, 13 bp, Artificial Sequence
  Oligonucleotide for detection of SNP TSC0015526
tccaaacctcaat

SEQ ID NO: 57541 - DNA, 13 bp, Artificial Sequence
  Oligonucleotide for detection of SNP TSC0015527
tgtgtgaatttty

SEQ ID NO: 57542 - DNA, 13 bp, Artificial Sequence
  Oligonucleotide for detection of SNP TSC0015527
raaaattcacaca

SEQ ID NO: 57543 - DNA, 13 bp, Artificial Sequence
  Oligonucleotide for detection of SNP TSC0015527
tgtgtggatttty

SEQ ID NO: 57544 - DNA, 13 bp, Artificial Sequence
  Oligonucleotide for detection of SNP TSC0015527
raaaatccacaca

SEQ ID NO: 57545 - DNA, 13 bp, Artificial Sequence
  Oligonucleotide for detection of SNP TSC0015527
tgcgtgaatttty

SEQ ID NO: 57546 - DNA, 13 bp, Artificial Sequence
  Oligonucleotide for detection of SNP TSC0015527
raaaattcacgca

SEQ ID NO: 57547 - DNA, 13 bp, Artificial Sequence
  Oligonucleotide for detection of SNP TSC0015527
tgcgtggatttty

SEQ ID NO: 57548 - DNA, 13 bp, Artificial Sequence
  Oligonucleotide for detection of SNP TSC0015527
raaaatccacgca

SEQ ID NO: 57549 - DNA, 13 bp, Artificial Sequence
  Oligonucleotide for detection of SNP TSC0015528
tatgtattatttt

SEQ ID NO: 57550 - DNA, 13 bp, Artificial Sequence
  Oligonucleotide for detection of SNP TSC0015528
aaaataatacata

SEQ ID NO: 57551 - DNA, 13 bp, Artificial Sequence
  Oligonucleotide for detection of SNP TSC0015528
tatgtagtatttt

SEQ ID NO: 57552 - DNA, 13 bp, Artificial Sequence
  Oligonucleotide for detection of SNP TSC0015528
aaaatactacata

SEQ ID NO: 57553 - DNA, 13 bp, Artificial Sequence
  Oligonucleotide for detection of SNP TSC0015528
aaagtggtgtata

SEQ ID NO: 57554 - DNA, 13 bp, Artificial Sequence
  Oligonucleotide for detection of SNP TSC0015528
tatacaccacttt

SEQ ID NO: 57555 - DNA, 13 bp, Artificial Sequence
  Oligonucleotide for detection of SNP TSC0015528
aaagtgttgtata

SEQ ID NO: 57556 - DNA, 13 bp, Artificial Sequence
  Oligonucleotide for detection of SNP TSC0015528
tatacaacacttt

SEQ ID NO: 57557 - DNA, 13 bp, Artificial Sequence
  Oligonucleotide for detection of SNP TSC0015529
atatatttgtgta

SEQ ID NO: 57558 - DNA, 13 bp, Artificial Sequence
  Oligonucleotide for detection of SNP TSC0015529
tacacaaatatat

SEQ ID NO: 57559 - DNA, 13 bp, Artificial Sequence
  Oligonucleotide for detection of SNP TSC0015529
atatacgtgtgta

SEQ ID NO: 57560 - DNA, 13 bp, Artificial Sequence
  Oligonucleotide for detection of SNP TSC0015529
tacacacgtatat

SEQ ID NO: 57561 - DNA, 13 bp, Artificial Sequence
  Oligonucleotide for detection of SNP TSC0015529
tatatatgtatat

SEQ ID NO: 57562 - DNA, 13 bp, Artificial Sequence
  Oligonucleotide for detection of SNP TSC0015529
atatacatatata

SEQ ID NO: 57563 - DNA, 13 bp, Artificial Sequence
  Oligonucleotide for detection of SNP TSC0015529
tatataagtatat

SEQ ID NO: 57564 - DNA, 13 bp, Artificial Sequence
  Oligonucleotide for detection of SNP TSC0015529
atatacttatata

SEQ ID NO: 57565 - DNA, 13 bp, Artificial Sequence
  Oligonucleotide for detection of SNP TSC0015530
ataagtttttttt

SEQ ID NO: 57566 - DNA, 13 bp, Artificial Sequence
  Oligonucleotide for detection of SNP TSC0015530
aaaaaaaacttat

SEQ ID NO: 57567 - DNA, 13 bp, Artificial Sequence
  Oligonucleotide for detection of SNP TSC0015530
ataagtgtttttt

SEQ ID NO: 57568 - DNA, 13 bp, Artificial Sequence
  Oligonucleotide for detection of SNP TSC0015530
aaaaaacacttat

SEQ ID NO: 57569 - DNA, 13 bp, Artificial Sequence
  Oligonucleotide for detection of SNP TSC0015530
ataagcgtttttt

SEQ ID NO: 57570 - DNA, 13 bp, Artificial Sequence
  Oligonucleotide for detection of SNP TSC0015530
aaaaaacgcttat

SEQ ID NO: 57571 - DNA, 13 bp, Artificial Sequence
  Oligonucleotide for detection of SNP TSC0015530
aaaaaaggtttat

SEQ ID NO: 57572 - DNA, 13 bp, Artificial Sequence
  Oligonucleotide for detection of SNP TSC0015530
ataaacctttttt

SEQ ID NO: 57573 - DNA, 13 bp, Artificial Sequence
  Oligonucleotide for detection of SNP TSC0015530
aaaaaatgtttat

SEQ ID NO: 57574 - DNA, 13 bp, Artificial Sequence
  Oligonucleotide for detection of SNP TSC0015530
ataaacatttttt

SEQ ID NO: 57575 - DNA, 13 bp, Artificial Sequence
  Oligonucleotide for detection of SNP TSC0015530
aaaaaacgtttat

SEQ ID NO: 57576 - DNA, 13 bp, Artificial Sequence
  Oligonucleotide for detection of SNP TSC0015530
ataaacgtttttt

SEQ ID NO: 57577 - DNA, 13 bp, Artificial Sequence
  Oligonucleotide for detection of SNP TSC0015531
gggtgggagttty

SEQ ID NO: 57578 - DNA, 13 bp, Artificial Sequence
  Oligonucleotide for detection of SNP TSC0015531
raaactcccaccc

SEQ ID NO: 57579 - DNA, 13 bp, Artificial Sequence
  Oligonucleotide for detection of SNP TSC0015531
gggtggaagttty

SEQ ID NO: 57580 - DNA, 13 bp, Artificial Sequence
  Oligonucleotide for detection of SNP TSC0015531
raaacttccaccc

SEQ ID NO: 57581 - DNA, 13 bp, Artificial Sequence
  Oligonucleotide for detection of SNP TSC0015532
ttttataaaaaty

SEQ ID NO: 57582 - DNA, 13 bp, Artificial Sequence
  Oligonucleotide for detection of SNP TSC0015532
ratttttataaaa

SEQ ID NO: 57583 - DNA, 13 bp, Artificial Sequence
  Oligonucleotide for detection of SNP TSC0015532
ttttatgaaaaty

SEQ ID NO: 57584 - DNA, 13 bp, Artificial Sequence
  Oligonucleotide for detection of SNP TSC0015532
rattttcataaaa

SEQ ID NO: 57585 - DNA, 13 bp, Artificial Sequence
  Oligonucleotide for detection of SNP TSC0015533
gggaagtgtttag

SEQ ID NO: 57586 - DNA, 13 bp, Artificial Sequence
  Oligonucleotide for detection of SNP TSC0015533
ctaaacacttccc

SEQ ID NO: 57587 - DNA, 13 bp, Artificial Sequence
  Oligonucleotide for detection of SNP TSC0015533
gggaagggtttag

SEQ ID NO: 57588 - DNA, 13 bp, Artificial Sequence
  Oligonucleotide for detection of SNP TSC0015533
ctaaacccttccc

SEQ ID NO: 57589 - DNA, 13 bp, Artificial Sequence
  Oligonucleotide for detection of SNP TSC0015533
gggaagcgtttag

SEQ ID NO: 57590 - DNA, 13 bp, Artificial Sequence
  Oligonucleotide for detection of SNP TSC0015533
ctaaacgcttccc

SEQ ID NO: 57591 - DNA, 13 bp, Artificial Sequence
  Oligonucleotide for detection of SNP TSC0015533
ttgagtgttttty

SEQ ID NO: 57592 - DNA, 13 bp, Artificial Sequence
  Oligonucleotide for detection of SNP TSC0015533
raaaaacactcaa

SEQ ID NO: 57593 - DNA, 13 bp, Artificial Sequence
  Oligonucleotide for detection of SNP TSC0015533
ttgagttttttty

SEQ ID NO: 57594 - DNA, 13 bp, Artificial Sequence
  Oligonucleotide for detection of SNP TSC0015533
raaaaaaactcaa

SEQ ID NO: 57595 - DNA, 13 bp, Artificial Sequence
  Oligonucleotide for detection of SNP TSC0015533
ttgagcgttttty

SEQ ID NO: 57596 - DNA, 13 bp, Artificial Sequence
  Oligonucleotide for detection of SNP TSC0015533
raaaaacgctcaa

SEQ ID NO: 57597 - DNA, 13 bp, Artificial Sequence
  Oligonucleotide for detection of SNP TSC0015534
tttttagtgtagt

SEQ ID NO: 57598 - DNA, 13 bp, Artificial Sequence
  Oligonucleotide for detection of SNP TSC0015534
actacactaaaaa

SEQ ID NO: 57599 - DNA, 13 bp, Artificial Sequence
  Oligonucleotide for detection of SNP TSC0015534
tttttaatgtagt

SEQ ID NO: 57600 - DNA, 13 bp, Artificial Sequence
  Oligonucleotide for detection of SNP TSC0015534
actacattaaaaa

SEQ ID NO: 57601 - DNA, 13 bp, Artificial Sequence
  Oligonucleotide for detection of SNP TSC0015538
taaaggggtatgy

SEQ ID NO: 57602 - DNA, 13 bp, Artificial Sequence
  Oligonucleotide for detection of SNP TSC0015538
rcataccccttta

SEQ ID NO: 57603 - DNA, 13 bp, Artificial Sequence
  Oligonucleotide for detection of SNP TSC0015538
taaaggagtatgy

SEQ ID NO: 57604 - DNA, 13 bp, Artificial Sequence
  Oligonucleotide for detection of SNP TSC0015538
rcatactccttta

SEQ ID NO: 57605 - DNA, 13 bp, Artificial Sequence
  Oligonucleotide for detection of SNP TSC0015538
taaaggggtacgy

SEQ ID NO: 57606 - DNA, 13 bp, Artificial Sequence
  Oligonucleotide for detection of SNP TSC0015538
rcgtaccccttta

SEQ ID NO: 57607 - DNA, 13 bp, Artificial Sequence
  Oligonucleotide for detection of SNP TSC0015538
taaaggagtacgy

SEQ ID NO: 57608 - DNA, 13 bp, Artificial Sequence
  Oligonucleotide for detection of SNP TSC0015538
rcgtactccttta

SEQ ID NO: 57609 - DNA, 13 bp, Artificial Sequence
  Oligonucleotide for detection of SNP TSC0015539
taatgaatttatt

SEQ ID NO: 57610 - DNA, 13 bp, Artificial Sequence
  Oligonucleotide for detection of SNP TSC0015539
aataaattcatta

SEQ ID NO: 57611 - DNA, 13 bp, Artificial Sequence
  Oligonucleotide for detection of SNP TSC0015539
taatgattttatt

SEQ ID NO: 57612 - DNA, 13 bp, Artificial Sequence
  Oligonucleotide for detection of SNP TSC0015539
aataaaatcatta

SEQ ID NO: 57613 - DNA, 13 bp, Artificial Sequence
  Oligonucleotide for detection of SNP TSC0015539
aatgaatttatta

SEQ ID NO: 57614 - DNA, 13 bp, Artificial Sequence
  Oligonucleotide for detection of SNP TSC0015539
taataaattcatt

SEQ ID NO: 57615 - DNA, 13 bp, Artificial Sequence
  Oligonucleotide for detection of SNP TSC0015539
aatgaaattatta

SEQ ID NO: 57616 - DNA, 13 bp, Artificial Sequence
  Oligonucleotide for detection of SNP TSC0015539
taataatttcatt

SEQ ID NO: 57617 - DNA, 13 bp, Artificial Sequence
  Oligonucleotide for detection of SNP TSC0015541
ttatttaatttay

SEQ ID NO: 57618 - DNA, 13 bp, Artificial Sequence
  Oligonucleotide for detection of SNP TSC0015541
rtaaattaaataa

SEQ ID NO: 57619 - DNA, 13 bp, Artificial Sequence
  Oligonucleotide for detection of SNP TSC0015541
ttattttatttay

SEQ ID NO: 57620 - DNA, 13 bp, Artificial Sequence
  Oligonucleotide for detection of SNP TSC0015541
rtaaataaaataa

SEQ ID NO: 57621 - DNA, 13 bp, Artificial Sequence
  Oligonucleotide for detection of SNP TSC0015541
gtagattagatgg

SEQ ID NO: 57622 - DNA, 13 bp, Artificial Sequence
  Oligonucleotide for detection of SNP TSC0015541
ccatctaatctac

SEQ ID NO: 57623 - DNA, 13 bp, Artificial Sequence
  Oligonucleotide for detection of SNP TSC0015541
gtagatgagatgg

SEQ ID NO: 57624 - DNA, 13 bp, Artificial Sequence
  Oligonucleotide for detection of SNP TSC0015541
ccatctcatctac

SEQ ID NO: 57625 - DNA, 13 bp, Artificial Sequence
  Oligonucleotide for detection of SNP TSC0015545
gatagaatgaagy

SEQ ID NO: 57626 - DNA, 13 bp, Artificial Sequence
  Oligonucleotide for detection of SNP TSC0015545
rcttcattctatc

SEQ ID NO: 57627 - DNA, 13 bp, Artificial Sequence
  Oligonucleotide for detection of SNP TSC0015545
gatagagtgaagy

SEQ ID NO: 57628 - DNA, 13 bp, Artificial Sequence
  Oligonucleotide for detection of SNP TSC0015545
rcttcactctatc

SEQ ID NO: 57629 - DNA, 13 bp, Artificial Sequence
  Oligonucleotide for detection of SNP TSC0015545
gatagaacgaagy

SEQ ID NO: 57630 - DNA, 13 bp, Artificial Sequence
  Oligonucleotide for detection of SNP TSC0015545
rcttcgttctatc

SEQ ID NO: 57631 - DNA, 13 bp, Artificial Sequence
  Oligonucleotide for detection of SNP TSC0015545
gatagagcgaagy

SEQ ID NO: 57632 - DNA, 13 bp, Artificial Sequence
  Oligonucleotide for detection of SNP TSC0015545
rcttcgctctatc

SEQ ID NO: 57633 - DNA, 13 bp, Artificial Sequence
  Oligonucleotide for detection of SNP TSC0015546
tatggaatttgta

SEQ ID NO: 57634 - DNA, 13 bp, Artificial Sequence
  Oligonucleotide for detection of SNP TSC0015546
tacaaattccata

SEQ ID NO: 57635 - DNA, 13 bp, Artificial Sequence
  Oligonucleotide for detection of SNP TSC0015546
tatggagtttgta

SEQ ID NO: 57636 - DNA, 13 bp, Artificial Sequence
  Oligonucleotide for detection of SNP TSC0015546
tacaaactccata

SEQ ID NO: 57637 - DNA, 13 bp, Artificial Sequence
  Oligonucleotide for detection of SNP TSC0015546
tatggaattcgta

SEQ ID NO: 57638 - DNA, 13 bp, Artificial Sequence
  Oligonucleotide for detection of SNP TSC0015546
tacgaattccata

SEQ ID NO: 57639 - DNA, 13 bp, Artificial Sequence
  Oligonucleotide for detection of SNP TSC0015546
tatggagttcgta

SEQ ID NO: 57640 - DNA, 13 bp, Artificial Sequence
  Oligonucleotide for detection of SNP TSC0015546
tacgaactccata

SEQ ID NO: 57641 - DNA, 13 bp, Artificial Sequence
  Oligonucleotide for detection of SNP TSC0015547
aggagatattttt

SEQ ID NO: 57642 - DNA, 13 bp, Artificial Sequence
  Oligonucleotide for detection of SNP TSC0015547
aaaaatatctcct

SEQ ID NO: 57643 - DNA, 13 bp, Artificial Sequence
  Oligonucleotide for detection of SNP TSC0015547
aggagagattttt

SEQ ID NO: 57644 - DNA, 13 bp, Artificial Sequence
  Oligonucleotide for detection of SNP TSC0015547
aaaaatctctcct

SEQ ID NO: 57645 - DNA, 13 bp, Artificial Sequence
  Oligonucleotide for detection of SNP TSC0015547
aggggtgtttttt

SEQ ID NO: 57646 - DNA, 13 bp, Artificial Sequence
  Oligonucleotide for detection of SNP TSC0015547
aaaaaacacccct

SEQ ID NO: 57647 - DNA, 13 bp, Artificial Sequence
  Oligonucleotide for detection of SNP TSC0015547
aggggtttttttt

SEQ ID NO: 57648 - DNA, 13 bp, Artificial Sequence
  Oligonucleotide for detection of SNP TSC0015547
aaaaaaaacccct

SEQ ID NO: 57649 - DNA, 13 bp, Artificial Sequence
  Oligonucleotide for detection of SNP TSC0015548
tttatatgtttta

SEQ ID NO: 57650 - DNA, 13 bp, Artificial Sequence
  Oligonucleotide for detection of SNP TSC0015548
taaaacatataaa

SEQ ID NO: 57651 - DNA, 13 bp, Artificial Sequence
  Oligonucleotide for detection of SNP TSC0015548
tttatacgtttta

SEQ ID NO: 57652 - DNA, 13 bp, Artificial Sequence
  Oligonucleotide for detection of SNP TSC0015548
taaaacgtataaa

SEQ ID NO: 57653 - DNA, 13 bp, Artificial Sequence
  Oligonucleotide for detection of SNP TSC0015548
tggaatgtatgga

SEQ ID NO: 57654 - DNA, 13 bp, Artificial Sequence
  Oligonucleotide for detection of SNP TSC0015548
tccatacattcca

SEQ ID NO: 57655 - DNA, 13 bp, Artificial Sequence
  Oligonucleotide for detection of SNP TSC0015548
tggaatatatgga

SEQ ID NO: 57656 - DNA, 13 bp, Artificial Sequence
  Oligonucleotide for detection of SNP TSC0015548
tccatatattcca

SEQ ID NO: 57657 - DNA, 13 bp, Artificial Sequence
  Oligonucleotide for detection of SNP TSC0015548
tggaacgtatgga

SEQ ID NO: 57658 - DNA, 13 bp, Artificial Sequence
  Oligonucleotide for detection of SNP TSC0015548
tccatacgttcca

SEQ ID NO: 57659 - DNA, 13 bp, Artificial Sequence
  Oligonucleotide for detection of SNP TSC0015549
gggatgaaggagy

SEQ ID NO: 57660 - DNA, 13 bp, Artificial Sequence
  Oligonucleotide for detection of SNP TSC0015549
rctccttcatccc

SEQ ID NO: 57661 - DNA, 13 bp, Artificial Sequence
  Oligonucleotide for detection of SNP TSC0015549
gggatggaggagy

SEQ ID NO: 57662 - DNA, 13 bp, Artificial Sequence
  Oligonucleotide for detection of SNP TSC0015549
rctcctccatccc

SEQ ID NO: 57663 - DNA, 13 bp, Artificial Sequence
  Oligonucleotide for detection of SNP TSC0015549
gggacgaaggagy

SEQ ID NO: 57664 - DNA, 13 bp, Artificial Sequence
  Oligonucleotide for detection of SNP TSC0015549
rctccttcgtccc

SEQ ID NO: 57665 - DNA, 13 bp, Artificial Sequence
  Oligonucleotide for detection of SNP TSC0015549
gggacggaggagy

SEQ ID NO: 57666 - DNA, 13 bp, Artificial Sequence
  Oligonucleotide for detection of SNP TSC0015549
rctcctccgtccc

SEQ ID NO: 57667 - DNA, 13 bp, Artificial Sequence
  Oligonucleotide for detection of SNP TSC0015550
atggtggtaaatt

SEQ ID NO: 57668 - DNA, 13 bp, Artificial Sequence
  Oligonucleotide for detection of SNP TSC0015550
aatttaccaccat

SEQ ID NO: 57669 - DNA, 13 bp, Artificial Sequence
  Oligonucleotide for detection of SNP TSC0015550
atggtgttaaatt

SEQ ID NO: 57670 - DNA, 13 bp, Artificial Sequence
  Oligonucleotide for detection of SNP TSC0015550
aatttaacaccat

SEQ ID NO: 57671 - DNA, 13 bp, Artificial Sequence
  Oligonucleotide for detection of SNP TSC0015550
agtttgttattat

SEQ ID NO: 57672 - DNA, 13 bp, Artificial Sequence
  Oligonucleotide for detection of SNP TSC0015550
ataataacaaact

SEQ ID NO: 57673 - DNA, 13 bp, Artificial Sequence
  Oligonucleotide for detection of SNP TSC0015550
agtttgatattat

SEQ ID NO: 57674 - DNA, 13 bp, Artificial Sequence
  Oligonucleotide for detection of SNP TSC0015550
ataatatcaaact

SEQ ID NO: 57675 - DNA, 13 bp, Artificial Sequence
  Oligonucleotide for detection of SNP TSC0015551
atttattgtttty

SEQ ID NO: 57676 - DNA, 13 bp, Artificial Sequence
  Oligonucleotide for detection of SNP TSC0015551
raaaacaataaat

SEQ ID NO: 57677 - DNA, 13 bp, Artificial Sequence
  Oligonucleotide for detection of SNP TSC0015551
atttatcgtttty

SEQ ID NO: 57678 - DNA, 13 bp, Artificial Sequence
  Oligonucleotide for detection of SNP TSC0015551
raaaacgataaat

SEQ ID NO: 57679 - DNA, 13 bp, Artificial Sequence
  Oligonucleotide for detection of SNP TSC0015551
ggaggtggtagat

SEQ ID NO: 57680 - DNA, 13 bp, Artificial Sequence
  Oligonucleotide for detection of SNP TSC0015551
atctaccacctcc

SEQ ID NO: 57681 - DNA, 13 bp, Artificial Sequence
  Oligonucleotide for detection of SNP TSC0015551
ggaggtagtagat

SEQ ID NO: 57682 - DNA, 13 bp, Artificial Sequence
  Oligonucleotide for detection of SNP TSC0015551
atctactacctcc

SEQ ID NO: 57683 - DNA, 13 bp, Artificial Sequence
  Oligonucleotide for detection of SNP TSC0015551
ggaggcggtagat

SEQ ID NO: 57684 - DNA, 13 bp, Artificial Sequence
  Oligonucleotide for detection of SNP TSC0015551
atctaccgcctcc

SEQ ID NO: 57685 - DNA, 13 bp, Artificial Sequence
  Oligonucleotide for detection of SNP TSC0015552
tggaaaattattg

SEQ ID NO: 57686 - DNA, 13 bp, Artificial Sequence
  Oligonucleotide for detection of SNP TSC0015552
caataattttcca

SEQ ID NO: 57687 - DNA, 13 bp, Artificial Sequence
  Oligonucleotide for detection of SNP TSC0015552
tggaaagttattg

SEQ ID NO: 57688 - DNA, 13 bp, Artificial Sequence
  Oligonucleotide for detection of SNP TSC0015552
caataactttcca

SEQ ID NO: 57689 - DNA, 13 bp, Artificial Sequence
  Oligonucleotide for detection of SNP TSC0015552
cggaaaattattg

SEQ ID NO: 57690 - DNA, 13 bp, Artificial Sequence
  Oligonucleotide for detection of SNP TSC0015552
caataattttccg

SEQ ID NO: 57691 - DNA, 13 bp, Artificial Sequence
  Oligonucleotide for detection of SNP TSC0015552
cggaaagttattg

SEQ ID NO: 57692 - DNA, 13 bp, Artificial Sequence
  Oligonucleotide for detection of SNP TSC0015552
caataactttccg

SEQ ID NO: 57693 - DNA, 13 bp, Artificial Sequence
  Oligonucleotide for detection of SNP TSC0015553
tgagggaaggtag

SEQ ID NO: 57694 - DNA, 13 bp, Artificial Sequence
  Oligonucleotide for detection of SNP TSC0015553
ctaccttccctca

SEQ ID NO: 57695 - DNA, 13 bp, Artificial Sequence
  Oligonucleotide for detection of SNP TSC0015553
tgaggggaggtag

SEQ ID NO: 57696 - DNA, 13 bp, Artificial Sequence
  Oligonucleotide for detection of SNP TSC0015553
ctacctcccctca

SEQ ID NO: 57697 - DNA, 13 bp, Artificial Sequence
  Oligonucleotide for detection of SNP TSC0015553
cgagggaaggtag

SEQ ID NO: 57698 - DNA, 13 bp, Artificial Sequence
  Oligonucleotide for detection of SNP TSC0015553
ctaccttccctcg

SEQ ID NO: 57699 - DNA, 13 bp, Artificial Sequence
  Oligonucleotide for detection of SNP TSC0015553
cgaggggaggtag

SEQ ID NO: 57700 - DNA, 13 bp, Artificial Sequence
  Oligonucleotide for detection of SNP TSC0015553
ctacctcccctcg

SEQ ID NO: 57701 - DNA, 13 bp, Artificial Sequence
  Oligonucleotide for detection of SNP TSC0015554
ttggagatggtta

SEQ ID NO: 57702 - DNA, 13 bp, Artificial Sequence
  Oligonucleotide for detection of SNP TSC0015554
taaccatctccaa

SEQ ID NO: 57703 - DNA, 13 bp, Artificial Sequence
  Oligonucleotide for detection of SNP TSC0015554
ttggaggtggtta

SEQ ID NO: 57704 - DNA, 13 bp, Artificial Sequence
  Oligonucleotide for detection of SNP TSC0015554
taaccacctccaa

SEQ ID NO: 57705 - DNA, 13 bp, Artificial Sequence
  Oligonucleotide for detection of SNP TSC0015555
tgtatatgatata

SEQ ID NO: 57706 - DNA, 13 bp, Artificial Sequence
  Oligonucleotide for detection of SNP TSC0015555
tatatcatataca

SEQ ID NO: 57707 - DNA, 13 bp, Artificial Sequence
  Oligonucleotide for detection of SNP TSC0015555
tgtatacgatata

SEQ ID NO: 57708 - DNA, 13 bp, Artificial Sequence
  Oligonucleotide for detection of SNP TSC0015555
tatatcgtataca

SEQ ID NO: 57709 - DNA, 13 bp, Artificial Sequence
  Oligonucleotide for detection of SNP TSC0015555
tatgttgtatgta

SEQ ID NO: 57710 - DNA, 13 bp, Artificial Sequence
  Oligonucleotide for detection of SNP TSC0015555
tacatacaacata

SEQ ID NO: 57711 - DNA, 13 bp, Artificial Sequence
  Oligonucleotide for detection of SNP TSC0015555
tatgttatatgta

SEQ ID NO: 57712 - DNA, 13 bp, Artificial Sequence
  Oligonucleotide for detection of SNP TSC0015555
tacatataacata

SEQ ID NO: 57713 - DNA, 13 bp, Artificial Sequence
  Oligonucleotide for detection of SNP TSC0015555
tatgtcgtatgta

SEQ ID NO: 57714 - DNA, 13 bp, Artificial Sequence
  Oligonucleotide for detection of SNP TSC0015555
tacatacgacata

SEQ ID NO: 57715 - DNA, 13 bp, Artificial Sequence
  Oligonucleotide for detection of SNP TSC0015556
tttggggttgaty

SEQ ID NO: 57716 - DNA, 13 bp, Artificial Sequence
  Oligonucleotide for detection of SNP TSC0015556
ratcaaccccaaa

SEQ ID NO: 57717 - DNA, 13 bp, Artificial Sequence
  Oligonucleotide for detection of SNP TSC0015556
tttgggattgaty

SEQ ID NO: 57718 - DNA, 13 bp, Artificial Sequence
  Oligonucleotide for detection of SNP TSC0015556
ratcaatcccaaa

SEQ ID NO: 57719 - DNA, 13 bp, Artificial Sequence
  Oligonucleotide for detection of SNP TSC0015556
ttcggggttgaty

SEQ ID NO: 57720 - DNA, 13 bp, Artificial Sequence
  Oligonucleotide for detection of SNP TSC0015556
ratcaaccccgaa

SEQ ID NO: 57721 - DNA, 13 bp, Artificial Sequence
  Oligonucleotide for detection of SNP TSC0015556
ttcgggattgaty

SEQ ID NO: 57722 - DNA, 13 bp, Artificial Sequence
  Oligonucleotide for detection of SNP TSC0015556
ratcaatcccgaa

SEQ ID NO: 57723 - DNA, 13 bp, Artificial Sequence
  Oligonucleotide for detection of SNP TSC0015556
tttggggtcgaty

SEQ ID NO: 57724 - DNA, 13 bp, Artificial Sequence
  Oligonucleotide for detection of SNP TSC0015556
ratcgaccccaaa

SEQ ID NO: 57725 - DNA, 13 bp, Artificial Sequence
  Oligonucleotide for detection of SNP TSC0015556
tttgggatcgaty

SEQ ID NO: 57726 - DNA, 13 bp, Artificial Sequence
  Oligonucleotide for detection of SNP TSC0015556
ratcgatcccaaa

SEQ ID NO: 57727 - DNA, 13 bp, Artificial Sequence
  Oligonucleotide for detection of SNP TSC0015556
ttcggggtcgaty

SEQ ID NO: 57728 - DNA, 13 bp, Artificial Sequence
  Oligonucleotide for detection of SNP TSC0015556
ratcgaccccgaa

SEQ ID NO: 57729 - DNA, 13 bp, Artificial Sequence
  Oligonucleotide for detection of SNP TSC0015556
ttcgggatcgaty

SEQ ID NO: 57730 - DNA, 13 bp, Artificial Sequence
  Oligonucleotide for detection of SNP TSC0015556
ratcgatcccgaa

SEQ ID NO: 57731 - DNA, 13 bp, Artificial Sequence
  Oligonucleotide for detection of SNP TSC0015557
ttagaaaatgaty

SEQ ID NO: 57732 - DNA, 13 bp, Artificial Sequence
  Oligonucleotide for detection of SNP TSC0015557
ratcattttctaa

SEQ ID NO: 57733 - DNA, 13 bp, Artificial Sequence
  Oligonucleotide for detection of SNP TSC0015557
ttagaatatgaty

SEQ ID NO: 57734 - DNA, 13 bp, Artificial Sequence
  Oligonucleotide for detection of SNP TSC0015557
ratcatattctaa

SEQ ID NO: 57735 - DNA, 13 bp, Artificial Sequence
  Oligonucleotide for detection of SNP TSC0015557
ttagaaaacgaty

SEQ ID NO: 57736 - DNA, 13 bp, Artificial Sequence
  Oligonucleotide for detection of SNP TSC0015557
ratcgttttctaa

SEQ ID NO: 57737 - DNA, 13 bp, Artificial Sequence
  Oligonucleotide for detection of SNP TSC0015557
ttagaatacgaty

SEQ ID NO: 57738 - DNA, 13 bp, Artificial Sequence
  Oligonucleotide for detection of SNP TSC0015557
ratcgtattctaa

SEQ ID NO: 57739 - DNA, 13 bp, Artificial Sequence
  Oligonucleotide for detection of SNP TSC0015557
ggttgttttttga

SEQ ID NO: 57740 - DNA, 13 bp, Artificial Sequence
  Oligonucleotide for detection of SNP TSC0015557
tcaaaaaacaacc

SEQ ID NO: 57741 - DNA, 13 bp, Artificial Sequence
  Oligonucleotide for detection of SNP TSC0015557
ggttgtgttttga

SEQ ID NO: 57742 - DNA, 13 bp, Artificial Sequence
  Oligonucleotide for detection of SNP TSC0015557
tcaaaacacaacc

SEQ ID NO: 57743 - DNA, 13 bp, Artificial Sequence
  Oligonucleotide for detection of SNP TSC0015557
ggtcgttttttga

SEQ ID NO: 57744 - DNA, 13 bp, Artificial Sequence
  Oligonucleotide for detection of SNP TSC0015557
tcaaaaaacgacc

SEQ ID NO: 57745 - DNA, 13 bp, Artificial Sequence
  Oligonucleotide for detection of SNP TSC0015557
ggtcgtgttttga

SEQ ID NO: 57746 - DNA, 13 bp, Artificial Sequence
  Oligonucleotide for detection of SNP TSC0015557
tcaaaacacgacc

SEQ ID NO: 57747 - DNA, 13 bp, Artificial Sequence
  Oligonucleotide for detection of SNP TSC0015561
aataatatgaggy

SEQ ID NO: 57748 - DNA, 13 bp, Artificial Sequence
  Oligonucleotide for detection of SNP TSC0015561
rcctcatattatt

SEQ ID NO: 57749 - DNA, 13 bp, Artificial Sequence
  Oligonucleotide for detection of SNP TSC0015561
aataatgtgaggy

SEQ ID NO: 57750 - DNA, 13 bp, Artificial Sequence
  Oligonucleotide for detection of SNP TSC0015561
rcctcacattatt

SEQ ID NO: 57751 - DNA, 13 bp, Artificial Sequence
  Oligonucleotide for detection of SNP TSC0015561
aataacgtgaggy

SEQ ID NO: 57752 - DNA, 13 bp, Artificial Sequence
  Oligonucleotide for detection of SNP TSC0015561
rcctcacgttatt

SEQ ID NO: 57753 - DNA, 13 bp, Artificial Sequence
  Oligonucleotide for detection of SNP TSC0015561
gttttatgttgtt

SEQ ID NO: 57754 - DNA, 13 bp, Artificial Sequence
  Oligonucleotide for detection of SNP TSC0015561
aacaacataaaac

SEQ ID NO: 57755 - DNA, 13 bp, Artificial Sequence
  Oligonucleotide for detection of SNP TSC0015561
gttttacgttgtt

SEQ ID NO: 57756 - DNA, 13 bp, Artificial Sequence
  Oligonucleotide for detection of SNP TSC0015561
aacaacgtaaaac

SEQ ID NO: 57757 - DNA, 13 bp, Artificial Sequence
  Oligonucleotide for detection of SNP TSC0015562
tatgaagaatgta

SEQ ID NO: 57758 - DNA, 13 bp, Artificial Sequence
  Oligonucleotide for detection of SNP TSC0015562
tacattcttcata

SEQ ID NO: 57759 - DNA, 13 bp, Artificial Sequence
  Oligonucleotide for detection of SNP TSC0015562
tatgaaaaatgta

SEQ ID NO: 57760 - DNA, 13 bp, Artificial Sequence
  Oligonucleotide for detection of SNP TSC0015562
tacatttttcata

SEQ ID NO: 57761 - DNA, 13 bp, Artificial Sequence
  Oligonucleotide for detection of SNP TSC0015562
tacgaagaatgta

SEQ ID NO: 57762 - DNA, 13 bp, Artificial Sequence
  Oligonucleotide for detection of SNP TSC0015562
tacattcttcgta

SEQ ID NO: 57763 - DNA, 13 bp, Artificial Sequence
  Oligonucleotide for detection of SNP TSC0015562
tacgaaaaatgta

SEQ ID NO: 57764 - DNA, 13 bp, Artificial Sequence
  Oligonucleotide for detection of SNP TSC0015562
tacatttttcgta

SEQ ID NO: 57765 - DNA, 13 bp, Artificial Sequence
  Oligonucleotide for detection of SNP TSC0015564
aaggttaggtgtg

SEQ ID NO: 57766 - DNA, 13 bp, Artificial Sequence
  Oligonucleotide for detection of SNP TSC0015564
cacacctaacctt

SEQ ID NO: 57767 - DNA, 13 bp, Artificial Sequence
  Oligonucleotide for detection of SNP TSC0015564
aaggttgggtgtg

SEQ ID NO: 57768 - DNA, 13 bp, Artificial Sequence
  Oligonucleotide for detection of SNP TSC0015564
cacacccaacctt

SEQ ID NO: 57769 - DNA, 13 bp, Artificial Sequence
  Oligonucleotide for detection of SNP TSC0015564
aaggttaggcgtg

SEQ ID NO: 57770 - DNA, 13 bp, Artificial Sequence
  Oligonucleotide for detection of SNP TSC0015564
cacgcctaacctt

SEQ ID NO: 57771 - DNA, 13 bp, Artificial Sequence
  Oligonucleotide for detection of SNP TSC0015564
aaggtcgggtgtg

SEQ ID NO: 57772 - DNA, 13 bp, Artificial Sequence
  Oligonucleotide for detection of SNP TSC0015564
cacacccgacctt

SEQ ID NO: 57773 - DNA, 13 bp, Artificial Sequence
  Oligonucleotide for detection of SNP TSC0015564
aaggttaggtgcg

SEQ ID NO: 57774 - DNA, 13 bp, Artificial Sequence
  Oligonucleotide for detection of SNP TSC0015564
cgcacctaacctt

SEQ ID NO: 57775 - DNA, 13 bp, Artificial Sequence
  Oligonucleotide for detection of SNP TSC0015564
aaggttgggcgtg

SEQ ID NO: 57776 - DNA, 13 bp, Artificial Sequence
  Oligonucleotide for detection of SNP TSC0015564
cacgcccaacctt

SEQ ID NO: 57777 - DNA, 13 bp, Artificial Sequence
  Oligonucleotide for detection of SNP TSC0015564
aaggttaggcgcg

SEQ ID NO: 57778 - DNA, 13 bp, Artificial Sequence
  Oligonucleotide for detection of SNP TSC0015564
cgcgcctaacctt

SEQ ID NO: 57779 - DNA, 13 bp, Artificial Sequence
  Oligonucleotide for detection of SNP TSC0015564
aaggttgggtgcg

SEQ ID NO: 57780 - DNA, 13 bp, Artificial Sequence
  Oligonucleotide for detection of SNP TSC0015564
cgcacccaacctt

SEQ ID NO: 57781 - DNA, 13 bp, Artificial Sequence
  Oligonucleotide for detection of SNP TSC0015564
aaggtcgggcgtg

SEQ ID NO: 57782 - DNA, 13 bp, Artificial Sequence
  Oligonucleotide for detection of SNP TSC0015564
cacgcccgacctt

SEQ ID NO: 57783 - DNA, 13 bp, Artificial Sequence
  Oligonucleotide for detection of SNP TSC0015564
aaggtcgggtgcg

SEQ ID NO: 57784 - DNA, 13 bp, Artificial Sequence
  Oligonucleotide for detection of SNP TSC0015564
cgcacccgacctt

SEQ ID NO: 57785 - DNA, 13 bp, Artificial Sequence
  Oligonucleotide for detection of SNP TSC0015564
aaggttgggcgcg

SEQ ID NO: 57786 - DNA, 13 bp, Artificial Sequence
  Oligonucleotide for detection of SNP TSC0015564
cgcgcccaacctt

SEQ ID NO: 57787 - DNA, 13 bp, Artificial Sequence
  Oligonucleotide for detection of SNP TSC0015564
aaggtcgggcgcg

SEQ ID NO: 57788 - DNA, 13 bp, Artificial Sequence
  Oligonucleotide for detection of SNP TSC0015564
cgcgcccgacctt

SEQ ID NO: 57789 - DNA, 13 bp, Artificial Sequence
  Oligonucleotide for detection of SNP TSC0015564
tgtgtttggtttt

SEQ ID NO: 57790 - DNA, 13 bp, Artificial Sequence
  Oligonucleotide for detection of SNP TSC0015564
aaaaccaaacaca

SEQ ID NO: 57791 - DNA, 13 bp, Artificial Sequence
  Oligonucleotide for detection of SNP TSC0015564
cgtgtttggtttt

SEQ ID NO: 57792 - DNA, 13 bp, Artificial Sequence
  Oligonucleotide for detection of SNP TSC0015564
aaaaccaaacacg

SEQ ID NO: 57793 - DNA, 13 bp, Artificial Sequence
  Oligonucleotide for detection of SNP TSC0015564
tgcgtttggtttt

SEQ ID NO: 57794 - DNA, 13 bp, Artificial Sequence
  Oligonucleotide for detection of SNP TSC0015564
aaaaccaaacgca

SEQ ID NO: 57795 - DNA, 13 bp, Artificial Sequence
  Oligonucleotide for detection of SNP TSC0015564
cgcgtttggtttt

SEQ ID NO: 57796 - DNA, 13 bp, Artificial Sequence
  Oligonucleotide for detection of SNP TSC0015564
aaaaccaaacgcg

SEQ ID NO: 57797 - DNA, 13 bp, Artificial Sequence
  Oligonucleotide for detection of SNP TSC0015564
tgtgttcggtttt

SEQ ID NO: 57798 - DNA, 13 bp, Artificial Sequence
  Oligonucleotide for detection of SNP TSC0015564
aaaaccgaacaca

SEQ ID NO: 57799 - DNA, 13 bp, Artificial Sequence
  Oligonucleotide for detection of SNP TSC0015564
cgtgttcggtttt

SEQ ID NO: 57800 - DNA, 13 bp, Artificial Sequence
  Oligonucleotide for detection of SNP TSC0015564
aaaaccgaacacg

SEQ ID NO: 57801 - DNA, 13 bp, Artificial Sequence
  Oligonucleotide for detection of SNP TSC0015564
tgcgttcggtttt

SEQ ID NO: 57802 - DNA, 13 bp, Artificial Sequence
  Oligonucleotide for detection of SNP TSC0015564
aaaaccgaacgca

SEQ ID NO: 57803 - DNA, 13 bp, Artificial Sequence
  Oligonucleotide for detection of SNP TSC0015564
cgcgttcggtttt

SEQ ID NO: 57804 - DNA, 13 bp, Artificial Sequence
  Oligonucleotide for detection of SNP TSC0015564
aaaaccgaacgcg

SEQ ID NO: 57805 - DNA, 13 bp, Artificial Sequence
  Oligonucleotide for detection of SNP TSC0015565
tgtggttgtttay

SEQ ID NO: 57806 - DNA, 13 bp, Artificial Sequence
  Oligonucleotide for detection of SNP TSC0015565
rtaaacaaccaca

SEQ ID NO: 57807 - DNA, 13 bp, Artificial Sequence
  Oligonucleotide for detection of SNP TSC0015565
tgtggtggtttay

SEQ ID NO: 57808 - DNA, 13 bp, Artificial Sequence
  Oligonucleotide for detection of SNP TSC0015565
rtaaaccaccaca

SEQ ID NO: 57809 - DNA, 13 bp, Artificial Sequence
  Oligonucleotide for detection of SNP TSC0015565
cgtggttgtttay

SEQ ID NO: 57810 - DNA, 13 bp, Artificial Sequence
  Oligonucleotide for detection of SNP TSC0015565
rtaaacaaccacg

SEQ ID NO: 57811 - DNA, 13 bp, Artificial Sequence
  Oligonucleotide for detection of SNP TSC0015565
cgtggtggtttay

SEQ ID NO: 57812 - DNA, 13 bp, Artificial Sequence
  Oligonucleotide for detection of SNP TSC0015565
rtaaaccaccacg

SEQ ID NO: 57813 - DNA, 13 bp, Artificial Sequence
  Oligonucleotide for detection of SNP TSC0015565
tgcggttgtttay

SEQ ID NO: 57814 - DNA, 13 bp, Artificial Sequence
  Oligonucleotide for detection of SNP TSC0015565
rtaaacaaccgca

SEQ ID NO: 57815 - DNA, 13 bp, Artificial Sequence
  Oligonucleotide for detection of SNP TSC0015565
tgcggtggtttay

SEQ ID NO: 57816 - DNA, 13 bp, Artificial Sequence
  Oligonucleotide for detection of SNP TSC0015565
rtaaaccaccgca

SEQ ID NO: 57817 - DNA, 13 bp, Artificial Sequence
  Oligonucleotide for detection of SNP TSC0015565
tgtggtcgtttay

SEQ ID NO: 57818 - DNA, 13 bp, Artificial Sequence
  Oligonucleotide for detection of SNP TSC0015565
rtaaacgaccaca

SEQ ID NO: 57819 - DNA, 13 bp, Artificial Sequence
  Oligonucleotide for detection of SNP TSC0015565
cgcggtggtttay

SEQ ID NO: 57820 - DNA, 13 bp, Artificial Sequence
  Oligonucleotide for detection of SNP TSC0015565
rtaaaccaccgcg

SEQ ID NO: 57821 - DNA, 13 bp, Artificial Sequence
  Oligonucleotide for detection of SNP TSC0015565
cgcggttgtttay

SEQ ID NO: 57822 - DNA, 13 bp, Artificial Sequence
  Oligonucleotide for detection of SNP TSC0015565
rtaaacaaccgcg

SEQ ID NO: 57823 - DNA, 13 bp, Artificial Sequence
  Oligonucleotide for detection of SNP TSC0015565
cgtggtcgtttay

SEQ ID NO: 57824 - DNA, 13 bp, Artificial Sequence
  Oligonucleotide for detection of SNP TSC0015565
rtaaacgaccacg

SEQ ID NO: 57825 - DNA, 13 bp, Artificial Sequence
  Oligonucleotide for detection of SNP TSC0015565
tgcggtcgtttay

SEQ ID NO: 57826 - DNA, 13 bp, Artificial Sequence
  Oligonucleotide for detection of SNP TSC0015565
rtaaacgaccgca

SEQ ID NO: 57827 - DNA, 13 bp, Artificial Sequence
  Oligonucleotide for detection of SNP TSC0015565
cgcggtcgtttay

SEQ ID NO: 57828 - DNA, 13 bp, Artificial Sequence
  Oligonucleotide for detection of SNP TSC0015565
rtaaacgaccgcg

SEQ ID NO: 57829 - DNA, 13 bp, Artificial Sequence
  Oligonucleotide for detection of SNP TSC0015565
gtgagtgattgtg

SEQ ID NO: 57830 - DNA, 13 bp, Artificial Sequence
  Oligonucleotide for detection of SNP TSC0015565
cacaatcactcac

SEQ ID NO: 57831 - DNA, 13 bp, Artificial Sequence
  Oligonucleotide for detection of SNP TSC0015565
gtgagttattgtg

SEQ ID NO: 57832 - DNA, 13 bp, Artificial Sequence
  Oligonucleotide for detection of SNP TSC0015565
cacaataactcac

SEQ ID NO: 57833 - DNA, 13 bp, Artificial Sequence
  Oligonucleotide for detection of SNP TSC0015565
gtgagcgattgtg

SEQ ID NO: 57834 - DNA, 13 bp, Artificial Sequence
  Oligonucleotide for detection of SNP TSC0015565
cacaatcgctcac

SEQ ID NO: 57835 - DNA, 13 bp, Artificial Sequence
  Oligonucleotide for detection of SNP TSC0015565
gtgagttatcgtg

SEQ ID NO: 57836 - DNA, 13 bp, Artificial Sequence
  Oligonucleotide for detection of SNP TSC0015565
cacgataactcac

SEQ ID NO: 57837 - DNA, 13 bp, Artificial Sequence
  Oligonucleotide for detection of SNP TSC0015565
gtgagtgatcgtg

SEQ ID NO: 57838 - DNA, 13 bp, Artificial Sequence
  Oligonucleotide for detection of SNP TSC0015565
cacgatcactcac

SEQ ID NO: 57839 - DNA, 13 bp, Artificial Sequence
  Oligonucleotide for detection of SNP TSC0015565
gtgagttattgcg

SEQ ID NO: 57840 - DNA, 13 bp, Artificial Sequence
  Oligonucleotide for detection of SNP TSC0015565
cgcaataactcac

SEQ ID NO: 57841 - DNA, 13 bp, Artificial Sequence
  Oligonucleotide for detection of SNP TSC0015565
gtgagtgattgcg

SEQ ID NO: 57842 - DNA, 13 bp, Artificial Sequence
  Oligonucleotide for detection of SNP TSC0015565
cgcaatcactcac

SEQ ID NO: 57843 - DNA, 13 bp, Artificial Sequence
  Oligonucleotide for detection of SNP TSC0015565
gtgagttatcgcg

SEQ ID NO: 57844 - DNA, 13 bp, Artificial Sequence
  Oligonucleotide for detection of SNP TSC0015565
cgcgataactcac

SEQ ID NO: 57845 - DNA, 13 bp, Artificial Sequence
  Oligonucleotide for detection of SNP TSC0015565
gtgagcgatcgtg

SEQ ID NO: 57846 - DNA, 13 bp, Artificial Sequence
  Oligonucleotide for detection of SNP TSC0015565
cacgatcgctcac

SEQ ID NO: 57847 - DNA, 13 bp, Artificial Sequence
  Oligonucleotide for detection of SNP TSC0015565
gtgagcgattgcg

SEQ ID NO: 57848 - DNA, 13 bp, Artificial Sequence
  Oligonucleotide for detection of SNP TSC0015565
cgcaatcgctcac

SEQ ID NO: 57849 - DNA, 13 bp, Artificial Sequence
  Oligonucleotide for detection of SNP TSC0015565
gtgagtgatcgcg

SEQ ID NO: 57850 - DNA, 13 bp, Artificial Sequence
  Oligonucleotide for detection of SNP TSC0015565
cgcgatcactcac

SEQ ID NO: 57851 - DNA, 13 bp, Artificial Sequence
  Oligonucleotide for detection of SNP TSC0015565
gtgagcgatcgcg

SEQ ID NO: 57852 - DNA, 13 bp, Artificial Sequence
  Oligonucleotide for detection of SNP TSC0015565
cgcgatcgctcac

SEQ ID NO: 57853 - DNA, 13 bp, Artificial Sequence
  Oligonucleotide for detection of SNP TSC0015566
tgtttatgtttgt

SEQ ID NO: 57854 - DNA, 13 bp, Artificial Sequence
  Oligonucleotide for detection of SNP TSC0015566
acaaacataaaca

SEQ ID NO: 57855 - DNA, 13 bp, Artificial Sequence
  Oligonucleotide for detection of SNP TSC0015566
cgtttatgtttgt

SEQ ID NO: 57856 - DNA, 13 bp, Artificial Sequence
  Oligonucleotide for detection of SNP TSC0015566
acaaacataaacg

SEQ ID NO: 57857 - DNA, 13 bp, Artificial Sequence
  Oligonucleotide for detection of SNP TSC0015566
tgtttacgtttgt

SEQ ID NO: 57858 - DNA, 13 bp, Artificial Sequence
  Oligonucleotide for detection of SNP TSC0015566
acaaacgtaaaca

SEQ ID NO: 57859 - DNA, 13 bp, Artificial Sequence
  Oligonucleotide for detection of SNP TSC0015566
cgtttacgtttgt

SEQ ID NO: 57860 - DNA, 13 bp, Artificial Sequence
  Oligonucleotide for detection of SNP TSC0015566
acaaacgtaaacg

SEQ ID NO: 57861 - DNA, 13 bp, Artificial Sequence
  Oligonucleotide for detection of SNP TSC0015566
ataggtgtgagtg

SEQ ID NO: 57862 - DNA, 13 bp, Artificial Sequence
  Oligonucleotide for detection of SNP TSC0015566
cactcacacctat

SEQ ID NO: 57863 - DNA, 13 bp, Artificial Sequence
  Oligonucleotide for detection of SNP TSC0015566
ataggtatgagtg

SEQ ID NO: 57864 - DNA, 13 bp, Artificial Sequence
  Oligonucleotide for detection of SNP TSC0015566
cactcatacctat

SEQ ID NO: 57865 - DNA, 13 bp, Artificial Sequence
  Oligonucleotide for detection of SNP TSC0015566
ataggcgtgagtg

SEQ ID NO: 57866 - DNA, 13 bp, Artificial Sequence
  Oligonucleotide for detection of SNP TSC0015566
cactcacgcctat

SEQ ID NO: 57867 - DNA, 13 bp, Artificial Sequence
  Oligonucleotide for detection of SNP TSC0015566
ataggtatgagcg

SEQ ID NO: 57868 - DNA, 13 bp, Artificial Sequence
  Oligonucleotide for detection of SNP TSC0015566
cgctcatacctat

SEQ ID NO: 57869 - DNA, 13 bp, Artificial Sequence
  Oligonucleotide for detection of SNP TSC0015566
ataggtgtgagcg

SEQ ID NO: 57870 - DNA, 13 bp, Artificial Sequence
  Oligonucleotide for detection of SNP TSC0015566
cgctcacacctat

SEQ ID NO: 57871 - DNA, 13 bp, Artificial Sequence
  Oligonucleotide for detection of SNP TSC0015566
ataggcgtgagcg

SEQ ID NO: 57872 - DNA, 13 bp, Artificial Sequence
  Oligonucleotide for detection of SNP TSC0015566
cgctcacgcctat

SEQ ID NO: 57873 - DNA, 13 bp, Artificial Sequence
  Oligonucleotide for detection of SNP TSC0015567
agtgatagtgaty

SEQ ID NO: 57874 - DNA, 13 bp, Artificial Sequence
  Oligonucleotide for detection of SNP TSC0015567
ratcactatcact

SEQ ID NO: 57875 - DNA, 13 bp, Artificial Sequence
  Oligonucleotide for detection of SNP TSC0015567
agtgatggtgaty

SEQ ID NO: 57876 - DNA, 13 bp, Artificial Sequence
  Oligonucleotide for detection of SNP TSC0015567
ratcaccatcact

SEQ ID NO: 57877 - DNA, 13 bp, Artificial Sequence
  Oligonucleotide for detection of SNP TSC0015568
ttatttatatgtg

SEQ ID NO: 57878 - DNA, 13 bp, Artificial Sequence
  Oligonucleotide for detection of SNP TSC0015568
cacatataaataa

SEQ ID NO: 57879 - DNA, 13 bp, Artificial Sequence
  Oligonucleotide for detection of SNP TSC0015568
ttatttttatgtg

SEQ ID NO: 57880 - DNA, 13 bp, Artificial Sequence
  Oligonucleotide for detection of SNP TSC0015568
cacataaaaataa

SEQ ID NO: 57881 - DNA, 13 bp, Artificial Sequence
  Oligonucleotide for detection of SNP TSC0015568
ttatttatacgtg

SEQ ID NO: 57882 - DNA, 13 bp, Artificial Sequence
  Oligonucleotide for detection of SNP TSC0015568
cacgtataaataa

SEQ ID NO: 57883 - DNA, 13 bp, Artificial Sequence
  Oligonucleotide for detection of SNP TSC0015568
ttatttttacgtg

SEQ ID NO: 57884 - DNA, 13 bp, Artificial Sequence
  Oligonucleotide for detection of SNP TSC0015568
cacgtaaaaataa

SEQ ID NO: 57885 - DNA, 13 bp, Artificial Sequence
  Oligonucleotide for detection of SNP TSC0015568
tatgtgtagatga

SEQ ID NO: 57886 - DNA, 13 bp, Artificial Sequence
  Oligonucleotide for detection of SNP TSC0015568
tcatctacacata

SEQ ID NO: 57887 - DNA, 13 bp, Artificial Sequence
  Oligonucleotide for detection of SNP TSC0015568
tatgtggagatga

SEQ ID NO: 57888 - DNA, 13 bp, Artificial Sequence
  Oligonucleotide for detection of SNP TSC0015568
tcatctccacata

SEQ ID NO: 57889 - DNA, 13 bp, Artificial Sequence
  Oligonucleotide for detection of SNP TSC0015568
tacgtgtagatga

SEQ ID NO: 57890 - DNA, 13 bp, Artificial Sequence
  Oligonucleotide for detection of SNP TSC0015568
tcatctacacgta

SEQ ID NO: 57891 - DNA, 13 bp, Artificial Sequence
  Oligonucleotide for detection of SNP TSC0015568
tacgtggagatga

SEQ ID NO: 57892 - DNA, 13 bp, Artificial Sequence
  Oligonucleotide for detection of SNP TSC0015568
tcatctccacgta

SEQ ID NO: 57893 - DNA, 13 bp, Artificial Sequence
  Oligonucleotide for detection of SNP TSC0015569
gtggagtggtatg

SEQ ID NO: 57894 - DNA, 13 bp, Artificial Sequence
  Oligonucleotide for detection of SNP TSC0015569
cataccactccac

SEQ ID NO: 57895 - DNA, 13 bp, Artificial Sequence
  Oligonucleotide for detection of SNP TSC0015569
gtggagcggtatg

SEQ ID NO: 57896 - DNA, 13 bp, Artificial Sequence
  Oligonucleotide for detection of SNP TSC0015569
cataccgctccac

SEQ ID NO: 57897 - DNA, 13 bp, Artificial Sequence
  Oligonucleotide for detection of SNP TSC0015569
gtggagtggtacg

SEQ ID NO: 57898 - DNA, 13 bp, Artificial Sequence
  Oligonucleotide for detection of SNP TSC0015569
cgtaccactccac

SEQ ID NO: 57899 - DNA, 13 bp, Artificial Sequence
  Oligonucleotide for detection of SNP TSC0015569
gtggagcggtacg

SEQ ID NO: 57900 - DNA, 13 bp, Artificial Sequence
  Oligonucleotide for detection of SNP TSC0015569
cgtaccgctccac

SEQ ID NO: 57901 - DNA, 13 bp, Artificial Sequence
  Oligonucleotide for detection of SNP TSC0015569
tgtgttgttttay

SEQ ID NO: 57902 - DNA, 13 bp, Artificial Sequence
  Oligonucleotide for detection of SNP TSC0015569
rtaaaacaacaca

SEQ ID NO: 57903 - DNA, 13 bp, Artificial Sequence
  Oligonucleotide for detection of SNP TSC0015569
tgtgttattttay

SEQ ID NO: 57904 - DNA, 13 bp, Artificial Sequence
  Oligonucleotide for detection of SNP TSC0015569
rtaaaataacaca

SEQ ID NO: 57905 - DNA, 13 bp, Artificial Sequence
  Oligonucleotide for detection of SNP TSC0015569
cgtgttgttttay

SEQ ID NO: 57906 - DNA, 13 bp, Artificial Sequence
  Oligonucleotide for detection of SNP TSC0015569
rtaaaacaacacg

SEQ ID NO: 57907 - DNA, 13 bp, Artificial Sequence
  Oligonucleotide for detection of SNP TSC0015569
cgtgttattttay

SEQ ID NO: 57908 - DNA, 13 bp, Artificial Sequence
  Oligonucleotide for detection of SNP TSC0015569
rtaaaataacacg

SEQ ID NO: 57909 - DNA, 13 bp, Artificial Sequence
  Oligonucleotide for detection of SNP TSC0015569
tgtgtcgttttay

SEQ ID NO: 57910 - DNA, 13 bp, Artificial Sequence
  Oligonucleotide for detection of SNP TSC0015569
rtaaaacgacaca

SEQ ID NO: 57911 - DNA, 13 bp, Artificial Sequence
  Oligonucleotide for detection of SNP TSC0015569
cgtgtcgttttay

SEQ ID NO: 57912 - DNA, 13 bp, Artificial Sequence
  Oligonucleotide for detection of SNP TSC0015569
rtaaaacgacacg

SEQ ID NO: 57913 - DNA, 13 bp, Artificial Sequence
  Oligonucleotide for detection of SNP TSC0015570
gtggtatgattty

SEQ ID NO: 57914 - DNA, 13 bp, Artificial Sequence
  Oligonucleotide for detection of SNP TSC0015570
raaatcataccac

SEQ ID NO: 57915 - DNA, 13 bp, Artificial Sequence
  Oligonucleotide for detection of SNP TSC0015570
gcggtatgattty

SEQ ID NO: 57916 - DNA, 13 bp, Artificial Sequence
  Oligonucleotide for detection of SNP TSC0015570
raaatcataccgc

SEQ ID NO: 57917 - DNA, 13 bp, Artificial Sequence
  Oligonucleotide for detection of SNP TSC0015570
gtggtacgattty

SEQ ID NO: 57918 - DNA, 13 bp, Artificial Sequence
  Oligonucleotide for detection of SNP TSC0015570
raaatcgtaccac

SEQ ID NO: 57919 - DNA, 13 bp, Artificial Sequence
  Oligonucleotide for detection of SNP TSC0015570
gcggtacgattty

SEQ ID NO: 57920 - DNA, 13 bp, Artificial Sequence
  Oligonucleotide for detection of SNP TSC0015570
raaatcgtaccgc

SEQ ID NO: 57921 - DNA, 13 bp, Artificial Sequence
  Oligonucleotide for detection of SNP TSC0015570
gagattgtgttgy

SEQ ID NO: 57922 - DNA, 13 bp, Artificial Sequence
  Oligonucleotide for detection of SNP TSC0015570
rcaacacaatctc

SEQ ID NO: 57923 - DNA, 13 bp, Artificial Sequence
  Oligonucleotide for detection of SNP TSC0015570
gagattatgttgy

SEQ ID NO: 57924 - DNA, 13 bp, Artificial Sequence
  Oligonucleotide for detection of SNP TSC0015570
rcaacataatctc

SEQ ID NO: 57925 - DNA, 13 bp, Artificial Sequence
  Oligonucleotide for detection of SNP TSC0015570
gagatcgtgttgy

SEQ ID NO: 57926 - DNA, 13 bp, Artificial Sequence
  Oligonucleotide for detection of SNP TSC0015570
rcaacacgatctc

SEQ ID NO: 57927 - DNA, 13 bp, Artificial Sequence
  Oligonucleotide for detection of SNP TSC0015570
gagattatgtcgy

SEQ ID NO: 57928 - DNA, 13 bp, Artificial Sequence
  Oligonucleotide for detection of SNP TSC0015570
rcgacataatctc

SEQ ID NO: 57929 - DNA, 13 bp, Artificial Sequence
  Oligonucleotide for detection of SNP TSC0015570
gagattgtgtcgy

SEQ ID NO: 57930 - DNA, 13 bp, Artificial Sequence
  Oligonucleotide for detection of SNP TSC0015570
rcgacacaatctc

SEQ ID NO: 57931 - DNA, 13 bp, Artificial Sequence
  Oligonucleotide for detection of SNP TSC0015570
gagatcgtgtcgy

SEQ ID NO: 57932 - DNA, 13 bp, Artificial Sequence
  Oligonucleotide for detection of SNP TSC0015570
rcgacacgatctc

SEQ ID NO: 57933 - DNA, 13 bp, Artificial Sequence
  Oligonucleotide for detection of SNP TSC0015571
tgggattgtaggy

SEQ ID NO: 57934 - DNA, 13 bp, Artificial Sequence
  Oligonucleotide for detection of SNP TSC0015571
rcctacaatccca

SEQ ID NO: 57935 - DNA, 13 bp, Artificial Sequence
  Oligonucleotide for detection of SNP TSC0015571
tgggatcgtaggy

SEQ ID NO: 57936 - DNA, 13 bp, Artificial Sequence
  Oligonucleotide for detection of SNP TSC0015571
rcctacgatccca

SEQ ID NO: 57937 - DNA, 13 bp, Artificial Sequence
  Oligonucleotide for detection of SNP TSC0015571
gtttgtggtttta

SEQ ID NO: 57938 - DNA, 13 bp, Artificial Sequence
  Oligonucleotide for detection of SNP TSC0015571
taaaaccacaaac

SEQ ID NO: 57939 - DNA, 13 bp, Artificial Sequence
  Oligonucleotide for detection of SNP TSC0015571
gtttgtagtttta

SEQ ID NO: 57940 - DNA, 13 bp, Artificial Sequence
  Oligonucleotide for detection of SNP TSC0015571
taaaactacaaac

SEQ ID NO: 57941 - DNA, 13 bp, Artificial Sequence
  Oligonucleotide for detection of SNP TSC0015571
gtttgcggtttta

SEQ ID NO: 57942 - DNA, 13 bp, Artificial Sequence
  Oligonucleotide for detection of SNP TSC0015571
taaaaccgcaaac

SEQ ID NO: 57943 - DNA, 13 bp, Artificial Sequence
  Oligonucleotide for detection of SNP TSC0015572
atattagtaaatt

SEQ ID NO: 57944 - DNA, 13 bp, Artificial Sequence
  Oligonucleotide for detection of SNP TSC0015572
aatttactaatat

SEQ ID NO: 57945 - DNA, 13 bp, Artificial Sequence
  Oligonucleotide for detection of SNP TSC0015572
atattaataaatt

SEQ ID NO: 57946 - DNA, 13 bp, Artificial Sequence
  Oligonucleotide for detection of SNP TSC0015572
aatttattaatat

SEQ ID NO: 57947 - DNA, 13 bp, Artificial Sequence
  Oligonucleotide for detection of SNP TSC0015573
tatataatttttt

SEQ ID NO: 57948 - DNA, 13 bp, Artificial Sequence
  Oligonucleotide for detection of SNP TSC0015573
aaaaaattatata

SEQ ID NO: 57949 - DNA, 13 bp, Artificial Sequence
  Oligonucleotide for detection of SNP TSC0015573
tatatattttttt

SEQ ID NO: 57950 - DNA, 13 bp, Artificial Sequence
  Oligonucleotide for detection of SNP TSC0015573
aaaaaaatatata

SEQ ID NO: 57951 - DNA, 13 bp, Artificial Sequence
  Oligonucleotide for detection of SNP TSC0015573
aggaaattgtgtg

SEQ ID NO: 57952 - DNA, 13 bp, Artificial Sequence
  Oligonucleotide for detection of SNP TSC0015573
cacacaatttcct

SEQ ID NO: 57953 - DNA, 13 bp, Artificial Sequence
  Oligonucleotide for detection of SNP TSC0015573
aggaaagtgtgtg

SEQ ID NO: 57954 - DNA, 13 bp, Artificial Sequence
  Oligonucleotide for detection of SNP TSC0015573
cacacactttcct

SEQ ID NO: 57955 - DNA, 13 bp, Artificial Sequence
  Oligonucleotide for detection of SNP TSC0015574
atttttagggaty

SEQ ID NO: 57956 - DNA, 13 bp, Artificial Sequence
  Oligonucleotide for detection of SNP TSC0015574
ratccctaaaaat

SEQ ID NO: 57957 - DNA, 13 bp, Artificial Sequence
  Oligonucleotide for detection of SNP TSC0015574
atttttggggaty

SEQ ID NO: 57958 - DNA, 13 bp, Artificial Sequence
  Oligonucleotide for detection of SNP TSC0015574
ratccccaaaaat

SEQ ID NO: 57959 - DNA, 13 bp, Artificial Sequence
  Oligonucleotide for detection of SNP TSC0015575
tattttagggttt

SEQ ID NO: 57960 - DNA, 13 bp, Artificial Sequence
  Oligonucleotide for detection of SNP TSC0015575
aaaccctaaaata

SEQ ID NO: 57961 - DNA, 13 bp, Artificial Sequence
  Oligonucleotide for detection of SNP TSC0015575
tattttggggttt

SEQ ID NO: 57962 - DNA, 13 bp, Artificial Sequence
  Oligonucleotide for detection of SNP TSC0015575
aaaccccaaaata

SEQ ID NO: 57963 - DNA, 13 bp, Artificial Sequence
  Oligonucleotide for detection of SNP TSC0015575
tatttcggggttt

SEQ ID NO: 57964 - DNA, 13 bp, Artificial Sequence
  Oligonucleotide for detection of SNP TSC0015575
aaaccccgaaata

SEQ ID NO: 57965 - DNA, 13 bp, Artificial Sequence
  Oligonucleotide for detection of SNP TSC0015575
agattttggggtg

SEQ ID NO: 57966 - DNA, 13 bp, Artificial Sequence
  Oligonucleotide for detection of SNP TSC0015575
caccccaaaatct

SEQ ID NO: 57967 - DNA, 13 bp, Artificial Sequence
  Oligonucleotide for detection of SNP TSC0015575
agatttcggggtg

SEQ ID NO: 57968 - DNA, 13 bp, Artificial Sequence
  Oligonucleotide for detection of SNP TSC0015575
caccccgaaatct

SEQ ID NO: 57969 - DNA, 13 bp, Artificial Sequence
  Oligonucleotide for detection of SNP TSC0015576
aggaaaagaggga

SEQ ID NO: 57970 - DNA, 13 bp, Artificial Sequence
  Oligonucleotide for detection of SNP TSC0015576
tccctcttttcct

SEQ ID NO: 57971 - DNA, 13 bp, Artificial Sequence
  Oligonucleotide for detection of SNP TSC0015576
aggaaaggaggga

SEQ ID NO: 57972 - DNA, 13 bp, Artificial Sequence
  Oligonucleotide for detection of SNP TSC0015576
tccctcctttcct

SEQ ID NO: 57973 - DNA, 13 bp, Artificial Sequence
  Oligonucleotide for detection of SNP TSC0015578
ggatttttttttt

SEQ ID NO: 57974 - DNA, 13 bp, Artificial Sequence
  Oligonucleotide for detection of SNP TSC0015578
aaaaaaaaaatcc

SEQ ID NO: 57975 - DNA, 13 bp, Artificial Sequence
  Oligonucleotide for detection of SNP TSC0015578
agagaagaaatty

SEQ ID NO: 57976 - DNA, 13 bp, Artificial Sequence
  Oligonucleotide for detection of SNP TSC0015578
raatttcttctct

SEQ ID NO: 57977 - DNA, 13 bp, Artificial Sequence
  Oligonucleotide for detection of SNP TSC0015578
agagaataaatty

SEQ ID NO: 57978 - DNA, 13 bp, Artificial Sequence
  Oligonucleotide for detection of SNP TSC0015578
raatttattctct

SEQ ID NO: 57979 - DNA, 13 bp, Artificial Sequence
  Oligonucleotide for detection of SNP TSC0015579
tttgttatttata

SEQ ID NO: 57980 - DNA, 13 bp, Artificial Sequence
  Oligonucleotide for detection of SNP TSC0015579
tataaataacaaa

SEQ ID NO: 57981 - DNA, 13 bp, Artificial Sequence
  Oligonucleotide for detection of SNP TSC0015579
tttgttttttata

SEQ ID NO: 57982 - DNA, 13 bp, Artificial Sequence
  Oligonucleotide for detection of SNP TSC0015579
tataaaaaacaaa

SEQ ID NO: 57983 - DNA, 13 bp, Artificial Sequence
  Oligonucleotide for detection of SNP TSC0015579
tatggataataga

SEQ ID NO: 57984 - DNA, 13 bp, Artificial Sequence
  Oligonucleotide for detection of SNP TSC0015579
tctattatccata

SEQ ID NO: 57985 - DNA, 13 bp, Artificial Sequence
  Oligonucleotide for detection of SNP TSC0015579
tatggagaataga

SEQ ID NO: 57986 - DNA, 13 bp, Artificial Sequence
  Oligonucleotide for detection of SNP TSC0015579
tctattctccata

SEQ ID NO: 57987 - DNA, 13 bp, Artificial Sequence
  Oligonucleotide for detection of SNP TSC0015580
attttaattaatg

SEQ ID NO: 57988 - DNA, 13 bp, Artificial Sequence
  Oligonucleotide for detection of SNP TSC0015580
cattaattaaaat

SEQ ID NO: 57989 - DNA, 13 bp, Artificial Sequence
  Oligonucleotide for detection of SNP TSC0015580
attttagttaatg

SEQ ID NO: 57990 - DNA, 13 bp, Artificial Sequence
  Oligonucleotide for detection of SNP TSC0015580
cattaactaaaat

SEQ ID NO: 57991 - DNA, 13 bp, Artificial Sequence
  Oligonucleotide for detection of SNP TSC0015580
attttaattaacg

SEQ ID NO: 57992 - DNA, 13 bp, Artificial Sequence
  Oligonucleotide for detection of SNP TSC0015580
cgttaattaaaat

SEQ ID NO: 57993 - DNA, 13 bp, Artificial Sequence
  Oligonucleotide for detection of SNP TSC0015580
attttagttaacg

SEQ ID NO: 57994 - DNA, 13 bp, Artificial Sequence
  Oligonucleotide for detection of SNP TSC0015580
cgttaactaaaat

SEQ ID NO: 57995 - DNA, 13 bp, Artificial Sequence
  Oligonucleotide for detection of SNP TSC0015581
aaatgtattaagy

SEQ ID NO: 57996 - DNA, 13 bp, Artificial Sequence
  Oligonucleotide for detection of SNP TSC0015581
rcttaatacattt

SEQ ID NO: 57997 - DNA, 13 bp, Artificial Sequence
  Oligonucleotide for detection of SNP TSC0015581
aaatgtgttaagy

SEQ ID NO: 57998 - DNA, 13 bp, Artificial Sequence
  Oligonucleotide for detection of SNP TSC0015581
rcttaacacattt

SEQ ID NO: 57999 - DNA, 13 bp, Artificial Sequence
  Oligonucleotide for detection of SNP TSC0015581
aaatgcgttaagy

SEQ ID NO: 58000 - DNA, 13 bp, Artificial Sequence
  Oligonucleotide for detection of SNP TSC0015581
rcttaacgcattt

SEQ ID NO: 58001 - DNA, 13 bp, Artificial Sequence
  Oligonucleotide for detection of SNP TSC0015581
gtttgatgtattt

SEQ ID NO: 58002 - DNA, 13 bp, Artificial Sequence
  Oligonucleotide for detection of SNP TSC0015581
aaatacatcaaac

SEQ ID NO: 58003 - DNA, 13 bp, Artificial Sequence
  Oligonucleotide for detection of SNP TSC0015581
gtttgacgtattt

SEQ ID NO: 58004 - DNA, 13 bp, Artificial Sequence
  Oligonucleotide for detection of SNP TSC0015581
aaatacgtcaaac

SEQ ID NO: 58005 - DNA, 13 bp, Artificial Sequence
  Oligonucleotide for detection of SNP TSC0015584
tattaatggataa

SEQ ID NO: 58006 - DNA, 13 bp, Artificial Sequence
  Oligonucleotide for detection of SNP TSC0015584
ttatccattaata

SEQ ID NO: 58007 - DNA, 13 bp, Artificial Sequence
  Oligonucleotide for detection of SNP TSC0015584
tattaagggataa

SEQ ID NO: 58008 - DNA, 13 bp, Artificial Sequence
  Oligonucleotide for detection of SNP TSC0015584
ttatcccttaata

SEQ ID NO: 58009 - DNA, 13 bp, Artificial Sequence
  Oligonucleotide for detection of SNP TSC0015584
tattaacggataa

SEQ ID NO: 58010 - DNA, 13 bp, Artificial Sequence
  Oligonucleotide for detection of SNP TSC0015584
ttatccgttaata

SEQ ID NO: 58011 - DNA, 13 bp, Artificial Sequence
  Oligonucleotide for detection of SNP TSC0015584
ttgtttgttgatg

SEQ ID NO: 58012 - DNA, 13 bp, Artificial Sequence
  Oligonucleotide for detection of SNP TSC0015584
catcaacaaacaa

SEQ ID NO: 58013 - DNA, 13 bp, Artificial Sequence
  Oligonucleotide for detection of SNP TSC0015584
ttgttttttgatg

SEQ ID NO: 58014 - DNA, 13 bp, Artificial Sequence
  Oligonucleotide for detection of SNP TSC0015584
catcaaaaaacaa

SEQ ID NO: 58015 - DNA, 13 bp, Artificial Sequence
  Oligonucleotide for detection of SNP TSC0015584
ttgttcgttgatg

SEQ ID NO: 58016 - DNA, 13 bp, Artificial Sequence
  Oligonucleotide for detection of SNP TSC0015584
catcaacgaacaa

SEQ ID NO: 58017 - DNA, 13 bp, Artificial Sequence
  Oligonucleotide for detection of SNP TSC0015585
tttttttatagat

SEQ ID NO: 58018 - DNA, 13 bp, Artificial Sequence
  Oligonucleotide for detection of SNP TSC0015585
atctataaaaaaa

SEQ ID NO: 58019 - DNA, 13 bp, Artificial Sequence
  Oligonucleotide for detection of SNP TSC0015585
atttgttagagaa

SEQ ID NO: 58020 - DNA, 13 bp, Artificial Sequence
  Oligonucleotide for detection of SNP TSC0015585
ttctctaacaaat

SEQ ID NO: 58021 - DNA, 13 bp, Artificial Sequence
  Oligonucleotide for detection of SNP TSC0015585
atttgtgagagaa

SEQ ID NO: 58022 - DNA, 13 bp, Artificial Sequence
  Oligonucleotide for detection of SNP TSC0015585
ttctctcacaaat

SEQ ID NO: 58023 - DNA, 13 bp, Artificial Sequence
  Oligonucleotide for detection of SNP TSC0015586
tattatattttgg

SEQ ID NO: 58024 - DNA, 13 bp, Artificial Sequence
  Oligonucleotide for detection of SNP TSC0015586
ccaaaatataata

SEQ ID NO: 58025 - DNA, 13 bp, Artificial Sequence
  Oligonucleotide for detection of SNP TSC0015586
tattatgttttgg

SEQ ID NO: 58026 - DNA, 13 bp, Artificial Sequence
  Oligonucleotide for detection of SNP TSC0015586
ccaaaacataata

SEQ ID NO: 58027 - DNA, 13 bp, Artificial Sequence
  Oligonucleotide for detection of SNP TSC0015586
tattacgttttgg

SEQ ID NO: 58028 - DNA, 13 bp, Artificial Sequence
  Oligonucleotide for detection of SNP TSC0015586
ccaaaacgtaata

SEQ ID NO: 58029 - DNA, 13 bp, Artificial Sequence
  Oligonucleotide for detection of SNP TSC0015586
ttaaaatgtaata

SEQ ID NO: 58030 - DNA, 13 bp, Artificial Sequence
  Oligonucleotide for detection of SNP TSC0015586
tattacattttaa

SEQ ID NO: 58031 - DNA, 13 bp, Artificial Sequence
  Oligonucleotide for detection of SNP TSC0015586
ttaaaacgtaata

SEQ ID NO: 58032 - DNA, 13 bp, Artificial Sequence
  Oligonucleotide for detection of SNP TSC0015586
tattacgttttaa

SEQ ID NO: 58033 - DNA, 13 bp, Artificial Sequence
  Oligonucleotide for detection of SNP TSC0015587
ttatgatgtaagy

SEQ ID NO: 58034 - DNA, 13 bp, Artificial Sequence
  Oligonucleotide for detection of SNP TSC0015587
rcttacatcataa

SEQ ID NO: 58035 - DNA, 13 bp, Artificial Sequence
  Oligonucleotide for detection of SNP TSC0015587
ttatgacgtaagy

SEQ ID NO: 58036 - DNA, 13 bp, Artificial Sequence
  Oligonucleotide for detection of SNP TSC0015587
rcttacgtcataa

SEQ ID NO: 58037 - DNA, 13 bp, Artificial Sequence
  Oligonucleotide for detection of SNP TSC0015587
gtttatgttatgg

SEQ ID NO: 58038 - DNA, 13 bp, Artificial Sequence
  Oligonucleotide for detection of SNP TSC0015587
ccataacataaac

SEQ ID NO: 58039 - DNA, 13 bp, Artificial Sequence
  Oligonucleotide for detection of SNP TSC0015587
gtttatattatgg

SEQ ID NO: 58040 - DNA, 13 bp, Artificial Sequence
  Oligonucleotide for detection of SNP TSC0015587
ccataatataaac

SEQ ID NO: 58041 - DNA, 13 bp, Artificial Sequence
  Oligonucleotide for detection of SNP TSC0015587
gtttacgttatgg

SEQ ID NO: 58042 - DNA, 13 bp, Artificial Sequence
  Oligonucleotide for detection of SNP TSC0015587
ccataacgtaaac

SEQ ID NO: 58043 - DNA, 13 bp, Artificial Sequence
  Oligonucleotide for detection of SNP TSC0015589
ataaatagtttty

SEQ ID NO: 58044 - DNA, 13 bp, Artificial Sequence
  Oligonucleotide for detection of SNP TSC0015589
raaaactatttat

SEQ ID NO: 58045 - DNA, 13 bp, Artificial Sequence
  Oligonucleotide for detection of SNP TSC0015589
ataaattgtttty

SEQ ID NO: 58046 - DNA, 13 bp, Artificial Sequence
  Oligonucleotide for detection of SNP TSC0015589
raaaacaatttat

SEQ ID NO: 58047 - DNA, 13 bp, Artificial Sequence
  Oligonucleotide for detection of SNP TSC0015589
ataaatcgtttty

SEQ ID NO: 58048 - DNA, 13 bp, Artificial Sequence
  Oligonucleotide for detection of SNP TSC0015589
raaaacgatttat

SEQ ID NO: 58049 - DNA, 13 bp, Artificial Sequence
  Oligonucleotide for detection of SNP TSC0015589
ggaagttatttgt

SEQ ID NO: 58050 - DNA, 13 bp, Artificial Sequence
  Oligonucleotide for detection of SNP TSC0015589
acaaataacttcc

SEQ ID NO: 58051 - DNA, 13 bp, Artificial Sequence
  Oligonucleotide for detection of SNP TSC0015589
ggaagtgatttgt

SEQ ID NO: 58052 - DNA, 13 bp, Artificial Sequence
  Oligonucleotide for detection of SNP TSC0015589
acaaatcacttcc

SEQ ID NO: 58053 - DNA, 13 bp, Artificial Sequence
  Oligonucleotide for detection of SNP TSC0015589
ggaagcgatttgt

SEQ ID NO: 58054 - DNA, 13 bp, Artificial Sequence
  Oligonucleotide for detection of SNP TSC0015589
acaaatcgcttcc

SEQ ID NO: 58055 - DNA, 13 bp, Artificial Sequence
  Oligonucleotide for detection of SNP TSC0015590
gatataaatgtat

SEQ ID NO: 58056 - DNA, 13 bp, Artificial Sequence
  Oligonucleotide for detection of SNP TSC0015590
atacatttatatc

SEQ ID NO: 58057 - DNA, 13 bp, Artificial Sequence
  Oligonucleotide for detection of SNP TSC0015590
gatatatatgtat

SEQ ID NO: 58058 - DNA, 13 bp, Artificial Sequence
  Oligonucleotide for detection of SNP TSC0015590
atacatatatatc

SEQ ID NO: 58059 - DNA, 13 bp, Artificial Sequence
  Oligonucleotide for detection of SNP TSC0015590
atgtatttgtaty

SEQ ID NO: 58060 - DNA, 13 bp, Artificial Sequence
  Oligonucleotide for detection of SNP TSC0015590
ratacaaatacat

SEQ ID NO: 58061 - DNA, 13 bp, Artificial Sequence
  Oligonucleotide for detection of SNP TSC0015590
atgtatgtgtaty

SEQ ID NO: 58062 - DNA, 13 bp, Artificial Sequence
  Oligonucleotide for detection of SNP TSC0015590
ratacacatacat

SEQ ID NO: 58063 - DNA, 13 bp, Artificial Sequence
  Oligonucleotide for detection of SNP TSC0015591
tgtttattttgty

SEQ ID NO: 58064 - DNA, 13 bp, Artificial Sequence
  Oligonucleotide for detection of SNP TSC0015591
racaaaataaaca

SEQ ID NO: 58065 - DNA, 13 bp, Artificial Sequence
  Oligonucleotide for detection of SNP TSC0015591
tgtttagtttgty

SEQ ID NO: 58066 - DNA, 13 bp, Artificial Sequence
  Oligonucleotide for detection of SNP TSC0015591
racaaactaaaca

SEQ ID NO: 58067 - DNA, 13 bp, Artificial Sequence
  Oligonucleotide for detection of SNP TSC0015591
cgtttattttgty

SEQ ID NO: 58068 - DNA, 13 bp, Artificial Sequence
  Oligonucleotide for detection of SNP TSC0015591
racaaaataaacg

SEQ ID NO: 58069 - DNA, 13 bp, Artificial Sequence
  Oligonucleotide for detection of SNP TSC0015591
cgtttagtttgty

SEQ ID NO: 58070 - DNA, 13 bp, Artificial Sequence
  Oligonucleotide for detection of SNP TSC0015591
racaaactaaacg

SEQ ID NO: 58071 - DNA, 13 bp, Artificial Sequence
  Oligonucleotide for detection of SNP TSC0015591
gatagagtgaatg

SEQ ID NO: 58072 - DNA, 13 bp, Artificial Sequence
  Oligonucleotide for detection of SNP TSC0015591
cattcactctatc

SEQ ID NO: 58073 - DNA, 13 bp, Artificial Sequence
  Oligonucleotide for detection of SNP TSC0015591
gatagattgaatg

SEQ ID NO: 58074 - DNA, 13 bp, Artificial Sequence
  Oligonucleotide for detection of SNP TSC0015591
cattcaatctatc

SEQ ID NO: 58075 - DNA, 13 bp, Artificial Sequence
  Oligonucleotide for detection of SNP TSC0015591
gatagagtgaacg

SEQ ID NO: 58076 - DNA, 13 bp, Artificial Sequence
  Oligonucleotide for detection of SNP TSC0015591
cgttcactctatc

SEQ ID NO: 58077 - DNA, 13 bp, Artificial Sequence
  Oligonucleotide for detection of SNP TSC0015591
gatagattgaacg

SEQ ID NO: 58078 - DNA, 13 bp, Artificial Sequence
  Oligonucleotide for detection of SNP TSC0015591
cgttcaatctatc

SEQ ID NO: 58079 - DNA, 13 bp, Artificial Sequence
  Oligonucleotide for detection of SNP TSC0015593
tatattagtatta

SEQ ID NO: 58080 - DNA, 13 bp, Artificial Sequence
  Oligonucleotide for detection of SNP TSC0015593
taatactaatata

SEQ ID NO: 58081 - DNA, 13 bp, Artificial Sequence
  Oligonucleotide for detection of SNP TSC0015593
tgatattgatgtg

SEQ ID NO: 58082 - DNA, 13 bp, Artificial Sequence
  Oligonucleotide for detection of SNP TSC0015593
cacatcaatatca

SEQ ID NO: 58083 - DNA, 13 bp, Artificial Sequence
  Oligonucleotide for detection of SNP TSC0015593
tgatatagatgtg

SEQ ID NO: 58084 - DNA, 13 bp, Artificial Sequence
  Oligonucleotide for detection of SNP TSC0015593
cacatctatatca

SEQ ID NO: 58085 - DNA, 13 bp, Artificial Sequence
  Oligonucleotide for detection of SNP TSC0015594
tgattaggtggtt

SEQ ID NO: 58086 - DNA, 13 bp, Artificial Sequence
  Oligonucleotide for detection of SNP TSC0015594
aaccacctaatca

SEQ ID NO: 58087 - DNA, 13 bp, Artificial Sequence
  Oligonucleotide for detection of SNP TSC0015594
tgattaagtggtt

SEQ ID NO: 58088 - DNA, 13 bp, Artificial Sequence
  Oligonucleotide for detection of SNP TSC0015594
aaccacttaatca

SEQ ID NO: 58089 - DNA, 13 bp, Artificial Sequence
  Oligonucleotide for detection of SNP TSC0015595
agttatatgataa

SEQ ID NO: 58090 - DNA, 13 bp, Artificial Sequence
  Oligonucleotide for detection of SNP TSC0015595
ttatcatataact

SEQ ID NO: 58091 - DNA, 13 bp, Artificial Sequence
  Oligonucleotide for detection of SNP TSC0015595
agttatgtgataa

SEQ ID NO: 58092 - DNA, 13 bp, Artificial Sequence
  Oligonucleotide for detection of SNP TSC0015595
ttatcacataact

SEQ ID NO: 58093 - DNA, 13 bp, Artificial Sequence
  Oligonucleotide for detection of SNP TSC0015595
agttacgtgataa

SEQ ID NO: 58094 - DNA, 13 bp, Artificial Sequence
  Oligonucleotide for detection of SNP TSC0015595
ttatcacgtaact

SEQ ID NO: 58095 - DNA, 13 bp, Artificial Sequence
  Oligonucleotide for detection of SNP TSC0015595
ttgttatgtggtt

SEQ ID NO: 58096 - DNA, 13 bp, Artificial Sequence
  Oligonucleotide for detection of SNP TSC0015595
aaccacataacaa

SEQ ID NO: 58097 - DNA, 13 bp, Artificial Sequence
  Oligonucleotide for detection of SNP TSC0015595
ttgttacgtggtt

SEQ ID NO: 58098 - DNA, 13 bp, Artificial Sequence
  Oligonucleotide for detection of SNP TSC0015595
aaccacgtaacaa

SEQ ID NO: 58099 - DNA, 13 bp, Artificial Sequence
  Oligonucleotide for detection of SNP TSC0015597
atattagtattgt

SEQ ID NO: 58100 - DNA, 13 bp, Artificial Sequence
  Oligonucleotide for detection of SNP TSC0015597
acaatactaatat

SEQ ID NO: 58101 - DNA, 13 bp, Artificial Sequence
  Oligonucleotide for detection of SNP TSC0015597
atattattattgt

SEQ ID NO: 58102 - DNA, 13 bp, Artificial Sequence
  Oligonucleotide for detection of SNP TSC0015597
acaataataatat

SEQ ID NO: 58103 - DNA, 13 bp, Artificial Sequence
  Oligonucleotide for detection of SNP TSC0015597
ataatattaatgt

SEQ ID NO: 58104 - DNA, 13 bp, Artificial Sequence
  Oligonucleotide for detection of SNP TSC0015597
acattaatattat

SEQ ID NO: 58105 - DNA, 13 bp, Artificial Sequence
  Oligonucleotide for detection of SNP TSC0015597
ataataataatgt

SEQ ID NO: 58106 - DNA, 13 bp, Artificial Sequence
  Oligonucleotide for detection of SNP TSC0015597
acattattattat

SEQ ID NO: 58107 - DNA, 13 bp, Artificial Sequence
  Oligonucleotide for detection of SNP TSC0015598
agtaagtaaggtg

SEQ ID NO: 58108 - DNA, 13 bp, Artificial Sequence
  Oligonucleotide for detection of SNP TSC0015598
caccttacttact

SEQ ID NO: 58109 - DNA, 13 bp, Artificial Sequence
  Oligonucleotide for detection of SNP TSC0015598
agtaaggaaggtg

SEQ ID NO: 58110 - DNA, 13 bp, Artificial Sequence
  Oligonucleotide for detection of SNP TSC0015598
caccttccttact

SEQ ID NO: 58111 - DNA, 13 bp, Artificial Sequence
  Oligonucleotide for detection of SNP TSC0015598
tattttgtttatt

SEQ ID NO: 58112 - DNA, 13 bp, Artificial Sequence
  Oligonucleotide for detection of SNP TSC0015598
aataaacaaaata

SEQ ID NO: 58113 - DNA, 13 bp, Artificial Sequence
  Oligonucleotide for detection of SNP TSC0015599
gtagtagtatttt

SEQ ID NO: 58114 - DNA, 13 bp, Artificial Sequence
  Oligonucleotide for detection of SNP TSC0015599
aaaatactactac

SEQ ID NO: 58115 - DNA, 13 bp, Artificial Sequence
  Oligonucleotide for detection of SNP TSC0015599
gtagtaatatttt

SEQ ID NO: 58116 - DNA, 13 bp, Artificial Sequence
  Oligonucleotide for detection of SNP TSC0015599
aaaatattactac

SEQ ID NO: 58117 - DNA, 13 bp, Artificial Sequence
  Oligonucleotide for detection of SNP TSC0015600
ttttttgggtgtt

SEQ ID NO: 58118 - DNA, 13 bp, Artificial Sequence
  Oligonucleotide for detection of SNP TSC0015600
aacacccaaaaaa

SEQ ID NO: 58119 - DNA, 13 bp, Artificial Sequence
  Oligonucleotide for detection of SNP TSC0015600
agtatttaagggg

SEQ ID NO: 58120 - DNA, 13 bp, Artificial Sequence
  Oligonucleotide for detection of SNP TSC0015600
ccccttaaatact

SEQ ID NO: 58121 - DNA, 13 bp, Artificial Sequence
  Oligonucleotide for detection of SNP TSC0015600
agtattaaagggg

SEQ ID NO: 58122 - DNA, 13 bp, Artificial Sequence
  Oligonucleotide for detection of SNP TSC0015600
cccctttaatact

SEQ ID NO: 58123 - DNA, 13 bp, Artificial Sequence
  Oligonucleotide for detection of SNP TSC0015609
atatatcggtttt

SEQ ID NO: 58124 - DNA, 13 bp, Artificial Sequence
  Oligonucleotide for detection of SNP TSC0015609
aaaaccgatatat

SEQ ID NO: 58125 - DNA, 13 bp, Artificial Sequence
  Oligonucleotide for detection of SNP TSC0015609
agaattggtatat

SEQ ID NO: 58126 - DNA, 13 bp, Artificial Sequence
  Oligonucleotide for detection of SNP TSC0015609
atataccaattct

SEQ ID NO: 58127 - DNA, 13 bp, Artificial Sequence
  Oligonucleotide for detection of SNP TSC0015609
agaattagtatat

SEQ ID NO: 58128 - DNA, 13 bp, Artificial Sequence
  Oligonucleotide for detection of SNP TSC0015609
atatactaattct

SEQ ID NO: 58129 - DNA, 13 bp, Artificial Sequence
  Oligonucleotide for detection of SNP TSC0015609
agaatcggtatat

SEQ ID NO: 58130 - DNA, 13 bp, Artificial Sequence
  Oligonucleotide for detection of SNP TSC0015609
atataccgattct

SEQ ID NO: 58131 - DNA, 13 bp, Artificial Sequence
  Oligonucleotide for detection of SNP TSC0015610
gatttggagttag

SEQ ID NO: 58132 - DNA, 13 bp, Artificial Sequence
  Oligonucleotide for detection of SNP TSC0015610
ctaactccaaatc

SEQ ID NO: 58133 - DNA, 13 bp, Artificial Sequence
  Oligonucleotide for detection of SNP TSC0015610
gatttgtagttag

SEQ ID NO: 58134 - DNA, 13 bp, Artificial Sequence
  Oligonucleotide for detection of SNP TSC0015610
ctaactacaaatc

SEQ ID NO: 58135 - DNA, 13 bp, Artificial Sequence
  Oligonucleotide for detection of SNP TSC0015610
ttaattttaaaty

SEQ ID NO: 58136 - DNA, 13 bp, Artificial Sequence
  Oligonucleotide for detection of SNP TSC0015610
ratttaaaattaa

SEQ ID NO: 58137 - DNA, 13 bp, Artificial Sequence
  Oligonucleotide for detection of SNP TSC0015610
ttaattataaaty

SEQ ID NO: 58138 - DNA, 13 bp, Artificial Sequence
  Oligonucleotide for detection of SNP TSC0015610
ratttataattaa

SEQ ID NO: 58139 - DNA, 13 bp, Artificial Sequence
  Oligonucleotide for detection of SNP TSC0015611
tttgtaggtataa

SEQ ID NO: 58140 - DNA, 13 bp, Artificial Sequence
  Oligonucleotide for detection of SNP TSC0015611
ttatacctacaaa

SEQ ID NO: 58141 - DNA, 13 bp, Artificial Sequence
  Oligonucleotide for detection of SNP TSC0015611
tttgtatgtataa

SEQ ID NO: 58142 - DNA, 13 bp, Artificial Sequence
  Oligonucleotide for detection of SNP TSC0015611
ttatacatacaaa

SEQ ID NO: 58143 - DNA, 13 bp, Artificial Sequence
  Oligonucleotide for detection of SNP TSC0015611
ttgtatttataaa

SEQ ID NO: 58144 - DNA, 13 bp, Artificial Sequence
  Oligonucleotide for detection of SNP TSC0015611
tttataaatacaa

SEQ ID NO: 58145 - DNA, 13 bp, Artificial Sequence
  Oligonucleotide for detection of SNP TSC0015611
ttgtatatataaa

SEQ ID NO: 58146 - DNA, 13 bp, Artificial Sequence
  Oligonucleotide for detection of SNP TSC0015611
tttatatatacaa

SEQ ID NO: 58147 - DNA, 13 bp, Artificial Sequence
  Oligonucleotide for detection of SNP TSC0015616
ataagtattgagy

SEQ ID NO: 58148 - DNA, 13 bp, Artificial Sequence
  Oligonucleotide for detection of SNP TSC0015616
rctcaatacttat

SEQ ID NO: 58149 - DNA, 13 bp, Artificial Sequence
  Oligonucleotide for detection of SNP TSC0015616
ataagtgttgagy

SEQ ID NO: 58150 - DNA, 13 bp, Artificial Sequence
  Oligonucleotide for detection of SNP TSC0015616
rctcaacacttat

SEQ ID NO: 58151 - DNA, 13 bp, Artificial Sequence
  Oligonucleotide for detection of SNP TSC0015616
ataagcgttgagy

SEQ ID NO: 58152 - DNA, 13 bp, Artificial Sequence
  Oligonucleotide for detection of SNP TSC0015616
rctcaacgcttat

SEQ ID NO: 58153 - DNA, 13 bp, Artificial Sequence
  Oligonucleotide for detection of SNP TSC0015616
gtttaatgtttgt

SEQ ID NO: 58154 - DNA, 13 bp, Artificial Sequence
  Oligonucleotide for detection of SNP TSC0015616
acaaacattaaac

SEQ ID NO: 58155 - DNA, 13 bp, Artificial Sequence
  Oligonucleotide for detection of SNP TSC0015616
gtttaacgtttgt

SEQ ID NO: 58156 - DNA, 13 bp, Artificial Sequence
  Oligonucleotide for detection of SNP TSC0015616
acaaacgttaaac

SEQ ID NO: 58157 - DNA, 13 bp, Artificial Sequence
  Oligonucleotide for detection of SNP TSC0015617
aaaaggtgattta

SEQ ID NO: 58158 - DNA, 13 bp, Artificial Sequence
  Oligonucleotide for detection of SNP TSC0015617
taaatcacctttt

SEQ ID NO: 58159 - DNA, 13 bp, Artificial Sequence
  Oligonucleotide for detection of SNP TSC0015617
aaaaggcgattta

SEQ ID NO: 58160 - DNA, 13 bp, Artificial Sequence
  Oligonucleotide for detection of SNP TSC0015617
taaatcgcctttt

SEQ ID NO: 58161 - DNA, 13 bp, Artificial Sequence
  Oligonucleotide for detection of SNP TSC0015617
tgaattgtttttt

SEQ ID NO: 58162 - DNA, 13 bp, Artificial Sequence
  Oligonucleotide for detection of SNP TSC0015617
aaaaaacaattca

SEQ ID NO: 58163 - DNA, 13 bp, Artificial Sequence
  Oligonucleotide for detection of SNP TSC0015617
tgaattatttttt

SEQ ID NO: 58164 - DNA, 13 bp, Artificial Sequence
  Oligonucleotide for detection of SNP TSC0015617
aaaaaataattca

SEQ ID NO: 58165 - DNA, 13 bp, Artificial Sequence
  Oligonucleotide for detection of SNP TSC0015617
tgaatcgtttttt

SEQ ID NO: 58166 - DNA, 13 bp, Artificial Sequence
  Oligonucleotide for detection of SNP TSC0015617
aaaaaacgattca

SEQ ID NO: 58167 - DNA, 13 bp, Artificial Sequence
  Oligonucleotide for detection of SNP TSC0015618
agaaaataatgat

SEQ ID NO: 58168 - DNA, 13 bp, Artificial Sequence
  Oligonucleotide for detection of SNP TSC0015618
atcattattttct

SEQ ID NO: 58169 - DNA, 13 bp, Artificial Sequence
  Oligonucleotide for detection of SNP TSC0015618
agaaaagaatgat

SEQ ID NO: 58170 - DNA, 13 bp, Artificial Sequence
  Oligonucleotide for detection of SNP TSC0015618
atcattcttttct

SEQ ID NO: 58171 - DNA, 13 bp, Artificial Sequence
  Oligonucleotide for detection of SNP TSC0015618
attattgtttttt

SEQ ID NO: 58172 - DNA, 13 bp, Artificial Sequence
  Oligonucleotide for detection of SNP TSC0015618
aaaaaacaataat

SEQ ID NO: 58173 - DNA, 13 bp, Artificial Sequence
  Oligonucleotide for detection of SNP TSC0015620
attagggtatttt

SEQ ID NO: 58174 - DNA, 13 bp, Artificial Sequence
  Oligonucleotide for detection of SNP TSC0015620
aaaataccctaat

SEQ ID NO: 58175 - DNA, 13 bp, Artificial Sequence
  Oligonucleotide for detection of SNP TSC0015620
attaggatatttt

SEQ ID NO: 58176 - DNA, 13 bp, Artificial Sequence
  Oligonucleotide for detection of SNP TSC0015620
aaaatatcctaat

SEQ ID NO: 58177 - DNA, 13 bp, Artificial Sequence
  Oligonucleotide for detection of SNP TSC0015622
tagttggttgtaa

SEQ ID NO: 58178 - DNA, 13 bp, Artificial Sequence
  Oligonucleotide for detection of SNP TSC0015622
ttacaaccaacta

SEQ ID NO: 58179 - DNA, 13 bp, Artificial Sequence
  Oligonucleotide for detection of SNP TSC0015622
tagttgtttgtaa

SEQ ID NO: 58180 - DNA, 13 bp, Artificial Sequence
  Oligonucleotide for detection of SNP TSC0015622
ttacaaacaacta

SEQ ID NO: 58181 - DNA, 13 bp, Artificial Sequence
  Oligonucleotide for detection of SNP TSC0015622
ttgtagttaatta

SEQ ID NO: 58182 - DNA, 13 bp, Artificial Sequence
  Oligonucleotide for detection of SNP TSC0015622
taattaactacaa

SEQ ID NO: 58183 - DNA, 13 bp, Artificial Sequence
  Oligonucleotide for detection of SNP TSC0015622
ttgtagataatta

SEQ ID NO: 58184 - DNA, 13 bp, Artificial Sequence
  Oligonucleotide for detection of SNP TSC0015622
taattatctacaa

SEQ ID NO: 58185 - DNA, 13 bp, Artificial Sequence
  Oligonucleotide for detection of SNP TSC0015623
gtaggtataatta

SEQ ID NO: 58186 - DNA, 13 bp, Artificial Sequence
  Oligonucleotide for detection of SNP TSC0015623
taattatacctac

SEQ ID NO: 58187 - DNA, 13 bp, Artificial Sequence
  Oligonucleotide for detection of SNP TSC0015623
gtaggtgtaatta

SEQ ID NO: 58188 - DNA, 13 bp, Artificial Sequence
  Oligonucleotide for detection of SNP TSC0015623
taattacacctac

SEQ ID NO: 58189 - DNA, 13 bp, Artificial Sequence
  Oligonucleotide for detection of SNP TSC0015623
gtaggcgtaatta

SEQ ID NO: 58190 - DNA, 13 bp, Artificial Sequence
  Oligonucleotide for detection of SNP TSC0015623
taattacgcctac

SEQ ID NO: 58191 - DNA, 13 bp, Artificial Sequence
  Oligonucleotide for detection of SNP TSC0015623
taattgtgtttgy

SEQ ID NO: 58192 - DNA, 13 bp, Artificial Sequence
  Oligonucleotide for detection of SNP TSC0015623
rcaaacacaatta

SEQ ID NO: 58193 - DNA, 13 bp, Artificial Sequence
  Oligonucleotide for detection of SNP TSC0015623
taattgcgtttgy

SEQ ID NO: 58194 - DNA, 13 bp, Artificial Sequence
  Oligonucleotide for detection of SNP TSC0015623
rcaaacgcaatta

SEQ ID NO: 58195 - DNA, 13 bp, Artificial Sequence
  Oligonucleotide for detection of SNP TSC0015624
atatttatattay

SEQ ID NO: 58196 - DNA, 13 bp, Artificial Sequence
  Oligonucleotide for detection of SNP TSC0015624
rtaatataaatat

SEQ ID NO: 58197 - DNA, 13 bp, Artificial Sequence
  Oligonucleotide for detection of SNP TSC0015624
atatttgtattay

SEQ ID NO: 58198 - DNA, 13 bp, Artificial Sequence
  Oligonucleotide for detection of SNP TSC0015624
rtaatacaaatat

SEQ ID NO: 58199 - DNA, 13 bp, Artificial Sequence
  Oligonucleotide for detection of SNP TSC0015625
tattttatgtatg

SEQ ID NO: 58200 - DNA, 13 bp, Artificial Sequence
  Oligonucleotide for detection of SNP TSC0015625
catacataaaata

SEQ ID NO: 58201 - DNA, 13 bp, Artificial Sequence
  Oligonucleotide for detection of SNP TSC0015625
tattttacgtatg

SEQ ID NO: 58202 - DNA, 13 bp, Artificial Sequence
  Oligonucleotide for detection of SNP TSC0015625
catacgtaaaata

SEQ ID NO: 58203 - DNA, 13 bp, Artificial Sequence
  Oligonucleotide for detection of SNP TSC0015625
tatttcgtgtatg

SEQ ID NO: 58204 - DNA, 13 bp, Artificial Sequence
  Oligonucleotide for detection of SNP TSC0015625
catacacgaaata

SEQ ID NO: 58205 - DNA, 13 bp, Artificial Sequence
  Oligonucleotide for detection of SNP TSC0015625
tattttgcgtatg

SEQ ID NO: 58206 - DNA, 13 bp, Artificial Sequence
  Oligonucleotide for detection of SNP TSC0015625
catacgcaaaata

SEQ ID NO: 58207 - DNA, 13 bp, Artificial Sequence
  Oligonucleotide for detection of SNP TSC0015625
tatttcgcgtatg

SEQ ID NO: 58208 - DNA, 13 bp, Artificial Sequence
  Oligonucleotide for detection of SNP TSC0015625
catacgcgaaata

SEQ ID NO: 58209 - DNA, 13 bp, Artificial Sequence
  Oligonucleotide for detection of SNP TSC0015625
tatgtgtggagta

SEQ ID NO: 58210 - DNA, 13 bp, Artificial Sequence
  Oligonucleotide for detection of SNP TSC0015625
tactccacacata

SEQ ID NO: 58211 - DNA, 13 bp, Artificial Sequence
  Oligonucleotide for detection of SNP TSC0015625
tatgcgtggagta

SEQ ID NO: 58212 - DNA, 13 bp, Artificial Sequence
  Oligonucleotide for detection of SNP TSC0015625
tactccacgcata

SEQ ID NO: 58213 - DNA, 13 bp, Artificial Sequence
  Oligonucleotide for detection of SNP TSC0015625
tatgtgcggagta

SEQ ID NO: 58214 - DNA, 13 bp, Artificial Sequence
  Oligonucleotide for detection of SNP TSC0015625
tactccgcacata

SEQ ID NO: 58215 - DNA, 13 bp, Artificial Sequence
  Oligonucleotide for detection of SNP TSC0015625
tatgcgcggagta

SEQ ID NO: 58216 - DNA, 13 bp, Artificial Sequence
  Oligonucleotide for detection of SNP TSC0015625
tactccgcgcata

SEQ ID NO: 58217 - DNA, 13 bp, Artificial Sequence
  Oligonucleotide for detection of SNP TSC0015626
tgttttgtttgty

SEQ ID NO: 58218 - DNA, 13 bp, Artificial Sequence
  Oligonucleotide for detection of SNP TSC0015626
racaaacaaaaca

SEQ ID NO: 58219 - DNA, 13 bp, Artificial Sequence
  Oligonucleotide for detection of SNP TSC0015626
tgttttttttgty

SEQ ID NO: 58220 - DNA, 13 bp, Artificial Sequence
  Oligonucleotide for detection of SNP TSC0015626
racaaaaaaaaca

SEQ ID NO: 58221 - DNA, 13 bp, Artificial Sequence
  Oligonucleotide for detection of SNP TSC0015626
ggtagaaaaagta

SEQ ID NO: 58222 - DNA, 13 bp, Artificial Sequence
  Oligonucleotide for detection of SNP TSC0015626
tactttttctacc

SEQ ID NO: 58223 - DNA, 13 bp, Artificial Sequence
  Oligonucleotide for detection of SNP TSC0015629
tttggtgttttay

SEQ ID NO: 58224 - DNA, 13 bp, Artificial Sequence
  Oligonucleotide for detection of SNP TSC0015629
rtaaaacaccaaa

SEQ ID NO: 58225 - DNA, 13 bp, Artificial Sequence
  Oligonucleotide for detection of SNP TSC0015629
tttggcgttttay

SEQ ID NO: 58226 - DNA, 13 bp, Artificial Sequence
  Oligonucleotide for detection of SNP TSC0015629
rtaaaacgccaaa

SEQ ID NO: 58227 - DNA, 13 bp, Artificial Sequence
  Oligonucleotide for detection of SNP TSC0015629
gtggggtgttagg

SEQ ID NO: 58228 - DNA, 13 bp, Artificial Sequence
  Oligonucleotide for detection of SNP TSC0015629
cctaacaccccac

SEQ ID NO: 58229 - DNA, 13 bp, Artificial Sequence
  Oligonucleotide for detection of SNP TSC0015629
gtggggcgttagg

SEQ ID NO: 58230 - DNA, 13 bp, Artificial Sequence
  Oligonucleotide for detection of SNP TSC0015629
cctaacgccccac

SEQ ID NO: 58231 - DNA, 13 bp, Artificial Sequence
  Oligonucleotide for detection of SNP TSC0015630
agagagtgataag

SEQ ID NO: 58232 - DNA, 13 bp, Artificial Sequence
  Oligonucleotide for detection of SNP TSC0015630
cttatcactctct

SEQ ID NO: 58233 - DNA, 13 bp, Artificial Sequence
  Oligonucleotide for detection of SNP TSC0015630
agagagcgataag

SEQ ID NO: 58234 - DNA, 13 bp, Artificial Sequence
  Oligonucleotide for detection of SNP TSC0015630
cttatcgctctct

SEQ ID NO: 58235 - DNA, 13 bp, Artificial Sequence
  Oligonucleotide for detection of SNP TSC0015631
gattataaattty

SEQ ID NO: 58236 - DNA, 13 bp, Artificial Sequence
  Oligonucleotide for detection of SNP TSC0015631
raaatttataatc

SEQ ID NO: 58237 - DNA, 13 bp, Artificial Sequence
  Oligonucleotide for detection of SNP TSC0015631
gattatgaattty

SEQ ID NO: 58238 - DNA, 13 bp, Artificial Sequence
  Oligonucleotide for detection of SNP TSC0015631
raaattcataatc

SEQ ID NO: 58239 - DNA, 13 bp, Artificial Sequence
  Oligonucleotide for detection of SNP TSC0015631
gattacgaattty

SEQ ID NO: 58240 - DNA, 13 bp, Artificial Sequence
  Oligonucleotide for detection of SNP TSC0015631
raaattcgtaatc

SEQ ID NO: 58241 - DNA, 13 bp, Artificial Sequence
  Oligonucleotide for detection of SNP TSC0015631
ggaatttgtgaty

SEQ ID NO: 58242 - DNA, 13 bp, Artificial Sequence
  Oligonucleotide for detection of SNP TSC0015631
ratcacaaattcc

SEQ ID NO: 58243 - DNA, 13 bp, Artificial Sequence
  Oligonucleotide for detection of SNP TSC0015631
ggaattcgtgaty

SEQ ID NO: 58244 - DNA, 13 bp, Artificial Sequence
  Oligonucleotide for detection of SNP TSC0015631
ratcacgaattcc

SEQ ID NO: 58245 - DNA, 13 bp, Artificial Sequence
  Oligonucleotide for detection of SNP TSC0015632
gtttttaggttta

SEQ ID NO: 58246 - DNA, 13 bp, Artificial Sequence
  Oligonucleotide for detection of SNP TSC0015632
taaacctaaaaac

SEQ ID NO: 58247 - DNA, 13 bp, Artificial Sequence
  Oligonucleotide for detection of SNP TSC0015632
gtttttgggttta

SEQ ID NO: 58248 - DNA, 13 bp, Artificial Sequence
  Oligonucleotide for detection of SNP TSC0015632
taaacccaaaaac

SEQ ID NO: 58249 - DNA, 13 bp, Artificial Sequence
  Oligonucleotide for detection of SNP TSC0015632
gttttcgggttta

SEQ ID NO: 58250 - DNA, 13 bp, Artificial Sequence
  Oligonucleotide for detection of SNP TSC0015632
taaacccgaaaac

SEQ ID NO: 58251 - DNA, 13 bp, Artificial Sequence
  Oligonucleotide for detection of SNP TSC0015632
tgagtttggaagy

SEQ ID NO: 58252 - DNA, 13 bp, Artificial Sequence
  Oligonucleotide for detection of SNP TSC0015632
rcttccaaactca

SEQ ID NO: 58253 - DNA, 13 bp, Artificial Sequence
  Oligonucleotide for detection of SNP TSC0015632
tgagttcggaagy

SEQ ID NO: 58254 - DNA, 13 bp, Artificial Sequence
  Oligonucleotide for detection of SNP TSC0015632
rcttccgaactca

SEQ ID NO: 58255 - DNA, 13 bp, Artificial Sequence
  Oligonucleotide for detection of SNP TSC0015633
taaagtgatgtgg

SEQ ID NO: 58256 - DNA, 13 bp, Artificial Sequence
  Oligonucleotide for detection of SNP TSC0015633
ccacatcacttta

SEQ ID NO: 58257 - DNA, 13 bp, Artificial Sequence
  Oligonucleotide for detection of SNP TSC0015633
taaagttatgtgg

SEQ ID NO: 58258 - DNA, 13 bp, Artificial Sequence
  Oligonucleotide for detection of SNP TSC0015633
ccacataacttta

SEQ ID NO: 58259 - DNA, 13 bp, Artificial Sequence
  Oligonucleotide for detection of SNP TSC0015633
taaagcgatgtgg

SEQ ID NO: 58260 - DNA, 13 bp, Artificial Sequence
  Oligonucleotide for detection of SNP TSC0015633
ccacatcgcttta

SEQ ID NO: 58261 - DNA, 13 bp, Artificial Sequence
  Oligonucleotide for detection of SNP TSC0015633
ttatattgttttg

SEQ ID NO: 58262 - DNA, 13 bp, Artificial Sequence
  Oligonucleotide for detection of SNP TSC0015633
caaaacaatataa

SEQ ID NO: 58263 - DNA, 13 bp, Artificial Sequence
  Oligonucleotide for detection of SNP TSC0015633
ttatatagttttg

SEQ ID NO: 58264 - DNA, 13 bp, Artificial Sequence
  Oligonucleotide for detection of SNP TSC0015633
caaaactatataa

SEQ ID NO: 58265 - DNA, 13 bp, Artificial Sequence
  Oligonucleotide for detection of SNP TSC0015633
ttatatcgttttg

SEQ ID NO: 58266 - DNA, 13 bp, Artificial Sequence
  Oligonucleotide for detection of SNP TSC0015633
caaaacgatataa

SEQ ID NO: 58267 - DNA, 13 bp, Artificial Sequence
  Oligonucleotide for detection of SNP TSC0015634
aggttaggttgag

SEQ ID NO: 58268 - DNA, 13 bp, Artificial Sequence
  Oligonucleotide for detection of SNP TSC0015634
ctcaacctaacct

SEQ ID NO: 58269 - DNA, 13 bp, Artificial Sequence
  Oligonucleotide for detection of SNP TSC0015634
aggttaagttgag

SEQ ID NO: 58270 - DNA, 13 bp, Artificial Sequence
  Oligonucleotide for detection of SNP TSC0015634
ctcaacttaacct

SEQ ID NO: 58271 - DNA, 13 bp, Artificial Sequence
  Oligonucleotide for detection of SNP TSC0015635
ttgattagattgg

SEQ ID NO: 58272 - DNA, 13 bp, Artificial Sequence
  Oligonucleotide for detection of SNP TSC0015635
ccaatctaatcaa

SEQ ID NO: 58273 - DNA, 13 bp, Artificial Sequence
  Oligonucleotide for detection of SNP TSC0015635
ttgattggattgg

SEQ ID NO: 58274 - DNA, 13 bp, Artificial Sequence
  Oligonucleotide for detection of SNP TSC0015635
ccaatccaatcaa

SEQ ID NO: 58275 - DNA, 13 bp, Artificial Sequence
  Oligonucleotide for detection of SNP TSC0015635
ttgatcggattgg

SEQ ID NO: 58276 - DNA, 13 bp, Artificial Sequence
  Oligonucleotide for detection of SNP TSC0015635
ccaatccgatcaa

SEQ ID NO: 58277 - DNA, 13 bp, Artificial Sequence
  Oligonucleotide for detection of SNP TSC0015635
ttagtttgattaa

SEQ ID NO: 58278 - DNA, 13 bp, Artificial Sequence
  Oligonucleotide for detection of SNP TSC0015635
ttaatcaaactaa

SEQ ID NO: 58279 - DNA, 13 bp, Artificial Sequence
  Oligonucleotide for detection of SNP TSC0015635
ttagttcgattaa

SEQ ID NO: 58280 - DNA, 13 bp, Artificial Sequence
  Oligonucleotide for detection of SNP TSC0015635
ttaatcgaactaa

SEQ ID NO: 58281 - DNA, 13 bp, Artificial Sequence
  Oligonucleotide for detection of SNP TSC0015636
tatttgggttatg

SEQ ID NO: 58282 - DNA, 13 bp, Artificial Sequence
  Oligonucleotide for detection of SNP TSC0015636
cataacccaaata

SEQ ID NO: 58283 - DNA, 13 bp, Artificial Sequence
  Oligonucleotide for detection of SNP TSC0015636
tatttgtgttatg

SEQ ID NO: 58284 - DNA, 13 bp, Artificial Sequence
  Oligonucleotide for detection of SNP TSC0015636
cataacacaaata

SEQ ID NO: 58285 - DNA, 13 bp, Artificial Sequence
  Oligonucleotide for detection of SNP TSC0015636
tatgatttagata

SEQ ID NO: 58286 - DNA, 13 bp, Artificial Sequence
  Oligonucleotide for detection of SNP TSC0015636
tatctaaatcata

SEQ ID NO: 58287 - DNA, 13 bp, Artificial Sequence
  Oligonucleotide for detection of SNP TSC0015636
tatgatatagata

SEQ ID NO: 58288 - DNA, 13 bp, Artificial Sequence
  Oligonucleotide for detection of SNP TSC0015636
tatctatatcata

SEQ ID NO: 58289 - DNA, 13 bp, Artificial Sequence
  Oligonucleotide for detection of SNP TSC0015637
atgtttgtagagg

SEQ ID NO: 58290 - DNA, 13 bp, Artificial Sequence
  Oligonucleotide for detection of SNP TSC0015637
cctctacaaacat

SEQ ID NO: 58291 - DNA, 13 bp, Artificial Sequence
  Oligonucleotide for detection of SNP TSC0015637
atgtttatagagg

SEQ ID NO: 58292 - DNA, 13 bp, Artificial Sequence
  Oligonucleotide for detection of SNP TSC0015637
cctctataaacat

SEQ ID NO: 58293 - DNA, 13 bp, Artificial Sequence
  Oligonucleotide for detection of SNP TSC0015641
taattaatagaaa

SEQ ID NO: 58294 - DNA, 13 bp, Artificial Sequence
  Oligonucleotide for detection of SNP TSC0015641
tttctattaatta

SEQ ID NO: 58295 - DNA, 13 bp, Artificial Sequence
  Oligonucleotide for detection of SNP TSC0015641
taattagtagaaa

SEQ ID NO: 58296 - DNA, 13 bp, Artificial Sequence
  Oligonucleotide for detection of SNP TSC0015641
tttctactaatta

SEQ ID NO: 58297 - DNA, 13 bp, Artificial Sequence
  Oligonucleotide for detection of SNP TSC0015642
aaggggaatatag

SEQ ID NO: 58298 - DNA, 13 bp, Artificial Sequence
  Oligonucleotide for detection of SNP TSC0015642
ctatattcccctt

SEQ ID NO: 58299 - DNA, 13 bp, Artificial Sequence
  Oligonucleotide for detection of SNP TSC0015642
aagggggatatag

SEQ ID NO: 58300 - DNA, 13 bp, Artificial Sequence
  Oligonucleotide for detection of SNP TSC0015642
ctatatccccctt

SEQ ID NO: 58301 - DNA, 13 bp, Artificial Sequence
  Oligonucleotide for detection of SNP TSC0015643
aatgtaggttaat

SEQ ID NO: 58302 - DNA, 13 bp, Artificial Sequence
  Oligonucleotide for detection of SNP TSC0015643
attaacctacatt

SEQ ID NO: 58303 - DNA, 13 bp, Artificial Sequence
  Oligonucleotide for detection of SNP TSC0015643
aatgtaagttaat

SEQ ID NO: 58304 - DNA, 13 bp, Artificial Sequence
  Oligonucleotide for detection of SNP TSC0015643
attaacttacatt

SEQ ID NO: 58305 - DNA, 13 bp, Artificial Sequence
  Oligonucleotide for detection of SNP TSC0015648
tagtatgtttagg

SEQ ID NO: 58306 - DNA, 13 bp, Artificial Sequence
  Oligonucleotide for detection of SNP TSC0015648
cctaaacatacta

SEQ ID NO: 58307 - DNA, 13 bp, Artificial Sequence
  Oligonucleotide for detection of SNP TSC0015648
tagtatatttagg

SEQ ID NO: 58308 - DNA, 13 bp, Artificial Sequence
  Oligonucleotide for detection of SNP TSC0015648
cctaaatatacta

SEQ ID NO: 58309 - DNA, 13 bp, Artificial Sequence
  Oligonucleotide for detection of SNP TSC0015649
atatgtttaaata

SEQ ID NO: 58310 - DNA, 13 bp, Artificial Sequence
  Oligonucleotide for detection of SNP TSC0015649
tatttaaacatat

SEQ ID NO: 58311 - DNA, 13 bp, Artificial Sequence
  Oligonucleotide for detection of SNP TSC0015649
atatgtgtaaata

SEQ ID NO: 58312 - DNA, 13 bp, Artificial Sequence
  Oligonucleotide for detection of SNP TSC0015649
tatttacacatat

SEQ ID NO: 58313 - DNA, 13 bp, Artificial Sequence
  Oligonucleotide for detection of SNP TSC0015649
atatgcgtaaata

SEQ ID NO: 58314 - DNA, 13 bp, Artificial Sequence
  Oligonucleotide for detection of SNP TSC0015649
tatttacgcatat

SEQ ID NO: 58315 - DNA, 13 bp, Artificial Sequence
  Oligonucleotide for detection of SNP TSC0015649
tgtttgggtatat

SEQ ID NO: 58316 - DNA, 13 bp, Artificial Sequence
  Oligonucleotide for detection of SNP TSC0015649
atatacccaaaca

SEQ ID NO: 58317 - DNA, 13 bp, Artificial Sequence
  Oligonucleotide for detection of SNP TSC0015651
atatatgtttatg

SEQ ID NO: 58318 - DNA, 13 bp, Artificial Sequence
  Oligonucleotide for detection of SNP TSC0015651
cataaacatatat

SEQ ID NO: 58319 - DNA, 13 bp, Artificial Sequence
  Oligonucleotide for detection of SNP TSC0015651
atatatatttatg

SEQ ID NO: 58320 - DNA, 13 bp, Artificial Sequence
  Oligonucleotide for detection of SNP TSC0015651
cataaatatatat

SEQ ID NO: 58321 - DNA, 13 bp, Artificial Sequence
  Oligonucleotide for detection of SNP TSC0015652
atgagtatgtgtg

SEQ ID NO: 58322 - DNA, 13 bp, Artificial Sequence
  Oligonucleotide for detection of SNP TSC0015652
cacacatactcat

SEQ ID NO: 58323 - DNA, 13 bp, Artificial Sequence
  Oligonucleotide for detection of SNP TSC0015652
atgagtgtgtgtg

SEQ ID NO: 58324 - DNA, 13 bp, Artificial Sequence
  Oligonucleotide for detection of SNP TSC0015652
cacacacactcat

SEQ ID NO: 58325 - DNA, 13 bp, Artificial Sequence
  Oligonucleotide for detection of SNP TSC0015652
atgagcgtgtgtg

SEQ ID NO: 58326 - DNA, 13 bp, Artificial Sequence
  Oligonucleotide for detection of SNP TSC0015652
cacacacgctcat

SEQ ID NO: 58327 - DNA, 13 bp, Artificial Sequence
  Oligonucleotide for detection of SNP TSC0015652
tatatatgtttat

SEQ ID NO: 58328 - DNA, 13 bp, Artificial Sequence
  Oligonucleotide for detection of SNP TSC0015652
ataaacatatata

SEQ ID NO: 58329 - DNA, 13 bp, Artificial Sequence
  Oligonucleotide for detection of SNP TSC0015652
tatatacgtttat

SEQ ID NO: 58330 - DNA, 13 bp, Artificial Sequence
  Oligonucleotide for detection of SNP TSC0015652
ataaacgtatata

SEQ ID NO: 58331 - DNA, 13 bp, Artificial Sequence
  Oligonucleotide for detection of SNP TSC0015654
ttttttattatay

SEQ ID NO: 58332 - DNA, 13 bp, Artificial Sequence
  Oligonucleotide for detection of SNP TSC0015654
rtataataaaaaa

SEQ ID NO: 58333 - DNA, 13 bp, Artificial Sequence
  Oligonucleotide for detection of SNP TSC0015654
ttttttgttatay

SEQ ID NO: 58334 - DNA, 13 bp, Artificial Sequence
  Oligonucleotide for detection of SNP TSC0015654
rtataacaaaaaa

SEQ ID NO: 58335 - DNA, 13 bp, Artificial Sequence
  Oligonucleotide for detection of SNP TSC0015654
tttttcgttatay

SEQ ID NO: 58336 - DNA, 13 bp, Artificial Sequence
  Oligonucleotide for detection of SNP TSC0015654
rtataacgaaaaa

SEQ ID NO: 58337 - DNA, 13 bp, Artificial Sequence
  Oligonucleotide for detection of SNP TSC0015654
gtgtgatgaaagg

SEQ ID NO: 58338 - DNA, 13 bp, Artificial Sequence
  Oligonucleotide for detection of SNP TSC0015654
cctttcatcacac

SEQ ID NO: 58339 - DNA, 13 bp, Artificial Sequence
  Oligonucleotide for detection of SNP TSC0015654
gtgtgacgaaagg

SEQ ID NO: 58340 - DNA, 13 bp, Artificial Sequence
  Oligonucleotide for detection of SNP TSC0015654
cctttcgtcacac

SEQ ID NO: 58341 - DNA, 13 bp, Artificial Sequence
  Oligonucleotide for detection of SNP TSC0015656
ttatttaagttga

SEQ ID NO: 58342 - DNA, 13 bp, Artificial Sequence
  Oligonucleotide for detection of SNP TSC0015656
tcaacttaaataa

SEQ ID NO: 58343 - DNA, 13 bp, Artificial Sequence
  Oligonucleotide for detection of SNP TSC0015656
ttatttgagttga

SEQ ID NO: 58344 - DNA, 13 bp, Artificial Sequence
  Oligonucleotide for detection of SNP TSC0015656
tcaactcaaataa

SEQ ID NO: 58345 - DNA, 13 bp, Artificial Sequence
  Oligonucleotide for detection of SNP TSC0015656
ttattcgagttga

SEQ ID NO: 58346 - DNA, 13 bp, Artificial Sequence
  Oligonucleotide for detection of SNP TSC0015656
tcaactcgaataa

SEQ ID NO: 58347 - DNA, 13 bp, Artificial Sequence
  Oligonucleotide for detection of SNP TSC0015656
ttagtttgaataa

SEQ ID NO: 58348 - DNA, 13 bp, Artificial Sequence
  Oligonucleotide for detection of SNP TSC0015656
ttattcaaactaa

SEQ ID NO: 58349 - DNA, 13 bp, Artificial Sequence
  Oligonucleotide for detection of SNP TSC0015656
ttagttcgaataa

SEQ ID NO: 58350 - DNA, 13 bp, Artificial Sequence
  Oligonucleotide for detection of SNP TSC0015656
ttattcgaactaa

SEQ ID NO: 58351 - DNA, 13 bp, Artificial Sequence
  Oligonucleotide for detection of SNP TSC0015657
gaggttataattg

SEQ ID NO: 58352 - DNA, 13 bp, Artificial Sequence
  Oligonucleotide for detection of SNP TSC0015657
caattataacctc

SEQ ID NO: 58353 - DNA, 13 bp, Artificial Sequence
  Oligonucleotide for detection of SNP TSC0015657
gaggttgtaattg

SEQ ID NO: 58354 - DNA, 13 bp, Artificial Sequence
  Oligonucleotide for detection of SNP TSC0015657
caattacaacctc

SEQ ID NO: 58355 - DNA, 13 bp, Artificial Sequence
  Oligonucleotide for detection of SNP TSC0015658
tgagaaaagaaaa

SEQ ID NO: 58356 - DNA, 13 bp, Artificial Sequence
  Oligonucleotide for detection of SNP TSC0015658
ttttcttttctca

SEQ ID NO: 58357 - DNA, 13 bp, Artificial Sequence
  Oligonucleotide for detection of SNP TSC0015658
tgagaagagaaaa

SEQ ID NO: 58358 - DNA, 13 bp, Artificial Sequence
  Oligonucleotide for detection of SNP TSC0015658
ttttctcttctca

SEQ ID NO: 58359 - DNA, 13 bp, Artificial Sequence
  Oligonucleotide for detection of SNP TSC0015659
taaaataataata

SEQ ID NO: 58360 - DNA, 13 bp, Artificial Sequence
  Oligonucleotide for detection of SNP TSC0015659
tattattatttta

SEQ ID NO: 58361 - DNA, 13 bp, Artificial Sequence
  Oligonucleotide for detection of SNP TSC0015659
taaaattataata

SEQ ID NO: 58362 - DNA, 13 bp, Artificial Sequence
  Oligonucleotide for detection of SNP TSC0015659
tattataatttta

SEQ ID NO: 58363 - DNA, 13 bp, Artificial Sequence
  Oligonucleotide for detection of SNP TSC0015661
aaatgtgaaggtg

SEQ ID NO: 58364 - DNA, 13 bp, Artificial Sequence
  Oligonucleotide for detection of SNP TSC0015661
caccttcacattt

SEQ ID NO: 58365 - DNA, 13 bp, Artificial Sequence
  Oligonucleotide for detection of SNP TSC0015661
aaatgtaaaggtg

SEQ ID NO: 58366 - DNA, 13 bp, Artificial Sequence
  Oligonucleotide for detection of SNP TSC0015661
cacctttacattt

SEQ ID NO: 58367 - DNA, 13 bp, Artificial Sequence
  Oligonucleotide for detection of SNP TSC0015661
aaatgcgaaggtg

SEQ ID NO: 58368 - DNA, 13 bp, Artificial Sequence
  Oligonucleotide for detection of SNP TSC0015661
caccttcgcattt

SEQ ID NO: 58369 - DNA, 13 bp, Artificial Sequence
  Oligonucleotide for detection of SNP TSC0015662
aatatggagatay

SEQ ID NO: 58370 - DNA, 13 bp, Artificial Sequence
  Oligonucleotide for detection of SNP TSC0015662
rtatctccatatt

SEQ ID NO: 58371 - DNA, 13 bp, Artificial Sequence
  Oligonucleotide for detection of SNP TSC0015662
aatatgaagatay

SEQ ID NO: 58372 - DNA, 13 bp, Artificial Sequence
  Oligonucleotide for detection of SNP TSC0015662
rtatcttcatatt

SEQ ID NO: 58373 - DNA, 13 bp, Artificial Sequence
  Oligonucleotide for detection of SNP TSC0015663
ttaggtaaaggtg

SEQ ID NO: 58374 - DNA, 13 bp, Artificial Sequence
  Oligonucleotide for detection of SNP TSC0015663
cacctttacctaa

SEQ ID NO: 58375 - DNA, 13 bp, Artificial Sequence
  Oligonucleotide for detection of SNP TSC0015663
ttaggttaaggtg

SEQ ID NO: 58376 - DNA, 13 bp, Artificial Sequence
  Oligonucleotide for detection of SNP TSC0015663
caccttaacctaa

SEQ ID NO: 58377 - DNA, 13 bp, Artificial Sequence
  Oligonucleotide for detection of SNP TSC0015663
tatttttgtttga

SEQ ID NO: 58378 - DNA, 13 bp, Artificial Sequence
  Oligonucleotide for detection of SNP TSC0015663
tcaaacaaaaata

SEQ ID NO: 58379 - DNA, 13 bp, Artificial Sequence
  Oligonucleotide for detection of SNP TSC0015663
tattttagtttga

SEQ ID NO: 58380 - DNA, 13 bp, Artificial Sequence
  Oligonucleotide for detection of SNP TSC0015663
tcaaactaaaata

SEQ ID NO: 58381 - DNA, 13 bp, Artificial Sequence
  Oligonucleotide for detection of SNP TSC0015664
taaaatattttat

SEQ ID NO: 58382 - DNA, 13 bp, Artificial Sequence
  Oligonucleotide for detection of SNP TSC0015664
ataaaatatttta

SEQ ID NO: 58383 - DNA, 13 bp, Artificial Sequence
  Oligonucleotide for detection of SNP TSC0015664
taaaattttttat

SEQ ID NO: 58384 - DNA, 13 bp, Artificial Sequence
  Oligonucleotide for detection of SNP TSC0015664
ataaaaaatttta

SEQ ID NO: 58385 - DNA, 13 bp, Artificial Sequence
  Oligonucleotide for detection of SNP TSC0015664
atgaggtattttg

SEQ ID NO: 58386 - DNA, 13 bp, Artificial Sequence
  Oligonucleotide for detection of SNP TSC0015664
caaaatacctcat

SEQ ID NO: 58387 - DNA, 13 bp, Artificial Sequence
  Oligonucleotide for detection of SNP TSC0015664
atgaggaattttg

SEQ ID NO: 58388 - DNA, 13 bp, Artificial Sequence
  Oligonucleotide for detection of SNP TSC0015664
caaaattcctcat

SEQ ID NO: 58389 - DNA, 13 bp, Artificial Sequence
  Oligonucleotide for detection of SNP TSC0015665
agggtatggatta

SEQ ID NO: 58390 - DNA, 13 bp, Artificial Sequence
  Oligonucleotide for detection of SNP TSC0015665
taatccataccct

SEQ ID NO: 58391 - DNA, 13 bp, Artificial Sequence
  Oligonucleotide for detection of SNP TSC0015665
agggtagggatta

SEQ ID NO: 58392 - DNA, 13 bp, Artificial Sequence
  Oligonucleotide for detection of SNP TSC0015665
taatccctaccct

SEQ ID NO: 58393 - DNA, 13 bp, Artificial Sequence
  Oligonucleotide for detection of SNP TSC0015665
agggtacggatta

SEQ ID NO: 58394 - DNA, 13 bp, Artificial Sequence
  Oligonucleotide for detection of SNP TSC0015665
taatccgtaccct

SEQ ID NO: 58395 - DNA, 13 bp, Artificial Sequence
  Oligonucleotide for detection of SNP TSC0015665
tggtttgtgtttt

SEQ ID NO: 58396 - DNA, 13 bp, Artificial Sequence
  Oligonucleotide for detection of SNP TSC0015665
aaaacacaaacca

SEQ ID NO: 58397 - DNA, 13 bp, Artificial Sequence
  Oligonucleotide for detection of SNP TSC0015665
tggtttttgtttt

SEQ ID NO: 58398 - DNA, 13 bp, Artificial Sequence
  Oligonucleotide for detection of SNP TSC0015665
aaaacaaaaacca

SEQ ID NO: 58399 - DNA, 13 bp, Artificial Sequence
  Oligonucleotide for detection of SNP TSC0015665
tggttcgtgtttt

SEQ ID NO: 58400 - DNA, 13 bp, Artificial Sequence
  Oligonucleotide for detection of SNP TSC0015665
aaaacacgaacca

SEQ ID NO: 58401 - DNA, 13 bp, Artificial Sequence
  Oligonucleotide for detection of SNP TSC0015666
attgtaatttaga

SEQ ID NO: 58402 - DNA, 13 bp, Artificial Sequence
  Oligonucleotide for detection of SNP TSC0015666
tctaaattacaat

SEQ ID NO: 58403 - DNA, 13 bp, Artificial Sequence
  Oligonucleotide for detection of SNP TSC0015666
attgtagtttaga

SEQ ID NO: 58404 - DNA, 13 bp, Artificial Sequence
  Oligonucleotide for detection of SNP TSC0015666
tctaaactacaat

SEQ ID NO: 58405 - DNA, 13 bp, Artificial Sequence
  Oligonucleotide for detection of SNP TSC0015668
gagaaagtatttt

SEQ ID NO: 58406 - DNA, 13 bp, Artificial Sequence
  Oligonucleotide for detection of SNP TSC0015668
aaaatactttctc

SEQ ID NO: 58407 - DNA, 13 bp, Artificial Sequence
  Oligonucleotide for detection of SNP TSC0015668
gagaaaatatttt

SEQ ID NO: 58408 - DNA, 13 bp, Artificial Sequence
  Oligonucleotide for detection of SNP TSC0015668
aaaatattttctc

SEQ ID NO: 58409 - DNA, 13 bp, Artificial Sequence
  Oligonucleotide for detection of SNP TSC0015673
atttatattaagg

SEQ ID NO: 58410 - DNA, 13 bp, Artificial Sequence
  Oligonucleotide for detection of SNP TSC0015673
ccttaatataaat

SEQ ID NO: 58411 - DNA, 13 bp, Artificial Sequence
  Oligonucleotide for detection of SNP TSC0015673
atttatgttaagg

SEQ ID NO: 58412 - DNA, 13 bp, Artificial Sequence
  Oligonucleotide for detection of SNP TSC0015673
ccttaacataaat

SEQ ID NO: 58413 - DNA, 13 bp, Artificial Sequence
  Oligonucleotide for detection of SNP TSC0015673
atttacgttaagg

SEQ ID NO: 58414 - DNA, 13 bp, Artificial Sequence
  Oligonucleotide for detection of SNP TSC0015673
ccttaacgtaaat

SEQ ID NO: 58415 - DNA, 13 bp, Artificial Sequence
  Oligonucleotide for detection of SNP TSC0015675
tttgatagattty

SEQ ID NO: 58416 - DNA, 13 bp, Artificial Sequence
  Oligonucleotide for detection of SNP TSC0015675
raaatctatcaaa

SEQ ID NO: 58417 - DNA, 13 bp, Artificial Sequence
  Oligonucleotide for detection of SNP TSC0015675
tttgatggattty

SEQ ID NO: 58418 - DNA, 13 bp, Artificial Sequence
  Oligonucleotide for detection of SNP TSC0015675
raaatccatcaaa

SEQ ID NO: 58419 - DNA, 13 bp, Artificial Sequence
  Oligonucleotide for detection of SNP TSC0015678
gttattatgttty

SEQ ID NO: 58420 - DNA, 13 bp, Artificial Sequence
  Oligonucleotide for detection of SNP TSC0015678
raaacataataac

SEQ ID NO: 58421 - DNA, 13 bp, Artificial Sequence
  Oligonucleotide for detection of SNP TSC0015678
gttattgtgttty

SEQ ID NO: 58422 - DNA, 13 bp, Artificial Sequence
  Oligonucleotide for detection of SNP TSC0015678
raaacacaataac

SEQ ID NO: 58423 - DNA, 13 bp, Artificial Sequence
  Oligonucleotide for detection of SNP TSC0015678
gttattacgttty

SEQ ID NO: 58424 - DNA, 13 bp, Artificial Sequence
  Oligonucleotide for detection of SNP TSC0015678
raaacgtaataac

SEQ ID NO: 58425 - DNA, 13 bp, Artificial Sequence
  Oligonucleotide for detection of SNP TSC0015678
gttatcgtgttty

SEQ ID NO: 58426 - DNA, 13 bp, Artificial Sequence
  Oligonucleotide for detection of SNP TSC0015678
raaacacgataac

SEQ ID NO: 58427 - DNA, 13 bp, Artificial Sequence
  Oligonucleotide for detection of SNP TSC0015678
gttattgcgttty

SEQ ID NO: 58428 - DNA, 13 bp, Artificial Sequence
  Oligonucleotide for detection of SNP TSC0015678
raaacgcaataac

SEQ ID NO: 58429 - DNA, 13 bp, Artificial Sequence
  Oligonucleotide for detection of SNP TSC0015678
gttatcgcgttty

SEQ ID NO: 58430 - DNA, 13 bp, Artificial Sequence
  Oligonucleotide for detection of SNP TSC0015678
raaacgcgataac

SEQ ID NO: 58431 - DNA, 13 bp, Artificial Sequence
  Oligonucleotide for detection of SNP TSC0015678
gaggtgtggtggy

SEQ ID NO: 58432 - DNA, 13 bp, Artificial Sequence
  Oligonucleotide for detection of SNP TSC0015678
rccaccacacctc

SEQ ID NO: 58433 - DNA, 13 bp, Artificial Sequence
  Oligonucleotide for detection of SNP TSC0015678
gaggcgtggtggy

SEQ ID NO: 58434 - DNA, 13 bp, Artificial Sequence
  Oligonucleotide for detection of SNP TSC0015678
rccaccacgcctc

SEQ ID NO: 58435 - DNA, 13 bp, Artificial Sequence
  Oligonucleotide for detection of SNP TSC0015678
gaggtgcggtggy

SEQ ID NO: 58436 - DNA, 13 bp, Artificial Sequence
  Oligonucleotide for detection of SNP TSC0015678
rccaccgcacctc

SEQ ID NO: 58437 - DNA, 13 bp, Artificial Sequence
  Oligonucleotide for detection of SNP TSC0015678
gaggcgcggtggy

SEQ ID NO: 58438 - DNA, 13 bp, Artificial Sequence
  Oligonucleotide for detection of SNP TSC0015678
rccaccgcgcctc

SEQ ID NO: 58439 - DNA, 13 bp, Artificial Sequence
  Oligonucleotide for detection of SNP TSC0015680
tttattgtttaaa

SEQ ID NO: 58440 - DNA, 13 bp, Artificial Sequence
  Oligonucleotide for detection of SNP TSC0015680
tttaaacaataaa

SEQ ID NO: 58441 - DNA, 13 bp, Artificial Sequence
  Oligonucleotide for detection of SNP TSC0015680
tttattttttaaa

SEQ ID NO: 58442 - DNA, 13 bp, Artificial Sequence
  Oligonucleotide for detection of SNP TSC0015680
tttaaaaaataaa

SEQ ID NO: 58443 - DNA, 13 bp, Artificial Sequence
  Oligonucleotide for detection of SNP TSC0015680
tttatcgtttaaa

SEQ ID NO: 58444 - DNA, 13 bp, Artificial Sequence
  Oligonucleotide for detection of SNP TSC0015680
tttaaacgataaa

SEQ ID NO: 58445 - DNA, 13 bp, Artificial Sequence
  Oligonucleotide for detection of SNP TSC0015680
tttagatggtgaa

SEQ ID NO: 58446 - DNA, 13 bp, Artificial Sequence
  Oligonucleotide for detection of SNP TSC0015680
ttcaccatctaaa

SEQ ID NO: 58447 - DNA, 13 bp, Artificial Sequence
  Oligonucleotide for detection of SNP TSC0015680
tttagaaggtgaa

SEQ ID NO: 58448 - DNA, 13 bp, Artificial Sequence
  Oligonucleotide for detection of SNP TSC0015680
ttcaccttctaaa

SEQ ID NO: 58449 - DNA, 13 bp, Artificial Sequence
  Oligonucleotide for detection of SNP TSC0015680
tttagacggtgaa

SEQ ID NO: 58450 - DNA, 13 bp, Artificial Sequence
  Oligonucleotide for detection of SNP TSC0015680
ttcaccgtctaaa

SEQ ID NO: 58451 - DNA, 13 bp, Artificial Sequence
  Oligonucleotide for detection of SNP TSC0015681
ttgagaattatay

SEQ ID NO: 58452 - DNA, 13 bp, Artificial Sequence
  Oligonucleotide for detection of SNP TSC0015681
rtataattctcaa

SEQ ID NO: 58453 - DNA, 13 bp, Artificial Sequence
  Oligonucleotide for detection of SNP TSC0015681
ttgagagttatay

SEQ ID NO: 58454 - DNA, 13 bp, Artificial Sequence
  Oligonucleotide for detection of SNP TSC0015681
rtataactctcaa

SEQ ID NO: 58455 - DNA, 13 bp, Artificial Sequence
  Oligonucleotide for detection of SNP TSC0015683
ttttttaagttty

SEQ ID NO: 58456 - DNA, 13 bp, Artificial Sequence
  Oligonucleotide for detection of SNP TSC0015683
raaacttaaaaaa

SEQ ID NO: 58457 - DNA, 13 bp, Artificial Sequence
  Oligonucleotide for detection of SNP TSC0015690
ttgtttgggttat

SEQ ID NO: 58458 - DNA, 13 bp, Artificial Sequence
  Oligonucleotide for detection of SNP TSC0015690
ataacccaaacaa

SEQ ID NO: 58459 - DNA, 13 bp, Artificial Sequence
  Oligonucleotide for detection of SNP TSC0015690
ttgtttaggttat

SEQ ID NO: 58460 - DNA, 13 bp, Artificial Sequence
  Oligonucleotide for detection of SNP TSC0015690
ataacctaaacaa

SEQ ID NO: 58461 - DNA, 13 bp, Artificial Sequence
  Oligonucleotide for detection of SNP TSC0015691
tgagagagtttty

SEQ ID NO: 58462 - DNA, 13 bp, Artificial Sequence
  Oligonucleotide for detection of SNP TSC0015691
raaaactctctca

SEQ ID NO: 58463 - DNA, 13 bp, Artificial Sequence
  Oligonucleotide for detection of SNP TSC0015691
tgagagtgtttty

SEQ ID NO: 58464 - DNA, 13 bp, Artificial Sequence
  Oligonucleotide for detection of SNP TSC0015691
raaaacactctca

SEQ ID NO: 58465 - DNA, 13 bp, Artificial Sequence
  Oligonucleotide for detection of SNP TSC0015691
tgagagcgtttty

SEQ ID NO: 58466 - DNA, 13 bp, Artificial Sequence
  Oligonucleotide for detection of SNP TSC0015691
raaaacgctctca

SEQ ID NO: 58467 - DNA, 13 bp, Artificial Sequence
  Oligonucleotide for detection of SNP TSC0015691
gggggttttttta

SEQ ID NO: 58468 - DNA, 13 bp, Artificial Sequence
  Oligonucleotide for detection of SNP TSC0015691
taaaaaaaccccc

SEQ ID NO: 58469 - DNA, 13 bp, Artificial Sequence
  Oligonucleotide for detection of SNP TSC0015692
gaaattgtttttg

SEQ ID NO: 58470 - DNA, 13 bp, Artificial Sequence
  Oligonucleotide for detection of SNP TSC0015692
caaaaacaatttc

SEQ ID NO: 58471 - DNA, 13 bp, Artificial Sequence
  Oligonucleotide for detection of SNP TSC0015692
gaaattttttttg

SEQ ID NO: 58472 - DNA, 13 bp, Artificial Sequence
  Oligonucleotide for detection of SNP TSC0015692
caaaaaaaatttc

SEQ ID NO: 58473 - DNA, 13 bp, Artificial Sequence
  Oligonucleotide for detection of SNP TSC0015692
gaaatcgtttttg

SEQ ID NO: 58474 - DNA, 13 bp, Artificial Sequence
  Oligonucleotide for detection of SNP TSC0015692
caaaaacgatttc

SEQ ID NO: 58475 - DNA, 13 bp, Artificial Sequence
  Oligonucleotide for detection of SNP TSC0015692
tagggatggttty

SEQ ID NO: 58476 - DNA, 13 bp, Artificial Sequence
  Oligonucleotide for detection of SNP TSC0015692
raaaccatcccta

SEQ ID NO: 58477 - DNA, 13 bp, Artificial Sequence
  Oligonucleotide for detection of SNP TSC0015692
tagggaaggttty

SEQ ID NO: 58478 - DNA, 13 bp, Artificial Sequence
  Oligonucleotide for detection of SNP TSC0015692
raaaccttcccta

SEQ ID NO: 58479 - DNA, 13 bp, Artificial Sequence
  Oligonucleotide for detection of SNP TSC0015692
tagggacggttty

SEQ ID NO: 58480 - DNA, 13 bp, Artificial Sequence
  Oligonucleotide for detection of SNP TSC0015692
raaaccgtcccta

SEQ ID NO: 58481 - DNA, 13 bp, Artificial Sequence
  Oligonucleotide for detection of SNP TSC0015693
ttgagtattggaa

SEQ ID NO: 58482 - DNA, 13 bp, Artificial Sequence
  Oligonucleotide for detection of SNP TSC0015693
ttccaatactcaa

SEQ ID NO: 58483 - DNA, 13 bp, Artificial Sequence
  Oligonucleotide for detection of SNP TSC0015693
ttgagtgttggaa

SEQ ID NO: 58484 - DNA, 13 bp, Artificial Sequence
  Oligonucleotide for detection of SNP TSC0015693
ttccaacactcaa

SEQ ID NO: 58485 - DNA, 13 bp, Artificial Sequence
  Oligonucleotide for detection of SNP TSC0015696
aatgaggttgtgy

SEQ ID NO: 58486 - DNA, 13 bp, Artificial Sequence
  Oligonucleotide for detection of SNP TSC0015696
rcacaacctcatt

SEQ ID NO: 58487 - DNA, 13 bp, Artificial Sequence
  Oligonucleotide for detection of SNP TSC0015696
aatgagattgtgy

SEQ ID NO: 58488 - DNA, 13 bp, Artificial Sequence
  Oligonucleotide for detection of SNP TSC0015696
rcacaatctcatt

SEQ ID NO: 58489 - DNA, 13 bp, Artificial Sequence
  Oligonucleotide for detection of SNP TSC0015696
aacgaggttgtgy

SEQ ID NO: 58490 - DNA, 13 bp, Artificial Sequence
  Oligonucleotide for detection of SNP TSC0015696
rcacaacctcgtt

SEQ ID NO: 58491 - DNA, 13 bp, Artificial Sequence
  Oligonucleotide for detection of SNP TSC0015696
aacgagattgtgy

SEQ ID NO: 58492 - DNA, 13 bp, Artificial Sequence
  Oligonucleotide for detection of SNP TSC0015696
rcacaatctcgtt

SEQ ID NO: 58493 - DNA, 13 bp, Artificial Sequence
  Oligonucleotide for detection of SNP TSC0015696
aatgaggtcgtgy

SEQ ID NO: 58494 - DNA, 13 bp, Artificial Sequence
  Oligonucleotide for detection of SNP TSC0015696
rcacgacctcatt

SEQ ID NO: 58495 - DNA, 13 bp, Artificial Sequence
  Oligonucleotide for detection of SNP TSC0015696
aatgagatcgtgy

SEQ ID NO: 58496 - DNA, 13 bp, Artificial Sequence
  Oligonucleotide for detection of SNP TSC0015696
rcacgatctcatt

SEQ ID NO: 58497 - DNA, 13 bp, Artificial Sequence
  Oligonucleotide for detection of SNP TSC0015696
aacgaggtcgtgy

SEQ ID NO: 58498 - DNA, 13 bp, Artificial Sequence
  Oligonucleotide for detection of SNP TSC0015696
rcacgacctcgtt

SEQ ID NO: 58499 - DNA, 13 bp, Artificial Sequence
  Oligonucleotide for detection of SNP TSC0015696
aacgagatcgtgy

SEQ ID NO: 58500 - DNA, 13 bp, Artificial Sequence
  Oligonucleotide for detection of SNP TSC0015696
rcacgatctcgtt

SEQ ID NO: 58501 - DNA, 13 bp, Artificial Sequence
  Oligonucleotide for detection of SNP TSC0015700
gttggatgtggtg

SEQ ID NO: 58502 - DNA, 13 bp, Artificial Sequence
  Oligonucleotide for detection of SNP TSC0015700
caccacatccaac

SEQ ID NO: 58503 - DNA, 13 bp, Artificial Sequence
  Oligonucleotide for detection of SNP TSC0015700
gttggacgtggtg

SEQ ID NO: 58504 - DNA, 13 bp, Artificial Sequence
  Oligonucleotide for detection of SNP TSC0015700
caccacgtccaac

SEQ ID NO: 58505 - DNA, 13 bp, Artificial Sequence
  Oligonucleotide for detection of SNP TSC0015701
gtatgtgttatta

SEQ ID NO: 58506 - DNA, 13 bp, Artificial Sequence
  Oligonucleotide for detection of SNP TSC0015701
taataacacatac

SEQ ID NO: 58507 - DNA, 13 bp, Artificial Sequence
  Oligonucleotide for detection of SNP TSC0015701
gtatgtattatta

SEQ ID NO: 58508 - DNA, 13 bp, Artificial Sequence
  Oligonucleotide for detection of SNP TSC0015701
taataatacatac

SEQ ID NO: 58509 - DNA, 13 bp, Artificial Sequence
  Oligonucleotide for detection of SNP TSC0015702
atttagaattaay

SEQ ID NO: 58510 - DNA, 13 bp, Artificial Sequence
  Oligonucleotide for detection of SNP TSC0015702
rttaattctaaat

SEQ ID NO: 58511 - DNA, 13 bp, Artificial Sequence
  Oligonucleotide for detection of SNP TSC0015702
atttaggattaay

SEQ ID NO: 58512 - DNA, 13 bp, Artificial Sequence
  Oligonucleotide for detection of SNP TSC0015702
rttaatcctaaat

SEQ ID NO: 58513 - DNA, 13 bp, Artificial Sequence
  Oligonucleotide for detection of SNP TSC0015703
gtttatatgttag

SEQ ID NO: 58514 - DNA, 13 bp, Artificial Sequence
  Oligonucleotide for detection of SNP TSC0015703
ctaacatataaac

SEQ ID NO: 58515 - DNA, 13 bp, Artificial Sequence
  Oligonucleotide for detection of SNP TSC0015703
gtttatgtgttag

SEQ ID NO: 58516 - DNA, 13 bp, Artificial Sequence
  Oligonucleotide for detection of SNP TSC0015703
ctaacacataaac

SEQ ID NO: 58517 - DNA, 13 bp, Artificial Sequence
  Oligonucleotide for detection of SNP TSC0015703
gtttacgtgttag

SEQ ID NO: 58518 - DNA, 13 bp, Artificial Sequence
  Oligonucleotide for detection of SNP TSC0015703
ctaacacgtaaac

SEQ ID NO: 58519 - DNA, 13 bp, Artificial Sequence
  Oligonucleotide for detection of SNP TSC0015703
ttgatatgtgagy

SEQ ID NO: 58520 - DNA, 13 bp, Artificial Sequence
  Oligonucleotide for detection of SNP TSC0015703
rctcacatatcaa

SEQ ID NO: 58521 - DNA, 13 bp, Artificial Sequence
  Oligonucleotide for detection of SNP TSC0015703
ttgatacgtgagy

SEQ ID NO: 58522 - DNA, 13 bp, Artificial Sequence
  Oligonucleotide for detection of SNP TSC0015703
rctcacgtatcaa

SEQ ID NO: 58523 - DNA, 13 bp, Artificial Sequence
  Oligonucleotide for detection of SNP TSC0015704
gaaaatgattata

SEQ ID NO: 58524 - DNA, 13 bp, Artificial Sequence
  Oligonucleotide for detection of SNP TSC0015704
tataatcattttc

SEQ ID NO: 58525 - DNA, 13 bp, Artificial Sequence
  Oligonucleotide for detection of SNP TSC0015704
gaaaataattata

SEQ ID NO: 58526 - DNA, 13 bp, Artificial Sequence
  Oligonucleotide for detection of SNP TSC0015704
tataattattttc

SEQ ID NO: 58527 - DNA, 13 bp, Artificial Sequence
  Oligonucleotide for detection of SNP TSC0015704
gaaaacgattata

SEQ ID NO: 58528 - DNA, 13 bp, Artificial Sequence
  Oligonucleotide for detection of SNP TSC0015704
tataatcgttttc

SEQ ID NO: 58529 - DNA, 13 bp, Artificial Sequence
  Oligonucleotide for detection of SNP TSC0015705
atatttgtaagaa

SEQ ID NO: 58530 - DNA, 13 bp, Artificial Sequence
  Oligonucleotide for detection of SNP TSC0015705
ttcttacaaatat

SEQ ID NO: 58531 - DNA, 13 bp, Artificial Sequence
  Oligonucleotide for detection of SNP TSC0015705
atatttataagaa

SEQ ID NO: 58532 - DNA, 13 bp, Artificial Sequence
  Oligonucleotide for detection of SNP TSC0015705
ttcttataaatat

SEQ ID NO: 58533 - DNA, 13 bp, Artificial Sequence
  Oligonucleotide for detection of SNP TSC0015706
tttttgtagtgga

SEQ ID NO: 58534 - DNA, 13 bp, Artificial Sequence
  Oligonucleotide for detection of SNP TSC0015706
tccactacaaaaa

SEQ ID NO: 58535 - DNA, 13 bp, Artificial Sequence
  Oligonucleotide for detection of SNP TSC0015706
tttttggagtgga

SEQ ID NO: 58536 - DNA, 13 bp, Artificial Sequence
  Oligonucleotide for detection of SNP TSC0015706
tccactccaaaaa

SEQ ID NO: 58537 - DNA, 13 bp, Artificial Sequence
  Oligonucleotide for detection of SNP TSC0015706
tttattgtagaga

SEQ ID NO: 58538 - DNA, 13 bp, Artificial Sequence
  Oligonucleotide for detection of SNP TSC0015706
tctctacaataaa

SEQ ID NO: 58539 - DNA, 13 bp, Artificial Sequence
  Oligonucleotide for detection of SNP TSC0015706
tttattttagaga

SEQ ID NO: 58540 - DNA, 13 bp, Artificial Sequence
  Oligonucleotide for detection of SNP TSC0015706
tctctaaaataaa

SEQ ID NO: 58541 - DNA, 13 bp, Artificial Sequence
  Oligonucleotide for detection of SNP TSC0015707
tgagaaatatgtg

SEQ ID NO: 58542 - DNA, 13 bp, Artificial Sequence
  Oligonucleotide for detection of SNP TSC0015707
cacatatttctca

SEQ ID NO: 58543 - DNA, 13 bp, Artificial Sequence
  Oligonucleotide for detection of SNP TSC0015707
tgagaattatgtg

SEQ ID NO: 58544 - DNA, 13 bp, Artificial Sequence
  Oligonucleotide for detection of SNP TSC0015707
cacataattctca

SEQ ID NO: 58545 - DNA, 13 bp, Artificial Sequence
  Oligonucleotide for detection of SNP TSC0015707
tgagaaatacgtg

SEQ ID NO: 58546 - DNA, 13 bp, Artificial Sequence
  Oligonucleotide for detection of SNP TSC0015707
cacgtatttctca

SEQ ID NO: 58547 - DNA, 13 bp, Artificial Sequence
  Oligonucleotide for detection of SNP TSC0015707
tgagaattacgtg

SEQ ID NO: 58548 - DNA, 13 bp, Artificial Sequence
  Oligonucleotide for detection of SNP TSC0015707
cacgtaattctca

SEQ ID NO: 58549 - DNA, 13 bp, Artificial Sequence
  Oligonucleotide for detection of SNP TSC0015707
tatgtgtttttta

SEQ ID NO: 58550 - DNA, 13 bp, Artificial Sequence
  Oligonucleotide for detection of SNP TSC0015707
taaaaaacacata

SEQ ID NO: 58551 - DNA, 13 bp, Artificial Sequence
  Oligonucleotide for detection of SNP TSC0015707
tatgtggttttta

SEQ ID NO: 58552 - DNA, 13 bp, Artificial Sequence
  Oligonucleotide for detection of SNP TSC0015707
taaaaaccacata

SEQ ID NO: 58553 - DNA, 13 bp, Artificial Sequence
  Oligonucleotide for detection of SNP TSC0015707
tacgtgtttttta

SEQ ID NO: 58554 - DNA, 13 bp, Artificial Sequence
  Oligonucleotide for detection of SNP TSC0015707
taaaaaacacgta

SEQ ID NO: 58555 - DNA, 13 bp, Artificial Sequence
  Oligonucleotide for detection of SNP TSC0015707
tacgtggttttta

SEQ ID NO: 58556 - DNA, 13 bp, Artificial Sequence
  Oligonucleotide for detection of SNP TSC0015707
taaaaaccacgta

SEQ ID NO: 58557 - DNA, 13 bp, Artificial Sequence
  Oligonucleotide for detection of SNP TSC0015708
gtatggaggttay

SEQ ID NO: 58558 - DNA, 13 bp, Artificial Sequence
  Oligonucleotide for detection of SNP TSC0015708
rtaacctccatac

SEQ ID NO: 58559 - DNA, 13 bp, Artificial Sequence
  Oligonucleotide for detection of SNP TSC0015708
gtatggtggttay

SEQ ID NO: 58560 - DNA, 13 bp, Artificial Sequence
  Oligonucleotide for detection of SNP TSC0015708
rtaaccaccatac

SEQ ID NO: 58561 - DNA, 13 bp, Artificial Sequence
  Oligonucleotide for detection of SNP TSC0015708
gtggtttttatgy

SEQ ID NO: 58562 - DNA, 13 bp, Artificial Sequence
  Oligonucleotide for detection of SNP TSC0015708
rcataaaaaccac

SEQ ID NO: 58563 - DNA, 13 bp, Artificial Sequence
  Oligonucleotide for detection of SNP TSC0015708
gtggttattatgy

SEQ ID NO: 58564 - DNA, 13 bp, Artificial Sequence
  Oligonucleotide for detection of SNP TSC0015708
rcataataaccac

SEQ ID NO: 58565 - DNA, 13 bp, Artificial Sequence
  Oligonucleotide for detection of SNP TSC0015709
ttttggtgttaty

SEQ ID NO: 58566 - DNA, 13 bp, Artificial Sequence
  Oligonucleotide for detection of SNP TSC0015709
rataacaccaaaa

SEQ ID NO: 58567 - DNA, 13 bp, Artificial Sequence
  Oligonucleotide for detection of SNP TSC0015709
ttttggcgttaty

SEQ ID NO: 58568 - DNA, 13 bp, Artificial Sequence
  Oligonucleotide for detection of SNP TSC0015709
rataacgccaaaa

SEQ ID NO: 58569 - DNA, 13 bp, Artificial Sequence
  Oligonucleotide for detection of SNP TSC0015709
ggtggtgttaggg

SEQ ID NO: 58570 - DNA, 13 bp, Artificial Sequence
  Oligonucleotide for detection of SNP TSC0015709
ccctaacaccacc

SEQ ID NO: 58571 - DNA, 13 bp, Artificial Sequence
  Oligonucleotide for detection of SNP TSC0015709
ggtggtattaggg

SEQ ID NO: 58572 - DNA, 13 bp, Artificial Sequence
  Oligonucleotide for detection of SNP TSC0015709
ccctaataccacc

SEQ ID NO: 58573 - DNA, 13 bp, Artificial Sequence
  Oligonucleotide for detection of SNP TSC0015709
ggtggcgttaggg

SEQ ID NO: 58574 - DNA, 13 bp, Artificial Sequence
  Oligonucleotide for detection of SNP TSC0015709
ccctaacgccacc

SEQ ID NO: 58575 - DNA, 13 bp, Artificial Sequence
  Oligonucleotide for detection of SNP TSC0015710
ttattttgttttg

SEQ ID NO: 58576 - DNA, 13 bp, Artificial Sequence
  Oligonucleotide for detection of SNP TSC0015710
caaaacaaaataa

SEQ ID NO: 58577 - DNA, 13 bp, Artificial Sequence
  Oligonucleotide for detection of SNP TSC0015710
ttatttggttttg

SEQ ID NO: 58578 - DNA, 13 bp, Artificial Sequence
  Oligonucleotide for detection of SNP TSC0015710
caaaaccaaataa

SEQ ID NO: 58579 - DNA, 13 bp, Artificial Sequence
  Oligonucleotide for detection of SNP TSC0015710
ttatttcgttttg

SEQ ID NO: 58580 - DNA, 13 bp, Artificial Sequence
  Oligonucleotide for detection of SNP TSC0015710
caaaacgaaataa

SEQ ID NO: 58581 - DNA, 13 bp, Artificial Sequence
  Oligonucleotide for detection of SNP TSC0015710
ttatttggtttcg

SEQ ID NO: 58582 - DNA, 13 bp, Artificial Sequence
  Oligonucleotide for detection of SNP TSC0015710
cgaaaccaaataa

SEQ ID NO: 58583 - DNA, 13 bp, Artificial Sequence
  Oligonucleotide for detection of SNP TSC0015710
ttattttgtttcg

SEQ ID NO: 58584 - DNA, 13 bp, Artificial Sequence
  Oligonucleotide for detection of SNP TSC0015710
cgaaacaaaataa

SEQ ID NO: 58585 - DNA, 13 bp, Artificial Sequence
  Oligonucleotide for detection of SNP TSC0015710
ttatttcgtttcg

SEQ ID NO: 58586 - DNA, 13 bp, Artificial Sequence
  Oligonucleotide for detection of SNP TSC0015710
cgaaacgaaataa

SEQ ID NO: 58587 - DNA, 13 bp, Artificial Sequence
  Oligonucleotide for detection of SNP TSC0015710
tggggtgaggtga

SEQ ID NO: 58588 - DNA, 13 bp, Artificial Sequence
  Oligonucleotide for detection of SNP TSC0015710
tcacctcacccca

SEQ ID NO: 58589 - DNA, 13 bp, Artificial Sequence
  Oligonucleotide for detection of SNP TSC0015710
tggggttaggtga

SEQ ID NO: 58590 - DNA, 13 bp, Artificial Sequence
  Oligonucleotide for detection of SNP TSC0015710
tcacctaacccca

SEQ ID NO: 58591 - DNA, 13 bp, Artificial Sequence
  Oligonucleotide for detection of SNP TSC0015710
cggggtgaggtga

SEQ ID NO: 58592 - DNA, 13 bp, Artificial Sequence
  Oligonucleotide for detection of SNP TSC0015710
tcacctcaccccg

SEQ ID NO: 58593 - DNA, 13 bp, Artificial Sequence
  Oligonucleotide for detection of SNP TSC0015710
cggggttaggtga

SEQ ID NO: 58594 - DNA, 13 bp, Artificial Sequence
  Oligonucleotide for detection of SNP TSC0015710
tcacctaaccccg

SEQ ID NO: 58595 - DNA, 13 bp, Artificial Sequence
  Oligonucleotide for detection of SNP TSC0015710
tggggcgaggtga

SEQ ID NO: 58596 - DNA, 13 bp, Artificial Sequence
  Oligonucleotide for detection of SNP TSC0015710
tcacctcgcccca

SEQ ID NO: 58597 - DNA, 13 bp, Artificial Sequence
  Oligonucleotide for detection of SNP TSC0015710
cggggcgaggtga

SEQ ID NO: 58598 - DNA, 13 bp, Artificial Sequence
  Oligonucleotide for detection of SNP TSC0015710
tcacctcgccccg

SEQ ID NO: 58599 - DNA, 13 bp, Artificial Sequence
  Oligonucleotide for detection of SNP TSC0015711
tttttttgtagta

SEQ ID NO: 58600 - DNA, 13 bp, Artificial Sequence
  Oligonucleotide for detection of SNP TSC0015711
tactacaaaaaaa

SEQ ID NO: 58601 - DNA, 13 bp, Artificial Sequence
  Oligonucleotide for detection of SNP TSC0015711
ttttttcgtagta

SEQ ID NO: 58602 - DNA, 13 bp, Artificial Sequence
  Oligonucleotide for detection of SNP TSC0015711
tactacgaaaaaa

SEQ ID NO: 58603 - DNA, 13 bp, Artificial Sequence
  Oligonucleotide for detection of SNP TSC0015711
tgttgtgggagaa

SEQ ID NO: 58604 - DNA, 13 bp, Artificial Sequence
  Oligonucleotide for detection of SNP TSC0015711
ttctcccacaaca

SEQ ID NO: 58605 - DNA, 13 bp, Artificial Sequence
  Oligonucleotide for detection of SNP TSC0015711
tgttgtaggagaa

SEQ ID NO: 58606 - DNA, 13 bp, Artificial Sequence
  Oligonucleotide for detection of SNP TSC0015711
ttctcctacaaca

SEQ ID NO: 58607 - DNA, 13 bp, Artificial Sequence
  Oligonucleotide for detection of SNP TSC0015711
tgttgcgggagaa

SEQ ID NO: 58608 - DNA, 13 bp, Artificial Sequence
  Oligonucleotide for detection of SNP TSC0015711
ttctcccgcaaca

SEQ ID NO: 58609 - DNA, 13 bp, Artificial Sequence
  Oligonucleotide for detection of SNP TSC0015712
tgtagtattgtga

SEQ ID NO: 58610 - DNA, 13 bp, Artificial Sequence
  Oligonucleotide for detection of SNP TSC0015712
tcacaatactaca

SEQ ID NO: 58611 - DNA, 13 bp, Artificial Sequence
  Oligonucleotide for detection of SNP TSC0015712
tgtagtgttgtga

SEQ ID NO: 58612 - DNA, 13 bp, Artificial Sequence
  Oligonucleotide for detection of SNP TSC0015712
tcacaacactaca

SEQ ID NO: 58613 - DNA, 13 bp, Artificial Sequence
  Oligonucleotide for detection of SNP TSC0015712
cgtagtattgtga

SEQ ID NO: 58614 - DNA, 13 bp, Artificial Sequence
  Oligonucleotide for detection of SNP TSC0015712
tcacaatactacg

SEQ ID NO: 58615 - DNA, 13 bp, Artificial Sequence
  Oligonucleotide for detection of SNP TSC0015712
cgtagtgttgtga

SEQ ID NO: 58616 - DNA, 13 bp, Artificial Sequence
  Oligonucleotide for detection of SNP TSC0015712
tcacaacactacg

SEQ ID NO: 58617 - DNA, 13 bp, Artificial Sequence
  Oligonucleotide for detection of SNP TSC0015712
tgtagcgttgtga

SEQ ID NO: 58618 - DNA, 13 bp, Artificial Sequence
  Oligonucleotide for detection of SNP TSC0015712
tcacaacgctaca

SEQ ID NO: 58619 - DNA, 13 bp, Artificial Sequence
  Oligonucleotide for detection of SNP TSC0015712
cgtagcgttgtga

SEQ ID NO: 58620 - DNA, 13 bp, Artificial Sequence
  Oligonucleotide for detection of SNP TSC0015712
tcacaacgctacg

SEQ ID NO: 58621 - DNA, 13 bp, Artificial Sequence
  Oligonucleotide for detection of SNP TSC0015712
ttatagtgttgtg

SEQ ID NO: 58622 - DNA, 13 bp, Artificial Sequence
  Oligonucleotide for detection of SNP TSC0015712
cacaacactataa

SEQ ID NO: 58623 - DNA, 13 bp, Artificial Sequence
  Oligonucleotide for detection of SNP TSC0015712
ttatagtgttgcg

SEQ ID NO: 58624 - DNA, 13 bp, Artificial Sequence
  Oligonucleotide for detection of SNP TSC0015712
cgcaacactataa

SEQ ID NO: 58625 - DNA, 13 bp, Artificial Sequence
  Oligonucleotide for detection of SNP TSC0015712
ttatagcgttgtg

SEQ ID NO: 58626 - DNA, 13 bp, Artificial Sequence
  Oligonucleotide for detection of SNP TSC0015712
cacaacgctataa

SEQ ID NO: 58627 - DNA, 13 bp, Artificial Sequence
  Oligonucleotide for detection of SNP TSC0015712
ttatagcgttgcg

SEQ ID NO: 58628 - DNA, 13 bp, Artificial Sequence
  Oligonucleotide for detection of SNP TSC0015712
cgcaacgctataa

SEQ ID NO: 58629 - DNA, 13 bp, Artificial Sequence
  Oligonucleotide for detection of SNP TSC0015713
ggaggggatttaa

SEQ ID NO: 58630 - DNA, 13 bp, Artificial Sequence
  Oligonucleotide for detection of SNP TSC0015713
ttaaatcccctcc

SEQ ID NO: 58631 - DNA, 13 bp, Artificial Sequence
  Oligonucleotide for detection of SNP TSC0015713
ggagggtatttaa

SEQ ID NO: 58632 - DNA, 13 bp, Artificial Sequence
  Oligonucleotide for detection of SNP TSC0015713
ttaaataccctcc

SEQ ID NO: 58633 - DNA, 13 bp, Artificial Sequence
  Oligonucleotide for detection of SNP TSC0015713
ttgggttttttty

SEQ ID NO: 58634 - DNA, 13 bp, Artificial Sequence
  Oligonucleotide for detection of SNP TSC0015713
raaaaaaacccaa

SEQ ID NO: 58635 - DNA, 13 bp, Artificial Sequence
  Oligonucleotide for detection of SNP TSC0015713
ttgggtattttty

SEQ ID NO: 58636 - DNA, 13 bp, Artificial Sequence
  Oligonucleotide for detection of SNP TSC0015713
raaaaatacccaa

SEQ ID NO: 58637 - DNA, 13 bp, Artificial Sequence
  Oligonucleotide for detection of SNP TSC0015714
ataaaggtatgag

SEQ ID NO: 58638 - DNA, 13 bp, Artificial Sequence
  Oligonucleotide for detection of SNP TSC0015714
ctcatacctttat

SEQ ID NO: 58639 - DNA, 13 bp, Artificial Sequence
  Oligonucleotide for detection of SNP TSC0015714
ataaagttatgag

SEQ ID NO: 58640 - DNA, 13 bp, Artificial Sequence
  Oligonucleotide for detection of SNP TSC0015714
ctcataactttat

SEQ ID NO: 58641 - DNA, 13 bp, Artificial Sequence
  Oligonucleotide for detection of SNP TSC0015714
ataaaggtacgag

SEQ ID NO: 58642 - DNA, 13 bp, Artificial Sequence
  Oligonucleotide for detection of SNP TSC0015714
ctcgtacctttat

SEQ ID NO: 58643 - DNA, 13 bp, Artificial Sequence
  Oligonucleotide for detection of SNP TSC0015714
ataaagttacgag

SEQ ID NO: 58644 - DNA, 13 bp, Artificial Sequence
  Oligonucleotide for detection of SNP TSC0015714
ctcgtaactttat

SEQ ID NO: 58645 - DNA, 13 bp, Artificial Sequence
  Oligonucleotide for detection of SNP TSC0015714
tttgtatttttat

SEQ ID NO: 58646 - DNA, 13 bp, Artificial Sequence
  Oligonucleotide for detection of SNP TSC0015714
ataaaaatacaaa

SEQ ID NO: 58647 - DNA, 13 bp, Artificial Sequence
  Oligonucleotide for detection of SNP TSC0015714
tttgtaattttat

SEQ ID NO: 58648 - DNA, 13 bp, Artificial Sequence
  Oligonucleotide for detection of SNP TSC0015714
ataaaattacaaa

SEQ ID NO: 58649 - DNA, 13 bp, Artificial Sequence
  Oligonucleotide for detection of SNP TSC0015714
ttcgtatttttat

SEQ ID NO: 58650 - DNA, 13 bp, Artificial Sequence
  Oligonucleotide for detection of SNP TSC0015714
ataaaaatacgaa

SEQ ID NO: 58651 - DNA, 13 bp, Artificial Sequence
  Oligonucleotide for detection of SNP TSC0015714
ttcgtaattttat

SEQ ID NO: 58652 - DNA, 13 bp, Artificial Sequence
  Oligonucleotide for detection of SNP TSC0015714
ataaaattacgaa

SEQ ID NO: 58653 - DNA, 13 bp, Artificial Sequence
  Oligonucleotide for detection of SNP TSC0015719
tgggatgtttgty

SEQ ID NO: 58654 - DNA, 13 bp, Artificial Sequence
  Oligonucleotide for detection of SNP TSC0015719
racaaacatccca

SEQ ID NO: 58655 - DNA, 13 bp, Artificial Sequence
  Oligonucleotide for detection of SNP TSC0015719
tgggatttttgty

SEQ ID NO: 58656 - DNA, 13 bp, Artificial Sequence
  Oligonucleotide for detection of SNP TSC0015719
racaaaaatccca

SEQ ID NO: 58657 - DNA, 13 bp, Artificial Sequence
  Oligonucleotide for detection of SNP TSC0015719
gataagtatttta

SEQ ID NO: 58658 - DNA, 13 bp, Artificial Sequence
  Oligonucleotide for detection of SNP TSC0015719
taaaatacttatc

SEQ ID NO: 58659 - DNA, 13 bp, Artificial Sequence
  Oligonucleotide for detection of SNP TSC0015719
gataagaatttta

SEQ ID NO: 58660 - DNA, 13 bp, Artificial Sequence
  Oligonucleotide for detection of SNP TSC0015719
taaaattcttatc

SEQ ID NO: 58661 - DNA, 13 bp, Artificial Sequence
  Oligonucleotide for detection of SNP TSC0015720
tttgttataaaat

SEQ ID NO: 58662 - DNA, 13 bp, Artificial Sequence
  Oligonucleotide for detection of SNP TSC0015720
attttataacaaa

SEQ ID NO: 58663 - DNA, 13 bp, Artificial Sequence
  Oligonucleotide for detection of SNP TSC0015720
tttgttgtaaaat

SEQ ID NO: 58664 - DNA, 13 bp, Artificial Sequence
  Oligonucleotide for detection of SNP TSC0015720
attttacaacaaa

SEQ ID NO: 58665 - DNA, 13 bp, Artificial Sequence
  Oligonucleotide for detection of SNP TSC0015720
tttgtcgtaaaat

SEQ ID NO: 58666 - DNA, 13 bp, Artificial Sequence
  Oligonucleotide for detection of SNP TSC0015720
attttacgacaaa

SEQ ID NO: 58667 - DNA, 13 bp, Artificial Sequence
  Oligonucleotide for detection of SNP TSC0015720
attttatgataag

SEQ ID NO: 58668 - DNA, 13 bp, Artificial Sequence
  Oligonucleotide for detection of SNP TSC0015720
cttatcataaaat

SEQ ID NO: 58669 - DNA, 13 bp, Artificial Sequence
  Oligonucleotide for detection of SNP TSC0015720
attttacgataag

SEQ ID NO: 58670 - DNA, 13 bp, Artificial Sequence
  Oligonucleotide for detection of SNP TSC0015720
cttatcgtaaaat

SEQ ID NO: 58671 - DNA, 13 bp, Artificial Sequence
  Oligonucleotide for detection of SNP TSC0015721
ttggtggttttty

SEQ ID NO: 58672 - DNA, 13 bp, Artificial Sequence
  Oligonucleotide for detection of SNP TSC0015721
raaaaaccaccaa

SEQ ID NO: 58673 - DNA, 13 bp, Artificial Sequence
  Oligonucleotide for detection of SNP TSC0015721
ttggtgattttty

SEQ ID NO: 58674 - DNA, 13 bp, Artificial Sequence
  Oligonucleotide for detection of SNP TSC0015721
raaaaatcaccaa

SEQ ID NO: 58675 - DNA, 13 bp, Artificial Sequence
  Oligonucleotide for detection of SNP TSC0015721
ttggcggttttty

SEQ ID NO: 58676 - DNA, 13 bp, Artificial Sequence
  Oligonucleotide for detection of SNP TSC0015721
raaaaaccgccaa

SEQ ID NO: 58677 - DNA, 13 bp, Artificial Sequence
  Oligonucleotide for detection of SNP TSC0015721
ttggcgattttty

SEQ ID NO: 58678 - DNA, 13 bp, Artificial Sequence
  Oligonucleotide for detection of SNP TSC0015721
raaaaatcgccaa

SEQ ID NO: 58679 - DNA, 13 bp, Artificial Sequence
  Oligonucleotide for detection of SNP TSC0015722
gtttaggaagttg

SEQ ID NO: 58680 - DNA, 13 bp, Artificial Sequence
  Oligonucleotide for detection of SNP TSC0015722
caacttcctaaac

SEQ ID NO: 58681 - DNA, 13 bp, Artificial Sequence
  Oligonucleotide for detection of SNP TSC0015722
gtttagaaagttg

SEQ ID NO: 58682 - DNA, 13 bp, Artificial Sequence
  Oligonucleotide for detection of SNP TSC0015722
caactttctaaac

SEQ ID NO: 58683 - DNA, 13 bp, Artificial Sequence
  Oligonucleotide for detection of SNP TSC0015723
gtttaattaatgt

SEQ ID NO: 58684 - DNA, 13 bp, Artificial Sequence
  Oligonucleotide for detection of SNP TSC0015723
acattaattaaac

SEQ ID NO: 58685 - DNA, 13 bp, Artificial Sequence
  Oligonucleotide for detection of SNP TSC0015723
gtttaagtaatgt

SEQ ID NO: 58686 - DNA, 13 bp, Artificial Sequence
  Oligonucleotide for detection of SNP TSC0015723
acattacttaaac

SEQ ID NO: 58687 - DNA, 13 bp, Artificial Sequence
  Oligonucleotide for detection of SNP TSC0015723
atattagttaggy

SEQ ID NO: 58688 - DNA, 13 bp, Artificial Sequence
  Oligonucleotide for detection of SNP TSC0015723
rcctaactaatat

SEQ ID NO: 58689 - DNA, 13 bp, Artificial Sequence
  Oligonucleotide for detection of SNP TSC0015723
atattatttaggy

SEQ ID NO: 58690 - DNA, 13 bp, Artificial Sequence
  Oligonucleotide for detection of SNP TSC0015723
rcctaaataatat

SEQ ID NO: 58691 - DNA, 13 bp, Artificial Sequence
  Oligonucleotide for detection of SNP TSC0015724
tgagaatgatggy

SEQ ID NO: 58692 - DNA, 13 bp, Artificial Sequence
  Oligonucleotide for detection of SNP TSC0015724
rccatcattctca

SEQ ID NO: 58693 - DNA, 13 bp, Artificial Sequence
  Oligonucleotide for detection of SNP TSC0015724
tgagaacgatggy

SEQ ID NO: 58694 - DNA, 13 bp, Artificial Sequence
  Oligonucleotide for detection of SNP TSC0015724
rccatcgttctca

SEQ ID NO: 58695 - DNA, 13 bp, Artificial Sequence
  Oligonucleotide for detection of SNP TSC0015730
tattgttgtatga

SEQ ID NO: 58696 - DNA, 13 bp, Artificial Sequence
  Oligonucleotide for detection of SNP TSC0015730
tcatacaacaata

SEQ ID NO: 58697 - DNA, 13 bp, Artificial Sequence
  Oligonucleotide for detection of SNP TSC0015730
tattgtcgtatga

SEQ ID NO: 58698 - DNA, 13 bp, Artificial Sequence
  Oligonucleotide for detection of SNP TSC0015730
tcatacgacaata

SEQ ID NO: 58699 - DNA, 13 bp, Artificial Sequence
  Oligonucleotide for detection of SNP TSC0015730
ttatgtggtagtg

SEQ ID NO: 58700 - DNA, 13 bp, Artificial Sequence
  Oligonucleotide for detection of SNP TSC0015730
cactaccacataa

SEQ ID NO: 58701 - DNA, 13 bp, Artificial Sequence
  Oligonucleotide for detection of SNP TSC0015730
ttatgtagtagtg

SEQ ID NO: 58702 - DNA, 13 bp, Artificial Sequence
  Oligonucleotide for detection of SNP TSC0015730
cactactacataa

SEQ ID NO: 58703 - DNA, 13 bp, Artificial Sequence
  Oligonucleotide for detection of SNP TSC0015730
ttatgcggtagtg

SEQ ID NO: 58704 - DNA, 13 bp, Artificial Sequence
  Oligonucleotide for detection of SNP TSC0015730
cactaccgcataa

SEQ ID NO: 58705 - DNA, 13 bp, Artificial Sequence
  Oligonucleotide for detection of SNP TSC0015731
tttattgtggata

SEQ ID NO: 58706 - DNA, 13 bp, Artificial Sequence
  Oligonucleotide for detection of SNP TSC0015731
tatccacaataaa

SEQ ID NO: 58707 - DNA, 13 bp, Artificial Sequence
  Oligonucleotide for detection of SNP TSC0015731
tttattatggata

SEQ ID NO: 58708 - DNA, 13 bp, Artificial Sequence
  Oligonucleotide for detection of SNP TSC0015731
tatccataataaa

SEQ ID NO: 58709 - DNA, 13 bp, Artificial Sequence
  Oligonucleotide for detection of SNP TSC0015734
tatttaaaataat

SEQ ID NO: 58710 - DNA, 13 bp, Artificial Sequence
  Oligonucleotide for detection of SNP TSC0015734
attattttaaata

SEQ ID NO: 58711 - DNA, 13 bp, Artificial Sequence
  Oligonucleotide for detection of SNP TSC0015734
tatttagaataat

SEQ ID NO: 58712 - DNA, 13 bp, Artificial Sequence
  Oligonucleotide for detection of SNP TSC0015734
attattctaaata

SEQ ID NO: 58713 - DNA, 13 bp, Artificial Sequence
  Oligonucleotide for detection of SNP TSC0015735
aaatttattttaa

SEQ ID NO: 58714 - DNA, 13 bp, Artificial Sequence
  Oligonucleotide for detection of SNP TSC0015735
ttaaaataaattt

SEQ ID NO: 58715 - DNA, 13 bp, Artificial Sequence
  Oligonucleotide for detection of SNP TSC0015735
aaattttttttaa

SEQ ID NO: 58716 - DNA, 13 bp, Artificial Sequence
  Oligonucleotide for detection of SNP TSC0015735
ttaaaaaaaattt

SEQ ID NO: 58717 - DNA, 13 bp, Artificial Sequence
  Oligonucleotide for detection of SNP TSC0015735
ttggggtgaattt

SEQ ID NO: 58718 - DNA, 13 bp, Artificial Sequence
  Oligonucleotide for detection of SNP TSC0015735
aaattcaccccaa

SEQ ID NO: 58719 - DNA, 13 bp, Artificial Sequence
  Oligonucleotide for detection of SNP TSC0015735
ttggggggaattt

SEQ ID NO: 58720 - DNA, 13 bp, Artificial Sequence
  Oligonucleotide for detection of SNP TSC0015735
aaattccccccaa

SEQ ID NO: 58721 - DNA, 13 bp, Artificial Sequence
  Oligonucleotide for detection of SNP TSC0015737
gtggtattatgta

SEQ ID NO: 58722 - DNA, 13 bp, Artificial Sequence
  Oligonucleotide for detection of SNP TSC0015737
tacataataccac

SEQ ID NO: 58723 - DNA, 13 bp, Artificial Sequence
  Oligonucleotide for detection of SNP TSC0015737
gtggtagtatgta

SEQ ID NO: 58724 - DNA, 13 bp, Artificial Sequence
  Oligonucleotide for detection of SNP TSC0015737
tacatactaccac

SEQ ID NO: 58725 - DNA, 13 bp, Artificial Sequence
  Oligonucleotide for detection of SNP TSC0015737
tgtatggtattay

SEQ ID NO: 58726 - DNA, 13 bp, Artificial Sequence
  Oligonucleotide for detection of SNP TSC0015737
rtaataccataca

SEQ ID NO: 58727 - DNA, 13 bp, Artificial Sequence
  Oligonucleotide for detection of SNP TSC0015737
tgtatgttattay

SEQ ID NO: 58728 - DNA, 13 bp, Artificial Sequence
  Oligonucleotide for detection of SNP TSC0015737
rtaataacataca

SEQ ID NO: 58729 - DNA, 13 bp, Artificial Sequence
  Oligonucleotide for detection of SNP TSC0015742
tgagttatgagty

SEQ ID NO: 58730 - DNA, 13 bp, Artificial Sequence
  Oligonucleotide for detection of SNP TSC0015742
ractcataactca

SEQ ID NO: 58731 - DNA, 13 bp, Artificial Sequence
  Oligonucleotide for detection of SNP TSC0015742
tgagttgtgagty

SEQ ID NO: 58732 - DNA, 13 bp, Artificial Sequence
  Oligonucleotide for detection of SNP TSC0015742
ractcacaactca

SEQ ID NO: 58733 - DNA, 13 bp, Artificial Sequence
  Oligonucleotide for detection of SNP TSC0015742
cgagttatgagty

SEQ ID NO: 58734 - DNA, 13 bp, Artificial Sequence
  Oligonucleotide for detection of SNP TSC0015742
ractcataactcg

SEQ ID NO: 58735 - DNA, 13 bp, Artificial Sequence
  Oligonucleotide for detection of SNP TSC0015742
cgagttgtgagty

SEQ ID NO: 58736 - DNA, 13 bp, Artificial Sequence
  Oligonucleotide for detection of SNP TSC0015742
ractcacaactcg

SEQ ID NO: 58737 - DNA, 13 bp, Artificial Sequence
  Oligonucleotide for detection of SNP TSC0015742
tgagtcgtgagty

SEQ ID NO: 58738 - DNA, 13 bp, Artificial Sequence
  Oligonucleotide for detection of SNP TSC0015742
ractcacgactca

SEQ ID NO: 58739 - DNA, 13 bp, Artificial Sequence
  Oligonucleotide for detection of SNP TSC0015742
cgagtcgtgagty

SEQ ID NO: 58740 - DNA, 13 bp, Artificial Sequence
  Oligonucleotide for detection of SNP TSC0015742
ractcacgactcg

SEQ ID NO: 58741 - DNA, 13 bp, Artificial Sequence
  Oligonucleotide for detection of SNP TSC0015742
ggtttatggtttg

SEQ ID NO: 58742 - DNA, 13 bp, Artificial Sequence
  Oligonucleotide for detection of SNP TSC0015742
caaaccataaacc

SEQ ID NO: 58743 - DNA, 13 bp, Artificial Sequence
  Oligonucleotide for detection of SNP TSC0015742
ggtttatggttcg

SEQ ID NO: 58744 - DNA, 13 bp, Artificial Sequence
  Oligonucleotide for detection of SNP TSC0015742
cgaaccataaacc

SEQ ID NO: 58745 - DNA, 13 bp, Artificial Sequence
  Oligonucleotide for detection of SNP TSC0015742
ggtttacggtttg

SEQ ID NO: 58746 - DNA, 13 bp, Artificial Sequence
  Oligonucleotide for detection of SNP TSC0015742
caaaccgtaaacc

SEQ ID NO: 58747 - DNA, 13 bp, Artificial Sequence
  Oligonucleotide for detection of SNP TSC0015742
ggtttacggttcg

SEQ ID NO: 58748 - DNA, 13 bp, Artificial Sequence
  Oligonucleotide for detection of SNP TSC0015742
cgaaccgtaaacc

SEQ ID NO: 58749 - DNA, 13 bp, Artificial Sequence
  Oligonucleotide for detection of SNP TSC0015743
gggttaagtttgg

SEQ ID NO: 58750 - DNA, 13 bp, Artificial Sequence
  Oligonucleotide for detection of SNP TSC0015743
ccaaacttaaccc

SEQ ID NO: 58751 - DNA, 13 bp, Artificial Sequence
  Oligonucleotide for detection of SNP TSC0015743
gggttaggtttgg

SEQ ID NO: 58752 - DNA, 13 bp, Artificial Sequence
  Oligonucleotide for detection of SNP TSC0015743
ccaaacctaaccc

SEQ ID NO: 58753 - DNA, 13 bp, Artificial Sequence
  Oligonucleotide for detection of SNP TSC0015744
gtttatattttaa

SEQ ID NO: 58754 - DNA, 13 bp, Artificial Sequence
  Oligonucleotide for detection of SNP TSC0015744
ttaaaatataaac

SEQ ID NO: 58755 - DNA, 13 bp, Artificial Sequence
  Oligonucleotide for detection of SNP TSC0015744
gtttatgttttaa

SEQ ID NO: 58756 - DNA, 13 bp, Artificial Sequence
  Oligonucleotide for detection of SNP TSC0015744
ttaaaacataaac

SEQ ID NO: 58757 - DNA, 13 bp, Artificial Sequence
  Oligonucleotide for detection of SNP TSC0015744
gtttacgttttaa

SEQ ID NO: 58758 - DNA, 13 bp, Artificial Sequence
  Oligonucleotide for detection of SNP TSC0015744
ttaaaacgtaaac

SEQ ID NO: 58759 - DNA, 13 bp, Artificial Sequence
  Oligonucleotide for detection of SNP TSC0015744
ttaagatgtaggy

SEQ ID NO: 58760 - DNA, 13 bp, Artificial Sequence
  Oligonucleotide for detection of SNP TSC0015744
rcctacatcttaa

SEQ ID NO: 58761 - DNA, 13 bp, Artificial Sequence
  Oligonucleotide for detection of SNP TSC0015744
ttaagacgtaggy

SEQ ID NO: 58762 - DNA, 13 bp, Artificial Sequence
  Oligonucleotide for detection of SNP TSC0015744
rcctacgtcttaa

SEQ ID NO: 58763 - DNA, 13 bp, Artificial Sequence
  Oligonucleotide for detection of SNP TSC0015745
tttgtaggttaag

SEQ ID NO: 58764 - DNA, 13 bp, Artificial Sequence
  Oligonucleotide for detection of SNP TSC0015745
cttaacctacaaa

SEQ ID NO: 58765 - DNA, 13 bp, Artificial Sequence
  Oligonucleotide for detection of SNP TSC0015745
tttgtaagttaag

SEQ ID NO: 58766 - DNA, 13 bp, Artificial Sequence
  Oligonucleotide for detection of SNP TSC0015745
cttaacttacaaa

SEQ ID NO: 58767 - DNA, 13 bp, Artificial Sequence
  Oligonucleotide for detection of SNP TSC0015745
ttcgtaggttaag

SEQ ID NO: 58768 - DNA, 13 bp, Artificial Sequence
  Oligonucleotide for detection of SNP TSC0015745
cttaacctacgaa

SEQ ID NO: 58769 - DNA, 13 bp, Artificial Sequence
  Oligonucleotide for detection of SNP TSC0015745
ttcgtaagttaag

SEQ ID NO: 58770 - DNA, 13 bp, Artificial Sequence
  Oligonucleotide for detection of SNP TSC0015745
cttaacttacgaa

SEQ ID NO: 58771 - DNA, 13 bp, Artificial Sequence
  Oligonucleotide for detection of SNP TSC0015746
tatggggaaaagg

SEQ ID NO: 58772 - DNA, 13 bp, Artificial Sequence
  Oligonucleotide for detection of SNP TSC0015746
ccttttccccata

SEQ ID NO: 58773 - DNA, 13 bp, Artificial Sequence
  Oligonucleotide for detection of SNP TSC0015746
tatgggaaaaagg

SEQ ID NO: 58774 - DNA, 13 bp, Artificial Sequence
  Oligonucleotide for detection of SNP TSC0015746
cctttttcccata

SEQ ID NO: 58775 - DNA, 13 bp, Artificial Sequence
  Oligonucleotide for detection of SNP TSC0015747
gggggatggggtg

SEQ ID NO: 58776 - DNA, 13 bp, Artificial Sequence
  Oligonucleotide for detection of SNP TSC0015747
caccccatccccc

SEQ ID NO: 58777 - DNA, 13 bp, Artificial Sequence
  Oligonucleotide for detection of SNP TSC0015747
gggggacggggtg

SEQ ID NO: 58778 - DNA, 13 bp, Artificial Sequence
  Oligonucleotide for detection of SNP TSC0015747
caccccgtccccc

SEQ ID NO: 58779 - DNA, 13 bp, Artificial Sequence
  Oligonucleotide for detection of SNP TSC0015747
tatttcgttttty

SEQ ID NO: 58780 - DNA, 13 bp, Artificial Sequence
  Oligonucleotide for detection of SNP TSC0015747
raaaaacgaaata

SEQ ID NO: 58781 - DNA, 13 bp, Artificial Sequence
  Oligonucleotide for detection of SNP TSC0015748
ttatagatgttcg

SEQ ID NO: 58782 - DNA, 13 bp, Artificial Sequence
  Oligonucleotide for detection of SNP TSC0015748
cgaacatctataa

SEQ ID NO: 58783 - DNA, 13 bp, Artificial Sequence
  Oligonucleotide for detection of SNP TSC0015748
ttataggtgttcg

SEQ ID NO: 58784 - DNA, 13 bp, Artificial Sequence
  Oligonucleotide for detection of SNP TSC0015748
cgaacacctataa

SEQ ID NO: 58785 - DNA, 13 bp, Artificial Sequence
  Oligonucleotide for detection of SNP TSC0015749
ttagagaatgaat

SEQ ID NO: 58786 - DNA, 13 bp, Artificial Sequence
  Oligonucleotide for detection of SNP TSC0015749
attcattctctaa

SEQ ID NO: 58787 - DNA, 13 bp, Artificial Sequence
  Oligonucleotide for detection of SNP TSC0015749
ttagaggatgaat

SEQ ID NO: 58788 - DNA, 13 bp, Artificial Sequence
  Oligonucleotide for detection of SNP TSC0015749
attcatcctctaa

SEQ ID NO: 58789 - DNA, 13 bp, Artificial Sequence
  Oligonucleotide for detection of SNP TSC0015753
aggtttgtgtttt

SEQ ID NO: 58790 - DNA, 13 bp, Artificial Sequence
  Oligonucleotide for detection of SNP TSC0015753
aaaacacaaacct

SEQ ID NO: 58791 - DNA, 13 bp, Artificial Sequence
  Oligonucleotide for detection of SNP TSC0015753
aggtttttgtttt

SEQ ID NO: 58792 - DNA, 13 bp, Artificial Sequence
  Oligonucleotide for detection of SNP TSC0015753
aaaacaaaaacct

SEQ ID NO: 58793 - DNA, 13 bp, Artificial Sequence
  Oligonucleotide for detection of SNP TSC0015753
agagtataaattt

SEQ ID NO: 58794 - DNA, 13 bp, Artificial Sequence
  Oligonucleotide for detection of SNP TSC0015753
aaatttatactct

SEQ ID NO: 58795 - DNA, 13 bp, Artificial Sequence
  Oligonucleotide for detection of SNP TSC0015753
agagtaaaaattt

SEQ ID NO: 58796 - DNA, 13 bp, Artificial Sequence
  Oligonucleotide for detection of SNP TSC0015753
aaatttttactct

SEQ ID NO: 58797 - DNA, 13 bp, Artificial Sequence
  Oligonucleotide for detection of SNP TSC0015754
ttaggaggtgatt

SEQ ID NO: 58798 - DNA, 13 bp, Artificial Sequence
  Oligonucleotide for detection of SNP TSC0015754
aatcacctcctaa

SEQ ID NO: 58799 - DNA, 13 bp, Artificial Sequence
  Oligonucleotide for detection of SNP TSC0015754
ttaggaagtgatt

SEQ ID NO: 58800 - DNA, 13 bp, Artificial Sequence
  Oligonucleotide for detection of SNP TSC0015754
aatcacttcctaa

SEQ ID NO: 58801 - DNA, 13 bp, Artificial Sequence
  Oligonucleotide for detection of SNP TSC0015755
tagattataataa

SEQ ID NO: 58802 - DNA, 13 bp, Artificial Sequence
  Oligonucleotide for detection of SNP TSC0015755
ttattataatcta
